United States Patent Application Publication US 2004/0259086 A1 - sequence listing, part 6

SEQ ID NO: 25268 - DNA, 3396 bp, Homo sapiens
  misc_feature 1, 2, 3381, 3382, 3383, 3384, 3385, 3386, 3387, 3388, 3389,3390, 3391, 3392, 3393, 3394, 3395, 3396: n = A,T,C or G
nnaattatgtatttttaatagagacgaggttttgctatgttgtccaggttggtctcgaactcctggcctcaattgatccgcctgccttggtctttcaaagtgctaggattataggcacgagccactgcacctggcctcaaaaatcatttttaaaagaagcagtatattagctctgggtcttctcatgactaaaatgactatttttaaacataagaccatattttataaatgtacagataattcaaatctattatctaatgtattaggttaatttctatttgttctatactttttttttttttttgagatggagtcttgctctgtcgcccaggctggagtgcagtggtgcaatcttggctcactgcaagctccgcctcctgggttcatgccattctcctgcctcggccttccaagtagctgggactacaggtgcccgccccgacacctggctaatttttaaaaaaatatttttagtagagacagggtttcaccgtgttagccaggatggtctcgatctcctgacctcgtgatccgcccgctttggcctcccaaagtgctgggattacaggcgtgagccaccgcacccggcctattgacattttttaaggtttcagattttcttttgtgtgtctagtaattcgtcttttattgtcaaagataatttgcttatttgacttagaaaaatgatttgtgggcatacaatattgtatgtggtacctaaacgttgccatttagttactcttacagaacaactttcattacactgtatattaatataaattacttcttgagtaatcccagaattgtagaaccaattggtagaatcagaaactgtctttggacttgaggtttttcttcccttagggtaaattttaggttttctggttagtttccaggagttggcggacaagttcatatcactaaaggtgttcatatcactaaaatagtaatgctaatttgtttcatatttctattttaaaaagcaatcaataaagacatttcaatacatttcatttggaagcccccaagtgtatggtggttaataaggctcagcatgctggtaacccaccattctcttagctagtgactccactaaatagtgctagccgctgagatggttttgaccctttaacagcctttttttttttttgagacagagtttcactcttgttatccaggctggggtgcaatggtgcgatatctcggctcactgcaaccactgcctcccaggttcaagcgattctcctgcctcagcctgccaagtagctggattacaggcacgtgccatcacgcccagctaatttttgtatttttggtagagacggggtttccccacgttgaccaggctggtctcgaactcctcacctcaagtgatccacccgcctcggcctcccaaagtgctgggattacaggcgtgagccaccgcgactggcctacacagcttttaattgcttgatttatactttattaaagagaggaagcacaatgagcagtgatactaaaatataactaatatggcatgtgaaagtgatcattattcagatgatcttcaccaacactgcatttgcatatatctgaccaaactttatgcgacataggcaggtctctggcacttcaaaaatgaatgttaaatagaaaataataaataatagctgattagggtaatcatttatttaatcagaataaagattatatccataaaatttacttgcaacgcgtagacagggtctcactctgtcacccaagctatggtgcagtggcacaatcacagctcactgcagcctggacctcctggcctcaaggggatgatcctcctacttcaggaattatgccaccatgcccggctagttgagaagtactttcaaatagcaacatgaagcctttcctttaccatttgaaaataaaacatagttgtaaacataaaccagtatgtctttgtaaagccaataatatatcattttataggagcattgtcttcttgtgtttttcaagttgactatgtagttcaatgtcagtctccattttaatatcttgtttgtttatcagcctgagcatatttcattttaaaatgtatttgttgagaagtcatggtggttttttgtttttcacaagtcaagtagcttgaacactatcacttgtccaatgggaaagttgatgcttatctttatggcaaatgcttggttgaataatatatttgcaaagatgttaattctacagagagctaaataaagttaagatacctgtaaaacagtttctccagatgactttaaaataagccttatttttgtaaatttatgttaaattttaggtgttaagttgtgaaatacctaatgatgtgggcctaaatttgcctcattcagactgagacagggctgttaaaattcatttctagctaataaactgtgctataacttcaaagcaacaacgaccacaaaccacacacccgcccaccccgaaccaaccacccaccacccaggcgccacaccccacacaacacacaagagcgggggcggctccccggaaactcccacccggggggggcgccccgatacaaccagcacacgccacagagcggacgagggggggtgccaacaaaaccggaggcgggtaaccaacaggtggctggtccagcactccgccgcgcggggaagaacgacaaaacaagaacgactcgcacaacacgacagctacctgtcgcagacacgataacactaaaacaacacgcactacgaaagaacaagaaacaagcgactgcaaaccagagaacagacacaacaagcactacaacaggaacgagaggagagaaaggggcggccaaagcagcagagggaaggggggagaggaagaggagacaagacaagagcgaggacagaaagcgacaagaagcaggaagagaagaaaaagagagcgaccgaaagcaagcgaaagggggaggggagaggagaggaggggagagaagcgggcagagaggaggggccagcgcagaaaagcacgtgaaaaccaggggaaagcagaacgggagggagagggaggaggcaaagcaagggcaagaagggacggaaagacggacaggacgcaaagggagaagggaggggcgaaagaaaggcaagagggcgcgagggaaggagcacagagagggacgacgggaagcaaggagaagagagcggagagagcgaggaggactgcacacacgcagaagcgacaaaagcagagacagagacagaaaggaccaaaaagagaggagcacgagcaataaaagacgcgacaaagaaacgagcagaaaaagcaggacaagacaaagcgcagaaaagaagcaagagaaaggaagacgagcgaaggaacaggcaaaaggacgacccaacgaagaagcgaaacacagannnnnnnnnnnnnnnn

SEQ ID NO: 25269 - DNA, 3353 bp, Homo sapiens
aagtttgtacattttgcccttagctttttgtttcctagcttgtcttttttcttctgcttcctacttttcaggtttaaatttatcttttttcttctaaaagtatgtttttatcttctaatttccctatcttctctattcttttctatcttccaattttcttctaagtttgtacattttgcccttagctttgtttcctagcttgtcttttttcttctgcttccttcaccaaatcgcactggctcctggactcttttcctatcttcaccacgaactgctgcttgctcgcttgctcctcagtcctagcttcatcaaacactggttcctgggatcctgtctgctgctgtcttcctagattcactgaatccacttctgtgtagcacctgggtcagctgtcaattaatgctagtcctcaggatttaaaaaataatcttaactcaaagtccaatgcaaaaacattaagttggtaattactcttgatcttgaattacttccgttacgaaagtccttcacatttttcaaactaagctactatatttaaggccttccaaattcttctaactcttccaaaagccttctgccttagtttttttttaaattacaccagtccttttagtagctttttgatgtgatttttaaccaacttccccttctagcttcaagtattcttctaaattggttctggtctacgtaaacaccctcatcttctcaagctttaccttctaacttctgcaccaccagaaattaaattgatgggcttttaaaataaattggttaccaataatttcctcatttttttcagtgctattttatccaatttttggctttatatttttctatcttctatacttctccaatacttgtcttagcttgtttttcattttctatctgaaactcttgacaatattttcattttctatcttgtttctatcttccaattttcttctaagtttgtacattttgcccttagctttttgtttcctagcttgtcttttttcttctgcttcctacttttcaggtttaaatttatcttttttcttctaaaagtatgtttttatcttctaatttccctatcttctctattcttttcttcgccttcccgtacttctgtcttccagttttcttctaaattggttctggtctacgtaaacaccctcatcttctcaagctttaccttctaacttctgcaccaccagaaattaaattgatgggcttttaaaataaattggttaccaataatttcctcattttttcagtgctattttatccaatttttggctttatatttttctatcttctatacttctccaatacttgtcttagcttgtttttcattttctatctgaaactcttgacaatattttcattttctatcttgtttctatcttccaattttcttctaagtttgtacattttgcccttagctttttgtttaaattacaccagtccttttagtagctttttgatgtgatttttaaccaacttccccttctagcttcaagtattcttctaaattggttctggtctacgtaaacaccctcatcttctcaagctttaccttctaacttctgcaccaccagaaattaaattgatgggcttttaaaataaattggttaccaataatttcctcattttttcagtgctattttatccaatttttggctttatatttttctatcttcaccacgaactgctgcttgctcgcttgctcctcagtcctagcttcatcaaacactggttcctggaatcctgtctgctgctgtcttcctagattcactgaatccacttctgtgtagcacctgggtcagctgtcaattaatgctagtcctcaggatttaaaaaataatcttaactcaaagtccaatgcaaaaacattaagttggtaattactcttgatcttgaattacttccgttacgaaggtccttcatcaccaaattgcactcgctccttcctggaatcctttttcctagcttcaccaccaaatcgttagcgctccttccttcttcctagcttccttcaccaaatcgcactggctcctggactcttttcctatcttcaccacgaactggaagacagaagtacgggaaggcgaagaaaagaatagagaagatagggaaattagaggataaaaacatacttttagaagaaaaaagataaatttaaacctgaaaagtaggaagcagaagaaaaaagacaagctaggaaacaaaaagctaagggcaaaatgtacaaacttagaagaaaatggaagatagaaacaagatagaaaatgaaaatatgtcaagagtttcagatagaaaatgaaaaacaagctaagacaagtattggagaagtatagaagatagaaaaatataaagccaaaaattggataaaatagcactgaaaaaatgaggaaattattggtaaccaatttattttaaaagcccatcaatttaatttctggtggtgcagaagttagaagaaaagaatagagaagatagggaaattagaagataaaaacatacttttagaagaaaaaagataaatttaaacctgaaaagtaggaagcagaagaaaaaaagacaagctaggaaacaaaaagctaagggcaaaatgtacaaacttagaagaaaattggaagatagaaacaagatagaaaatgaaaatattgtcaagagtttcagatagaaaatgaaaaacaagctaagacaagtattggagaagtatagaagatagaaaaatataaagccaaaaattggataaaatagcactgaaaaaatgaggaaattattggtaaccaatttattttaaaagcccatcaatttaatttctggtggtgcagaagttagaaggtaaagcttgagaagatgagggtgtttacgtagaccagaaccaatttagaagaatacttgaagctagaaggggaagttggttaaaaatcacatcaaaaagctactaaaaggactggtgtaatttaaaaaaaagctaaggcagaaggcaaaatgtacaaacttagaagaaaattggaagatagaaacaagatagaaaatgaaaatattgtcaagagtttcagatagaaaatgaaaaacaagctaagacaagtattggagaagtatagaagatagaaaaatataaagccaaaaattggataaaatagcactgaaaaaatgaggaaattattggtaaccaatttattttaaaagcccatcaatttaatttctggtggtgcagaatttagaagaaaagaatagagaagatagggaaattagaagataaaaacatacttttagaagaaaaaaagataaatttaaacctgaaaagtaggaagcggaagaaaaaagacaagctaggaaacaaaaagctaagggcaaaatgc

SEQ ID NO: 25270 - DNA, 1702 bp, Homo sapiens; identical to SEQ ID NO: 21884

SEQ ID NO: 25271 - DNA, 1680 bp, Homo sapiens
aaaatttaaaaagttagctagtcactgacggataacaggatgcacaaagcatttaatttcaaagccaaatttgcatttcaattatagtatttggctgacaaggcaagtatgtaaacaagaggaaaagttaaaaagaaaaaagccctaatagctacaatatcagcccagttctaaagagggatcttgtaccacattgtccacctaacaagtaatctttaattcaaaattcagcgtagttcttatgggtatttggaattgaatgcaagtgtgttctgtgagtataaacattatcttttattatatatgattgttaaactttgctttccacaacacttcataaccttggatgtaaacatgagaaaaaatgctaattaagaatccttacgcacccagtccagtgctcccttaattaatcaaactggtaagtctactgcttcttgattccatcctgaggtattaacttttgaaccaagacatgtttatcttttaccaacaacagggatggtcactgttaaagtttctaaataatttattagggaaataagttcccacaaagtcaggctgaactgggagctgattaacaaagctgtgtaagttagtgtgtttgctttaaggtattacaagaagtacacagagcacacatctgggttataaaagcccttttataaagccatttttaaacaaaacaaaaaaaaagtttacaaaagaaaaaaagatacagaaaaagaataacttgcttcatatgtcccaaaaagagaaaaaaataaaggggacaatgccaacatgctcaacaataaaggcttctttttcttatttttttaatacaaaatacaagcaaaggatacacatacttaaaacagagctcaggagcagacacgcagtcctggaaacccttcaataaaagcaaagcaggagtttgttttttctttgtctatgcagatacatacagagactgggatatgtaaaaattaagtatcacaaaagaccatcacacgattctaccaatgcatgttggcatctggtaattccacgaacatgggtcaacaaaatcatgtttcacttcaacccccattttcatttaaattaaagaaaaaaaccttttaaataaagtggttacattcaaactttaacttccttagtaccatgctggcagatttcaggcactggttaaggtattgcaagaatgcccaaccctctgggtgttctgatcatgtattctaggcaacattggcagtatggaagaaaagagatgccccgggtacgaccccatttctattaaaaataaatgtaaacacccaaccctcttggcagcccatgcacttgagaacctgtagaaaatggcagtgtgcaaccagcatggctgcgagctcagcgtcttcactagagagagtggaggtggttaggaaagggcaggcgggaaggggccatgttggccggacaactgcaggtgaagatgggattgtgaagtacaagtccaaggcccactcaccaagggctggatccatatatgtggggttgggattcatgtgacctacttccaattctaatatcgacctgagctaatattaagctctacatgtttgtccagctcgtattttccaacagcccctttaaaacttttagcatcctcttgtcacttttgtactaatccaaggtgggacagacaggtgcagcgtagaa

SEQ ID NO: 25272 - DNA, 2413 bp, Homo sapiens
  misc_feature 1, 2, 7, 2236, 2237, 2410, 2411, 2412, 2413: n = A,T,C or G
nnaccgnaagtccgtcactctcgcgaggccccagagagcaggcgctgggcagtgtggaggtcgttggagtcacttccgcgtcaccagctcctgtgcctgccagtcggtgcccctcccgctccagccatgctctccgccctcgcccggcctgccagcgctgctctccgccgcagcttcagcacctcggcccagaacaatgctaaagtagctgtgctaggggcctctggaggcatcgggcagccactttcacttctcctgaagaacagccccttggtgagccgcctgaccctctatgatatcgcgcacacacccggagtggccgcagatctgagccacatcgagaccaaagccgctgtgaaaggctacctcggacctgaacagctgcctgactgcctgaaaggttgtgatgtggtagttattccggctggagtccccagaaagccaggcatgacccgggacgacctgttcaacaccaatgccacgattgtggccaccctgaccgctgcctgtgcccagcactgcccggaagccatgatctgcgtcattgccaatccggttaattccaccatccccatcacagcagaagttttcaagaagcatggagtgtacaaccccaacaaaatcttcggcgtgacgaccctggacatcgtcagagccaacacctttgttgcagagctgaagggtttggatccagctcgagtcaacgtccctgtcattggtggccatgctgggaagaccatcatccccctgatctctcagtgcacccccaaggtggactttccccaggaccagctgacagcactcactgggcggatccaggaggccggcacggaggtggtcaaggctaaagccggagcaggctctgccaccctctccatggcgtatgccggcgcccgctttgtcttctcccttgtggatgcaatgaatggaaaggaaggtgttgtggaatgttccttcgttaagtcacaggaaacggaatgtacctacttctccacaccgctgctgcttgggaaaaagggcatcgagaagaacctgggcatcggcaaagtctcctcttttgaggagaagatgatctcggatgccatccccgagctgaaggcctccatcaagaagggggaagatttcgtgaagaccctgaagtgagccgctgtgacgggtggccagtttccttaatttatgaaggcatcatgtcactgcaaagccgttgcagataaactttgtattttaatttgctttggtgatgattactgtattgacatcatcatgccttccaaattgtgggtggctctgtgggcgcatcaataaaagccgtccttgattttatttttcaaggtcccttctgctctagttcggggcggcaaaggttcaaggccggcttcgtctgacccctcttcagggatgcggtccaactgttagactgaagcgtgacgctttcatcagtagcttcaagaaagtctaaattgttaatttatggaattggacacagtattcagtttacccgtacatgctcctcccgcccctcctgttggcacccttgcatcgcccaggcctgattcctcctgggggtagttcacccccacgggttcatagttcagcggcgaatgccagtgcagctgttttctggctgagcaaacagcacctttctcattgagcttcctctactgacctctgtcccccttgggatttcatcttctgaccgaaccctgatgttcagtggcagagacagcccatagccagaactgtgggtagaccagggttggggtgtgcggtttgggacagcccaaaccccagccgctgtgtcaaggcctaggacgccatgctgccatcaaaagggggttccaggtttccatcagtggcctaaagaagggacttcttgttgtactgaggagtgcggaattaaagagatttgactccctttagtattgggggcagtccgttccccagacactgtggcctctgaagtggaaactgaaagctgcatacctgggaaagaactttctaggaataggcaatggccttcagtggaagagggagggctggaggtgtgcccagtacttggatgttcatctgtccacaacagctttttgtttttttaaaaaagctaaaatggaaatggattttatcataaaggatgacatcgttttcttctacaattaatacatgttcattgtataaaacccaaaaagcagctaaaaaataaagcgggaaaggaactactggtaaaaaaaaaaaatannaaaagtaaaaaaaaaactctagggggggcccggtacccaattcgccctatagtgagtcgcattacaattcactggccgccgttttacaacgtcttgacttgtgaaaacccttggggttacccaacttaatcgccttgcgacactattcccctttttccagcttggcgtaatannnn

SEQ ID NO: 25273 - DNA, 884 bp, Homo sapiens; identical to SEQ ID NO: 23376
  misc_feature 1, 2, 3, 4, 5, 6, 7, 8, 9: n = A,T,C or G

SEQ ID NO: 25274 - DNA, 314 bp, Homo sapiens
  misc_feature 314: n = A,T,C or G
agctgagacctaatgcaagtattttgcttaagagaacccaccaatgctaggtgcttctaacaatatatgtcaagcagtgtgtagctgatggtaggagttaaatttatgcatattgtggttgtccatttccagctgcttgtgtgaagtcaccctttttttatgttaccagaatgccaagagcatcacagtttccttgaacactataaattttcgttggtgatacatcattgccagctcatagtgccatttgaaaacatgcttgtttttaagtctgaaataatgggtcaaagagagagaggcacactgtggcatgn

SEQ ID NO: 25275 - DNA, 3509 bp, Homo sapiens
  misc_feature 3507, 3508, 3509: n = A,T,C or G
ttttttttttttttttttttgcagtcaaataacactttatttttgtaaattcaattgttttgttcccggaggaaagggaggagctcaggagaacagtgtcgtcaaaatttcctggtggttgtttaatcacagccgccgagtaggtcagaaaactcatccggattaccctcttcctcctgtgctgcttgtccagacatcatcttcttcaggaaatatgagatgtttctgaagagtttcagcagcttgtcaggaaaggactctgccttttccagtacgcgtccgcccacgcgtgcgcagacttgataacgcccgtggtgccccatccctataggagctggtgagattgcagcctgctgcctcccctccatcagccacagctattggatttcccacccagaatctttaggtaaatgagatcatgattctggaaggaggtggtgtaatgaatctcaaccccggcaacaacctccttcaccagccgccagcctggacagacagctactccacgtgcaatgtttccagtgggttttttggaggccagtggcatgaaattcatcctcagtactggaccaagtaccaggtgtgggagtggctccagcacctcctggacaccaaccagctggatgccaattgtatccctttccaagagttcgacatcaacggcgagcacctctgcagcatgagtttgcaggagttcacccgggcggcagggacggcggggcagctcctctacagcaacttgcagcatctgaagtggaacggccagtgcagtagtgacctgttccagtccacacacaatgtcattgtcaagactgaacaaactgagccttccatcatgaacacctggaaagacgagaactatttatatgacaccaactatggtagcacagtagatttgttggacagcaaaactttctgccgggctcagatctccatgacaaccaccagtcaccttcctgttgcagagtcacctgatatgaaaaaggagcaagacccccctgccaagtgccacaccaaaaagcacaacccgagagggactcacttatgggaattcatccgcgacatcctcttgaacccagacaagaacccaggattaataaaatgggaagaccgatctgagggcgtcttcaggttcttgaaatcagaggcagtggctcagctatggggtaaaaagaagaacaacagcagcatgacctatgaaaagctcagccgagctatgagatattactacaaaagagaaattctggagcgtgtggatggacgaagactggtatataaatttgggaagaatgcccgaggatggagagaaaatgaaaactgaagctgccaatactttggacacaaaccaaaacacacaccaaataatcagaaacaaagaactcctggacgtaaatatttcaaagactacttttctctgatatttatgtaccatgaggggaacaagaaactacttctaacgggaagaagaaacactacagtcgattaaaaaaattattttgttacttcgaagtatgtcctatatggggaaaaaacgtacacagttttctgtgaaatatgatgctgtatgtggttgtgattttttttcacctctattgtgaattctttttcactgcaagagtaacaggatttgtagccttgtgcttcttgctaagagaaagaaaaacaaaatcagagggcattaaatgttttgtatgtgacatgatttagaaaaaggtgatgcatcctcctcacataagcatccatatggcttcgtcaagggaggtgaacattgttgctgagttaaattccagggtctcagatggttaggacaaagtggatggatgccgggaagtttaacctgagccttaggatccaatgagtggagaatggggacttccaaaacccaaggttggctataatctctgcataaccacatgacttggaatgcttaaatcagcaagaagaataatggtggggtctttatactcattcaggaatggtttatctgatgccagggctgtcttcctttctcccctttggatggttggtgaaatactttaattgccctgtctgctcacttctagctatttaagagagaacccagcttggttcttttttgctccaagtgcttaaaaataagttggaaaaaggagacggtggtgtggaaatggctgaagagtttgctcttgtatccctatagtccaaggtttctcaatctgcacaattgacatttttggccggagtgttctttgtggtgagggctttcctgtgcattgtaagatgttcagcagtatccactcatggtctctaaccacttgacaccagaaaccccccagctgtgataacgcaaaatgtctctagacatcaccaaatgttccctgggggtggcaaatttgcccttgattgagaaccaccagtttagctagtcaatatgaggatggtggtttattctcagaagaaaaagatatgtaaggtcttttagctccttagagtgaagcaaaagcaagacttcaacctcaacctatctttatgttttaaatgttagggacaataagttgaaatagctagaggagcttcttttcagaaccccagatgagagccaatgtcagataaagtaagcatagtaatgtagcaggaactacaatagaagacattttcactggaattacaaagcagaattaaaattatattgtagaaggaaacaccaagaaaagaatttccagggaaaatcctctttgcaggtattaattcttataattttttgtcttttggattatctgtttactgtctcatctgaactgatcccaggtgaacggtttattgcctagatttgtactcagaggaattttttttgttttgttttgtcttttaagaaaggaaagaaaggatgaaaaaaataaacagaaaactcagctcaggcacaattgtcaccaaggagttaaaagcttcttcttcaatagaggaattgttctgggggtcctggagacttaccattgagccatgcaatctgggaagcacaggaataagtagacactttgaaaatggatttgaatgttctcatcccttttgcagcttttctttttggctctctcatgtccttggcttgctcctctattctacctctctttctccagcaataatatgcaaatgaagacatgtatccataagaaggagtgctcttcatcaactaatagagcacctaccacagtgtcatacctggtagaggtgagcaattcatattcaaaggttgcaaagtgtttgtaatatattcatgaggctggaagtaagaagaattaaaaatttgtcctaattacaatgagaaccattctaggtagtgatctgggccacatgataattctgaggtgaccaatccttattctgctggtggcactctgagtactcgtggcagcacgcttgaagacgggaaaacaggagacgctagggacaaattcggaaattggtcaagacaaggccatgagaaaaatccacgagaagggaaaaaaacgcattaaataaacacttcacaannn

SEQ ID NO: 25276 - DNA, 1924 bp, Homo sapiens
  misc_feature 1922, 1923, 1924: n = A,T,C or G
acgcgggggggccgcgctggtcccgccccactgtgatcgtgagactgcatacccgctaataaaatccaccccaacaatcgctgtgtgccgctttagtgcgctcgccgtcggctctacctgcgtgctttagctccttctcgcctgatccttctgtctctcccaaccccggacacccggcttcgactggttatatcttcggtgttcttttcctctcttcttctttcgcggttcagcatgcaggaaaaagacgcctcctcacaaggtttcctgccacacttccaacatttcgccacgcaggcgatccatgtgggccaggatccagagcaatggacctccagggctgtagtgccccccatctcactgtccaccacgttcaagcaaggggcgcctggccagcactcgggttttgaatatagccgttctggaaatcccactaggaattgccttgaaaaagcagtggcagcactggatggggctaagtactgtttggcctttgcttcaggtttagcagccactgtaactattacccatcttttaaaagcaggagaccaaattatttgtatggatgatgtgtatggaggtacaaacaggtacttcaggcaagtggcatctgaatttggattaaagatttcttttgttgattgttccaaaatcaaattactagaggcagcaattacaccagaaaccaagcttgtttggatcgaaacccccacaaaccccacccagaaggtgattgacattgaaggctgtgcacatattgtccataagcatggagacattattttggtcgtggataacacttttatgtcaccatatttccagcgccctttggctctgggagctgatatttctatgtattctgcaacaaaatacatgaatggccacagtgatgttgtaatgggcctggtgtctgttaattgtgaaagccttcataatagacttcgtttcttgcaaaactctcttggagcagttccatctcctattgattgttacctctgcaatcgaggtctgaagactctacatgtccgaatggaaaagcatttcaaaaacggaatggcagttgcccagttcctggaatctaatccttgggtagaaaaggttatttatcctgggctgccctctcatccacagcatgagttggtgaagcgtcagtgtacaggttgtacagggatggtcaccttttatattaagggcactcttcagcatgctgagattttcctcaagaacctaaagctatttactctggccgagagcttgggaggattcgaaagccttgctgagcttccggcaatcatgactcatgcatcagttcttaagaatgacagagatgtccttggaattagtgacacactgattcgactttctgtgggcttagaggatgaggaagacctactggaagatctagatcaagctttgaaggcagcacaccctccaagtggaagtcacagctagtattccagagctgctattagaagctgcttcctgtgaagatcaaatcttcctgagtaattaaatggaccaacaatgagcctttgcaaaattttcaagcggaaattttaaggcacctcattatctttcataactgtaattttcttagggatcatctctgttaaaaagttttctgtatgtcatgttataattacaggtcaattctgttaatatctttttgttaattttgctctatgtttgcctctgaaggaggtgagatttgtgctactttgggagattatgttcttttttcatgtctaagatttattttgatcatgtttataatataatggtaattcatttttgatgttttgtgaagaatttaaatttaaacgaatgttcttaaatcaagtgtgatttttttgcatatcattgaaaagaacattaaaagcaatggtttacacttagttaccataagccgaaaatcaaatacnnn

SEQ ID NO: 25277 - DNA, 3643 bp, Homo sapiens
cacgtgttatttacctccccttgtaatccccttgttacccttcatgtgttcaaacggttaggctcttttcaaactatccagagcttttttttgccaatattggcacccgcacgattggcagccgatctcaagaatgttggaccttgcatggcacatgtgcccaaggtcccccagctggagtgaagcccccaccaaaccatgggtacatctgagggcaatgccacagcgcaacatcgctcatttctgcttgttaatcatctcatacttggtacgtgttcctctggaacatgctcttggtcctctggattatagaggagcgatttgcgaagacccggatggcatcctggtaacgacgcatcatcaaatatgcaaacccaacataatagtatgtggtgacctggcactctggcacacgggaatacatactcttcttgttcagttcgatgttctccagcaccttgatggcctggtagtaatctcctaacagggagtgcaggcggagaagcccgaccaggctgaagtaaccaagcattttgtagagggagtgccgcccatactccccagccacactctcagggtcacctccgcttgtgtatacctccaactgtcggttgatgttggatttgtctaccagggaatgaaggacattgaggacactatgaacattccagattttgggattggaacgaagaaagtcaatctcctcctctgacttcttggcagtcttacagcggtactgactgaatgactgaaactggtagatgaactcatcgataatatcccagagccactggttgggtagttcaaggggagcaggaccatcggcattaagaatgtagttgaagagattgcagtagttgtaataggattcaaacctctgctgctccaaggaaggtcccccactgactttggcatatatgtgcctgtagtataattctttgtataaaatcaggaagacagcatcattgccaacctgtggagcaatggcttcagcctcgggccaaggtgtattcttgaagaatctttcagtcagcttggtccagctgttctcatagatgtcctgtagctcatacaccgttctggtcaagtgacatcactggagacagcgactggcctgtagctcatacactttctggtcaatcaaatctgagacagttttgtggaaatatctggatgaagtttttgatcagcctcagggatcacctgataggtttgctgttcatactgacgttcataagcaaggtcctgctttggatctcctggtgtgcatatcatagtcgctgggataagcgtaggggtcataagccgcctcagactcataatcatcagcgggataagacatgcacacaggagatccaaagcaggaccttgcttatgaacgtcagtatgaacagcaaacctatcaggtgatccctgaggtgatcaaaaacttcatccagtatttccacaaaactgtctcagatttgattgaccagaaagtgtatgagctacaggccagtcgtgtctccagtgatgtcattgaccagaaggtgtatgagatccaggacatctatgagaacagctggaccaagctgactgaaagattcttcaagaatacaccttggcccgaggctgaagccattgctccacaggttggcaatgatgctgtcttcctgattttatacaaagaattatactacaggcacatatatgccaaagtcagtgggggaccttccttggagcagaggtttgaatcctattacaactactgcaatctcttcaactacattcttaatgccgatggtcctgctccccttgaactacccaaccagtggctctgggatattatcgatgagttcatctaccagtttcagtcattcagtcagtaccgctgtaagactgccaagaagtcagaggaggagattgactttcttcgttccaatcccaaaatctggaatgttcatagtgtcctcaatgtccttcattccctggtagacaaatccaacatcaaccgacagttggaggtatacacaagcggaggtgaccctgagagtgtggctggggagtatgggcggcactccctctacaaaatgcttggttacttcagcctggtcgggcttctccgcctgcactccctgttaggagattactaccaggccatcaaggtgctggagaacatcgaactgaacaagaagagtatgtattcccgtgtgccagagtgccaggtcaccacatactattatgttgggtttgcatatttgatgatgcgtcgttaccaggatgccatccgggtcttcgccaacatcctcctctacatccagaggaccaagagcatgttccagaggaccacgtacaagtatgagatgattaacaagcagaatgagcagatgcatgcgctgctggccattgccctcacgatgtaccccatgcgtatcgatgagagcattcacctccagctgcgggagaaatatggggacaagatgttgcgcatgcagaaaggtgacccacaagtctatgaagaacttttcagttactcctgccccaagttcctgtcgcctgtagtgcccaactatgataatgtgcaccccaactaccacaaagagcccttcctgcagcagctgaaggtgttttctgatgaagtacagcagcaggcccagctttcaaccatccgcagcttcctgaagctctacaccaccatgcctgtggccaagctggctggcttcctggacctcacagagcaggagttccggatccagcttcttgtcttcaaacacaagatgaagaacctcgtgtggaccagcggtatctcagccctggatggtgaatttcagtcagcctcagaggttgacttctacattgataaggacatgatccacatcgcggacaccaaggtcgccaggcgttatggggatttcttcatccgtcagatccacaaatttgaggagcttaatcgaaccctgaagaagatgggacagagaccttgatgatattcacacacattcaggaacctgttttgatgtattataggcaggaagtgtttttgctaccgtgaaacctttacctagatcagccatcagcctgtcaactcagttaacaagttaaggaccgaagtgtttcaagtggatctcagtaaaggatctttggagccagaaaaaaaaaaaaaaaaaaaaaaaaaaaaaaaaaaaaccgggggaaacatagggggggggggaaaaaggggcagaaaggggcaaggggccaaaagggtccgtggaaccaagtttgcgggttcacagggggcaaaaaggcggggacccccaaatagagaagacaaaaaaatcgaaaaccgggtaaccagggttaaaccggcgaacacaagaaagcaaagaaaagaaagaaagaaagacgacaaaaggacgaacacgagatagcagcacacaagaggaggaagaaagaacgaaaaacagaaaagcggtgccacggagacaccagaagcagaacccaaaaaaaaacagggacaagacacgcacaagaagagatgagagagaaagagggaaggaagaagacagcaggaaagagagaaaagagagggagaagcggggagggagagaggagaagaaagaaaaaaaacgaaaaaggaacgcgaagaaagggagaagggagcaaggcgggaagaaagaaagga

SEQ ID NO: 25278 - DNA, 2640 bp, Homo sapiens; identical to SEQ ID NO: 25132
  misc_feature 1, 2640: n = A,T,C or G

SEQ ID NO: 25279 - DNA, 3294 bp, Homo sapiens; identical to SEQ ID NO: 24717
  misc_feature 1, 2, 3, 4, 3293, 3294: n = A,T,C or G

SEQ ID NO: 25280 - DNA, 3397 bp, Homo sapiens
  misc_feature 1, 3383, 3384, 3385, 3386, 3387, 3388, 3389, 3390, 3391,3392, 3393, 3394, 3395, 3396, 3397: n = A,T,C or G
nacgcgggggcagcaggtcggtaggcgggaaatggcgactggctgaaggagctggttctgttgctgctgcggggtaagcgggaaagacaccacacattgcgcagtcgggaccatcgccggagcctgaggacacttctctgtcgtcacagttagttttacatgtggcacccataaaagatgaggctgagaacacggaaagcttctcagcagtcaaatcaaatccaaacacaacgcactgccagagcaaagaggaaatattcagaggttgatgatagcctgccttcaggaggagaaaaaccatcgaagaatgaaaccggcttgttgtcttcaattaaaaaatttattaaaggaagcacacctaaggaagagagagaaaatccttcaaaacggagtagaattgaacgtgatatagataacaatttgatcacgtcaacaccaagagcaggagaaaaacctaacaaacagatatctcgagtaagacggaaaagtcaagtaaatggagaagctggtagttatgaaatgacaaatcaacatgtaaaacaaaatggaaaattagaagataatccttcctctggcagtcctccaaggactactttgttggggaccatattttcacctgtcttcaactttttttcaccagcaaataaaaatggaacgtcaggatcagattctccaggacaggctgtggaagctgaagaaatagtaaaacaacttgatatggaacaggtggatgagatcactaccagtactactacatcaactaatggagcagcttactcaaatcaagcagttcaagtgagaccatcactaaacaatggtttagaagaagcagaagaaacagttaatcgtgatatcccaccccttacagcaccagtaactccagatagtggttattcatcagcccacgcggaggccacctatgaagaagactgggaagtatttgacccctattatttcatcaaacatgtcccgccactgacagaagaacaactaaataggaaacctgctcttccgttgaaaacaagaagcacaccggaattctccctagttttagacttggatgaaacactagtgcattgtagtctaaatgagctagaagatgcagcacttacttttccagtccttttccaagatgtcatttatcaggtttatgtgagattaagaccatttttcagggaattcctggaacgaatgtctcagatgtatgagatcattctttttactgcttctaagaaggtgtatgcagacaagttactgaacatactagaccctaaaaagcaactggtcaggcaccggcttttccgtgaacattgtgtttgtgtacaaggaaactatataaaggacttaaatattcttggaagagatctttcaaaaactataataattgacaactcaccacaagcctttgcatatcagctttctaatggaatccctatagaaagttggtttatggataaaaatgacaatgaactcctaaaattgattccattcctggagaagcttgtagaactgaatgaagatgttcgaccacacatcagagacagatttcgcttgcatgatttgctgcccccagattaagtacaaagacttgtcaaatcactgaagggggagagaatgcaggacccttttggactaagacaaaaacattgccattactgttgaaattttgcatttttgtaccccgtcttgcttttcttatctttggtgcccattaataattaagggttacagaaagagactttatctatctcagatcgaatacatatagtaggtaggctaaaacagaagagtctttagaactagtgcaactccagtgaaattttttatgtacaggacatctgcagtttataaagaattctgtttctgccaccagcagtttgacctgtagtcacacaggattttatgataataacagagatgaaaatggacttttattttctctctgtttggtgctctaagtgggtttgtagccacttttctgttactttatgattctcatttcaacaggaatggccagtaaaagttgttttatttttcctgttaaggtttataacctttttacatttttgacctgtattagattagaatttcattatgcattccttttagttgaggcgcttcatagttttctggagatagtcaatttttagttttttattatacatttgaatggccgttttcctgctttgtctgcctgcacattgtatatttgtttaaaaatattctctacttttagtctatgtaagtttcatttagaaagacatgcatttatattttgtttctgtaatattctactgtaggtgaaatcttttcaaaaatcaagagactgggtagataagaatatatgaatgactaatatacaaaagatttaaaccattgtgatggcgtatattctcaaatggtaatatcttgcaatggcacacagatttaatggataaaggtatacctcagacttcactgtgctcacaaatctttgaggagaaagtttggtcacctgtttggcttgatttagttactgctgcctttggttttctccaggaatgaagtattcagcacagtgactcagtatttttagttattttgcatgggctggtagtacctctgttatgctctcagttacaatcaatttaaaactgtataacagtcttggtacctaacagtagctatgcataatcctgtggcacagtacactcccaagccaccaatgcagttaatatgctctcatagtggtttttctatgctatatgaaaatagtcttcaagccttggttctctaatgcagctaccacaagaggttgatatttttatagtggcgtgtaatctccttttcgggaggctttttatggaaggtagaatttgtaaaagttcgtatgctttgcctctcaactgcattaacatgccacaggctcagactgtttttgtgtaaaggatgtcaaagaacggcactttttctaaagagaagtttgatattttgtatgcttgttaagaaagtacagtattggaaattaaaggtggacaactgataattgaggagtatgtcaattaattttttatgtatattacctgtttacttgtacaacttactgtacaaattacatgcagcttcattttcaaatgaatccttaaaataaggaaatctttttaggaaaacatttaatttttgtatttttgattttaaaggcatgagttatgtcaattttcagtgtattaatgaagattttacttttcatcaggttgagtgtttcttactatattatctgtggttgtgtcgccttgggtccgaatggtacattactttagccgccggttggggacctttctttaaacaaccggggttttgcaaaaaacagttggtcaaaaaaaaaaaatggggggccaaaaaannnnnnnnnnnnnnn

SEQ ID NO: 25281 - DNA, 1152 bp, Homo sapiens
  misc_feature 1, 2, 3, 4, 5, 6, 7, 8, 9, 1150, 1151, 1152: n = A,T,C or G
nnnnnnnnnacaggacgcgcctggcgaaaacgctacacgcttacaagaactatggacgacatgggcaacttacctggtcggcactgtagctcagtggccatgatctatgtgactgtttacactcgttgcttggcaactgcagacggccgacctcctgggactaccaatgcagcacgaggctgcctttctctactgctatattattattcacattctttgaacagatagctgagaggggacagtccaaagatagaatctgaccaacaaaagtaaacgttaaagaaatggagaatgggaacttacctggttggcactgtagcttagtggccatgatcttgctgctgtattacacatcgttgcttggtaactgcagaaggccgacctcctgggactaccaatgagcagaggctagctttctcttctgcttattcattattcacttccttggctcacacatgccccatatgttactctggaacttagatccatattatattttacacgacgcggaaagagtagagtaactgtgagaacaataagctgcctagcccctacgttactcactggcataacctacccctgcttacaccgaacttccacgggcccatatctgatatgagggtatctaaacaacttcacacaaaccatgtaaccctgagagctatgcttgctccgggacaccatgagtgtaaagtaccaaaggctagtagaggcacatactggaaactagaaccctttattcccacattgcgcaccataaggaagctaaacatggacacattacacccaactctgctgtcggctctccccaacacattcatatcctacatcacttggaatagtcgagcgctagctcgagacctccttctacaagggctacgccacaaaacactgacatcagtattaagacaacaatgactagatatcgaaaggttatcaatccctgacataattctccataaataaggacacataacgtgcaaacatcgccgaaaagcaagagagacgattgccgccttcctcatcctttgtcgtaccgagatgaaatcactactgagcctaccacgcacggctcgtaaagaacataaggaagtgagacaggaaataggagcgagactgaacactatagataatcaatcaatcaaggcannn

SEQ ID NO: 25282 - DNA, 346 bp, Homo sapiens
  misc_feature 346: n = A,T,C or G
acgcgggctttcagttctgcttgctgtccgcaccgctgcgttacccggaaccgccgggccgaacagcatgacgtccgctttggagaactgcatcaaccgaactgttgccgttattacatcagatgggagaatgattgtgggaacactgaaaggttttgaccagaccattaatttgattttggatgaaagccatgaacgagtattcagctcttcacagggggtagaacaagtggtaccagattaaataaactctggggattcatcccaattcgaactctgtaattctctgaatgaactctctcttcaattaaagccaaattattaacattttaactcaagtttaaan

SEQ ID NO: 25283 - DNA, 358 bp, Homo sapiens
  misc_feature 1, 2, 3, 4: n = A,T,C or G
nnnnatcccattttagtaaaaggcaaaaatttgaaacttataagctatatgggagcttatttttgggtggggaagaaatgagaaaagaatattacatctcctactggccagaccccatttgattaaaaattctaatggcccttcctactaaaatgatcccctgtaaggccaaaattaatatccaagcaaagtttttttttgaagacgaagtctcactcggtcccccaggttgaaggccattggtacccgggaaagaaagcaagatgccttgagcatggacaactgtaaagaattagagcggcttaccagtctttataaaggaggatgaactggaatttttatttataccttttagcgt

SEQ ID NO: 25284 - DNA, 1241 bp, Homo sapiens
  misc_feature 1, 2, 331, 1241: n = A,T,C or G
nnaacggcaggagaggagcgaagaggtggcaagacgagaagcagcgagcttgctctacacacgatgacttccgtcgtcttgcgtggtcgaatcttctgcactcatacgtttgtgtctgccgtactctacttcgatcgcggctgctcatctgctctttgtcctctgtcctgttcttccctacttctctccacttgtagtcttgttgcgtctttttctgcccatttagtcccatgggcgcctgtgttcagcccacatgggatactagggtcaacccgctgtacccagacccacgtgatctttggcaccgtgcccgctggtatgtctgcgccgncgtcccaagggccggcctgtcaccattcttcctccccctgtccccatgtacttgcatcccggcttcacacacacacacagctcccaatagctttcatcttacccgtcagctcccattgagtccaaagtgaccacccgcagaacccgtcctggctcacgcacgctaatgacttgccatctggggagaaagcaactcgttgagggccccctcgccccaccgtccacttaaggagaggttcctcgtggatttgctcttgcaagtgtgcacggcaaagctctctccctgcttcagaagctggtagtggggggctgtggtgccacaagtgtgctccacattatataagtacatgttcccactcgagtgggctactaggaaaaggctttccgaaccgggaacccatttgacacaggtaactcgtgacttgtctattagtctttcctcattaaaaagtttgctagtttcttttttgattgggtctataagctggacttggcctgcggaaaagcccactaggagagagacactttctgctgtggctgttaggtggttgaagtcatgacaagtaggctgtgttcctttgtatatccttttatctattggtttactcaagtcagcagccttgcggacccccttgtagatatagaagtacagctcccggcccacattgaagcagaggcggtcgccgttgccagactggtcgttgaggtttacgaaggagacgcggacagggttggatccctgcgagttgaagggcacccggttgggccggctgtactccgagtgcggcagcagcttgtacagaccttcccgggtggtgaattgggtcttaatctcgttcatctccttccctcctccctccgtcgccatcttgaaagcagcgttcatcggacgcgtgggtcgactccctatn

SEQ ID NO: 25285 - DNA, 3244 bp, Homo sapiens; identical to SEQ ID NO: 23095
  misc_feature 1, 2988, 3242, 3243, 3244: n = A,T,C or G

SEQ ID NO: 25286 - DNA, 1000 bp, Homo sapiens
  misc_feature 999, 1000: n = A,T,C or G
acgcgggggagatgcgaggtgcgcggggtcgcaggctgaaagttggagcaagcaggaagtgaactgagggccaccctgggaggaagccgactaggcgaattcacttactgaccggcctgggctgctctgagacatggaggaagccagtgaaggtggaggaaatgatcgtgtgcggaacctgcaaagtgaggtggagggagttaagaatattatgacccagaatgtggagcggatcctggcccggggggaaaacttggaacatctccgcaacaagacagaggatctggaagccacatctgagcacttcaagacgacatcgcagaaggtggctcgaaaattctggtggaagaacgtgaagatgattgtccttatctgcgtgattgtttttatcatcatcctcttcattgtgctctttgccactggtgccttctcttaagtaacagggaacctctcccacctgcccttctcttcagggacaaccctccataaatgtgtgccaagagggtctcctttcctgtcttcctctacagagaatgctgctcggtcctcctacccctcttcccgaggccctgctgccatgttgtatgccccagaaggtaccttggtcccccggaaggagagaaaaaagagagatggactgtggctgcatttcttgggtccttagagtgggctggagagacctagagggcccagcatgtggctgggaaactgttggtggccagtgggtaataaagacctttcagtatccctaaaaaaagaaaaacaataaaggaagtataaggagcagcacaaagagggggggcgggaaaaagaattccccggggggccccgagtatagcggcaccagcgtttttggaaagaggggcccataaggagggcggtaaaaaagaaggaggggccggggtaaacacggcgggggggaaactgggcgtgggactggaaaagacccactctggggggatagggccccccagaattacggcgggaaaaacagggaann

SEQ ID NO: 25287 - DNA, 303 bp, Homo sapiens
catgccttactttatcaaatgtataagaagtaaatatgaatcttatatgacaaaatgtttcattcattataacaaatttccaataatcctgcccgcgtactatgagaaggcacaaaagatagatccagaaaatgcagaattcctgactgctctctgtgagctccgactttccatttaaatacatactctaggaaattagctctaagtttttcccttcattttgggttctcctgtttgttttttttttattattttaatcccttgtttattatagagctaatatttattgaatagttattgtgt

SEQ ID NO: 25288 - DNA, 3730 bp, Homo sapiens; identical to SEQ ID NO: 22792
  misc_feature 386: n = A,T,C or G

SEQ ID NO: 25289 - DNA, 1651 bp, Homo sapiens; identical to SEQ ID NO: 21898
  misc_feature 1, 2: n = A,T,C or G

SEQ ID NO: 25290 - DNA, 4672 bp, Homo sapiens
  misc_feature 1, 2, 3, 4, 4670, 4671, 4672: n = A,T,C or G
nnnnagtcgaccacgcgtccggccaccgccccctcgccgcttcgccgctgcgttggggaacctggaccgcggcggcgccgggtttccctcatgatcccgggcgggtggcggcggcggcagaggcggcgggaggatgacctcttaccgggagcggagtgccgacctggcccgtttctacactgtcaccgagccccagcgacacccgaggggctacacagtatataaggtcaccgcccgggttgtttcacgaagaaatccagaggatgtccaggagataattgtatggaagagatacagtgattttaagaaactacacaaagaactatggcaaattcacaaaaacttattccgacattcagagttgtttcctccatttgctaaaggaatagtgtttgggcgatttgatgaaactgttatcgaagagagaagacaatgtgctgaagacctgctacagttctctgccaatattcctgctctttacaatagtaaacagcttgaagactttttcaagggtggaataattaatgatagttctgaattaattggtcctgctgaagctcactcagattccctcattgatacctttcctgagtgtagtacggaaggcttctccagtgacagtgatctggtatctcttactgttgatgtggattctcttgctgagttagatgatggaatggcttccaatcaaaattctcccattagaacttttggtctcaatctttcttcggattcttcagcactaggggctgttgcttctgacagtgaacagagcaaaacagaagaagaacgggaaagtcgtagcctctttcctggcagtttaaagccgaagcttggcaagagagattatttggagaaagcaggagaattaataaagctggctttaaaaaaggaagaagaagacgactatgaagctgcttctgatttttataggaagggagttgatttactcctagaaggtgttcaaggagagtcaagccctacccgtcgagaagctgtgaagagaagaacagccgagtacctcatgcgggcagaaagtatctctagtctttatgggaaacctcagcttgatgatgaatctcagcctccaggatcactaagttcaaggcccctttggaacctaaggagccctgccgaggagctgaaggccttcagagtccttggggtgattgacaaggttttacttgtaatggacacaaggacagaacagactttcattttaaaaggtctaaggaaaagcagtgaatacagcaggaacagaaagaccatcatcccccgctgtgtgcccaacatggtgtgtctgcataagtacatcatctctgaggagtcagtatttcttgtgctgcagcatgcggaaggtggcaaactgtggtcatatatcagtaaatttctaaacagaagtcctgaagaaagctttgacatcaaggaagtgaaaaaacctacacttgcaaaagttcacctgcagcagccaacttctagtcctcaggacagcagtagctttgaatccagaggaagtgatggtggaagcatgcttaaagctctgcctttgaagagtagtcttactccaagttctcaagatgacagcaaccaggaagatgatggccaagatagctctccaaagtggccagattctggttcaagttcagaagaagaatgtactactagttatttaacattatgcaatgaatatgggcaagaaaagattgaaccagggtctttgaatgaggagcccttcatgaagactgaagggaatggtgttgatacaaaagctattaaaagcttcccagcacaccttgctgctgacagtgacagccccagcacacagctgagagctcacgagctgaagttcttccccaacgatgacccagaagcagttagttctccaagaacatcagattccctcagtagatcaaaaaatagccccatggaattctttaggatagacagtaaggatagcgcaagtgaactcctgggacttgactttggagaaaaattgtatagtctaaaatcagaacctttgaaaccattctttactcttccagatggagacagtgcttctaggagttttaatactagtgaaagcaaggtagagtttaaagctcaggacaccattagcaggggctcagatgactcagtgccagttatttcatttaaagatgctgcttttgatgatgtcagtggtactgatgaaggaagacctgatcttcttgtaaatttacctggtgaattggagtcaacaagagaagctgcagcaatgggacctactaagtttacacaaactaatatagggataatagaaaataaactcttggaagcccctgatgttttatgcctcaggcttagtactgaacaatgccaagcacatgaggagaaaggcatagaggaactgagtgatccctctgggcccaaatcctatagtataacagagaaacactatgcacaggaggatcccaggatgttatttgtagcagctgttgatcatagtagttcaggagatatgtctttgttacccagctcagatcctaagtttcaaggacttggagtggttgagtcagcagtaactgcaaacaacacagaagaaagcttattccgtatttgtagtccactctcaggtgctaatgaatatattgcaagcacagacactttaaaaacagaagaagtattgctgtttacagatcagactgatgatttggctaaagaggaaccaacttctttattccagagagactctgagactaagggtgaaagtggtttagtgctagaaggagacaaggaaatacatcagatttttgaggaccttgataaaaaattagcactagcctccaggttttacatcccagagggctgcattcaaagatgggcagctgaaatggtggtagcccttgatgctttacatagagagggaattgtgtgccgcgatttgaacccaaacaacatcttattgaatgatagaggacacattcagctaacgtattttagcaggtggagtgaggttgaagattcctgtgacagcgatgccatagagagaatgtactgtgccccagaggttggagcaatcactgaagaaactgaagcctgtgattggtggagtttgggtgctgtcctctttgaacttctcactggcaagactctggttgaatgccatccagcaggaataaatactcacactactttgaacatgccagaatgtgtctctgaagaggctcgctcactcattcaacagctcttgcagttcaatcctctggaacgacttggtgctggagttgctggtgttgaagatatcaaatctcatccattttttacccctgtggattgggcagaactgatgagatgaacgtaatgcagggttatcttcacacattctgatcttctctgtgacaggcatctccagcactgaggcacctctgactcacagttacttatggagcaccaaagcatttggataaagaccgttataggaaatgggggggaaatggctaaaagagaacaattcgtttacaattacaagatattagctaattgtgccaggggctgttatatacatatatacacaaccaaggtgtgatctgaatttaatccacatttggtgttgcagatgagttgtaaagccaactgaaagagttccttcaagaagttcctctgataggaagctagaagtgtagaatgaagttttacttgacagaaggacctttacatggcagctaacagtgctttttgctgaccaggattggtttatatgattaaattaatatttgcttaataatacactaaaagtatatgaacaatgtcatcaatgaaacttaaaagcgagaaaaaagaatatacacataatttctgacggaaaacctgtaccctgatgctgtataatgtatgttgaatgtggtcccagattatttctgtaagaagacactccatgttgtcagctttgtactctttgttgatactgcttatttagagaagggttcatataaacactcactctgtgtcttcaacagcatctttctttccccatctttctattttctgcaccctctgcttgttccctcatattctgttcttccgactcctgctaacacacatgcaacaaaaaagggaagggagtgcttatttccctttgtgtaaggactaagaaatcatgatatcaaataaacatggtgaaacattagatctcttcttcatttaataagacctccccccttttttttccttgaagaaatgcgtctgttcctttccttgtgaaatattatcagtttctaccatgcttctcatgcttgactttgttttacttttgggcttggtatactaagaagcaaaggatctcatctaaatggaattgaatggagtctagttgttacttatggtgatgagattttcaggattggaatatctattggaaggtgatttacaaagaaggttagtattaaaattccaaacagtgtatttggtacgtactttggtgctagggagtacgtagtatggttgttgcgaaacttcaaaggttaagggttacgttgttttgttaaggtagccaaaaaattcaatcaagtagaaaccaaaaatgatggaagttattgggttgaaggtagaaacaggattgggtattagagtctaataaaaaagtggaagtggttatatcatgaaacagagaggggtattacatagaataatcnnn

SEQ ID NO: 25291 - DNA, 2435 bp, Homo sapiens; identical to SEQ ID NO: 22543
  misc_feature 2433, 2434, 2435: n = A,T,C or G

SEQ ID NO: 25292 - DNA, 1334 bp, Homo sapiens
  misc_feature 1, 2, 3, 4, 13, 31, 50, 1316, 1317, 1318, 1319, 1320, 1321,1322, 1323, 1324, 1325, 1326, 1327, 1328, 1329, 1330, 1331,1332, 1333, 1334: n = A,T,C or G
nnnnagacagagntcactttgtcgtccaggntggagtgcagtggcgcgantctcggctcactgcaacctctgcctcctgggttcacgccggttgtcctgcctcagcctcacaagtagctgggactgcaggcgcctgcactacgcccggctaatgttttgtatttttagtagagatggggtttcaccgtgttagccaggatggtctcaatctcctgacctcgtaatctgcccgcctcaacctcctaaagtggtgggattacaggtgtgagccaccgcgcctggcctaaataaaaagtcttgaaatggaagatattcacctaaccctcaacaaaccatgatgtaatgaagcacgaatcacaccattttgtctctttcctaattcaaataggtccctggcattagttcatgccgagactagaaaactgaaccctagtactgttttttaaaacagttttaacagaaaattaaactgtatgtttgaaatcataagtaaaagtttgttgcttgcataagagtagcctcttgattctcatagtggtaattttgtgtcatatcatttagatgttgaaccatttcatttgtgcatgtgtatatgtgcccaaattcatcctctttgtttagaatctgcttacaaataaaactaatagaatctgaatacatttatcatatattcttccagggtttttcttaactgactatagagagtggctgtaagttctggggcaaagcttgattgtattttcagtgatgtatagttacattgtttcatgttaaaatcatcgtgcatggaaagtgaaatgtgcgtatgattttaaattattgtaatatgtactatacccttcccctaaacttctttcattgatgatacacagaattcctctatttttgcttgaaaatagtcctttagattggagtagccttttcttagatccctctatggttccatgagatgaggtgatacctgcaaagcacttttaaagatatttttttaggctaatgtccaagatacagcattgaggaggcagctatgtctaatgagggctctcttgtttgctagagatgagagaaatgtatactaatcattttaatttgtacttaaaatacattttactaatcatattgattttaaatatgacaaattcttctagtagatactaatctttcttgtttatcatattgtcctagagaagcctaggtaaaaatgggttccacctagtctgtttgtataacaccttcccccgtcccctctccatccctgccaattgggctctatgcatattgacaagcaaataaagaaaaccctaaggttcttgtannnnnnnnnnnnnnnnnnn

SEQ ID NO: 25293 - DNA, 958 bp, Homo sapiens
  misc_feature 957, 958: n = A,T,C or G
gtccgcagctctgcacccactttcctgtcatttatttatataggactgtagttttttttagttcgagagcctttcgaagcttaatttatattctttctttgtaccttttttctaaaattaccaaagatattacacaaaggtaaattatgttctctgttttatgctttatctgatgaagccaaatatcctcttattgttgatcaaaggaggcaaaagaatttagaggcaaatgacaagcgataggctattgcaacctgagaaagagaactgctccttcatcgtaaatttagaagaccaagtagataatggaaccaaagttgttacttttttctagtagttatttttcctttttctttttgtgtacctctacagagaccaaaactcattctcttaaagagattttatggggctactgcagataaaaataggacacaatattaaaggagctacagaaggaagggagtcccatctcaaaaaaaaaatgaatgtatgccactgcaattagagtatccaataaaggagacagtttagagtcaggacagaaaagcttccataattgaactagattacataatagtatttctagaaaaagagatatttttagattgtatgccacttttgtttaagaactgtgctgtgatcactgtattaattttggtttatcttggcatatatccttcagtttgtttttatttttaatttttcctttttttccgattaggctttggtcagcatttttcatttaaagaaaagtaacactcccatccactcataagcttggtacaaaaacttctctggcagttacttttgaagcttcactctgctttctgtataaagggcagtctgtggtcacgcaagactttaaaaaaaaaaaatttggggcgcgaggtaaattggggcgagaaaggggttgaacgagagggttaaacggcagcaaattttagatctcgtcccaann

SEQ ID NO: 25294 - DNA, 772 bp, Homo sapiens
ggctacaggaacagggactgcaaggctggaagtccggtggggaccgtggctgtggccttcaagagagtgagcctgaagatttcttgaagcttttcattgatcccaatgaggtgtacatatacacactttactctgctcaagcaggtaactagtgaagtcacctttcacatgtaaatgtctcattcacaaatccctgcatcacaattctataactcaaagaatgcttaaatatctcaaaacaaattaactggtaactttttatccccctaagaagaaaccaagaatggaacagttcttgaaagattgaatcaaagttgtcttctaaacaaaataaaaatgtacgttccattcttggtttcttcttagggggataaaaagttaccagttaatttgttttgagatatttaagcattctttgagttatagaattgtgatgcagggatttgtgaatgagacatttacatgtgaaaggtgacttcactagttacctgcttgagcagagtaaagtgtgtatatgtacataaaatgtaagtaatcttaactccattgtgcagtgccttttagatgttccgctttctataaagtcttcaaatttttgcatatatattatatatatatgatgtaatgttatagaaatatatgtataatatacatattttttccaggggtatctgatagctctgtattttgttatggaagttgaaagaaaaaagtattttacctcagaaattaaataaaaaaatacttttaagttaaaaagaaaaaaaaaaaa

SEQ ID NO: 25295 - DNA, 3798 bp, Homo sapiens
  misc_feature 3169, 3170, 3171, 3172, 3173, 3174, 3175, 3176, 3177, 3178,3179, 3180, 3181, 3182, 3183, 3184, 3185, 3186, 3187, 3188,3189, 3190, 3191, 3192, 3193, 3194, 3195, 3196, 3197, 3198,3199, 3200, 3201, 3202, 3203, 3204, 3205, 3206, 3207: n = A,T,C or G
  misc_feature 3208, 3209, 3210, 3211, 3212, 3213, 3214, 3215, 3216, 3217,3218, 3219, 3220, 3221, 3222, 3223, 3224, 3225, 3226, 3227,3228, 3229, 3230, 3231, 3232, 3233, 3234, 3235, 3236, 3237,3238, 3239, 3240, 3241, 3242, 3243, 3244, 3245, 3246: n = A,T,C or G
  misc_feature 3247, 3248, 3249, 3250, 3251, 3252, 3253, 3254, 3255, 3256,3257: n = A,T,C or G
cacgcgtccgcccacgcgtccggtgtgttcagtgaataagtagaatataaaaaaatataaccagtattttacttcaaaagccaaaaagaggcaataagaaaagacactttgtggtggcctttatgtgtgcattaaaattggtttctgtaaaacgtgtaataagttgagtatctacgaagagtatcaagttctgaagtttaatttttttattatcctcctctcttcttagtaacttctttctgtggcaaaaccacaattctttaagattcctattgttcaggctaaggcaaatttttttgtttgtttcttcagtttaatattttgattttgtgtttttacgtaaatatttatattccttgaaagcaatttttgccaaggtagttcagtttaggaatatgttgttctaaaatatgtcttagaatcctgaaagcatagattttgaaatgtttttttaatgaaaatgaaggtcagagagaataattgccctgaccacatttgcctttcagtaggaggaggctgtgaaatagtaaaattataatcgtttatgccatgataaatacaagattggtaaataaatacattgattggtaaattatgagaatcaaaatgataaaaagagcctgcttttttccctaaccaatatagctatcttaagtatccttaggtttctgtgaagaaccatttcccatgttttcttggcaaaataatgctgtattccatatgtacatgtgaaatgatgttttaaattgataaaagcttaaataagatctacctatacccagtattttcatgatattagaacaaatgggtttttggttatattttatatttgtcaatataatttttgtattcacattctgttacactctgcctattcattgatatatgatattctgtaaatattgtacaatttgatcttttttatggtttaaattagttaattacatacaaattgattggcttatcacaaaaatcatttcatcagtaaaccttgttaacattttgtactggtgacccacctcttaggactttggtcttatccacgtgtatgttgttttcatttggtccaaataatattttatttgtatgggtatcttctaagactaaataggtagttgtgttctttatttttaaaatttctttttagagcaaatgttatgggttcttacccaaagagtcaaaaactatttcttaagaaagagcagagttattcatgactgttctttatacactaaaagcatgcatctaatctaatagtcctcttattatgcttttagttgtatgagtctctttctatgaactgaacacaaaactcaggaattggtggcttaattttagatcagtgcttgtactaggcttagttatatgaatctttataacacataattactaactttgtagccatatatgtaattgactttgaatgttatttacctgaaattaatcttccttcacacatggaccgtaaacggttcccagttgtctgagagcctcatgagggtttctaggatttatgaccttatgaccagtttttttcatttaccaagattttattttcctacatgaaaatttaattgagtaataattattcacatgtgcattttctttttagctgttaaatgtactatgccatcatccaccatttagtaaaatgtagctggcccaggacatgtaaaaaaaaaaaaaaacaacaacaataaatagggcatgtgaaatgttaagttacagcaatagatattttatttgtatttcatgttagtacttttttgttttatatcacttataaaggtacagtgtactctttgtcacagctcagttggtaaccgcattccattgaaaagttggccttgtaaaatacaactctcatttaatattcatgcttttgtgcctttaagaaaatattttttgtcattttttgtgttacagaactataatgtgattcaaggtgtttataggcttgtcataaaagggtcatttctgtgtgttactttctttttatatagctatagtatatttaaacaataatactatcttttataggggtttgtctatttacctattctttactcagacattgatgtagacttgtcagattattctgagtattgttaacagtgccttttcgatggaatcacactttttggctgtcaccttgtgccatatacacacaaaattttgtggaaggcagttttaactttctgaagaatatctgtcaaaatttaagaaaacaaatgtataaaattccattttttccagtgtttagcatttctagtaagcagtgaggttgtttgacatacagtgatgatggcattattgataagccatacatgagactgcagattatattgaatcatattaaatgtacagaaataaaatattagatttatatcaaattttccaatttgaaccagtggggaaaatcccacagaaatcagtaagtttacatttcaatttctatcttatttgactaagtggaaagagattctttaaaatgtataacctgccattatgtaatttggtttcattttattctacctgttgtgtgagtttagtatatttaatttactttttgttactctttacatactgtttatttttgttagtttttaattgaagatggactgttgaaattgtataggaccagtgtcttattaatatgattaatatatttagaagagccacgtgaaacccatgacaaaatgaatgtgaatattctttctaaaaatttagaaaatgttatctttttgcatttattatgtaaaactgttttacagtatcaaaatttttcacttaaagaaaaaaaaatgccatgaaacatttgaactgatgagccacagaacttcagttgaaatttttttcactttttagcatgctaaatatacatctgagtttaaatgttctgtttaatggccattcataaattcaagcactaccactggtcagttttgtgtgatagaataaaaatatgttacctgcagtgtaagtacagcacactgtcaaattcttttccttaaggtgcacagtaaatgtacagatagttataggccactgttttgtaatgtagtacatttctaatctattattcctaacctattataactgtttgcagaaagaaaagaatttttctaataatctgtaaaattatgctaacttctacaagtaggcttcnnnnnnnnnnnnnnnnnnnnnnnnnnnnnnnnnnnnnnnnnnnnnnnnnnnnnnnnnnnnnnnnnnnnnnnnnnnnnnnnnnnnnnnnnatgaacgaggacaagcgccattcacagggcacattcaccagtgactacagcaagtatctggactccaggcgtgcccaagattttgtgcagtggttgatgaataccaagaggaacaggaataacattgccaaacgtcacgatgaatttgagagacatgctgaagggacctttaccagtgatgtaagttcttatttggaaggccaagctgccaaggaattcattgcttggctggtgaaaggccgaggaaggcgagatttcccagaagaggtcgccattgttgaagaacttggccgcagacatgctgatggttctttctctgatgagatgaacaccattcttgataatcttgccgccagggactttataaactggttgattcagaccaaaatcactgacaggaaataactatatcactattcaagatcatcttcacaacatcacctgctagccacgtgggatgtttgaaatgttaagtcctgtaaatttaagaggtgtattctgaggccacattgctttgcatgccaataaataaattttcttt

SEQ ID NO: 25296 - DNA, 1640 bp, Homo sapiens; identical to SEQ ID NO: 24807
  misc_feature 1, 2, 3, 1636, 1637, 1638, 1639, 1640: n = A,T,C or G

SEQ ID NO: 25297 - DNA, 1440 bp, Homo sapiens; identical to SEQ ID NO: 23070
  misc_feature 1, 1440: n = A,T,C or G

SEQ ID NO: 25298 - DNA, 636 bp, Homo sapiens; identical to SEQ ID NO: 24178
  misc_feature 1: n = A,T,C or G

SEQ ID NO: 25299 - DNA, 1259 bp, Homo sapiens
  misc_feature 1, 2, 3, 4, 5, 6, 7, 8, 9, 10, 69, 1258, 1259: n = A,T,C or G
nnnnnnnnnncagggtccaggggaggggtgggagggtttttttttaaaaaaatttaacggccccccccnaaggtgtggaaggttttttttttaaactagtcaaacggccgacatttttaaatttcgccccccacaattttttctttttttggtaatcaaaaatgttttaatgattactgtttagacatttaacaatgtaggtatatccaggtgagctaagcacactttgacagcacactattgaatgttatagtttctgtattgaaatatgtaaagacatctgcaaattagtacctagcaatgaagacatacatttataaatatacacattctaggtttgataaggtaaatgtaaacagatgccatgactccttttcaaacagaaaacccacaagactaatagagaaccaataggctccctatagtacgaatgtgcaaaattaaagcatggtaaactgatatttacataaatatcaaaccaacaattagtttatacattgtcaatgaccttctaagatatgtcatgagtggttccaagaatatctttcccccaatggagaaggtattcagaggctaaattccgacactttaaaatgacacacatcataggctttacctgtttgaccactgcctcaaatgtgtgagatgtgattttatgataagcagtctattatttttaaacaagaggttctaaacacatctttagattctaagcagaaagaaattacaagtactattagatttacattaaacaagttacctctatcaaatttctcgattctcttatgctgtagctatatttgattttaccttaaaaagttctaaggtcctttccccccctttgttaattttggtaaactaggcacattttacaaggaaatctgtgtcaaaacagataacagtgcataaatcaatccaaatttagaccctggcaaccagttccccattgctcatctacgggactctgtcaaacggtaaataggcaatcatctctcttgaaaagtatacatcctctctcgcactggtggaaagcaaaattgactttttgtttgctgtataaaaacacttagcacttcagaaattaaaaatggcctactcaccctacacccttcctaaaatctcgaggacaaagaatatatatttaagtttcatcacgactgctgtagagcccccccctttttacattaatagtggcactcaaaataaaaaaataagatctgttaaaaagttaaactgactgtcacactagatttgagcnn

SEQ ID NO: 25300 - DNA, 304 bp, Homo sapiens
acttttttttttcttttttttttaaaaacagctttattgaaatataatttacatgatttattggagtaaatttacatataatttacatacacataattcactcaattcaataatgtttagtacaggttcaaatattatcttttttttcccaccaacctcttttccaggaaaatgcaaagctactctttagccaaattttaaaacaggggatatttattttgggaatcattaatacccatctgccccttttttggtccattggacatattgaaatgaatgattaatacttatcacttcatggtgt

SEQ ID NO: 25301 - DNA, 811 bp, Homo sapiens
  misc_feature 1, 808, 809, 810, 811: n = A,T,C or G
ncacatattgatgctctctgcaagttacctttaagtgttttttttttcttatacttgaagttgcttttacgatattattttggtggctttcttttctctctttgatgggcaatagaggaagtagataatgggatttaaggacccctgggggagaaaagggaggatgtggcattgtcttttttttttttttttttttagcatagaggtttaatcaaactcccatatgttgaaattgctcctcatattactggttttacatggacacagaaactaggcactttagaggtgcacttgcatggcaggctgggcccccttttctatattttattttcctttttagtatagtggtacttaaaatcactggttcacttaaaaaaacaaacaataaaatgttaaactctactaatgtacaaataagctgaaaagttgcattttatgtgtattttttgccatagcaggtactgtatttctcatgctggatttcaaaaaaaaaaaaaagtatcaaaaacaaaaaaaacccctaaagggtggtgttttattggattgtgacaggttgagtaataaggaattaagtcgtcgccatttcattaaaactgagagatgatgtaatgcatatataagagttttctgaagggttttttttgggcttttaaacagcttatttttgtttttgtttagtttttttattttattctattttggaaagatatgattgtattatgtgcaacttagttgcttacattataactacaaaatatttttgggttcctggtgaaaacataagaagaaaaacgactctttaatgtgnnnn

SEQ ID NO: 25302 - DNA, 4031 bp, Homo sapiens
  misc_feature 1, 2, 4028, 4029, 4030, 4031: n = A,T,C or G
nncggcaccaggctgctgcggggggactctttctgaggttactgtggagcacccaaagtctgtcagcctctggccgtgcaaacaggcacccagaggaaccagaccttgcttattcacccacagcctgggactgtcttctccagagtctccatcagctttgctaatcgactgattggaaataattcctcaaacaccaccaagtcaaggatacaggcagcagcggctcccctgttgtatggacattctgcacccgaaactgatagctgagtcctgaagttttatgttatgaaacagaagaactttcatcccagcacatgatttgggaattacactttgtgacatggatgaatctgcactgacccttggtacaatagatgtttcttatctgccacattcatcagaatacagtgttggtcgatgtaagcacacaagtgaggaatggggtgagtgtggctttagacccaccgtcttcagatctgcaactttaaaatggaaagaaagcctaatgagtcggaaaaggccatttgttggaagatgttgttactcctgcactccccagagctgggacaaatttttcaaccccagtatcccgtctttgggtttgcggaatgttatttatatcaatgaaactcacacaagacaccgcggatggcttgcaagacgcctttcttacgttctttttattcaagagcgagatgtgcataagggcatgtttgccaccaatgtgactgaaaatgtgctgaacagcagtagagtacaagaggcaattgcagaagtggctgctgaattaaaccctgatggttctgcccagcagcaatcaaaagccgttaacaaagtgaaaaagaaagctaaaaggattcttcaagaaatggttgccactgtctcaccggcaatgatcagactgactgggtgggtgctgctaaaactgttcaacagcttcttttggaacattcaaattcacaaaggtcaacttgagatggttaaagctgcaactgagacgaatttgccgcttctgtttctaccagttcatagatcccatattgactatctgctgctcactttcattctcttctgccataacatcaaagcaccatacattgcttcaggcaataatctcaacatcccaatcttcagtaccttgatccataagcttgggggcttcttcatacgacgaaggctcgatgaaacaccagatggacggaaagatgttctctatagagctttgctccatgggcatatagttgaattacttcgacagcagcaattcttggagatcttcctggaaggcacacgttctaggagtggaaaaacctcttgtgctcgggcaggacttttgtcagttgtggtagatactctgtctaccaatgtcatcccagacatcttgataatacctgttggaatctcctatgatcgcattatcgaaggtcactacaatggtgaacaactgggcaaacctaagaagaatgagagcctgtggagtgtagcaagaggtgttattagaatgttacgaaaaaactatggttgtgtccgagtggattttgcacagccattttccttaaaggaatatttagaaagccaaagtcagaaaccggtgtctgctctactttccctggagcaagcgttgttaccagctatacttccttcaagacccagtgatgctgctgatgaaggtagagacacgtccattaatgagtccagaaatgcaacagatgaatccctacgaaggaggttgattgcaaatctggctgagcatattctattcactgctagcaagtcctgtgccattatgtccacacacattgtggcttgcctgctcctctacagacacaggcagggaattgatctctccacattggtcgaagacttctttgtgatgaaagaggaagtcctggctcgtgattttgacctggggttctcaggaaattcagaagatgtagtaatgcatgccatacagctgctgggaaattgtgtcacaatcacccacactagcaggaacgatgagttttttatcacccccagcacaactgtcccatcagtcttcgaactcaacttctacagcaatggggtacttcatgtctttatcatggaggccatcatagcttgcagcctttatgcagttctgaacaagaggggactggggggtcccactagcaccccacctaacctgatcagccaggagcagctggtgcggaaggcggccagcctgtgctaccttctctccaatgaaggcaccatctcactgccttgccagacattttaccaagtctgccatgaaacagtaggaaagtttatccagtatggcattcttacagtggcagagcacgatgaccaggaagatatcagtcctagtcttgctgagcagcagtgggacaagaagcttccagaacctttgtcttggagaagtgatgaagaagatgaagacagtgactttggggaggaacagcgagattgctacctgaaggtgagccaatccaaggagcaccagcagtttatcaccttcttacagagactccttgggcctttgctggaggcctacagctctgctgccatctttgttcacaacttcagtggtcctgttccagaacctgagtatctgcaaaagttgcacaaatacctaataaccagaacagaaagaaatgttgcagtatatgctgagagtgccacatattgtcttgtgaagaatgctgtgaaaatgtttaaggatattggggttttcaaggagaccaaacaaaagagagtgtctgttttagaactgagcagcacttttctacctcaatgcaaccgacaaaaacttctagaatatattctgagttttgtggtgctgtaggtaacgtgtggcactgctggcaaatgaaggtcatgagatgagttccttgtaggtaccagcttctggctcaagagttgaaggtgccgtcgcagggtcaggcctgccctgtcccgaagtgatctcctggaagacaagtgccttctccctccatggatctgtgatcttcccagctctgcatcaacacagcagcctgcagataacacttggggggacctcagcctctattcgcaactcataatccgtagactacaagatgaaatctcaataaattatttttgagtttattaaagattgacattttaagtacaacttttaaggactaattactgtgatggacacagaaatgtagctgtgttctggaactgaatcttacatggtatacttagtgctgctgggtaatttgttggtatattatctggttagtggttaatgcttcctttaaaaataattgagtcatccattcactctttttcagttttatctgtcaatagtagctacatttttaatggggagcaccttttatcccaaagtgctttattaaattgagtgggacttgatattatatccacacccgggtattcactgtggctgtcctttgctgttcaggttttaggaaatgttttttaaggagctatgtggaaaacagacaatattagtttaggtcggggaacgagatattgtaatcaaatagttaacatcaggaagttaatttggctggcaaaattctagggaaacttggccagaaaactggtgttgaaggcttttgctcatataaacaagtgccattgagtttcaaatgaccagcaaatatatttagaacccttcctgttttatgtctgtacctcgtccacccctcaggtaatacctgcctctcacaggtacagctgtttcttggaaatcctccaaccaaatagcagttttcctaacttgattagcttgagctgacagactgttagaatacagttctctggccacagctgatgagggctttctgtactgcacacagattgtgtactgcaccccagtccaggtgactgggtacccactcgagttgtggccgtgcacaacctggtccagtatatgcatgtggtgggcctactgactgggtaatgggtagagggcattatgggattttagccttgaggaccatgacttttacaaattttatgggtatatgcctaccctatgcacatagtggtannnn

SEQ ID NO: 25303 - DNA, 7474 bp, Homo sapiens
  misc_feature 1, 7446, 7447, 7448, 7449, 7450, 7451, 7452, 7453, 7454,7455, 7456, 7457, 7458, 7459, 7460, 7461, 7462, 7463, 7464,7465, 7466, 7467, 7468, 7469, 7470, 7471, 7472, 7473, 7474: n = A,T,C or G
nctgcggcgctcggagcctcccttgcgatcccacggccgggactgcccggagtgcatgggcgcgggccagggacgctgagcggtcgcgccatggagggcgccgagccccgcgcgcggcccgagcgcctggccgaggccgagacgcgggcggcggacggcgggcgcctggtggaggtgcagctgagcggcggcgccccgtggggcttcaccctgaagggcggccgcgagcacggcgagccgctggtcatcaccaagattgaagagggcagtaaagccgcggcggtcgacaagttactggctggagatgagatcgtcggcatcaatgacattggtctctcagggtttagacaggaagcgatttgcctggtgaaggggtcccataagaccctgaagctggtcgtcaaaaggaggagcgagctgggctggaggcctcactcctggcatgccaccaagttctctgacagccaccccgagctagcggcctccccgttcacctccaccagcggctgtccttcctggtccggccgacaccacgcgagttcttcctcccacgacctgtccagttcctgggagcagacgaacctacagcgcaccttagatcacttcagctccttggggagcgttgacagcctggaccacccctccagtcgcctctcggtggccaagtccaacagcagcatcgaccacctgggcagccacagcaagcgcgactcggcctacggctccttctccaccagctctagcactcctgaccacaccttgtccaaagccgacacgtcctccgcagagaacatcctctacactgtgggcctctgggaggctcccaggcagggtggccggcaggcccaggccgcaggcgaccctcagggctcggaggagaagctcagttgtttcccgcccagggtccccggtgacagcggcaaaggccccaggccagagtacaatgccgagcccaagctggctgcccctgggaggtccaattttgggccagtctggtatgttcccgataagaagaaagcaccatcatccccacctcctccccctccccctctccgcagtgacagctttgctgccaccaagagccacgagaaggcccagggccctgtgttctcagaggcggctgcggcacagcactttacggccctggcccaggctcagcctcgtggtgaccggagaccagagctcaccgatcggccttggaggtcagcacacccggggagcctcgggaagggatcgggaggcccgggctgcccacaggaggcccacgcagacggcagctggccgccctccaaggatggagcttccagtaggctgcaggcctctctgtccagctcagatgtgcgcttccctcagtctcctcatagcggccgacaccctcccctatacagcgaccacagccccctctgtgctgacagccttgggcaggagccaggggctgccagcttccagaacgacagccctcctcaggtgagggggctcagcagctgtgaccagaagctggggagcggctggcagggtccccggccctgtgtgcagggagacctgcaagcagcacagctctgggcgggatgctggccttctgacacagcccttggagccctcgagagtcttcccccacccacggtgggccagagcccacgccatcacctacctcagcctgagggtcctccggatgcccgcgagacaggacggtgttacccgctggacaaaggggccgagggctgctccgcgggagcccaggagcctcccagggccagccgtgcagaaaaagccagccagaggctggcagccagcatcacgtgggcagatggggagagcagcaggatctgcccgcaggagacgcccctgttgcactccctgacccaggaggggaagcgccggcctgagagcagtccagaggacagcgccaccagaccgccaccgttcgacgcccacgtgggcaagcccacccgaagaagcgaccgctttgccaccaccctgcggaatgagatccagatgcatagagccaagctgcagaagagccggagcacagtggctctgactgcagcaggggaggcggaggatggcaccggccgctggagggccgggttgggaggtggcacccaggaaggacccctcgctggcacctataaagaccacctgaaagaggcccaagcccgggtcctgagggccacgtccttcaagcgccgcgacttggaccccaacccaggagacctatacccggagtcactggaacaccggatgggggatccagacactgtcccccacttctgggaggcaggcctggcccagccaccctcatctacaagtggcgggccccacccgccccgcatcggaggccggagacggttcacagctgagcagaaattgaagtcctactcggaacctgagaagatgaacgaggtgggcctcacgaggggctacagtcctcaccagcaccccaggacatctgaggatactgtgggcacgtttgctgacaggtggaagttttttgaggaaacgagcaaacctgttccccagaggcctgcccagaagcaagctcttcacggaatcccgagagacaagccagagaggccgcggacagcgggccgcacatgtgagggcacggagccctggtcgcgcaccacctcccttggggacagcctcaacgctcacagcgcagcggagaaggcagggacttcagacctgccgcggaggctcggcacctttgcagagtatcaggcctcttggaaggaacagaggaaacctctggaggccaggagctctgggcgctgccactcagcggatgacatcctggatgtgagcctggacccacaggagaggccgcagcacgttcatgggaggtcccggtcttcaccgtccacagaccactacaagcaggaagcttctgtcgaactgcgaaggcaggcaggggaccccggcgagcccagagaagagcttccctccgcagtccgggccgaggagggacagtccacgccgagacaagcagatgcccagtgtcgggaaggcagcccaggatcacagcagcacccaccgagtcagaaggcaccgaacccacccacattctctgaactatctcactgccggggagccccagagctgccccgggagggccggggccgagcgggaaccctacctcgagattatagatactcggaggagagcaccccagcagacttgggaccccgagcccagagccctggctcacccctgcatgctcgaggacaagactcgtggccagtgagctcagccctgctctccaagaggccagccccacagaggccaccgccacccaagcgcgagcccaggagatacagggccacagacggcgcacctgctgacgcccccgtgggcgtcctcggcaggcccttcccaacgccatcccctgcgtccctggatgtgtatgtggcccgcctgtccctctcccacagcccctctgtgttcagcagtgcccagccccaggacaccccgaaggccactgtctgtgagcgtggaagccagcatgtgagcggggacgcatcacgtcctctgccagaagcactgctccctcccaagcagcagcacctgcgcctgcagacggccaccatggagacctcgcgctccccctcgccccagttcgccccccagaaactgacggacaaacctcccctgctcatccaggatgaggattcaaccagaattgagcgggtgatggacaacaacaccacggtgaagatggtgcccatcaagatcgtgcactcggagagccagccagagaaggagagccgccagagcctggcatgccccgccgagccacctgccctgccccacgggctggagaaagaccagatcaagacgctgagcacatctgagcagttctactcgcgcttctgtctgtacacgcggcagggtgctgagcccgaggccccacatagggcccagccggctgagccccagcccctgggcacccaggtgccccccgagaaagaccgctgcacctcccctccagggctcagctacatgaaggccaaagagaagactgtggaagacctgaagtcggaggagctggccagggagatcgtggggaaggataagtccctggccgacatcctggatcccagtgtgaagatcaaaaccactatggacttgatggaaggcatcttccccaaagacgagcacctcctggaagaagcccagcaacggaggaagctgctccccaaaatcccctctcctagaagcacagaggagaggaaagaggagcccagcgtgcctgcggccgtgtccctggccaccaattctacctactacagcacgtcggcccccaaggcggagctgctgatcaagatgaaggacctgcaggagcagcaggagcacgaagaggattcgggaagcgacttggaccacgacctgtcggtgaagaagcaggagctcatcgagagcatcagccgcaagctgcaggtgctccgggaggcccgcgagagcctgctggaggacgtgcaggccaacaccgtgctgggggccgaggtggaggccatcgtgaaaggcgtctgcaagcccagcgagtttgacaagttccggatgttcattggagacctggacaaagtggtgaacctcctgctgtcgctgtcaggccgcctggcccgggtggagaatgccctcaataatttggacgacggcgcttctcccggtgatcggcaatcactgcttgagaagcagagagtcctgatccagcagcacgaggacgccaaggagctcaaggagaacctggaccgccgcgagcgcatcgtctttgacattttggccaactatctgagcgaggagagcctcgcggactatgagcacttcgtgaagatgaagtcggccctcatcatcgagcagcgggagctggaagataaaatccaccttggtgaagagcagctgaagtgcttattggacagccttcagcccgaaaggggcaaataagagaccagtccccggtggaggaggggcacggggcctccgagctccagctccgttcccaaggatactcgtgaagaccccatctgtgttcatggcctggaaagagacttctcccatagcaaagaggctgttataaaagcaataacttttgtgtttgtgtgggatgatttatttaattttttagtttcccctttgattgctgagagccattttcctttacacataactacacctgacaccaggctctgctggatgtgagtttccactgcatgggctgtgggctgggcctgtggtgcctgccgagtggtcactgtcagtgggaaacccgttgttcctcccgtcttcagatgctgagccaactgcttggacagcagccagcgcgtcatgacgtgcatgagagggggaccctggtgctcatcttctcttgtcattcatccaggcatgggctgccaggttttgtccctgctcgttcaacagtgtgagcatttgtctctgttatctaatgatgttctctgacccagcagaaatcatcatcatgatgatgataatttattaactttttggaagggtgaatagtttcctaatggttaaaaaccaactgtgaaaggaaccacctgtgtggttgggttcactcattctcagattaaattgccacttaaagaaataacgtgcatgctttaaaaaacacagtcacgcaccaagcaggcaaatagctttagtccttctcacctcacatcacagttgttctgcaaagtaaaattttttggttaagagcgtgtccagtagtaatgtgcttgttagctgtttctcaagaccaacagaagattttttcagttactttccccccatgtattttgtatgcatatgattgtccgtgataattggctacttttccattgtttcctccttaaatcgtttagcatggcatgagggccacattccatggacgggaagaccccttcctcttcagaggtcccgtggactacacagctcctgagcttgatctttttctgccatgaagtttaaagattctatgcccatttccttgattgaaatggcaggattctaaagagagcctggtttgttaaaagaaaacactgtcatgctgtcagttcccaattgacaagtcacagactgggagaaaatatttgcaaatcgtgtatctgacaaaaggtttgtgtccaggatgtacaaagaactctcaaaccggatagtaagaaaacaaacagcccaagtgaaaagcaggcaaaagacttgaatagacacttcaccaaagagcatacacgcgtggcaaacaagcacacgaaaagacgttcagccgccgatggcttggttataatttataacttacttatttttatctaataattgtagattcagtgtatttcttcaaaaaatgtttaattaaatgcatgttaatggtgagtgaatcccttgggtgacttcgtgtttaggtcgtattagggcatttgttggatcaacggatcattttaaccctgacttccccttattcccataaaagaagttttccagtggaatggagatttcattttgtcagcagcagtgaccacagccttaccaaagcagacgcgtgcgcgtgcacagatgcacacacacagatgtcttaaaagactagaatccacacttcctgagccagaggggccgtgttgacggtaatgcattctctatagagccaagtccaaactggcaagctcaatgatgcaggcaataaaccgcctttttggcagcctaccaatgccaaaaggataaatgtctttccaaaagtgtgtattcctgttaaattaagctcttgctaacttgaaaaatccctgttctgccagcgaagcttcctcctcctctccagctggtagtcacttgcgtgaatgctggtcagtctgaaaaggtgaagctggctgtgcacttacccccatctttctccctcggggagacgacccaaggaatttcagagtattttgtttggcagagcttttacctgttattctttgccctcaaatacagtattgtggtcattttgatgatatgtgtgtaaaatgtgaataatccaattggtgtctgtactcagccttttgatgtctttttaggactttctcttctacacagcaatacgtcgtgctcgagtatccttgtagcaaagcacatagagccagctgtcctgtcagttcccctgtttgcctctgaaacgtctggttagtggggacccaaagattctagtgagtcaacatccataactctgtatctagttgtattattcatagaaaatcaatctggtgctaatggttggccctggtgttgttgggtggcagctgctccttcgccctcttgtagtgtggctgtggagggctctgcctatggggggtggcctgtggcttgtatccttcagtccaccacagcaaatgtgtgtagatttcatgctcgacacttaccactcacctatcaacagatcatcctgcttgactgtaacaaaataaatagtgtctcttcaagtgnnnnnnnnnnnnnnnnnnnnnnnnnnnnn

SEQ ID NO: 25304 - DNA, 1125 bp, Homo sapiens
gagtcgacccacgcgtccggagcgagctgagtggttgtgtggtcgcgtctcggaaaccggtagcgcttgcagcatggctgaccaactgactgaagagcagattgcagaattcaaagaagctttttcactatttgacaaagatggtgatggaactataacaacaaaggaattgggaactgtaatgagatctcttgggcagaatcccacagaagcagagttacaggacatgattaatgaagtagatgctgatggtaatggcacaattgacttccctgaatttctgacaatgatggcaagatgataaggatggcaatggctatattagtgctgcagaacttcgccatgtgatgacaaaccttggagagaagttaacagatgaagaagttgatgaaatgatcagggaagcagatattgatggtgatggtcaagtaaactatgaagagtttgtacaaatgatgacagcaaagtgaagaccttgtacagaatgtgttaaatttcttgtacaaaatgtttattgccttttcttgttgtaacttatctgtaaaaggtttctccctactgtcaaaaaaatatgcatgtatagtaattaggacttcattcctccatgttttcttcccttatcttactgtcattgtcctaaaaccttattttagaaaattgatcaagtaacatgttgcatgtggcttactctggatatatctaagcccttctgcacatctaaatttagatggagttggtcaaatgagggaacatctgggttatgcctttttttaaagtagttttctttaggaactgtcagcatgtgtgttgaagtgtggagtgtaactctggtggactatggacagtcaacaatatgtacttaaagttggactatgggaaaaggggtgtattatccagggtaatcgtacactatttttggtactgctggtctggacagaaacatttctttatgggtactgctttaacttgttagcactaaattggtatgggaaattgctaaatcatcagtgttttgggttcattagaaatcagttaaaagagaagaaaaaagaaggagaaaaaaaaaaaaggggggggggggaataaaaggggggggagagaggaaggtagaggggagggggaaaa

SEQ ID NO: 25305 - DNA, 1702 bp, Homo sapiens
  misc_feature 1, 2, 3, 4, 5, 6, 7, 8, 9, 10, 11: n = A,T,C or G
nnnnnnnnnnnacgcacgcacgcggataaatgttttgccagccaaaccagtcgcaccctcaggtcggacgaccggcttaccgtcccaccaaagaccggttttgttctttctctagaatgttatttattaaaaatagattctctatccttcccctcacccctgcgagcaaagtggcctttcccaacatcttttcccaaatggatgaaacaggtcttgaggacgcagatgtggcattctacataaactacaggatcaggcttttctgggacagtgggtctgctggagccaagagtggaacagcacaagacaacatcagcaaaccctggcgcacctaaccgcgggctgccatggatgccgggacggactggagttcctcctgctccaggtacaagtccacaaagagagacccagcggcccagcagcagcctcctgggcaccaccagaaagcgatgtacttaagggcctcaggcggtcgagaggcaacgtggcttccacatgtgtgggaatgagactaaaaagctggctcaaagcaaaatatgaacttataggaaaggagggccctggactgggcaggaagagagagactcgtggcaattctagagatggcagtgcccagccatcaagttctaaagagacccatttgggagtgactctgcctttagccaggttgagctcacagacacacaggcccagaggccgaattcgcggccagcttccaggtgtgccggggcctctcgttgcttttaacagtccagccagagagggttcagttagtgagagtatcttcccatgatcaaacacagatgcccgagtttctcttcactatttcttccgcttcagtttcatatcttttttgttctttgtctctctgttcttcaacttcttgctctgtttgggttcttgtttggcctctaacttccttttcttgtcacttttcaggctgatgatcgaggcgttcggcccagctttgttcaaaacttcattccactcttcatcgtccccacggattatgtattcagagaggtccatgctcttcagcttccctacttccttcttgtgtttctcctgaaattcctttgctgcttcatctaggtcgtcactgagggtcttcatcgtgggctccatgaccacatccttcgctgccaccatctgctcctcaatggccttttcctgaacttcattaaatagcttcacaactttgcggatgatccggttgaaaagtcccatcaactggcccgagggcagctcaatctccttttccagctggtccacagacttatgctgcaggccaatccccaagagaagagccgactgagccgcagacagggccaggtcccccagctggttcaggaaatagatgcgagagatggccgggatcatgtccatgatgaggtgatagtccaccatattccgtgaatacatctccagccgcttcaggtcataggggaggaagagtgcttccagctcctcccggctcagggcaggctgggctggcttccccatgttcctgttctgaatgatgttcagagccagggaaggagagaaggtacctgcccgggcggccgctcgactacataaaatacaaaaccttagatgggcatggtgctgtgtgcctatagtcccactacttgtggggctaaggcaggaggatcacttgagccccggaggtaaaggctacagtgagccaagagtgcactactgt

SEQ ID NO: 25306 - DNA, 638 bp, Homo sapiens
acgcggggagagcacatccggtgttagaagcgctggataggccttggagaggcgggttaggaagagtggagactgctgcacggactctggaaccatgaacatatttgatcgaaagatcaactttgatgcgcttttaaaattttctcatataaccccgtcaacgcagcagcacctgaagaaggtctatgcaagttttgccctttgtatgtttgtggcggctgcaggggcctatgtccatatggtcactcattttattcaggctggcctgctgtctgccttgggctccctgatattgatgatttggctgatggcaacacctcatagccatgaaactgaacagcctgccctggagttttgtattgctgtcaaccccagcatccttcccactgctttcatgggcacggcaatgatctttacctgcttcaccctcagtgcactctatgccaggcgccgtagctacctctttctgggaggtatcttgatgtcagccctgagcttgttgcttttgtcttccctggggaatgttttctttggatccatttggcttttccaggcaaacctgtatgtgggactggtggtcatgtgtggcttcggcctttttgaactcaactcattattgggcccaacattgagatcga

SEQ ID NO: 25307 - DNA, 3419 bp, Homo sapiens
cgacaaattaccgagtaccaaacgctacaggtcttcgccttcgttgggccactttggagggccgcatgcgtggcgtttgttacaccactggggacaaaggtgaatttccgacacaggatatataaggggggaaccccgaggttttcacaggtcccactgtttaaaaggccgcccagtgatttttttttttttttttttttttttggctttctgggtcttttatttgtacccatgtgtctgtcacaccatgaatgtacctggggaaatcaactgacctccctgaacatttcacgcagtcagggaacaggtgaggaaagaaataaataagtgattctaatgctgcctaggtcaccctcaacccccatttactggcacaattgggtggagagaagggaaggggtatgattgtcctgatggctcagggttgcaggaggttcagaggggaaggaggaaaggccaggctggaggctgggctgttagcacttccctcccacagttcagacggctcactctgggctcaggtttgccatggcttcctttggtccaaacataggccctgtccttagtcctgtgccctgtttgacttttggccaggaggcctttttgtgctgctgctgttgcagggctagctgcatggcccatatgctcagtggccgcatgtaggccagtgagcggaacactcgctgctggcagtatgcctctggggtctggaaggccagacccaggcgctcccacacggtacggtagcagccttcagctgtctggaagccctcccaagtcaggccctcttggatcatggtagctgccagcccgtagaccacacccacccagacttcatcagactgcacactggatttatcagggacaccatggggctgcatcccattcacagcccccatggcccctcctgcaaaggcctggacgttcagctcaaagatagtttggagagcacggaccacatgttgggtaggaaacacctcagtgtctccttctcctaggccacaggccttcaggaaccactgtccagcacactggtcagacataacactacgagactgaggccgagagctgctgtcatagttgtaatagcggccattccacagcagtctctcataggcttcttggccccggctgaggatagaagaaaacttatcctggatgtcctgtgccccgcacagagcagccatctggaccatcacagccacagctgccagccacagccctccacagtaagcactggggcctgtggtcacccatccatcataggtctggtctgcatagcctccattttcaatgagtccatcatggtccttgtcaaacttcatttcagattccatcacagcctagagagggaccaagatgttgaagacctaggtaccgaggaaaggcaacaaccagctaggctcttcccagacaccaaccatacccctggcacactggccactgcatgtgcatcccttactagacacacaggccacatgtccttcaggaagttttgatcacccgtgaggtaatagtcccgataaacctgcagcacaaacttcaggttcaggtccttccaatcagcagtatcatggattaaatatgcattgacgcggagccatggttcatcatctgggtccccaatatcatgggggatgacgttcctccttttcacaggtgccatcaccccactcatcaggtaccgtcgccgtgtcaggtcctccctgagagtggccagagccatgtcatactgtaggctgagctcaagtttgggccagagcatgatgagggcaaaggaagcataaaagtggacatcatatgtgttgtacatgcggtactcctggccctcaaggtagccaaatcgaccgtagtcccgtagggtggggcggaggtgacacatgtttctgcccagctcctctggtagggagtcctcaagaacttccagccacactgtgcctccatcagccaggaagtatagttcattgaacagcgcagatttgtaccaggcaggcagtgatctgtcatccaataccgggctctgccaagctgagatcctctcttcccactctgcgtatcggcacagtgcatagtggctgagggcaggtgctgcatctccatcctggccaaagaaccttgtataccgcctgtagtggacttggcctttagctccaaacatgatcctgggcatgtcccaagccagtgaaaactccaggcggcactggcctcgaggtcgcaacttgctggaaacacacacagctccagcaatgcctactcctttctgcgtaggggtgctttggccagtgggagagtccagctgtccatcctgaagtagatcctgccacacctgctgccccgtgctgtcagggtcaaaggctgtgatgtgggttaccgtggtagctgccgtgactcgtgcagccacagccatcgtgtaggggtttggaagggttggatgatgcaggagcagcccccggacagtttccccgctacgctccagacagaagggctcattccacaaaccccctggggcatcgtctccaccacccagtccattccgcatggagaacatgatggacacatctagagcttcgtccccttcattttccacatcccacacaaagactcctacaggcaggctgctgtcctggtagtcatggggcaagatgggtgtgatctgacggcaggtgagggtgacattctggccaggaagctgatagacagtccaggctcggggatagagggcatggtagaaagcaaagtacccacacaggccccagttccagctgcggaggacacttgggcgctccagggacaggacttgctggtacacagtctgcccttcccgacgcaggcacactgtgaacttaagagggcagataggctggaacggggtaaaccacagggaccacagactaagtcttccctctcctcaaatcagctcctcccctttcagagcctgcaactgttaccactgcaccatcagcttcaagtcatcccccaggctcagtgaatcaccaagtcctgcttcctccccatccatctatctcccaagctttctctcccttctccactacggtggtgttagcacctcacttaagcccaatctcctgctttttctgtggcccttttcatctgggtagcagagtgatctttctcacaggcaaatcaagatatgtcagtccttggttaggatgtttcagtgactccccatggccctcaggctaaagtctcaactcttgcctggctttcaaggcccttcttgagctggcctctccctgcccatcagactcatcacctgttcaagcacctatagtctgttcatataaaaacactcactgttccttgagcacactacattctctcctccatgcctgtgctcatgcttgttcgctatctggtgaaacctctcatccttcaaagcctaggcggacgcgtgggtc

SEQ ID NO: 25308 - DNA, 735 bp, Homo sapiens
ttttttttttttttttttttttttttttttttttttttttttttttttttttttttttttaaatgtgagcacaggcacttttaatgaaaaaggcatcatctaagtttaaaaacaaatgaaaagacttagaaattcatgaatattgtgattattttacatttggaaacaacttctgcaagtttatgttttatgttttgtgtaataacttgcttcctagtatgatcagctcatgtacactatgagagggttcaggggtgggtcatttaaataatgaattggctaatgtggattttaaatttcatatcatgatataagcactgcaatggaaatgtttttactaaaacattatatttttgtggtactagaatttcctgaggtgaaaaaccgatattgaagattcatttttcttttttccattcttcaggaccttcggcaaggtgagtcaaggctctctacctacctagatgtttttcagaggcctacaaatacaagtatctttcttatatgcacattctaataaatgatgaaattcagtccaacatgcttattataaacatagcaattcttgctctatcaaattagcttatatgccaaatattaaatatggtttatttaggtaagcataaaaacataggggctatcatttttaaagacttgattttctctattgtggtaaaatatataaatacatatttgccattttaaacatttaccattttaaccatttttaagtgt

SEQ ID NO: 25309 - DNA, 670 bp, Homo sapiens; identical to SEQ ID NO: 24929

SEQ ID NO: 25310 - DNA, 1048 bp, Homo sapiens
  misc_feature 1, 1038, 1039, 1040, 1041, 1042, 1043, 1044, 1045, 1046,1047, 1048: n = A,T,C or G
ncttcccaaagtgctgggattacaggcgtgagccaccacgcccagcctatggtaaatatattttgaactacaaaggtgctgtggtactttaaagaaaaactatttttactagtttatctgaatggtctgtggactttatttagaaactgtttttcagtttagttttttggacatatcctttgctcagtgtattttgttacttctctagtaaaggtagaagtgaagcagatgccattgtaggttttaccagcatttaaatatattatgaattgcttagcaatgaaatgcaagtatgcatcttttacttaaagatactatttatgtattcagctacagagatgaaatagcattttatgtgttaattgttttggctataaaatttaagtccttacagcatttggggattatacacttggatttcaaaattgataaaacccttgtgaacatatctaatagatattctgtttacttgtagaaataatataatgtgtctggttctgttttgttagacattttttatgttctactgaatcagaatagtcagtgttatattccttatttcaagaattcatctattttatggctacatctcatatgtgctatgaggacttctagccagtgggtggcgctgtaataccgaagtactgcactgctttgttcctgtttccttgtgctgattcctttctagtatttaggtaacattaccggatggcattcccttaaattccaccaatcttaatcttattttaaaatggctacttttagggggtggggtacggtaaaacttaatagtacgtgtttatctcagttaatgtctggatatctatatgcactggttaacagtcccgaccgtatatgatggcgtatttaggaaagatataatactggccttttaatataaaaatcaaaaagagcgaaaaagagggggggaaatcccgggggcctaagccaatattaaaggagaaagaggataaaaagcggtaaaagagcgaagatgtagaaacccgtgagtagacaaagaaaagtatagctgtatannnnnnnnnnn

SEQ ID NO: 25311 - DNA, 1841 bp, Homo sapiens
  misc_feature 1, 1841: n = A,T,C or G
ngagcctcttacctgtaccgcgcgtggtggcacatgcctgtaatcccagctactcgagaggctgaggcaggagaattgctcgaacccgagaggcggaggttgtggtgagctgagattgcgccattgcgctccagcctgggcaacaagagcaaaactccgtcttaaaaaaaaaaaaaaaaagaactctgaaggaacctttgttagatagtccttctctatgttagcattgcctttctagttgggcagctggggtgcataggcctggttctcagacaaggggatttgaagtttcagacgtgtcatattccaaaatgctgtgttaacaagtaaggcctcctatagatctacttcaagtttggccaggtttcctttaccaccttgtttttcagataggactgaggctttcagtgcatactggcaaccttggaagagctatgacgtcgcatgcacgcgtacgtaagcttggatcctctagagcggccgtctactactactaaatttgcggccgcgtcgacgaactgggttaggtgccgctgttgctgctcgtgttgaatctagaaccgtagccagacatgggactggaggacgagcaaaagatgcttaccgaatccggagatcctgaggaggaggaagaggaagaggaggaattagtggatcccctaacaacagtgagagagcaatgcgagcagttggagaaatgtgtaaaggcccgggagcggctagagctctgtgatgagcgtgtatcctctcgatcacatacagaagaggattgcacggaggagctctttgacttcttgcatgcgagggaccattgcgtggcccacaaactctttaacaacttgaaataaatgtgtggacttaattcaccccagtcttcatcatctgggcatcagaatatttccttatggttttggatgtaccatttgtttcttatttgtgtaactgtaagttcacatgaacctcatgggtttggcttaggctggtagcttctatgtaattcgcaatgattccatctaaataaaagttctatgatctgcaaaaacaaaaaaaaaaaacagaaaaactttgggcgcggctgggcctcggaaagcttttaaccattgttggggcggggccatttttgcattggcatcgggcccaggaacaccggcagcttgttggttccccaaaaaacccgggccgggttgaaaaccagagtggtcgggcacgtctaacagcgccggctacaccccctggcggggaaaaaacaccactcacaaacaccgtaaatgagcataaactgaacaaaaaaaagcaaaagagaaacaaacacacaaacagcaagagacacaacgacacgaaacgaaagaaacaacagcaaaagagaaagaaaaaacaagaaaaagagagaagatagagaggaagagagagaagacgagggagacgcggacagagagggaggggaggggaggcgtgaaagaaggggaacagggagacaggagaagaaggggcagggaagggaaggaagaaaggaagaggggagagagggaggacagagcgcggacgagacagaagggtaagaagaggggagaagcggaggagagggaggaacagaaaggggcaaagaggcacggagggcgagaaaggagaagagaaggcaggacaaggagcgcggccacggggcgacaagagcaggagccgaagaggcggagaacgagacgaagagaaggaggaggaagagagcgagggaggcgacaaaggagagggcgaggacgacgagaggaaggaagaagagagcagaaagaacaaaccaagaggaaggagtggagagacagacagaaggaagagagagccaagagacn

SEQ ID NO: 25312 - DNA, 2670 bp, Homo sapiens; identical to SEQ ID NO: 24256
  misc_feature 1, 2, 3, 4, 5, 6, 7, 8, 9, 10, 11, 12, 13, 14, 15, 16, 17,18, 19, 20, 21, 22, 23, 24, 2643, 2659, 2660, 2661, 2662,2663, 2664, 2665, 2666, 2667, 2668, 2669, 2670: n = A,T,C or G

SEQ ID NO: 25313 - DNA, 794 bp, Homo sapiens
  misc_feature 591, 593, 594, 595, 596, 597, 598, 599, 600, 601, 602, 603,604, 605, 606, 607, 608, 609, 610, 611, 612, 613, 614, 615,616, 617, 618, 619, 620, 621, 622, 623, 701, 702, 703, 704,705, 706, 707, 708, 709, 710, 711, 712, 713, 714, 715: n = A,T,C or G
  misc_feature 716, 717, 718, 719, 720, 721, 722, 723, 792, 793, 794: n = A,T,C or G
ccacgcgtccggatggcggcgcggacagcgttcggtgctgtgtgccggcgcctctggcagggattggggaatttttctgtaaacacttctaagggcaatacagccaaaaatggtggcttgcttcttaccaatatgaagtgggtacagttttcaaacctacacgttgatgttccaaaggatttgaccaaacctgtggtaacaatctctgatgaaccagacatattatataagcgcctctcggttttggtgaaaggtcacgataaggctgtattggacagttatgaatattttgctgtgcttgctgctaaagaacttggtatctctattaaagtacatgaacctccaaggaaaatagagcgatttactcttctccaatcagtgcatatttacaagaagcacagagttcagtatgaaatgagaacactttacagatgtttagagttagaacatctaactggaagcacagcagatgtctacttggaatatattcagcgaaacttacctgaaggggttgccatggaagtaacaaagacacaattagaacagttaccagaacacatcaaggagccaatctgggaaacactatcagangnnnnnnnnnnnnnnnnnnnnnnnnnnnnnnngtggggacaaccttagccaaaccatttacccaaataaagtataggcgatagaaattgaaacctggcgcaatagatatnnnnnnnnnnnnnnnnnnnnnnngctcatagataaggacaaggggttggttaaatctttactcacagtaatttaccaagaacttcaaatacnnn

SEQ ID NO: 25314 - DNA, 2423 bp, Homo sapiens; identical to SEQ ID NO: 22179
  misc_feature 1, 2402, 2403, 2404, 2405, 2406, 2407, 2408, 2409, 2410,2411, 2412, 2413, 2414, 2415, 2416, 2417, 2418, 2419, 2420,2421, 2422, 2423: n = A,T,C or G

SEQ ID NO: 25315 - DNA, 2553 bp, Homo sapiens
cagcgtccgagcacacagagctcttttccctaacatcactgtgaataatagtggatcctatacctgccacgccaataactcagtcactggctgcaacaggaccacagtcaagacgatcatagtcactgagctaagtccagtagtagcaaagccccaaatcaaagccagcaagaccacagtcacaggagataaggactctgtgaacctgacctgctccacaaatgacactggaatctccatccgttggttcttcaaaaaccagagtctcccgtcctcggagaggatgaagctgtcccagggcaacaccaccctcagcataaaccctgtcaagagggaggatgctgggacgtattggtgtgaggtcttcaacccaatcagtaagaaccaaagcgaccccatcatgctgaacgtaaactataatgctctaccacaagaaaatggcctctcacctggggccattgctggcattgtgattggagtagtggccctggttgctctgatagcagtagccctggcatgttttctgcatttcgggaagaccggcagggcaagcgaccagcgtgatctcacagagcacaaaccctcagtctccaaccacactcaggaccactccaatgacccacctaacaagatgaatgaagttacttattctaccctgaactttgaagcccagcaacccacacaaccaacttcagcctccccatccctaacagccacagaaataatttattcagaagtaaaaaagcagtaatgaaacctgtcctgctcactgcagtgctgatgtatttcaagtctctcaccctcatcactaggagattcctttcccctgtaggggtagaggggtggggacagaaacaactttctcctactcttccttcctaataggcatctccaggctgcctggtcactgcccctctctcagtgtcaatagatgaaagtacattgggagtctgtaggaaacccaaccttcttgtcattgaaatttggcaaagctgactttgggaaagagggaccagaacttcccctcccttccccttttcccaacctggacttgttttaaacttgcctgttcagagcactcattccttcccacccccagtcctgtcctatcactctaattcggatttgccatagccttgaggttatgtccttttccattaagtacatgtgccaggaaacaagagagagagaaagtaaaggcagtaatgccttctcctatttctccaaagccttgtgtgaactcaccaaacacaagaaaatcaaatatataaccaatagtgaaatgccacacctttgtccactgtcagggttgtctacctgtaggatcagggtctaagcaccttggtgcttagctagaataccacctaatccttctggcaagcctgtcttcagagaacccactagaagcaactaggaaaatcacttgccaaaatccaaggcaattcctgatggaaaatgcaaaagcacatatatgttttaatatctttatgggctctgttcaaggcagtgctgagagggaggggttatagcttcaggagggaaccagcttctgataaacacaatctgctaggaacttgggaaaggaatcagagagctgcccttcagcgattatttaaattattgttaaagaatacacaatttggggtattgggatttttctccttttctctgagacattccaccattttaatttttgtaactgcttatttatgtgaaaagggttatttttacttagcttagctatgtcagccaatccgattgccttaggtgaaagaaaccaccgaaatccctcaggtcccttggtcaggagcctctcaagattttttttgtcagaggctccaaatagaaaataagaaaaggttttcttcattcatggctagagctagatttaactcagtttctaggcacctcagaccaatcatcaactaccattctattccatgtttgcacctgtgcattttctgtttgcccccattcactttgtcaggaaaccttggcctctgctaaggtgtatttggtccttgagaagtgggagcaccctacagggacactatcactcatgctggtggcattgtttacagctagaaagctgcactggtgctaatgccccttggggaaatggggctgtgaggaggaggattataacttaggcctagcctcttttaacagcctctgaaatttatcttttcttctatggggtctataaatgtatcttataataaaaaggaaggacaggaggaagacaggcaaatgtacttctcacccagtcttctacacagatggaatctctttggggctaagagaaaggttttattctatattgcttacctgatctcatgttaggcctaagaggctttctccaggaggattagcttggagttctctatactcaggtacctctttcagggttttctaaccctgacacggactgtgcatactttccctcatccatgctgtgctgtgttatttaatttttcctggctaagatcatgtctgaattatgtatgaaaattattctatgtttttataataaaaataatatatcagacatcg

SEQ ID NO: 25316 - DNA, 2170 bp, Homo sapiens; identical to SEQ ID NO: 25233
  misc_feature 1, 2166, 2167, 2168, 2169, 2170: n = A,T,C or G

SEQ ID NO: 25317 - DNA, 1441 bp, Homo sapiens; identical to SEQ ID NO: 24492
  misc_feature 1439, 1440, 1441: n = A,T,C or G

SEQ ID NO: 25318 - DNA, 489 bp, Homo sapiens
acagagggacagattctgatggtgctgggaatcatccaaggttttaaagaccattgctaccatcccatgtgctctcaggtgcattcgaaaactgggcatggcacatttagtagccaagctaataacactaaggcaacgtgtgtttagaggctgagtgctctttaagccacttaacaagtacatttttgttgtagattattttaaacataatgctatagtaatattttgaagatttgagctgttatttccatttgtttttacactgtgactaaatgattaggttttagttttagactctaaatggaacctgaattaataggaaataaacacggtacctgcccctccacaccaaggcgcatctgtctcaatcattaatttttcactaggaattgacttcaaaacttccaaattagcttcagttttcagtgagcaaccattaaatcctatataaagatccaagtcaatcaaagcagctgctgcttccttggt

SEQ ID NO: 25319 - DNA, 472 bp, Homo sapiens
  misc_feature 1, 6, 472: n = A,T,C or G
ncaaanacgtgctacgtcactgtgcgatcgggttgtgcttagcttggggtctcctggccccttgacgcgtcaggttgctgtacccctgcatcggatgcgctgtaccctgcgctggctccgtgaaccttagggacaacaccgggacacccgcgaggccggaaaatggactcagtggcttttgaggatgtgtctgtgagcttcagccaggaggagtgggctctgctggctccttcacagaagaaactctacagagatgtgatgcaggaaacattcaagaacctggcatctataggggaaaaatgggaagacccgaatgttgaagatcaacacaaaaaccaaggacgaaatctaagaagccatacgggagagagactctgtgaaggtaaagaaggtagtcaatgtgcagaaaacttcagtcccaatctcagtgtgacgaagaagactgccggagtaaaaccatatgagtgtaccn

SEQ ID NO: 25320 - DNA, 747 bp, Homo sapiens
  misc_feature 1, 743, 744, 745, 746, 747: n = A,T,C or G
ngacccaaaaacttgataggagtcaaatatttttcacgggtcaaagcagcttctgcttttcttacccaaggctccttcccaaaacttcttgggaatggataacggatgttttctggttctaactttcacccttgagccaccaagggaaccttggtccctttgaatgaacctgcacttcaaaaaatccaaacttaaacacccggatagttttagattggccttaaatgcaaatccagagtgtttgggctttgcttgtatttgcttgacatgctatagtacccagagtccaaggtgccagggtcctgggagcaacaaatgcattcccattgatttattgttgaaaaaccctctgatcagcctacccaaaggccctgccctaccctgccttgcctcacctacatacgttcagtttgtaattctttttccttttgctgcacaataactgcttccgtttacctttttcacgggagactctggcttggaaatctccaaaatgcatactttatctgtgttgtgggtttgtttagtatctcttcaagactcacttgctgacttcctaaccctcagtttctcacagtgtgactgtatttggaggtaggggctttaaagaggtgattaaaatgaagacattagggtgggtcctattccaatatgactgatgtctttatcagaagagtagatttaggacacagacaaaaggaaggccacggaagacagagtgagatatgaccggctgcaaccannnnn

SEQ ID NO: 25321 - DNA, 3368 bp, Homo sapiens
  misc_feature 1, 2, 3, 4, 5, 6, 7, 3368: n = A,T,C or G
nnnnnnngaggggcgtatcctagtggcccccatccggtctccgttttggaagacccgcctcggcacagccaggctcagtccggccttgcgctgagaaaagatgacagcaatcaagcatgcattacaaagagacatttttacaccaaatgatgaacgcctgctgagcattgtgaatgtctgcaaagcaggaaaaaagaaaaagaactgttttttatgtgccacagtgacaactgaacgccctgtgcaggttaaggtggtcaaagtcaagaaatccgataagggagatttctacaaaaggcagattgcatgggcccttcgagatcttgctgtggtagatgccaaagatgctatcaaagaaaatcctgaatttgatttacactttgaaaaaatatataaatgggttgccagcagcactgctgaaaagaatgcatttatttcatgcatttggaaattgaatcagcgatatctccggaagaaaattgattttgtcaatgttagctcacagcttttggaagaatctgttccaagtggagaaaatcagagtgtgacaggaggtgatgaagaagtagtagatgaataccaagagttaaatgcaagagaagaacaggatatcgaaataatgatggaaggctgtgaatatgcaatctcgaatgcggaagcctttgcagaaaaattgtccagagagctgcaggtgctagatggggctaacatccagtcaatcatggcatctgaaaaacaagtcaacatcctgatgaaattgctagatgaggctctaaaggaggtagatcagattgaattgaaactgagcagttatgaggaaatgctccaaagtgtaaaagaacaaatggatcagatctctgaaagcaaccacctaattcatcttagtaacactaataatgtaaaactcctatctgagatagagttccttgtgaaccacatggacttggccaaaggtcatataaaggcccttcaggaaggagatcttgcttcttccagaggcattgaggcctgcaccaatgctgctgatgcccttctgcagtgcatgaatgtagctcttcgaccaggccatgacttgcttctggcagtcaaacagcaacagcagcgattcagtgatttgcgagagctttttgcccggagactggccagtcacctcaacaatgtttttgttcaacagggtcatgatcagagttcgactcttgcccaacactctgttgaactgactttacccaatcatcatccatttcatagagatttgctccgatatgccaagctgatggagtggctaaagagtacagattatggaaaatatgaaggactaacaaagaattacatggattatttatcccgactatatgaaagagaaatcaaagatttctttgaagttgcaaagatcaagatgactggcacaactaaagaaagcaagaagtttgctacactgcctcgaaaagaaagtgctgtcaaacaggaaacagagagtcttcatggaagttcggggaaattaactggatctacttctagtctaaataagctcagtgttcagagttcagggaatcgcagatctcagtcatcttccctgttggatatgggaaacatgtctgcctctgatctcgatgttgctgacaggaccaaatttgataagatctttgaacaggtactaagtgaactggagcccctatgtctggcagaacaggacttcataagtaaatttttcaaactacagcaacatcaaagtatgcctggaactatggctgaagcagaggacctggatggaggaacattatcacggcaacataattgtggcacaccactgcctgtttcatctgagaaagatatgatccgccaaatgatgattaaaatatttcgctgcattgagccagagctgaacaacctaattgcattaggagacaaaattgatagctttaactctctttatatgttagtcaaaatgagtcatcatgtgtggactgcacaaaatgtggaccctgcttctttcctaagtactacattgggaaatgttttggtgactgtcaaaaggaactttgacaaatgcattagtaaccaaataaggcaaatggaagaagtaaagatctcaaaaaagagtaaagttggaattcttccatttgttgctgaatttgaagaatttgctggacttgcagaatcaatcttcaaaaatgctgagcgtcgtggagacctggataaagcatacaccaaacttatcagaggagtatttgttaatgtggagaaagtagcaaatgaaagccagaagacccccagggatgtggttatgatggaaaactttcaccatatttttgcaactctttctcgattgaaaatctcatgtctagaagcagaaaaaaaagaagccaaacaaaaatacacagatcaccttcagtcttatgtcatttactctttaggacaacctcttgaaaaactaaatcatttctttgaaggtgttgaagctcgcgtggcacagggcataagggaggaggaagtaagttaccaacttgcatttaacaaacaagaacttcgtaaagtcattaaggagtaccctggaaaggaagtaaaaaaaggtctagataacctctacaagaaagttgataaacatttatgtgaagaagagaacttacttcaggtggtgtggcactccatgcaagatgaatttatacgccagtataagcactttgaaggtttgatagctcgctgttatcctggatctggtgttacaatggaattcactattcaggacattctggattattgttccagcattgcacagtcccactaaaccttgtgaaagaagaaaagataactgaatgaagcatttgagtataacagacactataccaaaataccaagcaactgttttgagaacccagacttaaaattttatgtattattaaatgttagataaatgggtagtaccatactacaaatatttaaatgcaaaattaccaacctatatagcagttttatttgccctataggttgcatactaacttaagcattcatgtcaccataaaatgcctttagcatttctcaatgactggatgggaaattttcctttattgcctagctgcttgtgtttgagtggttgtcctatgagcaatgcatttggagttcttcagctttcactacttctctgttgcttgctaatcatgtaactactaaaatactgtacaaaattgttttttcacactaacaaatgtgtatatggagaagagggctcatgtgatgatcatttgtgaacttagatttttgaggattatgtgactagtaataaatgtgaaataaattttcaaaaaagttgacatttgataatatttttaggtctatcatatgctgtcttctgtattaaagcaagttcttan

SEQ ID NO: 25322 - DNA, 2071 bp, Homo sapiens; identical to SEQ ID NO: 21824

SEQ ID NO: 25323 - DNA, 461 bp, Homo sapiens; identical to SEQ ID NO: 22262

SEQ ID NO: 25324 - DNA, 1192 bp, Homo sapiens
  misc_feature 1, 2, 3, 4, 5, 6, 7, 8, 9, 10, 11, 12, 1177, 1178, 1179,1180, 1181, 1182, 1183, 1184, 1185, 1186, 1187, 1188, 1189,1190, 1191, 1192: n = A,T,C or G
nnnnnnnnnnnnccaaaaaaagtaaaaccagagtttcaggaactctttatccacagaggctaatagaaatagaatttggaaatatctatctgagacatttttaaatctgaggaatccgtaaaatggtggctcttgggtatccagccctcaggatctccatttacctgttaaagtgaggatttggtgcctttcttctttagttgggccatcaagaaaacttcagaaatcaggcattctgtcttcctatacaataaatattttcagatcatattttcagataagagtcttcagcttccctcagctattcaacccaatgcatggaaagcctcagttgaataaacttttccaccatcccaggtgcctgaaactagtgtccttcttcacttctacattcaggacaaaatgaagtcaggtttttaaaacctcagtataaaagaccccctcacactggtccaatatgaagacttctcagcgtgaacactggggaattccttcctttcatctttcctaatagattgttgttttctaatcccatcccattctgctgtacctctccagcaagtcccttttcaccttagccaagctccctgcaatgctctccagttgtgaagccttgtattcactaaggaactacgtactcttagtctgctctgaaagggctaatgtctagtgtaatggcaaaattaccaatctgttctccaaagtgttccagcagatatatttctactagacaaacataattgtgaattgactgttagtgaggctgtttcttctctaatgatcacataatatccaaattatatcaacttcattatttccctctttccttttcctaaccctttccctttatttcttgtttctcttgaagactacttcaaattacctatttgtcttcattactgcccccaaaactctaataattgtgacccctaactgttcatttctcttcctttctccaccccattctgaacatccttctttaagttttatttaatgaaagaacactaaagtgagtgagttcataaacttgagactcgtaggcagagtgaagcatgtcttcattttagcttcagagtttaaaagttatcaatattcttttgagagtgggaggacctgagtcacagttttaaatgtcaactgtactagctgaggtcattaattccccttaccttcacgnnnnnnnnnnnnnnnn

SEQ ID NO: 25325 - DNA, 3606 bp, Homo sapiens
  misc_feature 1, 2, 3604, 3605, 3606: n = A,T,C or G
nnccgttctggagattaacataccggccgatgtgtgttgcggacggagttgggtcgtgggtgtgttagtacgtgtgtgttcggttttagtgttgtgttgtcggtggttcgcgcgtgcgtgggtgcggggcggtgttgtggttgttgggggtgtcggatggctgagtgttgtggtgcagtgtgtgggtgggggtgcagagagggctgcggtcgtcggtttacttacttcgtgagtgtcggtagtcacgggtgtggtgttgtctcgtgtacggcgcgctcggtgggtgtgtgggtagctccgtgtatgcacgcctcgtagtgtgtgtgactccatgggcggttaccagttgcatgagcggcctgcaagagaatggtgagttccagtgtacaatgcctgtggttacaatggatacaacgtgttttatgaagtttggggcccattgacggttggaaaatgtatagggcgtgtgaaaagtatataagaatggtgatactgacgcgagcgggtgaagaggctgtgcaggttgcgtgtggaagttcttccccagggggtgtagtgtagatagttggtgcgtggaggcctgtctaaagttggaggtcctaccttcgcaccccgtttaatacctgtagggatggtgaagatagtgttcgttgaaaagaggccgttatagatagcatttgtggggaagaacggggttaggacagaagtgaatgtgggtgccgtgcgtcacgtcaagcgagcacagctgcgataaggtggaaaaggcgcctgcggtccgttgaaagatgtgagctggtctgtaggagaaggttgtaacaggagcagtgttcgttaaagcccacggagaagaggattgacaccagtctattcttgttaacagcaggtagtttagagttcttaaaataactttataaatatataatatagtaacatagataaccaaagtggaaaaatttcaagccagggtaccagtgtataaaatgaaacttttcaagccatcttaacaacagttaagtgagcaaaccaccaactctgaactctcaagctgtgttttaaaatacaaagcagcccgcagcaagttctctcttgtccaggcattctgtatgtaaggccaggaggcttctgcttctttcctgggttttgcttgctaggcacagctggaagggcagagggccacagctgagctgaactcgctgtcaaatttgaacttcctagaaaaatcactgcagaggaaaccacatcaacctactgaagatttcagatcttcagaaatgtcacggaaagtccgctgaggctgagcaggccatggggtctggtttggcgtgggaactgaattcgtgggactcactagcatggcactatagatattggaagcaaccacaagtatgcagagaagaataggaccgatgattgctccttccaggcctaggtagtatgctccaccggccactgccaagcctgtcaggtaaggatggccacctcctgatatgtcagagtagattgcagtatctacaaagtatgttggcaagagatgaaaaatcaacagtaaaatggccttgcatcctaacccttgtgtcagccacaggtcaagaactgcaggtactgctgcccagtatgtccccaggaatggcactgctccaaggattgctgctaatgctgatggtatgaagacaatattgatgccaaacatagtatgagtcagccaggtatacaatccatagaagccagccattttgagggaagcatcaaacacccctctgatagcttcttccacagactggccaataatattagaagaaggacctggctgagatagtggagtcaggcttatcacccacttcactggcttgtagtactcatcactggaacttaatagataaaatagtgtggtcaggaaaattatcagagagagtacaaaattgagaagggctgtcccgctgtagacgaggatggtcaagagtgtagtgacagtggtgaacagcaggctcacattccggctcataacgatccacagagactccaagatcgaaagaaatgtctcaatgttctcgtgaacaaaggaaacaatatcctgccagtccagaatgtctcccagccagctattctgacgactgacactgctacttctgtcctttgtgccttccagagtgtgttacattctttacaaaccaagagtgatacagtctgtcccaaagttctagtacttgcttttcaattacagcagtattgttcaccttatctcctagaattttatggagcttgtgagttatccattctcgtccatactgatacacgttgttagccgcagaattcagggctctttggactacctgagcctcaggaagccaatttgcccactcagggtgatttgctagagtttcattaatcaaattacttgtgacttcaatcatgtgtacactctcttgatgtacctttgcagtcaggagtagggctaaaagaagagttcctatcactaacaaaaatatgatgaaaatgctaattattttatctaacatcttctccaaccagatgatcatcttgctatcaacttgtcacaagaacttttccaagcccgacaatgggccaaggcgcgagagctccctgccgctccttcaggaagctttctataatgccccaccacacatggtagcgtttctctaggaaatccacaactccaaagtgaatgacaagctttttgagtatccagactgcaatcggcactgccagcaactgcacaatccacagggtcaaccagatctgcatgacgaccatggcccaaactagagacacaaagtagatgtcactaggtttcttctttctaagaaacgttcctatttcaggccttcgtctgcccagagtaggtgaaggggaggtggaatctgaagtgggaggtggacaacgttggagcggattctcccctgtccactgcttctgcaggctgagtggagggctggtcttcactgcttgattcataccctgtgatagagatggccaagtttgccagagtagaagctgccatggagataacctgccctggtaactctgccccagaagactcttttccattctgtttttcatagagggtacccacagacatcaggaaaacaataaccaggaatactggaattctccatgagccagccagggatgctaaatgaaaaagcaatataatccagacaggaattgaaactgctctcaagtagcgttcagtgcttgcattccacttgaatgaaacagtcaacacatagccaaccaccaacgtccagatccacaggctgctgaagtagtccagcccgcggcagatgagcgtggcagcgtgcaccagcagcacctgcacgcccaagtagctgccgaggcagtagaggccgtacaggagcgggccgccggcgccgagcagcaggagcaggcggcggcggcgcagcgcctgctcgcccagggcctcgacgccgtagtcgacgaagcagagcggcaggagcagcgcggccaggacgatgggcgtgtgcgcgcggtgcaggcgctgcagccagtggcggcccaggcgcgtcagcgagctcttgaaggggtgcagaaaagtgccgcatagcacggcccagagcagcggccnnn

SEQ ID NO: 25326 - DNA, 3461 bp, Homo sapiens
  misc_feature 3277: n = A,T,C or G
acactgcattttgcaaaaaaaaaaaaaaaaaagtaatcttttagcaaccccagtattccttcactatttcgcttcctgcattagcaaattttacttacagtcaaaagtgcagatttatactcctgacgtgtctcattcacagctaaataataggccataggacttttggtaggtttaaacttttaattctgtatttcatgattataagtcttgctagaattttttctaatctttagtagatttgattaaataatgattcacagaatttagtaacagaatcaaactaagccatgtatgagggtaatcgagatgaggatattaactcaaaagaaatagggtgatttttaaaggattaataaaattctgaaatgttaagtagaagattacattgtctagtcttgtatttcctccttctgttgctctctttcattcacacactctcagtttctcatatttgtagctcatttatttggttatttcctaagaatattgaaagtgaagcaactatgtgactgtattcttcaggtaaacactgactgcgcttgttggattttccctatttttgtgacttcaagaataatatgccctgctgaatacatgccatttcacattctgaaactgggtagagtggttgggtgttctgccaacaattgctagtggtgtgaattcattcatatttgccagtattgctcacttcaaagaaactccttcatcaagcagtccagagctaggccagatcaatgctacaatcatgaagttctcattgcatgcaattgtgtaggattgacaaggaactcagataaaaatttccagggtgcacttccagaaccagcttcaacatatgtctacattgcccccaagttaataaagtgccaaccctttactctctcatacagccagaaatgttagaaatccaaaatcttggtgcattattttttcataaacgctaaaacatttgaagaaacaatttaattatttaaaattcaagtattttattcacattatttgcaatatccaaatgtttaaaaattcccagataattaactagctattacagatctcacctagagggttgatgttatgaagactccagtggactgtactcacaaattgactggacaccctatgaaagtgggtagacctctcagcggaaaataagaagggcttttacctacagggcaggacagggtcccatgagagcagttctgtggagatataaaaagaatggaagaaggaatgccttatagtgatattgtgacattatatctatatatctacatatatctatctatctatatctacatctatataatcttacatttaaaattgtattcctacacatattagaaactcttctaataaatgaagtaaaaaaattaaaaagaatacaaatattccagccccaaatgagaaatcaaacatattaaaattgttcaagaaaatttctttgaacacttttgaaagtttttggaaacttagaaaagagggaaaaaaatccagtgttactagtaatttccatggtaatacagataaaatacattcttttaattctgggaaattagaaaaagtggggtgatctttccaggaaaaacatgtgtaacatctgcttatcactccagctccctcctcctcctcctctccacgttcccttgagtaaatgtctgggaaagcatgaagcttgatgcaagaaccctgttgtactggagttttcctcccctgtgaaaacgtaactactgttgggagtgaattgaggatgtagaaaggtggtggaaccaaattgtggtcaatggaaataggagaatatggttctcactcttgagaaaaaaacctaagattagcccaggtagttgcctgtaacttcagtttttctgcctgggtttgatatagtttagggttggggttagattaagatctaaattacatcaggacaaagagacagactattaactccacagttaattaaggacgtatgttccatgtttatttgttaaagcagtgtgaatagccttcaagcatgtgaataatcttccatcttccccgccacacatacacacacacactttttgtttctttcaggtagacaccttttaaaatgcagaactaactgaggcatttcagtaactttgctttcaaatcaataaagtcaaatgtatggaaacattttgtgccctactctccataccccgtgtactcaaattctctactgtatgaattatgctttaagtagaattcagtgccaaggagaacttggtgaaataaattattttaattttttttttatcctttacaaagccatggattttatttggttgatgtgtgctctgtacacaagccatttcaataggatggagctgttaattattttccaaagagtaatagacatgcaaaagtttcaataaaaactgggccattaacaaataaattaataaactaataagcattcccttctaggtttttgccaaactgcctatccaataacaaatttgagaatcgttgaaaaagctagttatatttcagagaaatgattttcattattgaaactgttctccctagcaggccattttccctttttcctgggagtttagcaagtttaggagagaatagtcatgaaaagaaagggaagaaaggggagaagggaagaggttaaaaagtaagtgctcagacctatgaacgtaatccctttgctagaaatatttaagagcagctcagcttggttgaaactgagttttgtcatcttccatatttgcaggaaggtattttctgacttgcaatgcagctagatgtaaaattttattttatcatactagaaagccttgactagaaaaatgaataaatattgagggtttcctgtccatatctggcttgcatgtgccagaaagcagagaatagaaaatgtaatctccaacatccaagcatcgaaacccaaggggtaggcaattctatgtaggttttggacatgaagtttggtgcatcttggtttatgctggctcaactgctattaaacctctctggcttatagtctcttcattctattaggcaagcacgtatcgaacacttgcttcgcacaaggctctttagttaacaatttagcagctactgtttgtgttaaacacacttttcaccaaataggttctgaggcaaacgagagcaatgactatttaaagaaaggctttcccagcatcacttacacatcccaaaactaaaaagatcaactcttccaactgagaacaacaacgacaacaacatacatttggaatattattctcaactcacgttntaataatacatcttattattcttctagtagagaaactacaaatcagcctcttcaacacttatatacaggttaataaagccttttgcaagttactcggtctctcacctgaggtatttctttcctcccaccttgcccctgtcctccctttctcttctccctttgcaagagggaatacttaacatac

SEQ ID NO: 25327 - DNA, 752 bp, Homo sapiens; identical to SEQ ID NO: 25041

SEQ ID NO: 25328 - DNA, 6946 bp, Homo sapiens
  misc_feature 6932, 6933, 6934, 6935, 6936, 6937, 6938, 6939, 6940, 6941,6942, 6943, 6944, 6945, 6946: n = A,T,C or G
cgacccacgcgtccgggcccggcggtgatttccgcggcggtctctcctgcgcccggcctctgcggcgcaggcccagcccccgaacctcgcacgttcggcagccccggcctggccccggcccctcctgcccatggcggtggccgagctgtacacgcagtacaacagggtctggattcccgatcctgaagaagtttggaagtctgctgaaatagccaaggactacagagttggtgacaaggtcctgcgactcctgctggaggatggaacggagctggattattctgtcaatccagaatctctgcctccacttcggaatcctgacatcctcgtgggcgagaatgacctcacggctctcagctatcttcacgagcccgcggtgctccacaacctcagaatccgctttgcagaatccaaactcatttacacctacagtggaatcattttggtggccatgaatccttacaagcagttgccaatatacggagatgccatcatccacgcctacagcgggcagaacatgggcgatatggacccacacatatttgccgtggcagaagaggcatacaagcagatggccagaaacaacagaaaccagtccataattgtaagtggggagtcaggtgctggaaagacagtgtcggctcgctatgccatgaggtactttgccaccgtcagcaaatcgggcagcaacgctcacgtggaagacaaggtcctggcatccaatcccatcaccgaggccgttggaaatgccaagaccacccgcaatgacaatagtagtcggtttgggaaatacacagaaatcagttttgatgaacaaaatcaaattataggagccaacatgagcacttacctcctggagaaatccagagttgtctttcaatcggaaaatgaacgaaattaccacattttctatcagctttgtgcatctgcacagcagtcggaatttaaacatcttaaattggggagtgccgaagaatttaattatacaagaatgggaggcaatactgtcattgagggtgtgaatgatcgagctgaaatggtagagactcaaaagaccttcacgcttctgggtttcaaggaggattttcagatggacgtttttaaaatcctggcagccatcctacatctgggcaacgtgcagatcaccgcggtgggcaacgagaggtcctcagttagtgaggatgacagtcacctgaaggtgttctgtgagctcctgggcctggagagtggcagagttgctcagtggctgtgcaatcgcaaaatcgtcacaagctctgagacggtggtaaaacccatgaccaggcctcaggctgtcaacgccagggatgcactggccaaaaagatctatgctcacctgttcgacttcattgtggagagaattaaccaagcgttgcagttttcaggcaagcagcacacttttattggtgttttggacatttatggttttgaaacctttgatgtgaacagctttgaacaattttgcatcaattacgctaatgaaaaactgcaacaacagtttaacatgcatgtcttcaaactggaacaagaagaatacatgaaggaagatataccttggacgctgatagatttttatgacaatcaaccagttattgacctgattgaagcaaaaatgggaattctggagttactggatgaagaatgtttgttaccacatggaactgatgaaaactggcctcaaaagctgtataataattttgtcaacaggaaccctttgtttgaaaagcctagaatgtcaaacacatcctttgtcatccagcactttgctgataaggtagagtataaatgtgaaggtttcctggagaaaaacagagacaccgtctatgacatgctggttgaaatcctgagagcaagcaagtttcatctctgtgccaacttttttcaagaaaatccaactcctccttctccttttggttcaatgattacagttaaatctgcaaagcaagtcatcaagccaaacagcaagcatttccgaaccacagttgggagcaagttccgcagctctctgtacttgctcatggagaccctcaatgcgacgacgccccactacgttcgatgcatcaagccaaatgatgagaagttaccctttgaatttgactccaaaagaattgttcagcagctgcgagcctgcggcgttttagaaacgattcgcattagtgcacagagctacccttccaggtggacatacatcgagttctacagtcgctacggcattctcatgaccaagcaagagctttccttcagcgataaaaaggaggtgtgcaaggtggttttacacagactcatccaggattctaatcagtaccagtttggtaaaaccaaaattttcttcagagcaggacaagtggcttatttagagaaacttcgattggataaactgaggcagagttgtgttatggtacaaaagcacatgcgtggctggctccagaggaaaaaattcctccgagagagacgagccgccctgataatccagcagtacttccggggtcagcaaactgtgaggaaagctattactgcagtggccttaaaagaagcttgggcagccataatcattcagaagcactgccgtgggtatcttgttcgcagcctgtatcagttgattcgcatggccaccatcacaatgcaggcctacagccgaggattcctggcaaggaggaggtatcgaaagatgctggaggaacataaggctgtgatcctacagaaatacgcacgggcgtggctggccagacgcagattccagagtatccgacgattcgtgcttaatattcagcttacttacagggtccagcgtttgcagaaaaagctggaagatcagaacaaagaaaaccatgggctggtggagaagctgactagcctggctgctcttcgagctggggatgtggaaaagattcagaagctggaagcagaactagaaaaagcagccactcacaggcgaaattacgaggagaaggggcaagagatacagggatgctgtggaagagaaattggcaaagcttcagaagcataattcagaactggaaacacagaaagaacaaatacagctgaagcttcaagagaagactgaagagttaaaagaaaaaatggacaacctcaccaagcagctctttgatgatgtacaaaaggaagaacggcaaagaatgcttcttgaaaaaagttttgaactgaaaacacaagactatgagaagcagattcagtctttgaaagaagaaattaaagctctcaaggatgagaagatgcaactccaacacctggtggagggggagcacgtcacttctgatggcttgaaggcggaagtggcccgcctgagcaagcaggtcaagacaatctctgagttcgaaaaagagatagaactacttcaggcacagaagatagatgtggagaaacatgtgcagtcacaaaaacgggaaatgagagaaaagatgtcagagatcaccaaacaacttctcgaaagctatgacattgaagatgtaagaagcaggctctctgtggaagatctggaacatttaaatgaggatggagaactttggtttgcttatgaaggactaaagaaagcaacacgtgttttggagagccatttccagtctcagaaggattgctatgaaaaggagattgaagctttgaacttcaaagtggtgcatctcagtcaagaaatcaaccacctgcagaagttattcagagaagaaaatgacatcaatgaaagcatccgtcatgaagttaccaggctaacatcagagaacatgatgatcccagactttaaacagcaaattccagaattggagaaacagaagcaagatcttgaaatccgcctgaatgaacaagctgagaaaatgaaaggaaaactagaagaattgtctaatcagttacatcgcagtcaagaggaggaaggaacacaaagaaaggccttggaagcccaaaatgaaatacataccaaagagaaggagaagctgattgataagattcaagaaatgcaggaggccagtgaccacttgaagaaacaatttgaaactgaaagtgaagtcaagtgtaacttccggcaggaagcatcccggctcactttggaaaacagggatcttgaagaagaattagacatgaaagacagagtgattaaaaagctacaagatcaagtcaagacactaagcaagacaattggaaaagccaatgatgtgcactcgtcctcaggacccaaggagtaccttggaatgctgcaatacaagagagaagacgaggccaagctcattcagaacctcattcttgacttgaagccccgtggcgtggtggtgaacatgatccccgggctgccggctcatatcctgttcatgtgtgtgcgctacgcagactctctgaatgatgccaacatgctgaagtccctcatgaacagcaccattaatggcatcaagcaggtggttaaggaacatttagaagactttgaaatgctgtccttttggctttccaacacttgtcattttctcaattgcctgaagcagtacagcggagaagaggaattcatgaagcataatagtccacagcagaataagaattgcttgaacaattttgacctttcagaatacagacagattctcagtgatgtggctatacgaatatatcatcaatttattatcataatggaaaagaatatccaaccgataatagttccgggaatgctggagtatgagagcctgcagggcatttccggcctgaagcccacaggcttccggaagcgctcctctagcatagacgacacggacggctacaccatgacctccgtcctgcaacagctgagctacttttacaccaccatgtgccagaacggcctggaccccgagcttgtgaggcaggcggtgaagcagctcttcttcttgatcggggcggtcacgctgaacagcctcttcctgcgcaaggacatgtgctcctgcagaaaagggatgcagatcaggtgcaatatcagctacttagaagaatggcttaaagataagaacttgcagaacagcttagcaaaggaaactttggagcccctctctcaggcagcctggttgcttcaggtcaagaagaccacagacagtgatgccaaggagatctacgaacgctgcacctcactgtctgctgtgcagatcataaagatccttaattcatacacacctatagatgactttgagaagagagtgactccatcctttgttcgcaaagtacaggctctcctaaatagccgggaggattcatcacagctgatgttggataccaaatatctctttcaagtcacatttccttttaccccctctccacatgctctggaaatgattcagatccccagcagtttcaagctaggctttctgaataggttatagcaggagaaaaagtcaatgcactttttcttcaaaagctaagtgaaggttcaatatgagggatgtgttttattaattggcagtggaaattgggaatgtgatttaaggaagaaaacagacttttgctcaaatggaccacatcatctctcactcacagtgacaatgctgctcctgtaattttgtaagaattcacacacaccagctgtatttggaaaagccatgtctcactctcgaatctcagctggttttcactgaaattcctggagggctcatattttcttccacgtgcctcttgatctgttctgtcttgtggcagggctctaccaggagggagtgagatctggggacacagtggcttccaagttttctaaggttcatgtgaaacctgagtacatttacaaagctgcaagtggattctagtgctgagtcttccaggaaaaaatcccgtttggccaccgtgacctgccaaaagttctcttgccccatgcctgctggggacagaaggttttcatgaactctttttactgaaaatgccctgcatttaaaaatgtttattttagacccttctaaatttttttttttttttgagactccggagtctcgctctatcgccaggctggagtgtagtggcatgatctcggcttattgcaacctccgcttcctgggttcaaacaattctcctgcctcagcctcctgagtagctgggactacaggcacctgccaccacgcccagctaatttttgtatttttagtggagacaggtttcaccatgttggccaggatggcctcgatctcttgacctcgtgatccgcccacctcagcctcccaaagtgctaggattacaggcgtgtgccaccgcgcctggctgacccttttaatttttaagagtgttcaatccgagatgaatcatttgaagtatttttatatgtatatctatttaaaactaatatattattaaagcttaattgccatgccgtttatcttctctgaaagaacttcaaatcttacctgccaacatattcaccataattattttttaatacctttcatacaataacttttttaaaaaaacctcagattgaaaaagcaacctaaattactttcgctctctaatcagcatttcaatgtatttatttttaaatgttctcaaaaagtaactaaaaaattgtgtcggaccctacttttgagaaatctacgtttcccaagttttatgggaactggctattccttgtcccggcacaccttctcattccttcctttcagagcctaaaacctcatttgataagcactcctagtctctggcctgtggatccagtgctattctgtcaccaacctaagaatcccaattgcaccttctgtttctgacagtcacaggtgacagctgtgattctataatacagactggtgtcttagaggtaggaataatacatgattatgaagcatcaccctgctaatacataataatgtctttttatattataagtgattgagtttagttcatttcaatacattgtacatgaaaaaatgaaaagtagaactttgtaatactttaatcaataaaattaattaccaaannnnnnnnnnnnnnn

SEQ ID NO: 25329 - DNA, 1564 bp, Homo sapiens
acccacgcgtccggccccttggagtaaatacggctctgtgttccctagcagctgcgggagggtttggccgatgaagtacctgctcagcttagctaatcagattgaaggaagacatgtgtctttcctttttgtttaagcactcggtcccttatttatcagtaagcaggtttttaaaaatcttttatatcatttatgggatcaaacatatgattgtctgaaaacatcactttttgtggatttgtgtatccggtcaccaaacggtgaatattatagaagaatgggggaagaaaggatagaatattaaaactgctttgcatgggttttctgggaaattaggataacttcactgagaagacattgaatggaaattattcacccattttaaattggtgacctagggatcagagatttgtctttccaacagcttgtcattttttcatttctcttctcatttttcaggaaagttttgagtgttataaggtggaaggaaacatagtagcaatggatacttttttgaaaaattattgcattaccaagaaacagtagccaaagatatttgaagatcatgttcctcggctccattgtgggttattctagaaatccagtcttaaatctctccgctaaagtggacattccccataaaaattgtccagctgcctggctcttttgcaataacaacctttgattactgaatccctacactcaaactatagtgatatatcagtgtttgagagtgacctctagaaaaaagaaaagtgtttttagaaatgtgtacaagtcacccccaaatcctattgcttatcttgggttaaatttgagagtgattctctgtatataaatatgtgaaatattattatctcaacttagcacacgtgaagcaacatttctttcctacagagaggtgtcatggtaagatttcattccgaattcattgtttcatagagctatgatcaggccatttctgcaagcaatgtatgaccccacctgagcaaccacaaataggctctctgtgaaactacaaaggaagttatgtgtggcatccatgttggtttcgtctgtctgtaatgtgaattccagtatttgtttagtatttccagttgtctcctgctagcaatatgtacagtaacgcgtcaggcttgtgacatttgaataaggaaaaacagagttcctgttaagtgaataactttagcttttacaggggattatgatcaaaagtgattttagtacatcttaaatgatatcttatttctacatggaaagaagttatagaatcttcatagagttctatgagaaaaaatatacttgctatctataaaaaagagaaaaaagaaaaaaaatgagaaaaaagtaagaaaaaaaaaaatcctgtcctaggcttttactcttgatcttcaaaggcacgcagggtttaatggttccttgggttattattttgcagttttgttttttattttgccttaagtaatgatagaagatatatatggccggacacatatgtataaacttttcagcagcatttttaataataaaatatcacagtattttctaaaaaaaaaaaaaaaaa

SEQ ID NO: 25330 - DNA, 3465 bp, Homo sapiens
gtcgacccacgcgtccgcccagctggtgctgaagctcgtcagttcaccatccgccctcggcttccgcggggcgctgggccgccagcctcggcaccgtcctttcctttctccctcgcgttaggcaggcagccgagagtcctgcaccgtggggtgtgtatgtgtgttcacgcgcatgcgtgtgcctgtgtgtctgtgcgtctgcatcaccaaccttctgttagggctaactgtgaggctgaagcttgcactatgcctatacgtggcaggtgacagcagggacatgtctcgggagatgcaggatgtagacctcgctgaggtgaagcctttggtggagaaaggggagaccatcaccggcctcctgcaagagtttgatgtccaggagcaggacatcgagactttacatggctctgttcacgtcacgctgtgtgggactcccaagggaaaccggcctgtcatcctcacctaccatgacatcggcatgaaccacaaaacctgctacaaccccctcttcaactacgaggacatgcaggagatcacccagcactttgccgtctgccacgtggacgcccctggccagcaggacggcgcagcctccttccccgcagggtacatgtacccctccatggatcagctggctgaaatgcttcctggagtccttcaacagtttgggctgaaaagcattattggcatgggaacaggagcaggcgcctacatcctaactcgatttgctctaaacaaccctgagatggtggagggccttgtccttatcaacgtgaacccttgtgcggaaggctggatggactgggccgcctccaagatctcaggatggacccaagctctgccggacatggtggtgtcccacctttttgggaaggaagaaatgcagagtaacgtggaagtggtccacacctaccgccagcacattgtgaatgacatgaaccccggcaacctgcacctgttcatcaatgcctacaacagccggcgcgacctggagattgagcgaccaatgccgggaacccacacagtcaccctgcagtgccctgctctgttggtggttggggacagctcgcctgcagtggatgccgtggtggagtgcaactcaaaattggacccaacaaagaccactctcctcaagatggcggactgtggcggcctcccgcagatctcccagccggccaagctcgctgaggccttcaagtacttcgtgcagggcatgggatacatgccctcggctagcatgacccgcctgatgcggtcccgcacagcctctggttccagcgtcacttctctggatggcacccgcagccgctcccacaccagcgagggcacccgaagccgctcccacaccagcgagggcacccgcagccgctcgcacaccagcgagggggcccacctggacatcacccccaactcgggtgctgctgggaacagcgccgggcccaagtccatggaggtctcctgctaggcggcctgcccagctgccgcccccggactctgatctctgtagtggccccctcctccccggccccttttcgccccctgcctgccatactgcgcctaactcggtattaatccaaagcttattttgtaagagtgagctctggtggagacaaatgaggtctattacgtgggtgccctctccaaaggcggggtggcggtggaccaaaggaaggaagcaagcatctccgcatcgcatcctcttccattaaccagtggccggttgccactctcctcccctccctcagagacaccaaactgccaaaaacaagacgcgtagcagcacacacttcacaaagccaagcctaggccgccctgagcatcctggttcaaacgggtgcctggtcagaaggccagccgcccacttcccgtttcctctttaactgaggagaagctgatccagtttccggaaacaaaatccttttctcatttggggaggggggtaatagtgacatgcaggcacctcttttaaacaggcaaaacaggaagggggaaaaggtgggattcatgtcgaggctagaggcatttggaacaacaaatctacgtagttaacttgaagaaaccgatttttaaagttggtgcatctagaaagctttgaatgcagaagcaaacaagcttgatttttctagcatcctcttaatgtgcagcaaaagcaggcaacaaaatctcctggctttacagacaaaaatatttcagcaaacgttgggcatcatggtttttgaaggctttagttctgctttctgcctctcctccacagccccaacctcccacccctgatacatgagccagtgattattcttgttcagggagaagatcatttagatttgttttgcattccttagaatggagggcaacattccacagctgccctggctgtgatgagtgtccttgcaggggccggagtaggagcactggggtgggggtggaattggggttactcgatgtaagggattccttgttgttgtgttgagatccagtgcagttgtgatttctgtggatcccagcttggttccaggaattttgtgtgattggcttaaatccagttttcaatcttcgacagctgggctggaacgtgaactcagtagctgaacctgtctgacccggtcacgttcttggatcctcagaactctttgctcttgtcggggtgggggtgggaactcacgtggggagcggtggctgagaaaatgtaaggattctggaatacatattccatgggactttccttccctctcctgcttcctcttttcctgctccctaacctttcgccgaatggggcagcaccactgacgtttctgggcggccagtgcggctgccaggttcctgtactactgccttgtacttttcattttggctcaccgtggattttctcataggaagtttggtcagagtgaattgaatattgtaagtcagccactgggacccgaggatttctgggaccccgcagttgggaggaggaagtagtccagccttccaggtggcgtgagaggcaatgactcgttacctgccgcccatcaccttggaggccttccctggccttgagtagaaaagtcggggatcggggcaagagaggctgagtacggatgggaaactattgtgcacaagtctttccagaggagtttcttaatgagatatttgtatttatttccagaccaataaatttgtaactttgcaaaaaaaaaaaaaaaagcggccgctttttttttttttttgagacggagttttgctcttgttgctcaggctggagtgcaatggcgcgatctcggctcaccgcaacttccacccgggttcaagcgattatcccacctcagcctcccaagtagctgggattacaggcatgtgccaccacacctggctaactttgtatttttagtagagacggggtttctccatgttggccaggctggtctcaaactcccaacctcaggtgacccacccaccccgcgttaattaattctagaagacttccga

SEQ ID NO: 25331 - DNA, 2171 bp, Homo sapiens; identical to SEQ ID NO: 22408
  misc_feature 1, 2, 3, 4, 5, 6, 7, 8, 9, 10, 11, 12, 13, 14, 2166, 2167,2168, 2169, 2170, 2171: n = A,T,C or G

SEQ ID NO: 25332 - DNA, 828 bp, Homo sapiens
  misc_feature 1, 2, 3, 4, 5, 6, 7, 8, 9, 10, 11, 12, 13, 14, 820, 821,822, 823, 824, 825, 826, 827, 828: n = A,T,C or G
nnnnnnnnnnnnnngggatggggacttgacatttaaatgtattaccattaggccctatctgtcaaaaggtctttcaggacatcaaggcacgcaagtacacagcctctgtaaaccagaaccagtccattccatagtccatgatcttcttatcaggagaaagttgttgaaatcagtctcttgtctaatcaaagctgtagttatggcagttggctggattagtgtccgatgttggatgttccagttggaattggcaaagggcctcttggactcgtccccgactgtactgggcgttggcggcgagtccgcgaacactgcgcatgcgcgagccggaagctgccgcccgcggcggaaggggcggacccgggagactgaggacttggattgcttaaggacaccaggcaggcgcgacagccttcagcctctccctctgcagttttggccggttcctttaacttgccttcatctggggctgtttggtatttccacgtgccttgggcccgcccactgcagcctccatcttggaagcggccgccggcgcctagaactgtatttcagaaaaaagaaactacagttttagcatgcagaaaggaaaagggagaacaagccggatcagaagacgaaaactctgcggaagttctgaatcaagaggagtgaatgagagccacaagtctgaatttatagagctgaggaagtggctgaaagctaggaagtttcaagattcaaacttagcgcctgcttgttttccaggtaccttccgagatggatgggtctcctactacaaccagcctgtgtttctggctggcatgggtcttgctttccnnnnnnnnn

SEQ ID NO: 25333 - DNA, 993 bp, Homo sapiens
  misc_feature 991, 992, 993: n = A,T,C or G
acgcggggctggttcctcttgggtccttccggcgtcgccggagtgaattgatccgggagttgaagagggctgcaaggtgggaagtgaagtcagtgcctcagttgctgatcagtgtgttttttgtgtccaattcttttatcaccaaaaaagagaagaaatattgcagtgaatgaagattcctctgcattttagcactgctttttcaactgtagttggcttttgaatgaggatgacaatggaagagatgaagaatgaagctgagaccacatccatggtttctatgcccctctatgcagtcatgtatcctgtgtttaatgagctagaacgagtaaatctgtctgcagcccagacactgagagccgctttcatcaaggctgaaaaagaaaatccaggtctcacacaagacatcattatgaaaattttagagaaaaaaagcgtggaagttaacttcacggagtcccttcttcgtatggcagctgatgatgtagaagagtatatgatttggaacgaccagagccagaatttccaagacctaaacgaaaaaggcacgagcacttaaacaaattctcagtaagatcccagatgagatcatgaccgagtggggtgtctggggacaatcaaggtatagctggtggccttaaagaaattcttgtttaccggggaataatggtttccggaaatttcattcccaaaacggggggcttgaccacaaaggaggattgttatgttttcccagttttcgggtttctggaagcgttttagtgggggggatatggttgtctgggtgtgtcgggtattttcaatctttatttgactctaaggggcgaggtttttgaaaaaatgctagggggaaagggggtagctagttaatgggggatattataatcccgggaaagagaagagataggatgcacttgatgtgaacaagagaagttgtttgtaaaacagtgttacgtagctttgtgtgctggtgttgagactaaaaaggtcnnn

SEQ ID NO: 25334 - DNA, 3983 bp, Homo sapiens; identical to SEQ ID NO: 21101

SEQ ID NO: 25335 - DNA, 3983 bp, Homo sapiens; identical to SEQ ID NO: 21101

SEQ ID NO: 25336 - DNA, 3595 bp, Homo sapiens; identical to SEQ ID NO: 22463
  misc_feature 1, 2, 3, 4, 5, 6, 7, 8, 9, 10, 11, 3592, 3593, 3594, 3595: n = A,T,C or G

SEQ ID NO: 25337 - DNA, 2425 bp, Homo sapiens
cccaatccacgttttgttttattttgtctttttgcctctcaaatgcatggaaattggctgctagtagctttgctacaggagaaaatcgctaatctgtagtgcaaaatcggcgcacaggggttttctctgagattgtctagacgccgcgcgggcgggtcggaggcgccagacacattgtatccggagcgcggagctcgggagcaacagtcgccgcctctactctgtatctgcgccgccccaggcgcccagtgtccgcgctgggcctgggactgccctcgggggatggggcccacgcgggctttgatggggggccgggggccactttgtccacccaggcgaggcttgggtccagcgccggccacatcaactcccgggggatctagcagcgcggaggccaagcaggaggcccaggagccccgcgcgtcttccattagcgcagggacctccgggccacagctcagagaatcggaaggcctcctcccccttcccgagcgctgccactggggccgaggtttccagcaagaacccgcgtgtccctgcgcacgcacacacggtgcacacgtcagtccggcgcctccccgtgccccgactcacgcaggtcctcccgcgcgcccgcaacacgcccgcaggctcctgtgtctgctgccggggcagcggggccggaaggaagatggctgtgccacccacgtatgccgatcttggcaaatctgccagggatgtcttcaccaagggctatggatttggcttaataaagcttgatttgaaaacaaaatctgagaatggattggaatttacaagctcaggctcagccaacactgagaccaccaaagtgacgggcagtctggaaaccaagtacagatggactgagtacggcctgacgtttacagagaaatggaataccgacaatacactaggcaccgagattactgtggaagatcagcttgcacgtggactgaagctgaccttcgattcatccttctcacctaacactgggcttttcctgtctgtgttctcacttcgttattgtggggtttctgcagactgagtccctgtggaagagaggttgtgtcctgctcattgtggaaaaaaaatgctaaaatcaagacagggtacaagcgggagcacattaacctgggctgcgacatggatttcgacattgctgggccttccatccggggtgctctggtgctaggttacgagggctggctggccggctaccagatgaattttgagactgcaaaatcccgagtgacccagagcaactttgcagttggctacaagactgatgaattccagcttcacactaatgtgaatgacgggacagagtttggcggctccatttaccagaaagtgaacaagaagttggagaccgctgtcaatcttgcctggacagcaggaaacagtaacacgcgcttcggaatagcagccaagtatcagattgaccctgacgcctgcttctcggctaaagtgaacaactccagcctgataggtttaggatacactcagactctaaagccaggtattaaactgacactgtcagctcttctggatggcaagaacgtcaatgctggtggccacaagcttggtctaggactggaatttcaagcataaatgaatactgtacaattgtttaattttaaactattttgcagcatagctaccttcagaatttagtgtatcttttaatgttgtatgtctgggatgcaagtattgctaaatatgttagccctccaggttaaagttgattcagctttaagatgttacccttccagaggtacagaagaaacctatttccaaaaaaggtcctttcagtggtagactcggggagaacttggtggcccctttgagatgccaggtttcttttttatctagaaatggctgcaagtggaagcggataatatgtaggcactttgtaaattcatattgagtaaatgaatgaaattgtgatttcctgagaatcgaaccttggttccctaaccctaattgatgagaggctcgctgcttgatggtgtgtacaaactcacctgaatgggacttttttagacagatcttcatgacctgttcccaccccagttcatcatcatctcttttacaccaaaaggtctgcagggtgtggtaactgtttcttttgtgccattttggggtggagaaggtggatgtgatgaagccaataattcaggacttattccttcttgtgttgtgttttttttttgcccttgcaccagagtatgaaatagcttccaggagctccagctataagcttggaagtgtctgtatgattgtaatcacatggggacaacactcaaaatctaaattggacttctgttgtattctcaccactcaatttgttttttagcagtttaatgggtaaaaaagataaatttaaacctggaaagtaggaagcagaaaaaaaaaaaaaaaaaaa

SEQ ID NO: 25338 - DNA, 3228 bp, Homo sapiens; identical to SEQ ID NO: 22886
  misc_feature 1, 2, 3216, 3217, 3218, 3219, 3220, 3221, 3222, 3223, 3224,3225, 3226, 3227, 3228: n = A,T,C or G

SEQ ID NO: 25339 - DNA, 2071 bp, Homo sapiens; identical to SEQ ID NO: 21824

SEQ ID NO: 25340 - DNA, 2208 bp, Homo sapiens
  misc_feature 2208: n = A,T,C or G
gagtcgacccacgcgtccgcccactgtggcgcggcactgcttgaccgaggggctccggagcccagctgcaccggctgcggtttgagcgcccagggccggggtgcggggtggaccgcggcggcccttcgaccaaagttaaaaaaaatggaacctttttcctgtgacactttcgtggcattacctccagcaacagtcaataacaggattatttttggaaaaaattcagatagactctatgatgaagtacaagaggtggtttattttcctgctgtagttcatgataacctgggagaacgtcttaagtgtacatatatagaaattgatcaagttcctgaaacatatgctgttgtcctgagtcgcccagacgtggttgtggggggcagaaatgggagccaatgagcatgggagtttgcattgggaatgaagctgtatgtggaagagaagaagtttgtgatgaagaagcactattaggaatggaccttgtcagacttggccttgaaagagctgatacagctgaaaaagccctcaatgtcattgttgacttactagaaaaatatggccagggtggaaattgcacagagggtagaatggtatttagctatcacaacagtttcctgcgtgaggcgggccttcgggctggctcgccgtcggctgccggggggttggcctgggtgtcattggctctgggaagcggcagcagaggcagggaccactcggggtctggtgtcggcacagccatggcgggcgcgttggtgcggaaagcggcggactatgtccgaagcaaggatttccgggactacctcatgagtacgcacttctggggcccagtagccaactggggtcttcccattgctgccatcaatgatatgaaaaagtctccagagattatcagtgggcggatgacatttgccctctgttgctattctttgacattcatgagatttgcctacaaggtacagcctcggaactggcttctgtttgcatgccacgcaacaaatgaagtagcccagctcatccagggagggcggcttatcaaacacgagatgactaaaacggcatctgcataacaatggaaaaggaagaacaaggtcttgaagggacagcattgccagctgctgctgagtcacagatttcattataaatagcctccctaaggaaaatacactgaatgctatttttactaaccattctatttttatagaaatagctgagagtttctaaaccaactctctgctgccttacaagtattaaatattttacttctttccataaagagtagctcaaaatatgcaattaatttaataatttctgatgatggttttatctgcagtaatatgtatatcatctattagaatttacttaatgaaaaactgaagagaacaaaatttgtaaccactagcacttaagtactcctgattcttaacattgtctttaatgaccacaagacaaccaacagctggccacgtacttaaaattttgtccccactgtttaaaaatgttacctgtgtatttccatgcagtgtatatattgagatgctgtaacttaatggcaataaaatgaaaatatttgttaaaaaaaaagaaaaaaaaactatgtgttcgggcaccctgcgccccctggaaacgttccacacacaactgcataggccacaggggacacaaacgcaaaggcaaccgtgccaaacagtgcccacagaaacacgggccaagaaaagagcaagagaatacaccccacaaaacaacgcgccgcggaaacaccgagcctctctagaaaaacccagagggcatccagaagcacaaaggggaccatcacacggaccaccacacaaccggaaattacaaatagccgcagcccacggggggcacagcgcaagaacgaggaataatcaacaacaacaaacaacaaagcagaacacgagaagcaacaccacagagagcaaacgagcacgaccagaacacgaagcagcaacacacccagcagtacagagaaaccacaaacaacaaggcaaaagacaagcgggcaagcgcgaagcaacagcacacacacacacaaaagagcgacgagagaccagagccagactagacgtaccaacactacagggaacactacacagctacgacaccacacagaagacaaatcctactgacattacctaagcaacacgcccaccacacatatcaacactaacacaacacagagtcctagan

SEQ ID NO: 25341 - DNA, 1218 bp, Homo sapiens
  misc_feature 1, 2, 3, 4, 5: n = A,T,C or G
nnnnnctcctcgccgtctttcgccttcttttctttttcgcatcttgccgtgctctcctctctctcgtcgttgcctgtgtctcgtctctctgcctgtcctcgttcctgcttcccttccctgtctccttctgcctcgctcttggctctgtgttgtcctgcatcttggcctgctcgtcctgcgtttctgctctcttttctcttcggcttgcttgcgtcgtctctgttctcgttcctcgtttctgttcttggctccttgcttgcgtgctccttgtctttctccggtgtttgctgtctcttcctctcctgctcgtcccccttctttgtgttgctgttgtccctttctggccctgctctttggctgcgtcgtctgacgcatcgtctgtggctagtgtattgcttttcgttgctttgtctgtgtgtgttcgtggtgtgtctcggtcgtttgtcactcattctgtttgctgtctgcttgctgctccgctctctgttgctcggcttgttcgcgcttctttcatctgtgcttttctggtgtggtcgcaccccccacgcgcgcgccccggcgtaattttttttatttctgtgctcccctgggcacccccctggtgtgttgtgcccccccgtttttgccctccctcgtggctccccctctgggaggtggtgtcccgaaccgccccggtgggtcccccccggcgggctttttttatattgggggagagaactcccccgcccttgtgtgctcggccccccggtgttccttttggaccccgtttgtgccccatgttctaccgtgcgctaccgtgggcccccgctcgccccaccggcattggggtgttagaaacctctcctggggccccaggcgcgcgcgcccaacagatttttttgtgtttgtttttttttttttttttggaggaaagtcagcttccaccacacccatttcagtcgtcatggcgctccctaagccaaaggatggggctttctgtaatcccgactgctccaggctggaggtgagacctttcctagagaagcagttgagtgtaggagctgcctgggagggtgagactcgggaagcaagtggtgcctcccgggctgctgtattcaaggcaaggctcagccaggagaggtgggtaggagcagctgcacgtcaggtgcaagagaaacaggtgcaagagctgttacctgctctgctgcagcgcctggagtcaaggtgaacctcccgcgt

SEQ ID NO: 25342 - DNA, 2929 bp, Homo sapiens; identical to SEQ ID NO: 21129

SEQ ID NO: 25343 - DNA, 2597 bp, Homo sapiens; identical to SEQ ID NO: 23346
  misc_feature 1, 2597: n = A,T,C or G

SEQ ID NO: 25344 - DNA, 343 bp, Homo sapiens; identical to SEQ ID NO: 24711

SEQ ID NO: 25345 - DNA, 1289 bp, Homo sapiens; identical to SEQ ID NO: 25026

SEQ ID NO: 25346 - DNA, 1366 bp, Homo sapiens; identical to SEQ ID NO: 24535

SEQ ID NO: 25347 - DNA, 460 bp, Homo sapiens
  misc_feature 1, 459, 460: n = A,T,C or G
ngtacttcccggttcccttgcgtctgtagggttcttatgtccagtagggggatagtaaagtcccaacaggaaactcaagatagaagaaggagaatctgcgagtgtctgtctcctgtcaagcttccctaatacagccctggtagaacttcatcaacagtggaaggcatttgcaaagccaccagacattacattccagagccttgagaaaaactgatgaaaaaaaagtcatgaaaaaaagtcattcgcacaagtgacaccatggtgtgaagtcaaggagcacagactctggagtcagagggcttgagtcaacctgagcatcttcagctttgactgtgaagacacagctttgactctctgtgttgcagagatggtagtgcccactccagtgacgcttgtgaggattagttgagataataaatacaaaatgctgagcatcaaacctagagtagagaaaggtcnn

SEQ ID NO: 25348 - DNA, 2305 bp, Homo sapiens
  misc_feature 1, 2, 2298, 2299, 2300, 2301, 2302, 2303, 2304, 2305: n = A,T,C or G
nnagctgtttcctgtgtttaaaacgaacggaccaggatcctggttcatagttgtttcttttgataaaaaaaaaaacaagtggcttgcttacgttttcttcttttttcttcaccaaaggcaacatgaaagtaccactgaagtaaaacaccaactacctaccttactataaaggaaatgttaaaatttttttcacaataattttttcaattttcactattactgttgtaattattgattgtgattaaaatatttgctcccaggagaactcctgaccagtgggcatgtattcctattttatcctaagattttaatgagcaaaaaggggagagaatttgcaataacttcacaattaccttttctagtgcagttatattagaatgcatatgtttttaaaatgctagtataactagatagtatataatgtacagtataaagaggaatattgtgcttttgaaaagagtatactttttacttttatttatgtactagtagatgtaaaatttcacattgaaggtttatatatattggccaactcatatagaaattttatttataggaagctactactaaaaaaagtcactaactttgtgtacctataatccctaaattaaaattaaattttaattggctggctgtaatttgcattgagagaccttttactagtagctagtgttaggaagtgaacctaaaataagaaaatataatgatctgtgtttatcattagccttgtacaaatgtaaattactaatagtgatgttcttttgcaaggcatagaacatttgtatgaaaagacatttagtatgctttgaaaaaaactcagcttttagtttttttccattagaatactgcaaaacccatatatctttttaaaaaatttatgtactcacagtctttcccttgaagagaagattgaaaaagtctactgttcataaaccatgctaacattttccttttagctagttttgaaagtaaggaacaatacctgggaaataattaaacagaaggttaccattgtcagccagttggctatactgtggttagttctttcagaaattgtaaatatcttgtagcatattctgaaataatagagtaagttcttctcagagatgttaatatcatgtttttcatgttctaattagaatactttattacttacaaactcagaaatacgaacagaaatacagcagacgaacatatttattggtactgaaaagagacgtagtaaattaaatagaagaaatatatttataaagcttagtgaaacacaaaattagaatgttcatgtcaggcacaagggtttggattttgtgcaagctaatttggccacatttggcctggtgacagaactgttcataaggaagtaatatatagataaggtaggtagatatcagttgaatgccttatattgtatacattcctttcaaataaagaccttgagaaaacagcagagccaagtgaagatcacctaaagaactttgtggctaatttatacttcatgtagtagcagtgggtactgggcagggtctctttcccactctgatgatttgtgctcttatttttcctagatttacctcatctagggcatattcttttccctcttcctctttacctttcctggtcctgatccctctgtactcagttcccctaaattatggactacaaactaatatactagaaaagcatacacttattttatttgaatgcagaaatgctatctatcagtatatatacataagaatgtatattacagtatatctatatatacttaacactgtaactttcagtattccccagttagcgtacctaactctcctgtgggtttgttaattcttattagactactagagaaaaaccaactggcagtttgctaagcatatctactggtgttgtttctgcgccctcttttggctaattgatgtaattatactggctctaaagatttactgccccataagtaaatagtatagccacattctgaacatatcaaacagtacaacttaggaggagtgtatgtccaacaatgtctaaattctatgaaaatgacctgtttatgagtcatctagtcatcagatgggaggatgcctgctcattagtacgtccattaaatctgggtcacacccacttttcgattggataataagcattaggtattatttaacctatggagaaacctaaactgaaagggcttgaaatcactttcaacaaatgacgttggccaaaaaccacttcgttgcactaaaacaaatcacagtgagtgcgcctaaaaaaagagtgacctgtaagaacatggcgcgtgcnnnnnnnn

SEQ ID NO: 25349 - DNA, 3395 bp, Homo sapiens
  misc_feature 1, 2, 3, 4, 5, 6: n = A,T,C or G
nnnnnnagagatccctttctctgctgtgatccatactcgggggacctttacaaagtgccgtcacctttgacctgtctggctcacactaggactgtcaccactctagctgtctgtatctctcctgaccatgacatctatctagctgctcagcccaggacagacctctgggtgtataaaccagctcagaatagttggcagcaacttgcagatcgcttgctgtgtcgtgagggcatggatgtggcatatctcaatggctatatctacattttgggggggcgagaccctattactggagttaagttgaaggaagtggaatgctacaatgttaagagaaaccagtgggcattggtggctccactgccccattcttttttatcctttgacctaatggtaattcgagactatctctatgctctcaacagtaagcgcatgttctgttatgatcctagccacaatatgtggctgaagtgcgtttctctgaagcgcaatgactttcaggaagcctgcgtcttcaatgaggagatctattgtatctgtgatatcccagtcatgaaggtctacaacccagttagggcagaatggaggcaaatgaataatattcccttggtctcagagaccaacaactacagaattatcaagcatggccaaaaattgttgctcatcacctctcgcaccccacaatggaaaaagaaccgagtgacagtgtatgagtatgatactagggaagatcagtggattaatataggtaccatgttaggccttttgcagtttgactctggctttatttgcctttgtgctcgtgtttatccttcctgccttgaacctggtcagagttttattactgaggaagatgatgcacggagtgagtctagtactgaatgggacttagatggattcagtgagctggactctgagtcaggaagttcaagttctttttcagatgatgaagtctgggtgcaagtagcacctcagcgaaatgcacaggatcagcagggttctttgtaaatagtattttgagacactaagatgtttctactgctacggaatgtattttaaacacatatcgtttctttttcttggaaaaaaagttgattaggaccacagatttggtttagaaagggtaatattttgaaatactacaaggtttagacagtccatgaaatcgacctgtttaataatttaccatcctgaaagtccagaattaaaatatggaagcaagaactatataattgattaggatgcttggtaggtttttttcattgttcaaatattcattgcacagtggattgttttgattagttagtatgctttttttttaattaattcagtcttctgttaatttttaagttttggttagtgccacaaggaatttaactttttgatttgtataatagaaaactgaactaggaattgttagcggggttttgaaggatgtgtactttccttcaaaataaagtggtagattttcaaaattttacactagtcagttctttatattctaagttaaatgtagtttgtaaaattattttggttttcttctacaaaggaaaaaattggatttatatatataaggttactgcataatgatttcattttgataatgtgcagaatggcctcataagctcacagaaagtaaaaaaaaaaaaaaaaaaaaaaaaatcaggattccactgttttaaaagaaatctcagtttttattttggaatataaaatgtgtatttggtatatgtgaccaattttctatcccaaaaaacacccattcttagtaatgtcatgaattaaacacccttctaaaccaaaaaaaaaaaaaaaaaaacggtaacttgctttttatgtttgtgtttttaatttatgcccaatacatgctttactgactcagaggaacaattcctggacatataattgggtaatgcaaatttttatccactggtcatgatttgtcttaaaatgtttacttgcctccctaaaatattttggctgtgtaggtttggtgtttgtcctagaggattcttcaacagaaagtgatttattctttactgttttgtgaggtaatatggtttagaacatatgtataagctaaaaacagtattttactcagatcagtagttatcgtgtctatcagctataaaaaaaatcaactgccagccaagaactttaaaactttaagctgtgtattatagaaccgttttgtgtagcattggaatattgtccattttgtaagtcattgtgaatgttcttaattatcagcttgaaggtatttttgtattaaaagttgacattgaagaacctaagtggatgatgggatttggggccagtagtgaaagtatgtttcctctaaaatatttccctaaacagtggtatacatggttattttattatgagatttgtatatgttctgtgtttctctgtgaacaatgtttcagtctctctgtcaccatatgtaaggggaagtccacaaatatagactacattgcacaaaactaaaattgttaattacaagaaaatataggtgcttaccttttgaaggtttattaatacatatggttgtcacaatacgtatatatgataaatggtgtacatatacagatgtttatggtgtataaatttttctatacccaattagaattatcttcctgattctttattcaataacatgctaattcctcttctatgttctatagtgacagaatgctaacttttcttataccctggcagaggacagaggagtctggtctaggatggggaactgaatttttgaacgaaaaggaaagagaaaggatgaaaaaacaaacaaacaaaaaaacacacgataatgtttcttagtcattttgattggccatttgaacagtctacaggtttaacgttatttccagtgaagtaggatggctgacctagcaatacatgtttcttcaaaagggtaaacatgctttagtgacctaaagctaaattttgtacatttgacatcagggatgttataagtactgcacttaatacaaagctatttctcaattgtgttatttttgagacaaatttttcttcaccattaacttcttgttggtagctttttgttttgtaaaaattgagagatggcaatgcttatctcaaccagattatccatctgcagaattaaggtatgcaactggtaaataaaagacaaatgctccagtttgtctttctcaacctttgagttcttaacctttgagttaaaacctagtctaaatagtgggaatgtcttggtttacagtaaggttttcttgggaaggatcttggttttgtgatctatttgtgaattaaggagtagatgttaaccattattttatagataagtgatttgtacatggttagttataaataaaactggtactagaacccatataaaaaaaaaaaaaaagcat

SEQ ID NO: 25350 - DNA, 884 bp, Homo sapiens
  misc_feature 1, 2, 3, 4, 5, 883, 884: n = A,T,C or G
nnnnnaaataaacatttatttaatgaattttaaaatatcttggtgttaaaataatcatcagtacaagcatatctcagatatatttagctccagatcagcacaataaaacaaatattgcaataaagtaagtcacacaaattttttggtttccccagtgtatataaaagtcatgtttacactttactgtattctgaatgtgcaaaaacttgtctaaaacaacaatgtatatagtttaatttaaaaatgctttattgctaaaaaaatgctaaaatcatctgagccttcattgagttgggatctttttgctggtgtacagtctcgtctcaatgttgatgactactgatcagtatggtggttgctgaaggttgaactggctgttgcaatttcttaagcatccttaaatacattatccaagagtattaactgccgagtccgaccttcttgcaccataggcagaaccccttcctctctccacactgagtggcagcgtcctcgcagtggagaacagatgaccagcaaagctgtctgttttcggctgagggaagagactcctccctgaaaccatggtacaggtgttttctgtggctctcagcttcattgcagcttgaagatagacggcagtgtctgtttgaactgagacacatgagacccgggacaggagtatgatagggaaacgttcctgcctatccaggatgtgaagctggcgcaaccgcctaccacctctggagagacctcggcacatttcaccagttttccctgctaccctcatcagcactggtgctgctgcttgtcactggagtacctgaggctgagactggctgtccagctccgcccagctttgacccctgctccagggctgagcaggtaactcacggcaccggann

SEQ ID NO: 25351 - DNA, 430 bp, Homo sapiens
  misc_feature 424, 425, 426, 427, 428, 429, 430: n = A,T,C or G
aggtactccatcctgggcgacaaaaggagacctatctcaaaaaataaggaagggggaagggatgaagagagggagaaagggaagtttggaagaaaaggaaagaaaaaaatgtggaaaaaatcgatccaacaaaaaggtattaagactcataaagactgtcttatgtagcagtgaacatttgtcttatgatttgttaatggagagtccaccaatctttcaaatacgacatagagacaatgtcatttctaagttgaaagtggagttgagacaacagagtgattaaaatgattagtacctgcccgggcgcccgctatttattttaatttacctagaataatatgtcaagaatcatatactcgaagatgaaaattacagcttttctgaggatggtagcacaaagagataaaaagcttctccacactgnnnnnnn

SEQ ID NO: 25352 - DNA, 859 bp, Homo sapiens; identical to SEQ ID NO: 24383
  misc_feature 1: n = A,T,C or G

SEQ ID NO: 25353 - DNA, 2001 bp, Homo sapiens; identical to SEQ ID NO: 23410
  misc_feature 1, 2, 3, 2000, 2001: n = A,T,C or G

SEQ ID NO: 25354 - DNA, 392 bp, Homo sapiens
  misc_feature 1, 2, 384, 385, 386, 387, 388, 389, 390, 391, 392: n = A,T,C or G
nnacatactctttaaataaatgactgcattgttgtatttgagctctcctttttgttgttgttggttggcgagtggtttccatcaagtcatcatgggaaaataatcaagttccatattcacaggttaggataggatgtaataattctcagaagaacccttctagtatgatatttgcttatcaaaatgtctcagaaacaaaatatttgaaaatactgtcacatttattgtatttctctctgttcttatgccgtgcatgtagaatgtacctgcccgggcggccgctcgatcaagttatcagatctctatacctaggtcatactcatgaagcaaaaatgctgcacaccactgaaaataataacgtttaagatgtctatcaagattcannnnnnnnn

SEQ ID NO: 25355 - DNA, 416 bp, Homo sapiens
  misc_feature 329, 330, 331, 332, 333, 334, 335, 336, 337, 338, 339, 340,341, 342, 343, 344, 345, 346, 347, 348, 349, 350, 351, 352: n = A,T,C or G
ggcggccgaggtacgcgggttctacttgatatcttgttctttaaatttttttcacatatggtttgcctgatacaactgatttttataactgaaatttaaggaatctaacagctaaaactcagtaagtgcatatatctccttataacataaacccgttgctactctcagcaccctctcctcaattttttttcctgtagcatgtgatgcctgattaaactcattttcatttgcttttatttctaatatgggaacaatgagagtgaactctaaatataggttgtagtaataaaacatcattagcctaattattagaaaatgctaattaagtnnnnnnnnnnnnnnnnnnnnnnnnaggtacttttttctttctttttttttattatggttagctgtcacatacaacttttttttttttg

SEQ ID NO: 25356 - DNA, 4339 bp, Homo sapiens
  misc_feature 4331, 4332, 4333, 4334, 4335, 4336, 4337, 4338, 4339: n = A,T,C or G
ctatagggagtcgacccacgcgtccggtgcaagtgtcatcctggttatgctggaaaaacctgtaatcaagacgagcacatcccagctcctcttgaccaaggcagtgaacagcctcttttccaacccctggatcaccaagccacaagtttgccttcaagggatctaaatgagtgtggcctgaagccccggccctgtaagcacaggtgcatgaacacttacggcagctacaagtgctactgtctcaacggatatatgctcatgccggatggttcctgctcaagtgccctgacctgctccatggcaaactgtcagtatggctgtgatgttgttaaaggacaaatacggtgccagtgcccatcccctggcctgcacctggctcctgatgggaggacctgtgtagatgttgatgaatgtgctacaggaagagcctcctgccctagatttaggcaatgtgtcaacacttttgggagctacatctgcaagtgtcataaaggcttcgatctcatgcatattggaggcaaatatcaatgtcatgacatagacgaatgctcacttggtcagtatcagtgcagcagctttgctcgatgttataacgtacgtgggtcctacaagtgcaaatgtaaagaaggataccagggtgatggactgacttgtgtgtatatcccaaaagttatgattgaaccttcaggtccaattcatgtaccaaagggaaatggtaccattttaaagggtgacacaggaaataataattggattcctgatgttggaagtacttggtggcctccgaagacaccatatattcctcctatcattaccaacaggcctacttctaagccaacaacaagacctacaccaaagccaacaccaattcctactccaccaccaccaccacccctgccaacagagctcagaacacctctaccacctacaaccccagaaaggccaaccaccggactgacaactatagcaccagctgccagtacacctccaggagggattacagttgacaacagggtacagacagaccctcagaaacccagaggagatgtgttcattccacggcaaccttcaaatgacttgtttgaaatatttgaaatagaaagaggagtcagtgcagacgatgaagcaaaggatgatccaggtgttctggtacacagttgtaattttgaccatggactttgtggatggatcagggagaaagacaatgacttgcactgggaaccaatcagggacccagcaggtggacaatatctgacagtgtcggcagccaaagccccagggggaaaagctgcacgcttggtgctacctctcggccgcctcatgcattcaggggacctgtgcctgtcattcaggcacaaggtgacggggctgcactctggcacactccaggtgtttgtgagaaaacacggtgcccacggagcagccctgtggggaagaaatggtggccatggctggaggcaaacacagatcaccttgcgaggggctgacatcaagagcgtcgtcttcaaaggtgaaaaaaggcgtggtcacactggggagattggattagatgatgtgagcttgaaaaaaggccactgctctgaagaacgctaacaactccagaactaacaatgaactcctatgttgctctatcctctttttccaattctcatcttctctcctcttctcccttttatcaggcctaggagaagagtgggtcagtgggtcagaaggaagtctatttggtgacccaggtttttctggcctgcttttgtgcaatcccaatgaacagtgataccctccttgaaatacaggggcatcgcagacacatcaaagccatctgtgggtgttgccttccatcctgtgtctctttcaggaaggcattcagcatgcgtgagccataccatcctccatcctgattacaaggtgctccttgtagcaaattatgagagtgagttacgggagcagtttttaaaagaaatctttgcagatggctatgatgttatgtgttcggtgttgtaccatgagtagtattgacttcccttgagatatgatgtacaatgtgcttgtgaaattgacttaccctcttcacttaagttagttctggcctgacctgaactctgacttttactgccattcactttataaaataagggtgtgtaacatatcaagatacatttatttttatctgtttttttttttcctgttaaagacaattatgtagagtgggcacgtaatccctccttagtagtattgtgttttgtgtaaatgtgctattgatattaagtatttacatgttccaaatatttacagactctagttgcaaggtaaagggcagcttgtgatctcaaaaaaatacatggtgaaatgtcatccagttccatgaccttatattggcagcagtaggaaattggcagaagtgttgggttgtggtaacggagtgatgaatttttttttaatggccttgagtttgatctctgcaaaggataggaaacctttaggaagacaagaaactgcagttaatttagaactgtcactgtttcaagttacactttaaaaccacagcttttaccatcataacatggctctggtaatatgtaggaagctttataaaagttttggttgattcagaaaaaggatcctgttgcagagtgagaggaagcatagggggaaactccattggaacagattttcacacaacgttttaaattgatataagtttaggcagttgtagttcataacttatgttgctcatgttgtgctgtgtcaggatgggataggaagcaagtcccatgcttagaggcatgggatgtgttggaacgggatttacacacactggaggagcagggcaagttggaattctaagatccatgaacccccaactgtatttcctccctgcatattttaccaatatattaaaaaacaatgtaacttttaaaaggcatcattcctgaggtttgtcttaatttctgattaagtaatcagaatattttctgctatttttgccaggaatcacaaagatgattaaagggttggaaaaaaagatctatgatggaaaattaaaggaactgggattattgagcctggagaagagaagactgaggggcaaaccattgatggttttcaagtatatgaagggttggcacagagagggtggcgaccagctgttctccatatgcactaagaatagaacaagaggaaactggcttagactagagtataagggagcatttcttggcaggggccattgttagaatacttcataaaaaaagaagtgtgaaaatctcagtatctctctctctttctaaaaaattagataaaaatttgtctatttaagatggttaaagatgttcttacccaaggaaaagtaacaaattatagaatttcccaaaagatgttttgatcctactagtagtatgcagtgaaaatctttagaactaaataatttggacaaggcttaatttaggcatttccctcttgacctcctaatggagagggattgaaaggggaagagcccaccaaatgctgagctcactgaaatatctctcccttatggcaatcctagcagtattaaagaaaaaaggaaactatttattccaaatgagagtatgatggacagatattttagtatctcagtaatgtcctagtgtggcggtggttttcaatgtttcttcatggtaaaggtataagcctttcatttgttcaatggatgatgtttcagatttttttttttttaagagatccttcaaggaacacagttcagagagattttcatcgggtgcattctctctgcttcgtgtgtgacaagttatcttggctgctgagaaagagtgccctgccccacaccggcagacctttccttcacctcatcagtatgattcagtttctcttatcaattggactctcccaggttccacagaacagtaatattttttgaacaataggtacaatagaaggtcttctgtcatttaacctggtaaaggcagggctggagggggaaaataaatcattaagcctttgagtaacggcagaatatatggctgtagatccatttttaatggttcatttcctttatggtcatataactgcacagctgaagatgaaaggggaaaataaatgaaaattttacttttcgatgccaatgatacattgcactaaactgatggaagaagttatccaaagtactgtataacatcttgtttattatttaatgttttctaaaataaaaaatgttagtggttttccaaatggcctaataaaaacaattatttgtaaataaaaacactgttagtaataccaaaaaaaaaaaaaaaaaaacggggggccccgttattccctttagtgagggtaannnnnnnnn

SEQ ID NO: 25357 - DNA, 1361 bp, Homo sapiens
  misc_feature 1, 1361: n = A,T,C or G
nctggtcacacccagtgtgaacttgggtgtggtgttgctgttcgcgggggtgcccagtatggtgtataaagcatgcccgtgtaatggggtggaaaatacaatctttgtcgtggggtgatgtttctattggtccgctgccataatccatacctatgttcgggggtacaaattgtgtagatgttgttggcgcgctgcttttgtaccacgttgtgctgagaaagtttccacttgtgttagaatttcccctattgccattatggccgtgtaaaggggttggtaaacttcgtagcctgatatgataccctgtgttacatgtaagtgggtccgttcccagggaaggttcgttgtttacgcaagccaagtcaggttacgaggttctggtcccggtgaaggccagaagtgggatgtggtatccccttttgagttgaatgagagattttgaaatcggattatgtgaatatttgcgaagcactcgtggctattatgtttgtgggagtttagtaaactaccgttaaaatatatatatatataagacataatggagcctctcgggaggcgggtaacgttatagtatttgtcagaagttggggtctccgtgggcattgtgatccgtcccaggcagtggattaggaggccagaaggagatcccttccacggtgctaggctgagatggatcctctcagggcccaacagctggctgcggagctggaggtggagatgatggccgatatgtacaacagaatgaccagtgcctgccaccggaagtgtgtgcctcctcactacaaggaagcagagctctccaagggcgagtctgtgtgcctggaccgatgtgtctctaagtacctggacatccatgagcggatgggcaaaaagttgacagagttgtctatgcaggatgaagagctgatgaagagggtgcagcagagctctgggcctgcatgaggtccctgtcagtatacaccctggggtgtaccccaccccttcccactttaataaacgtgctccctgttgggtgtcatctgtgaagactgccaggcctaggctctctgtagagagtcttcaagatcccggagtggtagcgctgtctcctggtgaaggagtatttgtcacactggaatgtgactgtgtgtgtatgtatgtgtatatatatatatatatatatatataaacaagtttgttgacacctataacaaaaaaatataaaaccactacaacaaaaaaaacgcggcgcttcatttccggggcgcgaaacaaagggttttgaaagggccctcggtccaaggtgtatcggaacccccttttttgacaaaggtgaactgggcgggcccaatagaggggcgaaaatcgaaaacggtacttan

SEQ ID NO: 25358 - DNA, 1090 bp, Homo sapiens
  misc_feature 1089, 1090: n = A,T,C or G
aacttgtgcctcctgggttcaagcgattctgctgcctcagcctcccgagtagctgggattgcaggtacccatcagcccatgcccagctaattttgtatttttagtagagatggggtttcaccatgttggccaggctggtcttgaactcctgaccctgtgatccgaccaccttggcctcccaaagtgctgggattacaggtgtgagtcaccacacctggctgcatagtgttttaaatgtttgtgtgaagaatgagtttgtggaacaatttgatttgctgtggcctctatgcctaatgagctagtgtttctggcagctctctctacccaactttgcacttgtagttttgagtctttgtctctctggaatatgaacaggtttataaaacattccatggtgaacaattctgtcggctgcattatagccatgagtgaatagacagcattggctggtccaagctctgttattgagtatacaaggaactgatttttcttatgttagcactaagggcaaaaaccaatatttataatgtaagcactatccaggtaaaacactggcccaagatttggtaaagagatttcattgcaatgtaataactacagttttttacaaattggaacagctttggtgtgtcgtaatcaagggttttttttgtttgtttgtttcaaataagccatctgattgtggtgactggggcccatgtccaagacaattcctggcatattctgtcaccctcccgtggggcgatcactgtgtggggaccccattccccagttaaagtgtgtctctgtaccttacaacagcgattcaggacccaagtgtgaacaacactcagcccgccctctggagcgtgtgctgtctttagggccctacccaaagtcactgtaacagttaagtgtgtcattaacctttctgtctctttgcgccataaaaaaatgctcaaagttttagatgtagccactgtatgttgtacaaacgttggcgacatgtaaaataaaagtcataaaatgctcaaaaaccaaacccaccaaatggaggggcctaccgaaggcggccgaagcttattccctttgtgagggttaattttagcnn

SEQ ID NO: 25359 - DNA, 3252 bp, Homo sapiens; identical to SEQ ID NO: 24619
  misc_feature 1, 3241, 3242, 3243, 3244, 3245, 3246, 3247, 3248, 3249,3250, 3251, 3252: n = A,T,C or G

SEQ ID NO: 25360 - DNA, 1181 bp, Homo sapiens
  misc_feature 1, 1180, 1181: n = A,T,C or G
nactccttctgttatacattcttgtgcggatgtgaataaacatacttttacgtcattatcacaaatattaaaaatgtatgtcggtgacagcataaaagtaattaccctaactctttgcctatttagaaagaatgtggaatgggctaaactttctcaccaattattagaaagctaaatggataaatacttccctttttgtagatatttttctgtgcattgtaagttataggagcaggacatattttttgtacattgtcttgattgtttatactgcaggtaggtatttccagtgaatggaaacgttgaaatttatagatgggacaatgcacatacttcatatgtaaacaaagcatttttctaaataatttggaaaggattggatttagcaccgttaacttttaatacccatttattggctatttaaggtaaattataaaacctaaaattagtatcagtattttagatcctattattttttcaactttctattattttcacagtggaaaatttgcgtatagtattaaactattcttttttctgtctacctttatattttgaagtgtggttgtacttacgttaatagtaagtgtatttgtagaaagtttttcataaagaagagattaactttccatataaataaataccaggtatgaaattactgattttagtgcaatatctgtatgattatccagaactatcacttcagatgtttctattttgggcaccataactatttgagctcatatttttataattctgattgagaatttaggggcatggtaatttttaccaaaactgaagctggtaattttaagtaaagcaactaaatttaccctttacttattagttaaaaggaaaccaaggcatgtaggaaaatattggtacgttggaaaatgtgaaaagagctttactttcaaaatgtatgttcactggatggatttaggaccggttcctaatgggctatgctacccgttgatttaagtttaacttaagtgttgcaatgtcctcgggtcatatttctgtctatgaaggtcatgctacgtttttataagcctgggttaaaaaacaagaaaaaaaaaaaaaggggaaaaacaaagggaagtacacatgaagaggaaggtaaaaagagaaacaagaaaagttacacgtagacaaaatgtttcccgttgttataaagccnn

SEQ ID NO: 25361 - DNA, 1963 bp, Homo sapiens
  misc_feature 1, 2, 36, 49, 52, 73, 92, 102, 106, 1961, 1962, 1963: n = A,T,C or G
nnatcggaagcgactagagactctgcagagtgtcangccatgtggatcnatnagtgtggggggaacgtcgggnttaaaaaatataaaatacntttatttggngacntttcaaaatctgacttatctggaacaacagcttgtatactcatcataggatggagcaagaaaggtttgaggaagctaaaaacactctctgcctgatacagaacaagctcaaggaggaagagaagcgcctgctcaagagtggaagtaacgatgactcggacatagacatccaggaggacgatgaatccgacagtgagttggaagaaaggcggctgcccaagccacagacagccatggagatgctcatgcaaggaagacctggcaaacgcattgtgggcacgatgcaaggtggagactccgatgacaatgaggactcggaggagagtgaaattgacatggaagatgatgatgacgaggatgacgatttggaagacgagagcatttctctctcaccaaccaagcccaatcgaagggtccggaaatctgaacccctggatgaaagtgccaatgacttctgacccttttgccaagggaccctggcagattaaacccctcagacttgtaggtaaatgggaacttagaaggttaggaaggtaacccctgttttgtttactaagctggctggactcatgatcactgaagcaatacttatttctgctttagcctcctatgtttgcattccatgaagcttaaataagaattgaagcaaatccctaagatttatttttttccaccttatttatcttctaaaacttgaggaatgcatgtgttcttagtgattcacatccacgggacaaaaactcaagaagaaataagagctgacgccacacaagtcttggctgcttttgttactatacattttctctgagactccagcagagttggggctggaacttggcactggggactcatgtttggaatcgtaggggaacatctggctgttaatcacttgcacagttgagaacatttcctatacatcggcttttaattctagctcttatttcattttgtaatcttattttctttcgtctgcatgttcacaataccaagcattaaatgtattttaataactaaacttttctgaaagaaggttagctaaagttaaatgaaaacttggtttctttgaaaatcaggcaatagagacaggctccagatgaggaatcctccattttctgtccgaagctgacattcctctggcaagtccagttcaccttggattacagccaccttcatgtttccacggttggtactaaatctggaaactctggtgacctgggctgccctctcagaaactccagactcccatggcaatgacagccgggacacttttcttccctccagccagggtttctctaaaggagctttgttttgtctaaagtgtggcaagacatagtgcacaacacagggacaaaggcaggtttcctgcagctcgctacctaagtgtttctgtaggggaaggagccaattaagaaaaagtgttggtacagattcatgtttctgatttaaaaaaacaacaaccccaggattgaattaagtagagtaatagcactagaagaatttttctgttgtgaaattagaagtggagttggtttttttcttttttcttcttctttttttttaatatgaaaagtacttagctgggagtggtggcaagcgcccttgggtccagctactcaggaggccaaggtgggaggatcacttgagcccaggagttttagactagcctggacaactaagtgagactccatctctacaaaaaatttaaaaattagccaggtgtggaggggcatgcctgtggtctcagctattcaggaggctgaggcaggagaatcacttgagaccaggaagttgaggctgcaatgagccgtgatcatgccactgcactccagcctgggtgacagagtgagaccctgtcnnn

SEQ ID NO: 25362 - DNA, 869 bp, Homo sapiens
  misc_feature 851, 856, 857, 858, 859, 860, 861, 862, 863, 864, 865, 866,867, 868, 869: n = A,T,C or G
ccggccacggcagccatcgcgctttgcagttcggtctcctggtgtacggccaacgccaagtaggggattgcgttccctccagtcgcagagtttccctcctgtcgcccaggctggagtgaagtggcacgatctcggcttactgcaagctccgcctcccgggttcacgccattctcctgcctcagcctcccgagtagctgggactacagaccctatcagatttggatatgtccttcatatttgattggatttacagtggtttcagcagtgtgctacagtttttaggattatataagaaaactggtaaactggtatttcttggattggataatgcaggaaaaacaacattgctacacatgttaaaagatgacagacttggacaaacatgtcccaacattacatcccacttccgaagaactgaccattgctggcatgacgtttacaacttttgatctgggtggacatgttcaagctcgaagagtgtggaaaaactaccttcctgctatcaatggcatgtatttctggtggatgtgcagacacgaaggctgttagagtcaaaagaagaacttgattcactaatgacagatggaacatgctaatgtgctatactgattctgcgaataagatcgacagacctggagcatcagtgagagagtgcgagagatgtgggtgtgttatggccggccacaggaagggggtatttcggaaaaggatggcgacctaaaggttaggtgggggccaaagaaggtggaagtccgggggggattggttaaaccatggcaggtaggaggtagaggggcagatggtacggggaaaggttttaatggggaaggacggataaagggtacggggnctcannnnnnnnnnnnnn

SEQ ID NO: 25363 - DNA, 1113 bp, Homo sapiens
  misc_feature 1: n = A,T,C or G
ncgtccgatttgacaatcgtattttaaaattgaaactgatggaacattctttcttggtcttcaccatctgacaaattgaatggcaagaggtggattttgccagtttcttttcactgatgcagatttgtgttaagatagtactgaatggagtatttataaactggccctgagcatgcataaagcatcagtatctgacctttttttaaccttctaggaatttgaaataaatgtgtttgtgttgtctgattagatgatcattggtgtcttgccacaatgtttaaaaattactgtacaggaaagtcacagcaaagatagcagttgtgactgacatgtaggactttcacagttgtgccacatttttgcctaaaatttgggttatgacatttttcttggttcttatctgaaaatttcatctgtaacctttcatgtgtgttaagaaacactgatctgatcatttgggatttgctgaggcatttgtgagtcttccttataaacctgatgagcagatctcaactatctagcttgtgtgtcatcagaaaggtttatccctttgagagtatcaagtcctcagttaatgattcttgctttcatccctccagtatttgctgtgggagctcgttttattctttaatttggaattcagtaatttttcttctttattgacgaattcctcccctcacaaaactgttctttcccacctctctccatatctaattcctgattcttgttatttttaagtcataaatgtagccagtcataaatacataaatgttaaccttcgggttgcaaccttgtctcttgcagtttaaggtaatggatattgtagcccatttgaattttcttcactcttattctcgtaattctggagtttcttcagattgtggtgtattttattgtgctcctatgtaagatgaagaattaactattaaaattacattttcaacatacaaaagcttttgatgactggtaactggtatccttccaaataaatgcattgcttggtaacaaatgttagcttaattcagaatgaaatagttaacaaccctaatattgtaaaatttgaaaactgatagcagctgtcatatataacaattcttgggctgtttaaagggt

SEQ ID NO: 25364 - DNA, 2551 bp, Homo sapiens; identical to SEQ ID NO: 22616

SEQ ID NO: 25365 - DNA, 2595 bp, Homo sapiens; identical to SEQ ID NO: 24520
  misc_feature 1, 2, 3, 42, 2589, 2590, 2591, 2592, 2593, 2594, 2595: n = A,T,C or G

SEQ ID NO: 25366 - DNA, 2146 bp, Homo sapiens
  misc_feature 1, 2, 2136, 2137, 2138, 2139, 2140, 2141, 2142, 2143, 2144,2145, 2146: n = A,T,C or G
nngtgtgacactcggagtttgctggggtctccgtgggcgggaggactttccagcgcaatggcgactccctaagccccgcagcttctgcgcccgggaaagatatccaagagatgcaaagctctactgggcccaggctgccaccccagaggcccccttccgtcccggggccggggctaggccaaggcgggcaccaggactgcccagcctcccggcccttcgcactggtaaccggttccggggcggatgctttttgcatctgacccggcgcgcccggtgacgccttcgcgtggccacggaagtgcgggcggaggatccccagccgggtcccaagcctgtgcctgagcctgagcctgagcctgagccccgagccgggagccggtcgcgggggctccgggctgtgggaccgctgggcccccagcgatggcgaccctgtggggaggccttcttcggcttggctccttgctcagcctgtcgtgcctggcgctttccgtgctgctgctggcgcagctgtcagacgccgccaagaatttcgaggatgtcagatgtaaatgtatctgccctccctataaagaaaattctgggcatatttataataagaacatatctcagaaagattgtgattgccttcatgttgtggagcccatgcctgtgcgggggcctgatgtagaagcatactgtctacgctgtgaatgcaaatatgaagaaagaagctctgtcacaatcaaggttaccattataatttatctctccattttgggccttctacttctgtacatggtatatcttactctggttgagcccatactgaagaggcgcctctttggacatgcacagttgatacagagtgatgatgatattggggatcaccagccttttgcaaatgcacacgatgtgctagcccgctcccgcagtcgagccaacgtgctgaacaaggtagaatatgcacagcagcgctggaagcttcaagtccaagagcagcgaaagtctgtctttgaccggcatgttgtcctcagctaattgggaattgaattcaaggtgactagaaagaaacaggcagacaactggaaagaactgactgggttttgctgggtttcattttaataccttgttgatttcaccaactgttgctggaagattcaaaactggaagcaaaaacttgcttgatttttttttcttgttaacgtaataatagagacatttttaaaagcacacagctcaaagtcagccaataagtcttttcctatttgtgacttttactaataaaaataaatctgcctgtaaattatcttgaagtcctttacctggaacaagcactctctttttcaccacatagttttaacttgactttcaagataattttcagggtttttgttgttgttgttttttgtttgtttgttttggtgggagaggggagggatgcctgggaagtggttaacaacttttttcaagtcactttactaaacaaacttttgtaaatagaccttaccttctattttcgagtttcatttatattttgcagtgtagccagcctcatcaaagagctgacttactcatttgacttttgcactgactgtattatctgggtatctgctgtgtctgcacttcatggtaaacgggatctaaaatgcctggtggcttttcacaaaaagcagattttcttcatgtactgtgatgtctgatgcaatgcatcctagaacaaactggccatttgctagtttactctaaagactaaacatagtcttggtgtgtgtggtcttactcatcttctagtacctttaaggacaaatcctaaggacttggacacttgcaataaagaaattttattttaaacccaagcctccctggattgataatatatacacatttgtcagcatttccggtcgtggtgagaggcagctgtttgagctccaatgtgtgcagctttgaactagggctggggttgtgggtgcctcttctgaaaggtctaaccattattggataactggcttttttcttcctctgtcctctttggaatgtaacaataaaaataatttttgaaacatccatcagtgtatctatctatgtctcctagttttttcctcctccctcttttgctgtataatgagattgaagatataaagacattttgtaccctgnnnnnnnnnnn

SEQ ID NO: 25367 - DNA, 3286 bp, Homo sapiens
  misc_feature 1, 3282, 3283, 3284, 3285, 3286: n = A,T,C or G
nagtcgaccacgcgtccgctccagctctgcctgtaaggtctcggaagtacgaggcggaggggacgaaaaacggggggccagactgttgtggctgtggtggagacgagaaaccaggaagaagaggctcgcctcccactcggcgacagtaagcgaagcagccgaaggcgagcgccgacatcagcagctgccccctaaatcccgcccttcgtcttggcggcagcgggagactgagagacgcgcgcagcaggggcgggactggagaggggccccgcgcgcggatctcgcgagagcattagagggcggaagcgctatccgagcaggatgcggttcgtggttgccttggtcctcctgaacgtcgcagcggcgggagccgtgccgctcttggccaccgaaagcgtcaagcaagaagaagctggagtacggccttctgcaggaaacgtctccacccaccccagcttgagccaacggcctggaggctctaccaagtcgcatccggagccgcagactccaaaagacagccctagcaagtcgagtgcggaggcgcagaccccagaagacacccccaacaagtcgggtgcggaggcaaagacccaaaaagacagctccaacaagtcgggtgcggaggcaaagacccaaaaaggcagcactagcaagtcgggttcggaggcgcagaccacaaaagacagcactagtaagtcgcatccggagctgcagactccaaaagacagcactggcaaatcgggtgcggaggcgcagaccccagaagacagccccaacaggtcgggtgcggaggcaaagacccaaaaagacagccctagcaagtcaggttcggaggcgcagaccacaaaagatgtccctaataagtcgggtgcggacggccagaccccaaaagacggctccagcaagtcgggtgcggaggatcagaccccaaaagacgtccctaacaagtcgggtgcggagaagcagactccaaaagacggctctaacaagtccggtgcagaggagcagggcccaatagacgggcccagcaagtcgggtgcggaggagcagacctcaaaagacagccctaacaaggtggttccagagcagccttcccggaaagaccattccaagcccatctccaacccttctgataacaaggagctccccaaggctgacacaaaccagcttgctgacaaagggaagctttctcctcatgctttcaaaaccgaatctggggaggaaactgacctcatttctcccccgcaggaggaagttaagtcttcagagcctactgaggatgtggagcccaaagaggctgaagatgatgatacaggacccgaggagggctcaccgcccaaagaagagaaagaaaagatgtccggttctgcctccagtgagaaccgtgaaggaacactttcggattccacgggtagcgagaaggatgacctttatccgaacggttctggaaatggcagcgcggagagcagccacttctttgcatatctggtgactgcagccattcttgtggctgtcctctatatcgctcatcacaacaagcggaagatcattgcttttgtcctggaaggaaaaagatctaaagtcacccggcggccaaaggccagtgactaccaacgtttggaccagaagtcctaacagaatggtatattcctctggaaaaagatgaacgtcaccaatggattgtgctgctctcgtttcagctttgatttttttgtccttgagaaccttgtcctccctgctgatttgtttctaaatcaaaagaaatgaagaaaaaagtactgtgacctgagagacaccctcctctagaatttagtggcgggtctgggctggcagaggtagggggctgctttgggctttgcacctgcactttggtgacattgttcttctgtgttccctttatttatgctggtggcttccatccgttcctcctctgagggtgagtggaggggtatatggaaacacggctatgaccaaagggagatcccagcctgggcaggctgcgctgctgaccaccctccctggggcccgggctctgtaggaaagttggtccttgactgtggcattgcactctgcactgtttctctctgcagacctaggggaaaactgcaggtggaagtgcttttctactaaggcctcttactttgggggggatgtgccctacagaagacatagaagatggggaaatgccaatgggcaaagagctactttgaatacataattctcttcaaagacttcagcagcaaaccaaaacagcaggttaaaaaaaaagatgcttttttgggtgcaagtctaacctgtctagcatgagatcttcttgattttctgattattttatgtagcttgagacaaagtgaatcaacttccacttagttgtaccgagcataaaacagaacttgggcttcctggcagtgaggccactgtcccatcacagatttttaaaataaatatgatttgaagtagtgtgatctttcacacaatcatactcagtaggaactttttgaaatagggcaagtttatgtttcatgcgagaaaacatgaaggagggttttggttttggtctgcagtttttccaaagggcttttatgagatacatttcccacaaagtccattttgcctttgttgcctaaaacagacaaaatagacttagatttattaatagaaactatactctctgccaattttacctcagtgtatttaatggtcctttaatctgatataagatgccaagggtatttgataaaaattcttcttccatgccatgtcaggagttaatacaaatgaagaaattccgtgggttcccctgggataagtgagggtagtgtcttggacaacactattgtttgaaggtttatctcttctaatcatgctctaccgcattgtagagagcctaaagagagttgtttctgagctgatctcagggaaatacaaataacttgggagatgagggaaataagatgaattctgtgctgtcaaggcagtaagtctgaagaaaggaccatgcttcttatattatcttccaccttgcttaaaacagcccatagctttgagttgacattttcattcttggcggatagcctactttatgaaggtaaggaatgaactcctacccttcttgggtcattctctgtactgatgcggtagctttatacttgcgcccccctggggactcttaggttctcggcccctagaggtggttccgttgcctcctggcggcgctttcctctccccccggttgcgggcgcggcggctccccccgttgccccgtgtccccccttgttcccnnnnn

SEQ ID NO: 25368 - DNA, 2820 bp, Homo sapiens
ggcgtgcccgtctctccgccggccccctgcctcgcagtggtttctcctgcagctcccctgggctccgcggccagtagtgcagcccgtggagccgcggctttgcccgtctcctctgggtggccccagtgcgcgggctgacactcattcagccggggaaggtgaggcgagtagaggctggtgcggaacttgccgcccccagcagcgccggcgggctaagcccagggccgggcagacaaaagaggccgcccgcgtaggaaggcacggccggcggcggcggagcgcagcgatggccgggcgagggggcagcgcgctgctggctctgtgcggggcactggctgcctgcgggtggctcctgggcgccgaagcccaggagcccggggcgcccgcggcgggcatgaggcggcgccggcggctgcagcaagaggacggcatctccttcgagtaccaccgctaccccgagctgcgcgaggcgctcgtgtccgtgtggctgcagtgcaccgccatcagcaggatttacacggtggggcgcagcttcgagggccgggagctcctggtcatcgagctgtccgacaaccctggcgtccatgagcctggtgagcctgaatttaaatacattgggaatatgcatgggaatgaggctgttggacgagaactgctcattttcttggcccagtacctatgcaacgaataccagaaggggaacgagacaattgtcaacctgatccacagtacccgcattcacatcatgccttccctgaacccagatggctttgagaaggcagcgtctcagcctggtgaactcaaggactggtttgtgggtcgaagcaatgcccagggaatagatctgaaccggaactttccagacctggataggatagtgtacgtgaatgagaaagaaggtggtccaaataatcatctgttgaaaaatatgaagaaaattgtggatcaaaacacaaagcttgctcctgagaccaaggctgtcattcattggattatggatattccttttgtgctttctgccaatctccatggaggagaccttgtggccaattatccatatgatgagacgcggagtggtagtgctcacgaatacagctcctccccagatgacgccattttccaaagcttggcccgggcatactcttctttcaacccggccatgtctgaccccaatcggccaccatgtcgcaagaatgatgatgacagcagctttgtagatggaaccaccaacggtggtgcttggtacagcgtacctggagggatgcaagacttcaattaccttagcagcaactgttttgagatcaccgtggagcttagctgtgagaagttcccacctgaagagactctgaagacctactgggaggataacaaaaactccctcattagctaccttgagcagatacaccgaggagttaaaggatttgtccgagaccttcaaggtaacccaattgcgaatgccaccatctccgtggaaggaatagaccacgatgttacatccgcaaaggatggtgattactggagattgcttatacctggaaactataaacttacagcctcagctccaggctatctggcaataacaaagaaagtggcagttccttacagccctgctgctggggttgattttgaactggagtcattttctgaaaggaaagaagaggagaaggaagaattgatggaatggtggaaaatgatgtcagaaactttaaatttttaaaaaggcttctagttagctgctttaaatctatctatataatgtagtatgatgtaatgtggtcttttttttagattttgtgcagttaatacttaacattgatttattttttaatcatttaaatattaatcaactttccttaaaataaatagcctcttaggtaaaaatataagaacttgatatatttcattctcttatatagtattcattttcctacctatattacacaaaaaagtatagaaaagatttaagtaattttgccatcctaggcttaaatgcaatattcctggtattatttacaatgcagaattttttgagtaattctagctttcaaaaattagtgaagttcttttactgtaattggtgacaatgtcacataatgaatgctattgaaaaggttaacagatacagctcggagttgtgagcactctactgcaagacttaaatagttcagtataaattgtcgtttttttcttgtgctgactaactataagcatgatcttgttaatgcatttttgatgggaagaaaaggtacatgtttacaaagaggttttatgaaaagaataaaaattgacttcttgcttgtacatataggagcaatactattatattatgtagtccgttaacactacttaaaagtttagggttttctcttggttgtagagtggcccagaattgcattctgaatgaataaaggttaaaaatatatcaagttcttatatttttacctaagaggctatttattttaagaacttgatatatttcattctcttatatagtattcattttcctacctatattacacaaaaaagtatagaaaagatttaagtaattttgccatcctaggcttaaatgcaatattcctggtattatttacaatgcagaattttttgagtaattctagctttcaaaaattagtgaagttcttttactgtaattggtgacaatgtcacataatgaatgctattgaaaaggttaacagatacagctcggagttgtgagcactctactgcaagacttaaatagttcagtataaattgtcgtttttttcttgtgctgactaactataagcatgatcttgttaatgcatttttgatgggaagaaa

SEQ ID NO: 25369 - DNA, 975 bp, Homo sapiens
  misc_feature 971, 972, 973, 974, 975: n = A,T,C or G
ggatcttcggcaagactcacgtctccaacaaccaagctccccaagctgagccgggctggcggaagaggcacgtgcgctgctgaatggagctggtcgctggttgctacgagcaggtcctctttgggttcgctgtacacccggagcccgaggttgggggaccacgagcaatggactctgggtggctgacttcactcaccatgctcacactgcctccttgtcagcagtagctgtaaatagtcgtttgtggtcactgggagcaaagatgaaacaattcacatttatgaccatgaaaaagaagatttgagcatggggctctagtgcatcacagtggtacaataacttgcctgaaaattctatggcaacaggcatttaatcagtggaggcggaagatggactcatctgtatctgggatgcaaagaaatgggaatgcctgaagtcaattaaaagctcacaaaggacaggtgaccttcctttctattcacccatctggcaagttggccctgtcggtttggtacaggataaaactttaagaacgtggaatctgtgtagaaggaagatcagcattcataaaaaatataaaaaaaatgtcacatagtagaatggtcccaagaggagagcagtatgtagttatcatacagaatagatagacatctatcagcttgaactgcattcattagtgcacgtcacaaatgaaagagaattcctctggtaaatttcttcagaggttggctgagggctgggatgaagaagttcagggtttgagggatcactagtgtgcctctggaattaaggtcttgcacggggcaggatttccggtggaaatcaaccttgttggtccgctccggggttctcaaggggctggggagaagacgcttttgtgaaacaacgggtgtggtgtgcaggggaaaaccgttcgtgttgtaaagagaggtgcaagcgacacggggggagtgagtttcgtcgacatatannnnn

SEQ ID NO: 25370 - DNA, 1390 bp, Homo sapiens; identical to SEQ ID NO: 24490
  misc_feature 1, 1385, 1386, 1387, 1388, 1389, 1390: n = A,T,C or G

SEQ ID NO: 25371 - DNA, 934 bp, Homo sapiens
  misc_feature 100, 101, 102, 103, 104, 105, 106, 107, 108, 109, 110, 111,112, 113, 114, 115, 116, 117, 118, 119, 120, 121, 122, 123,124, 125, 126, 127, 128, 129, 130, 131, 132, 133, 134, 135,136, 137, 138, 139, 140, 929, 930, 931, 932, 933, 934: n = A,T,C or G
acagatacatggccccatcaatccactgccactgctgcctcttctgtgggtcgtgcaggccaatccatatcggctggcttctctgatagccacttatgtnnnnnnnnnnnnnnnnnnnnnnnnnnnnnnnnnnnnnnnnnggtttggtttggtttggtttggtttggggttcacaaagaagagatttttattacaaaaaaaaaaattccagtgaattgtgcaaaaaaggtggtttttaccccatcctaaaaaaaaacttttcaagggtgttttggagtaaaaaaaaggttataaagttggaattttaaattgtaaaattaacccttgagggtcaaagttttaaaaacagaactcattttgtgcaatgaacataaggaaagactcctgtaaaggttttttttttttttccttttaaaaaaaaaaaagctttggttaagggttgcaaacttttattggagtaaatttgaatgatcctactcctttggagtaaaaatagggcttaccagttttccaattgtatttaggttttggttggaatttgaaaaaaaaagaaaaaaagaaaaagaaaccctaaataaaataggtgaaagtttccctgactattcaggtgaatacccaaaaaaaaaaaaaaaaaaaaaaaaaaaaaaaaaaaaaaaaaaaaacgtcgactctagactcgagcaagcttatgcatgcggccgcaattcgagctcacttggccaattcgccctatagtgagtcgtattacaattcactggccgtcgttttacaacgtcgtgactgggaaaaccctggcgttacccaacttaatcgccttgcagcacatcccccttttcgcaagttggcgtattagcgaaaaggcccgcacggatcgcccttcccaacagtgcgcaatctgaatggcgattggatattgtaagcgttaatannnnnn

SEQ ID NO: 25372 - DNA, 1458 bp, Homo sapiens; identical to SEQ ID NO: 22244
  misc_feature 1, 1458: n = A,T,C or G

SEQ ID NO: 25373 - DNA, 1915 bp, Homo sapiens
  misc_feature 1, 1908, 1909, 1910, 1911, 1912, 1913, 1914, 1915: n = A,T,C or G
nacggagtctccctctattgcccaggctggagtgcaatggcacgatcttggctcgccacaacttctgcctcaccggttcaagcgattctcctgcctcagccacggcaccttgcaaatatcagctccttggaacaggtgaagttccaggtaccaatgccaatcagaggaaggcagtttggttcaggctttggagttagaaacacctgaagttgaatctgggctctgttgcttccttctttcatgggctagagcacgactctttacctctctcttggcctcaatttcctcacctgtaaaatagatgaggaagctgctcacttattattgtctcgttctgaaagcttggaaagctacatcgaagatgagctcttcattcagctttgatttgacctgtacccctggtgggggattgcactggcaacatttgggtctcagcaaaaaaaccaagcacacacatctttccttccatttattgaaaaacatctttgtaagatccattcattgaaaaacataatccatttattgaaaaatatctttgtaagatcacctgctaaatatgaaaatctgacttgaatttgtactctttaaagttgcgtatctgctctagtgggcaggacctagggcttaaaggggaacttcctttctccatttctaagaactgggactctaaaatgagaagctggttgtctgaagtaaccctgcaggtgtggttggggaaggtctgttttcttggatgaaggaactaaactaagcatatcagagcactgtcttaaccagttttatttccctggagatagaattcttttaaaaagagttagggagctggtaataggaagtgcctttcattataactacattttgcagagcttcatatttatatacaagcctcctaggtgatacactgttagcttgcagactttcctatgcttcatttctcctgttgctttcaaagaaggcaggagacacgtttaataacggagtatctggtgataagaattgcttgggcaaaccagctcatctggactctttctcagtcttggaagtgggaagaggaaaacttgtttccttcctgcttcttaaggatattctgagggtacactgatcaataacactaaatttggaatgaaaataccatgtgatgagtttagcctgctgatgcttccagtagatccttgtatagtttcaagatttaagttttccgatttcatataaatttcttaaagtcgaggaccttataagggtgcaatggatgtttgctaaatatgaaaaactgacttgaatttgcactctttaatgttgcgtatctgctctagtgggcaggacctagggcttaaaggggaacttcctttctccaattctaggaactgggactctaaaatgagaagctggttgtctgaagtaaccctgcaggtgtggttggggaaggtctgttttcttggatgaagggattaaactgagcaaatcactagaagtatgccctgtcccctgctcagaacactggggagctcaagagtgggctgcaatgtgcacccctcaggaatagctgtgaattgcaggtctactggctttttgctttttgtcttttgctgcaaggtaccccacgtacttaaccattctcaacagtgtaaatcagtgtcattttagaatgagatactcagcttgcttctaaagtcactgaattactgagtgagtctctcctttagagtcttcggcaaccaaattccagaattgaagagtctactactcagaggcaacaagattaaaaaaagaaaacacaaaaactgttgaggtgaaaaaaaaaaaccaagtgggccgtattacttactgggcgcgctttacaacgtcgtgactgggccctggcgttccccacttccggcttgaggacatcccctttcgccggtggcgtcnnnnnnnn

SEQ ID NO: 25374 - DNA, 924 bp, Homo sapiens
  misc_feature 1, 2, 920, 921, 922, 923, 924: n = A,T,C or G
nnacgcgtccgggcaaactttctgtaaagggccagatagtaaatacgttaggtgttgtgggccatgtggtccctgtcacaactattcaacttccccattttagtacaaaacagccagagacaatatataaactacagtatctgaaccttggcactgccaatattttggaccggataatactttgctataggaagctgcccagtgcatcctgggatgtttaggggaatccttggcttctacccacaagatgccagcattcaatgctgatagctgcccctcccccagttgtgacagtcaaaaatgtctccagacatggccaggtgtacctagaggccaaaattgtccctggttgagacccactgatgaatgtgtgcaatagtggttcccataaactgcatttaaaaaacagctgttaggtttcatttggctcaagggctgtcatttttcactcctccccccatagagtatgtaaaatgattagaaatgacaacagactatcatttagtatcagattagtgtgtgtatatgccataaattatttccttagcaattcctttagtatttttgttgcaataattctttaaacgctacatttgtaatgctgtcttggagcctaggaattatttttggagatatttatgcagacttccctctataatgatcggttttttattatggttaatccataaatattttgagatgtatctctaaaaaacgagcactctttgaaaacataaccacaatgccattattatacctacaaaaattaaccacaattccttaaaacataatgatgcctttttgaagagaggtatattgagacttcattctgggggaggaaacctttccggataactttatttaccttttcccttggccaggcttacaacattaggtttggaatatggtttgtatcaggnnnnn

SEQ ID NO: 25375 - DNA, 2487 bp, Homo sapiens; identical to SEQ ID NO: 20922
  misc_feature 1, 2, 3, 4, 5, 6, 7, 8, 2459, 2460, 2461, 2462, 2463, 2464,2465, 2466, 2467, 2468, 2469, 2470, 2471, 2472, 2473, 2474,2475, 2476, 2477, 2478, 2479, 2480, 2481, 2482, 2483, 2484,2485, 2486, 2487: n = A,T,C or G

SEQ ID NO: 25376 - DNA, 1120 bp, Homo sapiens
  misc_feature 1, 2, 3, 4, 1116, 1117, 1118, 1119, 1120: n = A,T,C or G
nnnncttataaatatccgacactgcgtgcccggagaacttatagcgccaggtttagaaaacagtgccccctctgtggcacagagcgatgtagttaatacagactcagcattgtgacacttcccaagaaggccaaacctctaaccgacattcctgaaatacgtggcattattcttttttggatttctcatttatggaaggctaaccctctgttgaccgtaagccttttggtttgggctgtattgaaatcctttctaaattgcatgaataggctctgctaacgtgatgagacaaactgaaaattattgcaagcattgactataattatgcagtacgttctcaggatgcatccaggggttcattttcatgagcctgtccaggttagtttactcctgaccactaatagcattgtcatttgggctttctgttgaatgaatcaacaaaccacaatacttcctgggaccttttgtactttatttgaactatgagtctttaatttttcctgatgatggtggctgtaatatgttgagttcagtttactaaaggttttactattatggtttgaagtggagtctcatgacctctcagaataaggtgtcacctccctgaaattgcatatatgtatatagacatgcacacgtgtgcatttgtttgtatacatatatttgtccttcgtatagcaagttttttgctcatcagcagagagcaacagatgttttattgagtgaagccttaaaaagcacacaccacacacagctaactgccaaaatacattgaccgtagtagctgttcaactcctagtacttagaaatacacgtatggttaatgttcagtccaacaaaccacacacagtaaatgtttattaatagtcatggttcgtattttaggtgactgaaattgcaacagtgatcataatgaggtttgttaaaacgatagctatattcaaaatgtctatatgtttatttggacttttgaggttaaagacagtcatataaacgtcctgtttctgttttaatgttatcatagaattttttaatgaaactaaattcaattgaaataaatgatagttttcatctccaaaaaaaaaaaaaaaaaaactcgagggggggtcccggtannnnn

SEQ ID NO: 25377 - DNA, 1817 bp, Homo sapiens
  misc_feature 1, 2, 1815, 1816, 1817: n = A,T,C or G
nngcatctgccaagcataatgcatcttttttgctctgccattcttgtgttgattggagaatttttctgtatgtaattagaaaaaaatgtaaaacatgatttatgtgaaatactgtatagtaaaagttggtctaatagtagaactttaaaattttttcttattgtgaggaatctgttaaaagtttaaagctttgctgaaaactgaattcattctcaggaatttcataaatcttctccccaggtaaataattgaaatagctgtaaaataagtagatagctgctgttaatataatacagtacattttggggggcatatgtgtggttggggggtccttaaaaatcaaaatttgccatttcagttggatgaattactagaggtaataacaaatcttactataaaatcaagaggtttaagaacatacactgggcagatgttgattccgtgcatgcccaccttttattaccaaacaaggttttgtttatatgattgtattagaaatgctcagacttccccagaaatgaaccataaattttggaacttcctttcagctcaagaggttcagctatattgtatttgtgcagtgtaatcactactatttctgctcggtttcctaaaaggaaaaaaaaggcgcagtggtgatgaccctcatgaatgagccacgcttctgcattcttcttagaaactgctgtgaaaaacaatttatgtttgcagggtttaaaaatcagtaaaaatgggaatgattgagctaaaacccactctatgagaaggaagattactgaaaagcatgtgacatattgctacaaagattttttttcctaaatgattcagtaattgaatgattatttaatatatagtgctatcaagcaatccctggtactttggacttccatggcttgttatataaaattacatttttacatgtaaaaataaactaaacaaatctaatgataaaatataatgtcagatccatgttctaaaaaatttttgtaatgacatgacattacaagagtataaaaatggacattaaatcatggccttgcattaaaatatggaaagcagagcagtacatattcaaatgtattcagaaagtcaaaagattacctatcgttctacaataaaatacatggaaatagcttgctatttttatatacatttccaaaatattaagataactttctgtaagagtcaatgattctgttcgactaaatagctgtcctttccaacacattgctacttttttaaatactgtatcataagttcagcctgtcatactttttgcattgatcgttatgaataccagaccatttgtaagtgtggttgaagagcaaaatgctaattgacatctctagtaaatactgttacaggattcatgaacttgaataattctacagtttgaaactctgatgctatatatacatggtataatgtattcagactttgattactacttatttaaaatggaatgtttaatggttgtgcatatggatgtgaagtgaaaatattagccttaactttaaattgggtgtggaagtggtatttggatattggtgaatagtcaccagtcaatttaaaagccctggtgaaaattgtctgaatactactgctgcggcaactagacttattgcctaattttatgtccttttaaaccctttaaatacgggccgttgggtgtggtgtttttcaccagggtgggggtcctggtgaactcacagcaccgggacagtctttagacgaaacagaacaggatgacacggggggggggcaaaaaaaagcggcgcaaggggggatagtttgtacgaacacgatctacatgannn

SEQ ID NO: 25378 - DNA, 2982 bp, Homo sapiens
tatagggagtcgacccacgcgtccgcggacgcgtgggccgcgatgcccgcgcgcccaggacgcctcctcccgctgctggcccggccggcggccctgactgcgctgctgctgctgctgctgctgggccatggcggcggcgggcgctggggcgcccgggcccaggaggcggcggcggcggcggcggacgggccccccgcggcagacggcgaggacggacaggacccgcacagcaagcacctgtacacggccgacatgttcacgcacgggatccagagcgccgcgcacttcgtcatgttcttcgcgccctggtgtggacactgccagcggctgcagccgacttggaatgacctgggagacaaatacaacagcatggaagatgccaaagtctatgtggctaaagtggactgcacggcccactccgacgtgtgctccgcccagggggtgcgaggataccccaccttaaagcttttcaagccaggccaagaagctgtgaagtaccagggtcctcgggacttccagacactggaaaactggatgctgcagacactgaacgaggagccagtgacaccagagccggaagtggaaccgcccagtgcccccgagctcaagcaagggctgtatgagctctcagcaagcaactttgagctgcacgttgcacaaggcgaccactttatcaagttcttcgctccgtggtgtggtcactgcaaagccctggctccaacctgggagcagctggctctgggccttgaacattccgaaactgtcaagattggcaaggttgattgtacacagcactatgaactctgctccggaaaccaggttcgtggctatcccactcttctctggttccgagatgggaaaaaggtggatcagtacaagggaaagcgggatttggagtcactgagggagtacgtggagtcgcagctgcagcgcacagagactggagcgacggagaccgtcacgccctcagaggccccggtgctggcagctgagcccgaggctgacaagggcactgtgttggcactcactgaaaataacttcgatgacaccattgcagaaggaataaccttcatcaagttttatgctccatggtgtggtcattgtaagactctggctcctacttgggaggaactctctaaaaaggaattccctggtctggcgggggtcaagatcgccgaagtagactgcactgctgaacggaatatctgcagcaagtattcggtacgaggctaccccacgttattgcttttccgaggagggaagaaagtcagtgagcacagtggaggcagagaccttgactcgttacaccgctttgtcctgagccaagcgaaagacgaactttaggaacacagttggaggtcacctctcctgcccagctcccgcaccctgcgtttaggagttcagtcccacagaggccactgggttcccagtggtggctgttcagaaagcagaacatactaagcgtgaggtatcttctttgtgtgtgtgttttccaagccaacacactctacagattctttattaagagttaagtttctctaagtaaatgtgtaactcatggtcactgtgtaaacattttcagtggcgatatatcccctttgaccttctcttgatgaaatttacatggtttcctttgagactaaaatagcgttgagggaaatgaaattgctggactatttgtggctcctgagttgagtgattttggtgaaagaaagcacatccaaagcatagtttacctgcccacgagttctggaaaggtggccttgtggcagtattgacgttcctctgatcttaaggtcacagttgactcaatactgtgttggtccgtagcatggagcagattgaaatgcaaaaacccacacctctggaagataccttcacggccgctgctggagcttctgttgctgtgaatacttctctcagtgtgagaggttagccgtgatgaaagcagcgttacttctgaccgtgcctgagtaagagaatgctgatgccataactttatgtgtcgatacttgtcaaatcagttactgttcaggggatccttctgtttctcacggggtgaaacatgtctttagttcctcatgttaacacgaagccagagcccacatgaactgttggatgtcttccttagaaagggtaggcatggaaaattccacgaggctcattctcagtatctcattaactcattgaaagattccagttgtatttgtcacctggggtgacaagaccagacaggctttcccaggcctgggtatccagggaggctctgcagccctgctgaagggccctaactagagttctagagtttctgattctgtttctcagtagtccttttagaggcttgctatacttggtctgcttcaaggaggtcgaccttctaatgtatgaagaatgggatgcatttgatctcaagaccaaagacagatgtcagtgggctgctctggccctggtgtgcacggctgtggcagctgttgatgccagtgtcctctaactcatgctgtccttgtgattaaacacctctatctcccttgggaataagcacatacaggcttaagctctaagatagataggtgtttgtccttttaccatcgagctacttcccataataaccactttgcatccaacactcttcacccacctcccatacgcaaggggatgtggatacttggcccaaagtaactggtggtaggaatcttagaaacaagaccacttatactgtctgtctgaggcagaagataacagcagcatctcgaccagcctctgccttaaaggaaatctttattaatcacgtatggttcacagataattctttttttaaaaaaacccaacctcctagagaagcacaactgtcaagagtcttgtacttcagtatctttgaagatgcttgagaaaacttctggatgaagcgaagcatactggcccctattgaaagtcttgttcaggaagatgccaggtagttctgattaacatgctacagctaag

SEQ ID NO: 25379 - DNA, 4031 bp, Homo sapiens
  misc_feature 1, 4003, 4004, 4005, 4006, 4007, 4008, 4009, 4010, 4011,4012, 4013, 4014, 4015, 4016, 4017, 4018, 4019, 4020, 4021,4022, 4023, 4024, 4025, 4026, 4027, 4028, 4029, 4030, 4031: n = A,T,C or G
nctggctcgaagtacgtgcacattgtacaaagaacctcgtttttttcaacaaatgcagcctcctttcccatgcccgtgggcataaggagaaaggggtggtaatgcaatgctcccacttaattttaaagccagtcccagcagatcaaatgatagtttctccgtcaagcaatacttccacttcaacttccactcttcagagccctgtgggagctggcacacacactgtcacaaaaattcagtctggcataactgggacagtcatatcggctccttcaagcactcccatcaccccagccatgcccctagatgaagacccctccaaactgtgtagacatagtctaaaatgtttggagtgtaatgaagtcttccaggacgagacatcactggctacacatttccagcaggctgcagatacgagtggacaaaagacttgcactatctgccagatgctgcttcctaaccagtgcagttatgcatcacaccagagaatccatcagcacaaatctccctacacctgccctgagtgtggggccatctgcaggtcggtgcacttccagacccacgtcaccaagaactgtctgcactacacgaggagagttggttttcgatgtgtgcattgcaatgttgtgtactctgatgtggctgctctgaagtctcacattcaaggttctcactgtgaagtcttctacaagtgtcctatttgtccaatggcgtttaagtctgccccaagcacacattcccacgcctacacacagcatcctggcatcaagataggagaaccaaaaataatatataagtgttccatgtgcgacactgtgttcaccctgcaaaccttgctgtatcgccactttgaccaacacattgaaaaccagaaggtgtctgttttcaagtgtccagactgttctcttttatatgcacagaagcaacttatgatggaccatatcaagtctatgcatggaacattgaaaagtattgaagggcctccaaacttgggtataaacttgcctttgagcattaagcctgcaactcaaaattcagcaaatcagaacaaagaggacaccaaatccatgaatgggaaagagaaattggaaaagaaatctccatctcctgtgaaaaaatcaatggaaaccaagaaagtggccagtcctgggtggacgtgttgggagtgtgactgcctgttcatgcagagagatgtgtacatatcccacgtgaggaaggagcacgggaagcaaatgaagaaacacccctgccgccagtgtgacaagtctttcagctcgtcccacagcctgtgccggcacaaccggatcaagcacaaaggcatcaggaaagtgtacgcctgctcgcactgcccagactccagacgtacctttaccaaacgtttgatgctggagaagcacgtccagctgatgcatggcatcaaggaccctgacctgaaagaaatgacagatgccaccaatgaggaggaaacagaaataaaagaagacactaaggtccccagtcccaagcggaagttggaagaaccagttctggagttcaggcctccccgaggagcaatcactcaaccactgaaaaagctgaaaatcaatgtttttaaggttcacaagtgtgccgtgtgtggcttcaccaccgaaaacctgctgcaattccacgaacacatccctcagcacaaatcggatggttcttcctaccagtgccgggagtgtggcctctgctacacgtctcacgtctctctgtccaggcacctcttcatcgtacacaagttaaaggaacctcagccagtgtccaagcaaaatggggctggggaagataaccaacaggagaacaaacccagccacgaggatgaatcccctgatggcgccgtgtcagacagaaagtgcaaagtgtgcgcaaaaacttttgaaactgaagctgccttaaatactcacatgcggacacacggcatggccttcatcaaatccaaaaggatgagctcagccgagaaatagccacagatgctccatgaggaaaatccctgtccacattggaataaaaaagacatttttgttacaaagtttgcagtataatagagttaacagtactgtctaggctgttgcaatatattctctttcaatgtaccttccttcacctcgtcgtatatatcctcgataagtattaaaacagtatttgagtttaaaagagtttgtatatatttaaatgaataactttttatactctttgttacatgtttgtatcagtatttagtggaaaaccatttgagttgttttgggttagaatttttctttttgtactgtttctttaaaacagagttcttagtaacaggggcagttcctgaattcaaataaaccattttgtatgtttggattttgaatgggttaactaattacaggctaaaataatgccttttttagtgtttttaatttttagaattcactacataaattgtaagtaattgtgggtctcaaaaacactaggaacttttaagtgtcttagcacttcctcgatgtgcctgccctgagggagtgagttcacatttgagacaactgcactccagtgtggacgtgcctttgtcttcaggccatgccgaagggtgtttaaagcagtcttgcaggtcgctcctttcccagccgtggataaaaactgaagctaggaatctaataaggaatgctgatttcctcagttccattttgaggaatggggaaggctattctaaagaaaaaaatgggatttgttttctcggcagatctgcaaggctggctttaagagcacaaggagggaaagtaacgaaagggctggactactataaaagttacaaatacgtagttagaccaatagatttatatagtcaggtttttgtcatgtaatttattaactaactattacagaaacacagctaagaatatcaagtatttctctggctcttgacagaaaaaaatcagttgacttaaccctttgctgtcaaaagagttggcgtttcctgttctgggtgctactgccaaacgttatggtacttagagtcgggatgcacaacttcaaccaccgacttatcaatgcagccgcctgtgtattgcaattggccgttaccttaagcactgagccacccgggtttagttcagccatttcaagaagtatatttaacgtcggtagttctgctttattaaaatgcagcagaggtactcttctgtcccttccgtttatagttctctgagagagttctattttttggttttgttttgtgttttcttttgcattttgtatcttgtatttatccctgaacatgttttgtaccttttttttttttttttttaagaaaaggaattcttttgtgtatatatagatacttgcatgatatactgtagtcaatgttcggttcctcaaaaggtcttgctgctgtcaggtgttatgcactccatccatcataactgtatgaaacacatttcatatgtaaataaacgtgggacatttggcccttgtgcttctgtgagagaattattgatggtgggtctctgacatctttgtgaagtttgggaagtaattaattgcagcgacaagctacagggtgttgcagaattcttcccactcagaagaatggcatattcgttctcattagtaatcagctattttgtcactttcttgttgactccatcagtacatgggtacaatccgagggtgtgaatttcagcttgaaattccattgctgttccttgttttgtttgtattgctctaagttgtattcataatagcactttcatatgtttctgcatttgaaccttgcaataagcctgtgtggtaggccacataggtccgaataacctagttttacagttgagggagctgagctcagattcagttctttgccgaagccctcatagctggtaagtggctttgcatattagaacccaaatattttgctctctaaatctaatgctcgctctatgtggttatgtacatattgacaaatattcatttattcaacaaataaaaagtatgtacaaaacatgaaaannnnnnnnnnnnnnnnnnnnnnnnnnnnn

SEQ ID NO: 25380 - DNA, 1710 bp, Homo sapiens; identical to SEQ ID NO: 22925
  misc_feature 1, 2, 3, 4, 1706, 1707, 1708, 1709, 1710: n = A,T,C or G

SEQ ID NO: 25381 - DNA, 1106 bp, Homo sapiens
  misc_feature 1, 2, 3, 4, 5, 6, 7, 1106: n = A,T,C or G
nnnnnnngtgacgacccttttccactgtgcaatttttgcattatttaccctcccccgacaacctgtatccttggccctttctgattttctctgcttggtctctttcggtcgatccggggattaccggggagtcggcctcggggctctgctctcctacctcagtctgccctaccctggaatggggaaaatgcggacatgccactcagtccggccgcgaacagtgctccagaactcagagagttttccagacgggtggagatcgcgttccctgcccgccgaggtcccatcgcttccctgctgggaagacaaatgaggcgctttagccgtctccacggccagcccctccctcataacccgagattctttgtgggctcttagtccatagctgcctttgaggtggtgtagaccttgctaaccaggacggcccagtaggcagagctcatttttattcctgtctgcaatcgtgcaaaaacgcctcttatggaaaagccagagcgccaggagtcagcaaaacacactaaagattgggcagtcactggggagaacactcagcccgcctgcacccaggtgaaatatacagccttgttgctcacacaaagcctgtttggtggtttcttcacacggatgcatgtgacatttggtgctgaagacccaggacaggaggactcctttgggagaccagtgccctgttgtcgccctcactccgtgaggagatccacctatgatctcaggtcctcagaccaaccagcccaaggaacatcttgccaatttcaaatcggataggagtgtcaggcctctgagtccaagctaagcccatcaaattccctgtgagctgcacgtgtacatccagatgactgaaggaactgaagatcacaaagaagtgaaagagcttactgatggccttcgccatgtgattgtcctggccaggtagtgatacaattttttccccgctgaatgtatttgaacttatcgaggtttaaatagggatctacacttgggttcttttgatcagcgctggccggtaataacggcggggcaaaaaaccgggttctggtggcacagcgggccggacgtttcacttggagggccaggtaaacggaatacan

SEQ ID NO: 25382 - DNA, 883 bp, Homo sapiens
  misc_feature 1, 2, 3, 883: n = A,T,C or G
nnnacgcgtccgggtgcagatttcgtccctgatcctttctgtgtggaattgactgagagtcttttacgattggaatggcatattaaaggaaagtacacgtgccttgggtgtttggtagagtgcataggagttgaacatattttggctatagataaaactattccatctcaaatcttagaggtgatgggagaccagtcattggtaccttatgcaagtgacctcttggaaaccatgtttagaaatcataagagtcatttgaaatcccagactgctgagagttcttggattgaccagtggcatgagacttgggtttctcctctcctttttatattgtgtgaaggaaacttggatcaaaaatcttacgtgattgattattacttgccaaaattattaagttacagccctgaaagcttacagtacatggtaaagattcttcagacttctattgatgctaaaactggacaagagcaatctttcccatccttagggtcttgtaatagcaggggggctctgggagctttgatggcatgtctgcgaatagctagagctcatggacatcttcagtctgcaactgatacctgggagaacctcgtgtctgatgcaagaataaagcaaggcttaattcatcagcattgccaagtaaggatagatacattaggcttgctttgtgaaagtaatcggagcacagaaattgtttccatggaagaaatgcagtggattcagttctttattacatacaatcttaacagccagtctccaggagtgcggcaacagcatctgttctcttctaaaaaggttgtttttgtaggatacgggaaagttcttaggtactttataaattggagcagagtaaatccaaacgtgaaccagagaatgagttaan

SEQ ID NO: 25383 - DNA, 4186 bp, Homo sapiens
  misc_feature 1, 4185, 4186: n = A,T,C or G
ngaaaggcacggctggaagaagagttgctgtctgtgaggggaacaccaagcagagctctggccgagagattgagattggaagagagaagaaaagagctgctacagaaacttgaagaaactactaaattaactacttatttgcattcacaacttaaaagcctctctgccagcaccctgtccatgtcatctgggagcagcctgggttccctggcatcgagtcggggctctctgaacacctccagcagagggtcactcaactccctcagttccaccgaactctattacagcagtcaaagtgatcagatagatgtggattatcagtataaactggacttccttctgcaagagaaaagcggttacattccttctggacccatcaccaccatccatgaaaacgaggtggtcaagtcccctagccagcctggccagagtggactctgtggagtggcagctgcagcaacaggccacactcctccactggctgaggccccgaagtctgtggcctccctgtcctcgaggtcctccctttcctccttgtctcctccaggctctcccttggttttggaaggcacgtttcccatgtcttcttctcatgatgcctctctccatcagttcactgctgactttgaagactgtgagttgagtagccattttgcagatatcagcctcatcgaaaatcggattttgctggattctgattcaggaggagcctcccagtctctttcagaggataaagaccttaatgaatgtgctagggagaagattgcctacttcaccagagcaaagataagcatcccatccctgccagctgatgatgtgtgattacatgacttaagaaattattttttcatctgttcactttcttagggagggtaaaagactgaagatttgtgtttttgttttggtgtttggttttttttggtaacgtaactgtcaactcttgaagaacttttatttcacatcagattttcaacacattaatttgtaaagtaccttgagtgtaatttttatatgcttaaaaaagaaaaaatcatataagaaagatgggataacctggtacacaaatgttgcccagtatgtgcgcattgccagtggacttcattttgtaaaaatggaatagaggcagtaccccaccatgtgtactgttgagccggctgttgagaaacaacttggttcagccggtggttttgcttctcctttgtgttcctgtgagtaggctgtgccgatggcagcagcgccacgtggtatctgtgcgctggcgaggagaggagcgctttccatttggaggcagtgtgagcacacgctggagtgcagcgttccaaagtccgcccgaaatggatgctgcgtccacggccatcacctgtgcgggaacacctggtttccttaagacaatttcctttttgtccttttatatttttctaaagaaaactaagatataaactaccaagtgctcttaagaataaaaataagaataagaatacaaaggagcactactcttggctacacgaaagatcttgggattcatgacactgagggcagggagaagaaagaacaccagccacgcagagatacaaataagctcatcaaatgagcagctggtttgtctcactcagcctgaatttgcattaagtgttcaaaagtgagtttctggcttgcactagtgttttgccctaaatctaaggatggtgcctagtggtggccctgtgttctgaggacagagagagctggaggggtggagggaaatgcatcggcactcatttggtgtaaccaagaagagggggaaagatgtcttgatagaatcaaagttgccaaaaacaaagaagagtttatcaagcagatttctaacatttagtagaaactacttcatagctctcatttttagggggttctatctataatttatggtaaatagttgggaggcaaagggaagaatgtgtgtggggggattattaatttgaagtataagctaaattgtttattaaaaagcctattttggatgaacaagtttagagagataaactgactaatgtgtcctccagtttagaatttcaccttacccgacccaggcacttcttaaaaacacagatcctcagtgcagctctgccagcatcaaggcttttaaaatatgtagtatttaggccatttaaaccatacttattactcaataacccaagaaacaattttgggttagccatctaatatagcaaataaaatagattttttaaagaaatccaaaattgtcttaaaggaatggaccccttgaagaaaaaaaaaaaaaagttttgttcctcagttagaatgctcactagctcactagcaagaatttttattttcttgaaagcaattatatatattttggaaagttcatgttattggaaattgaagcttcaggatagatcagtcggtttgggcagacgtatacttttcctgaggtccaaccttacagaattgtctgtgaacataacgaactggcagacggctttgaacaaaacggcctaagcggagtggcggagaacagtccttaaggcgcccagttcattctattagatgactaaggaaaactagaaaaagaatacagttcacccttgtcaaggtcaaatgtgaaagacagaagtttatttaatgtagaggtaaatgaaggtgagctgttttcagcatcttagttttgaccatgaaaatgtctatagaattatgtgtagttgttccgtaacgattttattttcttcatttatttatttacagtcttatttatgttctgtttaatatatagtttgattctggccattttaaatatttgacacagaagagactatattggaatatttacagctttataagtctttcatcagattagctgttgactttttgtaatacaaaaagtttcagacaagtattaaagaataaaatctgtctcaggctggtagttagcagttgtgaccaagatgcttttggttgttgtatttcacaaaatttcctcatttctaacatgagagatgaacttattttaatataatcctttttctacactttaaaagtcagcaatagtgttatgtatttataggcagcttttaataatcttgtcatatttgtactaacccaaatgattcacagtgacaaaacattttaataacttgatcacaaaaccatatggacaaatatgaattttaatattataaatactatttttaaaaggtagaatttattcgcacagggtaaaaagaatgtaatatttagttctcaagtttgaattatcagtatattattacaattttgtatatcagaatcttaagtgttacaggtacaaaaagaatattgctagccaaatgaacaaagtttagctaaatctctgtagcatgcaaatcaaataaattaaaattttttgctattgctttatctatattgtcttaaatatcaaaagctcaggactgaacttaatatttaatcaggttaaattctgaacatgtttctgttttaatttgtcttgtttgtaaacgtatgcaaatacatcacatagattaactggtttctgcactttccatgtgtttgtgggtggaaaaaaattcagtggtttttttttaaaaaaaaaagcaaaaacaaagctacatattgcctaatactctatttcagtgtcgtttattgttcagtttatttccctgattggcacaaacacaagagtttccttgaaccatgtaccaagcaaatacaaaatatttcatgaagaaatccccaggctggcagtttgtgatgaatagttcttgttggaactatatgtattgctgataaaaaaggacgaagtattttcattgagcaaataaaatgaagggctccagaatatgtgctctgtggtcgctgcgctgggctggcagtgtgctccacagagaggcagcgtccaggagttatttaaccaaaacccagtctggcctggccgtgccccccaaaggggaccagtgctgggaagcaagaaaaggggcccggaaataccgaacacaggatgcgaacccgttggtgggcagagtcaatgaacatccaaaacaggaaggctcgacctgtagatagaagggttgaaatggggctttggagggcacaagacggggcgttcagggaaatgacctccggaaactaaacaaaattaaaaaggggctaaagcaacagggtagagttacaagaagaagcgcgatcaaggann

SEQ ID NO: 25384 - DNA, 2259 bp, Homo sapiens
  misc_feature 1, 2, 2258, 2259: n = A,T,C or G
nnagtcacccacgcgtccggccgggaggagctggcggcgagcgccgagccgggcgcgcagcgacggagctggggccggcctgggaccatgggcggacatgttcccgatttgaggtgaaaccatgaagagaaaatagaatacttaataatgcttttccgcaaccgcttcttgctgctgctggccctggctgcgctgctggcctttgtgagcctcagcctgcagttcttccagcctgatcccggtgtcgactcctaagaatggaatgagtagcaagagtcgaaagagaatcatgcccgaccctgtgacggagccccctgtgacagaccccgtttatgaagctcttttgtactgcaacatccccagcgtggccgagcgcagcatggaaggtcatgccccgcatcattttaagctggtctcagtgcatgtgttcattcgccacggagacaggtacccactgtatgtcattcccaaaacaaagcgaccagaaattgactgcactctggtggctaacaggaaaccgtatcacccaaaactggaagctttcattagtcacatgtcaaaaggatccggagcctctttcgaaagccccttgaactccttgcctctttacccaaatcacccattgtgtgagatgggagagctcacacagacaggagttgtgcagcatttgcagaacggtcagctgctgagggatatctatctaaagaaacacaaactcctgcccaatgattggtctgcagaccagctctatttagagaccactgggaaaagccggaccctacaaagtgggctggccttgctttatggctttctcccagattttgactggaagaagatttatttcaggcaccagccaagtgcgctgttctgctctggaagctgctattgcccggtaagaaaccagtatctggaaaaggagcagcgtcgtcagtacctcctacgtttgaaaaacagccagctggagaagacctacggggagatggccaagatcgtggatgtccccaccaagcagcttagagctgccaaccccatagactccatgctctgccacttctgccacaatgtcagctttccctgtaccagaaatggctgtgttgacatggagcacttcaaggtaattaagacccatcagatcgaggatgaaagggaaagacgggagaagaaattgtacttcgggtattctctcctgggtgcccaccccatcctgaaccaaaccatcggccggatgcagcgtgccaccgagggcaggaaagaagagctctttgccctctactctgctcatgatgtcactctgtcaccagttctcagtgccttgggcctttcagaagccaggttcccaaggtttgcagccaggttgatctttgagctttggcaagacagagaaaagcccagtgaacattccgtccggattctttacaatggcgtcgatgtcacattccacacctctttctgccaagaccaccacaagcgttctcccaagcccatgtgcccgcttgaaaacttggtccgctttgtgaaaagggacatgtttgtagccctgggtggcagtggtacaaattattatgatgcatgtcacagggaaggattctaaaaggtatgcagtacagcagtatagaatccatgccaatacagagcatagggaaaggtccacttctagttttgtctgttactaagggtagaagattattgctttttaaaggctaaatattgtttgtgggaaccacagatggttggggttgaacagtaagcacattgctgcaatgtggtacgtgaattgcttggtacaaaatggccagttcacagaggaatagaaggtactttatcatagccagacttcgcttagaatgccagaataatatagttcaagacctgaagttgccaatccaagtttgcactcttctggcctgccccatgttactatgtgatggaaccagcacacctcaaccaaaatttttttaatcttagacatctttaccttgttcttgttacgaattccttgcaagtgattatctaacattaaggtggcaaacttttctgtaagggccagatgtacttatttccgcctgtgtggaccaaggcaattcaggcttgtataataaccaaattgttttgagagggagcccccaggcgacattcagaataggtagcgggccagccggaaagatggcacatgcccgggttgttgccctctaaaaggtgtaatgtcgctgagtgacaatatagggtcctcggacaagttttaggtgctcatcgacacnn

SEQ ID NO: 25385 - DNA, 3822 bp, Homo sapiens
  misc_feature 3819, 3821, 3822: n = A,T,C or G
gagtcgacccacgcgtccgcgggtatcaaaagaaggatcggctccgcccccgggctccccgggggagttgatagaagggtccttcccaccctttgccgtccccactcctgtgcctacgacccaggagcgtgtcagccaaagcatggagaatcaagagaaggcgagtatcgcgggccacatgttcgacgtagtcgtgatcggaggtggcatttcaggactatctgctgccaaactcttgactgaatatggcgttagtgttttggttttagaagctcgggacagggttggaggaagaacatatactataaggaatgagcatgttgattacgtagatgttggtggagcttatgtgggaccaacccaaaacagaatcttacgcttgtctaaggagctgggcatagagacttacaaagtgaatgtcagtgagcgtctcgttcaatatgtcaaggggaaaacatatccatttcggggcgcctttccaccagtatggaatcccattgcatatttggattacaataatctgtggaggacaatagataacatggggaaggagattccaactgatgcaccctgggaggctcaacatgctgacaaatgggacaaaatgaccatgaaagagctcattgacaaaatctgctggacaaagactgctaggcggtttgcttatctttttgtgaatatcaatgtgacctctgagcctcacgaagtgtctgccctgtggttcttgtggtatgtgaagcagtgcgggggcaccactcggatattctctgtcaccaatggtggccaggaacggaagtttgtaggtggatctggtcaagtgagcgaacggataatggacctcctcggagaccaagtgaagctgaaccatcctgtcactcacgttgaccagtcaagtgacaacatcatcatagagacgctgaaccatgaacattatgagtgcaaatacgtaattaatgcgatccctccgaccttgactgccaagattcacttcagaccagagcttccagcagagagaaaccagttaattcagcgtcttccaatgggagctgtcattaagtgcatgatgtattacaaggaggccttctggaagaagaaggattactgtggctgcatgatcattgaagatgaagatgctccaatttcaataaccttggatgacaccaagccagatgggtcactgcctgccatcatgggcttcattcttgcccggaaagctgatcgacttgctaagctacataaggaaataaggaagaagaaaatctgtgagctctatgccaaagtgctgggatcccaagaagctttacatccagtgcattatgaagagaagaactggtgtgaggagcagtactctgggggctgctacacggcctacttccctcctgggatcatgactcaatatggaagggtgattcgtcaacccgtgggcaggattttctttgcgggcacagagactgccacaaagtggagcggctacatggaaggggcagttgaggctggagaacgagcagctagggaggtcttaaatggtctcgggaaggtgaccgagaaagacatctgggtacaagaacctgaatcaaaggacgttccagcggtagaaatcacccacaccttctgggaaaggaacctgccctctgtttctggcctgctgaagatcattggattttccacatcagtaactgccctggggtttgtgctgtacaaatacaagctcctgccacggtcttgaagttctgttcttatgctctctgctcactggttttcaataccaccaagaggaaaatattgacaagtttaaaggctgtgtcattgggccatgtttaagtgtactggatttaactacctttggcttaattccaatcattgttaaagtaaaaacaattcaaagaatcacctaattaatttcagtaagatcaagctccatcttatttgtcagtgtagatcaactcatgttaattgatagaataaagccttgtgatcactttctgaaattcacaaagttaaacgtgatgtgctcatcagaaacaatttctgtgtcctgtttttattcccttcaatgcaaaatacatgatgatttcagaaacaaagcatttgactttctgtctgtggaggtggagtaggtgaaggcccagcctgtaactgtcctttttcttcccttaggcaatggtgaactgtcattacagagcctagaggctcacagcctcctggaggaagcagcctccactttggatcaggaaatagtaaaggaaagcagtgttgggggtagcggcatgcagaccctcagaccagaatggggacatcttgtggtctgctgcctcaggaatctcctgaccacttgtagtccctccgacttctctagacatctagtctcagtgctagcttatttgtatttttcctctttcacttcttatggaggagagtgtttaactgagttagaatgttgaaactgacttgctgtgacttatgtgcagctttccagttgagcagaggaaaatagtggcaggactgtcccccaggaggactccctgcttagctctgtgggagaccaactacgactggcatcttctcttccccctggaaggcagctagacaccaatggatccttgtcagttgtaacattctatttcaacttcaggaaagcagcagttttcttttaatttttcctatgaccataaaattagacatacctctcaacttacatatgtcttcaacatggttacctctgcataaatattagcaaagcatgccaatttctcttaagtactgaaatacatatgataaatttgactgttatttgttgagactatcagacagaaaagaaattagggctctaatttccttaaagcaagctcacttgctttagttgttaagttttataaaagacatgaaattgagtcattttatatatgaaaactaagttctctatcttaggagtaatgtcggcccacaagggtgcccacctcttgttttccccttttaaaaactcagatttttaaaagccctttccaaaggtttcaactgtaaaatacttctttttacaatgtatcaacatatttttatttaaggggaattaacaattgccagggaaaccagccaacccaagtttattatatcattaaccttatcataaattcaaacctaagttgctggaccctggtgtgaggacataaatcttccaaagttttgcctatcctaagagctgcatttttctactgctctttaccttgcattttagctaatttaggagttttgagaatgtattggatacgctccagtacataaggagttgccgcatattatatcagactgctttgagaaatctcatccctagtctattgcagttgtttctattagcttactgattaactcagtcctgacacaccttttgggaaatgctgatttaaacttcttaactggcaacagttggaacagtaatcagtttgctaacatatttaaagtcttgaatgttgaagaactcatgtgatttacccttttcaactttttggaaaacgatttaatttattctaattagattaaccctattaatctatggattgggtatcaaaatgaatgccagtccagatgtgcctagacacgaaattggagctgaggactctcacgatatgcaagttcatccaacgtgaagataccataagctttttctctgaaccagagaaatgaaagtcagtttaagaggctgatagatcttggccctgttaaggcatccacttcacagttctgaaggctgagtcagccccactccacagttaggccaagaattagattttaaaacttcatctgtctgtcccagtgataccttangnn

SEQ ID NO: 25386 - DNA, 1113 bp, Homo sapiens
  misc_feature 1, 2, 3, 4, 5, 1108, 1109, 1110, 1111, 1112, 1113: n = A,T,C or G
nnnnnccccctcgttgtgttgcctttctgttgtccgtggatgttccgcgaggcgtcgtgcagctttgctggttatgcctgttcccccctggacctatgtgtctctacgtcttcctgtgtggcctattcgttgtcgtgtcgccgagggcttcgtcttgtgctcttatcctggtgctgctttgctaccgtaaggtgtctttctggtacgaggggctgtctattgatccatccccggggcctaccagacctcctggggtcagctaaggtctgtttccttcccagaagctaggtctctggggatagcatcaacccttgggtaaccgagctaggcaggtggctgtccgatggaaactaggaacctgcctcgactcccaagcaaggcaacaaaaatgacttagagatggggattaaggcagcaaggcctgaaatagctgatagagctacctcagaagtgccagggagccaagccagtcctaacccagtgcctggggatggattgcaccgggctggttttgatgcctttatgacaggttatgtgatggcctatgtggaagtgagccagggaccgcagccctgcagctctggaccctggctccctgaatgccacaataaggtatatttgagtggcaaagctgtacccctcacagtggccaagagccagttctctcgttcctccaaagcccacaatcagaagatgaagctcacttggggcagtagctgatgcaacttccaccttgctctcaggtggaacagaggtattttgggtctctctagcctgaaatgtcatcctcaactgctactgagtttaggggagggggaatgtcttgacagacatcactgcattgccctggaccgcctcctttatcccagtgtttgaggtacaagtaagaaggctgaccagcacctgtaacactgactttatttttaagtctgaaaatgtcttgggaaagttttacaaaaaaaaaaatcaacagaagcaagttatgaaaatatttgaccagcttcatctttggttatttcttattgcagctctgtaaggacagactgttcccaaagctccagccatggcaggaagggaagcaaatcagtccctgtataaaccatttaannnnnn

SEQ ID NO: 25387 - DNA, 3677 bp, Homo sapiens; identical to SEQ ID NO: 24153

SEQ ID NO: 25388 - DNA, 2438 bp, Homo sapiens
  misc_feature 2430, 2431, 2432, 2433, 2434, 2435, 2436, 2437, 2438: n = A,T,C or G
tatagggagtcgacccacgcgtccggtaattccagcgagaggcagagggagcgagcgggcggccggctagggtggaagagccgggcgagcagagctgcgctgcgggcgtcctgggaagggagatccggagcgaatagggggcttcgcctctggcccagccctcccgctgatcccccagccagcggtccgcaacccttgccgcatccacgaaactttgcccatagcagcgggcgggcactttgcactggaacttacaacacccgagcaaggacgcgactctcccgacgcggggaggctattctgcccatttggggacacttccccgccgctgccaggacccgcttctctgaaaggctctccttgcagctgcttagacgctggatttttttcgggtagtggaaaaccagcagcctcccgcgaacgatgcccctcaacgtagcttcaccaacaggaactatgacctcgactacgactcggtgcagccgtatttctactgcgacgaggaggagaacttctaccagcagcagcagcagagcgagctgcagcccccggcgcccagcgaggatatctggaagaaattcgagctgctgcccaccccgcccctgtcccctagccgccgctccgggctctgctcgccctcctacgttgcggtcacacccttctcccttcggggagacaacgacggcggtggcgggagcttctccacggccgaccagctggagatggtgaccgagctgctgggaggagacatggtgaaccagagtttcatctgcgacccggacgacgagaccttcatcaaaaacatcatcatccaggactgtatgtggagcggcttctcggccgccgccaagctcgtctcagagaagctggcctcctaccaggctgcgcgcaaagacagcggcagcccgaaccccgcccgcggccacagcgtctgctccacctccagcttgtacctgcaggatctgagcgccgccgcctcagagtgcatcgacccctcggtggtcttcccctaccctctcaacgacagcagctcgcccaagtcctgcgcctcgcaagactccagcgccttctctccgtcctcggattctctgctctcctcgacggagtcctccccgcagggcagccccgagcccctggtgctccatgaggagacaccgcccaccaccagcagcgactctgaggaggaacaagaagatgaggaagaaatcgatgttgtttctgtggaaaagaggcaggctcctggcaaaaggtcagagtctggatcaccttctgctggaggccacagcaaacctcctcacagcccactggtcctcaagaggtgccacgtctccacacatcagcacaactacgcagcgcctccctccactcggaaggactatcctgctgccaagagggtcaagttggacagtgtcagagtcctgagacagatcagcaacaaccgaaaatgcaccagccccaggtcctcggacaccgaggagaatgtcaagaggcgaacacacaacgtcttggagcgccagaggaggaacgagctaaaacggagcttttttgccctgcgtgaccagatcccggagttggaaaacaatgaaaaggcccccaaggtagttatccttaaaaaagccacagcatacatcctgtccgtccaagcagaggagcaaaagctcatttctgaagaggacttgttgcggaaacgacgagaacagttgaaacacaaacttgaacagctacggaactcttgtgcgtaaggaaaagtaaggaaaacgattccttctaacagaaatgtcctgagcaatcacctatgaacttgtttcaaatgcatgatcaaatgcaacctcacaaccttggctgagtcttgagactgaaagatttagccataatgtaaactgcctcaaattggactttgggcataaaagaacttttttatgcttaccatcttttttttttctttaacagatttgtatttaagaattgtttttaaaaaattttaagatttacacaatgtttctctgtaaatattgccattaaatgtaaataactttaataaaacgtttatagcagttacacagaatttcaatcctagtatatagtacctagtattataggtactataaaccctaattttttttatttaagtacagcttcaacacgacgcccccccaagggcggcaaaacacaccccacgggcacctacacagcacaaggggcgcaaaacaaacccacaggcaccagcataccgacacaacctgtgtacaagggccccagacggcacacaccacccgcaaccagaacaagcgcccgcaacacaccggcactccacacacacaccacgcaacaacaccagcaaaaggcacgacaacagcacaacaagcgcacatcaatcaacaccaacgcacaccgacagacactcaacacaaacaacaacacaaagtcgannnnnnnnn

SEQ ID NO: 25389 - DNA, 4990 bp, Homo sapiens; identical to SEQ ID NO: 24994

SEQ ID NO: 25390 - DNA, 3146 bp, Homo sapiens
  misc_feature 3054, 3055, 3056, 3057, 3058, 3059, 3060, 3061, 3062, 3063,3064, 3065, 3066, 3067, 3068, 3069, 3070, 3071, 3072, 3073,3074, 3075, 3076, 3077, 3078, 3079, 3080, 3081, 3082, 3083,3084, 3085, 3086, 3087, 3088: n = A,T,C or G
tcgacccacgcgtccggcgggctagctgttgtgttttttttttttttcccccgggcggcccggcggctgcgtactggctgtgggatgggaagtgaagccccagcgagcggctgcagcggggccgtgaggagcagccagcgggaggcggcggcgagtcggtgagcagctgggaagagcagaaccggggcggagcacctgcaggcgcgggcggcggccccaccatggcgattcgcaagaaaagcaccaagagccccccagtgctgagccacgaattcgtcctgcagaatcacgcggacatcgtctcctgtgtggcgatggtcttcctgctggggctcatgtttgagataacggcaaaagcttctatcatttttgttactcttcagtacaatgtcaccctcccagcaacagaagaacaagctactgaatcagtgtccctttattactatggcatcaaagatttggctactgttttcttctacatgctagtggcgataattattcatgccgtaattcaagagtatatgttggataaaattaacaggcgaatgcacttctccaaaacaaaacacagcaagtttaatgaatctggtcagcttagtgcgttctacctttttgcctgtgtttggggcacattcattctcatctctgaaaactacatctcagacccaactatcttatggagggcttatccccataacctgatgacatttcaaatgaagtttttctacatatcacagctggcttactggcttcatgcttttcctgaactctacttccagaaaaccaaaaaagaagatattcctcgtcagcttgtctacattggtctttacctcttccacattgctggagcttaccttttgaacttgaatcatctaggacttgttcttctggtgctacattattttgttgaatttcttttccacatttcccgcctgttttattttagcaatgaaaagtatcagaaaggattttctctgtgggcagttctttttgttttgggaagacttctgactttaattctttcagtactgactgttggttttggccttgcaagagcagaaaatcagaagctggatttcagtactggaaacttcaatgtgttagctgttagaatcgctgttctggcatccatttgcgttactcaggcatttatgatgtggaagttcattaattttcagcttcgaaggtggagggaacattctgcttttcaggcaccagctgtgaagaagaaaccaacagtaactaaaggcagatcttctaaaaaaggaacagaaaatggtgtgaatggaacattaacttcaaatgtagcagactctccccggaataaaaaagagaaatcttcataatgaattataaactaattgattaatgtccccaaagaaatctgctttctactatatctttcagcattagagatttttctgttcttgaaaatacagtctgtgctctttgatttttgctattgtacggtttcatgcatttttttaaagggcatttgaggggaggattattgctatgaatgaaaaaaatattttagcttagactaagctacctgccttcaaaatagtttagggaccaccaccatattttattttgtttttatttttgaacatttttctaatgatttggagagaaaactatttacaaaaattccacatatcagtgatacaatttcttgctgtcaccaattttttataatagcagagtggcctgttctaagaaggccatattttttaagttatctttcagggtaacatggaaatactataaagttggatgtcaaactttaatatgttttcagtgttctctaattttttggaatttttgtagactttacacctggaaaaaaagatttgtaaaatcaccggaacaattgtgtgctttattttataggtagtggttattagtattacatccccattttaaaaacaaaaacataataatggttacaacacgtggagttttactaacatacatattaaatcaaagtatattcttaaaagtacttgtgaagtaaaatctttcttgtgcattttcaatacttgtaaactggaaatcagaaaatatttactatgaacaggaaaatctgacatatagccctttttgatatgtttattaataatgattcttaatggggctcataataagtttaatatgcacagcatcttagaaaagtttaacctgcaaacacttttaaaacataatgcctacttgatttatatctataaaaagactgacaggtaattatatttggaaaacatttaatgcactaactttaaagaaattgaaaattcaggtggataaatagtcttacaaaagacaatgtgctttatgttatacctatagctttggtcccatctttaattgagaaacatttatctgtataaaacatatttttggataaatatatatatatatatttgtatcgctacagaaaggctctaaaaagcatttgaggaaaatatttggttcccttttctataatcatcctttaagattcttatagctacatttggtttattcatcatatttacagtatatatattgttcttttcagtgttcacatcttgttccccatttctcacttgtgtcaccagctgtttgtgccatttttagtgtaaaagttgcagacctattagatctgcagtttaagttgccatgctgctaggaaattgtcctttttctttctagctgttaacctacttcctggaaaaagtagtagctctctgtagcattatggagtttcagtggaaccaaatttttgccattaaaaactggcattatactgaactatacattgagaaatcaatcaaaataaaaatttttactttcacaagttgtatcctggatgtttctgtcattgttggtgattaggctattttggtatataacctcattaaaatgtaccatatttaaaacacttcatagacattcagaataacccttttcaaaattgtgttctgcaaataaacagatttgttccacagaatattggtgaggactactggggggatagatggtcataaccaaataaatctgggaatcactggaccnnnnnnnnnnnnnnnnnnnnnnnnnnnnnnnnnnntgtgtcatatacactgaagtgtcctgaagatgcctgtgagctgctgattccagctggt

SEQ ID NO: 25391 - DNA, 364 bp, Homo sapiens
  misc_feature 1, 2, 3, 4, 5, 6, 7, 8, 9, 10, 363, 364: n = A,T,C or G
nnnnnnnnnngaggttggcgggattcattaggtttaaattgaatttctgcaggccgggggattccctagttttaaaacggccgaggttccacaggagttcccctgcttctcaaggaggcactgaacaagattcctcctgcactctggttcctgcacatagttattggatctaacacaagataactcctcaatgacccctccattggaggctgcagtcagtttgcgcaacaaagaagctgtcgtccttctctgttctccaagatgaggagtctgcctagccatacaggcccaggagagggggatcagaaggtgccaatcaagaacctgacggccgccaccgcgatggtgctccaaatgccctann

SEQ ID NO: 25392 - DNA, 816 bp, Homo sapiens; identical to SEQ ID NO: 21390

SEQ ID NO: 25393 - DNA, 412 bp, Homo sapiens
acgcggggatgttggatcaggacatcccgatggcgcagccgctattaaaggttcgtttgttcaacgattagagtcctacgtgatctgagttcagaccggagtaatccaggtcggtttctatctacttcaaattcctccctgtacggtcctatacgaagttgttctgtctctgcatcataaatgctaatcattggtcctcctgctaaagttcgcgcagcacgaagctgctcctccggaccccgatcttgaaaggaggctctgtaaatctctgcagtcttaatgttgacagcaatgccatatattactggaaagtggttttcgttttcttcccggtcatttaattctgtcacacataatgtcactaagtgaatgtcatcttcttgcctgtcaaattcactaagaagttgatgag

SEQ ID NO: 25394 - DNA, 277 bp, Homo sapiens
actgacagcatgccagctaccgaagtcacccagccattcccatgagcagcagttcatttaattgtcacagcgtcgccaggaagaagatctgataaacctaggtttacagataaagaaagcaaaatgtagagatgttgttgaggtcacagaggtgactgcctaacttcagagcagggcttctgatccctttaagaaattacgggcgtaagtcaccatgcccagccaagaaagctattcttgaagtgtaaaacagccaggtgcaaaattattttggagt

SEQ ID NO: 25395 - DNA, 2998 bp, Homo sapiens
  misc_feature 1, 2, 3, 4, 5, 6, 7, 8, 9, 2958, 2995, 2996, 2997, 2998: n = A,T,C or G
nnnnnnnnnttttttttttcatcatcattaaatatttattgagtgcttactgtatgcaaggcactggggatacaaagaggtataattcatggctctgcccttaaggagctcacaatctagttggaaaaacaagacatatatatatatatacatacaaaaatcagtaacaacacagaggcctgaacaattgccaagtggacaacagtacagataataaagaagcaagaaacgagggttcactaaaggctatagtggggaagggagtgcttcactgagagagtgggacttgaactggtattaaaaacaagagcatcccgggcaaagggaacaacactcacagctcagaggcaggaagacactctgcgggtctaagaaatgaagagttaaatgtggctagattggaggtttggtgcagggctaagagagtaatactcgcttagccaggaaaggatgcatttgttttacgcattttgtgcgtctgaggggctggcaggccttgcacgtggcagtgtctatcctgtcagatttgggaggtcagctattaattagatcagctattaatcagactgttctcctaacactttaacttcatggatgtaccttccttcctttcctaatgccaactctgtttcccgggtaggtgtttcactgcctgaatgaaatcctagatctctgtcacagtttttgttcgctggtcagtcagaacctaggcccactggatgagcgtggagccgcccagctgagcattctcgtgaaggtgcgtctgcctggaagtatgcagccttgccgaaaggacagaggtggttttgccaatggagaattcatgatctttcctctgagtcagtaaagcatttcctcaatacacacacgtacagagataagatacaaagataaaaatgttggtatcagttgattttgaagcaggtaatactgtgccacctcacagtgctcaaaaatagttcagtcctgaatagtttattcagcccatcaaataagcattgggttgttctaacttcctcacatcctcccccctccttacttccttgaactaacccccatctcactgagataattatctgcttgtaatcaaaacgggttctccccaaccccagtacttgacaaaatacattaactggaaaccagctactaaattcctactgatgaaagagtactttcataggaagtcatgcatgtatggatttggtacaagtcattttaggaactaatagaaataggaatgtgggaaggccaggtggttctgtagaattttgaacaaggcttttccaagaaactcctccctccgcccccatcctccatatggagagttggtgagctgaagtggaatgacagctgagtccttctctctgcagggctttagccgccagtcttcactcctgttcaagattctctccagtgttcggaatcatcagatcaactcagatttggctcaactactgttacgactagattataacaaatactatacccaggctggtggaactctgggcaggtaggagcaacccttgggtaactcagtagactttttaaggtggctttttaatgagttgtagaattctagaactggaagaagactttagtccaaataccctcattttataagtaaggcttagagatagaggtgtgaccatctttaataattttaatggaggttattttctagtagaagtcatcatcatcataaaatactaaaaaacctgacagtgagataggtgttaagtcctttgctaggttatgtattgctatgctgggaggcagtgggccttccactcccaattctgatatgaactagctgtgcagccgtgggcaccccgccttgctggtccctagcttccgcatctgtgaaaggaggcgaccaccccttctaactctaaactttaaaaaaaactgataccgagattcagtggtagctggcttcccagaggtctgtcattcccattcagaaaatcacttcattgtcctttctctctaaaatgtctgcaagcagatttttttctaagctattgtagcagaagagtcaaaagaaactcttcagttttaagatgacattatttagatcacaggttatcctgattcatatttctttgaaggtagtcttgggaaagcatgacacttaataaggctctttttctcttttgtagtttcgggatgtgaaaatttctggctcataaattgaaataacagccacgttcccaaggttgtaacagaagattcaaaacatcccattctagccacacacaaataaatatctgcggcttagtgataggactctaccttttctcctagaagcagttactgaacatccaggagtacaactccttcccatcattcccatgtggaagggtctctcccatcaaggagaacatgtggcatctctgatcctttacattgagaacatttgttggatatgttcatttattcaatagtcatttattgagcacctactacgtaccttggtactgttcaagctgtgggagatacagcggtaaacaaacaatatagagcagaaagttaaatattttatggttcatatgtgaaaaagtaattatgtttataaatagactaactgctggatgttaccaccaagtaagaaagcaacaggtaagataggctttctctctccctataccaagtaatttatacctacacagattgggcaattctagctaatgaaaatatacttaaaagtatttcttaggccgggcatggtggctcacacctgtaatcccagcactttgggaggccgaggcgggcggatcacctgaagtcaggagtttgagaccagcctgaccaacatgatgaaacctcgattctactaaaaatacaaaaattagccaggtgtggtggcatgtgcctgtaatcccagctactcaggaggctgagacaggagaattgcttgaacctgggaagcagacgctgcagtgagctgagattgtgccnttgcattccagcccgggcaacaagagcgaaattccgnnnn

SEQ ID NO: 25396 - DNA, 1944 bp, Homo sapiens
  misc_feature 1, 1917, 1922, 1934, 1935, 1936, 1937, 1938, 1939, 1940,1941, 1942, 1943, 1944: n = A,T,C or G
ngaagggaagagactgaaaatacgaaagaagtatctggtgatatcatctgagggaaatccccaggcttaggtttgacttggttcagggttggaggtttatagcctcttgtgtgatccttgataccagcaaactgggtccaaatcccaggagttatcctcactccaccatggactcactgttgttgtagcacttttgttttcccagtagttaaatgctacctgtgcagctgacatcactggactagatctgggaatagatgaaataatgttgaaaacaaaactttagaggtgccttctggtatcagatgctgcaaggccttgagcatcagagtgtgttaagtcccatctactgtatcaaggccagagtgtggctccatgctcttaggaagggtttcccaaccacggggccagagcccaaaaggtttccccttccctaatatgctaatgaacgaaacatgtaaatctgttttcccctgttaggctagtcttactgtgatgagaagtgtacctggctttccttttcctgggtggagacagctggggcatattcgggtggcattccctctcagtaccagaggccccactgcctgcagctggaggcatgtgaccataagctcctgcttttgctttttgggcttgcatccctcttttctgtgaactctggagaatgctggaattaaaacatttaagcattttgattaaatgagcttgagctcctctgttcttttctaggtgctcttgttctccaactctcctgcctctttctacctctgccctatacattccagctctggagacagagtctgaaactggagtctctggagggatgagaaaaccatctttaattgtaacaaatggggtgggtagacgagcttcagagtgggagcagattgcattgaggttcaactctcccacccatgcctgggagtcaagtcttggagaggagtaacactttggtggtcagcacagctcagagtcagagacaatagccagcaggccagcaaggctggctgtgtgaggcacaggaagcagggcataggtagggagcagagctgggggttctctctctgctggaagatagcagctgccccttggcatatgggggttgcacactgcaccttgtagccagggctgctatttgctgttctgtgaaggagttggccactcattgtgacatgcaggacagtggccttctgagaacctgctgcttgcttgcatagtgcagcacaagtgaggacaggcaggggtgggagcatttatggtgatcagatgtgcctggcaagcccctgttcagacattgctcacattccaaatgttttcgtgtagaatattgcacaggtctggggacgctctacctgtgccctgtgagtgttaataatggtggagaaagagtgtagctgtgcccttgagagagaaggtgagggaaagagtgcaccagtcagctgaccgtcagctggctaggctcttcactgagtcctatgtcgcagtgcacaaatcactgcccatcaggcctcagtttcctcatctggtaaatggtgataacatcaatctgcccccccgccagggtgctgttatgagggtcaaaagtggtagtggagggtaatactgggtgagtccattgtgtgtgggaggagaaaggctttacattcacctggtacatgaaggtttttctgcttcaggcagcacagcacagccatttcttctggcctttacaaaaaggcattttgttatactacagtgtaaacctcatttttttcactccaaaaggtagcagcccctcttcttcccaccctggacctgcctttcactccctgggcacagagcgcatggtaccattgatgtttggtttattccaggatccaaggagctggttctgctggttggaccaaacctcgtgagccagccacccctgacccnatgangagagctctgannnnnnnnnnn

SEQ ID NO: 25397 - DNA, 1290 bp, Homo sapiens; identical to SEQ ID NO: 20742
  misc_feature 1, 2, 1281, 1282, 1283, 1284, 1285, 1286, 1287, 1288, 1289,1290: n = A,T,C or G

SEQ ID NO: 25398 - DNA, 1120 bp, Homo sapiens; identical to SEQ ID NO: 22234
  misc_feature 1, 1119, 1120: n = A,T,C or G

SEQ ID NO: 25399 - DNA, 691 bp, Homo sapiens
  misc_feature 684, 685, 686, 687, 688, 689, 690, 691: n = A,T,C or G
gcactcaggggttggctgcgaatggtgtccttgatccacttccggtaatgcaccaccttgggtgtaccgcctcagtggagactggaatcccttacacattgatcctaactttgctagtctagcaggttttgacaagcccatattacatggattatgtacatttggattttctgccaggcgtgtgttacagcagtttgcagataatgatgtgtcaagattcaaggcaattaaggctcgttttgcaaaaccagtatatccaggacaaactctacaaactgagatgtggaaggaaggaaacagaattcattttcaaaccaaggtccaagaaactggagacattgtcatttcaaatgcatatgtggatcttgcaccaacatctggtacttcagctaagacaccctctgagggcgggaagcttcagagtacctttgtatttgaggaaataggacgccgcctaaaggatattgggcctgaggtggtgaagaaagtaaatgctgtatttgagtggcatataaccaaaggcggaaatattggggctaagtggactattgacctgaaaagtggttctggaaaagtgtaccaaggccctgcggtcctgggcaagcttgaccctcagaaggcattctttagtggcaggcttgaggccagagggaacatcatgctgagccagaaactttagatgannnnnnnn

SEQ ID NO: 25400 - DNA, 3218 bp, Homo sapiens
  misc_feature 1, 2, 3216, 3217, 3218: n = A,T,C or G
nncctcggacgcgtgggctgcctccggcatctcttcgccggtgcgtcctcgccgcgcccgtaggtcccggcagccgggccccgcctccttcggagtccgagcgatgggcggggaaagggacaggcaggtatagctctgtcggcgccgcggtgtccacctcagtcaggccacggtggaagacgcgtgccgcggcgcctggttgcctgcagcggcccggacccgagaggaagctgaaccatctatctccagaaatgtcttcagaaagtaaagagcaacataacgtttcacccagagactcagctgaaggaaatgacagttatccatctgggatccatctggaacttcaaagggaatcaagtactgacttcaagcaatttgagaccaatgatcaatgcagaccttatcataggatccttattgagcgtcaagagaaatcagatacaaacttcaaggagtttgttattaaaaagctgcagaagaattgccagtgcagtccagccaaagccaaaaatatgattttaggtttccttcctgttttgcagtggctcccaaaatacgacctaaagaaaaacattttaggggatgtgatgtcaggcttgattgtgggcatattattggtgccccagtccattgcttattccctgctggctggccaagaacctgtctatggtctgtacacatctttttttgccagcatcatttattttctcttgggtacctcccgtcacatctctgtgggcatttttggagtactgtgccttatgattggtgagacagttgaccgagaactacagaaagctggctatgacaatgcccatagtgctccttccttaggaatggtttcaaatgggagcacattattaaatcatacatcagacaggatatgtgacaaaagttgctatgcaattatggttggcagcactgtaacctttatagctggagtttatcaggtagcgatgggcttctttcaagtgggttttgtttctgtctacctctcagatgccttgctgagtggatttgtcactggtgcctccttcactattcttacatctcaggccaagtatcttcttgggctcaaccttcctcggactaatggtgtgggctcactcatcactacctggatacatgtcttcagaaacatccataagaccaatctctgtgatcttatcaccagccttttgtgccttttggttcttttgccaaccaaagaactcaatgaacacttcaaatccaagcttaaggcaccgattcctattgaacttgttgttgttgtagcagccacattagcctctcattttggaaaactacatgaaaattataattctagtattgctggacatattcccactgggtttatgccacccaaagtaccagaatggaacctaattcctagtgtggctgtagatgcaatagctatttccatcattggttttgctatcactgtatcactttctgagatgtttgccaagaaacatggttacacagtcaaagcaaaccaggaaatgtatgccattggcttttgtaatatcatcccttccttcttccactgttttactactagtgcagctcttgcaaagacattggttaaagaatcaacaggctgccatactcagctttctggtgtggtaacagccctggttcttttgttggtcctcctagtaatagctcctttgttctattcccttcaaaaaagtgtccttggtgtgatcacaattgtaaatctacggggagcccttcgtaaatttagggatcttcccaaaatgtggagtattagtagaatggatacagttatctggtttgttactatgctgtcctctgcactgctaagtactgaaataggcctacttgttggggtttgtttttctatattttgtgtcatcctccgcactcagaagccaaagagttcactgcttggcttggtggaagagtctgaggtctttgaatctgtgtctgcttacaagaaccttcagactaagccaggcatcaagattttccgctttgtagcccctctctactacataaacaaagaatgctttaaatctgctttatacaaacaaactgtcaacccaatcttaataaaggtggcttggaagaaggcagcaaagagaaagatcaaagaaaaagtagtgactcttggtggaatccaggatgaaatgtcagtgcaactttcccatgatcccttggagctgcatactatagtgattgactgcagtgcaattcaatttttagatacagcagggatccacacactgaaagaagttcgcagagattatgaagccattggaatccaggttctgctggctcagtgcaatcccactgtgagggattccctaaccaacggagaatattgcaaaaaggaagaagaaaaccttctcttctatagtgtgtatgaagcgatggcttttgcagaagtatctaaaaatcagaaaggagtatgtgttcccaatggtctgagtcttagtagtgattaattgagaaggtagatagaagaatgtctagccaataggttaaaatttcaagtgtccaacatttcccagttccacagtgggaaattttgcacacttgaaattttaaccaagtggctagatattattcctcctttgaagctaatggcatttgtatatacacactgcagcagagcttgtagctggacagagtcaaaaagaagaaaatacggtttcaggctttcttgcagatatgaagtattcttggaatgcaataagtatgtattgaactgtactgtaaagtagctccaaaacttaattactctcctgttttaggggttatacatttggactgtgcattctccaagagatgaagcggtgaagttgggatttacattggaagtgctgtagacttctttatgtggctcagtggagagagggaaagaatgttgcacctgctctagtaccataggtcaagaggcttctggatcacaaagtcataactagacaggtttgttcttgtagttttctatccccagtctttgctccccagatggcagtagtttttagtaggaaagtgccattcctgtccttaaggcacagtctcatcaaaccggagggtaaacatctggaacagggattaaaaaaaccctggaactggagatgaccgcctcgctcgcaccagcacgaacgctcagcgaacagggcctgtctgggcgggagagacaaagagagcaggcgacaaggggtcaccaacacgaggagggtcacnnn

SEQ ID NO: 25401 - DNA, 1003 bp, Homo sapiens
  misc_feature 999, 1000, 1001, 1002, 1003: n = A,T,C or G
ctgacgagagccgggaggcgttagcgaaggaagagaaaaaccgaagacgaagccactacagcccccgcgtacaggctgtcaggtacaggtgaaacaaattctcatcttgaatgatcagatgcaaaatcatttctgaaccctagagcagaagttagaaataacaaaatggccgtttcaaccttgactggccaaaaataactaataaacttttttgttttaagtcaggcaagtgattttctacatttagcagtttgaaagtccagtgttaatgcaatatttctagtgagaaatgcttgttattaaaagcatgggagtgatagtgtgaaatggtggtgagtgcttctatcatattactgtaggtacttggactggtgcaaacttgattccttttcatccccctgtttaggagctattaaaatattactgttaaaaatccaaaccattctttgttccatgtaataagaaaatagccaaaatcactttagagcttctcaactatttatgaagagctatcctgcttttattgaaagtcactagagttgaatgtggtaagaaaccacttagcctatgtattggacgagaaaatcagtatcatgataaaattttgaattaagagaacccttgtagagtttttaaaaaatgatttattttcaattaggtttaagaaatctatgttatgcagggaggcatatcagatgaatgttgtagcagacaaaagttttaaatcgtgttagacttgaattcatcaattgtttgaatgagggtgggtgggtagaaggataacaaaattactgttagtgtttctttccttacggaaaaagatgtgaatcccagccttatttcagggaagcctttgaagctatgatggacataagtctaaattaaatgtatgtatgtttcattatattgctcttaagactactgaggtggcagtttaattcttaaaaacaataaaatggaagcataaatacaaaaaaaaaaaaaaaaaaaaaaaaaaannnnn

SEQ ID NO: 25402 - DNA, 2649 bp, Homo sapiens; identical to SEQ ID NO: 22470
  misc_feature 1, 2, 3, 4, 5, 6, 7, 8, 9, 10, 11: n = A,T,C or G

SEQ ID NO: 25403 - DNA, 3983 bp, Homo sapiens; identical to SEQ ID NO: 21101

SEQ ID NO: 25404 - DNA, 2716 bp, Homo sapiens; identical to SEQ ID NO: 22021
  misc_feature 1, 2, 3, 4, 5, 6, 7, 8, 9, 10, 11, 12, 2716: n = A,T,C or G

SEQ ID NO: 25405 - DNA, 1834 bp, Homo sapiens; identical to SEQ ID NO: 25025
  misc_feature 1, 2, 3, 1832, 1833, 1834: n = A,T,C or G

SEQ ID NO: 25406 - DNA, 1405 bp, Homo sapiens
  misc_feature 1397, 1398, 1399, 1400, 1401, 1402, 1403, 1404, 1405: n = A,T,C or G
ccacgcgtccggaaaccctatgaatgtaagcaatgtgggaaagccttcagtcgatccacttactttcgagtacatgaaaaaattcatactggagagaaaccctatgagaaccctaaccctaacgcttcagttgtcccagttctttcatgagcatgaaaggagtcacatagagaaaccccatgaaagtaagaaatttgggaaagccttcagtcctttctgtttctttcaactacgtgaaaggattcacggtggagaaagaccctgtaagataattggctttaaattacgagagacttgtgataggacagtaaaacctagagttggagttggatctctggattgtgttatgtcagtgttggtaggttaggaactagatttcccagaatccattccatttgtgattccatgatacaattcaccagtaacctatcttacatgagattcggaagtaagttaagaaggcattagtcatggtttggaagcaccatacagggagacagctgtgtgaatacaggctgtatggacacttgcttccatcccattttcctgcttctttgggttgccaatcaagagtatcctcaaaacgacttgactttaattttctcggaggtgataggcttccacacaggtctccagaagccctgcattgaatatccatccacactttggttttccttcagacattattatgtctgtactaggcaactaattcagactgtcctggttgggaatattctgtgatgctctgactcccctagtctgtagacggaattggcatacggtctaatttgtgtagtaagcacctttgttcatactagtagtgactgtattcttgattcagcctgatagctaccatgctgctgtcaaaaccaaccagaggggagcttgttcttctgctgtagtgtgcagtgactggcctcacccaggactttgatgtgagaatgagcactttcctctatcaggaaatttcaagtgtttcctgttattcgtagctcaatgtaatgcctcagttcattttcagttgtttgattatatgtgactaatatgtattttttattcaaacaagacttctgtacatgtttcttcaaaacagtttattaactgtcttcagtcttggattacatcaagtttataattttggcaaattgttgagacactgtgaagtcagcgttaaccatgtgcatacaacttaaggaattttttcctcctcatgtaaattttacttttcatgcttatatagtttcaacttttatcttcatagtaatttctcatctactcataataccaaaagttaagtcatgctgttttgtgtgctctcttgctaaagaccgcagagaccatacctgttgtcaaagagggtgtaataaactgtaataataatcatgaccacaaaccannnnnnnnn

SEQ ID NO: 25407 - DNA, 1120 bp, Homo sapiens; identical to SEQ ID NO: 22234
  misc_feature 1, 1119, 1120: n = A,T,C or G

SEQ ID NO: 25408 - DNA, 1602 bp, Homo sapiens
gtcgacccacgcgtccggccgagtaggcgacggtgaggtcgacgccggccaagacagcacagacagattgacctattggggtgtttcgcgagtgtgagagggaagcgccgcggcctgtatttctagacctgcccttcgcctggttcgtggcgccttgtgaccccgggccccctgccgcctgcaagtcggaaattgcgctgtgctcctgtgctacggcctgtggctggactgcctgctgctgcccaactggctggcaagatgaagctctccctggtggccgcgatgctgctgctgctcagcgcggcgcgggccgaggaggaggacaagaaggaggacgtgggcacggtggtcggcatcgacctggggaccacctactcctgcgtcggcgtgttcaagaacggccgcgtggagatcatcgccaacgatcagggcaaccgcatcacgccgtcctatgtcgccttcactcctgaaggggaacgtctgattggcgatgccgccaagaaccagctcacctccaaccccgagaacacggtctttgacgccaagcggctcatcggccgcacgtggaatgacccgtctgtgcagcaggacatcaagttcttgccgttcaaggtggttgaaaagaaaactaaaccatacattcaagttgatattggaggtgggcaaacaaagacatttgctcctgaagaaatttctgccatggttctcactaaaatgaaagaaaccgctgaggcttatttgggaaagaaggttacccatgcagttgttactgtaccagcctattttaatgatgcccaacgccaagcaaccaaagacgctggaactattgctggcctaaatgttatgaggatcatcaacgagcctacggcagctgctattgcttatggcctggataagagggagggggagaagaacatcctggtgtttgacctgggtggcggaaccttcgatgtgtctcttctcaccattgacaatggtgtcttcgaagttgtggccactaatggagatactcatctgggtggagaagactttgaccagcgtgtcatggaacacttcatcaaactgtacaaaaagaagacgggcaaagatgtcaggaaagacaatagagctgtgcagaaactccggcgcgaggtagaaaaggccaaacgggccctgtcttctcagcatcaagcaagaattgaaattgagtccttctattaagggagaagacttttctgagaccctgactcgggccaaatttgaagagctcaacatggtatgttccttgttttctgctttgctaatgagatctccttagactctgaattcaggacattgcatctagatacttagataacagacatcacagtaaccatgtcttttttctaggatctgttccggtctactatgaagcccgtcccagaaagtgttggaagattctgatttgaagaaagtctgatattgatgaaattggttcttgttgggtggctcgactcgaattccaaagaaattcagcaactgggttaaaggaggttcttcaatggcaaggaaccatcccgtggcataaacccagatgaagctgtagcgtatggtgctgctgtccaggctggtgtgctctctgta

SEQ ID NO: 25409 - DNA, 4489 bp, Homo sapiens; identical to SEQ ID NO: 23404
  misc_feature 1, 4489: n = A,T,C or G

SEQ ID NO: 25410 - DNA, 1218 bp, Homo sapiens; identical to SEQ ID NO: 24726

SEQ ID NO: 25411 - DNA, 2058 bp, Homo sapiens; identical to SEQ ID NO: 24693
  misc_feature 1, 2037, 2049, 2050, 2051, 2052, 2053, 2054, 2055, 2056,2057, 2058: n = A,T,C or G

SEQ ID NO: 25412 - DNA, 1209 bp, Homo sapiens
  misc_feature 115, 116, 117, 118, 119, 120, 121, 122, 123, 124, 125, 126,127, 128, 129, 130, 131, 132, 133, 134, 135, 136, 137, 138,139, 140, 141, 142: n = A,T,C or G
actggagccacccgcgaaaattcggccagggttctcgctcttgtcgtgtctgttcaaaccggcacggtctgatccggaaatatggtctcaatatgtgccgccagtgtttccgtcnnnnnnnnnnnnnnnnnnnnnnnnnnnngtcaacacttttaattgttcaatattttactacaaatataagaaacaatacagaattaaataacacatgaaaatcttgctatatatatatatataaatatccaatttaacagcgaaaacaacttacactttaattcctaggccactggatagacacagacaaagcagaagatactgaaaaagcaactaattatggttattaaagattcaacatcattccactagctggaacaatatctttagaacaaagggattgtatgctcatatttgcctcctctgctattgggaaaagttaacgcatggaaaaagaagccagcagagacaaagcatatgaattggctgactgctatacaggaaatctcctaaacatctgttttcataatgtattttcattatatgaggctgaatttagaatgacgtaaaatagggctgggtcatgttataagacaaatggacagggagggcatgcttctcaaaaaatgtgagctattgtctaagactaacaatatttatctagctataaaaataagttaaatgaataagttaagattgccaatgttacttcacaataaattcagtcctatttgtgttggagtaaatctcatagaagcacatgaagaacagcagtgaaaccaaggattctagcaaggccagctattagcaaagcagtaagcaggaactggactagataccaaatgatggggaaacagactcatagacctaagaacataggaagaagagatgtaacatcaacagaaaggcaaaaggtaagctctctgtattctttcttctctctctctttcaattcttccccctttgcttattccctttttttttctggaattacattttaaattaagttttagagctatgtggtaaattatttggtccaattcctttatactttggatgaggtaaagtgactaacagaggtccccaccagtaggagcccaagtcagtctgtgagctcagtgctcctgatactaactaagtccagtgccctttcaaccacataacatggcattgctttacaaaatcaagtcctacaacagactgagaggtaaactg

SEQ ID NO: 25413 - DNA, 3892 bp, Homo sapiens
  misc_feature 1, 2, 3, 4, 5, 6, 7, 3892: n = A,T,C or G
nnnnnnnaagtaaagtttagaggtgtaacctgtatcagagggaaagaaaccatgccaattgaacgactcacagccccgtcgttcctgacttgctcattgtctatgctttgccagaacttcttcagagaccaagtcaggcagctctggcgactggagagaggcgggttagaaggtgtttgtgtgggtctgagggctgaggtaccctctagccagactttcctgtcctccgaatccagcagggaacagcgtcacctcgtgcctctgtgaggcttctgatctgagggggcacctcaagtcattttagtttgtgtgttttcatcttagttgaaagatgataggccacaggagggcgtccgcaactgtgttgaggcaagctggcttttgtgtcggcccttaggggctgaggtgaaaggctttgacacggagccagggtagctttggcagcttctcccctcctggtcagaacacttccactttcagttgtgaaaaaaaaaattaaaaccaggaagtgaagtccccgagcacgttagaaagcctgacatggcctgactcgggacagctcagagcagggcagaactggggacactctgggccggccttctgcctgcatggacgctctgaagccaccctgtctctggaggaaccacgagcgagggaagaaggacagggactcgtgtggcaggaagaactcagagccgggaagcccccattcactagaagcactgagagatgcggccccctcgcagggtctgaatttcctgctgctgttcacaaagatgctttttatctttaactttttgttttccccacttccgaccccggcgttgatctgcatcctgacatttggagctgccatcttcttgtggctgatcaccagacctcaacccgtcttacctcttcttgacctgaacaatcagtctgtgggaattgagggaggagcacggaagggggtttcccagaagaacaatgacctaacaagttgctgcttctcagatgccaagactatgtatgaggttttccaaagaggactcgctgtgtctgacaatgggccctgcttgggatatagaaaaccaaaccagccctacagatggctatcttacaaacaggtgtctgatagagcagagtacctgggttcctgtctcttgcataaaggttataaatcatcaccagaccagtttgtcggcatctttgctcagaataggccagagtggatcatctccgaattggcttgttacacgtactctatggtagctgtacctctgtatgacaccttgggaccagaagccatcgtacatattgtcaacaaggctgatatcgccatggtgatctgtgacacaccccaaaaggcattggtgctgatagggaatgtagagaaaggcttcaccccgagcctgaaggtgatcatccttatggacccctttgatgatgacctgaagcaaagaggggagaagagtggaattgagatcttatccctatatgatgctgagaacctaggcaaagagcacttcagaaaacctgtgcctcctagcccagaagacctgagcgtcatctgcttcaccagtgggaccacaggtgaccccaaaggagccatgataacccatcaaaatattgtttcaaatgctgctgcctttctcaaatgtgtggagcatgcttatgagcccactcctgatgatgtggccatatcctacctccctctggctcatatgtttgagaggattgtacaggctgttgtgtacagctgtggagccagagttggattcttccaaggggatattcggttgctggctgacgacatgaagactttgaagcccacattgtttcccgcggtgcctcgactccttaacaggatctacgataaggtacaaaatgaggccaagacacccttgaagaagttcttgttgaagctggctgtttccagtaaattcaaagagcttcaaaagggtatcatcaggcatgatagtttctgggacaagctcatctttgcaaagatccaggacagcctgggcggaagggttcgtgtaattgtcactggagctgcccccatgtccacttcagtcatgacattcttccgggcagcaatgggatgtcaggtgtatgaagcttatggtcaaacagaatgcacaggtggctgtacatttacattacctggggactggacatcaggtcacgttggggtgcccctggcttgcaattacgtgaagctggaagatgtggctgacatgaactactttacagtgaataatgaaggagaggtctgcatcaagggtacaaacgtgttcaaaggatacctgaaggaccctgagaagacacaggaagccctggacagtgatggctggcttcacacaggagacattggtcgctggctcccgaatggaactctgaagatcatcgaccgtaaaaagaacattttcaagctggcccaaggagaatacattgcaccagagaagatagaaaatatctacaacaggagtcaaccagtgttacaaatttttgtacacggggagagcttacggtcatccttagtaggagtggtggttcctgacacagatgtacttccctcatttgcagccaagcttggggtgaagggctcctttgaggaactgtgccaaaaccaagttgtaagggaagccattttagaagacttgcagaaaattgggaaagaaagtggccttaaaacttttgaacaggtcaaagccatttttcttcatccagagccattttccattgaaaatgggctcttgacaccaacattgaaagcaaagcgaggagagctttccaaatactttcggacccaaattgacagcctgtatgagcacatccaggattaggataaggtacttaagtacctgccggcccactgtgcactgcttgtgagaaaatggattaaaaactattcttacatttgttttgcctttcctcctatttttttttaacctgttaaactctaaagccatagcttttgttttatattgagacatataatgtgtaaacttagttcccaaataaatcaatcctgtctttcccatcttcgatgttgctaatattaaggcttcagggctacttttatcaacatgcctgtcttcaagatcccagtttatgttctgtgtccttcctcatgatttccaaccttaatactattagtaaccacaagttcaagggtcaaagggaccctctgtgccttcttctttgttttgtgataaacataacttgccaacagtctctatgcttatttacatcttctactgttcaaactaagagatttttaaattctgaaaaactgcttacaattcatgttttctagccactccacaaaccactaaaattttagttttagcctatcactcatgtcaatcatatctatgagacaaatgtctccgatgctcttctgcgtaaattaaattgtgtactgaagggaaaagtttgatcataccaaacatttcctaaactctctagttagatatctgacttgggagtattaaaaattgggtctatgacatattgtccaaaaggaatgctgttcttaaagcattatttacagtaggaactggggagtaaatctgttccctacagtttgctgctgagctggaagctgtgggggaaggagttgacaggtgggcccagtgaacttttccagtaaatgaagcaagcactgaataaaaacctcctgaactgggaacaaagatctacaggcaagcaagatgcccacacaacaggcttattttctgtgaaggaaccaactgatctcccccacccttggattagagttcctgctctaccttacccacagataacacatgttgtttctacttgtaaatgtaaagtctttaaaataaactattacagatacaaaaaaaaaaaaaaaaaaaaaaaaaaaaaaaaaaaaaagggcggn

SEQ ID NO: 25414 - DNA, 1032 bp, Homo sapiens
  misc_feature 1007, 1008, 1009, 1010, 1018, 1019, 1020, 1021, 1022, 1023,1024, 1025, 1026, 1027, 1028, 1029, 1030, 1031, 1032: n = A,T,C or G
gacccacgcgtccgtcgcgggcgccgagaggagaggcgaggcgggagcgcaagcggcggcggccactgccacgtattcccggcagtggtggcggcggcggcggcggcgcccgcgggcaggaataactcaagtcacctgtactggaaatcagtttgctgaaattaatcaacgattcttgaagttgaagaaaaggaggttccagccttggcaagaggagtgtggcccttcctggaatccctctggacacaccctcctagcatcctctaggaaagatgcggcagctcaaagggaagcccaagaaggagacctccaaggacaagaaggagcggaagcaagccatgcaggaggcccggcagcagatcactacagtggtgctgcccacgctggccgtggtcgtgctcttgatcgtggtgtttgtgtacgtggccacgcgccccaccatcaccgagtgagccccgcagccggccgcggaccccatcggcagggagaggaggcgcgggagggggacgcaaacaaaaaatggctttcatattcagagatgttcatgttgctgagctgtaagcaggagcaccctgtcttctctggtctttgacttgattaaagtatctccgctttcttgggagggaataggggatgttttatcagtgaatgtgccatacaccttatggtccacttcatgtgcctttcagacttcaaagcgcgcgcgcatgtgtgtgtgtgtgtgtgtgtgtgtgtgtgtgtgtgcttctttttctctcctaaaaatcgataagtagctccacctgaagagggatggaacctctgggtcaggaaacagctggaatccacactcacctcattcccattgtttggatcatgcttctttccaacacgtgttcacaatctccaaagggactgtatttcttctctgtgcttaatgtgatttgaaatatgttgaatcaaagtgaaatatttattttttgaataaaggagataatagccttaaaaaaaaaaaaaaaaaaaaaaannnngggaagannnnnnnnnnnnnnn

SEQ ID NO: 25415 - DNA, 4372 bp, Homo sapiens
agggagtcgcccacgcgtccgggttccggcaccggatagcatgtttttggcccagaggagcctctgctctcttagcggtagagcaaaattcctgaagacaatttcttcttccaaaatcctcggattctctacttctgctgaacattctgttgttttcctctgccatctagtggcaaaagaaagtaattttcctggttttttgaatggatagccataccttaaaaagcatccagattgcgcagtagtgctagcggcttcgcggttcagtcctcctaactgacagccgccactggtgctgagctgctaggaagcccctgtcggcgagcttgttggagcttgaacccattgtcacccctccgactcaccggcccaaaaaaaaaaaaaaaatggttgaagcagatcgcccaggaaagctcttcattggtgggcttaatacggaaacaaatgagaaagctcttgaaacagtatttggcaaatatggacgaatagtggaagtactcttgatgaaagaccgtgaaaccaacaaatcaagaggatttgcttttgtcacctttgaaagcccagcagacgctaaggatgcagccagagacatgaatggaaagtcattagatggaaaagccatcaaggtggaacaagccaccaaaccatcatttgaaagtggtagacgtggaccgcctccacctccaagaagtagaggccctccaagaggtcttagaggtggaagaggaggaagtggaggaaccaggggacctccctcacggggaggacacatggatgacggtggatattccatgaattttaacatgagttcttccaggggaccactcccagtaaaaagaggaccaccaccaagaagtgggggtcctcctcctaagagatctgcaccttcaggaccagttcgcagtagcagtggaatgggaggaagagctcctgtatcacgtggaagagatagttatggaggtccacctcgaagggaaccgctgccctctcgtagagatgtttatttgtccccaagagatgatgggtattctactaaagacagctattcaagcagagattacccaagttctcgtgatacaagagattatgcaccaccaccacgagattatacttaccgtgattatggtcattccagttcacgtgatgactatccatcaagaggatatggcgatagagatggatatggtcgtgatcgtgactattcagatcatccaagtggaggttcctacagagattcatatgagagttatggtaactcacgtagtgctccacctacacgagggcccccgccatcttatggtggaagcagtcgctatgatgattatagcagctcacgtgacggatatggtggaagtcgagacagttactcaagcagccgaagtgatctctactcaagtggtcgtgatcgggttggcagacaagaaagagggcttcccccttctatggaaagggggtaccctcctccacgtgattcctacagcagttcaagccgcggagcaccaagaggtggtggccgtggaggaagccgatctgatagagggggaggcagaagcagatactagaaacaaacaaaactttggaccaaaatcccagttcaaagaaacaaaaagtggaaactattctatcataactacccaaggactactaaaaggaaaaattgtgttactttttttaaattccctgttaagttcccctccataatttttatgttcttgtgaggaaaaaagtaaaacatgtttaattttatttgactttcgcattgcttttcaacaagcaaatgttaaatgtgttaagacttgtactagtgttgtaactttccaagtaaaagtatcccctaaaggccacttcctatctgatttttcccagcaaatgaggcaggcaattctaagatcttccacaaaacatctagccatctaaaatggagagatgaatcattctacctatacaaacaagctagctattagagggtggttggggtatgctactcataagatttcagggtgtcttccaactgaaatctcaatgttctcagtacgaaaaacctgaaatcacatgcctatgtaaggaaagtgctattcacccagtaaacccaaaaaagcaaatggataatgctggccattttgcctttctgacatttccttgggaatctgcaagaacctcccctttcccttcccccaataagaccatttaagtgtgtgttaaacaactacagaatactaaataaaaagtttggccaaaaccaaccatgaagctgcaaaggtgcttgctcttactgtttcaaatttttgcaactctgtagtgtctcacttttaaaggaacagcttgattgcaaaggagaaaatagataagcaatgaagttatctccaacttcctaaaggcttatgacttctaaaaagtgaatctatcagcattccacatcagatttaaagcatcaaatgcctgtgaaacagcaaagatggtaagcaaagcaaactagtttttccgtctaagtcgaaattgaacacttaccttcctcatagtacagtgaaacatactgtacctcaaggcaatggaaatgccttctagattaaaaaaaacttttggaaaaaagaaatattcaatagcgtattagaagtcctccaaattcaacacttggattttttttttttttttttaaagcatgtgtgacacttaaaggctttattaatagagctgttgtttaccaatggcgatctggggcttgggagggggtatttttttcaaagtccatttttgatgaagacctttaaacatgcttcgtatgtttttaacatttttttcaaattagtcttttagtcaatataggaaatggcttaagtttggggtccccctttttacccctgtaagccattgcaaacttgacatttagttggatgcctgacttgtttttagttctatgaaactacactgtatggagaaaatctattgcaagtggtctttaaaaagcaaaacctgaggcagcatgacccaggtccagccatgaagttgaaaaagatgctcttgaatatagtaaacttgaagacctccaactaaaaatccttatactgcacttattccttcaaataagttttgttcgttcaacttatggatttaacgtggcagtgcaccattggaacagaatgacaatccataagccatgcaacttaacaatttaagccattccagtccatcccgagccagtgaatcttccaccacttaagacaaatagtagaacatgaaatatattaagctgcaagtctgaacttgccttttctttctggaaaagagggcagtaataggcaagttttaaaagaatttccttaagagagataactagttttcatttatttaacttttgcaggttggtgattttgctcattatggtcgtggagtgctgattgattcacagtagataaagctggcagtaagaaatgctaagagttgttgaagcagaaggcggctgattgtcaataagtcactacagttgcataagcagtgctgtcagaattggtttggtgcaggcaatagattttgccttcaggggttcctgtggatctgaggaaggcatcagtgttgattaacactcataactagggagtgactggtagttacttaaagcaagtaattgaccaaatggaaaaggggaagtaattaaggaaattggtaagtggaggtagtcaggaagttcttgtggttcttcacatagattttacagctttggctttcattttgtttagctaaagtcatggggacaactcttcaatttagaacttaagttgaattataaaaatgatggatataagtggtagctgtatctagtgaagtgtctgtcagtaagtgaaacattttttggtggtggcttatccacaaacagtttagttgtagaataaaacttatgagtgacatctggaaagtaaccatgctaagatggcaagcacactggaaacaattaggccacttggctttcttttgctgtattgttttataagcctactttacctcccagtcttggaaacaagttttagttttttattggtttggagactagagccaatagtataatgttctcaaaggaaacagacttgagttgttggattagaggaactaacccaacttatatgatttttttttgtttttgtcgtgtagttatggcactgtcttatttggaacatttgcaactagggataatacaacattttttattctcattgacaactaatactaatcacagagcacaggttaatgccactgtatgtggtgtggctcatagtggtttagccatcttctaactctagatactggttaagttctggaggctcgggcggaaaccaaatttaggaatagagcttgcgaagtctggttccgtgcctgacaa

SEQ ID NO: 25416 - DNA, 2550 bp, Homo sapiens
  misc_feature 1, 2, 3, 4, 5, 6, 7, 8, 9, 10, 11, 12, 13, 14, 15, 16, 17,2538, 2539, 2540, 2541, 2542, 2543, 2544, 2545, 2546, 2547,2548, 2549, 2550: n = A,T,C or G
nnnnnnnnnnnnnnnnnacgcgcccgccgccccccccgcgggcgataaccgttaggagggtctcccgagatgacagcccaatccaaaggtttccataaatcccagtcccggccgacaacagcccaactgaatatagctcctgggacccattaaaatgtagcgaacagtctacctcgtcaaaaagaatgcatgtaaaatatttggtgaaagaatttttttgtttaaaaggtgaaaaaaaagtataaacccaagaaactgattcactcccttacttcatgcatccataatctaaacccaaaacgaaattttaaagcaagaacaaactactgctgcaagtttttgtaagtccattttctctgtacatacaaactgctcactactgaagggaaaaaaagaatataatccatggtgtctgctgattcaaaggggagaaacaaggctgtcatttagtatccaaaaactggtacatgtatgttctgcttttataatgtatatttttctctcttctgtttttcatatccaaaacttctaaatgctattttaggggcacagcagattagattccagcacttggtgaacagaattcacaagctgtgacaaaactctgtcatcttcagggtgcaattttgtttatatacactgtatgtatatatttcttttagatttggctgtagtggactggccatggttcaagtgggactatagcagtacatgggtcagggacagtcattttggctatgtacacattcatagtcggtccatggcttccaactagtagcgctatttccgaaggtctaatacacaaactgaaccatctgatgcactggctccaactttgtctcctgctgcattccagcaaacttcaaatattccacctgttcccctatagctgtgaactagagcacctgtctgcgtgttccagatgtgtacacatttgtcaaaagaaccacttgccagatacctgccatcaggactgaaagctacactgtacacaggctcttggtgttttgtcaaggtatggatgcatatccctcggtctacatcccataacctaacagtagaatcaaaggatgcacttgctaacataaggttggcatttggattattagtccctggtcctgttggactccatttgatagtataaatttctttattatgtgcttgcaaatcatggacacaattgtcttgtttcatactccatatctttaaagtcatgtcgtcagaacaggaggccaagagattgccagttgggtcccatttgatagcatttacttcattcgtatgtccttggaatgttttaataggtctgtcttgtcctaatttacagacatgaatgcacatatctgtactacaagaagcaaaggtgttgttgctctgccaatcaacatccaatgctggtgctgaatgaaaaggaaactgttgcttggcttcaccagtatgtgcgtcccaaataattgtagtcttgtctactccagcacttaggatgaaatttcctttcttattccattttaatgcaaatatagggcctttatgctgccctaaggtgctagcaaggttaccatctttagtccatattctggcaaacccatcataggaaccagttgctagaagtgtaccttcactattccaatctagagatgtgacatccttgttgcttggaacatcttgccctccttctcgtatacaatgtctaagtactaactgtgtagagccactggtgctgttctcactaagattccatattcttgctgttgagtctccagaccctgatgctaggagatcactaacagggttccaggcacagataaaaacttcagattcatggccccgcaacacaacagtctttattaggagggatttcaacatccccatccacttccatcatatcagtatgattatttgctatagtatgtgctccattctcctccccatttgctgtgttttctccattttttgcagatccttgttggctggctgcagctgcggcagctgcagcagctgctgcctgttgctgtgcaagcttatctctataagcttgttgtcttgtttgtactacatcaggcattacggcatctatcagggacagagactctattggtcgaccatcaaacaaggtaccatcctcattaatactaacttctgcttctacatactgtagacctttctggatgatagaaatcaatgcagcgggtgggacgagggcaccatttatattggactgactgatatggctttctataccaaaggtaaatgctgaatgagaaaatcctgactcttgcaagtatctatataccaagaagttgacctcatcactgcttatactcatctttattcccacttaaaccatgaggtcacaacacaggatataacccattggcagtgcattgatgtggggatgtgcaactgaatatccggtcaccgccaatcacaagttgctgttgttgatgctggaaacggtggcctccaacgccgctcccccctcccgggaatggaggcacaaggaaattccccctgaccgccgccgccaccgcctccaannnnnnnnnnnnn

SEQ ID NO: 25417 - DNA, 3114 bp, Homo sapiens
  misc_feature 1, 2, 3104, 3105, 3106, 3107, 3108, 3109, 3110, 3111, 3112,3113, 3114: n = A,T,C or G
nngcctgtatcgttatagatcctcgcgaatacaagttaattatcgtgtggtcacgctgtgcgcgtgcggtccacgctttatcttgttcaccgggttgtctaggccggtcagacccgggtgggtatgaacccggtggcatgcccgcgatagggcccatactcgcggggaagctccgaggggccacgtagatctttatcttaaaggtgttactgcgatacaatgtgttaaatttcctaatatctctagatatgcaacatgtcttgcttttcaggctaaggtccagatgtgtcgtgagacagtggattttgtaggtcttctgcgaagtatagaatattttgtgtgtgtactcgctgtcgtctggatgatttatttttgtggtttttttgttttgttttataggtgtttagatgtagttcatcatgtgatgtgcgcggaattttgctggtgtggtcggtctagcggtccttttgaggttcctcttggcactggtttcgtgggtgggggccgtgtggtcactgtgtttggtttgttgcttttgaggtctgctatggtggtgttcatggtgccccgcgttttgtgtgtctcttccgtgggttggtaagtccctctgcctttatccaattatctatgttcgctagtaaattatgtttcacacggcgtgagggggttgttggcgcgctgtggtagattcccactgtactactcggaggagggctgagagcacggggaggtgtcgctctttgtacctcgggaggtgttgatggctgtccctggtggggctcgtccaggttgggctccctgtccttcttctcttcctgggcgggtctatagtgaggacctctttccgtatatatataataactataaggtaagcagtaggaaagtggaattgaaggagagggtagtaaaggtagctggaaaagagagagtttggagtatggttgagaattgagcgtgaattgtttagaatagagattagtaacagacaataaaagagaaactggtttttccaagtcaagggtgagcagaaaccgggagcttcctgctcgtgttcgctgttgagaagctacccgcggggttgtagacctcggacctcatggcagagataattcaggaacgcatagaagatcggctcccggaattggaacagctggagcgcattggactgttcagtcatgcggagattaaggctatcattaagaaggcttccgatctagagtacaaaatccagagaagaacccttttcaaggaagactttatcaattatgttcaatatgaaattaatcttttggagctgatccggagaagaagaacacgcattggatattcatttaagaaggatgagattgagaattctattgtacaccgggtacaaggtgttttccagcgtgcctcagcaaaatggaaagacgatgttcaactttggctctcctatgtggctttttgtaagaagtgggctactaaaactcgacttagcaaggtattctctgccatgttggcgattcattccaacaaaccagctttgtggattatggcagccaaatgggaaatggaagatcgattgtcttcagaaagcgcaaggcaactatttcttcgcgcactgcgctttcatccagagtgcccaaaactttataaagaatactttaggatggagctgatgcatgctgaaaaactgaggaaggagaaggaagaatttgaaaaagccagtatggatgtggagaatcctgattattctgaagaaatccttaagggcgagttggcatggatcatctacaaaaattctgtaagcataattaaaggtgcagaatttcacgtgtcactgctttcgattgcacagctatttgactttgccaaagatctacaaaaagagatttatgatgaccttcaggctctacacacagatgatcctctcacttgggattatgtggcaaggcgagaattagagattgagtcacagacagaagagcagcctacaacgaaacaagccaaagcagtggaggtcggccggaaggaggagaggtgctgtgctgtgtatgaagaggcagtgaagactctgccaacagaggccatgtggaagtgttacatcaccttttgcttggaaagatttactaagaagtcaaatagtgggttccttagagggaagaggttggaaagaaccatgactgtattcaggaaggcacatgaactgaagcttctgtcagaatgccaatacaagcagttgagtgtttcgttgctgtgttataacttcctgagggaagctctggaagtggcagtagctggaactgaattgtttagagactctgggacaatgtggcagctgaagctgcaggtgctgatcgagtcaaagagccctgacatagccatgctttttgaagaagcctttgtgcacctgaaaccccaggtttgtctgccattgtggatttcctgggcagagtggagtgaaggtgccaaaagccaagaagacactgaggcagtctttaagaaagctctcttagctgtcataggtgccgactcagtaaccctgaagaataagtacctggattgggcttatcgaagtggtggctacaaaaaggccagagctgtgtttaaaagtttacaggagagccgaccattttcagttgactttttcaggaaaatgattcagtttgaaaaggagcaagaatcctgcaatatggcgaacataagagaatattatgagagagctttgagagagtttggatccgcagattctgatctttggatggattatatgaaagaagaattgaaccacccccttggtagacctgagaactgtggacagatctactggcgagcgatgaaaatgttgcagggagagtcagcagaggcatttgtagctaaacatgctatgcatcagactggccatttatgaagatgaagaatacagtcagctttgtgaaatagtattgcaagcaagccccgtgggcaaatttgtattgagtccatctgtaatttgctcagtgatggcagacaagatggctgtctggttttgagacacactttaattttatgttaacttgttaaatctttttaaaaattaaaaaatttttatgattgactaaaaaaaaaaacctacaaaccttccnnnnnnnnnnn

SEQ ID NO: 25418 - DNA, 913 bp, Homo sapiens; identical to SEQ ID NO: 22725
  misc_feature 1, 2, 3, 4, 13, 16, 17, 18, 31, 37, 45, 51, 53, 59, 61, 64,66, 67, 73, 75, 80, 88, 91, 98, 100, 108, 111, 119, 121,124, 751, 752, 789, 790, 792, 794, 798, 803, 808, 814, 819,825, 827, 831, 838, 841, 846, 852, 854, 855, 856, 857: n = A,T,C or G
  misc_feature 858, 860, 862, 867, 868, 870, 874, 877, 882, 885, 886, 887,888, 896, 897, 898, 899, 900, 901, 902, 903, 904, 905, 906,907, 908, 909, 910, 911, 912, 913: n = A,T,C or G

SEQ ID NO: 25419 - DNA, 221 bp, Homo sapiens
ggtggcggccgcccgggcaggacgcgggggccgtgaagagctttgcattgtgggaagtctttcctttctcgttccccggccatcttagcggctgctgttggttgggggccgtcccgctcctaaggcaggaagatggtggccgcaaagaagacgaaaaagtcgctggagtcgatcaactctaggctccaactcgttatgaaaagtgggaagtacctgcccgg

SEQ ID NO: 25420 - DNA, 1844 bp, Homo sapiens
  misc_feature 1, 77, 1825, 1826, 1827, 1828, 1829, 1830, 1831, 1832, 1833,1834, 1835, 1836, 1837, 1838, 1839, 1840, 1841, 1842, 1843,1844: n = A,T,C or G
ngatatcgaaattccttgcaggcccggggggaatccacctagttctagagcggcccgcccgggccaaggtacgcggngggagctgccggcaggaccctttctctcgctgcgctgggaccccgtgtcatcgcccaggccgagcacgatgccccctaaaaagggaggtgatggaattaaaccacccccaatcatggaagattggaacctcactgaaaatggtattgttggatgccaaatgtgggaaatctactttcttcaatgtgttaaccaatagtcaggcttcagcagaaaacttcccgttctgcactatgatcctaatgagagcagagtacctgtgccagatgaaaggtttgactttcttgtcaataccacaaaccagcaagcaaaattcctgcctttctaaatgtggtggatattgctggccttgtgaaaggagctcacaatgggcagggcctggggaatgcttttttatctcatattagtgcctgtgatggcatctttcatctaacacgtgcttttgaagatgatgatatcacgcacgttgaaggaagtgtagatcctattcgagatatagaaataatacatgaagagcttcagttaaagatgaggaaatgattgggccattatagataaatagaaaaggtggtgtgagaggaggagataaaaaactaaaactggaatatgatataatgtgccacaggtaaatccgggttattggattcacaagaaacctggtcgttctatccatgatggatgccagccaattgcagtggtgattaacacttatttggctttcaaaccaggtctactggtaactttcggaacaggactcttgccaggaccacactgggcgatcacaatccacgactgggtgggcacgtatgaccccgctgctttggccattcctcttaggggcggcaccactgggaacgcgcgcccccagatctgcgcccggacgagagacagaagtatctggaagcgaacatgacacaaagtgctttgccaaagatcattaaggctgggtttgcagcactccaactagaatactttttcactgcaggcccagatgaagtgcgtgcatggaccatcaggaaagggactaaggctcctcaggctgcaggaaagattcacacagattttgcacaagggattcattatggctgaagtaatgaaatacgaagattttaacagaggaaggttctgaaaatgcagtcaaggctgctggaaagtacagacaacaaggcagaaattatattgttgacgatggagatattatcttcttcaaatttaacacactcaacaaccgaagaagaaatcacctttagttattgctcagataaacatacaaattccaaaaggcatcctgatttttcacacaaacttccacaaatttctggaaaaccattgggacaatcaagtggggagactggcaactctggccaaccaattatttcaattgggttcaactttaatactggggggtgtcccccccccccctagtaaatgagggggtccacaaaggttgacaccctggggatgaccggggttaaaaaccaacctccaatgtggtgaaagattaaggaacgccaataaatcgggaaaaaaaaaaacaaccagtaggacgaaccacatgaacagggacgagaagaggccgctctgaaacacaaacgagagagagatcccaggagcgtaatacaaagaagaaagagaaaaaaaaggagaggcggggacaaaggagccgagagacgacacaaagatcatgccagaaacgaaaagacgcacgaacagcagatggacaaaacaagaagaacaaaagagcaagaannnnnnnnnnnnnnnnnnnn

SEQ ID NO: 25421 - DNA, 1521 bp, Homo sapiens
caggaattcggcacgagaactcctgccagaaacagctctcctcaacatgagagctgcaccccttcctcctggccagggcagcaagccttagccttggcttcttgtttctgctttttttctggctagaccgaagtgtactagccaaggagttgaagtttgtgactttggtgtttcggcatggagaccgaagtcccattgacacctttcccagcattttgggagtccgaggtgggcagatcacttgacggaattgtactttgagaagggggagtactttgtggagatgtactatcggaatgagacgcagcacgagccgtatcccctcatgctacctggctgcagccccagctgtcctctggagaggtttgctgagctggttggccctgtgatccctcaagactggtccacggagtgtatgaccacaaacagccatcaaggtactgaagacagtacagattagtgtgcacagagatctctgtagaaggagtagctgccctttctcagggcagatgatgctttgagaacatactttggccattacccccagctttgaggaaaatgggctttggatgattattttatgttttagggacccccaacctcaggcaattcctacctcttcacctgaccctgcccccacttgccataaaacttagctaagttttgttttgtttttcagcgttaatgtaaaggggcagcagtgccaaaatataatcagagataaagcttaggtcaaagttcatagagttcccatgaactatatgactggccacacaggatcttttgtatttaaggattctgagattttgcttgagcaggattagataaggctgttctttaaatgtctgaaatggaacagatttcaaaaaaaaaccccacaatctagggtgggaacaaggaaggaaagatgtgaataggctgatgggcaaaaaaccaatttacccatcagttccagccttctctcaggagagggcaagaaaggcgatacagtggagactctggaaagtttctccactgggaaactgctactatctgttcatattcggtcaccatatttgaggtacagaactaaaaattaaacctcttggtgtccttggtccggaccattatggtcctttaaagaaccaaattcaactttccgaagcattgcgctgtaaacattaggagctggagataaattttcagaacaaagcactgattgagaacacgcatgtggccaccattcgggaataggcccaggatggcttccaaagcccagatcaaacgtgccaacagacacacgcccggggagaccaataaaaactacgcaggcagcgaactactagccaggacactaggacgagaggctttcacaagaaaaaaatccgcgcgagaacattggggcgagttcccattcaccgctaccctgctgcgtatggtagcgcccatcccactcttgttgatagcgacgagtaatcaagtagtagagacgaatacaagaaagtgactgtacaaaaaacgcaaagagagaacgaacacaga

SEQ ID NO: 25422 - DNA, 802 bp, Homo sapiens; identical to SEQ ID NO: 21464

SEQ ID NO: 25423 - DNA, 1617 bp, Homo sapiens
aatctcttacagagtcgccgcgttatccggactccctccaaggtgttaggggaatcgcccggtttcaaagcaactgaggttcagagcgcaaccatcgggcgctcaggaggctaacggaagcgtaccctgggggtctttcgaagagacccaagccgtgggccaccaccacgctaagagagtcccaccatgccccagacaacccggtggctcccccgatacggggaggagagagcttaaatgaagcccacttttatggcctctttgtagtaaattctgtggaaataacatttgggttaaatttggggactttttttgtaaggagaatatggtttaataaataatagttggccaattgatgacattaaagatccatatcaccatcttgtttccactcccaggtaatgaattatccgaaaaagatggaacgtgcgttctcaccaggacctccaggttgattagtggagccacctgttgtctccagaggagatgcaccacagattgcattaataatacccagaacaggggatgggtgatacattcttgcttctcatagatagcatagtttctgtatgttaatagacttgttgggtagctattaaggtactagagttgataaatgtgtacagggtccttttgcaataaaactggttatgacttgatccaagtgtttaacaattggggctgttaagtctgaccatacatcactgtgatagaatgtgggctttttcaagggtgaagatacaagtcttaaccacagtgtaacttacagtttcctttaaaaaaaaaaaaagtaaacctggcagctatagaatacactatgtgcatttataatagctattttatatattgtagtatcaacatttttaaattaaatgttttacattcacaagtggtggggagtcttgtcattaaggtgtgtgtaatttagagtccagttggttttcttctgactgcacttgttctcatagtagtaaaatgctatgcgcatttataccttgcataagtcctcattctaccacatgttaaccctctagctgataatgcaaacactaactgggggaaatagggctctagaaaaaacgagttattcacaccagcatcatcttaactaacattctgaactagttagtgcagcttttcattgtgttgtgtggttggtctcataactagggtgagtttttctcctctgctgaggaaacagtaccgaagttctttttcttgtggcatttgtattataaaaacttggtgtgggggaggagcacaaaactccagcccactgaacctctgccaattaagatggtgttgggttaggttacatctggttactgtcctgggaaaatcatttttatagagatggccttccaagtggttttaaaatttactgaagttgaagggccacaaagccgtggaccaattacacatacctgttgtccacactgaagaagcaaaacaaactggtggggcgccgcgccgaaaaatttacacagcgggggcgggggaccaagaagggaaaggacgaggtacagagaaacggacgaagagtggggtccaaaaagacggggacagagtggaaaccagggggctggtacaagccgcacacctcgcgcgggaacccac

SEQ ID NO: 25424 - DNA, 1788 bp, Homo sapiens
  misc_feature 1, 2, 1788: n = A,T,C or G
nncatttaagctagttctctgaaaattttgccatttatctacagaaatttgattataaatatgttcctttttcaaagaaactttattctagagcaaaatagtctatatggtacttgatctacatttaagtggaaaaattagcagtatttgaaagctcagtttatgtcattgtcttaacttcagatacaaataactgaacagaaagttttaacctttaatatctcatgttctgttttttattcagtattttcctttatgttgattcaattatatacttctgaatggcaccttactttttggaaacaaatcttctgttatttacaaaataataatttttaaaaaacatttaaaaaaaatccaaagctgctctcgataatagtcaacatttgcatatatatggaatttcttactttttttctcccaaactctatttaataaacttattttaatgtttgtgtatttcatgtataattgtgatctcaattataaaagtttaattcagcatgtctttgagccaatataattactgcacacccactaaattgggatcagccattataaataatgtagttttagaataataaaacatgacacatatatatatatataaatatatagtatatattggcacatcggtgaaagtttatatgtgcagaagtttttttctttctcaagttaaaaattattttttgccatatgtaattttgtgttgcaggctgtcgagagataaaaatgattttaaatctgtgtactgatgattctttcggtgttaagaaacacagggttgtgtacttccctttttatgggcttatggattctatttatattaagacctgtttataattgttttctgccaaagggaattgtctaacttcagatttctacattgggttcatacttactgttttatatcagaaataaaaaaatagcttctgctttttcatatgaaatcttggtacatcagaaagaattcctgaaaatttataatagaatgaattttattaatgcagaaaaataccccagggtgttaaaatatatgaagtgtgggatatattcttatagtttgtaaaatgtagtcaaccaatactgtcttctaatttggtaatttatttataaaattacttaaacattaggtaattatatttgttaggatttgaaattatttgtagttaaattgtcatgctgtttgaaataattgatacttgtctacgtaatacattttactgtatgttttgaagatggttataatttcactttcaaaatttaaaaaatcaattttaaatgttttaaaaacatatagcttagggattttttttaaaaaggttttcttagtaaaaacataaatttaaaagcccctgagttctaggagagggcttattgaattgctataagaaagctggagttactttgataagtaataaattataaatagcactgatctataatgctttatttctatcggaaggtactttttcttctttcatcatcagttttagccagttagtaaatgggaatactcagttttagggatttgatttttgtttggtttaattttctttcaaaaattaaaagtatatttctaaaagttttccccagaggccagatacagtggctcatgcctataatcccagcactttgggagcctgagataggagtattgcttgaggctacgagtttgagaccaacctggcaacatggcaagaccctatctctacaaaaattttaaaacttagccaggtgtggtagtgcacctgtagtcccagctagtcagtaagctgaagtgggagn

SEQ ID NO: 25425 - DNA, 3744 bp, Homo sapiens
  misc_feature 1, 2, 3735, 3736, 3737, 3738, 3739, 3740, 3741, 3742, 3743,3744: n = A,T,C or G
nncgacccacgcgtccggtcctttaggtatcccccagaccagtcagaacagacacataataatttgcgggtaagatcttctcttgttcctttggaccatggaccagggtttctcactgggaacgtgggcctctgacacttcaaaactgccaatttgctggggcaaaggcaagttaaaaatgtcataaagttttccagttgtctttttctttagtccgctatcactcggttgttgtaatcttttgaccattttccagagtttcggcaaagttcattcggacagtttctcttagttgtgtgatgtttctgtggggaaatgaaagattgcagctgtctccagtgccattttgctgatgctcctcttttgtcaatttttgcttcatgttattatgctttgttattagttcatgtattagttttctagggctgccataaccaagtaacataaactgggtgccttgaacaacatacatttatagtcttatagtcctggaagctaaaaatctgaacttgaggtgtcagcagggatggtcccttcaagggctatgagagaaagtctgttctatgccttgtgtctagcttctggtggtttagtggcagtctttggctttccttggctaatctctgccctcataatcacatggtactctccccgtgtgtatgtctccctctgctcaaatttcttctttttataaggacatcagtcatattgaattcaagctcatctgattttatcttaacttgatcacctgcaaagaacctatttcctcatgaggtcatattcagtggttaggatttcagcatctatatagaggaaaacaatttagctcatatcggtgcatacatgattgtaatagctatgtcttcctaaagcgttgacccccttcttaatacagtataaatttttaaaatcctattcacatttttaatagtctatattgtgtcttatgagtataatgagttcagtgttcttatgattgccctttgcatgataatttttgtcatcttttttactttcaacccattagtatccttgcatctccgagtatattgggatcacttgttttaatccagtctgacaatctctgcctcttgattggattttaatctgttcacatttaatattataattggtataattctgtttatgtctgccattttaccgtttgttttgtatatttctcaaatatttatctttattgctttattttgcaatgaatgaatattttctaaaatagggaactttagattactaatgaattattttactatatatttttgagaatttttgttgttgtaagtttaccatataggtatacggaaaattaattattcaaatcaccttccaacttatactagtaaaattttagtaacacatagaaacatcattcttatacaaatctcttttatttcctccattttaaagtattatcactttacatattacatctattaaagttacaaagccaacaatacattttagtaattattactttaccatctagagtgattaccttatcacgatatatttttcttccaactacctcctttttgatgttactggaaagtatgttatagacatattacatttctacatgtcaaatactcagcaatacattatgcatatattattattattattatcattgagacggagtcccactctgttgcccaggctggagtgcagtggcacagtcttcgctcactgcaagctccatctcctggcttcatgccattctcctgcctcagcctcccgagtagctgggactacaggtgcccgccatcacgcccggctaattttttgtatttttagtagagacggggtttcattatgttagccaggatgctctcgatctcctggcctcgtaatacgcccgcctcagcctcctgaaatgctgagattataggcgtgagccatcgtgcctggccattatacacattttataaacaatttatgataaacagaaaacatgcatttctactgtcttttataatgttaattttacctataccagtgctttttaaaaaaagtggattcaaatgactgtcttgtgcaacttgcttttagccttaggaatttattttggtgttttttctttttttgtttgtttgataagtctgccagcaataacttcagttaatatttctgtttctctgggtaagtctttgtgttatcttcatttttgaaaactaattgctggataaggaattggtggctgacagttttttttcctttgcatcttttgaatatattatcccactacctcttgccttccattgtttctgttaagtcagctgttaatcttacaaaacataggtgcacaaaaaataaacatgtgcatgaatatttacagcagtaatattcatacagtcaaaaagtggaaacaatccatgtgcttgttgactcataaatggacacccaattttcagctgtaacaaagaatgaagtacttatacatggtataatatgggtgaaatttgaaagcattatgttaagtgcacaaaaggacaaatattacttgattttattcacatgaaacatcaggaattggcaaatcaattgggatataaatcagattagtggtcattagggctcagggaagcagaatagggtgtaacaactttatgcataatgggtttttagaagggacatgatgaaattgtcctggaacattgtgaatatactaaaagcaactgcgttgtatgctttaaaatgcttaagttattaattttatattatatgatttttaccttaaaaaaaaagagaaaatagccttactctctacataataaactcaagatgtgtaacaaatttatatgtgaaatccaaaatactataatatttaaggaatagctaaatagaataacactaaaatttaacataatgaaatatttccttaaaaaagaaaaaagcacagtaattaaaaggggatatatagttaatattttttctctccattaagcatgccattaactgagtaaaaatcaagctgcaattatgtaaactacattttctaaaaccataaagaaaagaaatgaaaagggatttggaaaaaaaacccaaaggtagagtcaactacacaaaaaaagcttagcgtcattaatcattatgaaaatgaaaattgtaactgaaataggataaaactacaattaaaagagaaagcctaaaatttcaaccccccaaaaattctgggttttggagagctgggatggaatagggctcctaaccttacaacaatgaaataacccaactaatttcaaagtcatgagtttatttttatagcaaccaggttgccaagaactgagtgatgtgtccacatcccgggagagagaagccaacagaagctggaagagctaaatcagactgctccctagagcttcagaaggagccagaactgatgactccaagatcttagcccagtgaaactgatctggacttctgaactatgagagattccattcctgttgtttgaagctaccacattattgagaacttgttacagtagcccgaggacactaacacaaatggggctccgggaaaatccagactaaaggtgttgtgttggtttgcaatctccttgcttaactttctgatactagacataaatagattggtgaaaaattttgtgattgaagaaatgtacatgaaacctacagcgtacagagaagcatctgttagttataagataaatattgataattttagttgaaaaaaaaaaaaaaaaaaaaaaaaaannnnnnnnnn

SEQ ID NO: 25426 - DNA, 3444 bp, Homo sapiens
  misc_feature 1, 2, 3, 3442, 3443, 3444: n = A,T,C or G
nnncttgcggccgcggcgcttccgatcgcgacgcggcttctggcccggaggcgccgatgcagccgggcttccccgagaacctgagcaagctgaagagcctcctgacccagctccgcgccgaggacttgaacatcgccccgcgcaaggccacactgcagccgctgccgcccaacctgccgccagtcacctacatgcacatctacgagacggacggcttcagcctgggcgtgttcctgctcaagagcggcacgtccatcccgctgcacgaccacccgggcatgcacggcatgctcaaggtgctgtacggcaccgtgcgcatcagctgcatggacaagctagacgcgggcggcgggcaacggccgcgggccttgccgcccgagcagcagttcgagccgccgctgcagccccgggagcgagaagccgtgcggccgggcgtgctgcgttcgcgggccgagtacaccgaggccagcggcccctgcatcctcacaccgcaccgggacaacctgcaccagatcgacgccgtggaagggcctgccgccttcctggacatcctggccccgccctacgacccggacgatggccgggactgccactattaccgggtgctggagccggtcaggcccaaggaggcctccagctcggcctgtgacctgcctcgagaggtgtggctcctggagaccccacaggccgatgacttctggtgcgagggagaaccctatccaggtcccaaggtcttcccttgaagccactggcgcccaggagcggtgggccgaagacgtgccctaccctaccacaagggctgtgtctctaccccctagcctgggcgttggatctactggaatgagcagcagccgcttcctcggcagccttgggaagcacgggcgactggacagcagccgccgggcacggttatgggggcggggtgggcggggaggctagattgtttcctggtactgtcactgccactggggctttgatttggaggaatggggcaggggactatctgaagcgcttccatcctaaagccataatgaaaatatcttcctctcttccccattctatacaaaatactaagtggttttcttgctcccactccctaccccttagttaaatagggtttattttccactcatgcccttatgcctttttttcttatagttttttaacttattgactgtgcatgacccagtggtttgaattgtttttagttcaagtcattggtaaaaactaggtttaaggagatgagctactgtttaaagtgagctggcctgcctaattaattccttgtgaaaactaaatgattttttcagtttggggatcattctcacaacataactatgcatgtagaggacaagatttattttctttcctccctttgcccagtagccacatctggtttactcaggcagcatctactaagaaattcagcacctgcatatctctgtgacatggtcacttagagcttatcttccctatgaatctccagatctgtgagtcgagcagatttcatgttgcagattcacctttaatgcaaagactgtattatcctcacatgactttttttcttgtcttactgtaccttaaaaggtgatagagtaattctgtattttctaacgggaagattcaaaggagctgaatgtgttatgcttccaaacaactgaatgtaaaacactcctagccagttgttgcattccctatatttatttacttccaatattttactgtaaaagtagggagaaatattatgttgatagttgtttcatattctctcaggaactttaatgttcccgactcgggtgattccagctgtgttgctggcagtgttgtctcaaccctctccctaaaatgactgagccctgggttcatctaatgtggttttccttaggaagagatagaaggcacagaagatcacagctagagaattgagaattaactatactactagccattttagggcaccaaaacttgggattaaacacttcctacttcccactcccaactcctgaaatgaagtcttgctatctgtgactagttttatttttgtgcttttaatagtccgagcagtcttaccttgtttacacatgtattgacaccatttgcttcaggccatggagcactgtttctccctttttactatttataggattccgttttttcacaagacttttaataaaaagaaattgtagaaataaacacattaaaatttgcccagctgtcgtctaagccctcttgattgacttgcccaagtggcaatagagttctaatatctataataaagggagatttgctattattagtggaatgttgaccccgtatgtagagaaacagtacgtgcctttgcctctttatgcacacagagacccagggtgagggagtatttgttcccagtttttaagatagtataaaaaagcaaatacttggtgagtgatttaaaaataaaaccaaaacaaaacacaaaaagatattccacaggacatgccactttattataaaacctgacacaggcatagtaccaagtatttcctgcattgttgctaaaattgttttattgtagctccacattctggtgtagtttaaaatgcctttgggggcagtttgaagcagttcttcatgccacttagtttgaaaataaaattctagatatgcaaatgattttcttagaaaacttcacaaaataaaagatcttgtttttttttccatagcacagtaatgaatgtggttatcaatcacatacttttttggattatattgtagcaaaaagttgattagcttaccaagattattaatagcaatgtatgtgttataatacaacttagtacattaaagctacgaaaactcatcctggctgtaggatagtaataaaggaagaattatgacttcattatgaaaaaaagaagttttaaagttttcaattacgagcaatttggaagaaaaaacctaaggtgcttttcaaaagagtaactgaaattgttgcaggccaaaacagcaatatgatatctcagatttagttcaataagaacagtgaaacttttggttcactaataaattctgagtaaattagtggtgaagacaaaatataacttgttttagtgagccactgaggaaagaaatatgcttattacaaagacaaaatgtggtggcagaaactatcttgcagccttgtgtgcttaactgttagtcgtgactgacttgggtgttggcattgtgttctatatactccgcatatagatatggtgtcataccactggggagaaaggtttttccttggaaaatatgggcaggattatcactttgggggcaaaaagggaatgggtggaaaaaaaaaaaaagggggtaaaaaataggaaaagagaacgcaagctaaaaataaaaaggggggttctcgaacgctgagagtataggcgaataatatatagtttattattaattttatataatatannn

SEQ ID NO: 25427 - DNA, 3106 bp, Homo sapiens; identical to SEQ ID NO: 23742
  misc_feature 3100, 3101, 3102, 3103, 3104, 3105, 3106: n = A,T,C or G

SEQ ID NO: 25428 - DNA, 3771 bp, Homo sapiens
gctcttaggctgcagcatggaccatgctaataggaccaaaggaccaggagtcccaacgtctaatagatgtttcagtcacatcccaggctggggatggatgctctgaccacagcagctgtgaagggcatcctgacctgcatgcgggcagagaaatgccagctgcaccagggctcagtgagctggagagggtgcgtttcactgtggggtgtggaggactcgcctcaggaatttcttcagcctctgtaagtggccttagccctaacagggctggaggtccaggccagggtgactgggagatgtacccagtgtcttggcaaacccaagaaagtggtgggcaagggcccctaagactgggaggtaggttgggatgttacaggctggggcaggctccctccaaggcggcactggtgatggagtgtggggcctctgggaagatggaccacgggatgagactctccactgccatctgggacggggactgagccttgaactcctaccacctcaatccctttcttccctcagccatctggggtatatccctctagagctacactactgccaatgccttcatactgagttctgggcccctctgcaaataagtctgagaagccccttctctccttcctttatcgtggcctatgctgcagaatctcactgcagctggcaaaaggcattggccagctctcagaaatccctttactcaacgttgaagctgcattttggtcaatgtgggtaacttactttagaaatgacttgagtttaggtctcccccacccatatttaatttttcccaagttgctggtagaagagaaatttaaaagtggatcaatcctcacagagagagttctttttgttgttgtttattgaaaaaaatgcaatacaagaagcaagaccaaacagatatctaaacactacaaccacttctactacgaaaggccaaaacagcaaacttgattattgcctgtgtagtctaaagattctgccaatctgattctgctgcccgagttcctattttttcaagaaatgtaaacaactacttgatatgattcataattttaaaaaaaatttacaaagctccttcatttttgtcaccaaaataatacatttgagagagatttgtagaaacaaccagcctggggctgagatcctgggcagaaatttcccgtgagcatcaaaaggcgtcagtcagggccgcagctctggctccagttcccgaggtttgttgtctcctcacccccagctgccaagcatccccccaacacacactgatgggcccagcggtggaggggggggtggggacggggatgggtcacggggccctgacgggtcccgcagttaggctccctgagccctcggcttataaatacaggtcttgctttgtgggtgggtgccagagtcctcatgtggcttggaggaaatctttatttctcaaattaaaataaaattgcagcgagagttgttactgtggtgtgtctgagtcactctaggaaaactgttgccaagtttctgaccctggaaatgtaattctcttccccctcctcaccatttctacctggacagagtctgtttttcttcacacaaacacacatacacacaactgcagaaagaaaaaaaatccaaacaattgccaaaccccaagaactgttgccagagatggaggaaaggggaagaggcctggaaggacacccatcttgctgggcttgtccaaatctatggcttctaagagcctgaaaggcattagagctcttttcatccaatttacagacaacgaagccgagagaagtgagttggtgacagagctgagggaaacgtttaggcccccgatgaacggtcctgtgctgtgaaagctgccacactgttctagatcacacggaatattcagtgggttagtttttaaagggacactcagtgccctctgccttttccccatcctcttcgttccacaggtctggaagccctggtagctcttcctacaggccatctggccatcaggcagtgggcatgcactacatgttcgtttgatgtaagctgcatttcttgtcaccactcctggcaacacgaccaggcttgggcactaccccaaagcccacctttcagaccctctgcccacagcctataattttgttcctgagataggacaagctctttcccctaagcctgtcccacgtcccacctgggctctttccctccctcctgttgttcatgtctcacatgggtaccaaaagaaaaatgcacacacccgaaatgagttcaaaccagccgaaacaaaactcaggcagtggagactttggacggtgttgggagaagcagctttagacatttctcttgctcactgcccttgagccccagtgactgctgcccgatacccactgtctattttaggaagctggaactgggattctaaggagccttgaggccaatgtgtttgtgggaagcagttggaaggttagagaagttctgttaaataaaaatgccccaaatcggccgggcgtggtggctcacacctgtaatcccagcactttgggattacaggcatgagccattgggtctagctggccttactgattaggttttgttgcttggaagggtattctatagcagctcatgcctgagatttctagagagcaccaatgtcactactaactattgattcctatttatttctcatggttttatgactccttggcttgagacaacaggctgtattatacctttgtgttggacttcgtcagtacctgtcattcaccctgctcacgttaagtatcatcattacaaagtgatggaatgagagaaaagcacaaagctcttaaatgttggttcttggattgttaacctgcaatccagtaggctcataaccctctcttggttcgaaagccatacaagtccacattccttgctctccaatatttaactggcacccacagagaaagtacaaacttcaaaaccacaacacaggccaacaggatagctgtgttttgtttcctctgccctgaggcacaactggatctagcaccaaggagggcaggatttaacagaccagcacaagacaaatcaatttaaagaggtagtttgaaccaggaataagactgcagtgtagactacaactgaacagaatacaaatccaatgtggttcttcactgagaacaggggttttggccacttgtaatgtaattaaacccccacgaataacaaagatgattatatggaggatgaggatctgcttggtataagcacagttgttggagcctgaggaaaacctggccatcaacaaaccacagcctgagtctttccaaagagaaagctgggcttttgcccttctggcccatgactggtagatttacactgcagatcaaaggtctctctcaacaatcaaactacttccaagaaaccatagacctttaaaaataaggactagtgatttcatacaggctagtaaaaatactttggctatagcccttcacacatgtgtgcttgggtacacatacacacaggtggagctcaataaatgtggaatgattaggtattgatcagcagtatttactacgtgagttaagtccagacacaccatctaccaatcagcaattcaaatttccatgcccaataccaggcagccaacccaccaggcaatatttccttagcttaaagcacagattctcaaaagtgtggtcccttgtaacatcagcaggaactcagaagtgccactttgggggcttttgggttgaggcccagcaattagtgttttaacaagccctacaggtgattctctcgtgc

SEQ ID NO: 25429 - DNA, 880 bp, Homo sapiens
  misc_feature 1, 2, 878, 879, 880: n = A,T,C or G
nncgcaggtcggctgccggtgccgcggccttgtctcgcagtcaggaggagcagggccagccgttcctgccagaagccaggcatgacccctggggtgcgcgtctccacagacccggagcaagtgacatttgaggacgtggtagtggacttcagccaggaggagtgggggcagctgaagcctgcccagaggaccctgtaccgtgatgtaatgctggacaccttcaggcttctggtctctgtgggacattggttaccgaagccgaatgtcatctccctgctggagcaagaggcagagctgtgggcggtggagtctagacttccccaaggcgtgtacccagacttggaaactagacccaaagtcaaactgtcagttctaaagcaaggcatctctgaagaaatatccaacagtgtcatcttggtagaaagattcctgtgggatggtctgtggtactgcaggggtgaggacactgagggccactgggaatggagttgtgagagtctagagagcctggagcgccggtggcttcacgcctgtgaagaggctgtctggagcagtggcgaggaatgggttggggaacacataagtctggaggcctgatctcccaccaatgaggcaagtgaggtcctgaacaagcaaacagccccacaccaatggggaaaccacgctggcacgacagggcgcacggcagaccctaaaatgctggtacccacaacacgtgggctaaaaggagaaccctgcaagtgttccgaaaggcggaaaagccggggcccagccagcaccactcgaaaccactgaacgcccccgggacaggcctcggacgccgaatgctaacaggctcggaaccggatacacccacttcactgggcactgaagacaannn

SEQ ID NO: 25430 - DNA, 984 bp, Homo sapiens
cgcgtccgcgggtgtaatcagcagccatccgttcttgggcatggtggcttccgaccgcggggaccccgagagtctcttgtcggccgagtagcagccaggaaggagagactgggatggttttttatctgttgctttcttaaatcaagggccgccgggccggagatgggtggagggaccggggatttgggaactcgaaaacgagctgagggaagggagcctgtggaaatagactggagtctgggtagtgtcgtttcctagagaatggtctcgaagtaacttctcgccaaaatgaagtttaatccctttgtgacttccgaccgaagcaagaatcgcaaaaggcatttcaatgcaccttcccacattcgaaggaagattatgtcttcccctctttccaaagagctgagacagaagtacaacgtgcgatccatgcccatccgaaaggatgatgaagttcaggttgtacgtggaacactataaaggtcaggcaaattggcaaagtagtccaggtttacaggaagaaatatgttatctacaattgaacgggtgcagcgggaaaaggctaatggcacaactgtccacgtaggcattcaccccagcaaggtggttatcactaggctaaaactggacaaagaccgcaaaaagatcctcgaacggaaagccatatcttgccaagtatgataggaaaagggcatattcatcgaaaaaccctttgaaaaaatgcaggattaaagtattttatttacaagctttgattaatactttgaaaaactaaataatgctctacatcatgtcggtcggcttggcccaagcgtctttaaacttgaacaagcttattcaatgcggccgaatttcgagtctatttggccaattccccctattatgagttgatttacaattaactggcgatgttttacaaccgcttaactggggccttgccgttccccaatttaatcggcttcgaatacattctcctttctcccttgc

SEQ ID NO: 25431 - DNA, 4743 bp, Homo sapiens; identical to SEQ ID NO: 24128
  misc_feature 1, 2, 3, 4, 5, 4731, 4732, 4733, 4734, 4735, 4736, 4737,4738, 4739, 4740, 4741, 4742, 4743: n = A,T,C or G

SEQ ID NO: 25432 - DNA, 246 bp, Homo sapiens
acccagctgacctatgaacccacaatctgtagtatccatgctacagatgaagaccgcaaagccatgaagtcgtccactggaggccttgggcagctatgcaaataggccacaagtgaagaaagctatattctgcattcatgctgtcccttgggccacgcagtttagctatgctgtccctcaaggtagcaggacccaggctggagtgcagtgaaactttgtctccaaaaaaaaaaaaacaaaaaaagt

SEQ ID NO: 25433 - DNA, 6837 bp, Homo sapiens
  misc_feature 6836, 6837: n = A,T,C or G
taaaacacccaaagaataacgcctttcacaaatgtttattttgctaggtgtatgaacagttaaagccagcctgaaagataaaaaatactaactcttgatttcgatttcttacattttctgctccaaagtacaaaggaacttaaatttgaagttataaaacggatcccacattgtttctgtaattatcatttcgcagtattggtaataggaataacatctttgtcgaataaccattcctaaaacttacttttagactcattcttacatattaatttgcaaataagcaaatgttaaggacagtatcaaaaaagactttaaaacacatctagtgaacgttctgagttacttctagtttcgaaaattctattgaattccaaggtcacatgtattatgtacattaaacttgtttccctaaataaaagttactgatatgggaaagttgctttaggggaattttcgctagtaaatccataatccttaaaattctaagtgaattaaacattgatactttgcaaatatttacagcagtgtaaatattactttttaaaggtgcgttagtttcaagaatgctggggtcctacaagcatgatgacactttgtaacacatactttttttttggtcttttcctctgctttctaaatctcttaattgccataagtattaaatagaactgatgtcaaggtatcttctgttcaagatggatgtttactaaacatgcaaagtatttttagagatatagattctaatttggaagaagaaaaatagcaacaaattttcttattcatttcttttctcatctttaaaatacaagttaaatcgtaattggaatcccttttcccatcgtgtagtcaagagtctgtgccagacttgaaggctttactttgttagccatgtgtttatgaacccccagcgctttccctagatcttttggctgataatctcaaacatggaggatgcttctgaatcttcacgaggggttgctccattaattaataatgtagttctcccaggctctccgctgtctcttcctgtatcagtgacaggctgtaaaagtcatcgagtagccaataaaaaggtagaagcgaggagtgaaaagctcctcccaacagctcttcctccttcagagccgaaagtagatcagaaacttcccaggagctccgagaggcggggaagtggcggtgggacgcaattccccgcgcggagtcgggcagtggcagcgggagaagcggcagccaggggcgcggcggggccggagagaggcggtcccctgggaggacggggtctcccctcgttgcctttgtagtggagaaggtggacaagtggcagtcggcgtgatcgcagggaagcggggccggcgcgggcggccgagggtccaggcgagcccgcgggcggacgggagatgccgctgctacaccgaaagccgtttgtgagacagaagccgcccgcggacctgcggcccgacgaggaagttttctactgtaaagtcaccaacgagatcttccgccactacgatgacttttttgaacgaaccattctgtgcaacagccttgtgtggagttgtgctgtgacgggtagacctggactgacgtatcaggaagcacttgagtcagaaaaaaaagcaagacagaatcttcagagttttccagaaccactaattattccagttttatacttgaccagccttacccatcgttcgcgcttacatgaaatttgtgatgatatctttgcatatgtcaaggatcgatattttgtcgaagaaactgtggaagtcattaggaacaatggtgcaaggttgcagtgtaggattttggaagtcctccctccatcacatcaaaatggttttgctaatggacatgttaacagtgtggatggagaaactattatcatcagtgatagtgatgattcagaaacacaaagctgttcttttcaaaatgggaagaaaaaagatgcaattgatcccttactattcaagtataaagtgcaacccactaaaaaagaattacatgagtctgctattgttaaagcaacacaaatcagccggagaaaacacctattttctcgtgataaactaaagctttttctgaagcaacactgtgaaccacaagatggagtcattaaaataaaggcatcatctctttcaacgtataaaatagcagaacaagatttttcttatttcttccctgatgatccacccacatttatcttcagtcctgctaacagacgaagagggagacctcccaaacgaatacatattagtcaagaggacaatgttgctaataaacagactcttgcaagttataggagcaaagctactaaagaaagagataaacttttgaaacaagaagaaatgaagtcactggcttttgaaaaggctaaattaaaaagagaaaaagcagatgccctagaagcgaagaaaaaagaaaaagaagataaagagaaaaagagggaagaattgaaaaaaattgttgaagaagagagactaaagaaaaaagaagaaaaagagaggcttaaagtagaaagagaaaaggaaagagagaagttacgtgaagaaaagcgaaagtatgtggaatacttaaaacagtggagtaaacctagagaagatatggaatgtgatgaccttaaggaacttccagaaccaacaccagtgaaaactagactacctcctgaaatctttggtgatgctctgatggttttggagttccttaatgcatttggggaactttttgatcttcaagatgagtttcctgatggagtaaccctagaagtattagaggaagctcttgtaggaaatgacagtgaaggcccactgtgtgaattgctttttttcttcctgactgcaatcttccaggcaatagctgaagaagaagaggaagtagccaaagagcaactaactgatgctgacaccaaaggctgcagtttgaaaagtttggatcttgatagctgcactctttcagaaatcctcagactgcacatcttagcttcaggtgctgatgtaacatcagcaaatgcaaagtatagatatcaaaaacgaggaggatttgatgctacagatgatgcttgtatggagcttcgtttgagcaatcccagtctagtgaagaaactgtcaagcacctcagtgtatgatttgacaccaggagaaaaaatgaagatactccatgctctctgtggaaagctactgaccctagtttcaactagggattttattgaagattatgttgatatattacgacaggcaaagcaggagttccgggaattaaaagcagaacaacatcgaaaagagagggaagaagcagctgccagaattcgtaaaaggaaggaagaaaaacttaaggagcaagaacaaaaaatgaaagagaaacaagaaaaactgaaagaagatgagcaaagaaattcaacggcagatatatctattggggaggaagaaagggaagattttgatactagcattgagagcaaagacacagagcaaaaggaattagatcaagatatggtcactgaagatgaagatgacccaggatcacataaaagaggcagaagggggaaaagaggacaaaatggatttaaagaatttacaaggcaagaacagatcaactgtgtaacaagagagcctcttactgctgatgaggaagaagcattaaaacaggaacaccaacgaaaagagaaagagctcttagaaaaaatccaaagtgccatagcctgtaccaatatctttcccttgggtcgcgaccgcatgtatagacgatactggattttcccttctattcctggactctttattgaagaggattattctggtcttactgaagacatgctgttgcctagaccttcatcatttcagaataatgtacagtctcaagatcctcaggtatccactaaaactggagagcctttgatgtctgaatctacctccaacattgaccaaggtccacgtgaccattctgtgcagctgccaaaaccagtgcataagccaaatcggtggtgcttttacagttcttgtgaacagctagaccagcttattgaagctcttaattctagaggacatagagaaagtgccttaaaagaaactttgttacaagagaaaagcagaatatgtgcacagctagcccgtttttctgaagagaaatttcatttttcagacaaacctcagcctgatagcaaaccaacatatagtcggggaagatcttccaatgcatatgatccatctcagatgtgtgcagaaaagcaacttgaactaaggctgagagattttcttttagatattgaagatagaatctaccaaggaacattaggagccatcaaggttacagatcgacatatctggagatcagcattagaaagtggacggtatgagctgttaagtgaggaaaacaaggaaaatgggataattaaaactgtgaatgaagacgtagaagagatggaaattgatgaacaaacaaaggtcatagtaaaagacagacttttggggataaaaacagaaactccaagtactgtatcaacaaatgcaagtacaccacaatcagtgagcagtgtggttcattatctggcaatggcactctttcaaatagagcagggcattgagcggcgttttctgaaagctccacttgatgccagtgacagtgggcgttcttataaaacagttctggaccgttggagagagtctctcctttcttctgctagtctatcccaagtttttcttcacctatccaccttggatcgtagcgtgatatggtctaaatctatactgaatgcgcgttgcaagatatgtcgaaagaaaggcgatgctgaaaacatggttctttgtgatggctgtgataggggtcatcatacctactgtgttcgaccaaagctcaagactgtgcctgaaggagactggttttgtccagaatgtcgaccaaagcaacgttctagaagactctcctctagacagagaccatccttggaaagtgatgaagatgtggaagacagtatgggaggtgaggatgatgaagttgatggcgatgaagaagaaggtcaaagtgaggaggaagagtatgaggtagaacaagatgaagatgactctcaagaagaggaagaagtcagcctacccaaacgaggaagaccacaagttagattgccagttaaaacaagagggaaacttagctcttctttctcaagtcgtggccaacaacaagaacctggaagatacccttcaaggagtcagcagagcacacccaaaacaactgtttcttctaaaactggtagaagcctaagaaagataaactctgctcctcctacagaaacaaaatctttaagaattgccagtcgttctactcgccacagtcatggcccactgcaagcagatgtatttgtggaattgcttagtcctcgtagaaaacgcagaggcaggaaaagtgctaataatacaccagaaaatagtcccaacttccctaacttcagagtcattgccacaaagtcaagtgaacagtcaagatctgtaaatattgcttcaaaactttctctccaagagagtgaatccaaaagaagatgcagaaaaagacaatctccagagccatcgcctgtgacactgggtcgaaggagttctggccgacagggaggagttcatgaattgtctgcttttgaacaacttgttgtagaattggtacgacatgatgacagctggccttttttgaaacttgtttctaaaatccaggtcccagactactatgacatcatcaaaaagcccattgccttaaatataattcgtgaaaaagtgaataagtgtgaatataaattagcatctgagtttattgatgacattgagttaatgttttcgaactgctttgaatacaaccctcgtaacacaagtgaagcaaaagctggaactaggcttcaagcattttttcatattcaggctcaaaagcttggactccacgtcacacccagtaatgtggaccaagttagcacaccaccggctgcgaaaaagtcacgaatctgactttgtccttctaaaggatatatttgaagaaaaacaaattgttcatgaaaatggaacattaaatcatgctgtataaagcaataacaattgattgaccacatgaaagtgtggcctgcactatattctcaattttaatattaagcactcaggagaatgtaggaaagatatcctttgctacagttttgttcagtatctaataagtttgatagatgtattggatacagtactggtttacagaggtttttgtacatttttgagatcattcatgtgtccagagatcttggaaaatattttttcacccacgatttattttgttattgatgatttttttttaaagtggtggtattaagggagagttatctacatggatgagtcttccgctatagcacagtttagaaaaggtgtttatgtcttaattaattgtttgagtacattctttcaacactacacatgaatgaatccaatcttataaccttgaagtgctgtaccagtgctggctgcaggtattaagtccaagtttattaactagatatttatttagtattgagagtaatttgtgaatttgttttgtatttataaaatttatacctgaaaaatgttccttaatgttttaaaccttttactgtgtttttattcctctaacttccttaatgatcaatcaaaaaaagtaacaccctccctttttcctgacagttctttcagctttacagaactgtattataagtttctatgtataactttttaactgtacaaataaaataacattttttcaaaaaaaaaaaaaaaagtcgtcgcggccgcgccgttagtagtagtaggcggccgctctagaggatccaagcttacgtacgcgtgcatgcnn

SEQ ID NO: 25434 - DNA, 3086 bp, Homo sapiens
cgccgcaggggattgaggggttgactgagcgttgcgagccttagctttctcccgaacgccagcgctgaggacacgatgtcgcggctctcccgctcactgctttgggccgccacctgcctgggcgtgctctgcgtgctgtccgcggacaagaacacgacccagcacccgaacgtgacgactttagcgcccatctccaacgtaacctcggcgccggtgacgtccctcccgctggtcaccactccggcaccagaaacctgtgaaggtcgaaacagctgcgtttcctgttttaatgttagcgttgttaatactacctgcttttggatagaatgtaaagatgagagctattgttcacataactcaacagttagtgattgtcaagtggggaacacgacagacttctgttccgtttccacggccactccagtgccaacagccaattctacagctaaacccacagttcagccctccccttctacaacttccaagacagttactacatcaggtacaacaaataacactgtgactccaacctcacaacctgtgcgaaagtctacctttgatgcagccagtttcattggaggaattgtcctggtcttggaaataagatgccacacaaggaactacattccagatttaaagaaatgaaaggataccattagtgtgtataacagattattgttcatacttgtaaagcaccttatgtcattgagaatataaagaacagtgccttagaagacagtgaaaggtaagctctagcttaatgtctatgatttgttctttgacattaaggaaggtaaggattggtcagaggatgtaacttgatgtgagcagtagtaaacctgttttagatatcatactgttaatattttattgaaaatttatttcagagcggagaaacttaagctaaagtctgttatacagaattgaaagccttcgtatcttgaacctcccaacatttttcttatggctgttgaaaagtatagagctaaattgatttaattacactttcctttgtactttaaaaaaaagtatgctagcactattgtaccttgaaaggatttccaccagactgtcttgagtagtgacttctttggtgaggcaagaaggatatacattattttagaatcatttactatttaaatgagacaatcatattattttagaatcatttattttaaatgagacaatcattttaagttttaagataacagaagtgaccaatgtaatttcacaacacctaaggattttttggttgatcaggttactgtagatttttactgattgtcctggatgaatagactgtgctttttctttttctctcccttccttcttggtttcccatagtataataagcatgcatactttaacttctatagttttctcctttagagggtcttcttcagttttagaggtttacttctcccttgcctttgactcattggactagtgcagaggctttaagtagtttaaaatgggcttttgcttttctaggtcattaacgttttttatttagtttctttagccaatagtggctgagtttcgcacttgattttcaatattttatagtaagaaatgacaaactgctttggttcatttcataaacaaactctgcatttagataactattaaaggttgttaagatgaagatttactgtttctttgttactcgttggtacagctgtttgttttacttgcacatttgtacatatacttaatgttttcaagtgccttaattgtttaaaatctctggcttcaaagtttcttggggaaaggtcggtttacctcacattttttgtttccattagtaatattctaggtacctcacaaaatgtattatggtgccatggctgttagtttttagtgagtgctgtaggattaattcgaaaataggcagaattccattcctcccaaggtggcaaaaattagctatactgatgtaattgtcatttacctgggtatgaattccctgacacacattcatgtcaacatatgtagcaaattttgtgaaaacataacaatttgaagcttctgtaattttgagcactgctctaacaacaagcataatataaaattagttagattttgcaagtctacaaatgagctcttgcaacagaactcacagcctttttacttttttcccctaactttagcaatgtagtatcttgagccattaatttttgggtttttttaaaatccagaaggtatatagaaaccttttcagatttttcatctgatttgttcttgcagatgttcttctatcaaataccttattttaccttacagatatttgttgcacaggcagatactgctgtatttagacatttctatttcagttcattaaaaactgcaaaaccaatctgtatcatgtaccaaactgacttaaaataaatctacatgtttattgaattaaaaaaaaaaaaaaaaaaaaaaaaaaaaaaaaaaaaaaaaaaaaaaaaaaaaaagaaacgaaaaaaagacagagagagagagagagagagagcacacgacgagagagaggcgagcgcgcggcgcggggagacaagaaaaaaaagaaagacgaggaagaaacaaaagaaagacgagggcgacgagagagaagcaactacagacgccgaggggaccacacccgacgagcgcagaggagagcgaactacgcggaccgaggagagagaaaaaaaaaagacgacacccaggcaccaaaaaagaaaagaaacagaaaacaaacccgcgagcaaagaaaagaaaaagcgggacagcagagcgaggagaaggaaaaccgccaccagctacacccacataaactcccccccaacagtacaactacaacagaacaatataccattaaaccacaaaaacatactacatcaccccccaatatattctcacacaacatcataacacaaacaaaaaacacacacaacaatctagccccgaaacccacacaggaagcagcgcgagacgcgacagaccagcgccgagagcgacaccccagaaaaagaaaacaagcaagaggcgcacgcacagaaaacgccacaaacaggaaacacaaacaaagcagaagagagaaaacacgacccgacccaaaa

SEQ ID NO: 25435 - DNA, 676 bp, Homo sapiens
  misc_feature 671, 672, 673, 674, 675, 676: n = A,T,C or G
ccgaggtacaataaattctattattccattaaaatcctacatttattcccaggtattggtaatttctcctccctacatctatactccactccctcagtaaataagtgaaaattgttaacccatgtgcccattcctgagtagggcagactcttcacaagaggcccatgacaagaattctagggtccagattgaactttaatatagacctttgtctgtgtagaccagtttgtcttgtaaactgtcttacttatgtgtgtaaacattttacattcacatgaaaagttattttcctttatataattggattcagaatcataagggacaggactgaaattattctacagtaaccagtaagaataagattcggccgggcacggtggctcctgcctgtaatcccaacactttgggaggccaaggtgggcggatcacctgaggtcaggagtttgagaccagcctggccaacatggtgaaaccccgtctctacacaaaaattagccaggcgtggtagcgggcatctgtaatcccagctacttggggggctgaggcaggagaatcgcttgaacccaggaggcggaggttgcagtgagccgagatcacgccactgcactcccgcctgggtgacaagagcaaaactccatcttaaaaaaaaagaaaaaaagagtaagattcannnnnn

SEQ ID NO: 25436 - DNA, 1207 bp, Homo sapiens
  misc_feature 1, 2, 3, 4, 1207: n = A,T,C or G
nnnnaacgaaggggagttctttcacctcggctgggcgcctagaaaagcctagaaacagctccttttttcttccgcctccgagtcttcgcgtcagcgtcctgcgcagggcccttggggcgaatcgcggtgcgcgtcggggcgaccgccctccctccctgggaggggcgagggggctagcggcgacggctggggcgagcgcgcctgcgcgctgggtgattttttcacgtgtcgccagggccggactgcgagtctctttgcggcgctacactagagcagagtacgagtctgaggcggagggagtaatggcaggacaagcgtttagaaagtttcttccactctttgaccgagtattggttgaaaggagtgctgctgaaactgtaaccaaaggaggcattatgcttccagaaaaatctcaaggaaaagtattgcaagcaacagtagtcgctgttggatcgggttctaaaggaaagggtggagagattcaaccagttagcgtgaaagttggagataaagttcttctcccagaatatggaggcaccaaagtagttctagatgacaaggattatttcctatttagagatggtgacattcttggaaagtacgtagactgaaataagtcactattgaaatggcatcaacatgatgctgcccattccactgaagttctgaaatctttcgtcatgtaaataatttccatatttctcttttataataaactaatgataactaatgacatccagtgtctccaaaattgtttccttgtactgatataaacacttccaaataaaaatatgtaaatcccggccccctggaaaacttcttgaaccccctctttgggagcccggccccaatgataacaacacatgtgcaaaaggaggccaagagagctcgtgtaaaaaacgtggcgtggtctccaccaaaaaaaccgcgggggaccaaggttttgacaaaccaagggttcacgcgacacgcgtctcacgggtccggacctaatccgtggcccaagcgaaacaagaaatgagagaaggagacaatcgaaccacaaatgagcgcgagacgcggacggagaacaagagagaacgagagacaggacacagaacgacgaggaacagagcgacgccgagcagagccagacgagagagagagacacaagagacacaggaggacagagagaagcggaagagcaacagaaaccaagacaacagan

SEQ ID NO: 25437 - DNA, 4830 bp, Homo sapiens; identical to SEQ ID NO: 24538

SEQ ID NO: 25438 - DNA, 2647 bp, Homo sapiens; identical to SEQ ID NO: 23285
  misc_feature 1, 2640, 2641, 2642, 2643, 2644, 2645, 2646, 2647: n = A,T,C or G

SEQ ID NO: 25439 - DNA, 3129 bp, Homo sapiens; identical to SEQ ID NO: 24721

SEQ ID NO: 25440 - DNA, 1701 bp, Homo sapiens
  misc_feature 1, 1701: n = A,T,C or G
nctgtccccgaaggggtgttgggagccgcccttgcccaacagtgggcgcattggtgactgcccagatgtggtagtttcgctcccctgccccagttagcccccgctgtgccccccccttttgggtggccccgattttctttgtccccccgttaagcccagctcccaggcccgcgactttaggactctctgcggccctcggaagcattgcggcaatttttcgatcaaaacagttgttctcgccctctggaagtcttgagttttcagctgtcttaaaatcatatgctggtcataatagggaagaatataatccacattctctctgggtcatagtaagatgaaacagccgtccactaccatctttcctgacatattgaccagtatgctcatcaaccacatgaatttttaccattgggtgagaaatcataaaatctgacttaagtctatcagttcggtgaatgtaaactcccacagacaaggtcatcatcaagcaaacatttgggataaaccgggctatctcggcttgttatttcatgaacaccatcaccatcaacatcttcattattatctgcaactgctttagtcttcttttttgttttttttggtttaggttttgtatcatcttgcatgctgtcttctgtgctttgttccattgagcttatttcatcatcttgatgagaatctgaagaaactgatctaactgaagattctttcttttgttcaccttcaactgtgtcaccagagatggtcaatgtacttgtttcagctttagagaagactggaacttcctttttctttttccttttttcactgcttagtttgtcatcatggaataaagtatctgagggaaagtaagtcaactgttctttcagtttctttcttattttcctcttaatctcctttgccatttcttcagttacatggcactgatatgcttgcatcaattcttcatcctcttctaaatcagtctcttctcttccctcatttgccttctcacttttctgatgatcaacgcctggctgtggctttgtatgtgttttctggtgtgtagaatcaaccttattctcaggagtttccggtttcaggtcttgtgtagtcaactggggcaccgtctttatcacctttttatttggctttccttgtttgtcttcctctacactagcatcaccattaggattttcagttgctaactgtgtgttcctcaatttgtttttagtgactctcgtgctcttcttcaggttgttagtgttagcagcacttacatcatcacttgtagtttctttaatatggggaagattgcttctaatagtgtcgggatcatcacttgtagtttctttcatatagtgaagattgcttctaatagtgtcaggtgagatgttttcttcagacctgacaagttttttcttcagttttttcttttcacgcattagatcactgtgggtcttaagcaattcttcaaagcgaactttggtttttacttttgcttcactctcagctgtaggcatctctcagctttatgcagaggactgagaatgcaaagcattgactcaatcaggatcggagaggggtacgcagaaccgcccgtcccgccggagccgacacccggagcagtgcaaatcaactcccccaccctagcggcgcgtgcgcgaagtgaggcggccacgcagccacctaacccgccagcgacccgtgtcctgacggacn

SEQ ID NO: 25441 - DNA, 3102 bp, Homo sapiens
  misc_feature 1: n = A,T,C or G
nccagcacaccccccgcctgtaccctctactttctctcccccacttttatctcgccccccctttttttttttttgccaatttccaggctttggcaataaaccggcaattattttgtaagaaaatagtaatttagtaatagcctgtacactttgaaaaacataccctgtactaaggccaacctcaagtcaatctacaagttattcaagcaaacctaaatcatcactgtgtaaactgcatttcataaaatatctgttgaaataaactccattaaaacataattatacagatattttaattgtatatatatcaggtacacggaataaaagtcctactctctagaacatgagaagtcaataaatagaaaagatatacaaagtggaatgaacataaaaatgactaagcatgtgatcttcacattcatacagtttttcaactaatcttttacaattaaaaagtcatttatttgaaactgtagagttgatatatgccatattagtttggaaccttacaaaacaactttagtggtgttatttatgtgtggagagaaaactgtgtatgtaactatcatgtttcaagggacatgacttaacagtgaagttttttatgttatagggaagaaaacaagtattagtatcagttatcttagaaatgctatctaaactagaatgacatttgttcagtatgatatgttctttccctaactccattctaattgcttaaaaactatcaagtgaagttacaaaagttaaaccactaaatgtggcatcttttcttacacaaagtatcttctcttagaaatgcggtatttaattaagtaaaccttcttggtgaccccagttataatcaaaagaggccacgaaactacagactactgacgaaaagtgtcagtgcagacactttccatcaatcaacaggcagtccaagggacgcaagagaacacaagtctgggtaacatgaatttggtaagaaagcaggctaaacctcctgtgtcttagtattcgaagtgagtcattctatagaatttttgactaatctgagaaaggccaaaaaaaagaaaaaagtattctgtttaaaggcagggaggtacatcataacttttaaaaacatgtcaaggcaaacatacattttacctagaatacctcattttctaattatgcatcattactgtacttatatttagtaaagtgaacagggtagtattataacctgtttatattcaaggaacatagtaaactagctgacaaaatttacctttcttaaagaaaaaactcagttggttgaaactgacaaggtaggattagctttccaatgtagaggacaactcttgccataacatgaatgttagtaaaggagctcactgccgtgaatgcttaggatacataggtacatggccaactccagacctaagagcaatataaagctactcaaaacaaaacaccccacaaataataaaaaccccattccctaacagagctttatttctcttatgttgtatcagcctcatagtacacccggcacagtgctgcattagggcggcatacaaaagcatcagtttctcttcccaactccgttagctgttccaatgaagacacacaaggataatgatcttttaacatatctggcaatttagaagttttctcttgaagacgtcgagaacgtctcactggtgttaaaaacttcagctctttaaatgcggaatttgttccatcaaactgcaccttttttttcacactttgcaagtatggcgtagtagacacattatatttaattaagcaacttgtcctcgtttctgtattgggggttttaacatcatgggttggatcttttgttttgttgtcttgctctttttcacaatcttgaaatagcaaatttctatgaagtttactctccatttccagtttttctggatctacatcaacacctgtatcttcaatactgacttctttgacttcttccttgcttgcacaagacttctccatattttctcctaaattagctttttcttgactcttcattgttagaatatctacaatcgtgtgtcgcatctcttcaataggctgagcccctgccagaatggctttctcatagattgcaataatattttcaataggacttgtgattggttcaataagtgcaagacatatccaatacttaacaagctttttggcatctggaatatttttaatcaggtcattcagtgtgaccagtatatcttcttttggacatccctcattaatcaagttcaggcattcagaaaatgtgttgtttactttttcagtaaataatctttgttcatcttcttctgccatggtagtccaaaaagacccaactggtttttcattttgtcctgcaggctcatgctgagtaactactgaattagggggcctttttagcactcttcctttgccagctttccactcactcagacgagcttttctctcttccgaggtttctttgggctgagctgatctactatcaacaattgcttttcctgcagtatgtcttcgctggtcaacgggctctgacttttccatcagtttatcattagacaatgaagcaggcctggctacaacttcagatgctatggatcttgatagagtcttatttcttattataccttgagaagaactggttttgacactagataaagctgtttttgattgtaatagttctttttcatgaggccctttccggattgtaacattggcagaggttctactgatgccttgtttcacagtgtcccgggtattactgtgatgacttctaataggaggtcgcacaagttgtgtgttctgagatgtagtgctcacaaatttagtagtggcagtcatattggaggatctattacttttcactgttacactgctggtgtttacaggctgaggttttgtggctttaggtatagtggctgaaagtttctttgttgctgcagaactctcatctttgacttgtagaggttttctaaatgaattaatcttagactgaacaatctggccacgataagatccaagcacaggtttcttgggcatgttagcatcttgcttttgtttttctgtagtcatttgtttctttttactattgtttttcggacgcgtgggtcg

SEQ ID NO: 25442 - DNA, 791 bp, Homo sapiens
  misc_feature 1, 791: n = A,T,C or G
ncaaactaaggactatttatgataatgtttgctactcttgtcagacaatggctataaactgaattaggcagtcttaaaaaaaaaaaaaaacagaaaaagaaaaaaaagaacgttgcaaatttgttaaaatgccaaaaaggacagtttaattttgtacagattatgcttacctcaggtttctttagtgtgcttgaatgcccttctttccatataacacttatcttcttcttaattcggcaatggaatatcttttaagttttaaaaaaactggaataattatatctatcttttttgccgtttatatttaggggtttttgttgataaaatcaagtcttggttgtggcttgctgaattaaatatttatgagtggtgcatttttaagtatagtgaacaagacaccatattaagtacagtgataaagcatctatattctgtaaaaaaaaaaaaaatctgcctatgcatgttttttaagaaaaaaaaaatggctgtatcggcctgtatgggactgtaatgcgcttagtggtctgacatatactggaaatgtatgtatactggcgtactttatattctctaaaatgcttaatgcctttgaaattttgtaatcaaaaaaaagctttgaaaaaatctaaagggttggcctttgtttacacaggacttgtggttcccacggcttagtatattttataatccagcgagattaggtaccaaattatcggtggttggaccttggccccttaagggcctgggtcaataaaaggatgcgggaataaaaaagaattggcgaggagtan

SEQ ID NO: 25443 - DNA, 1853 bp, Homo sapiens
  misc_feature 1843, 1844, 1845, 1846, 1847, 1848, 1849, 1850, 1851, 1852,1853: n = A,T,C or G
ggagtcgacccacgcgtccggttttacatgcgtcagctcttttaacctttatgacaactccataatgttatttcccccctttaactgattagaaaactgaggtacagaaagattaaggaatttgtcaaagatttcacaattatgaaatttgggtttggggactggaagccactgcactggcttcagaatccatgtccttaaccactttattgcttctcataaggtgggtctttgtttcctggtcatcacttgtttttactaaaatgggtcaaactgtgctcatttatttataatctactattcttatttgacagtacatcttggccattccttcaagcaaatgagataaaccagactcactctttaatgcctgcataagctattgtgactgtagaaaagacggagaatgtctgggtttgaggatatgtgggaggggtggggagaaggagtagagaagggctaaggcatgcatgttgttttaggtgtgtttgagatgcctgaagaacatcagtgtatccccctaatttctgtcatgttactcaaaccagacacattgtggccatttctttttcctttatcattcccacgtccggccactgccccattcctttttgttccgtagtagaccctcaatatatatgtgtgtgttggtaaatggccatacacagcagggtattttttattattattttcagttccctcagcgcgtttaccacaaagctgtgcatataggtggcaccatatatggcgtaccttgacctcgaagagaatctacatggacttttatggacctacgtacacaattttagaaatcataataaatgaatgctggagtcctcaagaccccttccagatttgatttgctaggaagactcacaggactcagcattttgtcatactcaatggctatgatttaccacaccgaaagaatccagagcaaactcagcaaaaggctcaaacccaagtccagaggaaaccaggcacaatctttgagaatcttaatgaaatcacacaggatgtgcttcattgaagctccatctgggacttaaaacaacacacgtgagatgtgttccaggaagtcgtcttgagcacccattgctcagagtttatattggacttgctttctagcacataccacaattgtagacctccagaagaacaggaggtgttcagcgtaagacaatttaggcacacggagctacttctcattactgggaacaatgggaaacttcccaaaacctaaagtacagactccagccaaggatgaaccttgcaagatcaaagaatagcagtctctggcctgctctgttctctttttcacagtaacttaaatggaaaaatgctgagttagcttaagtttctgtaacaaacattaagcaaataaaattttctataacagaaataagccatagctttgagatgaaggcttatatacgtgtaaaccattgtaaccaagaaaaaaaaaaaaaaagtcagagtcacagtgaaaatacttaacaaactagccaggatttaattcagtgatgacagggaacagaggaagtcttgtgagaaaggatcttgcctctgcctagtatctttcacagataggcttcaagtggtttgatttgcagatacaccctttcttggcctttatttcggcaaagatgtgatgggtaggtaaatgccgtgttctttccctagcacgtatgtcagtttctcatccactctttgttcttgctattgaaagttgtagcttctggctacaacagagatagttgaagaatatggagttcgccataatttatcattaaatgtggataatttgagattaaagaatatgttgttgcaggcttagtcacannnnnnnnnnn

SEQ ID NO: 25444 - DNA, 595 bp, Homo sapiens
agtgtgctggaattcggtgtcgagcggccgcccgggcaggtacaatgtcagtgtttacactgtcaaggatgacaaggaaagtgtccctatctctgataccatcatcccagctgttcctcctcccactgacctgcgattcaccaacattggtccagacaccatgcgtgtcacctgggctccacccccatccattgatttaaccaacttcctggtgcgttactcacctgtgaaaaatgaggaagatgttgcagagttgtcaatttctccttcagacaatgcagtggtcttaacaaatctcctgcctggtacagaatatgtagtgagtgtctccagtgtctacgaacaacatgagagcacacctcttagaggaagacagaaaacaggtcttgattccccaactggcattgacttttctgatattactgccaactcttttactgtgcactggattgctcctcgagccaccatcactggctacaggatccgccatcatcccgagcacttcagtgggagacctcgagaagatcgggtgccccactctaggaattccagcacatggcggccgttatagtggtaccgagaacggtaccaagtc

SEQ ID NO: 25445 - DNA, 880 bp, Homo sapiens
  misc_feature 1, 2, 3, 4, 5, 6, 7, 878, 879, 880: n = A,T,C or G
nnnnnnncaggtacataaacagtttaggcacagtgagctcctcttaccagttaggtggtaggaactctcttgaaatctaagttcccagactccagcaaaagggcagacttctaagctggtctttcaaagcataacagtaaggtctgttctgataactcttttgtactgctactacttcctcaaccactgtgggtgcagttaagcaagaacctctccactctacttcatatgcagtaaatattctggaaaatataaactcttcagaatcctcaaagcccattgaacttgatggtcttccttcagaccagtttgcaaaaggacaggacactgttgccatagaaggttttacagatgaggaggacacagaaagcggaggagaaggccaatacagagagcgtgatgaatttgtggtaaagatagaagacatagagacttttaaggaggctttaaaaacaggaaaagaacctccagctatttggaaagtacaaaaagctttattacagaaatttgttcctgaaattcgagatggtcaaagagaatttgctgctacaaatagttatcttggatattttggagatgcaaagagtaaatacaaaagaatatatgtgaagttcattgaaaatgcaaacaagaaggaatatgtcagagtgtgttctaaaaagccaagaaataaaccttcacaaactatcagaactgttcaagctaagccaagtagtagcagtaaaacttctgatcctctagcatcaaaaactacaactacaaaagccccttccgtgaaacccaaagttaaacagccaaaagtaaaggctgagccaccaccaaagaaacggaaaaaatggaaagaagaattttcatcatcccaatctgactcatctccnnn

SEQ ID NO: 25446 - DNA, 1782 bp, Homo sapiens; identical to SEQ ID NO: 21380
  misc_feature 1766, 1767, 1768, 1769, 1770, 1771, 1772, 1773, 1774, 1775,1776, 1777, 1778, 1779, 1780, 1781, 1782: n = A,T,C or G

SEQ ID NO: 25447 - DNA, 3106 bp, Homo sapiens
  misc_feature 1, 12, 2879, 3105, 3106: n = A,T,C or G
nccgcaccgggnagcgcgctcgttcgggatcgagaaggggtttgagatagtgaattcctaagaagaaaataatggattgcatattagttgttctctaagtggactcaacagtgtgcaagcttgttggaaaagccaaaagaagatggcaactccttatgtcccagttcctatgcccataggaaactctgcttccagttttacaacaaacagaaatcaaagaagttcttcttttggcagtgtctcaacaagctcaaattcttctaagggccagttagaagactcaaatatgggtaattttaaacagacaagtgttcctgatcaaatggataatacttcatctgtctgtagcagtcccctcattaggactaaatttacaggtacagcttcttccattgagtattctactagaccaagagacactgaagaacaaaatccggaaacagtgaattgggaagatagaccatctacacctactatactgggttatgaagtgatggaagaaagagctaaatttactgtatataaaatactagtaaagaaaaccccagaagaaagctgggtagttttcagaagatacactgacttctctaggcttaatgacaaattaaaagagatgtttccaggttttcgactagcacttcctccaaaacgctggtttaaagataattacaatgctgactttttagaagacagacaattaggattacaagcgtttcttcaaaatttagtagctcacaaggacattgctaactgccttgcagtgagagaatttctttgtttggatgatccaccgggtccatttgatagcctagaagaaagcagggcattctgtgaaactttagaagagacaaactaccgcttacagaaagaactacttgaaaaacaaaaggagatggaatcactaaagaaactgctcagtgagaagcaacttcatatagacactttagagaacagaatcagaacattgtctttagaacctgaagaatcactggatgtgtcagaaacagaaggtgaacagatcctaaaggtggagtcctctgcacttgaggttgatcaagatgtcctggatgaagaatctagagctgataataaaccatgcttaagttttagtgaacctgaaaatgctgtatcagagatagaagtagcagaagtggcatatgatgctgaagaagactaatgtatcacaagcagttccctccatttagactattcaaaaatttagaagagtggcaaatactattttaaaagaagaaccaagaactgtaaaacatatagaaaagagcaagaatgcacatgtataaagtttacataaagaagtttttttaagttattgagataggaaatatattcactgctgcttttaattgtattttatccaattacatttaatacactaaaaaaaatcttgttggaattctgttatcaaggcccacattcttaaatactgtgcataaattattatggtgttttgcctatatattgctccaaactactgtgtatatatgtatgtgtgttaaatcaccaattatattaatcaaatggaaattaattgcatgttactatctgggtgatatattcttctttatatctctgacatgacatattttcattaatagtttaaatcagtgaccatcataataaagataaaatttagttgagtttttaatgtttacatgtttacatctctaaataaaatttgcttatttgaaatgttaatgctctttagaaaaatgactttctagtaccaaaggaaaactacttgaaagagctgtaatcatatagctaaagtgataagatagccttgattttaaaagctgattcattaatatcaaaatactttaataagtgtcacagttattaatatgttacatttgtttagtttccacgtaatctttatctctacctagatttagtgagtttgcctctttcagaatactacctccttttgttaaggcatattctttcgaaaatatagattctaaataaataggggcttatacaaaaaagaaaataaaaagccatatatactgcaaagttcctaactggcttgactcctgacattgcatttttatttctatttgtgtgaagatgttgttatactgtattatggctgattttctttttaatatatttagccaagtgatgcactttatgataattaaactcttttgtgccaagtttaattggtggatttttttagtaagtagagttaggagaaagaattatgtagtgcctttactatttcactttctacaaaagtctcctagggtctttgagtcagctttatgaaaaaatgtttgtttatttcagctttgtgtacagtcattaaaagtgccttgtttcatttttataggatgaagttatttattttctattttcactgttttgcatattgctgttaataagcattgtaatcatgctggcattttgcaatcccagtcggtatgctttctaaaaactgagggaaacttactggggaaatagaataacaatctccatttttttctttactatctaaaagtttatcggtatcttgatgtatatatatattaaggtgtggctgtttaaaattctaatgacatatatcaacacattcaatggctgttgttaacctttgaagtaaaaaggagatcactttttaccaaataaccaaaaatttttagtctttgtcaaagtgcacaggtatgttctcagaacatttttcacaatgtgtatcagaaatatgtttgctatccttagagacagaaatgaatataacaaattgatctgcttatttattaaaattattattctagactttacaaaaggcttaaaagaacaatcatttaatcaggtaccattctgtgtcttattttacagatcttggcaatctagatatnatagtgttgccgtctgtctaagcgaccagccttttcaactgtttggaatgcgttacgttccagcgtgacaacaactggtctggtaacccatttatttaaaacttgactcataagggtacccctattgtttaaattttccaaaaaaaaggggctaatccgggacaagacacttaagcctagtaaaacggtgctgagaggttctcgttgacacaaatcttgtggctcnn

SEQ ID NO: 25448 - DNA, 1107 bp, Homo sapiens
  misc_feature 1, 23, 1107: n = A,T,C or G
ncgaccacgcgtccgagcaaatnttctatttgacaaagcccttggtggagtccaaatgatttttcacgcgtccgcccacgcgtcctatgttaggaaaataggcacactttcaaagagaggtataggggctttttactgccttcgaaatcacttttaataaaagttgtatgataaatcattaaaaatgcgagtgtaaatatttttttttacctctatcagggtttttatttgaaagtgtgctcttaccatttccttgtttgagtaagagagtgaatggttctgagtgtttaggaaggatttgcttgcttgcagcagaagttctaggaaaagcaggcacctcccaaatatcttgaggacactggcagccttatggtgactaaatccacactttctttaaagagatgcagatgaattacttttctgttaatatatagaaaaatacacaggagaacatgcagatacatgtaaatatctacatacagggatatttgtatgtgtggttgtgaaacccatacacaagtggatttggccatctttgggcagtgaggtcaaatgtgaatatgtgtaaaagtgcttttcagaactgcattactatgagaaaacatcaaaactgctgtagttttccatttctactgtatttcagttgcaacctatttttaataaactttgtatgtatttaagtgtatttgctattgttttgaaagtgctgacaaagtttatatttgtaacatcagccttcctcgcccatctctttccatctgtctcttcttcattaaacacttactgagtatgaaaaaaaaacagccaccactaaacaccaaaaaacaacaaaaaaaaaagggaggggcgaaaaatatcccggggaggggcacagaattaagcgccacccacatctatgtgtaaaaggcgcccccaagagagagcgacatctaatagagcaacaggcggcgccttataaagcgctgccgaggcaacaagtcgcgtaggattgtgagagaaccgcttcgtcgtggggatagttggaaccaacagattgatgcgagagaaatacaatatggtggacgtgggtcaaccaacgttcgggattcgtgacaataagtagatcan

SEQ ID NO: 25449 - DNA, 240 bp, Homo sapiens
  misc_feature 1, 240: n = A,T,C or G
nacaaccgaataaacccctaaactttttggacacctgtgatttgcatactgagcatataaagccatctttacgcacgtccatcggtgaaagaaaacggtctctttcaccactaattaagtttactccaggggaacaaagattgagaaccacaatggcatgcagtcttggagaactacctaatgtaaaggaagtccagcggccgcccgggcaggtacacaagtctgcagccactgaaatcn

SEQ ID NO: 25450 - DNA, 980 bp, Homo sapiens
  misc_feature 979, 980: n = A,T,C or G
accttttttttttttttttttttggtgggggagttgaaacctaattttgtggcgtagcaactatgcagcttgaaatccaagtagcagtctctacgctatgccctgtctctgtacacacagactactgacactctcatcaagacctttgtgcgctcgcagaccacccaagggtctggtgtggacgatcctgtgggagaagtctctattcaggtggacttgtttacacaccctggtactggggagcacaaggtcacagtgaaagtggtggctgccaatgacctcaagtggcagacagcgggtatgttccggcctttcgtggaggtgactatggttggcccacaccaaagtgataagaagaggaagttcacaaccaaatccaaaagcaacaactgggcccccaagtacaatgagacattccacttcctcctgggaaatgaggaggggcccgagttctatgagttgcagatatgcgtgaaggattactgctttgcccgggaagatcgcgtgctagggctggctgtgatgcctctgagggatgtcacagccaagggcagctgtgcctgctggtgccccttgggcccggaagatccatatggatgagacaggcctgaccattctccggattttatctcagaggagcaatgacgaggtggccgagaatttgtgaaactcaaatcagagtctcgtcacggaggagggacctgaacacttcgaatctgttgcatcagcagcagcattcacaaatcaggccgtgggagtagctggtaccgctaggttgcggcagagcgacctcggtaaggtattaggacatgggggggataatggttccacgaaaggcgtaccggccagatgggtcaggggggtggcccgcgacatctcaagagaacatttgtgctctgtgtaccccgctacaccgcctccatagatccaaaaggcggtggcctcgcgagtctgtcatctatctaacatctctcactcnn

SEQ ID NO: 25451 - DNA, 873 bp, Homo sapiens
  misc_feature 30, 90, 91, 92, 93, 94, 95, 96, 97, 98, 99, 100, 101, 102,103, 104, 105, 106, 107, 108, 109, 110, 111, 112, 113, 114,115, 116, 117, 118, 119, 120, 121, 122, 123, 124, 125, 126,127, 128, 129, 130, 131, 132, 133, 134, 135, 136, 137: n = A,T,C or G
  misc_feature 138, 139, 140, 141, 142, 143, 144, 145, 146, 147, 148, 149,150, 151, 152, 153, 154, 155, 156, 157, 158, 159, 160, 161,162, 163, 164, 165, 166, 167, 168, 169, 170, 171, 172, 173,174, 175, 176, 177, 178, 179, 180, 181, 182, 183, 184: n = A,T,C or G
  misc_feature 185, 186, 187, 188: n = A,T,C or G
aggaaacagcctatgacccatgattacgcncaagcgcgtcaattaaccccctccactaaaagggaaccaaaagctgggtatccggcgacnnnnnnnnnnnnnnnnnnnnnnnnnnnnnnnnnnnnnnnnnnnnnnnnnnnnnnnnnnnnnnnnnnnnnnnnnnnnnnnnnnnnnnnnnnnnnnnnnnnacaggagatgatctattgtaaaatgagcactgcatcagtggactttgtggactggtcgcgatattgcccaattctgttagccagtccacctcattttcacggtaagtagtttctggtatgtctgaggtattttggttccaagatgatcttgggtattcttgatgtgaaacatctgaactcagctggtacatgccagattgggtaggatcactttgaactgcctgaagttcaggaaggtcatctgcaaataagcacactcaaaatcataaaaaggaaattactaatacaaggaacaatattataactgcagttaaaagagaagtcctcaattttagctaattaattttgagagaggaaaatcataaatttaacattctgttcacagactggaaaaacatggtttggtttgtgttttctgcttcttattccccctagtgttttgtacctcacctaggagtgatccatatgccactgagatatttttacattaccaagttaatgaagaaaaaggcattttatgtgtgcaatatggacttattactcacatactttaataacctgttatacagactataaacaataatttccataatgataatatagatcacataaatatttagctactacttacacaactctgtgttaaagtatttctttttactaataaattctgaacttgttaata

SEQ ID NO: 25452 - DNA, 1015 bp, Homo sapiens; identical to SEQ ID NO: 22433
  misc_feature 1015: n = A,T,C or G

SEQ ID NO: 25453 - DNA, 2648 bp, Homo sapiens
  misc_feature 1, 2, 3, 4, 5, 6, 7, 8, 9, 10, 11, 12, 13, 14, 15, 16, 17,18, 19, 20, 21, 2640, 2641, 2642, 2643, 2644, 2645, 2646,2647, 2648: n = A,T,C or G
nnnnnnnnnnnnnnnnnnnnnctgaacaagcgcgagggctggctgctgggccgacgaggggcggtgccaggccgtgggtccttagtcaagtgacgcgaagcggccggcctgggcgccgactgcagagccgggaggctggtggtcatgccggggttcctggttcgcatcctccttctgctgctggttctgctgcttctgggccctacgcgcggcttgcgcaatgccacccagaggatgtttgaaattgactatagccgggactccttcctcaaggatggccagccatttcgctacatctcaggaagcattcactactcccgtgtgccccgcttctactggaaggaccggctgctgaagatgaagatggctgggctgaacgccatccagacgtatgtgccctggaactttcatgagccctggccaggacagtaccagttttctgaggaccatgatgtggaatattttcttcggctggctcatgagctgggactgctggttatcctgaggcccgggccctacatctgtgcagagtgggaaatgggaggattacctgcttggctgctagagaaagagtctattcttctccgctcctccgacccagattacctggcagctgtggacaagtggttgggagtccttctgcccaagatgaagcctctcctctatcagaatggagggccagttataacagtgcaggttgaaaatgaatatggcagctactttgcctgtgattttgactacctgcgcttcctgcagaagcgctttcgccaccatctgggggatgatgtggttctgtttaccactgatggagcacataaaacattcctgaaatgtggggccctgcagggcctctacaccacggtggactttggaacaggcagcaacatcacagatgctttcctaagccagaggaagtgtgagcccaaaggacccttgatcaattctgaattctatactggctggctagatcactggggccaacctcactccacaatcaagaccgaagcagtggcttcctccctctatgatatacttgcccgtggggcgagtgtgaacttgtacatgtttataggtgggaccaattttgcctattggaatggggccaactcaccctatgcagcacagcccaccagctacgactatgatgccccactgagtgaggctggggacctcactgagaagtattttgctctgcgaaacatcatccagaagtttgaaaaagtaccagaaggtcctatccctccatctacaccaaagtttgcatatggaaaggtcactttggaaaagttaaagacagtgggagcagctctggacattctgtgtccctctgggcccatcaaaagcctttatcccttgacatttatccaggtgaaacagcattatgggtttgtgctgtaccggacaacacttcctcaagattgcagcaacccagcacctctctcttcacccctcaatggagtccacgatcgagcatatgttgctgtggatgggatcccccagggagtccttgagcgaaacaatgtgatcactctgaacataacagggaaagctggagccactctggaccttctggtagagaacatgggacgtgtgaactatggtgcatatatcaacgattttaagggtttggtttctaacctgactctcagttccaatatcctcacggactggacgatctttccactggacactgaggatgcagtgcgcagccacctggggggctggggacaccgtgacagtggccaccatgatgaagcctgggcccacaactcatccaactacacgctcccggccttttatatggggaacttctccattcccagtgggatcccagacttgccccaggacacctttatccagtttcctggatggaccaagggccaggtctggattaatggctttaaccttggccgctattggccagcccggggccctcagttgaccttgtttgtgccccagcacatcctgatgacctcggccccaaacaccatcaccgtgctggaactggagtgggcaccctgcagcagtgatgatccagaactatgtgctgtgacgttcgtggacaggccagttattggctcatctgtgacctacgatcatccctccaaacctgttgaaaaaagactcatgcccccacccccgcaaaaaaacaaagattcatggctggaccatgtatgatgatgaaagcctgtgtctttgagggattctaccctgaacatacctcacagatcctccctgtcatgccacatttcactgattggaatgtggaaatggaaaaggaatttaggatgtgcattttcacctgaggtttccctgcatccctgcagtgccaaagccccaccttcagggaccacctggaatgtgtgaggggctgacagcacagtaacgtgcatacatatctgcagggctggaatggaagctttaaaggtggtagtgatttttattttggaagaatcatgttacctttttgttaaataaaatttgtactcaaatgaaaaaaaaaaaaaataaaaagaaaaaaaagggggggggggctaaaagaattccccgcggggggggccaattttgggggtaaccgcgtttttttttgaaaagggtggccaaaaggggggacggattaaaaagcagggggggggcggnnnnnnnnn

SEQ ID NO: 25454 - DNA, 266 bp, Homo sapiens
  misc_feature 266: n = A,T,C or G
gctctcttccaggacatcaagaagccagctgaagatgagtggggtaaaaccccagacgccagggcagctactgtggccacttcctcagctgtaaccacaggctgaagtcttcactaaacaagagaatccagaaagtgatgcagatccagtagtggaagatggaacttctgtatcaacactgagaacactccagcaaagagtgaagcgtctagagaccttacttacagcgttgtaagtagacgattcagtcacataagtaacaatgn

SEQ ID NO: 25455 - DNA, 895 bp, Homo sapiens
  misc_feature 1, 891, 892, 893, 894, 895: n = A,T,C or G
ngccgaaggcttcgggctttcacattcgggaagcgtcgggattaggtgaaagtacgtagttgtctttcgtaagttaaaatgataattgggccgaaacttactgccttacctaaaaggcagcgcagtcaggatattggtaggtcgggggcggctttggaaacccttaagtttacaagcatgcgcggacttgagtgctcattaggtcgccgggcgtccacgtgcagccctggaccctgaaccccggcgtgcgtgggccgtgggccctcggggaaaggttccgtgcactcggggactccggtgaagcctgttcagccgtctgtgtcatgtggccatcttgagtctactctgtcgctcttgtgccctagcaccccgagaaccgtcagtttgagccagatggaagctgagctgaacacattacgatggatgatggaaacataagactatcaagaaatccaagtggtaatgggcgaagtttattcagcatccggcaatggacttatcgtagttggggaaacgggtgttccgaataatatcctggaagttatcaggacacctattttaaatataggcctgaattttgtaaagtaatatttaaggtggtccgtgataattaaataaaatgcttaattcatgtggctaacaacaaggaaaccacagggaacaacaaacaagttgttggccgtcgaccctgaaagagggttcaaaccaacggtgtggggcaccgcccaagacaagggcaagagaaaatgctcagaagaacggcacactggggtcccacaaaacaccggggcggctgcaccacaggtggggctgggcacaggcacactaacacccgaaggaaacaaagaaaagaaaaacaagcaaaagaaaaaaaaaggggtgagtcacaannnnn

SEQ ID NO: 25456 - DNA, 2562 bp, Homo sapiens
  misc_feature 1, 2, 2555, 2556, 2557, 2558, 2559, 2560, 2561, 2562: n = A,T,C or G
nncaatcaagttgtagtccaggtgctttctttggagggaaagggctatgagcgcacatcttctaaggtacacgacatcagcccacgtgaggcttggtaggactgcggacgtatttgttttcttcaagcatttggtcgagattaagaattaaaaatgtcatccaaacaagaaataatgagtgaccagcggtttagacgggttgcaaaggacccgagattttgggaaatgccagaaaaggatcgaaaagtcaaaattgacaagagatttcgagccatgtttcatgacaagaagttcaagttgaactatgccgtggataaaagagggcgccccattagccatagcactacagaggatttgaagcgtttttacgacctttcagattctgattccaatctctctggtgaagatagcaaagcattgagtcaaaagaaaataaagaagaaaaaaacccagactaaaaaagaaatcgattcaaaaaatctagttgagaaaaagaaagaaaccaagaaggctaatcacaagggttctgaaaataaaactgatttagataattctataggaattaaaaaaatgaaaacctcatgtaaatttaagatagattcaaacataagtccgaagaaggatagcaaagaatttacacaaaaaaataagaaagagaaaaaaaacattgttcaacatactacagactcttctctcgaagaaaaacaaaggacattagactcaggcacctctgaaattgtgaaatctcccagaatcgagtgttctaagacaagaagagaaatgcaatcagtggttcaactcataatgacaagagacagtgatggttatgaaaactcaacagatggtgaaatgtgtgacaaagatgctctggaggaagattcagaaagcgttagtgaaataggaagtgatgaggaatctgaaaatgaaattacaagtgttggtagagcttcaggtgatgacgatggaagtgaagatgatgaagaggaggatgaagatgaagaggaggatgaagatgaggatagtgaggatgatgataaaagtgacagtggccctgatcttgcaaggggtaaaggaaatatagaaactagttctgaagatgaagatgatacggcagatttgtttccagaagaatctggttttgagcatgcttggagagaattagataaagatgctcctcgtgctgatgagattacacgtcgattagcagtttgtaacatggactgggatagattaaaggcaaaagatttgctggctctgttcaattcatttaaacccaaaggaggtgtaatattttccgtcaagatatatccttcagaatttggaaaggagaggatgaaggaagagcaagttcaaggaccagtagagctattaagtattcctgaagatgccccagaaaaagactggacgtctagagaaaaattgagagattatcaattcaaacgactgaagtactattatgcagtagtagactgtgattctccggaaacagctagtaaaatttatgaggattgtgatggcctggaatttgaaagtagttgttctttcatagatctaaggtttataccagatgatattacttttgatgatgagcctaaggatgtagcctcagaagtgaatttaacagcatataaaccaaaatatttcacttctgctgcaatgggaacatcaacggtggaaatcacttgggatgagactgatcatgaaagaattacaatgctcaacaggaagtttaaaaaggaagagcttttggacatggattttcaagcctacttagcttcctctagtgaagatgaagaggagacagaagaggagctacaaggtgatgatggagtcaatgtagaagaagatgggaaaacaaagaaaagtcagaaggatgatgaagaacaaattgctaaatacaggcagctcttgcaggttattcaagaaaaagaaaagaaaggcaaagaaaatgatatggaaatggaaattaaatgggttccaggtcttaaagaaagtgcagaagagatggtcaaaaacaaattggaaggaaaggataaactgaccccttgggaacaatttttagagaagaagaaagagaaaaaaagactgaaaaggaaacagaaggctcttgctgaagaggccagtgaagaggaacttccctctgatgttgatttgaatgacccatactttgctgaagaagttaaacaaataggtataaataaaaaatcggtaaaatctgaaaagatggcacatctccagaagaagagattgaaatagaaagacaaaagggtgaaatggtttgttatgatgggtgaggaggaggacgtaagaacacttcaattacaacagatgtggcgcacagaatctgagcaaagaaaaaagcagtctgaaagaggcataaaggggactggggcaagggcacgaggcgggtcggcaggactcctgtcattgggcctgatcattctaaacaagtcggaatctgggggaccgcagaaggaacaatccgaaaagaggtgggacggggatgcgggaatgcgccaacgacgtgcgtgctcgaggcccacatgcgatatacnnnnnnnn

SEQ ID NO: 25457 - DNA, 2924 bp, Homo sapiens; identical to SEQ ID NO: 22959
  misc_feature 1, 57, 2923, 2924: n = A,T,C or G

SEQ ID NO: 25458 - DNA, 7473 bp, Homo sapiens; identical to SEQ ID NO: 22423
  misc_feature 1, 2, 3, 7470, 7471, 7472, 7473: n = A,T,C or G

SEQ ID NO: 25459 - DNA, 2979 bp, Homo sapiens
  misc_feature 1, 2974, 2975, 2976, 2977, 2978, 2979: n = A,T,C or G
natggattagatgacagaagactgatccagaagtcaggagcttcctgtctcatccccgccccctccccggaaagtgataacagaattcattgaagtggagaatttttaaagaaggtaacaaaaagagaaagaaaatgccgaaaccaatcaacgtaagagtaactacaatggatgctgagctggaatttgccattcagcccaatacaactggcaaacaactttttgaccaggtggtgaaaacagttggtttgcgtgaggtctggttttttgggctgcagtatgtagacagcaaaggttattctacatggcttaaactaaataaaaaggtaacacagcaggatgttaaaaaagagaatcctttacagttcaagtttagagctaaattctttcctgaagatgtttctgaggaattaattcaagaaataacccagagactcttcttcttgcaagttaaagaagccatcttaaatgatgagatatattgcccgccagaaactgcagttcttttggcttcctatgctgtccaagccaagtatggagattacaataaagagattcataagccaggctacctggctaatgatagactcctaccccagcgtgtattggaacaacacaaactaacaaaagaacagtgggaagaaagaatacagaactggcatgaagaacatagaggaatgttaagggaggattctatgatggaatacctgaagattgcacaagatctagaaatgtatggagtcaactattttgaaataaaaaataaaaaaggaactgaattgtggctaggtgttgatgctttgggtctgaatatttatgagcatgacgacaagttaacacctaaaattggttttccctggagtgaaatcagaaatatttcatttaatgacaaaaaatttgttataaagccaatcgacaaaaaggcacctgattttgtgttttatgcacctcgtctgagaatcaataagcggattttggccttatgtatgggaaaccatgaactatacatgcgaagaaggaagcctgatactattgaagtacaacagatgaaggctcaggctagggaggagaaacatcagaagcagttggaaagggcacaattagagaatgaaaagaagaaaagagaaatagcagaaaaggaaaaggaaagaatagaacgtgaaaaggaagagctaatggaacgtctaaaacaaattgaagagcagacaattaaagctcagaaagaactagaagaacagactcgaaaagctctagaactggatcaagaacgaaaacgagcaaaagaagaagcagaacgacttgaaaaggagcgtcgagctgctgaagaggcaaagtctgccatagcaaaacaagctgccgaccagatgaagaatcaggagcagctagcagcagaacttgctgaattcactgccaagattgcacttctagaggaagccaagaagaaaaaggaagaggaagctactgagtggcaacacaaagcttttgcagcccaggaagacttggaaaagaccaaagaagagttaaaaactgtgatgtctgccccccctccacctccaccaccaccagtcattcctccaacagaaaacgaacatgatgaacacgatgagaataatgctgaagctagtgctgaattatcaaatgaaggggtaatgaaccatagaagcgaggaagaacgtgtaaccgaaacacagaaaaatgagcgtgttaagaagcaacttcaggcattaagttcagaattagcccaagccagagatgaaaccaagaaaacacaaaatgatgttcttcatgctgagaatgttaaagcaggccgtgataagtacaagactctgcgacagattcgacaaggcaatacaaagcagcgtatcgatgagtttgaagcaatgtgagagctgttattttgcatatatgttcttcataagctgaaccaccaacagagaaaagcaggcctttgcagatatgatggaatgcatcccaccttgccaaagcacttacaccagtttgactgtgctagctaaaagacaaatttaaggggagctcttcaacattaaggcagtatgatatcatgcttggttttcttttttcttttggtccagggaatggagaatggtgttccattgcctcttttcacattttttttctttttcttttttttttctgttgaagattaacactaattatcacgtctgacaaatgtgtatgtgtggtttcagttctgtgtacattttaaaggataatggtgaacattttaatgggtttcccttgccctttccatatttaacctatttccacattctctctcactcacattttctcagtgtgcccttctcttatctgccatgtccatagccataattccaccatcatacagatcaggcagtgtttaaaatgatggtaggtagcacagtggacagtctttgatcatcatgtagaatatggctatgaatcaggaaagagattagaacatttaataatgtatgtacagctggtgcttagtttttttttaatctaaatttaattaccttattggatatttgatatttggttatttaatcacagtcatctttaacagcttacactgattggtgttttatctcctgtgatcctttgatggctttttttgcctaccatttcacagaggtttagacagcagtagtagctccctaggagagtttactgatgaaacagcctctgcaagattttaaaagttttgttcttttatagactgatttagaaaaacaaatgattagttaaaaaaagaaaatatacatttgttggtaactaatgttattttttaaaacctggacctttctggaagggcagcatataaaaacatcagtcccgaggaggggacaacaatactacctcactactacatctgtgatgactggttgttcaaacacaagggttgggtcattgttattaacgaggtagaaaatttggagtttcaaataaggatagggtgtagaaagagcgnnnnnn

SEQ ID NO: 25460 - DNA, 315 bp, Homo sapiens
acacatgtataccacgcacccactcacacatacacacacgcactttggaccaacatcatttccaggttcaggaaatagaggatcataatttctgtgacaactcatttttgcaggtacgttagtgttcgcgattttaaaggcaaagtgctaattgatattagagaatattggatggatcctgaaggtgaaatgaaaccaggaagaaaaggtatttctttaaatccagaacaatggagccagctgaaggaacagatttctgacattgatgatgcagtaagaaaactgtaaaattcgagccatataaataaaacctgt

SEQ ID NO: 25461 - DNA, 4688 bp, Homo sapiens
  misc_feature 1, 2, 3, 4, 5, 6, 4686, 4687, 4688: n = A,T,C or G
nnnnnncaaccacacaaatgtttattttacatagcacgggggccctcattaaaaaaaaaaaagacctaaagcagcagttaagagccaattgcttatagagtgaaatggacaaaaaatagtagttgtgaaacatgataaggcgaaggggcttggggtaaagaagcgactagaaagatagggattaacaaattttgtttggacagatttccctcgacttcaactttctgtccttgaagataacaatgttattttatagggaagacatctttcacatgggaatttcatctcctccttttaagacacataatatccatgacagtgatcttgcacctgctgtttttaagtgcctttaatttaaaatagtcaatatgccacagcagcatattttgaggtggtatattattaactccttcaaggctaaaagctttgaatatgccggggtagttaccagactggagaaccttctcagctatttgccacttgtggaatgcattcaaatgtactgagtgcttattaacttttctctcagtccctcactctgctgctcttctcgcctcatctcacataagggaaaactcaggctccaaaagcaaagtgattccaccaagatgacaatggaatcgggacctggtgtccaagcctggtcctcgcacgaggtagatactccctgagatgctggggaagagccatggtaggaccactcatggccctcttcctttggcggaccttggaatccaccttccctgcgttaaagtgctccaccaggtgacgccggaagagaagccagcaggcggcggcggcgtcagcatcagcggcctcctgcccgtatctatcgtggcggcgacgggacccgcctccctgggcgccggagtcatgtgacccacacaatggctgagtggctactctcggcttcctggcaacgccgagcgaaagctatgactgcggccgcgggttcggcgggccgcgccgcggtgcccttgctgctgtgtgcgctgctggcgcccggcggcgcgtacgtgctcgacgactccgacgggctgggccgggagttcgacggcatcggcgcggtcagcggcggcggggcaacctcccgacttctagtaaattacccagagccctatcgttctcagatattggattatctctttaagccgaattttggtgcctctttgcatattttaaaagtggaaataggtggtgatgggcagacaacagacggcactgagccctcccacatgcattatgcactagatgagaattatttccgaggatacgagtggtggttgatgaaagaagctaagaagaggaatcccaatattacactcattgggttgccatggtcattccctggatggctgggaaaaggtttcgactggccttatgtcaatcttcagctgactgcctattatgtcgtgacctggattgtgggcgccaagcgttaccatgatttggacattgattatattggaatttggaatgagaggtcatataatgccaattatattaagatattaagaaaaatgctgaattatcaaggtctccagcgagtgaaaatcatagcaagtgataatctctgggagtccatctctgcatccatgctccttgatgccgaactcttcaaggtggttgatgttataggggctcattatcctggaacccattcagcaaaagatgcaaagttgactgggaagaagctttggtcttctgaagactttagcactttaaatagtgacatgggtgcaggctgctggggtcgcattttaaatcagaattatatcaatggctatatgacttccacaatcgcatggaatttagtggctagttactatgaacagttgccttatgggagatgcgggttgatgacggcccaagagccatggagtgggcactacgtggtagaatctcctgtctgggtatcagctcataccactcagtttactcaacctggctggtattacctgaagacagttggccatttagagaaaggaggaagctacgtagctctgactgatggcttagggaacctcaccatcatcattgaaaccatgagtcataaacattctaagtgcatacggccatttcttccttatttcaatgtgtcacaacaatttgccacctttgttcttaagggatcttttagtgaaataccagagctacaggtatggtataccaaacttggaaaaacatccgaaagatttctttttaagcagctggattctctatggctccttgacagcgatggcagtttcacactgagcctgcatgaagatgagctgttcacactcaccactctcaccactggtcgcaaaggcagctacccgcttcctccaaaatcccagcccttcccaagtacctataaggatgatttcaatgttgattacccattttttagtgaagctccaaactttgctgatcaaactggtgtatttgaatattttacaaatattgaagaccctggcgagcatcacttcacgctacgccaagttctcaaccagagacccattacgtgggctgccgatgcatccaacacaatcagtattataggagactacaactggaccaatctgactacaaagtgtgatgtttacatagagacccctgacacaggaggtgtgttcattgcaggaagagtaaataaaggtggtattttgattagaagtgccagaggaattttcttctggatttttgcaaatggatcttacagggttacaggtgatttagctggatggattatatatgctttaggacgtgttgaagttacagcaaaaaaatggtatacactcacgttaactattaagggtcatttcgcctctggcatgctgaatgacaagtctctgtggacagacatccctgtgaattttccaaagaatggctgggctgcaattggaactcactcctttgaatttgcacagtttgacaactttcttgtggaagccacacgctaatacttaacagggcatcatagaatactctggattttcttcccttctttttggttttggttcagagccaattcttgtttcattggaacagtatatgaggcttttgagactaaaaataatgaagagtaaaaggggagagaaatttatttttaatttaccctgtggaagattttattagaattaattccaaggggaaaactggtgaatctttaacattacctggtgtgttccctaacattcaaactgtgcattggccatacccttaggagtggtttgagtagtacagacctcgaagccttgctgctaacactgaggtagctctcttcatcttatttgcaagcggtcctgtagatggcagtaacttgatcatcactgagatgtatttatgcatgctgaccgtgtgtccaagtgagccagtgtcttcatcacaagatgatgctgccataatagaaagctgaagaacactagaagtagctttttgaaaaccacttcaacctgttatgctttatgctctaaaaagtatttttttattttcctttttaagatgatacttttgaaatgcaggatatgatgagtgggatgattttaaaaatgcctctttaataaactacctctaacactatttctgtggtaatagatattagcagattaattgggttatttgcattatttaatttttttgattccaagttttggtcttgtaaccactataactctctgtgaacgtttttccaggtggctggaagaaggaagaaaacctgatatagccaatgctgttgtagtcgtttcctcagcctcatctcactgtgctgtggtctgtcctcacatgtgcactggtaacagactcacacagctgatgaatgcttttctctccttatgtgtggaaggaggggagcacttagacatttgctaactcccagaattggatcatctcctaagatgtacttactttttaaagtccaaatatgtttatatttaaatatacgtgagcatgttcatcatgttgtatgatttatactaagcattaatgtggctctatgtagcaaatcagttattcatgtaggtaaagtaaatctagaattatttataagaattactcattgaactaattctactatttaggaatttgtaagagtctaacataggcttagctacagtgaagttttgcattgcttttgaagacaagaagataagtgctagaataaataagattacagagaaaattttttgttaaaaccaagtgatttccagctgatgtatctaatattttttaaaacgaacattatagaggtgtaatttatttacaataaaatgttcctactttaaatatacaattcagtgagttttgataaattgatatacccatgtaaccaacactccagtcaagcttcagaatatttccatcaccccagaaggttctcttgtatacctgctcagtcagttcctttcactcccgattgttggcagccattgataggaattctatcactataggttagttttctttgttccagaacatcatgaaagcggcgtcatgtactgtgtattcttatgaatggtttctttccatcagcataatgatttgagatttgtccatgttgtgtgattcagtggtttgttccttcttatttctgaagagttttccattgtatgaatataccacaatttgtttcctccccaccagttctgatactacaattaaaactgtctacatttcccaaaaaaaaaaaaaaaaaacggacgnnn

SEQ ID NO: 25462 - DNA, 365 bp, Homo sapiens; identical to SEQ ID NO: 21784

SEQ ID NO: 25463 - DNA, 715 bp, Homo sapiens
  misc_feature 1, 2, 3, 706, 707, 708, 709, 710, 711, 712, 713, 714, 715: n = A,T,C or G
nnnaaaaaggcccccaaaggggggggaaaaaaaccccccctaagggggaattgggggcccccccgggggggggccccccctttttttttttttttttttttgacaaagtgagattctgcctcaaaaaaaaaaaagaagactgcaagtaatctgtattcaaaacaaaaataaatgcagataatacaataatacagaagagtataaaatgcaaagtgaaaggtcttcctaaccagtttcaatcactagtggcaatcctgtcaacaatacctggttttatttcttcaaaggagaggcattaattttataaaacatacttttattttctgaaattttcacatctttcccttcttttacaacccatggtgtcctctttcttgtattctttttttatttccctgaagcaatttttttaaaagatgcatgaacagtaagcattctgatcctaacatctaaacatgtctacagtgtgccctcacacttacctattagttggctgggtatattcaggttgaaaatctttttttttctttttttttttttattatactttaagttttagggtacatgtgcacactgtgcaggttagttacatatgtatacatgtgccatgctggtgcgctgcacccactaactcatcatctagcattaggtatatctcccaatgctatccctccccgcgttaattaattctagaagactttcgaannnnnnnnnn

SEQ ID NO: 25464 - DNA, 1265 bp, Homo sapiens
  misc_feature 1, 2, 3, 4, 5, 6, 7, 8, 9, 10, 11: n = A,T,C or G
nnnnnnnnnnnagtcatattcgttcctttttttattggataaaaaatccaactttcaataatatttgcgcggcttagtggggccctgccaccgagagtggtcccaagaccagccatgtcctcggcttttacccgctgtcttcttaaccccccaaagccccgtgaaaaaaacggtagcgaactgccccgaggtaatttagcggccccttttttttttgagaggatctcctctgtccagctgagtgcatgcttgatctgctcactgaaacctccatctccggagttcaagtgattctcgtgcctcagcctcctgtgtagctggattacagctcctgccaccacacccagctaatttttatatttttagtagagacggggtttcaccatgttggccaggatggtctcgaactcctgacctcgtgatctgcctgccttggcctcccaaagtgctgagattacaggcgtaagtcactgcgcctggccagggagtccttttctaaactgagcctatttttctcttaggtacaaatggaataagtgacaaactctaatttgtagaaacattttaggccatgtataagttacactgattttagcactaagctatatttttatcacagatgggtcaccttaaaagaaaactaaggagatggaatgaatctgaaatctttctaaatacaaggtagttaacaccatactcaagcagaaattataatcctgtatttagagatactttttttttgagacagagtctcactctatcactcaggctggagcgcagtaggaaatatgcaaggaggaggagaaacaactgtcttgctgagggctagacgtgtgctctgaagaatggtgttccattttcagaagaccacatgacacacataatttctctactcaaaaggaaagatgcgtaaagtatacacatccacacaaagatgaagaagctaagaatgaattcctaatgtagttatctgtaacaggcatatgtgggaacacctggtcaggacttactttccccatctttggataaggcaatataaaatcagatgaccaagttaactaaagtagttttgagctttgttctaactaaaacaaagtagtagttttacaatttttataatatacttaattgtacgcgggagatctgacagagggaaagttctcatttcctactattcatgctatttggtcaaggcctgaaagcacccaggtgcagaatatcttgcgccagagaacagaaaacatagatataaaaaaatactgtgt

SEQ ID NO: 25465 - DNA, 3210 bp, Homo sapiens
  misc_feature 1, 2, 3203, 3204, 3205, 3206, 3207, 3208, 3209, 3210: n = A,T,C or G
nncctcggcagcccctgcctcgcttctccgcgctcgcggcgccgcctcctcccttcgcgccgccggcgctgctcgggggcggggccttgccgctgcggaggccggagacgcggcggcgctggacgcggaggcgctgggcgcacggcgcggagccggccggagctcgaggccggcggcggcgggagagcgacccgggcggcctcgtagcggggccccggatccccgagtggcggccggagcctcgaaaagagattctcagcgctgattttgagatgatgggcttgggaaacgggcgtcgcagcatgaagtcgccgcccctcgtgctggccgccctggtggcctgcatcatcgtcttgggcttcaactactggattgcgagctcccggagcgtggacctccagacacggatcatggagctggaaggcagggtccgcagggcggctgcagagagaggcgccgtggagctgaagaagaacgagttccagggagagctggagaagcagcgggagcagcttgacaaaatccagtccagccacaacttccagctggagagcgtcaacaagctgtaccaggacgaaaaggcggttttggtgaataacatcaccacaggtgagaggctcatccgagtgctgcaagaccagttaaagaccctgcagaggaattacggcaggctgcagcaggatgtcctccagtttcagaagaaccagaccaacctggagaggaagttctcctacgacctgagccagtgcatcaatcagatgaaggaggtgaaggaacagtgtgaggagcgaatagaagaggtcaccaaaaaggggaatgaagctgtagcttccagagacctgagtgaaaacaacgaccagagacagcagctccaagccctcagtgagcctcagcccaggctgcaggcagcaggcctgccacacacagaggtgccacaagggaagggaaacgtgcttggtaacagcaagtcccagacaccagcccccagttccgaagtggttttggattcaaagagacaagttgagaaagaggaaaccaatgagatccaggtggtgaatgaggagcctcagagggacaggctgccgcaggagccaggccgggagcaggtggtggaagacagacctgtaggtggaagaggcttcgggggagccggagaactgggccagaccccacaggtgcaggctgccctgtcagtgagccaggaaaatccagagatggagggccctgagcgagaccagcttgtcatccccgacggacaggaggaggagcaggaagctgccggggaagggagaaaccagcagaaactgagaggagaagatgactacaacatggatgaaaatgaagcagaatctgagacagacaagcaagcagccctggcagggaatgacagaaacatagatgtttttaatgttgaagatcagaaaagagacaccataaatttacttgatcagcgtgaaaagcggaatcatacactctgaattgaactggaatcacatatttcacaacagggccgaagagatgactataaaatgttcatgagggactgaatactgaaaactgtgaaatgtactaaataaaatgtacatctgaagatgattattgtgaaattttagtatgcactttgtgtaggaaaaaatggaatggtcttttaaacagcttttggggggtactttggaagtgtctaataaggtgtcacaatttttggtagtaggtatttcgtgagaagttcaacaccaaaactggaacatagttctccttcaagtgttggcgacagcggggcttcctgattctggaatataactttgtgtaaattaacagccacctatagaagagtccatctgctgtgaaggagagacagagaactctgggttccgtcgtcctgtccacgtgctgtaccaagtgctggtgccagcctgttacctgttctcactgaaaagtctggctaatgctcttgtgtagtcacttctgattctgacaatcaatcaatcaatggcctagagcactgactgttaacacaaacgtcactagcaaagtagcaacagctttaagtctaaatacaaagctgttctgtgtgagaattttttaaaaggctacttgtataataacccttgtcatttttaatgtacaaaacgctattaagtggcttagaatttgaacatttgtggtctttatttactttgcttcgtgtgtgggcaaagcaacatcttccctaaatatatattaccaagaaaagcaagaagcagattaggtttttgacaaaacaaacaggccaaaagggggctgacctggagcagagcatggtgagaggcaaggcatgagagggcaagtttgttgtggacagatctgtgcctactttattactggagtaaaagaaaacaaagttcattgatgtcgaaggatatatacagtgttagaaattaggactgtttagaaaaacaggaatacaatggttgtttttatcatagtgtacacatttagcttgtggtaaatgactcacaaaactgattttaaaatcaagttaatgtgaattttgaaaattactacttaatcctaattcacaataacaatggcattaaggtttgacttgagttggttcttagtattatttatggtaaataggctcttaccacttgcaaataactggccacatcattaatgactgacttcccagtaaggctctctaaggggtaagtaggaggatccacaggatttgagatgctaaggccccagagatcgtttgatccaaccctcttattttcagaggggaaaatggggcctagaagttacagagcatctagctggtgcgctggcacccctggcctcacacagactcccgagtagctgggactacaggcacacagtcactgaagcaggccctgtttgcaattcacgttgccacctccaacttaaacattcttcatatgtgatgtccttagtcactaaggttaaactttcccacccagaaaaggcaacttagataaaatcttagagtactttcatactcttctaagtcctcttccagcctcactttgagtcctccttggggttgataggaattttctcttgctttctcaataaagtctctattcatctcatgtttaatttgtacgcatagaattgctgagaaataaaatgttctgttcaacttaaaaaaaaaaaaaaaaaaaaaaaaacccagggcggccgctctagagtatccctcnnnnnnnn

SEQ ID NO: 25466 - DNA, 2608 bp, Homo sapiens; identical to SEQ ID NO: 21241
  misc_feature 1, 2, 3, 4, 5, 6, 7, 8, 9, 10, 11, 12, 13, 14, 15, 16, 17,18, 19, 20, 21, 22, 2607, 2608: n = A,T,C or G

SEQ ID NO: 25467 - DNA, 1090 bp, Homo sapiens; identical to SEQ ID NO: 22541
  misc_feature 1: n = A,T,C or G

SEQ ID NO: 25468 - DNA, 400 bp, Homo sapiens
  misc_feature 1, 2, 3, 178, 179, 180, 181, 182, 183, 184, 185, 186, 187,188, 189, 190, 191, 192, 193, 194, 195, 196, 197, 198, 199,200, 201, 202, 203, 204, 205, 206, 207, 208, 209, 210: n = A,T,C or G
nnnactgaggctgtatacagccacagcctctccccatccctccagccttatctgtcatcaccatcaacccctcccatgcacctaaacaaaatctaacttgtaattccttgaacatgtcaggcatacattattccttctgcctgagaagctcttccttgtctcttaaatctagaatgannnnnnnnnnnnnnnnnnnnnnnnnnnnnnnnnctcggccggactccagatgcatttatttcaagtttcgctcaccatgcttcatgtcattttagtagaagtaatgtgccagtagagacaactgatgaaataccatttagtttctctgacaggctcagaatttctgaaaaatgacctccttgtttttgaaagttagcataattttagatgcctgtgaaatagt

SEQ ID NO: 25469 - DNA, 1822 bp, Homo sapiens
  misc_feature 1, 2, 3, 4, 5, 1821, 1822: n = A,T,C or G
nnnnnccaagtcgaccggcggcaaggccccgaggaagcagctggctaccaaagcggcccgcaagagcgcgccggccacgggcggggtgaagaagccgcaccgctaccggcccggcaccgtggctctgcgggagatccggcgctaccagaagtctacggagctgctgatccgcaagctgcccttccagcggctggtacgcgagatcgcgcaggactttaagacggacctgcgcttccagagctcggccgtgacggcgctggcgctgcaggaggccagcgaggcctacctggtggggctgttcgaagacacgaacctgtgcgccatccatgccaagcgcgtgaccatcatgcccaaggacatccagttggtcagccgcatccgcggagagccggccagcgaaatccgctcctgctcccaagaagggctccaaaaaggctgttacgaaagtgcagaagaaggacggcgagaagcgcaagcgcagccgcaaggagagctactccgtttacgtgtaggaggtgctgaagcaggtccaccccgacaccggcatctcgtccaaggccatgggcatcatgaactccttcgtcaacgacatcttcgagcgcatcgcgggagaggcgtcccgcctggcgcactacaacaagcgctccaccatcacgtcccgcgagatccagacggccgtgcgcctgctgctgcccggcgagctggccaagcacgccgtgtccgagggcaccaaggcggtcaccaagtacaccagctcgaagtaagagtgtgcaagggacgcaatagatcaaccacctaaccccaaaggctcttttcagagccacttcagtaatcgagaaagcagctgtaaacacttgtcagagcgtttgatagcttttggtcaggtagggagtgttaccatggtcacggatgcattcgggtttaggactaaggagtttcctgtagtccctgtaatgaagttcgccttcaacatgccggaaccagcgaagtccgctcccgcgccaagaagggctcgaagaaagccgtgactaaggcgcagaagaaggacggcaagaagcgcaagcgcagccgcaaggagagctactccgtatacgtgtacaaggtgctgaagcaggtccaccccgacaccggcatctcctctaaggccatgggaatcatgaactccttcgtcaacgacatcttcgaacgcatcgcgggtgaggcttcccgcctggcgcattacaacaagcgctcgaccatcacctccagggagatccagacggcgtgcgcctgctgctgcccggggagttggccaagcacgccgtgtccgagggcaccaaggccgtcaccaagtacaccagcgctaagtaaacttgccaaggagggactttctctggaatttcctgatatgaccaagaaagcttcttatcaaaagaagcacaattgccttcggttacctcattatctactgcagacaaagaagacgagaatgcaaccataactagatggacttttccacaagctaaagctggcctcttgatctcattcagattccaacagcagaatccatctacaagttaatttctgtctccttggtccattccttctctctaactactcatctactgttcctcaaagaattgtctaattacccatctcctctttgcctctgagaaagagtaataagctctgacccacggggggtgggtatatcggtgtctcagccgaccttaattaattggcgcctttccttccacacaccacaaacacacacaacaaaaacaggcggcccaacaccacgagccacagcgcaaccctgaaaggccaagctcaaaaaacgcnn

SEQ ID NO: 25470 - DNA, 1384 bp, Homo sapiens
  misc_feature 1, 2, 117, 118, 119, 120, 121, 122, 123, 124, 125, 126, 127,128, 129, 130, 131, 132, 133, 134, 135, 136, 137, 138, 139,1367, 1368, 1369, 1370, 1371, 1372, 1373, 1374, 1375, 1376,1377, 1378, 1379, 1380, 1381, 1382, 1383, 1384: n = A,T,C or G
nnagtcgaccacgcgtccgcaaaaacaaaagcaccaagagcagaacaaaacaacgtagttgctttcctgaaatactttttggatttgattctatcttgggagtggtggctttacttnnnnnnnnnnnnnnnnnnnnnnngagacagagtctcgctccttcacccagctggagtgcagtggcgcgatctcggctcactgccagctctgcctcccaggttcatgccattctcctgcctcagcctcctgagtagctgggactataggtgcccgccaccatgcctcgctaattttttgtatttttagtagaaacggggtttcaccgtgttagccaggatggtcttgatctcatgacctcgtgatccaccctcctcggcttcccaaagtgctgggattgcaggcgtgaaccaccacgcccggccggctttacttctaatcctccacttcttggtctatttgaaccatcacaagtattttgggaccgataacaaaccccttttatgctaatttaattcttgacttgggtaataggtgcacctggataatttataaagctgtccatagatctaagtttagtggtacagatactactgggcaggagaaaaagcacaagttaaaatatttctacagtcagctcttaatattcccacatcttgtttgcaaaattttatggtcacgttctggcttttttacatgaggaaaacaaagttttaacagttttctcttctgtccccttctccagaggaggtgtgaaccagaactgaggaggccagttatattttaggcttttcagtagtacgattttgtcctctcccactgaggaggagggaagaagggggaagccagtgggagttccacacacgtggtcagtgctgtaagttcccggatatcagtgtctctcacatcaacacagaaatagggcacttctcaacattaattttggaattattcaccatttaaaaattgtcactgctctttttcattactgtagataactgagagttagctgttctaggaaaaggccatgtttcagttagtgctatgacttcttttttcgattaaggttgaagcagtgttctcttagtagcctgaacacttctcaaagcgacttatcactagcggctttaatattgagcttctatatcgttgtgtccacctcactttttaaggctgttcatacctggcaatattcacttactctgctatttttaaaaactattttaaagttttaagcacaatgttgactcttctgtaatttcctaaaattatattgttttcctacagacagctcaactttccttgatatgtaacactctaggaaaataactgccttgtaaaataaacgtgattttttttttcttttataccannnnnnnnnnnnnnnnnn

SEQ ID NO: 25471 - DNA, 1185 bp, Homo sapiens; identical to SEQ ID NO: 25142
  misc_feature 1, 1185: n = A,T,C or G

SEQ ID NO: 25472 - DNA, 223 bp, Homo sapiens
  misc_feature 221, 222, 223: n = A,T,C or G
acttttttttattttttttttttaacaatggtgtgcatgtgcaggaaatgacaaatttgtatgtcagattatacaaggatgtattcttaaaccgcatgactattcagatggctactgagttatcagtggccatttattagcatcatatttatttgtattttctcaacagatgttaaggtacctggccgggcggccgcccccgcggttgaggttccaattcnnn

SEQ ID NO: 25473 - DNA, 1186 bp, Homo sapiens
  misc_feature 1, 1185, 1186: n = A,T,C or G
nacggagtgcaatcactgcgtccttacgggggttgcaaggcgtccgaagtatgagtccactaacaaaagtccagaaactcgccagttaatagtattgtgatggagttcgctcttgttgcccaggctggaatgcaatggcatgaccttggctcactgcaacctctgcctccccagttcaagtggttctcctgcctcagcctcccgagtagctgagattacaggtactggctcctgtatcacccagctctggagttgaaagagctcttcattcctgagtctcctgtaccactgagaataggctggagtgcagtggcgcaatctcggctctctgcaaccttcacctcccgtgttcaagtgattctcctgcctcagcctcctgaatacctgagattacaagcatgcaccaccacgcccgtctaattttgtattttcactagagacggggtttctccatgttggtcaggctggtctcgaactcccgacctcaggtgatccgcccgcctcagcctcccaaagtgctgggattacaggcatgagccaccgcgtccagcaagaataggtgattttcaaacttggaaacattcagaagttatcgcctcagtttcagattgagtagtctcaaagagattacagacatctaccacaaattctctacttggtgtggtgcaaaatcagtatgatgtaaactttgtctctcagtttcttcaaaggaaagaagcaactggaacacacatataacactaacccttccagctgcattatgagggaccagtacctgtctcaaggcaaaattatgacttagttcatcctcacctctggaggccagtaaaagtgggttatagaagaacaaagaggcatctagatctttcactgggttatttggagagaaacatctcctaccgaaggccagtttaacaagactggtagaggaggttatcttatctaattcacagaaatcaacacattgagtcaagaaaaatgaaacacagaaacactctaaataaaagaagataagtcttcagaaaccaaccctaatgaaatgaagatatgtgattaacctgacaggaattaaaagagccctaaaaagtctctgggcagctgaccactgggacttctccgaatacgtcccagttgcggaaacaccggctccatcggctccacatcggcaaggtactgtggcgcacnn

SEQ ID NO: 25474 - DNA, 3298 bp, Homo sapiens
aaaagaccactttgttcccgtcccggtttgtgaaaccctttcgctcttctggaatttttctattggcgcccccagttttattaatttggcggccgcccacatatttttttttgttgttgttttgttttttttttgcttacacccgtttttctccgggtagccccaactccccagccgaccatttctcctaagtgtgtaacatgggaaaacccaataatgcccagtctgtcagtgtaagatgtaagaaaatatatttattttttccatgacaatactatgataaaattgttaaatacatgcatgttttaaaaacagacataagtaacatctttagagttaacagccaagcatactagttttacatttatggtgttttagtaatagattattttctatgtttttgctataatcatgttttccaaaagatacagaaactaaattctgaaattatacaatgatataaagtgtccaaatttcccattctaacagcaatttaaaatccaaattttcacaaggcaggaaatgcttcagttatcatctaagtggagttgttttattccatattactctcagaattctgtgaatcagactgaatcacacacatgtacttcatctatagttttcttcctgtataagtgtattgaaatgtttccttatacgattaaacatgattttaggtacagcacatcacaactgtttattcaccttaaaaaaatgtctgtagtggtaacatttcaagaaatgaaaaagggaacagtttgggatccgcagtttctccctatcttctttcagctacatttacaagcatttgaccaaacaaaaattagtaaacagttactagtatttataaaaaacttaaaatatttaacatataatactcactttaaaaaaacattcattctacaaaccttataaaagacagaaacttatatctgttcacagtatgtgtattttgtaaacagtaattcactataatgcaattttgaaagtaaaaaaaggtaatttcctagtgttataaggaccttgacttatggccagctaatgaaagagaagaaaacctaacatccttattaggaaagttaagtattttgaaatgatttattttacctttcaacatacttttaagatggtactatcttaaatctaggatgtctatctatccaggccaatcttttgcaagcaattctgaatttaaatgtatttaagaaaaagccgtgctcttttttgagaaaataacaggataaaacaaacgccaggaagggcatcaatcacataacacctacccctccacaacaatgaaaggtttctttttcgtgttgtctcccgctactcacaatgttattcatatttttcctaaatattgtgttggaaggaaaaattaaatacaaggaaacactagcttatgatatattagacaatttggggaaaagcatttggaatcaaactgggagaagaatgttttacaaaaattgtatgaaaaccattattcagtgttcttttctatgagcaattgcaaaaacactaatactaatgttaaacctaacagttaacttttccacgttataaatgaaaattgtactaccacctagagatattttgatcttttataatacacaactggaatgtttaggaaaatagttcggaagctgaaagttacccatttaaaatggaataattcttaacggaagtacactttaaatgtataaggaaattcaacaacttaagtgagccattcaatcacgtgtgcaaagtattttagtcttaagggcaacacataggatctatgttgttagctttttttttttttaaagttctgattggctactgtaaaggcaatcttagaagatgcatgtaaatataatataaatcaactttcttatcaattagacattttccccactcacatctcttagtttttagggtattcagtcccagcaaccaaaaaaaaaaatgtaaatcatattttgtttctggctaatgttcaatcagtttttcttttataagagcttttgatgtactgtttctacggttctttaggcacttacacataaaaacattcagagggttttccccttaacacacaacttttaattctcatgaaaatgttgcacagttagaatttgtcttgcataggtaaattctgtttataacatggactctgataatccaaatattaacattcctaatatagggaaaaataagcaccattcatagctaaaaataatagaatcctgtcataacccaatatcataattacaaggatctggatatattctagaccaaatcacactccctgaaacattaccatgtacaataaagcctgaaatagccaactaattgaatgttattcttaatcctttacactggcactaaaaatagttcatctgtaataagcatgaatacgaccatgtaataattaatagcactaattgaaaaggaataaaaaaatctaaccaccatagcaaaataaggggtttaagtattattaatagccctggtacataatccataaagataaaaacgaaccaaattcaagccaagtaatttccaatgatattctaaggctaagtctaaaagatgaatgttctgtaactttggccataaatcatacttaaaccccttattttgctatggtggttagatttttttattccttttcaattagtgctattaattattacatggtcgtattcatgcttattacagatgaactatttttagtgccagtgtaaaggattaagaataacattcaattagttggctatttcaggctttattgtacatggtaatgtttcagggagtgtgatttggtctagaatatatccagatccttgtaattatgatattgggttatgacaggattctattatttttagctatgaatggtgcttatttttccctatattagggaatgttaatatttggattatcagagtccatgttataaacagaatttacctatgcaagacaaattccctaactgtgcaacattttcatgagaattaaaagttgtgtgttaaggggaaaacccctctgaatgtttttatgtgtaagtgccctaaagaacccgtagaaacagtacatcaaaagctcttataaaagaaaaactgattgaacattagccagaaacaaaatatgatttacatttttttttttggttgctgggactgaataccctaaaaactaagagatgtgagtggggaaaatgtctaattgataagaaagttgatttatattatatttacatgcatcttctaagattgcctttacagtagccaatcagaactttaaaaaaaaa

SEQ ID NO: 25475 - DNA, 1732 bp, Homo sapiens
  misc_feature 1, 62, 63, 64, 65, 66, 67, 68, 69, 70, 71, 72, 73, 74, 75,76, 77, 78, 79, 80, 81, 82, 83, 84, 85, 86, 87, 88, 89,90, 91, 1732: n = A,T,C or G
nctggctaccgcttaaacttaagcttaccatggggggttctcatcatcatcatcatcatggnnnnnnnnnnnnnnnnnnnnnnnnnnnnnnaaccgcatggatgtacgacgatgacgataagtcgctgctgctatggtctgtgcccaggtattcatagccaaactgagcagcaggacacccatcaggttcatcaggaggcctgtccgcaccatgtctttgaccagcaagtgtccagaggcgaaggcgatggagttggggggcgttgagaccgggagcatgaaggcaaaggagcagccgactgtgcccggaatcatcagatacagggggtgcactctcaggcggatggccagctctgccaggaccggcaggaagatgatgatggtcgccgtgttgctggcaaactcagtgaagaaggcgatgaccacagtgatgagcagcacagccagggcggggggcacattctccagggggtgcagctgcccaccaatccatacagacagccccgattcctcacagcctttggccatggcgaagccccctcccaggagaaggatgatgttccaaggcactgtctcctgggccttcttccaggtcagcaagggctctgtctctgtgttgggagctttgaagtcaaaccaccacttgagagagggcctttgggacgggaagaaaaacaagatggtgacaatagccacgccggtgacagcatcagaaagaaacccaggattgaagaggctggcccagccagggatgaacttcgggtcccgggtgaagaggaggatggcaaacatgcagaaaaggatgaaaacagcctgttcggcaaacttgatgggccccaggttctggtattcttcccgaattacagctcgagccctatcttctgcattggttcttatctcagatttattcttcctccagcccctgaagctcagtcccccgtacaggaaggagatccagagccagcctgccaacaggaacaacagcataagagggaaggcgaaaatgaaccaggagccgaaattcaccacgtcacactgcggaaagaaactcttgagctggccaagcaggatgaggttaggggctgtgcccgtgagtgtggctgtgcccccaatactggacatggacatggcaaattacagtgaagttttggacccaacttacacaactttggagtttgaaactatgcagattctatataattcaagtgatagttctgccccagagacaagtatgaataccacagacaacggtgtcaactgtctgtgtgctatctgtggggacagagcaacaggaaaacactatggggcatccagctgtgatgggtgcaagggtttcttcagacgcagcattcgtaagagtcacgtttattcttgcaggttcagtcggcaatgtgttgttgacaaggacaaaaggaatcaatgtagatattgtcgattaagaaagtgttttagagcgggaatgaaaaaagaagctgtacaaaatgaacgtgacagaataagcaccagaagaagcacatttgatggcagcaacatcccctccattaacacactggcacaagctgaagttcggtctcgccagatctcagtctcaagccctgggtcaagcactgacataaacgttaagaaaattgcaagtattggtgatgtctgtgaatctatgaaacagcagctcttagtcttggtggaatgggctaaatatattcctgccttctgtgaattacaattggatgan

SEQ ID NO: 25476 - DNA, 2358 bp, Homo sapiens; identical to SEQ ID NO: 22430
  misc_feature 1, 2, 3, 2358: n = A,T,C or G

SEQ ID NO: 25477 - DNA, 1702 bp, Homo sapiens; identical to SEQ ID NO: 25305
  misc_feature 1, 2, 3, 4, 5, 6, 7, 8, 9, 10, 11: n = A,T,C or G

SEQ ID NO: 25478 - DNA, 3586 bp, Homo sapiens
  misc_feature 1, 2, 3, 4: n = A,T,C or G
nnnncccgcgtccgcgacttccggcgagcgggcaagcgggaaccaggtggccacccggtgtcggtttcattttcctttggaatttctgctttacagacagaacaatggcagcccgagtacttataattggcagtggaggaagggaacatacgctggcctggaaacttgcacagtctcatcatgtcaaacaagtgttggttgccccaggaaacgcaggcactgcctgctctgaaaagatttcaaataccgccatctcaatcagtgaccacactgcccttgctcaattctgcaaagagaagaaaattgaatttgtagttgttggaccagaagcacctctggctgctgggattgttgggaacctgaggtctgcaggagtgcaatgctttggcccaacagcagaagcggctcagttagagtccagcaaaaggtttgccaaagagtttatggacagacatggaatcccaaccgcacaatggaaggctttcaccaaacctgaagaagcctgcagcttcattttgagtgcagacttccctgctttggttgtgaaggccagtggtcttgcagctggaaaaggggtgattgttgcaaagagcaaagaagaggcctgcaaagctgtacaagagatcatgcaggagaaagcctttggggcagctggagaaacaattgtcattgaagaacttcttgacggagaagaggtgtcgtgtctgtgtttcactgatggcaagactgtggcccccatgcccccagcacaggaccataagcgattactggagggagatggtggccctaacacagggggaatgggagcctattgtccagcccctcaggtttctaatgatctattactaaaaattaaagatactgttcttcagaggacagtggatggcatgcagcaagagggtactccatatacaggtattctctatgctggaataatgctgaccaagaatggcccaaaagttctagagtttaattgccgttttggtgatccagagtgccaagtaatcctcccacttcttaaaagtgatctttatgaagtgattcagtccaccttagatggactgctctgcacatctctgcctgtttggctagaaaaccacaccgccctaactgttgtcatggcaagtaaaggttatcctggagactacaccaagggtgtagagataacagggtttcctgaggctcaagctctaggactggaggtgttccatgcaggcactgccctcaaaaatggcaaagtagtaactcatgggggtagagttcttgcagtcacagccatccgggaaaatctcatatcagcccttgaggaagccaagaaaggactagctgctataaagtttgagggagcaatttataggaaagacatcggctttcgtgccatagctttcctccagcagcccaggagtttgacttacaaggaatctggagtagatatcgcagctggaaatatgctggtcaagaaaattcagcctttagcaaaagccacttccagatcaggctgtaaagttgatcttggaggttttgctggtctttttgatttaaaagcagctggtttcaaagatccccttctggcctctggaacagatggcgttggaactaaactaaagattgcccagctatgcaataaacatgataccattggtcaagatttggtagcaatgtgtgttaatgatattctggcacaaggagcagagcccctcttcttccttgattacttttcctgtggaaaacttgacctcagtgtaactgaagctgttgttgctggaattgctaaagcttgtggaaaagctggatgtgctctccttggaggtgaaacagcagaaatgcctgacatgtatccccctggagagtatgacctagctgggtttgccgttggtgccatggagcgagatcagaaactccctcacctggaaagaatcactgagggtgatgttgttgttggaatagcttcatctggtcttcatagcaatggatttagccttgtgaggaaaatcgtggcaaaatcttccctccagtactcctctccagcacctgatggttgtggtgaccagactttaggggacttacttctcacgcctaccagaatctacagccattcactgttacctgtcctacgttcaggacatgtcaaagcctttgcccatattactggtggaggattactagagaacatccccagagtcctccctgagaaacttggggtagatttagatgcccagacctggaggatccccagggtcttctcatggttgcagcaggaaggacacctctctgaggaagagatggccagaacatttaactgtggggttggcgctgtccttgtggtatcaaaggagcagacagagcagattctgagggatatccagcagcacaaggaagaagcctgggtgattggcagtgtggttgcacgagctgaaggttccccacgtgtgaaagtcaagaatctgattgaaagcatgcaaataaatgggtcagtgttgaagaatggctccctgacaaatcatttctcttttgaaaaaaaaaaggccagagtggctgtcttaatatctggaacaggatcgaacctgcaagcacttatagacagtactcgggaaccaaatagctctgcacaaattgatattgttatctccaacaaagccgcagtagctgggttagataaagcggaaagagctggtattcccactagagtaattaatcataaactgtataaaaatcgtgtagaatttgacagtgcaattgacctagtccttgaagagttctccatagacatagtctgtcttgcaggattcatgagaattctttctggcccctttgtccaaaagtggaatggaaaaatgctcaatatccacccatccttgctcccttcttttaagggttcaaatgcccatgagcaagccctggaaaccggagtcacagttactgggtgcactgtacactttgtagctgaagatgtggatgctggacagattattttgcaagaagctgttcccgtgaagaggggtgatactgtcgcaactctttctgaaagagtaaaattagcagaacataaaatatttcctgcagcccttcagctggtggccagtggaactgtacagcttggagaaaatggcaagatctgttgggttaaagaggaatgaagccttttaattcagaaatggggccagtttagaaagaattatttgctgtttgcatggtggttttttatcatggacttggcccaaaagaaaaactgctaaaagacaaaaaagacctcacccttacttcatctatttttttaataaatagagactcactaaaaacaagactagttagtgcagcatatctgagacatacagttttcttggtcttttttatgctctttttctaaccgtcaccccctctttttttttttggtattgcctgacaacatgatgaatcacctccatgtttataagttttatgttttcagctgggcacagtggctcacgcctgtaatcccagcactttgggaggccgaggcaggcggatcatgaggtcaggagatcgagactattctggctaacacagtgaaatcccatctctactaaaaatacaaaaaatagttagc

SEQ ID NO: 25479 - DNA, 6329 bp, Homo sapiens
  misc_feature 1, 2, 3, 6301, 6302, 6303, 6304, 6305, 6306, 6307, 6308,6309, 6310, 6311, 6312, 6313, 6314, 6315, 6316, 6317, 6318,6319, 6320, 6321, 6322, 6323, 6324, 6325, 6326, 6327, 6328,6329: n = A,T,C or G
nnngtccctcggccgccgtgaaggggtggaattggcactcccacccctgacatgggttcacttcgcattagccagaatcgcgtttggctgtgctggatgtgtgaacctattgggtactgtacaacttcaagcctcgaaatcagataggcaccaccaacctcatttcctgtttcaccttgattttctgtgataccaaaatctcagcttcacaaagtcattgaaagtgttggttcatgaagttttaccatcaattcaagtaatcataaatggcaaattctgcaaaagcagaagaatatgaaaagatgtctcttgaacaggcaaaagcgtcagtgaattctgaaacagagtcttcattcaatattaatgaaaacacaacagcttctgggactgggctttctgaaaagacttctgtctgtaggcaagtagacatagcaagaaagagaaaagagtttgaagatgatcttgtaaaggaaagttctagttgtgggaaagacactccatccaagaagagaaaacttgatcctgaaattgtcccagaggaaaaagattgtggtgatgctgaaggcaattcaaagaaaagaaaaagagaaactgaggatgttccaaaagataaatcttctactggagatggcactcaaaataagagaaaaatagcacttgaggatgttcctgaaaagcagaaaaatctggaagaaggacacagctcaacagtggctgcccattacaatgaacttcaggaagttggtttggagaagcgtagtcaaagtcgtattttttacctaagaaactttaataattggatgaaaagtgttctcattggagaatttttggaaaaggtacgacagaagaaaaaacgtgatatcactgttttggacctgggatgtggtaaaggtggagatttgctgaaatggaaaaaaggaagaattaacaagctagtttgtactgatattgccgatgtttctgtcaaacagtgtcagcagcggtatgaggacatgaaaaatcgtcgtgatagtgaatatattttcagtgcagaatttataactgctgacagctcaaaggaacttctgattgacaaatttcgtgacccacaaatgtgttttgacatctgcagttgtcagtttgtctgtcattactcatttgagtcttatgagcaggctgacatgatgctgagaaatgcgtgtgagagacttagccctgggggctattttattggtactactcccaatagctttgaattgataagacgccttgaagcttcagaaacagaatcatttggaaatgaaatatatactgtgaaatttcagaagaaaggagattatcctttatttggctgcaaatatgacttcaacttggaaggtgttgtggatgttcctgaattcttggtctattttccattgctaaatgaaatggcaaagaagtacaatatgaaactagtctacaaaaaaacatttctggaattctacgaagaaaagattaagaacaatgaaaataaaatgctcttaaaacgaatgcaggccttggagccatatcctgcaaatgagagttctaaacttgtctctgagaaggtggatgactatgaacatgcagcaaagtacatgaagaacagtcaagtaaggttacctttgggaaccttaagtaaatcagaatgggaagctacaagtatttacttggtgtttgcctttgagaaacagcagtgagcacataggcagtagtcccagaggggccgtgttctgtcctgcacaaatttgaacaactcatctcgatatatttgatatttctctgtctgttgattttaattctaaatgtgcaggatgctgccagaaactccaatgtagaaattcaacatttgctgtctgtgacagatgaacttttgcatgtgtatataagaatgagttgggacctctgtctttaaaaatctatttttaggtaatgttctaagaattccatttgcctctatgatcttagctcataaaaatataatatgacttgataaagcaactaaactctttccacagtgttcagatttgtcctgtgtgtgtttacagtattcaatttattgcagttatagaattggtcagagagcattttcatagtgtgctcatttctatggttttgttatatagcatttttcaacatttaatggtctgtacagttgaatgtaagtgttcaatatgtattgctgaagttataagtttaaaactcaatttcagatgctcataaaagttacttagctaaaattttagcaatttattgcattttgaaataatcattaacatgctgcaattcaggagctggttagaacattttaagtggcagcatagaattttggaattttggggctttcttttcagaaattgctaccatagtaattaatgtttccagttatcaagattgtgattagacacatttacctttcttcattgaacaaatggtgccatagttatttttctcaaaatttagtgaaaatccctcccatgtagacatgttgcacattttttccaaatttatacatggaactgcagtaggaatattctcaccatctgatgccatgtacccacttcagaaataagcaatacttgttcctctgttacaacctcagcactttgcaccgtaggagccattgttaaagttgtcacttgtgtaactgactgcttttccaaaactggtacttatgtgaactgttgtccttgctttacaccaccatttggaaaacttaccagtttttagatgtagatgtagtgaaaaacttcaagaatgaagcagagcaattgagtattcttttttaaattattaagccatgatttacaaaaacattactttctgtaattcacaatacttgttttaaaaacatagtgtcttcattagtgtgcatctattaactgttcatggtgttagagttgcaaactttttagcaagaaaatatggatttcctcatttcagttccttctgcagcctgtgaatctccacaaagtgttaccagtttacaaaaataagtctttttgccttaagtcattttggaaataagtaatactgcatctgactctggtggctgtattagctaggaaaggtttgtaaatggtgtcagtgaggtggggaaaggaagtcttcctgtcacatatgcaggttcgttttcattctagggcagtgccaggaagtatattgatagctttgtaggtacaggaaaaacatcatcattatttcctctgttcacatttactggtcttaattaacaggtaataataatacatgtacttttagcctgaaacctcttccacgccatgggtaacttgggggagagaagaatcctccaaacgatggagtagccagtggtaatacaaagcagggagaacagaaaggtagagttactaaggccttcagtgaacagaaaggagcagagagcaagattagatctgagaagatgctctggggactgagcccactgttgttggtgtcagggaggcttactggagccacacctgcaggcgctgtgttcaggcaccaccttcctccttgagctttgcctgtctcttgccttatcagttcttcctccaccaccctacacccccctccccccggccccaagcccctgtgtctccttgttacaattaagtttctggatattgacttaagaactgttaggaagaggactagaaaaggcttcccctgcctatcctctccgatcaccaaggtggaagggagctagtaggactcttccttgacacaccttgtagtctaaatgttcggtattctattcaggacttacggtaactattatgagggaggcatggctttccaccgtcgggccaggaagagcacctgttgctgcaagctcagtgaagtggggcactcccagacctgccatgcagtttatcctctgagaatggaattggaaatgaagacctaaccagctattggtgggaatgacggaactggggattgcgatgattgatctgggaacatggctggattgtgatttaaccaagaatgctgatgttgaattctttgggcctagaatatacttgagaaagcactagtggcttgtgttcagggagaggagctggcagtttttaaccacttctgtgggagccgtgttctaacctgtggaaagtattgcaattctgtgagagtgactctgcagagtcactgcaccatcaggcttggccctgctgtgccttcagtacccagccaggttctctgggtccagggtgactctccaaagaaattggccttcagctggagaaaacattgggtggagactctcacttatgttaatgcaatcttgaaatgactgaaaggtagattgccagcacagtgagtttcccagcctgctcccccatccacacttggaaattgagggagcatgaccgctctctgacttcacatgttaatagaggatcagagcagagttgggagtatattggtcaggatcatagaaaagaagacaaagcttgctcagccatgagatggccaggtatccagttttgttaactctctttgggaatttctttttcagcctgttttttagcttagtgccattatgtcattttgatttgtattcaagtactcttcaagtatctttgtaatgaaggtttggctacttgtataggtctgcctgcagggtgaaaatgccagtgtgaatattctagctaccaaacattgttttttgttgaaaaactgactttctgttgtctacctcaggccttgtgcatttgggttatctcaagccagtcaccacagagggtctctagggtctgcaaaatagaggccaaatccagggaccaggccctaataatagaagttgtaccaaaatgcctgtggtacttgatggcctgttggtcaaataggaagtacaagtgtgtgatgttagaacctccctagttgctgctatatcaaacactgcacacttgacaagtgttttcattccccgccctctgacagaacaacattcctaattctttgaaggcaaccagtgcaaaggctactacacttgtgtaatgatatttagcagatgcatacaggactggatcccagggcactgtcagttcttccctccctctcgtgctgctcagtttgtcctctgctcccatgtaggcctaaagtcaccccactccttagtgcctgcacctcaccacgatattgaggaagcacaggacatccaagggtactctccagtttggctgtggagacttgagcaagccctaaagtcccctgctccctggacttctcctgggttgtgcttttttgggggcaacataccttggacaaagctgagctgacagctaatgtttattagcctcctacctaagtcagtcactttgctaaattcttcacctgtggtaactcattttgattgttataacatctcagcaccattattcccattttaatgatgaggaaactgagtcatagaggatacagacttgcccaaaggagagccaggattttcacaccccctcctcaagctgggcctgccctccaagtgcttgttatatacctccacgggtgtcagcccagatgactcctcacccatccaccacctgcagcttgagatgttaactattagagctccattcttttggttcaaaacgttgatacttacttagatgttccctgagaggagtgtttatttctgagtaaggggctttgttgaaagagggggttagagagagcaagacagcacttgagtgcactggcaggaagcagagataagacttgaatttcagtttggtagacctccttctttagcagcccaacctgtagcaaatctagtttagcctgcatggcagggagagggattctcttcccaccctcaccatttgcaagtggcaggagctgagaatgccagtacgagagtgtagccaaagtgagaggctgagagcaaaggagacatttttttcagttttgagtcgagtatccagacagaggcaaatcattttgtttaactttttattaaagtgtaactatagaaacacatcaatgatttttcacaagtggagcacgtgcatacaatcggcaccccagaagccccccgtcagattcccttccagttaactacctctccaagggaaaccactatcctgagttctaagcgcatagattagttctgtctggtttggggagatatataaatggaattatgcattcttcgtatctggtttcttttcaccaatattatgtttgtgagatttttgttgcatgtatttgtacatggattttcattctcatggttgtataatatttcattgtgtgaataaaccacatactgtttatctgaaaaaaaaaaaaaaaaaaaaaaaaaaannnnnnnnnnnnnnnnnnnnnnnnnnnnn

SEQ ID NO: 25480 - DNA, 399 bp, Homo sapiens
  misc_feature 1, 2, 109, 110, 111, 112, 113, 114, 115, 116, 117, 118, 119,120, 121, 122, 123, 124, 125, 126, 127, 128, 129, 130, 131,132, 133, 134, 135, 136, 137, 138, 139, 140, 141, 142, 143,144, 145, 146: n = A,T,C or G
nnttgcatggcaaacatgtttactctgtgctaatgaaactatgaaacagttcctgcaagttcacagacaagtcaatcaatgattgactacagaacagactggtgagtgnnnnnnnnnnnnnnnnnnnnnnnnnnnnnnnnnnnnnncctcggccgcgaccatcgagcggccgcccgggcaggtacacacatgagaactgaaatggcccaaacccagaaagaaagcccaactagatcctcagaagacgcttctagggacaataaccgatgaggaaaagatggcctccttgtgccaccgtctgttatgatttctctccattgcagcagaaagccgttcttctaagcagacagcaggtgatgatggcaaaatagaccacactcttgaggagcaggaggaggt

SEQ ID NO: 25481 - DNA, 1122 bp, Homo sapiens
  misc_feature 434, 481, 490, 519, 520, 546, 599, 1122: n = A,T,C or G
actgctgactggctacctgctggacgccagtgcattgaacactaccgccggccccggcgctattgtgtcttctcccacgaggagctcatctgcaagatggctgccttcccagagacgttggatctcaatctagcagtagctgtgcacaaggagatgttcattatggttcaggaggagcgacgtctacgaaaggcccttttggagaagctttccttacaaggttgagtccacatcagggctcagtgttggctgaggtggggtgtccacaaccctactcctagtctttacagtatatgtgggttgaacacccccagggcgtcacggaggctgagcgagaggcttttgagctgctccaagatgatgacgcccagtgcatcaagggcaaaaccacgtgcttctgtcaagcctggcctgctacgactgccaagatggcntgtatgcctttccacatcaatgaccctctgcaagtgctctagtagcngacagtacntcggtatcggtacaccttggatgagctcnncaccatgctgcataaactgaagatcngggctgagtcttttgacactgggcccaacaaagtgcgagtggcctgaggttgnaggatggccgtaaacgcagtgagtgacaggaaatggaaggaacccttgtgtaagccttatttctttcttttgggtattctcaaccttccttttctgctaacactgcctacctgttgcaacttacactctccaggctttgaagagctaagggcactggagtctgaggctcgtgagaggaggtttcctaatagtgagctgcttcagcgactgaagaactgcctgagtgaggtggaggcttgtattgctcaagtcctggggctggtcagtggtcaggtggccaggtacgtgagaggagaaggcaaagaagggtgtcagtgtgtgaaaatgaataacaaaaatggatagactataaacacacaatcctgtttgaggctgaggcaggagaattgtttgaacccaggagacagaggttgcagtgagccgagatggcatcattgcactccagcctgggcagcaagagcaaaactccatctcaaaacaacagcaaaaaaaaaaaaaagtcgacgcggccgcaatttagtan

SEQ ID NO: 25482 - DNA, 5529 bp, Homo sapiens; identical to SEQ ID NO: 23158
  misc_feature 1, 2, 3, 4, 5, 6, 7, 8, 9, 10, 11, 12, 13, 14, 15, 16, 17,18, 19, 20, 5527, 5528, 5529: n = A,T,C or G

SEQ ID NO: 25483 - DNA, 2538 bp, Homo sapiens; identical to SEQ ID NO: 20316
  misc_feature 2538: n = A,T,C or G

SEQ ID NO: 25484 - DNA, 985 bp, Homo sapiens; identical to SEQ ID NO: 21932
  misc_feature 1, 2, 3, 4, 5, 6, 7, 8, 9, 10, 11, 12, 13, 14, 983, 984, 985: n = A,T,C or G

SEQ ID NO: 25485 - DNA, 1031 bp, Homo sapiens
  misc_feature 1, 2, 3, 1027, 1028, 1029, 1030, 1031: n = A,T,C or G
nnnccaagtagctcggagaagtactgtgcaccacaccggatagttttgtattttagtagagatggggtacatcatgctggccaggctggtcttgaactcctgacctcaggtgatctgtgtgccccagcctcccaaagcgctgggattacaggtgtgagccactgagcccagccatttaggaagtattataaaggcccttaaagtttgtaaggaaatgaaagggctttgtattaccttttcaataggcaacaatgtactttttctttccttagactttggcttactggaagatttaattaaaaggtagaggagaagtaaatttgctgtaataattttgctgtaaataaaacaaagagtttattttattagataaagaatgtgaagtaagcatgaagagacaggctttgggagaaataccagaaagggatttttcaaagatggcattgtttaatctccgtgtggccctcggttgtgcaatcacagatgagccagaagagggccagccccctacttgtttgggctccgaaactcttaccaaacatcaatttttattcttgggatagaaaaatagtatgtgctatctctaatacgctacttcgatatttattaaagaagtatttttaatgtagtgtccacaggctcatttcattgaaaacaactgactatgatgatagacagctcctgattggcaaaagttcgatggtatattcagaattaaattttgcctgcgcacctaaacactgacaacatttagcttaaaggttttccatggagaagagtggtaagagctgtagttagcaaaattggcatcctcttaagggtgtcaatctgtgttgcttgcaaatgtgaacttgattcgtggcagtagcacgtcactcttagatagccgattttctagcgaattttgaacttaatcttccacctttgggccgcggaaaatttgcgaagggaaggccaaagaaagacggggggaaaaaccggggggaggctcttactttttattttttctgtctattatttcgaatgnnnnn

SEQ ID NO: 25486 - DNA, 1080 bp, Homo sapiens
  misc_feature 1078, 1079, 1080: n = A,T,C or G
acttactggagtggtatacctgctcctgcaatttgctgttgccgaatttatggatgaacctgacttaaaaggagctgtgctgtaggtttctcaggagttttgtttgctttgaaagttcttaacaaccattattgccctggaggctttgtcaacattttgggctttcctgtaccgaacagatttgcttgtgggtcgaacttgtggctattcatttattctcaccagggacttccttcgctgggcatctggctgggattcttgttggactaatgtacactcaagggcctctgaagaaaatcatggaagcatgtgcaggcggtttttcctccagtgttggttacccaggacggcaatactactttaatagttcaggcagctctggatatcaggattattatccgcatggcaggccagatcactatgaagaagcacccaggaactatgacacgtacacagcaggactgagtgaagaagaacagctcgagagagcattacaagccagcctctgggaccgaggaaataccagaaatagcccaccaccctacgggtttcatctctcaccagaagaaatgaggagacagcggcttcacagattcgatagccagtgaggtggcatcttgggaagacatggcctattcgtgtaattattgcccatttggctcattccccaagcccctaattcattttaattcattttaaacaaaagcagagtacaccggtattgctccagatcgctcacatcacctgggacaagtcccatggcccctatgagtcaactcacagcttgcggggagtgggccttctcctggctgttctgctcataacgggtcacttctcatgagagacaggttcacgctccatctctcatgtgatcaggagcctctggctgggcgtttgagaatggacttcaccggagttattacacagcgggaaaagcctatcgcgggagccggtgatgaaggggggcaccaggccctggcacgagggcagagaggggggaagggcatcaccggaaccacggcgggggagacaaagggcaaaagaggacgggcccgcgcccgggcccgcgccgcacgcnnn

SEQ ID NO: 25487 - DNA, 9361 bp, Homo sapiens
  misc_feature 1, 9285, 9357, 9358, 9359, 9360, 9361: n = A,T,C or G
nattagggaaaacataaagtggctgaatttacaaattattggtatccccaagcacaaagaaaggattagaaaacctatttaacaaagtaatgatgaaaactctcaagatctagcaagacatagagacattcagatataggagacacaatgatccctaggaagatacagtgcaaaaaaggtcttctcaacaaggcattataatcagactctctaaagtcaaagataagagtgaatcctaaaaatagcaagaaaaaagcatgtagctacctataaaggaaaccccatcaaactaacagtagatttttcagcagaaaccttacagctcgtgccgaattcggcacgaggtttgtcgcagcaagaacaaacagcattccttccagcaaatcaagtgcctgttttacaacagaacacttcagttgctgcaaaacaaccccagacttctgtggtacagaatcaacaacagatatcacaacagggacctatatatgatgaagtggaattggatgcattggctgaaattgagcgaatagagagagaatcagctattgaaagggagcgcttctcaaaagaagttcaagataaagataagcctttgaaaaaaagaaaacaagattcttacccacaggaggctgggggtgctacaggaggtaatagaccagcttctcaggagacgggttctacgggaaatgggtcaaggccagcattaatggttagcattgatcttcatcaggcaggaagagtggactctcaggcttctataactcaggattcagactccataaaaaagcctgaagaaatcaaacaatgtaatgatgcacctgtttctgttcttcaggaagatattgttggaagtcttaaatctacaccagaaaaccatcctgagacacctaaaaaaaagtctgatcctgagctttcaaagagtgaaatgaaacaaagtgaaagtagattagcagaatctaaaccaaatgaaaaccgattggtggagacaaaatcaagtgaaaataagttagaaactaaagttgagacccaaacagaagaacttaaacagaatgagagcagaacaactgaatgcaaacaaaacgagagcaccatagttgagcctaaacaaaatgaaaatagactgtctgacacaaaaccaaatgacaacaaacaaaataatggcagatcagaaacaacaaaatcaaggcctgaaaccccaaagcaaaagggtgaaagccggcctgagactccaaaacaaaagagtgatgggcatcctgaaaccccaaaacagaagggtgatggaaggcctgaaactccaaagcaaaaaggtgagagccgccctgaaactccaaagcaaaaaaatgaagggcgacctgaaacaccaaaacacaggcatgacaataggagggattctggaaagccatctacagagaaaaaacctgaagtgtctaaacataaacaagatactaaatctgactcacctcggttaaaatcagaacgagctgaagccttaaagcagagacctgatgggcgatctgtttctgagtcactaagacgtgaccatgataataaacaaaaatcagatgacaggggtgaatcagagcgacatcgaggggatcagtctagggttcgaagaccagaaacattgagatcctctagtagaaatgaacatggcattaaatctgatagttcaaaaactgataaactagaacgaaaacacaggcatgaatcaggggactcaagggaaagaccatcttctggggaacaaaaatcaagacctgacagtcctcgtgttaaacaaggagattctaataaatcaagatctgataaacttggttttaaatcaccaactagtaaagatgacaaaaggacagagggtaacaagagtaaagtagacactaataaagcacaccctgacaataaggcagaatttccaagttatttgttggggggcaggtctggtgcgttgaaaaattttgtcattccgaaaatcaagagggataaagatggcaatgttactcaggagacaaagaaaatggaaatgaaaggagagccgaaagacaaagtagaaaaaataggattagttgaagatctaaataaaggagctaagcctgtagttgtgctacaaaaactgtctttggatgatgttcagaaacttattaaagatagagaggacaaatcaagaagttcccttaaacctatcaagaataaaccatcaaagtcaaataaaggtagtatagatcaatcagtgttaaaagaattaccccctgaactcctggcagaaattgagtccaccatgccactttgtgaacgtgtgaaaatgaacaaacgcaagcgtagcacagttaatgaaaagccaaaatatgctgaaatcagttcagatgaagataatgatagtgatgaagcttttgaatcctctaggaaacgacataaaaaagatgatgataaagcttgggaatatgaagagcgtgacagaagaagctctggggatcataggagaagtggccactctcatgaaggaagaaggagttcaggtggtggtcgttatcgaaaccgaagtccgtcagattctgacatggaagattattctcctcctcccagccttagtgaggttgctaggaaaatgaagaaaaaagaaaaacagaagaaaaggaaagcatatgaaccaaaactaacacctgaagaaatgatggactcttcaacttttaagagattcacagcctcaatagagaatattttggataatttggaagatatggattttactgcgtttggtgatgatgatgaaattcctcaggaactgctcttaggaaaacatcagcttaatgaacttggcagtgaatctgctaaaataaaagcaatgggtataatggataagctttcaactgacaaaactgtgaaagtcttaaatatcttggagaagaatattcaggatgggtcaaagctttccactttgttaaatcataataacgatactgaagaagaagaaaggttatggagagaccttattatggagagagttacaaaatcagcggatgcttgtcttacaactatcaacattatgacatcccctaacatgccaaaagctgtgtacattgaggatgtaattgaaagagttatacagtacactaaatttcatttgcagaatacactttatcctcagtatgatcctgtttacagattagatcctcatggaggaggcttattaagttcaaaagcaaaacgggctaaatgttctacccataagcagagagtaatagtaatgctttataacaaagtttgtgacattgttagcagcttatcagaattgctagagatacaacttcttacagacacaacaattcttcaggtttcatctatgggaataacaccattttttgtggaaaatgtcagtgaactacagttgtgtgccattaagttagtcactgcagtattctcaagatatgaaaaacataggcagttaattttggaagaaatttttacttcacttgcaagattaccaaccagcaagaggagtttaaggaacttcaggttaaacagtagtgatatggatggagaacctatgtatattcagatggttacagcactggttttacaacttattcagtgtgtggtacacttaccatcatcagagaaggactctaatgcagaagaagattcaaataaaaaaattgaccaggatgttgtcattactaactcttatgaaacagctatgcgaacagcccaaaacttcctctccatcttccttaaaaaatgtggtagtaagcaaggtgaagaagattacagaccactgtttgaaaattttgttcaagaccttctttcaacagtcaataagcctgaatggccagctgctgaactactccttagtttgttagggagactgttggttcatcagttcagtaacaagtcaacagagatggctttaagagtggcatctcttgattaccttggaactgttgctgcacggctaagaaaagatgctgttacaagcaaaatggatcaaggatctatagaacgcattttaaaacaggtttcaggaggggaagatgaaatccaacaattacaaaaagcattgcttgattacttggatgaaaacactgagactgatccttcactagtgttttctcgtaaattctatatagcccagtggtttcgagacacaactctggaaacagaaaaagcaatgaaatcacaaaaagatgaagaatcatctgaaggaacacatcatgcaaaggaaattgagacaactggccaaattatgcatcgagctgaaaaccgaaaaaagtttcttagaagcattatcaaaaccacaccttctcagtttagcacattaaagatgaactctgatactgtggactatgatgatgcttgcttgattgttcgatacttggcctccatgaggccgtttgcccagagctttgatatttatttgacacagatcctacgagttcttggtgaaaatgcaattgctgttcgaacaaaagccatgaagtgtttgtctgaggttgttgctgtagaccccagtattctagcaaggcttgatatgcaacgaggtgttcatggacgattgatggataattcgactagtgtccgagaagcagcagtagaattactaggtcgatttgtcctttgtcgacctcagcttgctgaacagtattatgatatgctgattgaaagaatattggatactggtatcagtgtcaggaaaagagtaataaagattctcagagacatttgtattgaacaaccaacatttccaaaaatcacagaaatgtgtgtaaaaatgattcgcagagtcaatgatgaagagggcattaagaaattagtaaatgaaacattccagaaactctggtttactccaactccacacaatgacaaagaagcaatgacaaggaaaattttaaacattaccgatgtggttgcagcatgcagagatactggatatgactggtttgagcaactgcttcaaaacttgttgaagtctgaagaggattcctcatataaacctgtgaagaaagcttgtactcaacttgttgataacctagttgagcacattcttaaatatgaggaatctctagctgactctgacaataaaggtgtgaattctggaagattggtagcttgcataaccactttgttcttattcagcaaaataagaccccagctcatggttaaacatgcaatgactatgcaaccataccttaccactaaatgtagtacgcaaaatgatttcatggttatctgcaatgttgcaaaaatcctagagctagttgtaccactgatggagcatccaagtgaaacttttcttgccactattgaggaagatctaatgaagctcatcatcaaatatggcatgactgtagtgcaacattgtgtgagctgtcttggagctgttgtaaataaagtgacacaaaattttaaatttgtgtgggcttgtttcaatagatactatggtgccatttcaaaattaaaaagtcaacaccaagaggacccaaataacacttcacttctaacaaacaaaccagcacttcttagatcccttttcaccgttggagcactatgtcggcattttgattttgatctggaagattttaaaggcaacagcaaggttaacataaaagataaagtacttgaactattgatgtattttacaaaacactcagatgaagaagtacaaacaaaagctatcattggtctaggatttgcctttattcagcatccaagtctaatgttcgagcaagaagtgaagaatctatataataatattttatctgataagaactcctcagtcaatttaaaaatacaagtgttaaaaaacctccagacctacctacaagaagaagatacacgtatgcagcaggcagatagagactggaagaaagttgcaaaacaggaagacttaaaagaaatgggtgatgtttcctcagggatgagtagttccatcatgcagctttatctcaaacaggtgcttgaggcattttttcacacccagtcaagtgtacgccactttgccctaaatgtcattgcattgactctaaatcaaggtcttattcatccagttcagtgtgtgccatatttaattgctatgggcacagacccagaacctgctatgcggaacaaggctgatcagcaacttgtggaaatagacaaaaaatatgctggattcattcatatgaaagcagtggctggtatgaagatgtcttaccaggtacaacaggcaatcaacacatgcctaaaagatcctgtaaggggtttcagacaagacgagtcctctagcgctttgtgttcacacctttactccatgatccgtggaaaccgccaacacagacgagcctttcttatttctttactcaacctctttgatgacacagcaaaaacagacgtgactatgctcttgtatatagcagacaatctagcctgttttccataccagacacaggaagagccgttgtttataatgcatcatatagacattacactctcagtttctggtagtaacctactgcagtcattcaaggagtctatggtaaaggacaaaaggaaagagagaaaatcatcacctagtaaggaaaatgagtcaagcgacagtgaagaagaagtttccaggcctcggaagtcacggaaacgtgtagattcagattcagattcagattcagaagacgatataaattcagtgatgaaatgtttgccagaaaattcagctcctttaatcgaatttgcaaatgtgtcccagggtattttattacttctcatgttaaaacaacatttgaagaatctttgtggattttctgatagtaaaattcagaagtactctccatctgaatctgcaaaagtatatgataaagcgataaaccgaaaaacaggagttcattttcatccaaaacaaacactggacttcctgcggagtgacatggctaattccaaaatcacagaagaggtgaaaaggagtatagtaaaacagtatctagatttcaaacttctcatggaacatctggaccctgatgaagaagaagaagaaggggaggtttcagctagcacaaatgctcggaacaaagcaattacctcactgcttggaggaggcagccctaaaaataatacagcagcagagacagaagatgatgaaagtgatggggaggatagaggaggaggcacttcaggggtgaggcggaggaggagtcaacgtatttcgcagcgtattacgtaaaatgatttttatgtgcttatatatgtcagtctattaaatgtacaccaagtaatgtaatacttaaaagagaaaacattttgtagatagagattctctacttacccgtttatacatccttttgtagaaagtttaacataaaagacaataaaaaaacagaaatgagatttatccagcataaagggttaatttttctttgaattgtattaatgtgtgttatttttattgttgctaagttttatgtagctatatggttcatatgtatatataattttatatatcaataagagtaaagacacgggtacaaattaagagttatatggttttacaagtatatgttaaccccttggcgctggcggtcacggtgcgtctcattgccggcaatggaagtgtgccgggaaatcccaactcccggcgtcaagggattaaaagcaataaaaacaataatttcactaaaattcttttgtgtaacacttggtcttttttcccccctcccaatgttttagtcattgagaaggtcaaaacgaaattcagactctacggagttggcagcacagatgaatgaaagtgttgacgtcatggatgtcatcgctatttgctgtccaaagtacaaagatcgaccacaaattgcaagagtagtgcagaaaaccagcagtggcttcagtgttcagtggatggcaggctcctacagtggctcctggactgaggctaagcgccgtgatggccgcaaactggtgccttgggtagacactattaaagagtcagacattatttacaaaaaaattgctctaacgagtgctaataagctgactaataaagttgttcagactttacgatccctgtatgccgccaaggatgggacttccagctaatgaatttgtacatgcagccaaatttacaggaatttttttaaaaggcagaaaaacttgaaataccaacattctggcaaaaaaaaatcagttttatgaagagtaagtggaacctgggatgcaggaacaaaagaaggaaatgttgggcaaacatttttgtgggagctcccttcgctgttgtgcagcagaaacagattctcagttcatttttactcccactgtattatagtttaacaaaaattgtttatatcttggaaaaaaaactttctgtttaaaaaaaataaacaagtgaatgttggaaattagtctgttaatgttcttaataaagtgttcttggagtttaacctagcagcggatggctttctttagcttagcccagtttccagggaagcattgttttttccaggctgtaaaatggcagaatctcctggatatataatttattctgttgaaaaaaaaaaaagcatgcagtatctatgacctatctgcagaaggagtttttgtaaatgtagattttgatgtattaggtcaccctgaaaacaatacaagaaaagggatccccaggtaatctggtggagcgaatactgcaataaatttttttacttctctttgttacttgtctgtttccatttgaatttcttattgtaaaaatctgtttaaatccatttatattattttacagtcttttatgtaaaatttattatatcactggttttcaaagcaaaacataaaatattgtttatacagtttgtataggctgacttctgaataattggtatctattattttcattcccataagagggtgtaaacaattaactccagggttttattgtatcctgcaatatttagtattaactatatatgatttagcactgtgccaaacacattttcaagagtacattttgatataaaaagaaactatagtttaacaaaaaacaaaaaaaaaaaagatcaaaaaaaaacatggcggccgcctcggcccagtcgactctagactcgagcaagcttatgcatgcggccgcaattcgagctcacttggccaattcgccctatagtgagtcgtattacaattcactggccgtcgttttacaacgtcgtgactgggaaaaccctggcgttacccaacttaatcgccttgcagcacatccccctttcgccagctggcgtaatagcgaagaggcccgcaccgatcgcccttcccaacagttgcgcagcctgaatggcgaatggaaanatgtagcgttaatattttgttaaaaattcgcgttaaaatttttgttcagctcatttttttacctaggcccgnnnnn

SEQ ID NO: 25488 - DNA, 927 bp, Homo sapiens
ccctttcgagcggccgcccgggcaggtacgcgggggcgtcgtagtctcctgcagcgtctggggtttccgttgcagtcctcggaaccaggacctcggcgtggcctagcgagttatggcgacgaaggccgtgtgcgtgctgaagggcgacggcccagtgcagggcatcatcaatttcgagcagaaggaaagtaatggaccagtgaaggtgtggggaagcattaaaggactgactgaaggcctgcatggattccatgttcatgagtttggagataatacagcaggctgtaccagtgcaggtcctcactttaatcctctatccagaaaacacggtgggccaaaggatgaagagaggcatgttggagacttgggcaatgtgactgctgacaaagatggtgtggccgatgtgtctattgaagattctgtgatctcactctcaggagaccatttgcatcattggccgcacactggtggtccatgaaaaagcagatgacttgggcaaaggtggaaatgaagaaagtacaaagacaggaaacgctggaagtcgtttggcttgtggtgtaattgggatcgcccaataaacattcccttggatgtagtctgaggccccttaactcatctgttatcctgctagctgtagaaatgtatcctgataaacattaaacactgtaatcttaaaagtgtaattgtgtgactttttcagagttgctttaaagtacctgtagtgagaaactgatttatgatcacttggaagatttgtatagttttataaaactcagttaaaatgtctgtttcaatgacctgtattttgccagacttaaatcacagatgggtattaaacttgtcagaatttctttgtcattcaagcctgtgaataaaaaccctgtatggcacttattatgaggctattaaaagaatccaaattcaaac

SEQ ID NO: 25489 - DNA, 1007 bp, Homo sapiens
  misc_feature 1, 2, 3, 1007: n = A,T,C or G
nnnaactggaaatctgaatttttaaatttagatctttaaatcaaattatttttatgcatattttcatttaatatagagtataccaatcgattgaagcctttcacaagtagtgcgctgagcttttcttattgaagagagtgaattagtttctgagaagtcaatctattgtgaaaagtttcagatgagattattttcttttagtctttttaaatatcactatatgtatttaaatagaagcaataaactagagagagtgtttcttgaaaagacaatgttttatttgccaccaggcagaacagaatgagcattggtagagaaggctccctcttggtatgttactgataaacttgtacttcctcatacttgtttgtggttctactgacttatttccaaacttaagagtaatgtacttcgaaaacaacttggttattctttaaatttcaggtaaaaccccttttcctaacactcatcttatttccactgtcttatttcctctcagatgttcatatttcacatgttcaaaatgaagcgtactatttcccctccaataaacgaagtctcctgccaacttcactgtctctgttaataacgttaccctaagagttcaggcttcaaacaccgagtcctccctcatatccatatcattaaaacagataatattgtcttcttacttctgaatcctactgaaggtccaacattttttataaaataatgtcatgaagatactaccactggcctctgaaactgtaactttgcctttattctaattcatcacaattgtcactgccacactgttccatccattgcacatgttccatgcattgtacatgttacctgcagtatctaatttgttcataaaataaggtaaaatgatcattttctagatgaggctgagggatagagacatttagaaacttatcctggataagacataagggggcaggttcaggattcaaatcctgtgctattcaagttcatagtctttccagcatatgtgcttcaactan

SEQ ID NO: 25490 - DNA, 916 bp, Homo sapiens
  misc_feature 897, 898, 899, 900, 901, 902, 903, 904, 905, 906, 907, 908,909, 910, 911, 912, 913, 914, 915, 916: n = A,T,C or G
actgtttttcgaattgataattcaagcaaaggcttctctttactgtcactgatttttttttgtttttattttgtttccttgtttctatttccttgaagctttgaagggaggagaagcagaaaattttgtttatgtttgttaaaaatcagaactacttaatgctttttgccacagcatatttccttgcctgttggagccgttaggaagattacctatgtcctaatcttcaacctgagaagatttttgactcttgtgtctactgttgattgtttgcttgagttctcaaagacctgtggccaggtattttaaaaagtcgtctatttctttctagttgcatcaacttgcacactggtgtctaactatatgtggtattcggaacttgtaattcttattgagcagccattgcctatattttctcagctcctcactgatttctttatatgagctcagctgacaagcaaatgcagctattttgtttaccctctcttcataccggaccatcaacaacagtgttctaactcatccctgatggtctgtgagatgtagactattacacaagattcaagttactcgtaagcaacttttagatagagttggtcctgttaggaggagactcttgatgtcaccttcagtatcttgaaagcgggtcccctccccgaggctcttaattctttgaaaacttgatgctgtttcagctgaaaaattagcaagactgttaaaaaaaaaaagttgaggggagctgtttaagaaactgaaaagtaattgcaaactacattggataattgtgactttcagttgttgttctgtatcagttgaatttttgtgctcttttccctgtgtacgtggtggttctatttttctccaataaaacttttatttaaaaaaaaaaaaaaaagnnnnnnnnnnnnnnnnnnnn

SEQ ID NO: 25491 - DNA, 2209 bp, Homo sapiens
  misc_feature 955, 956, 957, 958, 959, 960, 961, 962, 963, 964, 965, 966,967, 968, 969, 970, 971, 972, 973, 974, 975, 976, 977: n = A,T,C or G
gactttaggtgacactatagaagagctatgacgtcgcatgcacgcgtacgtaagcttggatcctctagagcggccgcctactactactaaattcgcggccgcgtcgacttttttttttttttttattttaagtatcagtttttattaaaaagtgcattttgattaatttatgatctaggtaagctgtaagataccagtatactctctggaataataactttacaaagatttaaaacaaacaaaattttaaaagcctttttatttccttcaccattattgttttacaatacaaatatcaccttgtgaatacacaaaaaaatcctacggaagataattctgctgcacgtaaaatacagaatggatatatatacttcttcattcttaaaaaactattttgttctccacattggcaagtatagaatagaatacttccccaaacatatgtatgttaggagtaaaacttagagttacatgcagtttctgcacaaatatcttttaaagaaatagatctcttttttgttgttcaccaacaaaattgtcatgagagtatggataactaattcatagctttcaagttttaggtaagtgatcattttcaaaactctctttaagaaaagatattcatggctgttttcattgagtagttaaaattgaactaccaaatcgacgataaaataatttaagtggtacatgtcattgctacctgatcacaatatgtgaacaggctctgactctaattaacaacctcattatttaagtcattgcaattttaaaaccataagcagtcttctgattcaatttagctataaatgcaaaatttagtagtgtatacatatatttatattttcaaggaatactttattttaaataaaaacatttaagattgcctactgaccatacaatcaagacaagaaaggcactagaaacatagacaaatttctctcccaagatgcannnnnnnnnnnnnnnnnnnnnnnacagatatcatttcttgtgtatgccatgacttgaaaaagtttgggaagctctttagcaatatcagctaaaaggatatgaaatcacaggtgatagcagttgtcattcagtaatttcctacaagcagcaccccaaaggaaatatagtcctaatctttactatccacttctaaatttaatgtgaatttcatacatgttattagttgttttctttataattttataaaaattattcatcgggagtttaacttccacttccatgctatcggatgtgttgggctccatgcaagaacttggaagaaaaacaggcaggaatgcatttgcataatgacccagatcatcattttctgcaactgagaattatatttcatcattgcttctagaagtctgcaattctttacttttctttggtgcattattatctaggtgccatcactggataatgtggagtgactagagaagtcacatatcactgtaaggtacagttagggtaacactttagaggtttattatttttaaaaaacttttcttgaactcctggccggcatggtgaaaccccgtctctactaaaaataccaaaattagccaggcgtgatggtgggcgcctgtagtctcagctacttgggaggctgaagcaggagaactgcctgaacccaggaggcagaggttgcggtgagtcgagatcgcgctactactgcctgggtggcaagggtgagactccatctcaaaaaagaaacaaaaaaacccaaaaagttttctttactgttggttaaaaaaaaagccagaccatagtttgactggtggcatggaatttgtgtatcaaataaatgcatttgcttatttgacaaaccatcagtgtccactatttgttaccagagttgggccactatcttttaaaattgctggtgaaaacttgccactagatggcagtgcctgtatagatggggaaaaaattgccaccattcttggtataatacagtgtagcttagatgaggtggtgaaataggggtatcagccgaatattcctaatatagtttctcttgaattaataaactgaagatttgtaggaaaatgagtgagcaaaatttgtttactgttgtgaatttttcctacagcactgtttttaatcttgatgttttccaactttctgtacctgcccgggcggccgaggtacatctctctccctcctcccccacatgcacaaggctcacatctcattatggtgcggcccatgt

SEQ ID NO: 25492 - DNA, 408 bp, Homo sapiens; identical to SEQ ID NO: 21570
  misc_feature 1: n = A,T,C or G

SEQ ID NO: 25493 - DNA, 1114 bp, Homo sapiens
  misc_feature 1, 2, 1114: n = A,T,C or G
nncgtcttgcaccaaagggaggtcgggatctcggttttccggccccgagagggaccaggtgcctccgccatagcttctgtcgctccatcgcccgcactgtgactggactgttagagggatccgtggagaggaggccaggacacctggaagccgggaaatggattcagtggtctttgaggatgtagatgtgaacttcacccaggaggagtgggctttgctggatccttcccagaagaatctctacagagatgtgatgcaggaaaccttcaggaacctggcttctgaaaaaaaatggaaagatcagaaaattgaagatgagtacaaaaatcccaggagaaacctaagaggtcttatgggagagagactcttagaacgtacgaacgatcatcagcatggcgaaattttgagccaggttccagatgacatgctgaagaagaaaatccacggagtaaaatcatgtggagaagtcagcgtgggtcatgcattccttaataggcacaaagagctgacactgggacacaagcatatgagtataggaatatggacagaagcatattaatgtacatactgtaagaaagactacagagatctcacgtaatttcggaacagatgaatgggctcaaactggggggaaactatagaatgggaggatggtgcaaaggttaattacacgtgaagcattcaaaaacagggaatcatgaccagggacgaaatcgacctacaatgtaaccaaaggcagacaccgcatgaagggacgcgaagggactaatccaaaggaaccaccgggcacacacccaagacaggaccagagggagaacaacagaatcagacaacacgcacataaagaactcatcgcaacaaccacaccgaggtgtgaagatcaagaaatagcacggcaaaaacacagcagggagcacgcacgcagggggacgggccacaacagcgacgaaccgtcacaccagtaggaggaaggacaagatcagagcaaactagcacgaacgaggtccacaccgcgtagccaacgatcagagaaagcgagcagcagcgactacacaacccacctgacaaagaacagcaggaacaagcaacaacaaagaccagcgaggaccgcacn

SEQ ID NO: 25494 - DNA, 283 bp, Homo sapiens; identical to SEQ ID NO: 21781

SEQ ID NO: 25495 - DNA, 1003 bp, Homo sapiens
  misc_feature 1, 992, 993, 994, 995, 996, 997, 998, 999, 1000, 1001, 1002,1003: n = A,T,C or G
nacgcgtccgaccgggggtgcagcgcggcagaatgagggttgattcctcggctgaccccacaatgtcgcaggagcaagggccggggtcctccacgcctcccagttctccgacacttcttgacgctctgctccagaacctttacgactttggaggtacagaaggtgaaacagaacagaagaagatcataaagaaaagggaaaacaagaagagagatgtgatggcttcagcggccttggcagcagagccatctcccctacctggttctctcataagaggccagaggaagagcgcttcgagcttcttcaaggaacttagagaagagcggcattgtgctccttctgggacccccacaggaccagagatccttgctgctgcagttcctccctcttccctaaagaacaatagggaacaagtagaagtggtagaatttcacagcaataaaaaaagaaaattgacgccagatcataacaagaacacaaaggctaatcctagtgttttggagagagatgtggatacacaagaatttaacctagaaaaagctcgtttagaagtgcaccggtttggtatcacgggttatggaaaaggaaaggagagaatcctggaacaggaacgtgccattatgctgggcgctaagcctcctaaaaagagttatgtgaattacaaggttttacaggagcaaattaaagaaaaaaaggcagcaaaggaagaagaaaagagactggcccaagaaacagatattttcaagaaaaagaagaggaaaggacaggaggacaggaaatccaaaaagaagtccgctcccagtattttgtcaaatggacggattggacaggttggaaaattcaaaaatggaacactgattctgagcccagttgatatcaagaaaataattcttcagatggcaatgagtcttgtcataaaccgggggggcccactggttcactggggggccgggccgtgcgatttaaaagaagtttaagccttcacaaggtcnnnnnnnnnnnn

SEQ ID NO: 25496 - DNA, 1340 bp, Homo sapiens; identical to SEQ ID NO: 24176
  misc_feature 1163: n = A,T,C or G

SEQ ID NO: 25497 - DNA, 3032 bp, Homo sapiens
agtgcaatggcacaatctcggttcactgcaacctctgcctcccaggttcaagtgattctcctgtctcagcctcccaagtagctgggattacaggtgcccgccaccatgctcagctaatttttgtatttttagtagagacagggttggccaggctggtctcgagctcctgacctcaggtgatcctcccacctcggcctcccaaagttctgggattacaggggtgagccactgtgcccggccataattttatatttttagaaaataaagaatgaaggacaaaagagcacagctaaatgaaactgctgctctaatttattccactggaaaggtctcaggactccttaactgttttccaggtttggctcttcatatctaacctgtgctaaaatgagaaggtatgctaggtgctgttagaaatcacaccatttccaaagaacccaagtagtatagagaccaaaatgaggcaaaaataaaagagatgaaacaggagagtttatttcttgcatactttccgaccttcatcatacaacctctcctaacctccctgtagtctttaaaatgtttaacttgcctataagctaacatgtaataaaacacatactcaattatatgaatagaagtggagagccagaatgctacaaaagaaatcacagctgctagaagtatcctccatagaaacatcaacatgattgtggatcaaaatgattttcactggatatggaatttgtatgggccatatttattaaaagagttctgtgtggtcacatagagttcctttgggatttcatcccacttttcaggacttaatttgtttgggtttgcttacctaacaagcaacaacaacaacaaaataaatagttccaaaatctagtttattacataaatctctatgaatccttgagggcctatatctatattataaataaatacaaatatagatttttaaatatctatgggactttgccgtccttaaactcatgggccgaggcaccaagttctgatcccccgtagaaatccccctttctctaatagcgaggctctaaccacacagcctacaatgctgcgtctcccatcttaactctttgcctttgccaccaactggccctcttcttacttgatgagtgtaacaagaaaggagagtcttgcagtgattaaggtctctctttggactctcccctcttatgtacctcttttagtcattttgcttcatagctggttcctgctagaaatgggaaatgcctaagaagatgacttcccaactgcaagtcacaaaggaatggaggctctaattgaattttcaagcatctcctgaggatcagaaagtaatttcttctcaaagggtacttccactgatggaaacaaagtggaaggaaagatgctcaggtacagagaaggaatgtctttggtcctcttgccatctataggggccaaatatattctctttggtgtacaaaatggaattcattctggtctctctattaccactgaagatagaagaaaaaagaatgtcagaaaaacaataagagcgtttgcccaaatctgcctattgcagctgggagaagggggtcaaagcaaggatctttcacccacagaaagagagcactgaccccgatggcgatggactactgaagccctaactcagccaaccttacttacagcataagggagcgtagaatctgtgtagacgaagggggcatctggccttacacctcgttagggaagagaaacagggtgttgtcagcatcttctcactcccttctccttgataacagctaccatgacaaccctgtggtttccaaggagctgagaatagaaggaaactagcttacatgaaaacagactggcctgaggagcagcagttgctggtggctaatggtgtaacctgagatggccctctggtagacacaggatagataactctttggatagcatgtctttttttctgttaattagttgtgtactctggcctctgtcatatcttcacaatggtgctcatttcatggggtattatccattcagtcatcgtaggggatttgaaggtcttgatttgttttagaatgatgcacatttcatgtattccagtttgtttattacttatttggggttgcatcagaaatgtctggagaataattctttgattatgactgttttttaaactaggaaaattggacattaagcatcacaaatgatattaaaaattggctagttgaatctattgggattttctacaagtattctgcctttgcagaaacagatttggtgaatttgaatctcaatttgagtaatctgatcgttctttctagctaatggaaaatgattttacttagcaatgttatcttggtgtgttaagagttaggtttaacataaaggttattttctcctgatatagatcacataacagaatgcaccagtcatcagctattcagttggtaagcttccaggaaaaaggacaggcagaaagagtttgagacctgaatagctcccagatttcagtcttttcctgtttttgttaactttgggttaaaaaaaaaaaaaagtctgattggttttaattgaaggaaagatttgtactacagttcttttgttgtaaagagttgtgttgttcttttcccccaaagtggtttcagcaatatttaaggagatgtaagagctttacaaaaagacacttgatacttgttttcaaaccagtatacaagataagcttccctctcctccttctatgcagcctggaaggaggagagggaaaatgttttgtaagaaaccaatcaagataaaggacagtgaagtaatccgtaccttgtgttttgttttgatttaataacataacaaataaccaacccttccctgaaaacctcacatgcatacatacacatatatacacacacaaagagagttaatcaactgaaagtgtttccttcatttctgatatagaattgcaattttaacacacataaaggataaacttttagaaacttatcttacaaagtgtattttataaaattaaagaaaataaaattaagaatgttctcaat

SEQ ID NO: 25498 - DNA, 7984 bp, Homo sapiens; identical to SEQ ID NO: 22761

SEQ ID NO: 25499 - DNA, 720 bp, Homo sapiens
  misc_feature 1, 2, 707, 708, 709, 710, 711, 712, 713, 714, 715, 716, 717,718, 719, 720: n = A,T,C or G
nnccgggtgaatcaggggttcatgaccagcctggccaatgtggtgaaaccctgtctctactgagtcgacccacgcgtccgaaaaaaagatggctgatttcagagtcatattcaggtttaaattctgtcattcagcccaaactcattactttatgttacttatgggaacctcatctaaaaagcaaggatcctgatacctgcctcatattgtggcaaggatcaaatgagtcaaataagatgcttgtgaaagtgaggacaggatctatcctcaacacctagtgcaattctttttacacattaggtacttagtaatttgggttgaattgtgttgaactaacctggcggtataggcaaaatttggaagtttggttttcagaaagtcttgacttcctcttatctctaagtaattggcatgtcctctaattcatattttcccccctcatctgttgggtgaaatactgtttatcctttagtactaaaattaaaagttacctcattcttctagctagctgattttttttttaatctaggctaaatcatgaatacatttacatttaaataaaatattacagttgaaagtaaagggtcctttcattatctccacttccaattccagtaccctgtgtaaaggaaaacatatacatcttgcagacattttttaatgtgtttgtaatataggtacataaaaatatatgtgcttgttttaannnnnnnnnnnnnn

SEQ ID NO: 25500 - DNA, 4733 bp, Homo sapiens
  misc_feature 4720, 4721, 4722, 4723, 4724, 4725, 4726, 4727, 4728, 4729,4730, 4731, 4732, 4733: n = A,T,C or G
ccggggctgcggcggcctccggcgctgtctccccgcacccgaccgggccgagccggctgggccggcggggtgagggaaagcagtggagtcgggagcagaagcgctagaggcagtggtcgtggcgcggcggcggcggctcccctggaggccggggatgtgggagaggcggtggcagcagcggcggaggcggcgctgcggacccgggggaaactgctggctgacaggacacccgggagagacgtgagggagccgccgctgccacctctcacccctgagtgaagctgggctcgagagggcggccctgtgctccccgggccgactggccagcgggcgcggcgcgggggcgggaacccgggctcgggcccggccgggcgccgggcggcggcggccgtggagcagcagcctcggtgcgacgtggagggctggaggcggcggcgatgcactaggcctcgctcagggcggctgccccgggacccgcagttgagtggtgattttatgcaatggcttcaagccacagttcttcaccagtgcctcaaggaagcagcagtgatgttttctttaaaatagaggtagatccgtcaaaacacattcgacctgtgccatcactgccagatgtgtgtcccaaggaacccacaggtgattcacatagtttatatgttgccccatctctagttacagatcaacatagatggactgtatatcattccaaagtaaatctcccagcagcattaaacgatcctagattagcaaaaagagaatctgacttcttcacaaaaacatggggattggactttgtggacactgaagtcataccttcattctacctcccacagatcagcaaggaacattttacagtatatcaacaggaaatctctcagagagagaaggttcatgagagatgcaagaatatttgtcctcctaaagataccttcgaaaggactcttttacatactcatgataaatccaggacagatctggagcaagtacctaagatttttatgaaaccagattttgccttggatgattccttaacttttaattcagttttaccatggtctcattttaatactgctggtggaaaaggaaatcgtgatgcagcttcctcaaagttgcttcaagaaaagctgagccattatctggatattgtggaagtaaacattgctcaccagatctctctacgttcagaagcattttttcatgcaatgacctctcaacacgagttgcaggactacctcaggaaaacttcccaggctgtaaaaatgcttcgagataaaattgcacagattgataaagtaatgtgtgaaggatcactccacattttaagactggcacttaccagaaataattgtgttaaagtatacaataagctgaagttaatggccactgtacaccagactcagcctacagtacaggtgttattatctacttctgaatttgttggagcattggacttaatagcaacaacacaagaggttctacagcaggaacttcagggcattcacagtttccggcatttgggatcacagctttgtgaattagaaaaactgatagataaaatgatgattgcagaattttctacttattctcacagtgacttaaatagaccactggaagatgactgtcaagttttagaagaggaaagactaatatctcttgtatttggacttttaaaacaaagaaagcttaattttttagaaatctatggtgaaaaaatggttattacagcaaagaatatcattaaacagtgtgtgattaataaagtttcacaaacagaagaaatagacacagatgttgttgtgaagcttgcagatcagatgagaatgttgaattttccccagtggtttgatctgctcaaggatattttctctaagtttacaattttcctacagagagtgaaggcaacattaaatatcattcacagtgttgttctctcagttcttgacaaaaaccaaaggactagagaattggaagagatttcacaacagaagaatgctgcaaaagataattcactggacacagaggtggcttatttaatccatgaaggcatgtttataagtgatgcattcggtgagggtgagctaacacctatagcagttgacactacctctcaaagaaatgcatctccaaatagtgagccctgcagcagtgattctgtatccgagccagaatgtactactgattcttcatccagcaaagagcacacatcatcatctgctattccaggaggtgtggatattatggtcagtgaagatatgaaattaactgactcagagctaggaaagctggcaaataatatccaggaattattatatagtgcctcagatatatgccatgatcgagctgtcaaatttctcatgtcaagagcaaaggatggttttcttgagaagctaaattccatggaattcataacactttctagattaatggaaacattcattttagacaccgaacagatctgtggaagaaaaagcacgtcattacttggagcacttcagagccaagctattaagtttgtaaataggtttcatgaagagagaaaaaccaagctcagcctcctcttagacaatgagcgctggaagcaagcagatgttcctgcagaatttcaggatcttgttgattctctgtcagatgggaagattgctttacctgaaaaaaaatcaggagccacagaagaaaggaaaccagctgaagttcttattgtcgagggacaacagtatgcagttgttggaaccgtattgctgttaataagaattatccttgaatattgccagtgtgtggataacatcccatctgttactactgacatgcttactcgtctgtcagatttattgaagtacttcaattcaagaagttgccagttagttcttggagctggtgcactgcaagttgttggactaaaaacgataactacaaaaaatttggctctttcttcacgatgtttgcagttaattgtgcactacattcctgtgatccgggctcattttgaagctcgactaccacctaagcaatatagcatgcttaggcattttgatcatatcactaaggactaccatgatcacatagctgaaatatcagctaagcttgtagcgataatggatagcttatttgacaagctgttatctaagtatgaagtgaaggctcctgttccttctgcctgtttcaggaatatttgtaagcaaatgacaaaaatgcacgaagctatatttgatctccttccagaagaacaaacacagatgttatttttaagaattaatgcaagttataaactccacttgaaaaagcagttatctcacttaaatgtgataaatgatggaggacctcaaaatgggttggtcacagcagatgtagctttttacactggaaatcttcaagccttaaaaggccttaaagatttggacctaaatatggccgaaatttgggagcagaagaggtgatgtcatcctggaaaactgggtagttcatctgaccatgggatgtgtttgttatgaagaaaatctggatgcctgtgattcgagaattgaacctgaaacccaaagtgaactggggtgggggaagggaaaaaggaaagtatcaagtgttgggaaactggattcagtgggatctacaaggaatgtcatttttgtgcatcctacagtgaggagtaactgatcaggtgtctataacatttttcattctctctggaaacagactcaggtttctttggaccaaatccaaaagaacacatagctgtaacacagctgtagttgactagaatgctctgtatactttatattaaaaaatgctttgcatttcttccagtgcaatgaaattcatatggtgtcccaccttatttaatgatggtacaatttaaaatcttagtcaacttctgtagaaagttttctctatgaaagtaaagctgtttgaaaaattattatttttttacagatctttctataaaaaataaacatcttttgattgcttggatttaggaattcaatttttgtttcagtgaccaatgtcaagttgcaggctttgtgtgttgcatatttaatatttctactaccaccgtatgtcaactgggtaaagccttccagagctctctaaatacctgaaagacttaagcctttttttaagtaattaatacttaaaaaaaaagatcctggcatctatttatgcaactaaatacttttcagaaatggtatataaaaggctacagtttaatatctgtatttttataaaagtatgatgaagggtttggggtgtttttatttgtagcagaggtaagaatatgtattcatataatctgcctacttttgagttctcatattaacatttagataacatatgaagtatggcccccttggatccttgtttttaagttactttcgatgtgtatacgaacaaagaccagggagaaacagaacttttaaaactataggctgctgtgttggggccagaaataaggtgacaagtaaagacttttataatacctaccttcaaaattagaatcagcagcactgtacaaataaagtgcctgtgcttcacctcacaccaagaatcttgcctaaccctgtcagagtgcctaatatcctgtggtgattatgtataatgaaacagtcttattttgtgctctttggtttcttaaaaggaaagcttgttttctttcctttatcattacagaggtatgtctttggttcttaaactatctgtctaaaataaagctgtaaaaaattaacagacnnnnnnnnnnnnnn

SEQ ID NO: 25501 - DNA, 938 bp, Homo sapiens
  misc_feature 937, 938: n = A,T,C or G
acgcgggggtgggcgcgtgagtggaatgggaggaggtcgcgctgtccatgggcgtccttggcctgcgccacccagagatgataaatagccaaagacgtcaatggcacccatggacatagtaagcatagtaggagctgaaaaactagaagcaatgacaatgtcaactattttgagcaaaaagaagcagtgtcttcggaacatttgatcataaaaccagaaattaaaggatgagaaaaacatttttctgaagcttatactttcacatttcctagagagcatatttgtgtggatgggggtgggtaaacactcaacaaaagtttctttaaaaagaagaaaccatcctggtttgatgtaatcaatggttgcccactgctcccttcctgtgcctgtgacccttcccaaactgccctgttgcttgcaggctcgcctgagctgaaaggcagccctcacatcccgtcggcacctccctggggccttctttacaccctggagaacttcacagggaatctgtgtctgtaacacaaaggcttcctggtccagatgtagatactaaggctgactggttatttaagtcctgcggacttactctgccaaaattatttaatcatgtaaaaataatttataattcttataaagtatccccttcataatataatgaatgttggtgctattacatttaagtgcacatgtacagtatacaagattattaataataatgttttcaaatagttattgtcaaagctatttttcttatgtttatgaaagtgcttataaaattcacgtaggcggcggacagcttttgcatcctccggatggtaaatcgccagcggttgtggggacacggagccacatcaagttgaaggtcttcggagttaacagtaaataacttccaaggctcccttacaccggtgcccggcacacccgaaatccgcggcann

SEQ ID NO: 25502 - DNA, 2670 bp, Homo sapiens; identical to SEQ ID NO: 24256
  misc_feature 1, 2, 3, 4, 5, 6, 7, 8, 9, 10, 11, 12, 13, 14, 15, 16, 17,18, 19, 20, 21, 22, 23, 24, 2643, 2659, 2660, 2661, 2662,2663, 2664, 2665, 2666, 2667, 2668, 2669, 2670: n = A,T,C or G

SEQ ID NO: 25503 - DNA, 770 bp, Homo sapiens
  misc_feature 1, 2, 7, 10, 18, 19, 676, 677, 694, 719, 729, 732, 735, 736,741, 748, 755, 758, 766, 767, 768, 769, 770: n = A,T,C or G
nncattngangtggctgnnatggacccggcagttcttcatacccccccgtcggaaaaagacccaacaaatggtgcccatctggaaggatgaaggcctcctggcaatgttctcttcaacctatgatgtaggttaacaagagtggaccagtgttctgtttctgaatgattatggagaaacaaaggtaccattaaaatttctaacccatattagccctttatcttccatccatgaaggcataagtttgcccatgtataaggttggcagcaaaatcctccacaaataaaagtataccctatgggtgcacgcgggaccaccccttttccaattctattgttcacagaagcataagcaagaaaaaattaagaggttatgagtctcatgacggcagagaagtcttgatctgtgatcttgggaaagctgtccatgactatggtgctgtctgcttctggagaaaaacgtctctctgttcagctttaccttaaagtctccaatagatatacagttccaagagtctagaggggcccctctgagtggtgagattatggacccataattcaacgcctcaaagttttgctccatgtgggcagtaagggcggtctttctctgataccattcccagaagacacagcctccagattctagatcatgaagggtgatggcttattaggaccgganngctcctgcctgggcccnccctggaacctgggggggggcttgncccaggccanttnggnnatttnccccccnccccccnggnccaaaaannnnn

SEQ ID NO: 25504 - DNA, 363 bp, Homo sapiens
  misc_feature 238, 239, 263, 264, 295, 296, 324, 325, 326, 341, 343, 344,357, 358, 359, 360, 361, 362, 363: n = A,T,C or G
ctctctttgatgaagtaagaaagacagcacgcttaaaccgtagaccaagaaatcaggagagttcaagtgatgagcagacgcctagtcgggatgatgatagccagtccaggagtccaagtagatctcgaagtaaatctgaaaccaaatcaagacacagaacaaggtctgtctcctatagtcactcaagaagtcgatcgagaagttccacatcatcttatcgatcaagaagctactctanngaagtcggagcagagggatgggtnnacctcggccggctctaggaaactagtggganntcccccgggctgcagggaatttcgatannncaagcttatcgatancnncgtcgacctcgannnnnnn

SEQ ID NO: 25505 - DNA, 591 bp, Homo sapiens
  misc_feature 591: n = A,T,C or G
gcgtccggttttccatacaaaatgtatttatatctgttatgtctttaggcagagttttctatttatccactaaggtcttgtacattttttattggctttatttctgagtactttatatttttgttgctattgttttaattcattttctgattggttgctattgtgttggaaagttattgagtatatattgattatatattcaatctcctgaatgtcttatgacgttctgtttttttggttcattctgtttaattttttaggtgatgtttcatatcattcatgcgtatatttgctttgcatctttcttgtctattttctgcatttttttttctggtctaattacattgtctaggattacaatgtttgttcctatttttaattgcaaaggtttttatgtctttaccatttagtgtcacgtctgttggagatttctttcgtctattctgcatgtcagtttaaggatgtctctattcctggattgttaagagtgtgcacaaaaagaagatatagttatttaattttaagagaataccaatactgtaaatagctttatgccaataaatatgaaaagctggatgaatacggacgcgn

SEQ ID NO: 25506 - DNA, 230 bp, Homo sapiens
ttaaacatgtgtcactgggcaggcggtgcctctaatactggtgatgctagaggtgatgtttttggtaaacagcccgcgtacattgcacatacccttggatccccacagtttggtcctcctcccagctacccctttatagtatgacgagttaacaagttggtgacctgcacaaagcgagacacagctatttaatctcttgccagatatcgcccctcttggtgcgatgctgt

SEQ ID NO: 25507 - DNA, 397 bp, Homo sapiens
  misc_feature 395, 396, 397: n = A,T,C or G
actcattcttcttcagagggccttcaaagaattcaaaggggactgagtgctgagttccctaagctgtggtcactgcagccatttcagcactagagggtgccataatcccaagtatgcaataaatcttgcagactcctagatacccagcctagatagatgtgggaaagagaagacaatgttctgggttcccaggcaaagtcccttactctcttctctctcattccccgaagtataagaagtccctctatatataccaggctgcctgtaattgggggagacgtgacacagggactcctgtgtccatcacagctggcatcacagtaatgctagtctaaacccatggactctatgaccagcacagtaccgtggtgaccgtggttcccaaagatgtcaannn

SEQ ID NO: 25508 - DNA, 204 bp, Homo sapiens; identical to SEQ ID NO: 24003
  misc_feature 204: n = A,T,C or G

SEQ ID NO: 25509 - DNA, 3963 bp, Homo sapiens
  misc_feature 3813, 3814, 3815, 3816, 3817, 3818, 3819, 3820, 3821, 3822,3823, 3824, 3825, 3826, 3827, 3828, 3829, 3830, 3831, 3832,3833, 3834, 3835, 3836, 3837, 3838, 3839, 3961, 3962, 3963: n = A,T,C or G
gaccccgcgtccgatgagattacatcctctgcctataaaaatcctggaagaaaacctaggaaatattcacctggacattgcacttggcaatgaatttatggatagaaaatgcagttgaaagatatttcataaaggaagaaaaagtaagaatacagctttaaccgtttattgtggtggagtctttcgccgcgcgacccacgggagcgcgcgaggcgcggggagcctgggaccaggagcgagagccgcctacctgcagccgccgcccacggcacggcagccaccatggcgctcctgctgtgcttcgtgctcctgtgcggagtagtggatttcgccagaagtttgagtatcactactcctgaagagatgattgaaaaagccaaaggggaaactgcctatctgccatgcaaatttacgcttagtcccgaagaccagggaccgctggacatcgagtggctgatatcaccagctgataatcagaaggtggatcaagtgattattttatattctggagacaaaatttatgatgactactatccagatctgaaaggccgagtacattttacgagtaatgatctcaaatctggtgatgcatcaataaatgtaacgaatttacaactgtcagatattggcacatatcagtgcaaagtgaaaaaagctcctggtgttgcaaataagaagattcatctggtagttcttgttaagccttcaggtgcgagatgttacgttgatggatctgaagaaattggaagtgactttaagataaaatgtgaaccaaaagaaggttcacttccattacagtatgagtggcaaaaattgtctgactcacagaaaatgcccacttcatggttagcagaaatgacttcatctgttatatctgtaaaaaatgcctcttctgagtactctgggacatacagctgtacagtcagaaacagagtgggctctgatcagtgcctgttgcgtctaaacgttgtccctccttcaaataaagctggactaattgcaggagccattataggaactttgcttgctctagcgctcattggtcttatcatcttttgctgtcgtaaaaagcgcagagaagaaaaatatgaaaaggaagttcatcacgatatcagggaagatgtgccacctccaaagagccgtacgtccactgccagaagctacatcggcagtaatcattcatccctggggtccatgtctccttccaacatggaaggatattccaagactcagtataaccaagtaccaagtgaagactttgaacgcactcctcagagtccgactctcccacctgctaaggtagctgcccctaatctaagtcgaatgggtgcgattcctgtgatgattccagcacagagcaaggatgggtctatagtatagagcctccatatgtctcatctgtgctctccgtgttcctttcctttttttgatatatgaaaacctattctggtctaaattgtgttactagcctcaaaatacatcaaaaaataagttaatcaggaactgtacggaatatatttttaaaaatttttgtttggttatatcgaaatagttacaggcactaaagttagtaaagaaaagtttaccatctgaaaaagctggattttctttaagaggttgattataaagttttctaaatttatcagtacctaagtaagatgtagcgctttgaatatgaaatcataggtgaagacatgggtgaacttacttgcataccaagttgatacttgaataaccatctgaaagtggtacttgatcatttttaccattatttttaggatgtgtatttcatttatttatggcccaccagtctcccccaaattagtacagaaatatccatgacaaaattacttacgtatgtttgtacttggttttacagctcctttgaaaactctgtgtttggaatatctctaaaaacatagaaaacactacagtggtttagaaattactaattttacttctaagtcattcataaaccttgtctatgaaatgacttcttaaatatttagttgatagactgctacaggtaatagggacttagcaagctcttttatatgctaaaggagcatctatcagattaagttagaacatttgctgtcagccacatattgagatgacactaggtgcaatagcagggatagattttgttggtgagtagtctcatgccttgagatctgtggtggtcttcaaaatggtggccagccagatcaaggatgtagtatctcatagttcccaggtgatatttttcttattagaaaaatattataactcatttgttgtttgacacttatagattgaaatttcctaatttattctaaattttaagtggttctttggttccagtgctttatgttgttgttgtttttggatggtgttacatattatatgttctagaaacatgtaatcctaaatttaccctcttgaatataatccctggatgatattttttatcataaatgcagaataatcaaatacattttaagcaagttaagtgtcctccatcaattctgtattccagacttgggaggatgtacagttgctgttgtgtgatcaaacatgtctctgtgtagttccagcaaatcaagctgagctttgaaaaagtttgtcttagttttgtgaaggtgatttattcttaaaaaaaaaaaaaaagaaaaagaaaaaaagataagaagaaggagtaaagggactactcctccttgccaaatgtgctaaatatcattttaggagaagaaagtggatttattgtatttcccttaagattgtgagggagtgtggatacagtagaatgagccaacagtttctttataataaatacggtctgcaataaattatttcactagctgtaaaacctttccctagattttagtagggagttggtttctgttaatatctttgggtgctgtggtggtaaatgctacattataaacggtggcatgtatttacagttagagtatcgtgtgtacactttttaatggtaaacttaagctgaatgtgtaatggatttgtctatagttttacatatttggaagcattttaaaaacaggttttaaccttacataaaattacttttatacttgtgttaacattttcatctgtgccttttggtaatttaatttctattatgaatttctggtgcctatgagctagctatcacctacctgaaaggtgcttagaggtgaaggtactgtttctaaaaacacatcactgtgatacctttctatcctcacattttcaagcttgcctcttttctgttctttgtggatataacttaagcaattgtgttattcataaaggtttagaaatttcagtattcccaacactctatgtttctgattttataacagtagccatttttgaaagtcagatgtttggcctgttttatatgaataaagtttatttataaaatattataaaaaataagtaaataaacagaacattaataataaagttttggttcttcctattcctgactttcatataatgaaaattatcctattgatctaagtagaagttatcatagaaagtggacacgtataagactttccttcctttttttttttaataacatatgaggaacaagacttctcttcccatatacttcatattttagaggacattgttttaaaggcttatgtctcactgtaaaattctgtcagccaaatagtaccaatacgttttcaagtagttctcactgataatttagttgaaccagagatcaaatatttgctcccgaattactactggtaatcaagtagttgaacaaaaaattactaaagcatttccgttagatcagtcaaggacagtactgcatcnnnnnnnnnnnnnnnnnnnnnnnnnnnacggagtctcggtctgtcacccaggctggagtgcagtggcgggatctcggctcactgcaagctccgcctcccaggttcacgccattcttctgcctcagcctcccgagcagctgggactacannn

SEQ ID NO: 25510 - DNA, 853 bp, Homo sapiens; identical to SEQ ID NO: 22576
  misc_feature 1, 850, 851, 852, 853: n = A,T,C or G

SEQ ID NO: 25511 - DNA, 329 bp, Homo sapiens
  misc_feature 319, 320, 321, 322, 323, 324, 325, 326, 327, 328, 329: n = A,T,C or G
ttttttttttttttgtttgtttgttttggggggggtccttgttttgtatttactgaagaaaccggattattgttttgtagagtttacccaagtccaaattttgctgattatgccatgatatggcttaatatttttttctctttattttctataaactggtagcgagagctggaagcttgccttgatgcccgcggggttggttattcttggcaagataactctagagatgagggtgttttttcgtcaggaggcacttgacatctggttgactcctgttgtttttggctgctatagatgcttattggccaaatctgtccannnnnnnnnnn

SEQ ID NO: 25512 - DNA, 2999 bp, Homo sapiens
  misc_feature 1, 2950, 2962, 2997, 2998, 2999: n = A,T,C or G
ncctctgctccgctctccttctatccagttggtctttagggcactgaaggaaactcttcttcagaaataaccttttaacttttcttctgtcagctgcctgccaatcacggagccagaggctgaggggaggctttgagccggtctgcgagtccggaaggcaaagatcgcgaagcttggcgctccagaacgctcagggggcaggtgacacagtcgtgggttccccggcgggcgctggcttgacagtttcctccccgcccactggcaggggagcgccccgccgggctgcacgcgcgcgcgcgcaggggggcataaaagccgcggccgcgcggagacgcggagctcgcccaccgcccgccccagcagtggctgcaccatgcacgtgaacggcaaagtggcgctggtgaccggcgcggctcagggcataggcagagcctttgcagaggcgctgctgcttaagggcgccaaggtagcgctggtggattggaatcttgaagcaggtgtacagtgtaaagctgccctggatgagcagtttgaacctcagaagactctgttcatccagtgcgatgtggctgaccagcaacaactgagagacacttttagaaaagttgtagaccactttggaagactggacattttggtcaataatgctggagtgaataatgagaaaaactgggaaaaaactctgcaaattaatttggtttctgttatcagtggaacctatcttggtttggattacatgagtaagcaaaatggaggtgaaggcggcatcattatcaatatgtcatctttagcaggactcatgcccgttgcacagcagccggtttattgtgcttcaaagcatggcatagttggattcacacgctcagcagcgttggctgctaatcttatgaacagtggtgtgagactgaatgccatttgtccaggctttgttaacacagccatccttgaatcaattgaaaaagaagaaaacatgggacaatatatagaatataaggatcatatcaaggatatgattaaatactatggaattttggacccaccattgattgccaatggattgataacactcattgaagatgatgctttaaatggtgctattatgaagatcacaacttctaagggaattcattttcaagactatgatacaactccatttcaagcaaaaacccaatgaacagcttatgtgttagccatagctgaaaataagcacaaatagcttatattcagatcctatcttcatttgaatatagcttttaaatgaaatgttacagtttgaagttttccttcatgcacttggtgataaacgttttctaaatttttagttaagtatatggataaaaagttatgaactattaaaaatgtgatgtggaccaaaggctaggttgtaatcttgatagtctaaaaaatgatcaaaacaaatgattttcaaggaatattcaatattctgcctttcagaaagtgtatttatatctgtgcttcataaatattaatgttcttcagaacatcattttaaaggagatacttgaattgttatttaaatcaaaccagatgtaaaacactcacatacaagttcatactttaaaagaggaaagctacttaacaatgacaaatatttcacaataataatttttacttatataccatctttcaactgaacatttcagttcttccaagagcttcttagagtagtatattttgggggcagtcaaggaataaactacagtgtaaacatatcccagatgaaaactgctgtatggaaaaatgacagaaagtaactgattgacactgttgattcacagttcaacctcctatctgggaaagacatttctttcctctgctcactttaagaacttttaccgactccaaaaatctcaggaattaaacttttaacagttacagcaataaagaatagttagtactccaaaaatattatatttaagatgctcaacaagaaaaaaatgcaaatgtaatatttttttcaaattacttctttattgacttgtccaaatttcaaaagtgcctacccttcaataaaacttttttattctgatctccataaattacttagtcttctatgtatagctatcaaggaaataaaaccaattttgccacagccacaactgtaaatgtttttgtacccatgctgaaactcataacaacacagacataaaaatagctgtgaggttttgctttttttgttgtcagctatcttaagaatcattaaatacacctgctttgggtaaaactctttgcaagcagtaattaacactagtaacagtgaaagcacaagatttccaaatcagtcgttttctcaaaaaaatatcgtataagtgactcatcctgtctgctaactccagacctcccagcttgaagccaaatctttccatgtgagattgatatggatttcctagaagtactggaatgttgtcatatcttgccctattttaattctgctatagaaaacaattgccttcacttttaaggagtaatttgaatattaataactctggtctagattttcatataatgtattaaagacaaagtagtgaacatcaatgaacatctgatagagataaactgtaatcaggcataagcttgtttgtatgttctggcagtgactaatcagtaaatgatgtcggtttgcccagtatcacttatcttctgtatttttcctctgtcgtgtaaatagtataaccttttcatttatggacaattttttggactagtagccttcaatatacattctgctttgaattaattttttcaaatcaataaattatgtagacatttaaaatcaaatatcaagtagaattgaaaaatgtgagttacataagttaaaaacttactttaaatcttaccttctataggtagctctaaataaattcatatggttatatgatatctctggtgtatactgattgagaaaataattaaactgaagttagggganggggaccttggnttcttggatttttcagtgaatatcctaatgtaaannn

SEQ ID NO: 25513 - DNA, 2929 bp, Homo sapiens; identical to SEQ ID NO: 21129

SEQ ID NO: 25514 - DNA, 942 bp, Homo sapiens
  misc_feature 1, 2, 3, 8, 927, 928, 929, 930, 931, 932, 933, 934, 935,936, 937, 938, 939, 940, 941, 942: n = A,T,C or G
nnnccggnacatttcttggctgggcgctgcggcttgcgcctgtaatctcagcactttgggaggctgaggtgggtggatcacctgaggttgggagttcgagaccagcctgacaaaacatagtgaaaccccgtctctactaaaaatacaaaaattagctgggcgtggtggtgggtgtctgtaatcccagctattcgggaggctgaggcaggagaatcgcttgaacccgggaggtggaggttgcagtgagctgagatcctgccactgcactccagtctgggtgacagagcaagactccatctccaaaaaataaataaatagaaagagagagagagaggaaaaaaaaagaaaagaacacttctttatttgagggactttcccaacaccaggtgcttggggatttcttagagatcaccaaccgactccctcactgtgaaattaaaccaagtactggaaacgtaactaaacagcgaaccatgtagcttcacctgactcagtgctgggggcctctaccatctactgtgcttgtgtcatgatgctttttctctgaagtggtgtgggaagtaccaggggactggcagaagcccaggccctctctacttttaccagcaactgatcatgtctttcagaatccatgtacatataggctgttctagccacagtggtagatttatgattcacatccgaaagtgtgccttagttatcaatttaacatttctctagtattcatatcccttttcttaccatatacctcagtgtatccttcctgtgtcaagccttataaatcatgtaatttagtgccactcatgtaaatcagtaaaatcacaaaggtctatttaatgaaaacgatttaccaatgttgtttttttttaacaagaaaaaaaataaaagcacattgtcattttttatactgagaaaacaaacaacggnnnnnnnnnnnnnnnn

SEQ ID NO: 25515 - DNA, 1516 bp, Homo sapiens; identical to SEQ ID NO: 23013
  misc_feature 1, 2, 3, 4, 5, 6, 7, 8, 9, 10, 1504, 1505, 1506, 1507, 1508,1509, 1510, 1511, 1512, 1513, 1514, 1515, 1516: n = A,T,C or G

SEQ ID NO: 25516 - DNA, 337 bp, Homo sapiens
gatagggacccagaactccatttgacagatgaggaaacggcgaggcagacaggtgacctgacttccccacaatcgctgcaggacaggaagaaactgatgttctaatcatgtcagataaagatgatattgagactccactgctaactgaagcagcccccatccttgaagatggaaactgtgagccagccaagaattctgagtctgttgaccaaggtgccaaaccagagagtaaatcagaacctgtagtttccactcggaaaagaccagagaccaaaccttccagtgaccttgagacttcaaaagttctccctattcaggataatgtttccaaagatgt

SEQ ID NO: 25517 - DNA, 862 bp, Homo sapiens; identical to SEQ ID NO: 21330

SEQ ID NO: 25518 - DNA, 1915 bp, Homo sapiens
  misc_feature 1, 1913, 1914, 1915: n = A,T,C or G
naccgccaccgccgccgccgattccggagccggggtagtcgccgccgccgccgccgccgctgcagccactgcaggcaccgctgccgccgcctgagtagtgtaccgccaccgccgccgccgattccggagccggggtagtcgccgccgccgccgccgctgcagccactgcaggcaccgctgccgccgcctgagtagtgggcttaggaaggaagaggtcatctcgctcggagcttcgctcggaagggtctttgttccctgcagccctcccacggcagagtctccagagatttgggccgctacaaaaagtgcattttgcccattcggctgtggatagagaagcaggaagagcactggacttggagtcagggaatgacaatggataaaagtgagctggtacagaaagccaaactcgctgagcaggctgagcgatatgatgatatggctgcagccatgaaggcagtcacagaacaggggcatgaactctccaacgaagagagaaatctgctctctgttgcctacaagaatgtggtaggcgcccgccgctcttcctggcgtgtcatctccagcattgagcagaaaacagagaggaatgagaagaagcagcagatgggcaaagagtaccgtgagaagatagaggcagaactgcaggacatctgcaatgatgttctggagctgttggacaaatatcttattcccaatgctacacaaccagaaagtaaggtgttctacttgaaaatgaaaggagattattttaggtatctttctgaagtggcatctggagacaacaaacaaaccactgtgtcgaactcccagcaggcttaccaggaagcatttgaaattagtaagaaagaaatgcagcctacacacccaattcgtcttggtctggcactaaatttctcagtcttttactatgagattctaaactctcctgaaaaggcctgtagcctggcaaaaacggcatttgatgaagcaattgctgaattggatacgctgaatgaagagtcttataaagacagcactctgatcatgcagttacttagggacaatctcactctgtggacatcggaaaaccagggagacgaaggagacgctggggagggagagaactaatgtttctcgtgctttgtgatctgttcagtgtcactctgtaccctcaacatatatcccttgtgcgataaaaaaaaaaaaaaaaaaaaaaagaaatcgtacgtcgactttcgatttttcacagcctcagcctaggaaaaagggtccaggggataaacagcgggtattgggtttctaaaactcagattgggtcccattaaatgtgccagggaatttccgaagttctggatttggattacctttgacgggattactggggtggttaattttttaaaacctggaacactggtgattatgggggtatcggaatttagcagaactcttaacgggtccgaaaaaatagacctgaattatcgtgtaccttttgggacaggtgtaatccggatttcacaattaatctgggaatacagtcccttggaacgttgtcccaaagtttcacgagaatatattgtgacgctggaaactcggctgagacccaccctttgggattaaggtaagcgggaaacaccacaaagagaacgaggaagagggaacaagtaacaacaccccgtgaagagtggacccaaaagacatgacaccacaatgtacaaacgggccccgagagaaaacaaacagcgaaagggaaaaatgctggcgcaaaagcgaagtacacatacatagggggcgataaaaacaaaaaggagccactacatacgaagaactggatcaaacaggcgcgcaggcagaagacaaagccagaaacgacataagacagccgacagacaaaaagggcgccacacaataaaccgtcgagtgcacaccatcannn

SEQ ID NO: 25519 - DNA, 2171 bp, Homo sapiens
  misc_feature 2168, 2169, 2170, 2171: n = A,T,C or G
ccgttccatcttgagctaatgctacagtttaaataaaatgtatgaaaggtagttatcaaaaacaatttgtatatttaaaattctattttgacatccattttttacagcgaattatagcaggttatgtgaaatttaaaaataaattttaggaaatttttttatcttgtaagtaagaattataaatctatctcagttaaaagtaggatctttgtttttattcagatattttgaaagtttagaagcattttgtatgctactttggtatttcttaagtatagtcagcaggaaagggtaacctgttttatgcaaaatttttttaatttgtcaaatgtttttagtgtgtctactttctgaaatagtctcaatatcctgtctgtatcctaggcagataactacacaagaacaaaacgctatatagaaaagaaaatatttgaggaaatcttaaattccataagaaagtaattcttgcaagaatgttggctacatatttttttttctgtcctgaataaattacatcattaggtctgttgaagcttttgaagctaccactattctttctgggataaaggctaattactgatttatctgccctcaaaatcccagagttaattctaattgagtactaaattaacagtaagtagttaacacagagaactaaaatttaaccgcattatatcactgtatatatttctcatgatttttgctaattagagcatttacttaaccagtaataaactacacacacacacacacacacacacacgtatacgtgtgtgtgtgtatatacttggctctgacacaactctggtgcttaattaggatatgttctattatgtattttgaatgtttatcctgctagtgcgatgaacttttgttggaaaagcagaattagaaggaacagtttttcaatcagtttcatttggtaattacaggaaaaccttgagttgctctaatttaatttttccaattaatacatttagactttaaattgcatccgtaattctcttggctgaaaaacagtggtattttaagacagttttgttatacatgtgacttacttttgactcagcctgagaggaggaaatgtaaagagataagagatttggcccaaagcagcaagagactagtaaccttgagccaggacgaagccaagacaacgtgactcccaagtagcaggagcagaggtcggtcacctgtggcattctgtttcattcccttttaaaattatgagactttataggcagtgtaaaacatcagcaggcagcgatgtgataggatgtgcgaaaaagctggtctgataccatggctataattacagagctttagttcaattaggattttgtaaatgagcaaatgacctttttttccagtgccccttgtaatagttaatatgagtccatgcaatcttgtgatgccattctcctgaaggtgttgatttctggtacccagccagcttagctttggctgctggaagcacagtaggtactgatgattacttcctggaaatcttgacaggcttattgtactgtgtaatggggaaaagttaaagtataatgtttggtgttaataaatgactgatgtgaaaataggaacatgtgtctttaatatccaaatatggcttttatttgccagtggaaatcctaaattcccttaattcctacagtagtattttccttgcccctgtggttgttatattttccccaaatgacatttttgccggacagttggctttaggccaagttggaacacacttagaccgaacagtggttttaaccttaaagagatcagtcccagaaaccatggataaattaggaatctttattccgggaattacccaatttacaaattttaccaatcatggtccacgaagagaacaaacattcatggtttcctctatcctactgctcattttcaggtctgtgtctacatctagtctctactatttgtgaagctctgtccatccatcttctttacaagttcttctttgactttacctgaacacataatattccaaacttcttaatgctaacatggaacacgacacctaacactcctccgctttaccagaccttttcccacacagcgtccactcactaatcactctgtcactccacgcactcccccggcctgccagtacatcacgggcaccccacacgtgcacccggcannnn

SEQ ID NO: 25520 - DNA, 173 bp, Homo sapiens
tctcgtagagcatcgcctcggtcacgtcggggtggagtaggcaacatattcattaaaaatctggacaaatccattgataataaagcactgtatgatacattttctgcttttggtaacaccctttcatgtaaggtggtttgtgatgaaaatggttccaagggctatggatttgt

SEQ ID NO: 25521 - DNA, 539 bp, Homo sapiens
  misc_feature 293, 294, 308, 309, 310, 311, 312, 313, 314, 315, 316, 317,318, 319, 320, 321, 322, 323, 324, 325, 326, 327, 328, 329,330, 331, 332, 333, 334, 335, 336, 337, 338, 339, 340, 341,342, 343, 344, 345, 346, 347, 348, 349, 350, 351, 352: n = A,T,C or G
  misc_feature 353, 354, 355, 356, 357, 358, 359, 360, 361, 362, 363, 364,365, 366, 367, 368, 369, 370, 371, 372, 373, 374, 375, 376,377, 378, 535, 536, 537, 538, 539: n = A,T,C or G
acccttcataaggaaaaatgaagtaatgcctataagtagcaggcctttgtgcctcagtgtgaagagaaatcaagagatgctaaaagctttacaatggaagtggcctcatggatgaatccggggtatgagcccaggagaacgtgctgcttttggtaacttatccctttttctcttaagaaagcaggtactttcttattagaaatatgttagaatgtgtaagcaaacgacagtgcctttagaattacaattctaacttacatattttttgaaagcggcgcttcgtcgggggggcnnccgcgtacccagcnnnnnnnnnnnnnnnnnnnnnnnnnnnnnnnnnnnnnnnnnnnnnnnnnnnnnnnnnnnnnnnnnnnnnnnggggggagcatttctttggttataataaaaaaccctccaaacttaccataaaacagaaaaaaaaaaaaaatgccggtgctggggataactttttttttcggggttttttggggtgcaaaaataacataaatactgcacaatttcataaaaaaacggnnnnn

SEQ ID NO: 25522 - DNA, 2041 bp, Homo sapiens
  misc_feature 1, 2, 3, 4, 5, 19, 23, 2039, 2040, 2041: n = A,T,C or G
nnnnnaggggctgtagggngcgnaaaagagtggcgcagggtcggcggccccgctccttccccgcccagcgaagtcttctgaccacccctcttttctagagttcggcctcgcttcccggcgcggtcgcagccctcagcccacttaggataatggcgacagctgaggtactgaacattggtaaaaaattatatgagggtaaaacaaaagaagtctacgaattgttagacagtccaggaaaagtcctcctgcagtccaaggaccagattacagcaggaaatgcagctagaaaaaaccacctggaaggaaaagctgcaatctcaaataaaatcaccagttgtatttttcagttattacaggaagcaggtattaaaactgccttcaccagaaaatgtggggagacagctttcattgcaccgcagtgtgaaatgattccaattgaatgggtttgcagaagaatagcaactggttcttttctcaaaagaaatcctggtgtcaaggaaggatataagttttacccacctaaagtggagttgtttttcaaggatgatgccaataatgacccacagtggtctgaggaacagctgattgctgcaaaattttgctttgctggacttcttataggccagactgaagtggatatcatgagtcatgctacacaggctatatttgaaatactggagaaatcctggttgccccagaattgtacactggttgatatgaagattgaatttggtgttgatgtaaccaccaaagaaattgttcttgctgatgttattgacaatgattcctggagactctggccatcaggagatcgaagccaacagaaagacaaacagtcttatcgggacctcaaagaagtaactcctgaagggctccaaatggtaaagaaaaactttgagtgggttgcagagagagtagagttgcttttgaaatcagaaagtcagtgcagggttgtagtgttgatgggctctacttctgatcttggtcactgtgaaaaaatcaagaaggcctgtggaaattttggcattccatgtgaacttcgagtaacatctgcgcataaaggaccagatgaaactctgaggattaaagctgagtatgaaggggatggcattcctactgtatttgtggcagtggcaggcagaagtaatggtttgggaccagtgatgtctgggaacactgcatatccagttatcagctgtcctcccctcacaccagactggggagttcaggatgtgtggtcttctcttcgactacccagtggtcttggctgttcaaccgtactttctccagaaggatcagctcaatttgctgctcagatatttgggttaagcaaccatttggtatggagcaaactgcgagcaagcattttgaacacatggatttccttgaagcaggctgacaagaaaatcagagaatgtaatttataagaaagaatgccattgaattttttaggggaaaaactacaaatttctaatttagctgaaggaaaatcaagcaagatgaaaaggtaattttaaattagagaacacaaataaaatgtattagtgaataaatgcttctctagatccatattaataaacatgagcatctaacccctccttgaggaacaccccccttcttggttagacaccaagatattcaagcagcctttataatgctctaattaacctttgactaagatcggggcccacaagggagaatccgtaacacggcggtagcgagcttaaaaaccgccgcagggaaaaaagggggaatcgggagcccagaggaaattctcccagaagaggaaataacgatatcaagagaagggggtcacgttggccagcagacggagtgagagcgagggcggaaacacaacacgaggagtccccaggaacgaaaagaactacaccaacacttacaaagagagaagtaatagaccagaaggatgtatcgaataacaggaagatccataacgcgacgcaactacgcaactcagcaggaggtagaggggactaactagctatcgacaatacgactatcgaacattttaatcagannn

SEQ ID NO: 25523 - DNA, 1643 bp, Homo sapiens; identical to SEQ ID NO: 21150
  misc_feature 1, 2, 3, 4, 1615, 1616, 1617, 1618, 1619, 1620, 1621, 1622,1623, 1624, 1625, 1626, 1627, 1628, 1629, 1630, 1631, 1632,1633, 1634, 1635, 1636, 1637, 1638, 1639, 1640, 1641, 1642,1643: n = A,T,C or G

SEQ ID NO: 25524 - DNA, 1160 bp, Homo sapiens; identical to SEQ ID NO: 22252
  misc_feature 1, 2, 1154, 1155, 1156, 1157, 1158, 1159, 1160: n = A,T,C or G

SEQ ID NO: 25525 - DNA, 1928 bp, Homo sapiens
cccacgcgtccggtcggttgtagcactctgcgcgcccgctcttctgctgctgtttgtctacttcctcctgcttccccgccgccgccgccgccatcatgagggaaatcgtgcacttgcaggccgggcagtgcggcaaccaaatcggcgccaagttttgggaggtgatcagcgatgagcacggcatcgaccccacgggcacctaccacggggacagcgacctgcagctggaacgcatcaacgtgtactacaatgaggccaccggcggcaagtacgtgccccgcgccgtgctcgtggatctggagcccggcaccatggactccgtgcgctcggggcccttcgggcagatcttccggccggacaacttcgttttcggtcagagtggtgctgggaacaactgggccagacaggggcactacacgtttagtgtggtgccttcgcccaaagtgtcagacacagtggtggagccctacaacgccaccctctcagtccaccagctcgtagaaaacacagacgagacctactgcattgataacgaagctctctacgacatttgcttcagaaccctaaagctgaccacgcccacctatggtgacctgaaccacctggtgtctgctaccatgagtggggtcaccacctgcctgcgcttcccaggccagctcaatgctgacctgcggaagctggctgtgaacatggtcccgtttccccggctgcacttcttcatgcccggctttgccccactgaccagccggggcagccagcagtaccgggcgctgaccgtgcccgagctcacccagcagatgtttgatgccaagaacatgatggctgcctgcgacccccgccatggccgctacctgacggttgccgccgtgttcaggggccgcatgtccatgaaggaggtggatgagcaaatgcttaatgtccaaaacaaaaacagcagctattttgttgagtggatccccaacaatgtgaaaacggctgtctgtgacatcccacctcgggggctaaaaatgtccgccaccttcattggcaacagcacggccatccaggagctgttcaagcgcatctccgagcagttcacggccatgttccggcgcaaggccttcctgcactggtacacgggcgagggcatggacgagatggagttcaccgaggccgagagcaacatgaatgacctggtgtccgagtaccagcagtaccaggatgccacagccgaggaggagggcgagttcgaggaggaggctgaggaggaggtggcctagagccttcagtcactggggaaagcagggaagcagtgtgaactctttattcactcccagcctgtcctgtggcctgtcccactgtgtgcacttgctgttttccctgtccacatccatgctgtacagacaccaccattaaagcattttcatagtgaaaaaaaaaaaaaaaaaaaaaaaaaaaaaaagaaaaaaaaaaaaaaacaaaaaaaaaagagggggagaacataagagggcgcgagaaaaagggaacaaaaaagggacaggggacaaagagagtccaacaccacaatttaagaacaaaggggtaacatgggagaaccacaaagggagataaaaaaatacagaaaaaccgggggacaccccgttaaagatccgaccctcgcacaaaaacacagagaagcacagagcgagaagcgagagagagaggagacagggcgaaagaacagaggagcaaaggcagcgccaacacaacacagaaaaagagacagaaaagagcaagcacagcaacagcggagcagcgaacacaaagcgagcgacaagaaacgaaaaaagatgtaaaatagcacaaggcgagcaggaggggagacgcagcggagagcgagaccggggggagagggggggagggccagagacggagaaaagaaagaagagaaaaaaggaggaagaggacac

SEQ ID NO: 25526 - DNA, 2171 bp, Homo sapiens; identical to SEQ ID NO: 22408
  misc_feature 1, 2, 3, 4, 5, 6, 7, 8, 9, 10, 11, 12, 13, 14, 2166, 2167,2168, 2169, 2170, 2171: n = A,T,C or G

SEQ ID NO: 25527 - DNA, 1394 bp, Homo sapiens; identical to SEQ ID NO: 24121

SEQ ID NO: 25528 - DNA, 2152 bp, Homo sapiens
gctccagtcacacccggaagctgactggtccacgcacggccgaagcctgaggaagctcatcgtgagattcatttttcttaaattttggacttatacagtaagggcttcaactgatcttactcaaactggggactgttcccagtgtattcatcaggtcaccgaagtaggacagcaaattaaaacaatctttctgttctatagttattatgaatgtgtggaaacaataaaagaaacttgtttgtataatgccactcagtacaaggtatgtagcccaggaaatgaccgacccgatgtgtgttataacccatctgagccccctgcaaccaccgtttttgaaataagaataagaactggccttttcctaggtgatacaagtaaaataataactagaacagtagaaaaaggaagccccaaacaaataactttaagatttgatgctcgtgcagccattaatagtaacaagttaggaacacgatgtggttctcttaactgggaaaggagctacagagtacaaaataaatatgtttgtcatgagtcaggggtttgtaaaaattgtgcctattggccatgtgttatttaggctacttaaaaaaagaacaaaaaggacccggtttatcttcagaagggggaagccaacccctcctgtgctgccggtcactgtaacccactagaactaataattaccaatcccctagatccccattggaaaaagggagaacgtgtaaccctggggatcaattggacagggttaaaacctcaagttgtcattttaattagaggggaggtccacaagtgctctcccaaaccagtatttcaaaccttttatgaggagctgaatctgccagcaccagaacttctggaaaaagacaaaaaatttgtttctccaattagcagaaaatgtaattttcttacttaatgttacttcttgttatgtacgcggaggaaccactatcgggagacagatggccttgggaagcccgagagttggtgcctactgatccagctcctggatataattccagtttagaaggccgaagctagcaacttctaggtcctaaaaacctcaattattagacaatactgtatagctagagaagggaaagactttatcatccctgtaggaaagcctaattgtataggacagaagttgtataacagcacaacaaagacaattacttagtaggacctaaaccacactgaaaagaatccatttagtaaattttctaaattaaaaactgcttaggctcatccagaatctcatcaggactggacagttccctctggactatactagatatgtaggcacagagcctactttcagttacctaataaatgggcaggcagttgtgttattggcactattaagccgtcctttttcttattacccataaaaacaggtaagctgctaggtttccctgtctatacttcccgagaaaagaaaggcatagttataggaaactggaaagataatgagtggccccctgaaaggatcatacagtattatgggcctgccacatgggcacaagatggctcatggggataccgaacccccatctacatgctcaattggatcatacggttgcaggccatcttagaaataatttctaatgaaactggcagagctttgactgttttagcttggcaagaaacccaaatgaggaatgctatctatcagaatagactggccttagactacttgctagtagctgaaggaggagtttgtggaaaatttaacttaaccaattgctgcctacaaataaatgatcaaggacaggtggttaaaaacatagtcagggacatgacaaaggtggcacatgtgtctgtacaggtttggcacgagtttaatcctgagtctttatttgaaaaatggtttccagctatagcaggatttaaaaccctcattgtaggtggactgctagtgataggagcttgcttgctgctcccctgtgtattacccttgctttttcaaatgataaaaggttttgtagctactttggttcatcagaaaacttcagcacacgtgtgttatataaatcagtatcgctctatctcaccaatagactcaaaaagtaaagatgagagtgagaactcccactaaaaagtgaaaatgctcaaaggggggaaataaggtatgagaccaccacttctcctg

SEQ ID NO: 25529 - DNA, 1198 bp, Homo sapiens
  misc_feature 1, 1195, 1196, 1197, 1198: n = A,T,C or G
naacccttccccagctgttttcacccgtttaagtaagttttgtacccctccgtccggacaaaaaatttatttggctcatacagtcttaagccttccggacggatgtatggcccctaagcccattcagattttactgccacaactgacaccccttccagagtcgaacccctttctatctcgggaatgtccatcattctcctcaacttctgatctctccagttccagtcaaaaaccagaaattttaaggggctcaaattaaggccaccttgtttaacaagttctttaattctccccggagttcctacacccaggtgcaccacacgcttctccagcaactttacctgcgcctggacctttatgtgctttgcaaataattttataactttgccgtctcctctgaatgctgtcatcgacctaatgagctccagggctcggacggccgagctgcagatgatcagcatcaggaccgatttcttctcactgtggttcttcctaagttttacccacttaggacaaatttcttttaggtatgaggaaagactgtgagtcaaatcattggccttgaggaaacaggagtctggcaggttcagttcttctaattcaatcaccaagcgtctgctgctataatagtccttcatcagcttctgtaggtcttcaggtaaccctggttttggttctgattttgcaagaacatcagtaattttcttctttcttcttttcctggtcttggtggtattctcttttctttcctttggttgtatcaaaaaacattctttaggctgtttggttttctctgaaggtacaggaactggaactgtctcctgctgcatcacttctgtgtctccttctccttcaccatctgatgcttctgggctgctgcctgctccagtcggctggttctcccaccactcgtctccgagatcgtctgccatttcagctcaggtctcgacgtgggcagaacatcacgggtaggcgaccagctgcggagaatcacgttgtctcaaagccaggcggccggcgtagctacacgcggagctcccgctagacactgtcgcctccgccccgcggcgatgacgtcacacctctgccccgcctctccggcagccgctcccagactcgtcgcagtttccacacaggcgccgacaggcagaagcagtttggaaacgcaacataaatccccccaaagatttatacnnnn

SEQ ID NO: 25530 - DNA, 1457 bp, Homo sapiens
agtcgacccacgcgtccggaaaagccccttgtgcccgctttctgccatccgcgctgtctcgtgtctccctttttccattaaatgcctcttttcttgcgggtctcatctcgggaatagtgcactacggggacatacctatccccaactatcctaggcccgagaaccagcccttgccttcgcgtaacaggcggagactcgctgaggcgagttgcacttctaattgggcgtgaggtcttgtcaatccccaagttcttccaatcagaagtccggtccatccagccttccgctccccattggcctgtgtggaggaagaggggtgggtaagccgaagtcgctgcgctcagtgcgcaggcgcgaagaagctggcaggggcacgagccgggggcgggtttgaagacgcgtcgttgggttttggaggccgtgaaacagccgtttgagtttggctgcgggtggagaacgtttgtcaggggcccggccaagaaggaggcccgcctgttacgatggtgtccatgagtttcaagcggaaccgcagtgaccggttctacagcacccggtgctgcggctgttgccatgtccgcaccgggacgatcatcctggggacctggtacatggtagtaaacctattgatggcaattttgctgactgtggaagtgactcatccaaactccatgccagctgtcaacattcagtatgaagtcatcggtaattactattcgtctgagagaatggctgataatgcctgtgttctttttgccgtctctgttcttatgtttataatcagttcaatgctggtttatggagcaatttcttatcaagtgggttggctgattccattcttctgttaccgactttttgacttcgtcctcagttgcctggttgctattagttctctcacctatttgccaagaatcaaagaatatctggatcaactacatgattctccctacaaagatgacctcctggccttgcgactccactgcctcctgttcaatgacatggtgtctttgccttattcatcatctccacggctactctacttcccttgtgtctggcactgtatacatacatcaccagcggaaacgtgccgaacattgctgtcgtacctgccttttacgcacctccaacacgatattgcaacctatccatggccgtgcagatgctggcaacgcaccacacctccccttactaatctgacactcaacaaaattctgccttgtgaaactaaactatatacacgctcattacgcctttcgttccacacagcttcccactgagcctcatccacacagtcacacaatacaacatctctctgttcaacacatcatatcacacaatgaaatttacgtctgacacctaacactattcaactcctcctccccgtgtgacaccatcattagccagacacatcaccaatggatctgacaaaccgtcaatctctttatatatacacatacata

SEQ ID NO: 25531 - DNA, 760 bp, Homo sapiens; identical to SEQ ID NO: 23949
  misc_feature 757, 758, 759, 760: n = A,T,C or G

SEQ ID NO: 25532 - DNA, 3265 bp, Homo sapiens; identical to SEQ ID NO: 20201

SEQ ID NO: 25533 - DNA, 715 bp, Homo sapiens
  misc_feature 1, 2, 3, 7, 713, 714, 715: n = A,T,C or G
nnnagangcgaaacttaggctaggtacgagcgctgggtggtgctcgcgcctccccaactcgggtaaagctcctcggcctcggcgtgctgcgcctccgcggctgccctgcgccagaattcggttccctcaaaattataaaagcaggaaagctcaagacaaagaaatccaacaaggctagtgatttcagtgatatggagaattggccaacaccaagtgaattagtgaacactggatttcagagcgtcctcagccaaggaaataaaaagccacaaaatagaaaagaaaaagaagagaaggttgaaaagagaagtaacagtgacagcaaagaaaaccgggaaacaaaattaaatggtcctggtgaaaacgtcagtgaggatgaggctcagtcaagtaatcaacgtaagagagctaataagcacaagtgggtaccactccacttagatgttgtaagatcagagagtcaagaaagacctggatcccggaacagctcaagatgtcaacctgaagcaaataaaccaacacataacaataggagaaatgatacacgaagttggaagcgagatagagaaaaaagagatgatcaagatgacgtttccagtgtgagaagtgagggtggtaatatccgaggttcctttagaggtcgaggaagaggccgaggacggggaagaggacgaggcagaggaaatcctcgattgaactttgattattcctannn

SEQ ID NO: 25534 - DNA, 1866 bp, Homo sapiens
  misc_feature 1, 2, 3, 1855, 1856, 1857, 1858, 1859, 1860, 1861, 1862,1863, 1864, 1865, 1866: n = A,T,C or G
nnnccgcggtcgcgtgggccggcgactcaccatcgtcagtgcgcaaccgttcgctaactgaaatgatggcgactggaacgccagagtctcaagcgcggttcggtcagtccgtgaaggggcttctcacggagaaggtgaccacctgtggtactgacgtaatcgcgctcaccaagcaggtgctgaaaggctcccggagctccgagctgctaggtcaggcagctcgaaacatggtactccaggaagatgccatcttgcactcagaagatagtttaaggaagatggcaataataacaacacatcttcaataccagcaagaagctattcagaagaatgttgaacagtcatcggatctacaggaccagttgaatcatctgttgaaatagaatgacatgtaagagtgctgtaggactcctttgcctaatgctgaggagtaaataccttacacagctgtcctctgggtttggttttctattttcttctccaaaagttaagttagaaaagttctgtgttagggccgggcgcggtagctcacgcctgtaatcccagcactttgggaggccgaggcgggtggatcacgaggtcaggagttcgagaccagcctggccaagatggtgaaaccccgtctctactaaaaatacaaagaattagctgggcgtggtggcgggcgcctgtaatcccagctactcgggaagctgaggcaagagaatcgcttgaacccaggaggtggaggttgcagtgagccaagatcgcgccactgcactccagcctgggcgacagagtgagattccatctccaaaaaaaaaaaaaagaaaaaaaaaaagaaaagttctgtgttgatgtacagtttctcctaagaagaagcgaggtggttgaattttggaagcacttcttgaatcggattaacccatgctcttattgaattttttcatctgctctgtttagtttgatattaaagcaaaattaagaggtcttagtttttcctatagaacttttaatatgtcaaaagctatattgtctaaatttcagtacttaagcaaatactgagtagtgttttaaattcagaaatagagcttctattatgaacacatgagaatgatttttttctcttaatcattattaaggaaatattttaatttcatggtcatataatggtgataagtaatacctgattgtttccttttctgttctagtaactcagaggagatacgtgttttatttgtgatagcaaattcctaaatgaacattaggcaagtggtatcattatcaggccagctgcagcctcttgccttgacctgcattcctagaatttctttgttgctgtaattcttgattaagtgaccttgactttcattttgtaattttgctaatcatcagcaaattcacttgcatgacgttactgccaaatatgaaggcagttgaattattatgagtgattgtggcagaggtttgtgccatggtgaaaactttgatgtttgtctgtgttcattggatccatctttttaaatgacattaccatgagtctgttgtcaaacctaaatatctttgtttgattaaaatgggactctatattgtgtagttcaggtcttcattgaactaagagattgggagaaattctgacatagaaacattttcggtcttcacctgcgggaattaaggagagtaccagggatccaatattgttcatatggtgcttgtcccatctcaagttactaagctttcgattaggttattttcaacttggttaacttaggaaaaaggggggtggcgtgagggattgttaatctacggttaaggggaaaaggacggctgtgagcataaaagggtaaatttaaagggtttaggcgtttcaaaacannnnnnnnnnnn

SEQ ID NO: 25535 - DNA, 1162 bp, Homo sapiens
  misc_feature 1, 2, 3, 4, 5, 6, 7, 8, 9, 10, 11, 12, 13, 14, 15, 16, 17,18, 19, 20, 21, 22, 23, 24, 25: n = A,T,C or G
nnnnnnnnnnnnnnnnnnnnnnnnnccaatggaggaaatttatttattacagggaaattggttatacaggcattagagggctgaaaagcaaaatacaaaggctgaaaaaccaaaagtcatctagaaataataacttcagaaagcagctaccacctctagggctggaggaacaaaaggaaaaatatgaagtaaccagaacttagaagcccagaattgcaaccacaatctttgtggaaggtagaaccatctggctgctgtggataatctctgagcgggtacagggggaatcactgaggctgattccagtagtgctgaaagaagctgaagtggcactgccactgctgggagaagtgtctctaggtgaagaagcattgctggtcctgtaagcaacattaacaagaacagaaaaaacaggaagcatattctctccttctgcctcccagtctctctctagtgacccctattggcagaactgaacaggaagcaagcttaaaaagaagtctgagaaacagtttgaggacaactagccccatcattacagggaagaagagtacagaaggtagatttagaggtgaggggcaataagtaaatgactcgcacagatggtgttcatgctcaatgtttctcttctgaacaattttcagatttggtgttaaagcaccttctggccaggcgtggtggtttatgcctgtaatcccatcacttcgagaggcggagtcgggtggggattgcttgaggccaggagttcaagactaccctaggcaacatagtgagatgctcgtctctattaaaaaaaaaaaaagaaaaaaaaaggggacccaaggccatatatctgtttcattcctagaaactctccacagtgtcagatgaagactgcaaatccagtggtcctacattcacagataattcctagcctttggttagtgaggagaatgggatgggaggacacaaaatgagaacttttttgtggtatgctcaattcgtatctggcagtacccaggaatctgcattctcgacaagcgtccgcgccgacggggctagtgaagtttgagaacaattgcttcctacccagccgctccgctatcacctaggtagcacggccgctgcggctgaggctgtgactgccccggcggctggcggtcgcgtgggccgccgccctata

SEQ ID NO: 25536 - DNA, 1727 bp, Homo sapiens
  misc_feature 1, 2, 3, 4: n = A,T,C or G
nnnncgcgtgcgggctaggtctatatgttgacgtcagccgcacacttttactttggggggcattcccaggtgcccagtgaggttcccccgtgaccgcgttttaagacccagggcgctttcaaatgggcgtcgtggccccgattatttagtcccgcccctgtgttgtagctattaccaagtagtcgtagtggcatgtttgtggtttatcgcttaatagaaaacatatttttattccgtactttaaaaatatagactttctagcaacttataaatttctattataataataaattgatactttgagccaagaaaacaatataaccaaaaattcatttgttccctttgtttaggggtgttttacatttatgcataattttgcttttataaaagatgattgttacaatcaggtatacaactacttggttatgtctaagttctgtctcttaaaatatgttcttttagagaattcatttaatcatcttattcttttcttcaattttctccaaacagtggtagaagtactatttgatagacagaataaagaaaattgtttttggccacacccagatcatactgatatctacagcatagtcctggctacaggggagctcaactctaactcgtgaagcgggcctggtttagaaagtaacaatgaggtagtaactcatgatagtgctagctgttatcaaaaattaacaactttaggtatttttgttttgggtttttgcggtttaggtacatccaaaatttcttcatagtctgcactcattccctttgcccagcgaccaactgtgaccattcgctctgaattctgactttcagggcaatctttctttaaatgttccacagagccacaaagtttgcaaccgccaccatcagcatagagtcctttgggattatcaggacaagatctagacaggtgccccatttctccacaaacaaaacattttgcaaaaggaaattcgccaagagccgggtctactttagccttacacttggttatttcgtgctctgtggacccacacctgtaacatatcccagtgcccatgtcttgattttcaagggcggcggggcaatctgcaattccatgaccaggttttctacaatggaaacacaccattgcatttttctttgccgcttgtctttttaatcttcttccttcccgtcgactgtctttctgttaaagcaaactgcgatttctgtcccgtactgtcctcactgtctgttgctataatttgcccattgtgaaccatctgtgaattctgtcttaggtattccactgaatccattcacatcttcatttaagtactcttctttctttttgttctttttatgtctcttgcttggggtgcatcatttttgagggatagcctattggcttcaagttgtttacgctttggtaggttttggcttgttccctcaaaggatcccttcttcatgtcctcccatgatgttgcaggcaagggtctcttgttatatgtggtactaactcgggcccacctggtcataatttcatcagtggtacgtgggaagggggaggctctgggttatcaagagggtgaagtgggagaccaacggcccacccacagccggattccagggcggctggacgcacagcccccagcagccggagcccaacagctgagtcgccgcccctagacaaacccgcgctccagccagctcagggacccagcggactaagccttctgtcctcccagcgtcccacg

SEQ ID NO: 25537 - DNA, 3632 bp, Homo sapiens
ccacgcgtccgcgagaaaaggcagatcagactccccggctcctcgggtagttctcagaggcaaagacaaaaataagaaattagtctgaagaaagagagtccctcgcttcttcagaactcacctgccaagagcggcgtggacggcgccatgttgtcccggaaagagaaaccgctcgggtgagagttcaccagggccgaacccggcccctacacgtctcctcatgcgtggagacggcgaattggtggttccggagccatcagcctcggggccaattcacatccgtttacggagtgacgcggaaaaggcgcccgaacgcgcacgcgcaaatctagggcgacgcttgacagagcttgggagggtgcgcctgctttcgccctccttctccagcgggaggggcgcgcacttccgcggggcggagtccgtctagtgctgacgttggcagccgaacccaaagtagatcgaggcggcgggctgcacattcccgttgttgcgttgcgtttccttcctctttcactccgcgctcacggcggcggccaaagcggcggcgacggcggcgcgagaacgacccggcggccagttctcttcctcctgcgcacctgccccgctcggtcagtcagtcggcggccggcgcccggcttgtgctcagacctcgcgcttgcggcgcccaggcccagcggccgtagctagcgtctggcctgagaacctcggcgctccggcggcgcgggcaccacgagccgagccttgcagcggctccagaggaggcaggcgagtgagcgagtccgaggggggtggccggggcaggtggtggcgccgcgaagatggtcgccaagcaaaggatccgtatggccaacgagaagcacagcaagaacatcacccagcgcgggcaacgtcgccaagacctcgagaaatgcccccgaagagaaggcggtctgtaggaccctggttattggctctcttcatttttgttgtctgtggttctgcaattttccagattattcaaagtatcaggatgggcatgtgaagtgactgaccttaagatgtttccattctcctgtgaattttaacttgaactcattcctgatgtttgataccctggttgaaaacaattcagtaaagcatcctgcctcagaatgactttcctatcatgcttcatgtgtcattccaaggtttcttcatgagtcattccaagttttctagtccataccacagtgccttgcaaaaaacaccacatgaataaagcaataaaatttgattgttaagatacagtagtggaccctacttattcagtcaattaagagtaagtttttttatgtggttattaaaacagtatgaacaattagtctaactctgcatagacagggtctagattttgttaacccaaatgtataactgcagttagcttaaattacaatttgaagtcttgtggtttttatatagctaggcactttattactcttttgaactgaaagcacactcccttataggttcatgtaactgtcctgtaataaggtgcttataaatggaacaactacacagcctagttttgccacaacctttagcatctaaaaagttttaaaagcttctaaatgtctaatataaagggagatgcttatagccacaacatctattttaccaatattgtttccattacactaccttggattttgcatgagtgagtatagtaacccaagatgccataaaaaaaaaacttgatcgttttctgacttaatcagttactgtggtttcactaaaagctaccgtggtggagtgaagtcagtcagggaaggtttgtttatgttacatttatttcaccagaactattttaatatatcaaaggggtttactatgccaaacaaaattctagggaaaaatactgctaaaaatggatgcctcatcagaacatgctgttgagtccaatgtgccataagacattttagcatgttaaatagcacttttaatagcaaaaaaaggcacatcaactgcgaagttatccttagtttgcaaatgctttttctagattaatgatttttcaatcattagggtactagacacatcagcctaaagtggcatctggaattgaatggatttactgataatgatcagtctttagtcttccctttgttatatgactttataggttatgattgatcaaatttacgttttactaatggtaagggtgagggtcatagggcaggttttgggttttctagtactgttgaaaactgcaagtattggctatttgtatacttagccataacttggtgaaaaaaaacctgagcagtgtctatgtattaatgcgttggaaagaaagctgcttgtgtttgctttgttaattgcctcaggatatttcttttaaaataagctgttttaagaggaacagaagggaaatctgctacctagtctatacacagcgtgaacctcacagggggcttctgataccctcaaacatggagaacagtaagggagcagagtggttaaggactttcaggaacttaactattctggaataaggaatgaatcaactgaccttgggccagcaggtttttaactaaattgttacttgcctttctcacccagttaatcagtctctgtacttgtttccctttttgaaacaagtgtcttggttaactaattctgttttatggttgtgctaaattcatagcaggtgccttattctttgcttttagtcaaaccattccatatcagaattttccttggtttactatagatatttggctttaagttgttgtttgtgttttttaatgtacaatgttctgataaatttgactgttaaattgctatagctagcaatcattttacatatgtaaaaaattgcattccctttgtatttcatgtgtaattcaccaattaagtgcagtttatattcaggttggattatgcatgtttaggtaaacgaaagctgtgtcttacttgatttattctttaaaaataaagttccctgaatatttgatgcttttcttctaaacggaaatgattttacagttatctgagtgtaccttttatagttagtagaaaatgattttaaagaatgtttagtattgtacttaaatggtatgcagaggcacagatgtaaggtttataactggaaataggtggtaagaaaaatatatagaaagcacaatgatttgaatatttttccacttaggatttcctaatctccttgtcatccaattcaagctcaagatgaagcacaattctttgatctccctttgccagttgaattttatagatcatctaatgttgagcacagtatgagaataaatattggggttgtcaacattactcagttactctttgtggtttagctctaacatttcaacaagttgtcaattaattgtatctgttgggttgtatataatgttgctcaaaataattaagtggacttccaaaaataagatttccattgtaacaggatgcattgtgatgggctttgacttacattaaacgaaatgtggcatctgtccacctgcagggccatgaattctctcttcacctgcggttactggagttctcgctggtaccacaggccaaccccgcggaaagccgcatatgttccggggttacacaaggttccccacaaaatttatttcggctccttgttgacctcaacc

SEQ ID NO: 25538 - DNA, 340 bp, Homo sapiens; identical to SEQ ID NO: 24006
  misc_feature 1, 2: n = A,T,C or G

SEQ ID NO: 25539 - DNA, 1023 bp, Homo sapiens; identical to SEQ ID NO: 22481
  misc_feature 880: n = A,T,C or G

SEQ ID NO: 25540 - DNA, 618 bp, Homo sapiens; identical to SEQ ID NO: 22984

SEQ ID NO: 25541 - DNA, 8927 bp, Homo sapiens
agcgagcggcgaccctcacctcgcctcccgcctagctcctgcgcagccagcgggtaccgggagctgcggccagcgccgcttctttcctttccttttctctccgttttccttctccttccccggaggagaaaacaaataaagaagagcaaatagccgggaggcgctcggcatccaggacgttccctcccccgatccaagttggaattagcatcctctcgggggtggctcgggagcggcccggaggagccggcggcggcccgaggagcgagggaccgaaccgggagccatgccgcgctgagggggggccgcacagccgccgccaccgccaccgccgccgggtggggtgggaggggcgggagacgccgccgccgccgcctccagggtgggcgcctttcgccgtggacgccgaccgtccgggacgagggtttcatcaccttaaatggttttgaaccaatgaaggtgtattcccttaaaaagacggacagcccatcgtgtgaactatagagtttgtggacagatttatattgggttcatagtggcgtcatgcacgcagactcctgcaagttcccctaagttcttagaggactgctttgccttttgatctgagagttgcaaagttccataaagaatggcccttgtggataagcacaaagtcaagagacagcgattggacagaatttgtgaaggtatccgcccccagatcatgaacggccccctgcacccccgccccctggtggcgctgctggacggccgcgactgcactgtggagatgcccatcctgaaggacctggccactgtggccttctgtgacgcgcagtcgacgcaggaaatccacgagaaggttctaaacgaagccgtgggcgccatgatgtaccacaccatcaccctcaccagggaggacctggagaagttcaaggccctgagagtgatcgtgcggataggcagtggctatgacaacgtggacatcaaggctgccggcgagctcggaattgccgtgtgcaacatcccgtctgcagccgtggaagagacagcggactctaccatctgccacatcctcaacctgtaccggaggaacacgtggctgtaccaggcactgcgggaaggcacgcgggttcagagcgtggagcagatccgcgaggtggcctcgggagcggcccgcatccgtggggagacgctgggcctcattggctttggtcgcacggggcaggcggttgcagttcgagccaaggcctttggattcagcgtcatattttatgacccctacttgcaggatgggatcgagcggtccctgggcgtgcagagggtctacaccctgcaggatttgctgtatcagagcgactgcgtctccttgcactgcaatctcaacgaacataaccaccacctcatcaatgactttaccataaagcagatgaggcagggagcattccttgtgaacgcagcccgtggcggcctggtggacgagaaagccttagcacaagccctcaaggagggcaggatacgaggggcagccctcgacgtgcatgagtcagagcccttcagctttgctcagggtccgttgaaagatgccccgaatctcatctgcactcctcacactgcctggtacagtgagcaggcgtcactggagatgagggaggcagctgccaccgagatccgccgagccatcacaggtcgcatcccagaaagcttaagaaattgtgtgaacaaggaattctttgtcacatcagcgccttggtcagtaatagaccagcaagcaattcatcctgagctcaatggtgccacatacagatatccgccaggcatcgtgggtgtggctccaggaggacttcctgcagccatggaagggatcatccctggaggcatcccagtgactcacaacctcccgacagtggcacatccttcccaagcgccctctcccaaccagcccacaaaacacggggacaatcgagagcaccccaacgagcaatagcagagaatgccagaaggtaatcactcagatacacttgggaccaagagacagtgaaaaatagatgaactaagagaaaaagaatcggatggtctttgtaactgattctggacatatgcatcattgatgttgcagtgttgaaactacaagagctagaaaactgaagatgtcgtctgcttacggaagcgctgaaagactaggatgtgatttattaacgaccaacttctgttattgtgtgttaagtttttcatctgtgcatcaaatcacaaaaagaataaatagagctttttcctttatcagtcccttgggcacagcaggtcctgaacaccctgctctacaatgttgcatcaagagttcaaacaacaaaataaaaaatattaagaggaaatccccatcctgtgacttgagtcccttaagtctacaggggctggtgacctctttttgctaataggaaaatcacattactacaaaatggggagaaaactgtttgcctgtggtagacacctgcacgcataggattgaagacagtacaggctgctgtacagagaagcgcctctcacatctgaactgcatactgagcgggcaagtcggttgtaagttcagtaaaaccctctgatgatgcaaaaaaaaaaaaaaagtattaagtttcacaagctgtttgtactcaaatatattttctcagtttcagatcctctgctattttattgagtggaaagtcttgagctaaaagggttcaagaagaataatgttgcatttccttatgtctcaggaaacactttttatggtaacttgtcagattgtctatgaacaaacccacttttttagacattgataaagtcttcttttcttcacgtgatattttatacaagaacacttcagatgtattagatgtgactgattttaacaaatcctattagatttgtatcaactagttacatgttctattcatagtcttttgtgaatcattgcctttttgtttaaaaagatggcctattttgagcctttgtataggtacattcctgtttttgtgacaaaagaaaaactttaaaattgtcccaaacagaaaaataatggctatcagaagtatgttttgttttagtgtgagttaccgttactgtatttgtttattgtaaaggtggacatttagcgttcagtgcagttttcaataaaaagtaattaaaatttgttaagttctgaaattcaagtacatctcactaatgtaaatgttctctacttgagatgtttaaggcaattgcattgtcaattagccaatttccagctcttgttactacagggttccataaccagactcaagaccgctgacaattaattacctgtgataacaaaaagtttaattgaaaaatcaaaacctcacacaagtccatcattatcacgtcatgccatccttaagatgcaatggtgggttagtgctaaatcaattcaaaaaaaaacaaagttgctcaacttttagagttctgactttaatctaccccaaagcaaaatgacctggacctggttcaagggagggaagtgaaccttgaaactgttttgccaataacctaacaaacaaaatgatatttacaaagaagtgttgcaaatagtcccatgagttaagagcttgatttaatggatcttctttttaaatagaattaaacctttatactaaaagtatttgcaagtgtcaattaagtccaacaattccaggtatgaaactccctctgagctcttccttatacttcccttcccaattaaaacaaaacaagaaaatcatggtgtcttaaagcctttggcttgcctggccttgtctgctcactcattttaaggtggtggccccatcccaactctaccataaaagtgtctattaacacaagctcacatggagagagacggcgctcatagttactgacctattaccccagggaacaaaaaggtagtttaacgtcttcgtaaccactcatcaaagaggcaatgaaatatgcgtgaaaaggaggccaagcgcacacagaatatcttaccttcacgaatatgtgaagaagtctgggacacgatgaacctaagagtcaaaacataaaaggcaggtctgaatccatggtccacctgggttttaattattagatcttggtcgcccaaacaaaaatttatatatatatatatataaatttgaccccaaggaagaacaagtcaaaacaaaatgccacgctctgtttgctctagaaaaagaaccatcaagtccacagagtgcaggtatgacttactctccagagtcagtcattaatgtctgtcacctagccacgtataatcatctttgaaaaaggactatattctatctatcttgggacaataattatggctgttttaatagttcaagagcataatatagcattgatttaccaaaatttttggcctttaacagccagtctatgaaaaccatttagagccccattcctctctgtagcctaggaaatggaaccatctttaattctttcccacagggaagaatgctgcacctatcacactatgtggtcagggtcactgattgataataaataaataaataatagagcgctcaggggaaacaacactcaccagaccacaacacacagtagaagctaagtgctgagcgtgtactctctggacaacgctggctgcaatgcagactgcaatggctacatgcttttccctctaacaattctctttggctttttcaattgggagggcagattttgcttaacaggcaactagaacaggatctctgcccactaaaaaattatccctatacatagagaaattactacagatgctaagtagtcagaatgctaacattttctacaaacttgattacttattggccaaaatgaaagcaaacagccaatttttaacaacacattcaccacttgaaacaaacagcagcatttacattatatcaaagattcatttctacagaatcgtactaaaaaatcatttttcctgcaagatttagcatgcagcaaaaaatgatcttttcatcctgggaacacctttttactgagttttcggggggaaagaactaaagacatgacagttttgtgggtatttttctatttttagtattctggcagcaaatttgaggttgtacacatttcattatcaactaaacaaaacaagaagcaagcaaatactttaaggttttcacagcctttttcatcacagggaaggaaaaaactgtgtgtgtgtgtgtgtgtgtgtgtgtgtgtgtgtgtgtgtgtgtgtgcgtgcgtgtgtcgtctttccaaattcctggccacatcaatagtctagaaagtgcttatcaggacaccaaatatttctgtgttcctgagataggtctgaaatttttacccagtattgaatgtatacctgaagtggtcaaataatacttcttataaaaaagtttttctacctaagattatagttttaactttaaattaaagaatggccacaattaaccaacatgcaaaaattctcagactaaacactgagaaattcttcatacaatgcatttgccaccttattgcatttttaaaatctttattctgtagtgaattggtattcccaatctgcctaagcaaaggcatgcccttctaacaagatttgcttagagcagaggtgatagaaggaagaatccgaagaccctctggcatggcaatctgggagcagcacattgttgatggagtccaagtgagcacatttcacacaattcatttagtgacaagtgggcttgctcccttttcatccaggaaaaaaactactcacagaccactgcccagaatctggaataagaaccctcattttaaggtattcttcccaacaaataaatatctaaatattgaaagggggcatatcagaaaacttaaaagacacaataaccaaaaccaaaaccctcttcaaaacaagtaagcaatgtctgtatttagttcactctaaaacattcttagcttttcttgcagtttgttcctaaaagatttgattgggcacaagaggaacgaaattgttaataaaataaaagcttatttttgttttgctgtggataatcggtacaaaacgtttccagatctgagacttagatggatcttttaaggtgaaaggagaatgccaggttctactgaaataatatctgaaaggaacaaagagccatttgccatgtgctttttctaagtgcccatgctggaaaaaattttctcaataatatgaagatgctggtacaacttttcctattaaacaatgtcttacacaaccacatgcgttacatttatagacagatttacaatttggaaggaaaaaaagttctgtcttaataaaattagttttttttacaaactgtagtccaactaaagttctctgtctcctcacgcagcagaggcattatctccataaggtgtgtgtggtccaggaaaacacttccccgagcagatcctgccagatttggttcattccatgatgtcgactctgcttggagcaccacactaactttagggtcattacagatctgatgccttggtcttctgctgtttgattttttttttcattcatcttcatcatcctcatcttcctctccatcagacagggatgtacacggccggatctgtcggtagcggtcaagccatttttctaccatctgagtgaccagggggtgatttcgccgccgagaactcttctgcatggcaaccagaactcccccctccgtcacacagcagtccagccactccctgagcagtttttcttgctgttcctcattacctagctcctgagcagaaaggaagtgcacatggagtagcttcctttcactgtcaaccagaggcaaaaatgtgatggtgacatcatcatcggtattgagattagcaccagcacctcggttgccatagccatcattttccatggcaaccaaagcagagaagtggcccctcgtataacccagagcaatcggacttttccaacaaaaactctgttcccacaacaaaggcagataaacaccttgaaaccgagtatatcctaaagtttctccccggaaactcttgtaatattttactccataaactataattggtcgtctaagaatatgtgccagtacaaaaatgtgcgtctgctccaagcttgctccaggctgactagcaagagagagtataaatgcccagtcttcttgccattgttcttctctcaaggaaaaatgtaaaccaaagctctgagaataccatgattcccaatctttccagcgtgtgtaaaaccaatgtgaacagtcatgcaggctgtcatgcagggctttccgaagcactgagtccttgtcatagatgccccaggtagcttgtagaactgaatcaagtaggcagtctcctgcagtccggttccaaagtgcatacagtcgactgtccaaacgtgtagccaattccaaggaccagttaataattggagattcttcttctaattctttttgaacgtctctatcaagcacctcatcaaataatttttcttggactgttgggggcaaatcttcaatatctgctggcaatgtaaatgttacaaggtcagtcagaaaatagcaagcaaaatccccctttctctgatgaagagaggcagctatctctctccggatttgttctgtcagttcaggacacaccattgctggaatacactttgctgcttgttgagacacctctgtaagcaatattgctagcatatcctgcctctgaaaacgtatagccaagtgtacaagagtatagccaacatcaaaggcagaaggacgattcagcaagcgtacttcatctgcggtgagctgacgtgcaatgtctcctcctgatgacttgtatgcttctatggcagctaaatcaccttctacaacccctgagcccacatgggccagcccaacactaccctggagttctatggtagctgtgacatcacagcatggtttatgctgtggggtcagggtggacctggagtcggctggcacaatttcaggaaccccacacaagcattgaggaagagccaatcagtctttttcatcctgtttttaatttgctttagttttttaaagtctacttcaagttcctccttgcttcccacagcaccagccaattcaatcctctgaaaatccattttcacttcagagtcccgcttcgtagcaggaggtgatctcctttggctattaccactactgctacttcccctccatcgagctctgtcttgctcatttattattgaagaagcctcttcagtctctgccaattctattgcttcaatgttattaggtctgggatgatcacaaacaacacatcttttagccttggcccagttttcatatgtgcaaacagagcaagtccagtgctgtgtcctagtgttcagtttatttctatcattgtattcctcacaaggatcaacagaaaaagcaactggtcttgagccagatcctgaggactgaggagattctgtaggactcctggtcatacgttgggataagccctgggtacatctgattgctcttggccagttcaaatatgtacacatgtggcatgaccacttatttgcattttccatgctatacgaagatttcacccttggtcttgcactagagtctggacatatcaaaggactacttcctccttcggtgctggaaggatcccaatctctaccaacatcacttgaaccacttttaaatggatcttctgtaataattgttccactaggtctttgggcacgacacatagtacacttgattgcagatggccagttgttcatacgtacaatattcacaagcccacgttaattccacgttcgtgacacttgtgcacttcttgaagtgagctgtgtcaggcaggaagctggcggcggcggctcctcctccagctcctgctcctcctccccgtccgacgggcgcttggcggcggcggcggcggcggcgccggcggcggcagcggcgactccccgcgcagcccgcggctacgagtcgaggact

SEQ ID NO: 25542 - DNA, 3265 bp, Homo sapiens; identical to SEQ ID NO: 25231
  misc_feature 1, 2, 3, 4, 5, 3265: n = A,T,C or G

SEQ ID NO: 25543 - DNA, 438 bp, Homo sapiens; identical to SEQ ID NO: 22523
  misc_feature 1, 2, 3, 4: n = A,T,C or G

SEQ ID NO: 25544 - DNA, 886 bp, Homo sapiens
  misc_feature 569, 570, 571, 572, 573, 574, 575, 576, 577, 578, 579, 580,581, 582, 583, 584, 585, 586, 587, 588, 589, 590, 591, 592,593, 594, 595, 596, 597, 598, 599, 600, 601, 602, 603, 604,605, 606, 607, 608, 609, 610, 611, 612, 613, 614, 615: n = A,T,C or G
  misc_feature 616, 617, 618, 619, 620, 621, 622, 623, 624, 625, 626, 627,628, 629, 630, 631, 632, 633, 634, 635, 636, 637, 638, 639,640, 641, 642, 643, 644, 645, 646, 647, 648, 649, 650, 651,652, 653, 654, 655, 656, 657, 658, 659, 660, 661, 662: n = A,T,C or G
  misc_feature 663, 664, 665, 666, 667, 668, 669, 670, 671, 672, 673, 674,675, 676, 677, 678, 679, 680, 681, 682, 683, 684, 685, 686,687, 688, 689, 690, 691, 692, 693, 694, 695, 696, 697, 698,699, 700, 701, 702, 703, 704, 705, 877, 878, 879, 880: n = A,T,C or G
  misc_feature 881, 882, 883, 884, 885, 886: n = A,T,C or G
tcagtgcccctttccatacagggatttttttctcatagagtaattatatgaacagtttttgcgacctccttttggtctgaaatacttttgaacagaatttcttttttttagaaaaaaacagacatggggtcttactatgttgcccaggctggtgtcgaactcatgggctcaagcgatccttctgccttggcctcccacagtgctgggattgcaggcataagctaccaagctgggcctgaacataatttcaagaggaggatttataaaaccattttctgtaatcaaatgattggtgtcattttcccatttgccaatgtagtctctcttaagagtaatgaaaaaaaaaaagtaaagtacgactttgaactggtgaatgtaaacaattgtttttcacataagctgctttggaagaactgatgcttgctgctaactgaagttttggatgtatcgatttagagaaccaattaatacctgcaaaatataagcatactgtggtacttctgtttgatctagtatgtgtgattttagattgatggattaaaaattaataaagatcatacattccatannnnnnnnnnnnnnnnnnnnnnnnnnnnnnnnnnnnnnnnnnnnnnnnnnnnnnnnnnnnnnnnnnnnnnnnnnnnnnnnnnnnnnnnnnnnnnnnnnnnnnnnnnnnnnnnnnnnnnnnnnnnnnnnnnnnnnnnngggggggcccctttatttttttaaaaaaaaaatttccaaacccccttttgggattaaaaaaaaaaaaaaaaaacccccggggggtacacccttttttttcctcttaaaagggggcaaaaaaaaaaaaatttcccaaaaaattgccaaaaaaaggttttttttcccccctccnnnnnnnnnn

SEQ ID NO: 25545 - DNA, 2820 bp, Homo sapiens; identical to SEQ ID NO: 25368

SEQ ID NO: 25546 - DNA, 1391 bp, Homo sapiens
  misc_feature 819, 1362: n = A,T,C or G
gcccacgcgtccgcggacgcgtccgatggattgcaaggtctgcctggtatcgctggtcaccatggtgatcaaggtgctcctggctccgtgggtcctgctggtcctaggggccctgctggtccttctggccctgctggaaaagatggtcgcactggacatcctggtacagttggacctgctggcattcgaggccctcagggtcaccaaggccctgctggcccccctggtccccctggccctcctggacctccaggtgtaagcggtggtggttatgactttggttacgatggagacttctacagggctgaccagcctcgctcagcaccttctctcagacccaaggactatgaagttgatgctactctgaagtctctcaacaaccagattgagacccttcttactcctgaaggctctagaaagaacccagctcgcacatgccgtgacttgagactcagccacccagagtggagcagtggttactactggattgaccctaaccaaggatgcactatggatgctatcaaagtatactgtgatttctctactggcgaaacctgtatccgggcccaacctgaaaacatcccagccaagaactggtataggagctccaaggacaagaaacacgtctggctaggagaaactatcaatgctggcagccagtttgaatataatgtagaaggagtgacttccaaggaaatggctacccaacttgccttcatgcgcctgctggccaactatgcctctcagaacatcacctaccactgcaagaacagcattgcatacatggatgaggagacgggcagcttgaacaaggctgtncttctgcagggttccaacgatgttgaacttgttgctgagggcaacagcaggttcacctactctgtcctagtcgatggctgctccaaaaagacaaatgaatggggcaagacaatcattgaatacaaaacaaataagccatctcgcctgccgttccttgacattgcacctctggacattggtggtgctgaccaagaattccgtgtggaggttggccccgtctgtttcaaataagtgaactcaacctaaattaaaaaccaaaaacccctgaaaaaactttctctttgccgtttcctcctttaaaaaaaaaaacaaaaaacaaaaactgaaagctgaatccttccatgtcttctatgcatctacatcttaaactgtgggcaaaagagaaggattggtcagagcagtgtgcaatatgatccactaagtctcctcccttgggccctccccaaatggtttgcagtgttatttttgtgggtttttttttaacaccctgacacctgttgtggacattgtcaacctttgtaagaaaacccaaataaaaattgnaaaataaaataaaaagaaacccatgaaca

SEQ ID NO: 25547 - DNA, 667 bp, Homo sapiens
  misc_feature 1, 2, 3, 4, 5, 6, 7, 8, 9, 10, 11, 12, 667: n = A,T,C or G
nnnnnnnnnnnncctatataacgctacttttacctgagtacataaaagattttggaaatcgtgggaaaaaattataccagctataagctatttaaatactgttgatagttatcagagggaaatcaaaatcatataaacagcatactcaaaaaaatgagacaaaagttcaagagtatcatattttttgttcactgataaactaaaagccaatttcttggtatttctcatgtatacttcatttattttattaataagcaaagccctgtaaggggagcctttgcctagtcctccgactctgattcatcttcatcttgactaatctggaagtaacgaagttcgtaggtctccttgtcagatgcaaccactcgaagccaatcacgaagattgttcttcttaaggtatttcttggtaaggtatttcaaataccttttagagaactgtttctcagaaacaactgtgattttattcttgaagcgttcaatgtgaacaacattcccgagatttccagttttgccattgactttaaccttctcccgtagaaattgctcaaaatttccagaatcaaaaattccatcttctactggatgagtaaggtccaaattaaacctccaggttgacctcttgggcttcctgtctttctgcggcgccatcttcgagtcggcggccn

SEQ ID NO: 25548 - DNA, 505 bp, Homo sapiens
  misc_feature 1, 2, 3, 496, 505: n = A,T,C or G
nnnacttcagccaatctgtgaatgtaaaaactacactgttgccttgctaggatccaccctcctataatatggaacaaatatctggatgaaatccaccctaggagacggagtcaaactaaacttgtggtttttcatttaactttgactacagcatggccccatggcatccacaccaagagggtgttgtgatgaggtgccggtgtgcaaagggaactttagtttttccactggttcttatctgctagccttttacatacatgtgtaccacagtgtgtgagaggggaacccccatcaagtgtggccagcccatccggctgacacatgccaacactggccgaaacctccatagtcaccacttcacttcacctctttctggaaaccaggaagtgagtgcttttggtgaggaaggtgaaggtgattatctggatgactggacagtgctctgtaatggaccctactgggtgagagatggtgaggtgcggttcaaacactcttncactgaggn

SEQ ID NO: 25549 - DNA, 1929 bp, Homo sapiens; identical to SEQ ID NO: 22498
  misc_feature 1, 2, 3, 1928, 1929: n = A,T,C or G

SEQ ID NO: 25550 - DNA, 1104 bp, Homo sapiens
  misc_feature 1, 2, 3, 1104: n = A,T,C or G
nnnactcagaaatgagtttatttatacttatatataaatttttataccacaaagataaccatgcagtcaatagcaatttaattgtacactttaaaataactaaaagtgcataattgagttgtttgtaaaagataaatgttacaagtaatggctacataatttaccctgatgtaattgatgtaattattacatattgtatgcctctatcaaaatatgccagatttgcataaatatatacacatattatgtacccacaaaaaaataagaaaaaaatttaaatatcaaaaaaaggataaatatttaacctatgggaacaatattaacttatctgccagttaaagctactggcaaaagagattactagagatgctattccactatgttactaaatagcatactgctaccttcatttagctacacccttgagtaacatgggataggttaaagttgatagcataataatgcttcattaaatgcacaatagtcttaacatggtaacaaataaaatcaaatttacacataatttaaaaattttgaaatatactgcattttataacataaaagctcaatcactaaaatgatttacaattttattataaattcacttttaactaaaaaatattttctatcactgtaatacagaggcatattactctgaacatcgacctcatacatcactcaataagttaaccacaaagagcctctccacttagattttcatcaagcatcttacattttaatgtccttacttttttacagaagaggccataatttccacctaatgagtctatatgtgatgcagcaataattgatcacatgctttcacatgtgaataggaacaatgaaacagcatgaagtaatttgatacttgaattatatcataatttgcttttcaaaaattttatatatatacatatttttaaaagcatactttgggctgggtgcagtggctcatggctgcaatcccagcactctgggaggccaaggtgggcagatcacttgagatgaagagtttgagaccaccccggacaaaatggcgaaatctcatctctactaaaaatacaaaaaaaaatataaacggacgcgtgggtcgactccctatan

SEQ ID NO: 25551 - DNA, 2282 bp, Homo sapiens
  misc_feature 1, 2, 3, 4, 2253, 2254, 2255, 2256, 2257, 2258, 2259, 2260,2261, 2262, 2263, 2264, 2265, 2266, 2267, 2268, 2269, 2270,2271, 2272, 2273, 2274, 2275, 2276, 2277, 2278, 2279, 2280,2281, 2282: n = A,T,C or G
nnnnaaatttcctcagtgaacggagaatctcagccccatgggctctaattgattgggacttgtgtagagcgtggtcacagtttaatccaactggactgtatgctgtggtctcactcatgttgtggcttatttacactgtcacacacactacattgtggatcagttggaaggttcttcatctggtttatttagacctgacctaattgatcattttaccataaattgaattatagtgaaaactgtcttttgggtactgtttctacctaaaattaaaggtatcacaaaatatgtataataatttttaaatgaattttctgaatttatctttagacaaggtaattcttttgaattctaaagaaatgcagttcttggagttgatgagaggttaaattatagatggacaacttagagaacgtattccatcttcatataaatggtctttcataaaacatagtgtatctatgcagtttatataaactacatgatttattatttgagtctatgtattctgacctcagaactatctctgggctacagtattaccaaagtgggatgcctttaaaatgcagtcaaacttcatttgtatgaagtagaaaagaacttgggaaacctttaaaaatatatattgtgatttatgctttaagaaaatgcatacttttttctaatgaagagtagttcataatatataagggttttaaggccctgaaataacattagtgcttactcattgctctctcatcttgcctccagtcagatgttattggtatagtgaaaagaagaccagattttgaactagatctggattctctttttagtaactcaggcatgttatttaaccttctctgtgccttaggtttttaagtacaatcagtgtacccttcaaacctcacaagatgaaactcagaagagataatggatttggaagcattttgcgtggcttatattatgccacgccagtgttactgttgaagttctgttttgttctgttgttttctgtacagagcgttcagtttactcaggctgaatgttttctgacatatatctccagtatgaatttgtttatgtaaggaagagtttttcaggaagagaaagtagagaagaaaagaatgatgtaactaaatcaaaaaagaaggaaaagagaggaagtgagaaaaggggtgaggaaagagaaaggagtaagaatggggatggcaaagggcagagtaagagaaaagatggaatgagtgtatggaaaattgagaagtagagatggagagaaatggtgtggaaacatttactttttgagttgtagccctcacactacatcagtttgcttgcctgggctctctggggtcaggaaaggtgctgacttccatggaatggggcagcagggcctgctgtatttggtttgttagtactagagttgtttcccaatcaccctactcactgatcatttagtgccaattcaacattttatgtcttttttttttagtggatcccagtttgtgagctaggacctgtggaaatacaagtatcttcctttttaactttattgttttagccatcccaagtgttagactgcaagactaactacatattccccagtggaggttggaagtggaggggactgcttcattaggtctgaagggggccaaggaatgtgttgcagcagttttcgcagatgatactgacgagaggccaggtttgggaatcactgccctgccttggatggcaaattaagcaataaattacacctatttattcctcagttgggatactttcagttgaaccattctgagtagatttaagagaacaaaagacagcagaaataccttaaaagatattattggctgtcttatttttcagatatttgtatttaataaataccttagtagtagtcagaacctctttgagatgtttttagaaagaccactgatttgttttttaaaataatttttttggttccttagagtagagaagaaaagtaggggtgcaatatgtcaggtgtggggccagttatccatttattaaatgcaatttcaagtgtcttaaaaacaataattgccttattgcattttaatatttaataaagtagattaaataaagatttgtattataacagttattcttttatccattgccaaagcaacccttttttgcctattaaaatctggctaaactgtctgatgttgtttcttaattcattaaacatgaaactaggttttacaaactaaattatataaagacagaagtctaaaaatggtaccagaaaannnnnnnnnnnnnnnnnnnnnnnnnnnnnn

SEQ ID NO: 25552 - DNA, 4414 bp, Homo sapiens; identical to SEQ ID NO: 24618
  misc_feature 1, 2, 3, 4386, 4387, 4388, 4389, 4390, 4391, 4392, 4393,4394, 4395, 4396, 4397, 4398, 4399, 4400, 4401, 4402, 4403,4404, 4405, 4406, 4407, 4408, 4409, 4410, 4411, 4412, 4413,4414: n = A,T,C or G

SEQ ID NO: 25553 - DNA, 1037 bp, Homo sapiens
  misc_feature 1037: n = A,T,C or G
tcctgccaatttcagtttctagtttcactttcccttttgtaacgtcagctgaagggaaacaaacaaaaaggaaccagaggccacttgtatatataggtctcttcagcatttacgcggggggcagaagaggaagatttctgaagagtgcagctgcctgaaccgagccctgccgaacagctgagaattgcactgcaaccatgagtgagaacaataagaattccttggagagcagcctacggcaactaaaatgccatttcacctggaacttgatggagggagaaaactccttggatgattttgaagacaaagtattttaccggactgagtttcagaatcgtgaattcaaagccacaatgtgcaacctactggcctatctaaagcacctcaaagggcaaaacgaggcagccctggaatgcttacgtaaagctgaagagttaatccagcaagagcatgctgaccaggcagaaatcagaagtctggtcacctggggaaactatgcctgggtctactatcacatgggccgactctcagacgttcagatttatgtagacaaggtgaaacatgtctgtgagaagttttccagtccctatagaattgagagtccagagcttgactgtgaggaagggtggacacggttaaagtgtggaggaaaccaaaatgaaagagcgaaggtgtgctttgagaaggctctggaaaagaagccaaagaacccagaattcacctctggactggcaatagcaagctaccgtctggacaactggccaccatctcagaacgccattgaccctctgaggcaagccattcggctgaatcctgacaaccagtacctttaaagttcctccggtctgaaggtttctaggatggtgagacgtgacgcgacggtgaaggaagaagttgtgacgaagctgggaagccccgcggtactgctgtccccgagcgccatttacgcaaaagagaccgcagatgacgctcaagctgaatccacagcccgtgccgcggctcgcgaactcccaactcaaaggttgcacacatcgcan

SEQ ID NO: 25554 - DNA, 736 bp, Homo sapiens
acgcgggggttttcttgctgcagcaacgcgagtgggagcaccaggatctcgggctcggaacgagactgcacggattgttttaagaaaatggcagacaaaccagacatgggggaaatcgccagcttcgataaggccaagctgaagaaaacggagacgcaggagaagaacaccctgccgaccaaagagagtgagtgtgcctcggtctcccgcgccccagcccagcccctcaccctgctcttccttgcaaacccactcctccaccccccaccccgccgttgtccccggtgtgggcggccccggccactctttcagtttcacaaagcgccttgtttctccccagccccaagcttccttctaaatccccacacctcgtgggtgcctcgcccacaccgggaagcacctcggttgcgggtgggggttgcagctcccctccagcgcccgcttcccgctctccacagccattgagcaggagaagcggagtgaaatttcctaagatcctggaggatttcctacccccgtcctcttcgagaccccagtcgtgatgtggaggaagagccacctgcaagatggacacgagccacaagctgcactgtgaacctgggcactccgcgccgatgccaccggcctgtgggtctctgaagggacccccccccaatcggactgccaaattctccggtttgccccgggatattatagaaaattatttgtatgaataatgaaaataaaacacacctcg

SEQ ID NO: 25555 - DNA, 1892 bp, Homo sapiens
  misc_feature 1, 1887, 1888, 1889, 1890, 1891, 1892: n = A,T,C or G
nactgaacatcctcccttttattacaacattcacagacacagcattaaaggaatgaatatgccaaagttaaaaacagttttggtgctatttatctcaagcaggctttcgagtaagccgaactcatttggacccaatgggtgtacgcacagatgcacctctgatgcagtttaaatctatccttttaaagtacagcacccccacctacactggaggacagtcagaaagccatgtccagtcagcatctgaagatacagtaactgaaagagttgaaatgtcagtgaatgacaaagcagaagcaagtggctgcagaagatggtaaacgtagagaagaattggttctcaggtgtctgtatagatggcctaatagttctctataccaactgtagttctttttctgttctttcaattcagtagagtaaaaataaaaaacagtgtcattttcattcagaaactgagcagtttctaacttagctggtttgggagctttgctttccaagtttttttttgttttaaggcaaacttaaaattttaatggaaacatttcatatgaagccaagtctcactgagatcaccctactgcttaataattcagaaaattttcacatgcaaagtgtttggaattttatgtatgttatgaaagccatcttttacaattcttaatcacatctctgcctaaactgattcatgatgtttatgttttcctgtttgtagtgtacaaaatgaagctgaaggctcacatgttaaaatgaccctgaatagaataggaagaacagtgttcttacaggtcataatgtatttcacaattaaaaaactaaaatatgtacccatttttaagaaatcatacttctctccacattgatcttttcatttcttactagcttttaagaaattaaatacttgcctgagatagaaatactttatttttgtaactttaaggtctaaatgactaaacttcaaagtaagattttgtcagaataaattgagaccattaatctaatataatacttgttcatgagcactgaaatcctgaagaggagagatttggttataaattaaaaaggttgggtgatcttaagtgcctcagttaatgcacgtacagtattcatttggttggttgtactacctctcagaagtaaaatttgtcaccttatggaatgagagtttttgggtttgggggttgtttttttgttgttgcttggtttggtatttttggttttgtgtgtatttgtataaattttctgtataattagcccaggctgatgtaactataaaaattagttgaaaaaaaaaatattgtttccttaatggaattctcacttcattgtgaatataagattttggatgaaaggatttggtataaagtttgggtttttgtctcaaggatttgatccatatttatccctaaatatttcttaagggatgtaactttttataaccattaagtggggggaagggggtggagggggtggtaataattataactgaagggtttaaatatactacctaggaaaaagtacttctgtgacatatacaaaaaaatctagtggactagggcttcagcatgaatagagatattaattttgcagaaatgaaggaaaatctcttcgtgcagtacaggtattccaagagagttattttccttctcaataatgtggcataaattcggtaaatcagaaataggtgagggagatagtttattagccagtaaaaattggtgggattgcaggaaactaatgtgagaggaaaaggggtttcaatgaattataaccggagaattgacatattgttaatttgaagcctgtgagttaaactttgggttggtgagcaataaaggaggcatttttagcaagtgtgtgtttaaataatattgtgggtgttgtgtatgnnnnnn

SEQ ID NO: 25556 - DNA, 2192 bp, Homo sapiens; identical to SEQ ID NO: 24673

SEQ ID NO: 25557 - DNA, 2644 bp, Homo sapiens; identical to SEQ ID NO: 24697
  misc_feature 1, 2, 3, 4, 5, 6, 2572, 2578, 2642, 2643, 2644: n = A,T,C or G

SEQ ID NO: 25558 - DNA, 406 bp, Homo sapiens
  misc_feature 405, 406: n = A,T,C or G
accgtgttttaagcttagttcagtctcaagtgtttgcagccacatctgaagaccaataaagcaactgctggtttatcctttgggagctggcagaatttcttctcccaaatacatacacagtaaaatcataagcctgaattacctgcgtagttgctttcagatcatatcgttggtccactcttacagaaggatcactttaaaatatctctgcatttgtatccttgcaatgccacaactaaaagacagttatctcataggtccttgattaaattaagaggctttttattgaacacaagaaatgatacttttcaggcactgggcagaatacttgctagaaaggcattttttaactgtgctaaaattgagctgagtgcgtggctggagacaccacacaacacggacccnn

SEQ ID NO: 25559 - DNA, 1834 bp, Homo sapiens; identical to SEQ ID NO: 25025
  misc_feature 1, 2, 3, 1832, 1833, 1834: n = A,T,C or G

SEQ ID NO: 25560 - DNA, 2647 bp, Homo sapiens; identical to SEQ ID NO: 23285
  misc_feature 1, 2640, 2641, 2642, 2643, 2644, 2645, 2646, 2647: n = A,T,C or G

SEQ ID NO: 25561 - DNA, 3983 bp, Homo sapiens; identical to SEQ ID NO: 21101

SEQ ID NO: 25562 - DNA, 1051 bp, Homo sapiens
  misc_feature 1, 1050, 1051: n = A,T,C or G
nctcttgtcatcgcttctcggtctggcttctctgtcgtgcctctctgcggtgatatgttttgttgctgcctcgttctctaaacggcttctgcgtacttccgggttctcgttactgacgctggctgcctattggtacctactctgaaggtgtacaaagacgcgtccgtctgatttccgatatcttacacgggtcgatttagactggcctttattacaaactgtatgtaactaagaagtaaaagggagagggaagagacctgttaagatcacaaacttagaattcatgagtggacgtattaattaatgggaacagcagcctgggaggaagctcttcatcatgggtcccacatcgtcctggtcccccccccatggtttcgtaattctgtaaatgcggggaaggtgagtaccaactgggttttggcaggaagcactttttgactccttagttttagttgttaaatgatgtggaactttaaacagttcaggaggtggagttagtgtggttgggaaaaggcaggcagtgaggtgtggaataaagaacaagggctttgataacttcattcctcatgttgttcctggataagtcatttcatctttcttagccttaaatttcccaactgtaaatgtggaaataatgtccatctcctagggttgatatgaagggttaataagatattttaaaagcctaatacttagaaagtgctctgtaaatgttagtataaatgttagcttgatccttggacagttaaatctggaggtgagattggagtagatgatttctagaagttccatgtttgctttagaagccttagtttagaccaggtgcagtggcttatgcctgtggtcccagcactttgcgaggccaaggcaggagctcaagaccattctgggtggcatggtgagaccccccatctctacagaaaatacgtttaaaaaaagttcgggcagatgcggtggtacatgcctgtggtcaccagctgcttgggagactgaggtgggaggatcgctagggccagggaggttgaggctgaggttgacgttgtgatcgann

SEQ ID NO: 25563 - DNA, 770 bp, Homo sapiens; identical to SEQ ID NO: 25503
  misc_feature 1, 2, 7, 10, 18, 19, 676, 677, 694, 719, 729, 732, 735, 736,741, 748, 755, 758, 766, 767, 768, 769, 770: n = A,T,C or G

SEQ ID NO: 25564 - DNA, 4965 bp, Homo sapiens
  misc_feature 1, 2, 4959, 4960, 4961, 4962, 4963, 4964, 4965: n = A,T,C or G
nnacgcgtccgggctcggcctcagtcctgcagcgcctctaggctgcggatccgcgcttcaaccacctgctttgcgctgcgtccggggaagtggggaggagacgggagggagggaggaggcggggagaggaggaaagaggcagcttacacacgccttccagtccctctactcagagcagcccggagaccgctgccgccgctgccgctgctaccaccgctgccacctgaggagacccgccgcccccccgtcgccgcctcctgcgagtccttcttagcacctggcgtttcatgcacattgccactgccattattattatcattccaatacaaggaaaataaaagaagataccagcgaaaagaaccgcttacacctttccgaattactcaagtgtctcctggaaacagagggtcgttgtccccggaggagcagccgaagggcccgtgggctggtgttgaccgggagggaggaggagttgggggcattgcgtggtggaaagttgcgtgcggcagagaaccgaaggtgcagcgccacagcccaggggacggtgtgtctgggagaagacgctgcccctgcgtcgggacccgccagcgcgcgggcaccgcggggcccgggacgacgccccctcctgcggcgtggactccgtcagtggcccaccaagaaggaggaggaatatggaatccaagggggccagttcctgccgtctgctcttctgcctcttgatctccgccaccgtcttcaggccaggccttggatggtatactgtaaattcagcatatggagataccattatcataccttgccgacttgacgtacctcagaatctcatgtttggcaaatggaaatatgaaaagcccgatggctccccagtatttattgccttcagatcctctacaaagaaaagtgtgcagtacgacgatgtaccagaatacaaagacagattgaacctctcagaaaactacactttgtctatcagtaatgcaaggatcagtgatgaaaagagatttgtgtgcatgctagtaactgaggacaacgtgtttgaggcacctacaatagtcaaggtgttcaagcaaccatctaaacctgaaattgtaagcaaagcactgtttctcgaaacagagcagctaaaaaagttgggtgactgcatttcagaagacagttatccagatggcaatatcacatggtacaggaatggaaaagtgctacatccccttgaaggagcggtggtcataatttttaaaaaggaaatggacccagtgactcagctctataccatgacttccaccctggagtacaagacaaccaaggctgacatacaaatgccattcacctgctcggtgacatattatggaccatctggccagaaaacaattcattctgaacaggcagtatttgatatttactatcctacagagcaggtgacaatacaagtgctgccaccaaaaaatgccatcaaagaaggggataacatcactcttaaatgcttagggaatggcaaccctcccccagaggaatttttgttttacttaccaggacagcccgaaggaataagaagctcaaatacttacacactgacggatgtgaggcgcaatgcaacaggagactacaagtgttccctgatagacaaaaaaagcatgattgcttcaacagccatcacagttcactatttggatttgtccttaaacccaagtggagaagtgactagacagattggtgatgccctacccgtgtcatgcacaatatctgctagcaggaatgcaactgtggtatggatgaaagataacatcaggcttcgatctagcccgtcattttctagtcttcattatcaggatgctggaaactatgtctgcgaaactgctctgcaggaggttgaaggactaaagaaaagagagtcattgactctcattgtagaaggcaaacctcaaataaaaatgacaaagaaaactgatcccagtggactatctaaaacaataatctgccatgtggaaggttttccaaagccagccattcaatggacaattactggcagtggaagcgtcataaaccaaacagaggaatctccttatattaatggcaggtattatagtaaaattatcatttcccctgaagagaatgttacattaacttgcacagcagaaaaccaactggagagaacagtaaactccttgaatgtctctgctataagtattccagaacacgatgaggcagacgagataagtgatgaaaacagagaaaaggtgaatgaccaggcaaaactaattgtgggaatcgttgttggtctcctccttgctgcccttgttgctggtgtcgtctactggctgtacatgaagaagtcaaagactgcatcaaaacatgtaaacaaggacctcggtaatatggaagaaaacaaaaagttagaagaaaacaatcacaaaactgaagcctaagagagaaactgtcctagttgtccagagataaaaatcatatagaccaattgaagcatgaacgtggattgtatttaagacataaacaaagacattgacagcaattcatggttcaagtattaagcagttcattctaccaagctgtcacaggttttcagagaattatctcaagtaaaacaaatgaaatttaattacaaacaataagaacaagttttggcagccatgataataggtcatatgttgtgtttggttcaattttttttccgtaaatgtctgcactgaggatttctttttggtttgccttttatgtaaattttttacgtagctatttttatacactgtaagctttgttctgggagttgctgttaatctgatgtataatgtaatgtttttatttcaattgtttatatggataatctgagcaggtacatttctgattctgattgctatcagcaatgccccaaactttctcataagcacctaaaacccaaaggtggcagcttgtgaagattggggacactcatattgccctaattaaaaactgtgatttttatcacaagggaggggaggccgagagtcagactgatagacaccataggagccgactctttgatatgccaccagcgaactctcagaaataaatcacagatgcatatagacacacatacataatggtactcccaaactgacaattttacctattctgaaaaagacataaaacagaatttggtagcacttacctctacagacacctgctaataaattattttctgtcaaaagaaaaaacacaagcatgtgtgagagacagtttggaaaaatcatggtcaacattcccattttcatagatcacaatgtaaatcactataattacaaattggtgttaaatcctttgggttatccactgccttaaaattatacctatttcatgtttaaaaagatatcaatcagaattggagtttttaacagtggtcattatcaaagctgtgttattttccacagaatatagaatatatatttttttcgtgtgtgtttttgttaactaccctacagatattgaatgcaccttgagataatttagtgtttttaactgatacataatttatcaagcagtacatgaaagtgtaataataaaatgtctatgtatctttagttacattcaaatttgtaactttataaacatgttttatgcttgaggaaatttttaaggtggtagtataaatggaaactttttgaagtagaccagatatgggctacttgtgactagacttttaaactttgctctttcaagcagaagcctggtttctgggagaacactgcacagcgatttctttcccaggatttacacaactttaaagggaagataaatgaacatcagatttctaggtatagaactatgttattgaaaggaaaaggaaaactggtgtttgtttcttagactcatgaaataaaaaattatgaaggcaatgaaaaataaattgaaaattaaagtcagatgagaataggaataatactttgccacttctgcattatttagaaacatacgttattgtacatttgtaaaccatttactgtctgggcaatagtgactccgtttaataaaagcttccgtagtgcattggtatggattaaatgcataaaatattcttagactcgatgctgtataaaatattatgggaaaaaaagaaaatacgttattttgcctctaaacttttattgaagttttatttggcaggaaaaaaaattgaatcttggtcaacatttaaaccaaagtaaaaggggaaaaaccaaagttatttgttttgcatggctaagccattctgttatctctgtaaatactgtgatttcttttttattttctctttagaattttgttaaagaaattctaaaatttttaaacacctgctctccacaataaatcacaaacactaaaataaaattacttccatataaatattattttctcttttggtgtgggagatcaaaggtttaaagtctaacttctaagatatatttgcagaaagaagcaacatgacaatagagagagttatgctacaattatttcttggtttccacttgcaatggttaattaagtccaaaaacagctgtcagaacctcgagagcagaacatgagaaactcagagctctggaccgaaagcagaaagtttgccgggaaaaaaaaagacaacattattaccatcgattcagtgcctggataaagaggaaagcttacttgtttaatggcagccacatgcacgaagatgctaagaagaaaaagaattccaaatcctcaacttttgaggtttcggctctccaatttaactctttggcaacaggaaacaggttttgcaagttcaaggttcactccctatatgtgattataggaattgtttgtggaaatggattaacatacccgtctatgcctaaaagataataaaactgaaatatgtcttcacaggtcaaaaaaaaaaaaaaaaaaaaaatttggggcgcggccaaaaagttttaaacatcttggggcgcgccaaataaacgtgccgcnnnnnnn

SEQ ID NO: 25565 - DNA, 754 bp, Homo sapiens
cgcgtccgcgtcttcggtttttctcttccttcgctaacgcctcccggctctcgtcagcctcccgtcggccgtctccttaacaccgaacaccatgccttcaattaagttgcagagttctgatggagagatatttgaagttgatgtggaaattgccaaacaatctgtgactattaagaccatgttggaagatttgggaatggatgatgaaggagatgatgacccagttcctctaccaaatgtgaatgcagcaatattaaaaaaggtcattcagtggtgcacccaccacaaggatgaccctcctcctcctgaagatgatgagaacaaagaaaagcgaacagatgatatccctgtttgggaccaagaattcctgaaagttgaccaaggaacactttttgaactcattctggctgcaaactacttagacatcaaaggtttgcttgatgttacatgcaagactgttgccaatatgatcaaggggaaaactcctgaggagattcgcaagaccttcaatatcaaaaatgactttccctctttttttgtaaagcaatgtctgcctagtttattgtccagttaactttagtgaccttttaaaagttggcattgtaaataaaacaacttgcaaaaaagttttctggaatagaattaacaaaatattatctttattcatgagttggaaactggaaaaaggcttcttgaagtaaatgttctgagtggagctactaggatgtcttccagcctcctgcagtcaaggagt

SEQ ID NO: 25566 - DNA, 939 bp, Homo sapiens
  misc_feature 930, 931, 932, 933, 934, 935, 936, 937, 938, 939: n = A,T,C or G
acatttggtaataagaaaacagtctccaaatgattaacattttcccctgattcacaatgaaacaacggcattctgacgaagatgatccatacaccgaggggagtttaaaagacaaataagtattcagcgaattgtaggacaaggttcataaatcttttaaaactttttaaatagtgagtttctgtaacatggacttacagctccagctaggaagcaactattgccccatcttttgttcctttatattgtcaccccaattataaataatttgtttcttttagtactttttttttttttttttgaaagtgttttttcttcgtccttttggtttaaaaagtttcacgtcttggtgccttttgtgtgatgcgccttgctgatggcttgacatgtgcaattgtgagggacatgctcacctctagccttaaggggggcagggagtgatgatttgggggaggctttgggagcaaaataaggaagagggctgagctgagcttcggttctccagaatgtaagaaaacaaaatctaaaacaaaatctgaactctcaaaagtctatttttttaactgaaaatgtaaatttataaatatattcaggagttggaatgttgtagttacctactgagtaggcggcgatttttgtatgttatgaacatgcagttcattattttgtggctctatccttactttgtacttgcgcttgcttaaacaaagtgaactgttggcttataaacacattgaatgcgctttattgcccatgttatatgcggtgcatatccttcccacctcaaccgactctctcgcatctcatcaatcctcgcctatcctactctcgcaggcccccttgtcccagctgtcttttgttcccgcagccttctcatccccccctctctggctcacttgtccatctcgccctatcctggctccctttccnnnnnnnnnn

SEQ ID NO: 25567 - DNA, 1756 bp, Homo sapiens
gggacctgaccgcacgcctggagctcttcactggccgcttaaggggctggttgggtttccgtgatcgtggacagagagtacagtgtggcagtggaggccgtcagattactgatacttatccttaagtgagtcctgggaagaggggaggccagtgtctcagacctttgcccttccagggtcatctccctccacctgtcacagctgactcttccatctgtgcaggttgactgaggtcattcctgagttgcagtatgttgagagggtaatatttctgtcttctctaactccccatactcccttgtcttccactctccatttaggagttttttgtgagttatgtccttgttgcttttgcctctttttctttctagccttgattgtgccagaagacaatgtccctattcacacactctttctgcttttctgtgggcaggaacatggaaggggtgctgatggacgtggactgtgagagcgtctaccccattgtgtaggcctctaattgaggcctggcctctgctgtgggtgaatttctgtactggaagtgagtggggctccttttacgtttctttaacaccaccctctcggtttctctcccacatgtgctgctgccctacttaaggcctccccatctccgtggaagtctctctgctgtctcttttcctctctcagctccttggggctttccttagctctgcacctccttttcctttatcatctccttgggccatctcctccctctgtggtcatcattacacctccttgtttcctcctgtgctgagccctttccttgtgtccattccaccagacttttctaccctgagtgcgagataagaacgatgggtggaagagagcaacgccagagcccaggtgcccagaggactttcttccagcttctgctgtccttctttgtggagagcaaggtgacatacacagagataactctggctgttgtgcataggacctacaagtgggctggggttggtggttcacgcctgtaagcccagcactttgggaggctgaggtgggaggatcctttgagcccaggagtttgagaccagcttgggcaacatagtgagaccctgtctccagccttgctctccacaaagaaggacagcagaagctggaagaaagtcctctgggcgcctgggctctggcgttgctctcttccacccatcgttcttatctcgcactcagggtagaaaagtttaaggataagtatcagtaatctgacggcctccactgccacactgtactctctgtccacgatcatggaaaccatccagtccttgaagcggccagtgaagagctccaggcgtgcggtcaggtcccggttaccgtacagccctttcagagccttcacgcacttcacgcggacttctcggtgcttatcatgcagagtccaaccaatatattttaaatagctgtcggtgaggaaagacgtgctgtagctttgcatccaacacccaatttcctcaatgcagatagcacggatctcaggaaggacatccctgcatgtcacttttggcagctttcgcagcattgaaaagatcattggctggtggctctgactgtttccggctatgacgatgtaccgcttgggaccctttctttggatattttgccaccggcgttgttttcagtggtcgttttgctgctttcttcttcacaccgcgattgaagctgtcctcaaatcattttcttgtcttcttgtctgcaagtggccagtgccaagtgctgggccgccgctcctgccgtg

SEQ ID NO: 25568 - DNA, 884 bp, Homo sapiens
  misc_feature 1, 2, 877, 878, 879, 880, 881, 882, 883, 884: n = A,T,C or G
nnaggtattttaaacacctctgatttctattacacatgaaaaggtcattatttgtcccgcaaatttttttataacattttttctttcacgacttttgccgacaattcttcaatgtgtctcaactttctgacttattacaaacattttttttctttaaacaccagttagtttatttcaggacaagaatttaccatataacactctttttacataaattctgtctccccccacttttttttttttgaagataaccattccttttttttttttaaagcaaactttctttatgcctttggactagactgtctaaggccacaagattagaagttaccataatacatgttacactgttaactttaagcaaacttcacttttgttgaaaaccttgtaagtttgggatttcaattatcctttgctattaagaccttgtttagtctaaattaacttagaattggtatagatggcctttttttctctctactggtctttccttgcctctgccagccgcttatgctgctgttctcttaactacgttggcggggcaagggggtataaaagcagctgtaactttctatgtatggaaactggtctgggtgccttggcttacgggttaccttgtgtcatacctttgaaacaagggacctgtccaggcttccttctgatggccaacccacctctaatgctggccagtctatttcacacaaagttctaagttttcctggtgtcacagtaacactgtaatctcccttaaattctttcttgaatttttttttaacatagttcctagtggggtgggcttatttgtacctgacccatgcttcttcgagacaaaacaccacacccacaccacacacatgccaaaaaaaaccccccaggnnnnnnnn

SEQ ID NO: 25569 - DNA, 1384 bp, Homo sapiens; identical to SEQ ID NO: 24537
  misc_feature 1, 489, 490, 491, 492, 493, 494, 495, 496, 497, 498, 499,500, 501, 502, 503, 504, 505, 506, 507, 508, 509, 510, 511,1383, 1384: n = A,T,C or G

SEQ ID NO: 25570 - DNA, 1942 bp, Homo sapiens
ttccttttctcggaaagcgcgccattgtgttggtacccgggaattcggccattatggccgggggccattactgcaggaaaaggtccgcggagagctgagcagtcaagatgtgtgacttcaccgaagaccagaccgcagagttcaaggaggccttccagctgtttgaccgaacaggtgatggcaagatcctgtacagccagtgtggggatgtgatgagggccctgggccagaaccctaccaacgccgaggtgctcaaggtcctggggaaccccaagagtgatgagatgaatgtgaaggtgctggactttgagcactttctgcccatgctgcagacagtggccaagaacaaggaccagggcacctatgaggattatgtcgaaggacttcgggtgtttgacaaggaaggaaatggcaccgtcatgggtgctgaaatccggcatgttcttgtcacactgggtgagaagatgacagaggaagaagtagagatgctggtggcagggcatgaggacagcaatggttgtatcaactatgaagcggtgaggcatatcctgtcgggttgacgggcccatggggcggagctcgtccgcatggtgctgaatggctgaggaccttcccagtctccccagagtccgtgcctttccctgtgtgaattttgtatctagcctaaagtttccctaggctttcttgtctcagcaactttcccatcttgtctcttctcttgtatactagagaagagacgagatgtacaagagaagagacgagatatacaagagaagagacgagatgtacaagagaagagacgagatgggacaagttgctgagacaagaaagcctaggcgaaactttaggctagatacaaaattcacacaggggaaaggcacggcactcatggggagactgggaaggtcgctctagccattctagcagccatgcggacgagctccgccaccatggtgcccgtcagccccgatcaggcatatgcctcacacaacgcttcatagttcgatacaagccacttgctgtcctcatgccactgccaccagcatctcgtctcttctcttgtacatctcgtctcttagaagagacaagatgggaaagttgctgagacaagaaagcctagggaaactttaggctagatacaaaattcacacagggaaaggcacggactctggggagactgggaaggtcctcagccattcagcaccatgcggacgagctcttcatagttgatacaaccattgctgtcctcatgccctgccaccagcatctctacttcttcctctgtcatcttctcacccagtgtgacaagaacatgccggatttcagcacccatgacggtgccatttccttccttgtcaaacacccgaagtccttcgacataatcctcataggtgccctggtccttgttcttggccactgtctgcagcatgggcagaaagtgctcaaagtccagcaccttcacattcatctcatcactcttggggttccccaggaccttgagcacctcggcgcttggtacaggatctgacccagggccctcatcacatcgcccacactggctgtacaggatcttgccatcacctgttcggtcaaacagctggaaggcctccttgaactctgcggtctggtcttcggtgaagtcacactgctcagagaagagggaagtggtcagcatctgaacgccaatcccccgagtttctatcccagccccacaaactctgacccacaaactctgacccacaaactcctgtttcaggctgcagactcgcttccccgcagggccccagtctttccaaccccacctccaacctttcgggtcctcagattccctttgcctcctacccctgccttctcctcgccccccacccgtctcttcctgcctctcgtccccaatcctgcccgtctcccaagacctgggccccaccatcttactgccggacgc

SEQ ID NO: 25571 - DNA, 3855 bp, Homo sapiens; identical to SEQ ID NO: 20695
  misc_feature 1, 2, 3854, 3855: n = A,T,C or G

SEQ ID NO: 25572 - DNA, 513 bp, Homo sapiens; identical to SEQ ID NO: 20543

SEQ ID NO: 25573 - DNA, 2432 bp, Homo sapiens
ataggggagtcgacccacgcgtccggccagagtaaagcaaagagaaaggaagcaggcccgttggaagtggttgtgacaaccccagcaatgtggagaagcctggggcttgccctggctctctgtctcctcccatcgggaggaacagagagccaggaccaaagctccttatgtaagcaacccccagcctggagcataagagatcaagatccaatgctaaactccaatggttcagtgactgtggttgctcttcttcaagccagctgatacctgtgcatactgcaggcatctaaattagaagacctgcgagtaaaactgaagaaagaaggatattctaatatttcttatattgttgttaatcatcaaggaatctcttctcgattaaaatacacacatcttaagaataaggtttcagagcatattcctgtttatcaacaagaagaaaaccaaacagatgtctggacctcttttaaatggaagcaaagatgacttcctcatatatgatagatgtggccgtcttgtatatcatcttgcgttggcctttttccttcctaactttcccatatgtagaagaagccattaagattgcttactgtgaaaagaaatgtggaaactgctctctcacgactctcaaagatgaagacttttgtaaacgtgtatctttggctactgtggataaaaccagttgaaactccatcgcctcattaccatcatgagcatcatcacaatcatggacatcaggcaccttggcagcagtgagctttcagagaatcagcaaccaggagcaccaaatgctcctactcatcctgctcctccaggccttcatcaccaccataagcacaagggtcagcataggcagggtcacccagagaaccgagatatgccagcaagtgaagatttacaagatttacaaaagaagctctgtcgaaagagatgtataaatcaattactctgtaaattgcccacagattcagagttggctcctaggagctgatgctgccattgtcgacatctgatatttgaaaaaacagggtctgcaatcacctgacagtgtaaagctgaatcttgtcagtgacgtttgcctccagctgcctgacaaataagtcagcagcttatacccacagaagccagtgccagttgacgctgaaagaatcaggcaaaaaagtgagaatgaccttcaaactaaatatttaaaatagaacatactccccaatttagtctagacacaatttcatttccagcatttttataaactaccaaattagtgaaccaaaaatagaaattagatttgtgcaaacatggagaaatctactgaattggcttccagattttaaattttatgtcatagaaatattgactcaaaccatattttttatgatggagcaactgaaaggtgattgcagcttttggttaattatgtcttttttttctttttccagtgttctatttgctttaatgagaatagaaacgtaaactatgacctaggggtttctgtggataattagcagtttagaatggaggaagaacaacaaagacatgctttccatttttttctttacttatctctcaaaacaatattactttgtcttttcaatcttctacttttaactaataaaataagtggatttgtattttaagatccagaaatacttaacacgtgaatattttgctaaaaaagcatatataactattttaaatatccatttatcttttgtatatctaagactcatcctgatttttactatcacacatgaataaagcctttgtatctttctttctctaatgttgtatcatactcttctaaaacttgagtggctgtcttaaaagatataaggggaaagataatattgtctgtctctatattgcttagtaagtatttccatagtcaatgatggtttaataggtaaaccaaaccctataaacctgacctcctttatggttaatactatttaagcaagaatgcagtacagaattggatacagtacgggatttgcccaaataaattcagtaaaaaccttaaagctaaaaaaaaaaaaacataaaacaaaaaaaccatgtcggccgcctcggcccagtcgactttagactcgagcaagcttatgcatgcggccgcaattcgagctcacttggccaattcgccctatagggagtcgtattacaattcactggccgtcgttttacaacgtcgtgactgggaaaaccctggcgttacccaacttaatcgccttgcagcacatcccctttttgccagctggcgtaatagcgaagaggcccgaaccgatggcctttcccaaaagttgcccagcctgaatggcgaatggaaattgtaagcgttaaaatttggttaaaaattcgcgttaaattttggttaaatcagctcattttttaaccaataggccggaaatcggcgtttggaccaagtgtccccttttaac

SEQ ID NO: 25574 - DNA, 3168 bp, Homo sapiens; identical to SEQ ID NO: 23476

SEQ ID NO: 25575 - DNA, 1053 bp, Homo sapiens
  misc_feature 1045, 1046, 1047, 1048, 1049, 1050, 1051, 1052, 1053: n = A,T,C or G
accccttactccccatcaaaaaaaaaaaatggatacatggttaaaggatagaagggcaatattttatcatatgttctaaaagagaaggaagagaaaatactactttctcaaaatggaagcccttaaaggtgctttgatactgaaagacacaaatgtgaccgtccatcctcctttagagttgcatgacttggacacggtaactgttgcagttttagactcagcattgtgacacttcccaagaaggccaaacctctaaccgacattcctgaaatacgtggcattattcttttttggatttctcatttatggaaggctaaccctctgttgaccgtaagccttttggtttgggctgtattgaaatcctttctaaattgcatgaataggctctgctaacgtgatgagacaaactgaaaattattgcaagcattgactataattatgcagtacctgcccgggcggccgcgtaccgggagcctccaggacgtggagaatgcctataagaaaacctttctccctgagatgagtgaaaaatgtgaggttttacaatattctgcaagggaagctcaagattcaaaaaaggtggtagaggacattgaatacctgaagttcgataaagggccgtggctcaagcaggacaatcgcactttataccacctgcgattactggttcaggataagtttgaggtgctgaattacacaagcattcctatctttctcccggaagtccccattggagctcatcagactgaccgtgtcttacatcagttcagagaactcccgggccgcaagtgcagccctgggtacaactcgaggtggtagacaagtggatctggcttaagtgaacgggccgccatttgctccattctggatgtttggaaccctttagctttgttttggaatggcccaccattctcactggaaaacagtggtctgttgtgaaaggccagctctcggcagcccctgtggtttcagccctgccgctgtgtgtcattcaggttgggcacagtgtttttcttcccccttccagaaataaaagtgtttccannnnnnnnn

SEQ ID NO: 25576 - DNA, 1342 bp, Homo sapiens
  misc_feature 1, 1265, 1330, 1340, 1341, 1342: n = A,T,C or G
ngtcagtggggtatcaagccgccaaacctgatgccctcaccaagttggaacaaggagaaccactatggacactagaagatgaaatccacagtccagcccacccagaaattgagaaagctgatgatcatctgcagcagcccttgcaaaaccaaaaaatactgaagaggacgggacaacgctatgaacacggaagaactttgaaatcatatttaggtttaaccaaccagagcagaagatacaacagaaaggagcctgctgagtttaatggagatggagcttttctccatgataatcatgaacaaatgcctacggaaattgaattccctgaaagtagaaaacccatcagcaccaagtcacaattccttaaacatcagcaaacacacaacatagagaaagcccatgaatgcactgactgtgggaaagctttcctcaagaagtctcagctcactgagcataagagaattcatacaggaaagaaaccccacgtgtgtagcttgtgtgggaaagccttctacaagaagtacaggctcactgaacacgagagagctcacagaggagagataccccacgggtgttagcttgtgtggggaaagccttctacaagaggtacaggctcactgaacacgagagagctcacaaaggagagaaaccatacgggtgcagtgaatgtgggaaagccttccccaggaaatctgagcttactgaacatcaaaggattcacacgggaattaagccccatcaatgcagcgaatgtgggagagctttctccagaaaatcactactcgttgtacttctttttataggactggaaggaaaagtatataaaccgtgattattcaaagattttcactgaaaatatagttgaacaggtttgtattaatgattacaaagtatagaaaattttgctgttattttccagaagaaatattattaatactactttcacagaagatgtgaaagtggagaaactaccttttaggtaaaatttatttgactcaattactgattaaatagcattaaggaacatacagttgtaaaatgtagaacatagaaattaacattttaaaagcatgcctttttaaaaagcatgctcctatgtgtcatagctttctgaaaccactaaaaatagaaactgttgacagatctctgatgtagaactcttgcagtgaaagcttatctttggaagaaactgggctgtctttctggaagagtcttttctcagagacatctttgaaacatgaattctcttttagcttagtgttcanaactattgttaatacctaatttttgagaatgtaagatgtcatcaattctgaggtgcaccattatntatgtaccannn

SEQ ID NO: 25577 - DNA, 2664 bp, Homo sapiens
tatagggagtcgacccacgcgtccgcaccggcgcggtctatggctgcgacttctctaatgtctgctttggctgcccggctgctgcagcccgcgcacagctgctcccttcgccttcgccctttccacctcgcggcagttcgaaatgaagctgttgtcatttctggaaggaaactggcccagcagatcaagcaggaagtgcggcaggaggtagaagagtgggtggcctcaggcaacaaacggccacacctgagtgtgatcctggttggcgagaatcctgcaagtcactcctatgtcctcaacaaaaccagggcagctgcagttgtgggaatcaacagtgagacaattatgaaaccagcttcaatttcagaggaagaattgttgaatttaatcaataaactgaataatgatgataatgtagatggcctccttgttcagttgcctcttccagagcatattgatgagagaaggatctgcaatgctgtttctccagacaaggatgttgatggctttcatgtaattaatgtaggacgaatgtgtttggatcagtattccatgttaccggctactccatggggtgtgtgggaaataatcaagcgaactggcattccaaccctagggaagaatgtggttgtggctggaaggtcaaaaaacgttggaatgcccattgcaatgttactgcacacagatggggcgcatgaacgtcccggaggtgatgccactgttacaatatctcatcgatatactcccaaagagcagttgaagaaacatacaattcttgcagatattgtaatatctgctgcaggtattccaaatctgatcacagcagatatgatcaaggaaggagcagcagtcattgatgtgggaataaatagagttcacgatcctgtaactgccaaacccaagttggttggagatgtggattttgaaggagtcagacaaaaagctgggtatatcactccagttcctggaggtgttggccccatgacagtggcaatgctaatgaagaataccattattgctgcaaaaaaggtgctgaggcttgaagagcgagaagtgctgaagtctaaagagcttggggtagccactaattaactactgtgtcttctgtgtcacaaacagcactccaggccagctcaagaagcaaagcaggccaatagaaatgcaatatttttaatttattctactgaaatggtttaaaatgatgccttgtatttattgaaagcttaaatgggtgggtgtttctgcacatacctctgcagtacctcaccagggagcattccagtatcatgcagggtcctgtgatctagccaggagcagccattaacctagtgattaatatgggagacattaccatatggaggatggatgcttcactttgtcaagcacctcagttacacattcgccttttctaggattgcatttcccaagtgctattgcaataacagttgatactcattttaggtaccaaaccttttgagttcaactgatcaaaccaaaggaaaagtgttgctagagaaaattagggaaaaggtgaaaaagaaaaaatggtagtaattgagcagaaaaaaattaatttatatatgtattgattggcaaccagatttatctaagtagaactgaattggctaggaaaaaagaaaaactgcatgttaatcattttcctaagctgtccttttgaggcttagtcagtttattgggaaaatgtttaggattattccttgctattagtactcattttatgtatgttacccttcagtaagttctccccattttagttttctaggactgaaaggattcttttctacattatacatgtgtgttgtcatatttggcttttgctatatactttaacttcattgttaaatttttgtattgtatagtttctttggtgtatcttaaaacctatttttgaaaaacaaacttggcttgataatcatttgggcagcttgggtaagtacgcaacttacttttccaccaaagaactgtcagcagctgcctgcttttctgtgatgtatgtatcctgttgacttttccagaaattttttaagagtttgagttactattgaatttaatcagactttctgattaaagggttttctttcttttttaataaaacacatctgtctggtgtggtatgaatttctgaaattctgtcttcctatgactcctagttgtgacctaaccagtttttttctcatttaatcaatgtagctattcctatattcagtaacacttacttctatagccttaaatagataattttttttcttctattttgttttttttttggtagagatggggtcttgctatgttgcctggggctggtattgaactccgggcctcaagcaatcaatcctgtgtggcctcagtttcccagagggcggggataacaggccggggccacccagacccaaacagaggtcgttctaacgacgctgtgcggaaaacccaagcgtcgtcctccaaggcccattaggtcgagcggcgacacctgagtctcgctcctgtgcccacgctcgacctggacgggcattgaccccgggcccggcaaccctccggcccgccacaccaatctggggcccaccgcccttgaaggggacacgggcgcccacgcggcgaatgcggcgccaaacaagggccacactgggcggtccacccccgcag

SEQ ID NO: 25578 - DNA, 1179 bp, Homo sapiens
  misc_feature 1, 2, 57, 1179: n = A,T,C or G
nnggtcgccaagatggcgtcctccgcctccgcccggactccggcagggaagcgagtnataaatcaggaagaattgcggcggttaatgaaggagatcgatgagcagatagagtgttaccgacgggtggaaaagctacggaatcgccaggatgaaataaaaaataaacttaaagaaatcctgaccataaaagaactgcagaaaaaggaagaagagaatgctgacagcgatgatgagggggaactacaggattttttgtctcaggattggagggtgaaaggggcattgttatagggttttaaagacccaaggtttcaacagacctcagtatttctttttattgcattcgttgtctaacaacaataatactcattggcaagaaatttatttacactaacaaattaaatttaatcacaggtatttttagattggtcagaaaacaaaagaccactgtgatattttgcttgaatgcctctgaaaaccaaagagtaaggaatgtcatttgaaactttttgaacaatctagagaagtacatattaaccaagcacaagagaacaattcagacgtggcactattgtctcttccatgcaaatgatcagacatcaaaatgtacaaattaaaagcttaggtaacatgctatccatacttatcagacttaaaattattttcaaacaattcgtgttctttactgatatacaaagaaagctgaaaagaaatcaacttcttacagtggaatagaatttattctcttttattttcagctgcccagttttgtcagtaaggtgtagcaggtgtacaagtggttgcaacaccattaaaaaatataaaagcagtagttatattaaataatgttgaagaaaacatatacatatatatttaaggaatttcactaagcactaactaaatttcatgttgttgggaggtgttatctggctggagtgcctcttaattctttttaaggtaatttaattatttcttgccaattgttctttcttgaatgaatgattacatccttaacagaaaacctgggtgtataaataatacagctgaaagaaacagaagtgtacaccttccaacaacatacactcccaaccacttgtgttgtttttggcaacacccacgcgtccgcccacgcgtccgcccacgcgtccgcccacgcgtccgcccacgcggccgcggacn

SEQ ID NO: 25579 - DNA, 405 bp, Homo sapiens
  misc_feature 401, 402, 403, 404, 405: n = A,T,C or G
tcctccaccgtttcctccaggacagcacctagtcgtggccggaggagtctcagagctgtcagaaagaataagactgattttatgggaaaattaagcagatgctccagtttgagaaacctggatctgcgatctgtttgtggtctctatgaataaagaaaagcaaatagaatcttatcagataagtgcttttataagtctaaatatattctttggaatctctaaagcaaaacttttaaactttttttttttttttttttgtgaagatagaatttggctgtgtagtcctggctggcttggtattggaggcactcctcctgcctcagcctcccaagtgaaggaataacaggtgtgggccactgtgtctgactggggacccccaaacgtgcacacgtacctgcccnnnnn

SEQ ID NO: 25580 - DNA, 608 bp, Homo sapiens
  misc_feature 1, 2, 3, 4, 5: n = A,T,C or G
nnnnnatattcagaaccctaatgtggaacccacatcttagccaagaattagctgagaccttcatggtaagagatcctttgaggccgttgttggtcttttagggtcagaggagttccaaagggtcagaggggtggcagaaagagatcagtgtttgtttcttcttctttgctaccagatctatactgtgaggcacctttatatcctgtatagaaccttgggcagtagaaagtcccatatgaaccttcccctgagcagtggctcccagctgtggttggccccttgagtgacccgatttacatgataatgaaaatcgtccaagctacttccatctctagctcaagattttaagatattttcaaactctagctcacaggaagccattgaagagaaatctcagaatctcaggtaggttagttggactcaacagagccaagccttgtctatgaagcatcactaggcatgtgtaaaagtagggctttgtgcttgcttcggcggcacatatccataatgtagaatcagtggaagctctgagcttatttttctgcaactagatggtcttatctgggggcaaagtgagacaatgatagatcatctggcattccccgcgt

SEQ ID NO: 25581 - DNA, 867 bp, Homo sapiens
agtcagggagaggcgggatcacggcccaggctgctgacacccgcgcgtggggaggactcgggccacgaaaggaaagaaatgtataccgtatctatctacccgacagcagcgaccgagacccggtgggacactccccttctccccactttcacctccccacccaaactttataaaagttgaaaaaatatcatttgactttttatagaaaaaaaaaggaaaaaataattgagaaagtgttcatctgaggactgcatcggtggacactggtatttatttatgttagctccaagcggaccggtggttcaaaagtgcattatttagtttgagctctgtaggtaaaaaggaggtgggaaaaattttaaaacttgagggtaaaaatgtggaaaacaaaccctcccatcccttgtagattataaataaaagcaaaaccgccacagaactagaggtcttctctttaatgttactttaaaattgctatgattgtattgtacgttatttaatgtctgattgaaacacaaatttacatgcatgtttgttacaaaaaaaatgaaaaaaaaagtcacaattttgtcagctctgatttcaaattgcaattatttttaaggtgtataccatcgaagagaatgggtatttttttgtatgtattctggaagaaaacaacaaaaaaaaaaagaaaaagaaaaaattctattccaaaacctcatttgccttattttgttctttaaaaggaacacttaactatttttaatttttaagtccacccgctgagaaggggacaaggtttacgtcatgtactaaaataatagacaatgtatcgctttaaagattaaaattccgtatatttgatgtattaaaaaaaaaaaaaaa

SEQ ID NO: 25582 - DNA, 1639 bp, Homo sapiens
ttgatcacaacattttcgtacccagctcatttccttcttagccccagcacaactgttgatttctttgatatacttaccttgcattgtcactggaaatactgttaagagaaacctttttattttttaaaccagaaaacaaactaaagctcatgtgaccagattttaattttgagaaataaactccaaaagcattttaagccataacttatttcaaatgaataggaaaaataatgacttttgcttacatcatgcagcaataagcattcatttgttattcagaagaaaattgtatgcagtgtgtttatagttaacatcttgaggcaaatgttcacttaaattcacaatgtctccattggcctttcaccaaaagagaaatatactttaaaagcttacttcaatttgctcattaagtatgatttagccttttctaccatattatatttggtaactacatttggaagaatatcacacaaagcttcttaaaacattggtaaacattttgagatgtctttatcaagcaaccgtatcagcagagaaaagataaactcttaagactttcttttttgccccaaattatgtgtcagaaaggaaaatatatcccacttctctccttgtagacatcacaagattcttttgcattaaatgtggagcaaaaaagtaaagctggataaaagagacacaatgattctaaggcacccttagcatagggaatttcaaaatagacatttacagttggctgcttacaacatagtttaactttttttggtgagaatcactctgacatctgttaacagcataaaaaggctgactttcttttccataagtatgttgtttccaactagtttccagtctttcttccatgcccaaagttcaggcaagcctaggtaatcctgtcttagccaatggacaggatgtatttggaaatgacaaaaatgggtttaaattaggaagcaaagtactttgttatagctgaaatggttttaaatgaagcaaatggttgtaaataatgaatgacagaacatctattttgggacattatggcttaaaatgctatttacttttaacttcacaaataaacacagctgtattgttttgaaaagcaatgaaaggcatgcacctctactagcagatttagcacttctgaccaagtaagacaccaacttctttaaaaatatgcttcatgcactgtactggatttttttaagatgtaaattttaatacattatttcttttttgaacttgaacgggaaccagaatgggatgatccagatgatgacctgtggcgtctgggtaaagtagtggtgttccgtaggggttggccctgggctcagggttgtttagtgttttcaccaatcacctggcttatggaatagagaacatgttcattaagtttagatgacaacaaactagggggattatatgtggctaagataaaaatttgcagaagtggtaagaaagcaacagaatgaattccactcaaaaacagagtaattttttttacaaagaaacaaatgcagagaaacaagactgtgtgaaatcttaacatctaaactccaaaatgtgaagaagcaaaactaatcattctgtacaagtaggaatcatgagataatcctaccactgaacccagcaattaatagac

SEQ ID NO: 25583 - DNA, 2025 bp, Homo sapiens
  misc_feature 2025: n = A,T,C or G
cgacccacgcgtccgcgcgtcaggccgctcctctcggctccgcgctccttccctcgcgcgtgggcacccgcccccgagcggtgagagcgcgtgcgcgcgcgcccttctccgtgggcgagccagccagtcccgctgcacacgctcgcagtctgtgggccctccgggaggcggcggaggtcaccgcggggagaggggcgggcgcagcatggcagcctccttacggctcctcggagctgcctccggtctccggtactggagccggcggctgcggccggcagccggcagctttgcagcggtgtgttctaggtcagtggcttcaaagactccagttggattcattggactgggcaacatggggaatccaatggcaaaaaatctcatgaaacatggctatccacttattatttatgatgtgttccctgatgcctgcaaagagtttcaagatgcaggtgaacaggtagtatcttccccagcagatgttgctgaaaaagctgacagaattattacaatgctgcccaccagtatcaatgcaatagaagcttattccggagcaaatgggattctaaaaaaagtgaagaagggctcattattaatagattccagcactattgatcctgcagtttcaaaagaattggccaaagaagttgagaaaatgggagcagttttcatggatgcccctgtttctggtggtgtaggagctgcacgatctgggaacctcacgtttatggtgggaggagttgaagatgaatttgctgctgcccaagagttgctggggtgcatgggctccaacgtggtgtactgtggagctgttgggactgggcaggcggcaaagatctgcaacaacatgctgttagctattagtatgattggaactgctgaagctatgaatcttggaatcaggttagggcttgacccaaaactactggctaaaatcctaaatatgagctcaggacggtgttggtcaagtgacacttataatcctgtacctggagtgatggatggcgttccctcggctaataactatcagggtggatttggaacaacactcatggctaaggatctgggattggcacaagactctgctaccagcacaaagagcccaatccttcttggcagtctggcccatcagatctacaggatgatgtgtgcaaagggctactcaaagaaagacttctcatccgtgttccagttcctacgagaggaggagaccttctgagtgtgccctttggccacggacactgttgggaaccaaactctgtcttggagcctccttttagctcactccacaagtaaatggatttaatcaaaggtcacctatctgcttttgattgtctaggtcacagtaatccctaggatttttcaccgcttattctttttgtctttttaacaaacatattatccgaattttttttctgcaagccactgatagtctctgctaactagcttaattgacctttttacaaagtttgatccccaagcatcctcaactaaatcattgaatacttcaatcaggatattatctgctttactttacaaataaaaccaaatcttttgtcaacaggatgaaacccatcttaaaggaaagaaaaggaattggtgtgaagagagaagttagagaagggaaatgcagtgaattactatctgtgtccatcaggaagtttgtcctgttaaccaaatggttactgcactaccagggttactggtttattttccagggagctgataaagcaggagaactgttgctgcatgttttctatttggactccgtcacaatatggtaggatatccctcaccaactcccgacactcagcagacttgtttttatatttttttctttcttgccatgcgaagcaaaaaaattctcggcagcaaacaaccttcatgtgcttaccacactattgctacagcaattatagtatagcgacgtgcgtaccttctgtgtcgaaaaacaaccgggcgctggaccatatgcgtggaggatgtctgctagtccctctctagtcacttccgtacgtcgtgcctcan

SEQ ID NO: 25584 - DNA, 618 bp, Homo sapiens; identical to SEQ ID NO: 24439
  misc_feature 617, 618: n = A,T,C or G

SEQ ID NO: 25585 - DNA, 1482 bp, Homo sapiens
  misc_feature 1, 1481, 1482: n = A,T,C or G
ncgtgacatttccaggttggctactatgtaaaattaaaattacacaaattgtgcagaaaaagccttaattttaatttcatacaatctttgatgcattagtatgttctaaaatgtcattgggaattagttttttgtttctgctctttttttattttttttttgctttacattacttggtatgtaaataccttgattaaaaccttgtaaaccaatttcaaggttactataagttgtatagtacaagtgttttttaaaaatcttggggtgtttttaaaaattaagatatattttgcccaagaatttttttaacaagattgctaaaaacatcttatttagacacttcaatgtaccaatttataattggatattcagtttaaatagtacacagagttgtggcttttattttcaattaatttttttccttgtgggcagtgtgcatggtataataagcctgagcagaggcttaagttgtatgtgtgcagagtttgtaaaggaatcaattggaagatgcagaagaccgaggtttgctttcaaggtatttttcaggctgtgtgggtaaaatttgcctcaaatttctatcaaacaggaatgtaaaatagataaaatcctatgtatttgaattgtcagagctagggagtgcaaatgttttggcaatgtattcaaaatgctggcctgggcaccaaagagaaaatagccttttacagttacatagtaagatgcgattagtacccacaaattactgttttctaaacatttgaagttttacgattagctttaaaataatgattttataaattggtggtcacaataattttggtattactttcctccttttcccacttagcaatatagccaaatgtattcaacataaaaattcatagggtctgaaattcatagctgggccaaattttttatggcaccttagttttaccataatggtcatctattacactcttctgttataaaatatacccttatttcttttgtttatagtatctttgaggaatgtttttggaaaagttaatttatattttatagggagaacactcaataaattatgttaactgtgcccccgagttaaaaattttatgagtatatgtgaaacttgaacaactgaagactttttttaattgataaaaatgcttagtatgcctgttttggtctgccagtaaattaagtagcttattgagataactaacagctaaatatagctgtagtgtttcctgactgtatattctatgatttaataaaattatccagactagttatattgccacagtaaacatgtgactgaagtgtccttcatcttaatctgaaagagggcaaaatttcatgatcagttaatggaagttatttcatattaagtggtttgtttttttttttttttagatggagtcttgctctgtcgccaggcggaggttgccctgagccgagattgtgctattgcactccaccctgggaagtagagcaggactccgtcnn

SEQ ID NO: 25586 - DNA, 188 bp, Homo sapiens
  misc_feature 1, 2, 3, 4, 5, 6, 7, 8, 9, 10, 11: n = A,T,C or G
nnnnnnnnnnnaaagtggctttggtttttttttctcaaaggtaaaatctgtgaacatatttcccctttataggggcagggcatgagttagggagactgaagagtattgtagactgtacatgggactatgcttttctcaaagccccattaactgcttcctataattttgatagtgggaccacatacgtc

SEQ ID NO: 25587 - DNA, 502 bp, Homo sapiens; identical to SEQ ID NO: 24981
  misc_feature 502: n = A,T,C or G

SEQ ID NO: 25588 - DNA, 504 bp, Homo sapiens; identical to SEQ ID NO: 22504
  misc_feature 1, 2, 3, 4, 5, 503, 504: n = A,T,C or G

SEQ ID NO: 25589 - DNA, 3181 bp, Homo sapiens; identical to SEQ ID NO: 24763
  misc_feature 3179, 3180: n = A,T,C or G

SEQ ID NO: 25590 - DNA, 1745 bp, Homo sapiens
  misc_feature 1, 2, 3, 4, 5, 1741, 1742, 1743, 1744, 1745: n = A,T,C or G
nnnnngccgcaagtgggaccaagttgtggggcactaccgggtatttgcgcaaagccagtggagacaacaacacgcgacctggcttgagtatccatttgtaagttcagaaccgaagagtccttgcatttgctggaaaatgggccccttccccgcagtcaacactgtcacatccagcatcgctcgaatatctgggcatcagccaacttggggattgcccctctctccatttcctgggctggactcggtgcatcgctgacacatatctcttggtcatcagttttggtttcttaggacattccttgcgcgtgcagtgctcacactcatctggagcgcggcgggcgggaggccggggcctccagctcctcagtggacatgccgtcattctcttatcccggccgatagcgctcacgcaagcatggttaacgtccctaaaacccgccggactttctgtaagaagtgtggcaagcaccaaccccataaagtgacacagtacaagaagggcaaggattctctgtacgcccagggaaagcggcgttatgacaggaagcagagtggctatggtgggcaaactaagccgattttccggaaaaaggctaaaactacaaagaagattgtgctaaggcttgagtgcgttgagcccaactgcagatctaagagaatgctggctattaaaagatgcaagcattttgaactgggaggagataagaagagaaagggccaagtgatccagttctaagtgtcatcttttattatgaagacaataaaatcttgagtttatgttcaaaaaaaaaaaaaaaaaaaaaaaaggcacaaccaaaacggctaacaaaaacaacataaacacacaatcaacaaacacaacaacaatcaccaaaacacaccaacacacacgcccccacctcacacacgaaatcatctaatcccctccgagctagatgggccgtacaacactatattggtagccgcgcacaaacatcaatctgtctacttgcatatcaactcaatattggtgtccacgacatatgatgagggcatgagtatgtataatagatgaatcacagacacacgtagcgtcagcgcccgtccttcgaaccacaggctcggcgagtagagtagtaaaataagttaattagtactactgtattatatctatctattaataatgacataacacatcacacatacaaacctactcctcgtactcttatcacccaatccacgcaacccaaacatcaaataataacatttaacacataccacaaaaacgaatcactaaaaacacatctaattgtattataataatctaacatcatgatcctacgcatctcctttttaaccatatccaacagtcattatgcaccccgtgctactccatcgacaccgaaactactaacccaggcgagagccgaaagaaacaaagcgacgaacaatatccgtgacacaccgcagccgacgtcaagcaagcagaagagacagacacaggcggcagcaggaagagcacgccgctagagcccggacagccagcgcagtgtggcgcgagaggcgcagccgtacaagcaaaacccacgaaacaccaggacgcaaggtgacgcagcgaaccgaccacgcaccccacagcggacgcggcctagcagcgcaccccaatgacgcacgctgagcagcacgaaggacgcgcaacggctcacacggcggagctgcagccagagactcggcgcagcaacagatgaatcgtagagtagannnnn

SEQ ID NO: 25591 - DNA, 2670 bp, Homo sapiens; identical to SEQ ID NO: 24256
  misc_feature 1, 2, 3, 4, 5, 6, 7, 8, 9, 10, 11, 12, 13, 14, 15, 16, 17,18, 19, 20, 21, 22, 23, 24, 2643, 2659, 2660, 2661, 2662,2663, 2664, 2665, 2666, 2667, 2668, 2669, 2670: n = A,T,C or G

SEQ ID NO: 25592 - DNA, 1102 bp, Homo sapiens
  misc_feature 1, 2, 1101, 1102: n = A,T,C or G
nnctccaccgcggtggcggccgggtaccccttttgttatttaaaaaagttaagggagagaaatgttcataaatccctaattggtagaattagagagagctaaaaacagtgctaattatcaggcgacgtggaaacaactttgtgggcaagagagcattccttttttttttaactgtttacaaagagttcaattaaacttgttttaaattaaacacactaaacaaaattataagttttgtgattatgaaaatactgtttatcactacataaaatactgtttatggcactttatagattcaaaaaacctattaatgatacttcttttctggattaaagatagtggatgtttatatatatgtatgtgtatatacatacacacacacatatatatgtaaatgtatcatacagaaaataacataggcatatgatttggagaaacagggaaaaaaaagttacaaagtgggagaagtccatcccactatacaactcattcccagatatagcaatagtctcttattcacctcctcagaaatttttgttgcatgtaatcccatatatattctatttcacattagtcattcttctatacactttatttcactaacaccttagaaacatttacatatcagtatgtattgatacatttcattctttatacatacccaattagtattctattctagggttgtaacacattattagtcagccccctactgatagacactgaagttattctgttttcctctatcacgaacaagcgcttcagtgaatatcattggacaaatatccttatatacatgaacaagtggatgcctaagatataaacttcttagaatttcttgtgtcaaagactatgcgtacacttgaaaaaatctggtggtgctacccaacttgccttccaaagaatctgtaccactttacactctaagggaacatttctgatcaacatagattctttaaagcagactccatgctttcaactggccaggaagataacatagagtagtgaagcatgctgggctaagaaaatggcgaactggtctggtgtggtgacataatcccagcactttggggaggctgaggcgggtggatcacttgaggnn

SEQ ID NO: 25593 - DNA, 976 bp, Homo sapiens; identical to SEQ ID NO: 22546
  misc_feature 1, 2, 975, 976: n = A,T,C or G

SEQ ID NO: 25594 - DNA, 667 bp, Homo sapiens
  misc_feature 1, 2, 3, 4, 5: n = A,T,C or G
nnnnnacggaacttcagtgctgaattgagatgtaaacttgatgtacaaacggagagttgtttatctttcagatgtttcacagaatccagtgtccccgggttggataagaaagatatgggaaaaattattttagttttggaaagatcctcttcagaaataccactatcttcctgaagtttgatggagaaccttgtgacctgtctttgaatataacctggtatctgaaaagcgctgattgttacaatgaaatctataacttcaaggcagaagaagtagagttgtatttggaaaaacttaaggaaaaaagaggcttgtctgggaaatatcaaacatcatcaaaattgttccagaactgcagtgaactctttaaaacacagaccttttctggagattttatgcatcgactgcctcttttaggagaaaaacaggaggctaaggagaatggaacaaaccttacctttatgggagacaaaaccattcagatgcctttcttgaagaaccatttcttggatcgttgacagactttaataatttccaaagttccaaaagttgattttgatagtttttgccagtgttttcgttgcttttatggatgagtagattttcagagtttcttattctgccattctgaaagtgttctctctacctaaaccccagttttatttgt

SEQ ID NO: 25595 - DNA, 1934 bp, Homo sapiens
  misc_feature 1, 2, 1906, 1907, 1908, 1909, 1910, 1911, 1912, 1913, 1914,1915, 1916, 1917, 1918, 1919, 1920, 1921, 1922, 1923, 1924,1925, 1926, 1927, 1928, 1929, 1930, 1931, 1932, 1933, 1934: n = A,T,C or G
nnaaaacctttagtcgaagcttctctcttaaacttcatcagaacattcatacgggagagaagccttttgaatgcagtaattgtagaaaagctttcagacagatctcatccatcctacttcatcagagaattcacagtggaaagaaaagccatgaatgcaataaatgtggggaaagcttcaatcaaagaacaacccttattctacatatgagaattcatgatggaaaggaaattcttgactgtgggaaggccttgagtcaatgtcagtctttcaatatacatcagaaaattcatgttgttgggaatgtctgccagtgcagaaagtgcggaaaagccttcaatcagatgtcatcccttttacttcataagaaaattcacaatggaaagaaaacacataaatataataaatgtgggagaggcttcaaaaagaaatcagtctttgttgtacataaaagaatccatgctggagagaaaatccctgaaaatgcgaaggccttaagtcagagtctacagcaaagaagtcaccatttagagaatccttttaaatgcagaaaatgtgggaaattatttaataggatttcacccctgatgcttcaccagagaattcacacttcagagaaaccgtacaaatgtgataaatgtgacaagttcttcaggcggctttcaacccttattctgcatctaagaattcataatggagaaaaactatacagatgcaataaatgtgagaaggtctgcaatcggcattcatcccttattcaacatcagaaagttcatacaaagaaaaagaaactatttgagtgtaaggaatgtgggaagatgttttctggaactgcaaaccttaaaatacatcagaatattcattctgaagagaaacctttcaaatgcaataaatgtagtaaagttttcggccgccaatcatttcttattgaacatcaaagaattcatactggagaaaaaccctaccagtgtgaggaatgtggaaaagccttcagccaccgaatatctctcacacgacataagagaattcatactgaagatagaccctatgaatgtgatcagtgtgggaaggccttcagccagagtacacacctcgcccaacatgaaagaattcacactggagagaagccatatacatgcaaaacatgtggtaaggcctttagtcagcgcacatctcttattctacatgaaagaagtcatactggagagaaaccctatgaatgtaatgaatgtgggaaggcatttagcagtggctcagaccttattcgacatcagagaagtcattcttcagagaaaccctatgaatgtagtaaatgtgggaaggcatatagtcggagttcatccctgattcgacatcagaatacacattctgaagaaaaagcctaaggttgttttaaatctataaaatcaacgaatgaggctatcaaacatatggcaaatatgtatttgtctataatgtaaattttgtgtatatgggaccatttgatgatatgtcccactttgaaagccaaagagcaaaagtcattggtgattttgacctcaggatttgaaattaactgaaggaaactcagaagtttggtcagtcattgtgaatgaagatcatttttcatttgataagaattactggctgggcgcagtggcttacacctgtaaccccagcactttgggaggctgagacaggcggatcacgaggtcaagagtttgagaccacggtgaaaccctgtctctactaaaaaatacaaaattagctgggcgtggtggtgcgcacctgtaatctcagctactggagaggctgaggcaggagaatcgcttgaacccaggaggtgggggttgcaccgagcagagattgcaccactgcactccagtctgggcaacagagcaagactctgtgtcaaaaaaaaaaaaannnnnnnnnnnnnnnnnnnnnnnnnnnnn

SEQ ID NO: 25596 - DNA, 582 bp, Homo sapiens; identical to SEQ ID NO: 23129

SEQ ID NO: 25597 - DNA, 5316 bp, Homo sapiens
  misc_feature 1, 2, 5299, 5300, 5301, 5302, 5303, 5304, 5305, 5306, 5307,5308, 5309, 5310, 5311, 5312, 5313, 5314, 5315, 5316: n = A,T,C or G
nncagctgatagagatgtcttggacatgctctggctggctaatctccatgttctagccgactgaaaatacggtggccaagtggatggtgtgcttatttgcagtctaaagaaatttccttttgatgtggcagaaaatcgaggatgtggagtggagaccccagacttacttggagctggagggtctgccttgcatcctgatcttcagtgggatggacccgcatggggagtccttgccgaggtctttgaggtactgtgacctgcgattgataaactcctcctgcttggtgagaacagccttggagcaggagctgggcctggctgcctactttgtgagcaacgaggttcccttggagaagggggctaggaacgaggccttggagagtgatgctgagaagctgagcagcacagacaacgaggatgaggagctggggacagaaggctctacctcggagaagagaagccccatgaaaagggagaggtcccgctcccacgactcagcatcctcatccctctcctccaaggcttccggttcagcgctcggtggcgagtcctcggctcagcccacagcactcccccagggagagcatgccaggtcgccccagccccgtggccccgcagaggagggcagagcccctggtgagaaacagaggccccgggcaagtcaggggccaccctcggccatcagcaggcacagtcccgggccgacgccccagcccgactgtagcctcaggaccggccagaggagcgtccaggtgtcggtcacctcgtcgtgctcccagctgtcctcctcctcgggctcatcctcctcatccgtggcgcccgctgccggcacgtgggtcctgcaggcctcccagtgctccttgaccaaggcctgccgccagccacccattgtcttcttgcccaagctcgtgtacgacatggttgtgtccactgacagcagtggcctgcccaaggccgcctccctcctgccctccccctcggtcatgtgggccagctctttccgccccctgctcagcaagaccatgacatccaccgagcagtccctctactaccggcagtggacggtgccccggcccagccacatggactacggcaaccgggccgagggccgcgtggacggcttccacccccgcaggctgctgctcagcggcccccctcagatcgggaagacaggtgcctacctgcagttcctcagtgtcctgtccaggatgcttgttcggctcacagaagtggatgtctatgacgaggaggagatcaatatcaacctcagagaagaatctgactggcattatctccagcttagcgacccctggccagacctggagctgttcaagaagttgccctttgactacatcattcacgacccgaagtatgaagatgccagcctgatttgttcgcactatcagggtataaagagtgaagacagagggatgtcccggaagccggaggacctttatgtgcggcgtcagacggcacggatgagactgtccaagtacgcagcgtacaacacttaccaccactgtgagcagtgccaccagtacatgggcttccacccccgctaccagctgtatgagtccaccctgcacgcctttgccttctcttactccatgctaggagaggagatccagctgcacttcatcatccccaagtccaaggagcaccactttgtcttcagccaacctggaggccagctggagagcatgcgactacccctcgtgacagacaagagccatgaatatataaaaagtccgacattcactccaaccaccggccgtcacgaacatgggctctttaatctgtaccacgcaatggacggtgccagccatttgcacgtgctggttgtcaaggaatacgagatggcaatttataagaaatattggcccaaccacatcatgctggtgctccccagtatcttcaacagtgctggagttggtgctgctcatttcctcatcaaggagctgtcctaccataacctggagctcgagcggaaccggcaggaggagctgggaatcaagccgcaggacatctggcctttcattgtgatctctgatgactcctgcgtgatgtggaacgtggtggatgtcaactctgctggggagagaagcagggagttctcctggtcggaaaggaacgtgtctttgaagcacatcatgcagcacatcgaggcggcccccgacatcatgcactacgccctgctgggcctgcggaagtggtccagcaagacccgggccagcgaggtgcaagagcccttctcccgctgccacgtgcacaacttcatcatcctgaacgtggacctgacccagaacgtgcagtacaaccagaaccggttcctgtgtgacgatgtagacttcaacctgcgggtgcacagcgccggcctcctgctctgccggttcaaccgcttcagcgtgatgaagaagcagatcgtggtgggcggccacaggtccttccacatcacatccaaggtgtctgataactctgccgcggtcgtgccggcccagtacatctgtgccccggacagcaagcacacgttcctcgcagcgcccgcccagctcctgctggagaagttcctgcagcaccacagccacctcttcttcccgctgtccctgaagaaccatgaccacccagtgctgtctgtcgactgttacctgaacctgggatctcagatttctgtttgctatgtgagctccaggccccactctttaaacatcagctgctcggacttgctgttcagtgggctgctgctgtacctctgtgactcttttgtgggagctagctttttgaaaaagtttcattttctgaaaggtgcgacgttgtgtgtcatctgtcaggaccggagctcactgcgccagacggtcgtccgcctggagctcgaggacgagtggcagttccggctgcgcgatgagttccagaccgccaatgccagggaagaccggccgctcttttttctgacgggacgacacatctgaggaagacagcggcgagttttctgaagagatgagtgctcagagccctcatgctgttgaggctaaagggaggcctggaacggtggggcgtttgactggaatggaccccagggactgtccaggtgcagcccctcctagtacacatgggcccccgaggccgtggtcctgggagccaggaagactccgcagtgggtgagaatgaaaacttgagactcccaagttctgggccagcccattgctctgggctgttttaaagcccatttcacgaggaacaaagatttacttcctgtcctgccattcgtgtgcttccatggacaaacctgatttttttctcttagttctaaagaatcttgggttattttgtagcggtgccagtatttcagtagatgggatttcagccaagtaggttcccctgtaacctcctacaaagcaatattccaaaggaacattttaactgtaaaggctggagacaagaaaaaataagtagatcgttttaataacaattatttaattgcctataagtttgctgtttcagaggctagcccaaaggcatcaaatttaataaagttaaacaaattgatttacttcagagcaaatatgatcctattaaaataatatagggtaaataccctacctcttagaaagggcaaaaatgcaaagaagctttctttaaaactaaaagggttttttggggggggagttggcggggaggaaataaggctaacagaggttgacctaaaattagccttacaaaggagaaaggaccacattgcttacttgaaacagacaatgaaaacaaccaaagtgatatataaaatagttgatgagaactagacttatgactgtagtttactagagtttagttttcagttgctgaagtagctcattttctcttactaatgtttggttcctcagggaagaatctcacttgactagagaggaggtgggaacagaagagagaaggaggcagggagatgtatttcttagggctcaccccttcacagactgacagaatggttttgttttgttttgttttgttttgttttgtttttgagatggactctagctctgtcacccaggctggagtgcagtggtgcgatctcggctcactgcaagctccgcctcccgggttctcaccattctcctgcctcagcctcccgagtagctgggactacaggcgcccaccaccacgcccggctaattttttgtattttttagtagagacggggtttcaccatgttagccaggatggtctcgatctcctgacctcgtgatccgcccgcctcggcctcccaaagtgctgggattacaggcgtgagccaccgtgcctgccccagaatggtttttaaagccacagttgagaggccacccattgcccggcgcctggacagtgatcatcttgttcatcttgttcagtcctttcttgtgtgattggaattattcatcccctttgaaagatgagaaggttgagatgcaaagagtctacctttccaagttctcactgctggaaagagctagaagcacagttcaaagttctggcttctggactctgcagtccaggtctcccttctcccacttgcctaccctcaatgccacactgtttttgaagtggcccataacttgaaggaaaagtttaaagacagttcaatttaatcatcagaatgcattcttttttttttcggagacggagtttcactcttgctgcccaggctggagtgcaatggtgcaatgatctcggctcactgcaacctctgcctcctgggttcaagtgattctccagcctcagcctcccgagtagctgggattatgggcgcccaccaccatgcccagctaatttttgtattttttttttttagtagagatggggtttcgccaggttggccaggctggtcttgtgaactcctggcctcaggtgatctgcccacctcatcctccaaaagtgctgggattacaggcatgagccactgcgcctggcctcagaatgcattcttacacatctatcctagacatttataagcactctaatggataacaatccaagaataaatgattgtaaaagatgatgccgaagagttgatgtcaatctttttttcctaagaaaaaaagtccgcgagtattaaatatttagatcaatgtttataaaatgattactttgtatatctcattattcctattttggaataaaaactgaccttctttaatcatatacttgtcttttgtaaatagcagcttttgtgtcattctccccactttattagttaatttaaattggaaaaaaccctcaaactaatattcttgtctgttccagtcttataaataaaacttataatgcatgnnnnnnnnnnnnnnnnnn

SEQ ID NO: 25598 - DNA, 3045 bp, Homo sapiens
  misc_feature 1, 3036, 3037, 3038, 3039, 3040, 3041, 3042, 3043, 3044,3045: n = A,T,C or G
naggagaatcgcttgaacccaggaggcagtgattgcagtgagctgagatagcaccactgcatgcaagcctgggcaatagagcgagactccgtctcaaaaaaaaaaaaaaaaaaaaaaaaattagagctattgtgtctttattttcttaaattttgcccaaggtaacgttatatatcccaccacttcattgctggtttgggtacataggattttgaaagtggtatattaaagtctttccttccaagtattttgtaatacttgaaaattcttagatgtatactgctaacaaaagttagaacttaaacatttttgtttttatcatttatagcctagattagggacatatttgcatcaaccaaatcatcattagatttgaaaataggcagatgaatgaacaaatatggtcattgcactttccttttactttcagagtctaagtatattccttaaggttagtaaccagtctttattaaaaatataaaatttttcttcatgtctaatcccattgcatccacaatgctgtgatttatagtacatgatcaacacttaaaagtactttacatatgtgtgtttctgaagcaagttttcatgacctctgttagattctcaaaagaattcagaacttcaatttaagaatcaccattttaagaatacatgtgtacatatacacattaagcagtataaagcagctaaaattggcattggttttacactggtgcagtgtgcttaggtaaagtaacttcttccatgtttcaaggtcaggttcagagttgaatgaagtgtagatttaaatttaggattaggctttggaatatatcttgtttttattgtctcacatttctgatattgactacttatcccatattctgtttcaaattctttatcatatttcaagttctttctcatacttcttgatcttggcttaactaagcaagttagtatcagagactagttgactgaacccaagattaaacattttgcacttgcacaaaaccttcttagcattttgctttcaatgaatcagaaagtcaattcactaagagacagatcatgagaggaaagagaactagaggccaataaataaaataattgttcatatattaatgttcacatgtgaactacatatctaaaatcttggagaaaaatcaaggcaagaatttccagaactgtcctcaaatagctcatttatttaagttttgttaaaaagcaaaagcgaattgattacatttgattaacttttcctattccatgcacaagttaccttaaaacatgataaaaaccttatgggcattacctatcacacagtacttatgcataaacttataatagtaaaattactaatgtttgataaaataagatggaggcattacaaatagtctacagtttgtattttaaggaattggacatgaagaattctagatcattttgtgtctataaacccgactttctatcttgccttgggcaaactttctgtgcctcaatgtactctttaaatatgtgaaggatgctctttttgattaagtgttttgcactcctgaataaagggcatagtataagcacaaagtatgacttaatttatcacaaatattacacatcctatgttcttgaatgtgcacacttttttctcaataacaaaatatatcttaagtcagtttttttaatgctgtcaaaatttgtagaattttctttgagtatggcatgatctcttcccaaatgcattttacagttttttgtgtgttctatagactatagagtcaaaatcaagagtattttgagaggatcagaagcatttaaaaatctatttttttctagtatctttcacagatctaaatatttagattctctttgcctttttctccatggaatacggtggtatcaaattactaatacagtatataaacttcgtttgcattggtggaattcatttagatctctcaagtaatattattttagggctatataaattgtgtttttagtgtaaaatgttatttgataatgtgaagttaaatcccttttagaaagtgactgaaaatggtaaaggaactcatcagaatcttagcgttcttaagttctctgataatttagtatattttattaatgatgtccaacacctctaagattgttgagaaaacatgaagaattgaggttactcttctcaggtgacactttaaatattaaaatcagaggcttcctgaacaaaacaaattgcaaaatagcgataatggcatgggagaggccagatgcaggactctggtaaatttaacttactttgaatatctatctaaattttagttcatgcatgttcttacttaatcctggtgtttttgctcttagatgttagagtttaataaattgtgatacgcatatatttttttacatgaaggattctactttctaattttacttttctgatctcaagaaaattaaacttgaaaaacggggtaaaattcttcaactattgcctcaagttcagttttgtcctattgtcctgagaaaggagatttagacttgtctggcctaacacaggtattttttagggcatcgtactatcccagagaaagtgttgagataccatgggcagaaatataaaacctaagctttgaaccccagtagacttcttcttctgcattaagtctctctttatctgatattctaaggatttcttcaaactacttaataatttgtcaccattaactttaatatccagtttttaatctgcactgtaatatcctggtttgagaagaaagaatgctcaataaattaggagaagtaccagaacaacaatgttttggaaaggtgatcctggctcctgtgctctcaattaatggtgttattaggtgaaaataaaaggtcaggaaatgggccgtgcggtggtcatgctgtaattccagaattgggaggttgggtggtggtgtaccttaagtagggagttgagacagctggcaaatggtgaacctgtttttaaattcaaaaaaaagaaaaaattgggggcgccaaattttaacatgtgggggccaaaaaatatatattaaaaannnnnnnnnn

SEQ ID NO: 25599 - DNA, 7992 bp, Homo sapiens
  misc_feature 1, 2, 3, 4, 5: n = A,T,C or G
nnnnngtcccacagtgcctggcccagaagccttgctaaatatttgaacaggattgcccaatacttttctgctgtgagaatgtaagatggatccagaagagcaggagctcttaaatgattacagatacagaagctactcttcagtgattgaaaaggctttgagaaattttgagtcctcgagtgaatgggcggatctcatatcttcacttggcaaactcaacaaggctcttcagagtaacctgaggtactccttgttgccaagacggctcctcatcagcaaaagattagctcagtgtttgcaccctgccctgcccagtggtgtccacttaaaagctctggaaacctacgagattatctttaaaatcgtggggaccaaatggctggccaaggacttgtttctgtacagctgcgggttatttcctctcctggcacacgcggcggtgtcggtgaggccggtgctgctcaccctgtacgagaagtacttcctcccactgcagaagctgctcctgcccagtctgcaggccttcatcgtgggcctgctgcccggccttgaagagggctccgagatctccgacagaacggatgctctgctcctgagactgtcgctggtggttggcaaagaggtgttttacaccgccctctgggggagcgtcctggccagcccgtccatccgcctccctgcctcagtcttcgtggtgggccacatcaacagggatgcccccggccgggagcagaagtacatgctggggaccaatcaccaactcacggtgaagtctttgcgtgcctccctgttggactcaaatgttcttgtgcaaagaaataatctggaaatcgttctgtttttcttcccattttatacctgtctggattccaatgagagagccatccccctcctcagatctgacatcgtgcgcattctctcagccgccacccagaccctactgagaagggacatgtccctgaacagaagactgtatgcatggttactaggctcagacataaaaggaaataccgttgtgccagaatctgaaatctcaaattcttatgaagaccagtcgtcttatttttttgaaaaatactccaaggatcttttagttgagggtttggctgagatattgcatcagaagttcatagatgctgacgtggaggaacgccatcatgcatacctgaagccttttcgcgtcctcatcagtctgcttgacaagccagaaatagggcctcaagtggttgggaatttgtttctcgaagtcatcagggccttttattcttactgcagagatgcccttggctctgatcttaaacttagctacacccagagtggaaattcgctgataagtgcaatcaaggaaaacagaaatgcctctgagattgtcaaaacggtaaatttgctgataacttctctaagcacagactttctctgggattatatgacaaggtgttttgaggaatgctttagaccagtgaagcagcgttacagcgtgaggaacagcgtcagccctccccccacggtctcggagctctgcgccctcctggtcttcctgctggatgtcattcctttggaactttactctgaggtgcatacccagtatctccctcaggtgctcggctgcctggtgcagcctcttgctgaggacatggaggccttaagtttacctgaactcacgcatgccttgaagacgtgtttcaaggtgctcagcaaagtccagatgcctccttcctacctcgacacggagtccaccagcggaacctcgagtccagtaaaaggtgaaaacggcaaaataattttggaaacaaaggcagtgattcccggtgacgaagatgcttcgtttccccctctgaagtctgaggacagtgggatcgggctcagtgcctcgtcaccggagctctctgagcacttgagggttcctcgagtttctctggaaagggacgacgtttggaagaagggcgggagcatgcagaggacgtttctttgcatccaagagctaatcgccaactttgccagcaagaacatttttggagtacagctgacagcgtcaggagaagaaagcaagtccgaggagcctgcagggaagagggacagggatgggacgcagagcctggcagccaatgattccagcaggaagaactcttgggagcccaagcccatcactgtgcctcagttcaagcagatgctgtcagacttgttcacagcacgagggtctccattcaagacaaaaagttcagagtcaccatcgtcttcgcccagcagccctgccaggaaaaacgggggagaatgggatgttgagaaggtggtcattgacctggggggttccagggaggaacgcagggaggcctttgccgccgcctgccacctgctgctggattgtgccactttccctgtctacctgtccgaggaagagaccgagcagctctgtgcaacgctcttccagctgccaggagccggtgattccagttttccatcttggctgaagtccctcatgactatttgctgctgtgtgactgactgctacctccagaacgtggccatttccactctgctggaagtgataaaccattcccagtccctggcgcttgtcattgaagacaagatgaaacgctataagagctctggacacaaccctttttttggcaagctgcagatggtgacggttcctcccattgctccagggatattgaaagtcattgcagagaaaacagatttctatcagagggtggctcgcgtgctttggaatcagctgaacaaagagacccgggagcatcacgtcacctgcgtagaattgttctaccggctgcactgcctggcccctacggccaacatctgcgaggacatcatctgccatgccctcctggaccctgacaagggaacaaggctggaagctctgtttagattttccgtgatctggcatctgacaagagagatccaaggcagtcgagtaacatctcacaatcgctcctttgataggtccttgtttgtcgtgctggacagcctggcctgcacggatggtgccatcggtgcggcagcccagggctggctggtgcgtgcgctctccctcggggacgtggctcgcatcctcgaacccgtgctcctgctgctgctgcagccaaaaacccagagaacctccatccactgcctcaagcaggagaactcggccgatgacttgcaccgttggtttaacaggaagaaaacctctttcagagaggcatgcgcagtgcccgagcctcaggagagcggctctgaagagcacctgcctctgagccagttcaccacagtggaccgtgaagccatttgggccgaagtggagaaggagcccgagaagtacccgctgcgaggcgagctgagcgaggaagagctgccctactacgtggagcttccagacaggacggcccacggcgccccggacagcagcgagcacaccgagtctgcagatacaagctccggccacacggacagcgagaacacgtcctccttctcctccccttcccacgacctgcaggagctgagcaacgaagagaactgctgtgcacccatccacatggggggcagggcgtaccccaagcgctcggccctgctggcggccttccagtcagaaagcttcaaggctggggccaagttaagcctggtgcgggtggactcggacaagacgcaggcttctgagtcgttctccagcgacgaggaggcggacttggagctccaggccctcaccacatccaggctgctaaagcagcagcgggaaaggcaggaggccgtcgaggccttgttcaagcacatcctgctctacctgcagccctacgactctcggcgggtcctctatgccttctcggtgctggaggctgtgctcaaaaccaaccctaaggaattcatcgaggctgtgtccaggactagcatggataccagctccaccgcgcacctcaacctcatctccaacctcctcgctcgccaccaggaggccctcattggccagagtttctacggaaagctccagacccaggtccccaacgtgtgcccccactctctgctcctggagctgctcacctacccctgcctgagcttcctgcgctcctactacccttgctatttgaaggtctcgcaccgagacattctcggcaaccgggacgtgcaggtcaaaagtgtcgaggttttgatcaggataatgatgcagctggtctcagtggccaagtcttcggaagggaagaacgtggagttcatccacagcttgctgcagaggtgcaaagttcaggagtttgtcctgctctccctgtcggcgtccatgtacacgagccagaagcgctacgggctggccaccgcccaccacggcagggccctgccagaggacagcctctttgaggagagtctcattaacttgggtcaggaccagatctggagtgagcacccgctgcagattgagctgctgaagctgctgcaggtgctgattgtcttggaacaccacctgggtcgggcccatgaggaggcggaaaaccagcccgacctgtcccgggagtggcagagagccctgaacttccagcaggccatcagcgccctgcagtacgtgcagccccaccccctcacctcccagggtcttctggtctctgcggtggtgaggggtctgcagcccgcctacggttacggcatgcatccggcctgggtgagcttggtcacgcattccttgccctacttcggaaagtccctgggctggacggtgacaccctttgttgtccagatttgcaaaaacttggatgacttggtcaagcagtatgaaagcgaatctgtgaagctctctgtcagcacaacctccaagagggaaaacatttctccagattatccactcacccttctagaaggtctaacgaccattagtcatttttgtcttttggaacaagccaaccaaaacaaaaagaccatggctgcaggtgatcctgccaacttgaggaatgccagaaatgccattttggaagagctgcctcgaactgttaacaccatggcccttctctggaatgttctcagaaaggaggagactcaaaagagacctgtcgatctcctaggggccacgaagggatcctcttccgtttactttaaaaccaccaaaaccataagacaaaaaattttagacttcttaaaccccttgacggcccatcttggggttcagttgacagcggctgttgcggcagtgtggagcagaaagaaagcccagcgtcacagtaagatgaagattatcccaacggcaagtgcatcccagctaacccttgtcgacttggtgtgtgcactcagcaccctgcagactgacacgctgctgcacctggtgaaggaggtggtgaagaggccaccccaagtcaaagggggtgatgagaaatcgcccctagtggacattcctgtgttgcagttttgctatgcttttctccaaaggctcccagtaccagccttgcaagagaacttttcttcactgttgggagtattgaaagagtctgtacagttgaatctagccccacctgggtattttctgcttctcagcatgctgaatgactttgtaacaagaactcccaacctggaaaacaagaaggaccaaaaagacctgcaggaaatcactcagaaaatcctagaagctgtggggaacattgccggctcttccttggagcaaaccagctggctaagcagaaacctggaagtgaaggcccaacctcaggcctctctagaagaatctgatgctgaggaggacctgtatgatgctgctgcagcttcagcaatggtgtcttcatccgccccgtcggtgtacagcgtgcaagccctctctctcctggcagaggtactggcttccctcctggacatggtttatcgaagtgatgagaaggagaaagctgtgccgttaatctcccgtctgctttactatgtttttccatacttacgcaaccacagtgcctacaatgctcccagcttccgggctggcgctcagctgctgagctccctgagtggctatgcctacacaaagcgagcctggaggaaggaggtcctggggctgtttctcgaccccgctttctttcagatggatacttcctgtgttcattggaagtccattattgaccatcttttgactcatgagaaaacaatgtttaaggatttaatgaacatgcagagcagttctttgaaactattctcaagttttgaacagaaagccatgctgttaaagcgccaggcttttgctgtcttcagtggagaacttgatcaataccacctttaccttccactgatacaagaacgcctgacagacaatctcagagttggacagacatccatagttgctgctcagatgtttctttttttcagagttttgctgctaagaatatctcctcaacatttgacttcattgtggccaataatggtctctgaattgattcagacattcacacagcttgaagaagatctaaaagatgaagatgagtcattgagaagcaccaacaaagtaaacagaacgaaagtttcagtcccggatgcaaatggaccctcagtgggggagataccccagagtgaactcatcttgtatttatcagcttgcaaattcttggacacagcgctttcttttccacctgacaagatgccattatttcaaatttataggtgggcatttattccagaagtggacacagagggccctgccttcctgtcggatgtagaggagaatcaccaagaatgcaaaccccacactgtcaggattctagaacttctaaaattaaagtttggggaaatcagtagctctgatgagatcaccatgaagagtgaattcccgcttctgcgccaacattctgtttccagcatcaggcagttgatgccattcttcatgactctaaatggtgcatttaagacccagagacagctgcctgctgatagcccaggaactccattcttggactttcctgtcacagatagcccaaggatcttaaaacaactggaagaatgcatcgaatatgattttctggaacatccagaatgttaaccatgtgagagagaatatgtttaatccatgtattggtactttactgaaaaccaggttatattctaaagaagaaagaaggcaggatagtgcttttgaacaagcctatttccattttgaaagtagatttcaggctaggtgcggtggctcacacctgtaatctcagcactttgggaggccaaggcaggcagatcacttgaggtcaggagttcgagaccagcctgaccaacatggtgagaccctgtctctactaaaaatacaaaaattagctgggtgtggtggcggcgcctgtaatcccagctacttgggaggctaaggcatgagaattgcttgaacccaggaggtggaggctgcagtgagccgagatcacgacactgcactccagctgtgtgacagaatgagaccatctccaaaaaaaaaaaaagtagatttcagataatttactgttcagcaacaggacacacctccctaaatgccttgtaatatatttgaatctgattctgcatttcttcctcaatttatgtaatgaaaataaaattaatatatcatctaacagtagcacaaaatttgtaatatgaagtaaagtatgaagataatgaagaagttgttttctttgttgaagcagttatatgggtctttctcagtatatttctcttttctctaaaagtttaaacttattaaaagaatgttatttttaacctttcacacaaatgtcctttaaagtgcttattttggtactccattttaaaacgaaaatacattgttttctgaggacaataattgccccttacccattcagcagaggtaaggtaacctcaatgtattcaaagataacctcaatgtattcaaacctcgcacattaaaaattacatgtttgccgggcgcggtggctcacgcctgtaatcccagcactttgggaggccgaggtgggcagatcacctgaggtcaggagttcaagaccagcctgaccaacatggagaaaccctgtctctactaaaaatacaaaattagct

SEQ ID NO: 25600 - DNA, 1529 bp, Homo sapiens
  misc_feature 4, 5, 6, 7, 8, 9, 10, 11, 14, 15, 16, 17, 20, 22, 25, 26,27, 29, 30, 32, 33, 35, 40, 41, 42, 48, 49, 50, 51, 52,53, 54, 55, 56, 57, 58, 59, 60, 61, 62, 63, 64, 66, 67,68, 69, 70, 71, 72, 73, 74, 75, 76, 77, 78, 79, 94, 101,123: n = A,T,C or G
  misc_feature 140, 141, 145, 153, 169, 181, 182, 183, 187, 200, 221, 233,236, 252, 273, 281, 285, 299, 300, 310, 325, 365, 369, 376,386, 389, 398, 404, 419, 434, 464, 468, 480, 553, 564, 573,586, 588: n = A,T,C or G
gggnnnnnnnnggnnnnggngnggnnntnngnnanggaannnggaagnnnnnnnnnnnnnnnnncnnnnnnnnnnnnnnttttacgaaccaaancaagggngcagggggcccaaaggatttangcactctccccccttgnnaacnccgcccgnccattttggtcctctnccccaaaagacnnnaaangttgattctcacnctcctgaaagaaccaccgggnggcagagtcccnacnggatgatgcaaaaaanctcttgcccccaaaagatctnttttttcncccnggagaaaaattttnncggacaaganacgaggtcttaaccnttttggagccacaagtgaatcacccaatgccggggaaatntttntcctggngttcaattcntgnagagtgacncggctnccgggagcctgaggnacatcttaggggaancaacaatgagtggttttctgaagttccggnccanctgtctcctaancaagtggaaaaactgttcaggagttgttgggtgaaccacaaacatgttcacagtgtctccgtccaccccctcntcccccctttnacacatctncaggaaaccctcnantcgacaggatgagtggtctggcccagccccatctttgacacattcatctctggaggagaggccaagtggctcctacaaagcgtcactgtcatcctcctcccacatggctacgatggggctgggccagaccactcatcctgtcgaatagagcgtttcctgcagatgtgtgacagtgcggaagagggggtggacggagacactgtgaacatgtttgtggttcacccaacaactcctgcacagtatttccacttgcttaggagacagatggtccggaacttcagaaaaccactcattgttgcttcccctaagatgttactcaggctcccggcagccgtgtcaactcttcaagaaatggcaccaggaacaacatttaacccggtcattggtgattcatctgtggatccaaaaaaggttaagaccctcgtgttctgctccggcaaacatttctactccctggtgaaacaaagagaatctctgggggccaagaagcatgactttgccatcatccgagtagaggaactctgccccttcccgttggattctttacagcaagagatgagcaaatacaaacatgttaaagatcatatttggagtcaggaggaacctcagaacatgggtccgtggtcgtttgtttctccaaggtttgaaaagcagctggcctgcaagctccgtctggtgggccggccccctttgccagtacccgctgtaggaattggcacagttcacttgcaccattgcattccagcctgggcaacaagagcaaaactccgtctcaaacaaacaaacaaacaaaaaacaaaaaaaaacaactaaaggacactacctgatttattattttggggcaagtacatgttttgtttttatattactgggaatgattatgtagactttgttattctaagagtttagaaatataaataactttaaaaaatactttgtaa

SEQ ID NO: 25601 - DNA, 1334 bp, Homo sapiens; identical to SEQ ID NO: 25292
  misc_feature 1, 2, 3, 4, 13, 31, 50, 1316, 1317, 1318, 1319, 1320, 1321,1322, 1323, 1324, 1325, 1326, 1327, 1328, 1329, 1330, 1331,1332, 1333, 1334: n = A,T,C or G

SEQ ID NO: 25602 - DNA, 620 bp, Homo sapiens; identical to SEQ ID NO: 22471
  misc_feature 1: n = A,T,C or G

SEQ ID NO: 25603 - DNA, 1573 bp, Homo sapiens
  misc_feature 1570: n = A,T,C or G
gtcatggatttttatcttttttagcaagtaatgctaagaaccactggcctgagctactactcttcagtatacattattaggattgcatagacttactagagggacagtttcaggttttgatgctaatcagtgtgtgtcctaaagttgtcctttgtgcctttaaaaagtttggatatatcttctagtttaaaatggcttattaaggaattcattttataattgcagtgggaaagtaatggtcaagtaacactaggtagactatcatgcctgtttagcccagagaatttggggggagagagaatagataaaaatggcacccagaaaaatgttaaaatctttagtcaagactagaattaatacaattgtctacacttgtatggcagaaataaccttataaagtgtttaaggaattcagagaagggaatgtaccaaataagcaacagggagaaaattaggtaagaagtaagatacgaacgagaaacctgatttattgctcatccttcccttgcctccctaatggcaagcaaaactctgaacatctgaaaaggatgtagttctggacaaatcctgactacccagaggaaactcactgtgagattgctgttgatttgaagggtgctttcactaaggttatattttaaagtagaataacacatgctgagtgtaaactggctttggattggtcagctgcagtagtacaaaaacagcatagaatttgagaaaactaaaactgctatgagatagctatgagaaaactaaaactgctatgagatagaaatgatgtaaaattatgtggaaagttttccctcatatactcacatacagcctttgaagggctctggctctgaccggttgatggccttgagcgagatgaaatcatgaaattgagtcaaatcaatttgacattgaaatgacaagaggaaactcttaaatacataaaaacaagctctcatttgcctaggatagatactgtcttaaaaataaagactgaacctagatgttctgagcactagcaacaaggtattttaacaagtttaaaggaattctctgaaaaagttataaaattattctaggaaacataaccataatagtgttttaagggactttcacctggggattttatattcatgaacagagtgtattctgtatttaaaatgtctcatttgtgggaattggatgacatgttttttgataaatttattcacaatataaattgactttttattctaggaccatgtgaataatgggttccattgcacaaatacaaatattttaatagcttcttaggcagtggtgtagacatcttggatataaataattgtagatcttgtatatttgatttttaaaaaactagaataaacagagaggcataaacatatcttagagtccaagtggtagtgtttagcattggatataataaatggatgttttacaaagtgtttccataattctcttcctatacataaatgtcttgttttcaaaagtggatggaacttggctgggtgtggtggctcacgccctgtatcctagcactttgggaggccaaggcgggaggatcacttgagctcangag

SEQ ID NO: 25604 - DNA, 4476 bp, Homo sapiens
gctctctttcttcgtgctgctccttctggtgttctcctctcgttctctgcctctccctgctttttttcgttctttcttgcttctctgctgctctcgctcttgtttcgcgtgctgggctacctccggctgtgctctttcggctgctctgttgttgtgttctctggcttgtcttcctctcttcgtgtgctcgtctttcgtgtgctgagtgggtttccccttctgttcgtctcgttggttgtttgtgtttctgtttgctgtgtttctctgtcttttaggccgggttaccgtgtgtttcgtcgttgttttccgcgtgctttttttgggggttcccccgcagttttgcgcccctgtgtcgcacgttagttttgggcccgggtcctctgttgggcacacttgtgcccattttcttttctctcttttgtccccaacctccgtgggtttagttctccctcgaggtgttttttggtgtgtgtttgtttttgtttgttgttccgcttccagaatccaactggactttatttgacacagaatacaatatggctacagaaacagcaaactgaaaaaacaaagcagaaaaaaacacagttccatccaatttgtaattaggtaacagcagggaaagtcattaaatgaataacaaaacaattaagcttgatggaagaagtcttttcctagtgcccatacctgaaagacaaagtaaattactttttggaattcccactctctgttgtccaatggacacacctgtcgtgttttgagccagcgagagatgcagtggaagtgaaaagcatggttacagactccccatgcgacagtacactcttctgaagtagcggacgcctggttagcttgacattctatgcaaagatccataatgtggttcctgcagatggcacagttatcaaccacaatatcccaggcccagagggctactgcattccactttttcacttcaaagcgcttcttgcccgcgccgctgttggtgccgctcggggtatccacatccatcgctgcgggctcacaaagcggccagacgctcggcggcggcgtgtggcaggagcgcaggggcgcgagccggcgatcagccttcccggcgaccgtgccgcgggagctcgagcaactcggactaggggacccgggccggcccccaagatgccggcgatcgcggtgttggcggcggccgccgcggcgtggtgcttcctccaagtcgagagccggcacctggacgcgctcgccggaggcgcgggccccaaccacgggcaatttcctagacaatgaccaggtggctgagcaccgtctcccagtacgaccgggacaagtactggaaccgctttcgagacgatgattatttcagaaactggaatcccaacaagccctttgaccaagccctggacccatccaaggacccctgcctgaaggtaaaatgcagccctcacaaagtgtgtgtgacccaggactaccagaccgccctgtgtgtcagccgcaagcacctgctccccaggcaaaagaaggggaacgtggcccagaaacactgggttggaccttcgaatttggtcaagtgcaagccctgtcccgtggcacagtcagccatggtctgcggctcagatggccactcctacacatccaagtgcaaattggagttccatgcttgttctactggcaaaagcctcgccaccctctgtgatgggccctgtccctgtctcccagagcctgagccaccaaagcacaaggcagaaaggagtgcctgcacagacaaggagttgcggaaccttgcctcccggctgaaggattggtttggagctctccacgaggatgcgaacagagtcatcaagcccaccagctccaacacagcccaaggcaggtttgacactagcatcctgcccatctgcaaggactccctgggctggatgttcaacaagttggacatgaactatgacctcctgcttgacccttcagagatcaatgccatctacctggataagtacgagccctgtatcaagcctcttttcaactcgtgtgactccttcaaggatggcaagctttctaacaatgagtggtgctactgcttccagaagcctggaggtctcccttgccagaatgaaatgaacagaattcagaagctgagtaaggggaaaagcctgttgggggccttcatacctcggtgtaatgaggagggctattacaaagccacacagtgccacggcagcacggggcagtgctggtgtgtggacaaatatgggaatgagttggctggctccaggaaacagggtgctgtgagctgtgaagaggagcaggaaacctcaggggattttggcagtggtgggtccgtggtcctgctggatgacctagaatatgaacgggagctgggaccaaaggacaaagaggggaagctgagggtgcacacccgagccgtgacagaggatgatgaggatgaggatgatgacaaagaggatgaggtcgggtacatatggtagtgcccacaagaaagaggacacaagttttgcacaaaattgcaagtcacttcctattcctgcatttgtatctaagactccaaggcaccaaggtctcttctccattgttgctctctatacccgacctaaggtttggaagacaactgcttgttcccagaggattctgattttgcatatgtttgtatgggagaaagggtgttgtgttttttttttttgttgttgtttattttttggatagggaagtcattggcttaattagagcctccttcctttctgtgagatttttccaacaagcatgtgatttacgtggaattctgacagtgcagggagcccccaccctcttaaatgtcaaagaccctttttgattacccacactggtggttattacagcatggttcccagccttacagtgtctaagtgcttctcttgtgtcctgtagatgttgtgaaaaagaaaaaaacaaaaaatacaccacactgtactttttccccctgcccccgttactgccggtgattattattaaaaattagtttttttcacatcattatatctggcttcctataaacaacagccttaattcagtcaagactccctttggggaattcattttattaaaaattggtgtctggatacttccctgtacatgcataaatatgcatgcatgtacagaaagactgtatgtgtgtgccttgcacacacacccatacctctcagaaaaagtgtttgggtatcttaaaaactcgaaaaacaatgataaatttctcagcttgtccagacctggaacaaaatttctggaataagaaatttgtattaaagtccttttttgcactaacagttggctcttgtagcctgcaggctgaggaagtctcttctctgtgcatcagcagagttactgaaagcctctgattgagaaaaaacctccgtctgcctaaatcacttttctcgcagaagccatgcgactcccacacgacacgggcagcttcacaagccatctctttcatttctgcttgaagcccccttggctgcagcaatcctgtctgccataggtttcttccttccttacctactcaagggctttttctaaggcatgcacacatatctcctgttctctgagagtaccatggtgttccttaaaagaagaaaatttctaattctgaactcaatgttttgcttttactccctttctactgacaaatcatgataagggcacaaaagctgtacagattttttttttttaaccactcaatcccaaatggaggcctacaaagaacatcgtaataacacatggaagcaaaccccgggtttttaagagcaaattctgtccccccctcactcccccaagtgacaagatactaatgaagaaagttcttcaccatagtgtttgttttaactaaactcattggagtctagttccaaatttggtagggtcatcatctctacattccttaggatttctctccctatcaagctggcccagatacaagtaccaaacagtagtctctgaagttcccccatttccttcagtaccagtctataagctactgtccgccactgattttcatttatcagggtgtcctaatcagaatcagccacccaagcaagcctctctggcccacatatctatctcttgccttcccccatgaacttcagcctgtccacacaaaagccacataaactcaagcaagaaatatgttcagccaaaacatgattatagtggcagctgaccaatcccccatcccaaattgaccatttagatgtaccaactcaccttaaattagcatgttccaatccagtcggcattgcctgaatacagtaagcatcttatctatagtgtggtcttagataagaaatgaatattgatatagaagtcctttggttcgaaataactgaggtttgtattatttcccataggaaggcgcatagcactctgttggatcttaatcatacttgttaaatttttttctgacaaggatattaaacggtatggcaatcatagtttaatcgc

SEQ ID NO: 25605 - DNA, 2019 bp, Homo sapiens; identical to SEQ ID NO: 22489
  misc_feature 2005, 2006, 2007, 2008, 2009, 2010, 2011, 2012, 2013, 2014,2015, 2016, 2017, 2018, 2019: n = A,T,C or G

SEQ ID NO: 25606 - DNA, 727 bp, Homo sapiens; identical to SEQ ID NO: 21436
  misc_feature 1, 2, 3, 4, 5, 722, 723, 724, 725, 726, 727: n = A,T,C or G

SEQ ID NO: 25607 - DNA, 1578 bp, Homo sapiens
tatagggagtcgacccacgcgtccgctttccagcctcagtcggacgggcgcggagacgcttctggaagcttgtattggttggtgatggtggtactggaaaaacgaccttcgtgaaacgtcatttgactggtgaatttgagaagaagtatgtagccaccttgggtgttgaggttcatcccctagtgttccacaccaacagaggacctattaagttcaatgtatgggacacagccggccaggagaaattcggtggactgagagatggctattatatccaagcccagtgtgccatcataatgtttgatgtaacatcgagagttacttacaagaatgtgcctaactggcatagagatctggtacgagtgtgtgaaaacatccccattgtgttgtgtggcaacaaagtggatattaaggacaggaaagtgaaggcgaaatccattgtcttccaccgaaagaagaatcttcagtactacgacatttctgccaaaagtaactacaactttgaaaagcccttcctctggcttgctaggaagctcattggagaccctaacttggaatttgttgccatgcctgctctcgccccaccagaagttgtcatggacccagctttggcagcacagtatgagcacgacttagaggttgctcagacaactgctctcccggatgaggatgatgacctgtgagaatgaagctggagcccagcgtcagaagtctagttttataggcagctgtcctgtgatgtcagcggtgcagcgtgtgtgccacctcattattatctagctaagcggaacatgtgcttcatctgtgggatgctgaaggagatgagtgggcttcggagtgaatgtggcagtttaaaaaataacttcattgtttggacctgcatatttagctgttttggaacgcagttgattccttgagtttcatatataagactgctgcagtcacatcacaatattcagtggtgaaatcttgtttgttactgtcattcccattccttttcgtttagaatcagaataaagttgtatttcaaatatctaaaaaaaaaaaaaaaaaaaaaaaaaaaaaaaaaaaaaaaaaaaaaaaaaaaaaaaaaaaaaaaaaaaaaaaaaaaaaaaaaaaaaaaaaaaaaaaaaaaaaaaagggggggggggcccaaaaatcacctcacgggggcgacaaacaatgaaatgccacacacacccgtgtgagtctgtgaggaaaagggaaggcagcactcattaagggcgtcgtatattaaaatcaacaaagggcgagggggcgtctgtgatcaaaacagacccacggagggacggtgaggagggacaaacacaggctggacgtcagaaggcacttctagtggagaaagacggcacaccccccaccccctgggggggcgggaaaaacgacgaaggtccagacacccccacggcaaaaagataacaccggagcgcggaactaaagaaaaaaacaaccgacgagtagacaggggcgcacaaacccaaacagtaaatttgccggaccgaaaaaaacagtacccacgagacgtgaataacaacaccatcacggccgttgcaatca

SEQ ID NO: 25608 - DNA, 1042 bp, Homo sapiens
  misc_feature 1, 1042: n = A,T,C or G
nattcacccttgattcatttctcgcccccgtcactgattatttccttgagcatatatctctgcctaacactttagtaggtgctatagaggatacatgaaaagtatgagatctggttccatccagtaagacattttaatagagaagatcaaaatgttacctggcagttggggaataatctgacttcgttggcagttggccttaacttcttaatcattgatccaggaatatttcaaccagagacacaactttctggcagacagacaaattgtacaacaccaacaatatcctggaccttgaaattctgtttacttcagtccattgtatcctttaaggcacctgtgctagcctagattttgtaataacactgatttatgagaatggacaaaagtggtagggaaattgttccctctccacttctgaaagtatgatgatgtattaaggatggaggagttattatgaacacttagaaattcagggatattgggtctttagccttatgaatttgagctgcttatttaattgggggaatttactacatattagtactatattcgtaaggattttttattaaccattacagattttacaaacagctagttatatggtaaacagattattatgcctttttgcaattctgaatatgattctagtatttgtgtagatgtatttggtacatttggtaataagaaaacagtctccaaatgattaacattttcccctgattcacaatgaaacaacggcattctgacgaagatgatccatacaccgaggggagtttaaaagacaaataagtattcagcgaattgtaggacaaggttcataaatcttttaaaactttttaaatagtgagtttctgtaacatggacttacagctccagctaggaagcaactattgccccatcttttgttcctttatattgtcaccccaattataaataatttgtttcttttagtacaaggaaggggtaggctatgtgttttgtcagggggttgagaatgaatgtgaggcgtattataccataaccacctagttttaagagn

SEQ ID NO: 25609 - DNA, 975 bp, Homo sapiens; identical to SEQ ID NO: 25369
  misc_feature 971, 972, 973, 974, 975: n = A,T,C or G

SEQ ID NO: 25610 - DNA, 3894 bp, Homo sapiens
  misc_feature 3886, 3887, 3888, 3889, 3890, 3891, 3892, 3893, 3894: n = A,T,C or G
acgcggggtgcgccgggagcgtcatcgcctcctccctccccaagatggcgtccttgctgcagtcggaccgggttctctatctagtccagggagaaaagaaggttcgggccccgctctcgcaactctacttctgccgctattgtagcgaactgcggtcgctggaatgtgtgtctcacgaggtggactcccattattgtcccagttgtttagaaaatatgccatcggctgaagccaaactaaaaaagaatagatgtgccaattgttttgactgtcctggctgcatgcacaccctctctactcgggccacgagcatctccacacagcttccagatgacccagccaagaccaccatgaagaaagcctattacctggcatgtggattttgtcgctggacgtctagagatgtgggcatggcagacaaatctgtagctagtggcggttggcaggaacctgaaaatcctcacacacaacggatgaacaaattgattgaatattaccagcagcttgctcagaaagagaaggttgagcgagatcgcaagaaactggcacgacgtagaaactatatgcctctggctttttcggacaaatatggtcttggaaccaggcttcagcgaccacgagctggtgcatccatcagtacccttgccggactttcccttaaagaaggagaggatcagaaagagataaagattgagccagctcaggctgtggatgaagtggaacctctacctgaagactattatacaagaccagtaaatttaacagaggtaacaacccttcagcagcgtctgttacagcctgacttccagccagtctgtgcttcacagctctatcctcgccacaaacatcttctgatcaaacggtccctgcgctgccgtaaatgtgaacataatttgagcaagccagaatttaacccaacgtcaatcaaattcaaaatccagctggtcgctgtcaattatattccagaagtgagaatcatgtcaattcccaaccttcgctacatgaaggagagccaggtcctcctgactcttacaaatccagttgagaacctcacccatgtgactctcttcgagtgtgaggagggggaccctgatgatatcaacagcactgctaaggtggtggtgcctcccaaagagctcgttttagctggcaaggatgcagcagcagagtacgatgagttggcagaacctcaagactttcaggacgatcctgacattatagccttcagaaaggccaacaaagtgggtattttcatcaaagttacaccacagcgtgaggagggtgaagtgaccgtgtgcttcaagatgaagcatgattttaaaaacctggcagcccccattcgccccattgaagaaagtgaccagggaacagaagtcatctggctcacccagcatgtggaacttagcttgggcccacttcttccttaaaaggttccactggagggcagatcccaaaggacagtatcaccgtaaacctgcgttaaaatgtggaagctgctgcttcattaggccttgtttataacgatgtacccatgcactacggaattctattgctaagaaagtgggagcataggcaaggcattgggaacacagggtagctgctgttgctcttgctctcacccctgttgacaccagtaagtctgtgtctccctcactgaaccctgcacgttgagtaacagcagcataattccatcctaggaaaggggatgggtgttccttggaatggcattgtatttaccacctgagaaactctgtactgtctcttgatctgatctcactaaggatcacaatgtcacagatgaaacttaaatgataacccaaaggtagacctgctgttaatgatccagcattggtcacaatgtaccaactgctttctgcattccgttaaatatcatctaacagtctaaaacatatcccttcattgccataatggctgccattttgccatagatttccatataactgaaaaactgaattgtcactttatctttagtatcatgatgattggaaaaacctgtgaagttgttaaggcactctcatttgccctctttttctaagtgaatacaggacacgtattagttgttcttaatttttttcccagtaaaatatggatcttttaagaagaatttgagaagcaaacaattacatgtcatgtcaagggggtagcagattccattcgttttcaatattgccacaatacccagggattaatgctgccacaggggggcaatctttatttgtcttacttcctaccccttccctgttctgcctctttaactcagttaagttgttctgtttgggacctggaaaagaacccaaagaaaacctgagtggacaggttcatttctggaatgcagaaaacattttaaaggctagatttttagaatattctcaactagcattctttccattgatttgaaggggaaattaactattataatctcttgaatccaaaactggatattaagaactttcccccttactaagtttaagacttttgtcatgtggtgagtcaaataagaccattttgattgtaaaccataaaatagttcagcaagtagcccacagttctggcctaacagcagacttgctgttttcacttggtatcctggagttgggttgctaaccttaatttctatgatgttttctaaaatgaaacttgataaagtagaccaccagctgcaccgtgttttctgtaaaagtattgttagtaagtggccaagagacttgaggaaaatacagattttttgtttaccttggtcttgttttaagtcttaaaaaattaaagataacattataatgtagaatacagatgggacatagtccttgtaagcttcccttgaaaatgttttaaatatttaggaagcttttaaaagacactaaattgtactctaaaagacactaaattgtactaattgtacaaaggtcaagccaattttatgaaacagtcctacagagtaatatatgtgatgcagtgtaagaaggaaaatactcatctctaacattatggtaataacatttagcctcttaggagttggagcagggggatgggtaattacagatttgcagactatagaaagagtttcatttttttgtgaccccacagagtctcaaatttttatttcactacctgctagagcctactgtgaaatcactgctccatatttgccagtggaggaaatgggcatagagtagagaatagcttcatatgtttacacgtttgcatagactacacacatgtcatgcgtttatggcaggtagctggtatttattccccaaagtaataatgttgaagtatgggtctcatcattcccatacacagaaacacaaaacactttgatcataaacttttttcttcagaagccaaactaacttgcagaataatagagccactggtttaatgtttcctcaagataggttttagtgtaagctagtattctgtgtgttcgtagaaatgattcaatacctgcagctggtgaattaggaattgtatttgttgccttttttatattagatgaggtgcaaaaattttaatgctagtcagtatgcaccaccacaggaaagttagatcccattagcacttgaaactacagttttggaaacttaggctaagttaatttggatttgttacttgattcacctactgaccttttcttttgtttgaagtgcttatcagcataatgagctaagtgtcatgcatatttgtgaagaaacacccttttggtcccttgggacaagagtctcctgacttatgaagccagacggttgctatgctaacaggtggatacggcacgtgttgacacaagaattaacacaaaaaaaaaaaagggggctatcgggacacttaggagataataacggccgaggtggctggccaaactatatcnnnnnnnnn

SEQ ID NO: 25611 - DNA, 3855 bp, Homo sapiens; identical to SEQ ID NO: 20695
  misc_feature 1, 2, 3854, 3855: n = A,T,C or G

SEQ ID NO: 25612 - DNA, 6135 bp, Homo sapiens; identical to SEQ ID NO: 23942
  misc_feature 1, 6115, 6116, 6117, 6118, 6119, 6120, 6121, 6122, 6123,6124, 6125, 6126, 6127, 6128, 6129, 6130, 6131, 6132, 6133,6134, 6135: n = A,T,C or G

SEQ ID NO: 25613 - DNA, 322 bp, Homo sapiens
  misc_feature 228, 229, 230, 231, 232, 233, 234, 235, 236, 237, 238, 239,240, 241, 242, 243, 244, 245, 246, 247, 248, 249, 250, 251,252, 253, 254, 255, 256, 257, 258, 259, 260, 261, 262, 263,264, 265, 266, 267, 268, 269, 270, 271, 272, 273, 274: n = A,T,C or G
  misc_feature 275, 276, 277, 322: n = A,T,C or G
acagcagtctttggctgcctataatcagaggaaagccgatttggttaacagatcaattgctcagatgagagaagccaccactttggcaaatggggtgctagcttcccttaatcttcagcagcaattgagatgtgtctggagacactgtacgcgggggtgttgaatgtaactttgaagtagggaatggccttttaaatctgagagagaacatttgaatccttttcaggnnnnnnnnnnnnnnnnnnnnnnnnnnnnnnnnnnnnnnnnnnnnnnnnnngataagtgtatatacataaatacactcttctagagtggtttatan

SEQ ID NO: 25614 - DNA, 7388 bp, Homo sapiens
gctctgggtctttccagctggttgtcatttcactcggctcggtcctgaggagaaggactcagccgcggctgcgggacccgggcaccgggaggcggtggcggcggcggcggcggcagcagcggcgacagcagaggaggaagaggaggaagaaggaaagaaaaagaagaaccaggaggagtcctcaacaacgacagcggggactgcgggaccagggtaaagcggcgacggcggcgacggcccagcaaccgtgaggagaaacaaaagccttctaaattatagtttaaaaaaaaattctgggggaaaagagagagaaagccgaggggggaggcccttctcctttaaaataactacggtagtgggtttttcctttttttcctcttttttccctctctgcggagaatcgaactgagggaactgaacaaaccgcccctgggtcccatgagggaaaaaaaccccggagccgcagagaggggaagaggcagaaaccgcaggaccttccaggtcgccccctcggtccccgcacccccaggccgcccgctcaccctcgtcgagtctcgctaatccctcctgatcgcgacccccgcaagagggagaaacgggtgtttccaacccctttcatgggggagaggaagccgcggggagcccaggaacagcgaccgcagcaagatctgcacccggagcctcaggaacagccccagaggccaaaactgcaccctgcgaaagagcagaaaacaggaccaggaatagcagaaacctccctgcaatcatctttccattagtcaatgctgatttcctctcccgaaaccaggaattcacttcccaccccagataacctaatataatctatatatataaatatataatatataatgttcttaaattattcctgatttttttttaaccaagctgccaaaaaaagaacgtattcccctcttagtcctattctaatttttatgtgagtgaatctaaactgctgaggaaaaccatatgtgattgttaaattatatatatctatatttttactccgcgcaaggcttattcttctacatccatagatgcttgagaagctctgtttttgtcattcatgtacattttcctttggaaaaagaaagcgcctattttactaaccaaagacttgatttttaccctcttcatttttattccctcctaaaaataagcccaattggatccaagtcaatgttttaagagatttttttaagagttgttttttctttcagagaccagaattccaaatcagaacaatttaaggtgataagctgcgatctttgagctagctataaataagacatttcaagcaagcaagcaaacaacttaaatttggggtagaggaaaaaaaaggcgtgagacatcaggttgtcattttttattgtgagattctgctcctaaaaataataaatgggggattacgggtttggagtgctagtgcaaagcaatactgggaataaatctgcttttccagtcagattccatccacatctgcagcctccacaccatcaccaaaatgccacccccagccctgctgcttttataaataataacacagctgccaatggcagcagtgctgggtcagcttggctttttcctgctccagctacccataacattcaggatgagatcttggggtcagaaaaagcaaaaagtcagcaacaggaacagcaagaccccttagaaaagcagcagctttccccaagtccaggtcaggaagctggaatactgcctgaaacagagaaggcaaaatcagaagaaaatcaaggggacaattcttcggaaaatggcaatgggaaggagaaaataaggatcgaatctccagtgttgacagggtttgattatcaagaagccactgggctaggtacttcaacccaacccttgacatctagcgcatcgtctcttactggtttcagtaactggtcagcagcgatagcgccttcctcctctacaataatcaatgaagatgcaagtttctttcaccagggaggggtccctgctgcttcggctaataacggtgctctgttgtttcaaaatttcccccatcatgtcagccctggctttggaggcagcttctctcctcagatcgggcctctctcacagcaccacccacatcaccctcatttccagcatcatcacagccagcatcagcagcaaaggaggtctcctgccagtccccatcccccacccttcacacatagaaatgctgcttttaaccagctgcctcatttggcgaataatcttaacaaacccccctctccgtggagcagctaccagagtccgtcaccaacaccctcctcttcctggagcccgggcggtggtggatatggtggctggggaggttcccaaggccgagatcaccgcagagggctgaatggtggaataacgcccctgaactccatctcgcctttgaagaaaaattttgcaagcaatcatattcagctccagaagtatgctcgccccagctctgcctttgcacctaaatcctggatggaagatagcttgaacagggctgacaacatttttccttttccggatcgccccaggacattcgacatgcactcactggagagttcactcattgacataatgagagctgaaaatgataccattaaaggtcgtctaaactattcatatccaggatccgatagctctctgcttattaatggtcagtcttcactgtttccaatggaagatggattcttggatgatggccgtggggatcagcctcttcatagtggcctgggttcacctcactgcttcagtcaccagaatggggaaagagtggaacgatattctcgaaaggtgtttgtaggcggattgcctccagacattgatgaagatgagatcacagctagttttcgtcgctttggccctctgattgtggattggcctcataaagctgagagcaaatcctattttcctcctaaaggctatgcattcctgctgtttcaagatgaaagctctgtgcaggctctcattgatgcatgcattgaagaagatggaaaactctacctttgtgtatcaagtcccactatcaaggataagccagtccagattcggccttggaatctcagtgacagtgactttgtgatggatggttcacagccacttgacccacgaaaaactatatttgttggtggtgttcctcgaccattacgagctgtggagcttgcgatgataatggatcggctatatggaggtgtgtgctacgctgggattgataccgaccctgagctaaaatacccaaaaggagctgggagagttgcgttctctaatcaacagagttacatagctgctatcagtgcccgctttgttcagctgcagcatggagagatagataaacgggtggaagttaagccatatgtcttggatgatcagctgtgtgatgaatgtcagggggcccgttgtggggggaaatttgctccatttttctgtgctaatgttacctgtctgcagtattactgtgaatattgctgggctgctatccattctcgtgctggcagggaattccacaagcccctggtgaaggaaggcggtgaccgccctcggcatatttcattccgctggaactaaaggataactgcagtgctcattttcaggcctcagaataagtgcactcttctgttcattctgaccccttcctcaacctcttcacgctggcatgtccttttgtagcagtctgtaacttaactatagtataatgaaaagaatgacctataatataggtgttttgtagattcttgtgtcactgcaaacaatatgaactcctttttcgtattgccatcgggttgcatggaagttttattctcttgttttgctggaaaccaagaggatccaaacttcctgcaacattttcttagaggagagagagaaatattaaaagagaaatgaaacaatagagtattttgggtttttaattaaattattgttaataatataacatataagaatacttttattaaaataaccatgcaacaataacactatcggtctatctgacagtttttcccccagggaagtgcttttgccttttcctttcttttttttttttttttttcatcttttttgtctctctcttttttccatccctttttaatttttttaacagcaatggaggaagttaacaatttttaatggaaagagcatgttagagcaaacaaatgcataagcaagactgagcagcattataattaattttcagggttttgaggctgaacataatttcattatccctcaaaaagttaccaccacatcagaaaaaataaaaaaaaaatagtaaagtaggcagagctaggtttattttctcttaaacaatttttaaaattcagaatgtaaaaattgggtaaatttactactgaggggagtgcacttatttatttaacttacttatctggtcaaagccccaggaaacctaccaaagctagaattaatgacaactggtgggaaacctagcatttcctctcctgaagaataaatgtataaatgttatttttgatgtttatatataaactctatatcctaatttactaatactcatcagatgtcagcctttgctctccattttgacgttaaaaaacaacaacagatctagagatacctcaaggatatcatttttgattttgtgttacagtacacttgtagccaaaactggaagacaaaaccaatatataatttggctgctgattggcttacttttagatttaaagttactttgggtatcctgtaatttagttgtaacatagaaaatgaaaaaacagttaaaaaaagtgaagtagttgcaaagtgttttgcactgttgaactaagtaactgtgtaaatctgtgcaaaggtacgtatgtttatcttactcttcctataaactaaaataacattacagtttccgaatttagcatgggacatagtcagtgtttgaagtgccaacttcatcaagtaatgcatgctttattataaataaaattctagctttgaaaggcgttatgtgttgaacagtatgcttcaggggtaaatttaaaatagtctcttgaagccctagtcatggaagtaacttttattttaattgacattctcttattaaatgccctatccatcattaaaaggtttattatcagtgggcaaaacatgaaataatatgatcgaatggcaatcttgctagttgcgctacctaacagtaccatcttggatccttcaaaaccaaagacttgccccagcactgctgtggaaccacctggcttatgacccctatggatgatctttaggaaaagcagccctttacttttaatacaggctttaatgaactatacctgttaagttccaaaggtcaaaatggaggcatttgctgtctaatattcaaacatagaaagggagctgcttttaaagaattccctgcaaatactgaaagcagtcatgcgaatggagggtgctcttgtgtagctggtcagggacttttttttcttttctcctgaactacatgattctaattggaatgttcatttgcctctttttactcttttaaatgcttgtaggtggcttggggtgtgctatcgtgctgttcctactcagtaaacaggtgtgatgagttaacaagaaataacactgtttgagaactagctttgaataataatttttccctttgtacatgacctgctgaatttcggtacagtgtttttgtagctaacttattttgtcatgcacataatgtatatttgttatgcactacttttgtatatcttgtttttccaacagtgaacatttttaggcacacttttcactgacgggatatctctttatgcaatacctcaatttttcatattgcaaagagtagctttttgtacttttattactgagagatcttcatatacttcattttttaatataaataattttaataaattttattttcttatattctgctttttatacatttcagtgctctgcatacattttaaattatgaatgtcgtgcactggcaatgctattttagagtctgcagagaagagaaagcatgttgcttaaacatccttccccagcaccagctattggtgtacctataatttaagaaatagtctatgtaaagtcacaaattaatgaaaaaaattcgcatgaaaatgacagataacactgtagttcctaaaaaaaaaattaaatgcataagcataaggtagaaattaaaataacaaaattgtctacagcttcttactaagtttttaaaattattcataaaatgcagacatttttggtgaatgtttagccatttttaatattaataaattgatgttaagtgtttgattcagagatgtctgctcttttaaattatatataaggaaaaaaaatagcctgccttgggacaggtgtgtaatgttagtgtgcatgactaatgtaagaaattgttattctactaatatttacttgtgattgtgtgacaagtgtgtttacagattattggttacacttcaatttacagggcataaacaatgattatctattactctgaactttatgattacatgttcttcagattacatgggattgtagttgggagttaccatgtaactcaaacataattaacatgtaattagtttacagattgtagggcatcacttcaattcaccaagcatgtagttctagcgcactagcatggcgccagccatgtacttacaatgtagttacagagtaattacatggtgatttttgcaatgtaaaataaagtgtttctgattattttctatgtaaaggaaccctctcctttccccttctggtccctgcgctttggtataatatatatacttctccatacacagacctctgcagaatgcaaaataaaacttgcagtgaatgaatttagcattttatgagagtgctgttggaaagacttgataattcaccccttttgttttgaagagttgaatcttctgttaaaaggtgatttaaaacttgaatgtgatgaattgtggcaagttaacttcaagttatgtgcaatacttatttcaaacttttgaaagatctttgcagtgtaattctttgtttttaattgcagacatttaaaaatgtcattttctactgttaagagtaatcctctttcttgctggtgtttctaaagaaaagaatcagaaatcaatctttctactaatgtaaatttgagattatttttaaaaatggaataaaagaggttttggtcatttgctttattttattattttaaagctactgtgattgatagcattgtaagaatcgggacaatattgtattcaactgttttattttttatatttttaaaatttaaagtataattagtttttataattttcatcagatttttgttatattttttggaagtgaaacttttagcaagtgggtgtctagtttttactaatccctaattt

SEQ ID NO: 25615 - DNA, 1771 bp, Homo sapiens
  misc_feature 1, 11, 1744, 1745, 1746, 1747, 1748, 1749, 1750, 1751, 1752,1753, 1754, 1755, 1756, 1757, 1758, 1759, 1760, 1761, 1762,1763, 1764, 1765, 1766, 1767, 1768, 1769, 1770, 1771: n = A,T,C or G
nccgggagatncctcagactcatccagcccttgggtgctgaccagcagagtcactagtggatgctgaagttacatgagctacatgttaaatatttaaagtctccaaaataaaacaccccaacgttgaccttacccggctgatggttagccccttgctgcctgctccatgtgtcttatgagagcccgtagttacagtgtcctctaatttgaaatccataagttaacaagtctatatcaggtgcagctggctttgattaaaggccatttttaaaacttaaaaactcaacacctcacagattataatagaaaaagaaatggcctcagtttgatctcgttcagaatgacccagattgtttctgctttgggtgcagctgtttagttcagagttatattacagagaattattttctgagataatcttaaactagaatgttcaaaactaattgataattgaagtatcaagatacgtagaacacctcagagatttttcttcaggaacttccacaaactttgaatccttgtatctttatttggtattcatactactagtagcaaaatacaggttttttgttttgttttgttttgttttggcttcatagagtatctcaaattgaaacttttctgcacaaagaataaaattaaggattttataaactcaaattggcacctactgaattaaaatacataaaatcatttaaatataattcagcatatgggaagtaacattgcactaatatggaaatcactgccagagacagtctattttcttttaatttgttactacttagtcacaaaccccacattattccagtttggaattacttattaaggagaattggaaatacatatgcccatgcttaaattttatagctttaatttgtgttatttctttattgacgggaagaggtacatctttttttccttactgaaaacaaatatggattaattgcctcaaatttgtataagtgattggctagtgattcttgttttcagaagggagagtggtatagatagaaaatgacaaagatggcaatatacacttaatgttgttattgtatgttgttactgaagtacttagatttttaaaatttcaaatcctaaatcacttcttgtaggagggttttcattaactgcagtatatacagttcactacatatgggttgtttgagttttttgtgtgctgtatttctttctgttttttaatacctggttttgtacatatctaactctgttctcttttggttgttcagaaactggattttttttttcttaagcagtgcttaatttgtgttttttaattttgattcagaagtagtcccagctcataggtgttcatactgttacatccagaacatttgtcaggctctctgtcagctttcatgtacatatggtatagaaaccatggagttaggcacttcctggattttttttttatgagaaaaatactgtatttaaaatgtaaaataaacttttaaaaagcaggcactaatatatatttcttccagcctttgattacaaatttgtccttgcacatgttaagatgaattatctcctaaaaatatcattgttcttgggagcagtgtatgttactttacatagcagcggttcctgtcatgtgttcatgtcagaatatttttggttttaaactttcttattgcctttggctgttgattagtacagtacaagtgcgatttcaaaaagatcttgaaagtaatatatttaatcaattaaaatgtttatctgnnnnnnnnnnnnnnnnnnnnnnnnnnnn

SEQ ID NO: 25616 - DNA, 680 bp, Homo sapiens
  misc_feature 577: n = A,T,C or G
gtccggcggaatttaaggaccatagtacagctatggatactgaaccaaacccgggaacatcttctgtgtcaacaacaaccagcagtaccaccaccaccaccatcaccacttcctcctctcgaatgcagcagccacagatctctgtctacagtggttcagaccgacatgctgtacaggtaattcaacaggcattgcatcggccccccagctcagctgctcagtaccttcagcaaatgtatgcagcccaacaacagcacttgatgctgcatactgcagctcttcagcagcagcatttaagcagctcccagcttcagagccttgctgctgttcaggcaagtttgtccagtggaagaccatctacatctcccacaggaagtgtcacacagcagtcaagtatgtcccaaacgtctatcaacctctccacttctcctacacctgcacagttaataagccgttcccaggcttccagttctaccagcggcagtattacccaacagactatgttactagggagtacttcccctaccctaacggcaaagccaagctcaaatgtatctccgagctcaaatgctgattntcacacccgctaccactgtggctgctgtacagtctgacaattcctgtgtctcgtcgtcatcgtcatcttcctgtcagtctgcagctactcaggtgagcttgtc

SEQ ID NO: 25617 - DNA, 3918 bp, Homo sapiens; identical to SEQ ID NO: 22949
  misc_feature 3915, 3916, 3917, 3918: n = A,T,C or G

SEQ ID NO: 25618 - DNA, 399 bp, Homo sapiens
  misc_feature 1, 2, 3, 399: n = A,T,C or G
nnnatgtatagggtggctgtcaaagcagaaagatatataaaagtatccagtagcacatactatactgcattgctaggtaaggttcttttcctgacatcctatgcaactatcaaaaatcatatgtctgcaaactgaaaatattagcagaaagaattaaagatgttacagtttcagtattgaaagttttggtcccaaaaggtgctttcgtaaagttatttctctttcatgcattgattgttgcttagctaatcttcatcttggtccagatcagggtcaacatccgtggtgagtctttatgcctattgctgttttctttgcttctgcttttaatttggttgctcgtaaaataggtttagtttttttataatcctgtttaccaagcgttgtgtctttgatgcn

SEQ ID NO: 25619 - DNA, 2410 bp, Homo sapiens; identical to SEQ ID NO: 24226

SEQ ID NO: 25620 - DNA, 1180 bp, Homo sapiens; identical to SEQ ID NO: 22963
  misc_feature 1, 2, 3, 4, 5, 6, 7, 8, 1179, 1180: n = A,T,C or G

SEQ ID NO: 25621 - DNA, 1382 bp, Homo sapiens
  misc_feature 1, 2, 3, 4, 5, 6, 7, 8, 1378, 1379, 1380, 1381, 1382: n = A,T,C or G
nnnnnnnncggggtacttctagaattaattaacgcgggatgtcacatgtatacatatgtaacaaacctgcacgttgtgcacatgtaccctagaacttaaagtataataaaataaataataaaaaaattaaaaaacacaataaaaaataaaaaaaaattcttttgattacaactatagaagatcgtatagtcctagaaacagtagaccgactggaagaccacggcgtagcagaagccattccgacaatgatagaccaaactgcagctggaatacccagtacagttctgcttactacacttcaagaaagatctgaaagcggaaaaagaaccaaagaagggcagttcaagcgaccaaagggtgggtggaaggtgctgcagtatgaatactgtacgaatattttgactctggtctgaaaagataaaagaatgttatcgaaaactacatggaataattgaagtcccttcaagtttgaaagtaagcattttaggacaaataaaaggaaattcaactttgtacttgtggaaactaatccctaaatatgaataggtttatattgattcatgggtaacaggtccataataaattattggaaactaggatgtctgaatatcaaggaagacagccatagtctcttacagtgcctctgttggtctgtctcaaactgaattgggtgggaaaaggtatggtccaatataaaagttccatttttgccattattggcaaatcttgcctttgtttattttggtgccagtgttttctgcttaatcatttgctttgttggcatctgtgtttatttacttgtacaccacatgcagtttacatctgtcttaactactccttcccaggtaaattccaattatatttgacatccagctaagagggcccatctcttctcacctctttcctagtcagtatattcagcaaatatttattgagccttactgtggggcaatcattgtactggataattggagaacatgataattcccttattcaggaaatgtctactgagcccaatctagagagaccatacagatgggccaccataggccggacgggcgggggggactccacacaccaagtctttgaacacaattccgagtcaacaggtacacattgaaaagcacagtccgaccacaggcgagagaacaggtggtgagcattcggcacaaacaacagttccagcagctggagaccatcacaaaacaagacaggatagccacgcagaaaggggcgtaagcacagcacgcacaaagcataacagcgcaacacgcccagcaacgaatagcaccagcagatacggaagtgcagcgcgtacactaagacacaggagcgagcggtactatcccgtgtcgactgcttcctccacagtgcacgnnnnn

SEQ ID NO: 25622 - DNA, 1498 bp, Homo sapiens
  misc_feature 1, 2, 3, 4, 1498: n = A,T,C or G
nnnncgcggcctgttcgtttccgctgtctttcggatgctgacgctctcttcctgtctttgtggctccggaaaggcgtttgggatgccaacgatgaggctgctgtcatttgtggtgttggctctatttgctgtcactcaagcagaggaaggagccaggcttttggcttccaaatcactgctgaacagatacgccgtggagggacgagacctgaccttgcagtacaacatctacaatgttggctcaagtgctgcattagacgtggaactatctgatgattccttccctccagaagactttggcattgtgtctggaatgctcaatgtcaaatgggaccggattgcccctgctagcaatgtctcccacactgtggtcctgcgccctctcaaggctggttatttcaacttcacctcggcaacaattacttacctggcccaggaggatgggcccgttgtgattggctctaccagtgcacctggacagggaggaatcctggctcagcgggagtttgacaggcgattctcccctcattttctggactgggcagcctttggggtcatgacccttccctccatcggcatccccctgctattgtggtactccagcaagaggaaatatgacactcccaaaacgaagaagaactgattggggcttccacagccctcctctcccaagaaatccaggctctccagaaacagggttcagaaaatccagggttcataagcgatcttcttgatcgggactatgcggtaagctgtgcccatgaaggcgcactgtgggaacgtgctgggcacaagaatgaaggacgtgacgccacgttgagttccacccgtgtcccccccttcgaagttgcgagcccacaccacaagccaccaaagcatgcaacaacacaggagcgcagagcagcaccagcgacacgagaagcgccaagacgcagaagcccgcccgacaacgggcgagcgcagccggcccagcgccggaggcgagcaccccgccacgcgcagcacgcgagcaaaccaagcacccagagagcaccgagcacaggggaccacgagacgacggacgagccagcgagcaggccgacggagcatacggcgcgagtagcggagcacgcagcgagacgcggaccgcccgaaggggcacgcacgccacgacaccgacaaggaaacggagacaacaccccgcacccaccaaacgagacacaaagcggcaggacgcagagcgacaagaccggcgcagcagcaacacaccaaaccgagcacgacacgcagaaggacaacagaggaaggacagggcggtgagagtgcgccgacaaagacgagatgccgcgacgcggacgaagcgagcgagccagcgaacacatgaaggcacgcagggacaacgagccgagacgacgcagaaaacgaccgagagaccaggcccgacgcacacacaacaaagcgaagcgacacaccaacacagcgcaagcagaagccacagccacagacgagcccagaagan

SEQ ID NO: 25623 - DNA, 3825 bp, Homo sapiens
  misc_feature 1, 64, 148, 3825: n = A,T,C or G
natcaagtgttctcaatgctaagttatatgtgttagtgtcggggaaatagtttgcagataatgnaggagtacccctacaactatatgtccttagttcttacagaacctcatagtttgagaacaaagctgatgcaactgatttatacanaatgaactttggcaagaaaaataacattaacctcattgtgtttggccgggctttgcttaatgatggatcattgttttgtgaggagacagaaaaaccctcagattcatcctttactttgtgtttgacacattcccctttaccttcaacctcagaacccacaactgatcctcaagctagtttatctccaatgtctgaaagcaccctcagcattgctattggcagttctgttatcaatggtttgcctacttataatgggctttcaatagatagatttggtataaatattccttcacctgaacattcaaatacgattgacgtatgtaatactgttgacataaaaactgaggatctgtctgacagcctgccacccgtttgtgacacagtagccactgacttatgttccacaggcattgatatctgcagtttcagtgaagatataaaacctggagactctctgttactgagtgttgaggaagtactccgcagcttagaaactgtttcaaatacagaggtctgttgccctaatttgcagccgaacttggaagccactgtatccaatggaccttttctgcagctttcttcccagtctcttagccataatgtttttatgtccaccagtcctgcacttcatgggttatcatgtacagcagcaactccgaagatagcaaaattgaatagaaaacgatccagatcagagagtgacagtgagaaagttcagccacttccaatttctaccattatccgaggcccaacactgggggcatctgctcctgtgacagtgaaacgggagagcaaaatttctcttcaacctatagcaactgttcccaatggaggcacaacacctaaaatcagcaaaactgtacttttatctactaaaagcatgaaaaagagtcatgaacatggatccaagaaatctcactctaaaaccaagccaggtattcttaaaaaagacaaagcagtaaaggaaaagattcctagtcatcattttatgccaggaagtcctaccaagactgtgtacaaaaaaccccaggaaaagaaagggtgtaaatgtgggcgtgctactcaaaatccaagtgttcttacatgccgaggccaacgctgcccttgctactctaaccgcaaagcctgcttagattgtatatgtcgtggctgccaaaactcctatatggccaatggggagaagaagctggaggcatttgccgtgccagaaaaggccttggagcagaccaggctcactttgggcattaacgtgactagcattgctgtgcgtaacgctagtaccagcaccagtgtaataaatgtcacagggtccccagtaacgacgtttttagctgccagtacacatgatgataaaagtttggatgaagctatagacatgagattcgactgttaaatcagtgggtcttttaaacctactcctggtagggaaatagctacagttttacggcagctatggttctgttggtttaacttgccggagctcctgcatatagatcacttgtatcaagtgttttcattgctaagttatatgtgttagtgtcggggaaatagtttgcagataatggaggagtaaccctacaactatatgtccttagttcttacagaacctcatagtttgagaacaaagctgatgcaactgatttatacaaaatgaactttggcaagaaaaataacattaacctcattgtttatggccatgctttgtgcataatcaaagtttatgattaaatgtaaggaagtggtatctagtcagtccataaagattgtgctaatttttttgtggaaaagtagccattagttcaggaaactcagtgctgccttcagatgtcattgatgtttctcctgttggaaagctgatgtgtccagctcaacctttgtgctgacatcataccatttctgatcatgaaatattggctactggtgtatgtagcagttcttaaatcagcagtattatgaaaaaaaattccccctcattagaatgtttaagaaatctttttaaaaagtaaaattctgtcagactacaaatgtttagctgttactcatttctagggaagaaattctaaatccctccttcactttgagcagtgttctaattggataaatgaaggagagtagttttattctgaaggtaattaaatttagactatgtagtatgtgacagaatttttttaaaattataaaaagattttatttagtaattgggatttacttaaaataattttggaataatgctcccagacttgcccagatttgtgtattgtacttattgccactggccgccactttgacttattttctctaatagtttatttgccacagtctttattttgaatatgctcctagtttttttttagggtgctgttcattatgaaggcttctttatagaggcctaataagaatgcctttttataaagcctgtgcatttaggtaggttgaagctaggaggattttctttagaatgctcttttgcatgtaaagcacaaagtatgtttcagtttaaatgcacttcttccggttaatttttatggggaagacaagtgagtcacaaacattctgttgaagggaaatctagtcagttgcttgaaagagcacagcccaaataaaacaaggactgactaggtgtaatgaaataacctgtgatttaaaagaagagctgcagctttgacagtgcttatttaaagaaaaatactgctggaaaatttccaatttctactacgttcaccatctctagtaagatctgacatatgctgaagttatgttttgatttggcacacagcatgttcaatgatggttactcgcctagtacaagacatggagaagaaacctttggacacagagcagatgacacctccttctgttttgtagtgtatcctggtgtcattttctgtgaatgtggtcaggtagagttgtttttgttgttgttgttgggcttttttttcttttttttttttggtctcttttggtggggtgggggtgggctaaagccataggaagaaaaatgtgatgtatgtgtccagtatgtactattttgtttttgttttgcaagaagagttgaactatttttgataacaagagtaaatggtggaaaatgcttcttagttgtcttgtctttatttgctttccaagatttggaattttatttaattcctttaagtgttagcagtgtcttatgaaacatgtatttacctaacgtttgtaacagttttgtgttgaacccagatgccctgctatataaagttgtaaatctgttctttattcactaatgatcactgcaaaaatgattagaaatgagattgtacacatggatgaggatatattttgcaaatcgaccaaactttcctaatattatgatcttaaaattcatagagtactttattgcttcccaagtttgataatcttgtgggttttttttttttttttgatgcatgggaggttggcaatatagacaaagtggaaatcattagtatgtgagggccttgattgttatgtaatattgccaatgatgaattcaggttgtttttagcacaagtttctcttttttatgctggtattctcactgccacatttttggaaacctgtattacaccttaaatctatcaataaatgatagttttctaattctatgttgtagaatactgaagagtttgggataatgtgatagccgggaactctagagn

SEQ ID NO: 25624 - DNA, 381 bp, Homo sapiens
  misc_feature 106, 107, 108, 109, 110, 111, 112, 113, 114, 115, 116, 117,118, 119, 120, 121, 122, 123, 124, 125, 126, 127, 128: n = A,T,C or G
ctgcacagagatctacaactctcacaactcgcagatatagggtcactgcttcctttagcttccgggaaagacattccatacacatgatatcctgcagagggaggtnnnnnnnnnnnnnnnnnnnnnnngtatttacagttgtttcatggacactggccagtctacaagcagagcactctcatggggagcaccagatgagttccagccgcagttcttttataagctttaagtgcctcatgaagacgcgaggatctcttccaagtgcaacctggtcacatcagggcacattcagcagcagaagtctgtttccagtatagtccttggtatggctaaattccactgtccctttctcagcagtcaataatccatgataaattctgt

SEQ ID NO: 25625 - DNA, 573 bp, Homo sapiens; identical to SEQ ID NO: 24623
  misc_feature 569, 570, 571, 572, 573: n = A,T,C or G

SEQ ID NO: 25626 - DNA, 1223 bp, Homo sapiens
  misc_feature 1, 2, 3, 4, 5, 6, 7, 8, 9, 10, 11, 12, 13, 14, 15, 16, 17,18, 19, 20, 21, 22, 23, 24, 25, 26, 27, 28, 29, 30, 1219,1220, 1221, 1222, 1223: n = A,T,C or G
nnnnnnnnnnnnnnnnnnnnnnnnnnnnnngaaaaaacacacaaggggggcccctatcagcttcgggacacagactctgcctggactcctcttgcgggacagccgatgattgttcatgttataggtaaactagtggccgaatttgctcgacgcttactcgtgccagggagttcgctggtaatccccctttagcaagagtatatctagccttcaaaaggataccaattcttcccagagatatacccacaatttcataccagcattggttagtaacttagaagaattataagcaaatctatgttgcaaccagtagaaatggataaatgactgtagtatatgtataaaagagtcaaacagaggaaatgaatgaactagaactacatctttgacatatatgaatacttttcaaaagaacaatctgcttgagatatatacaatatttgtcctatttatacaaggtttaaaacagagaaacatatttataaatgtgcagtgatacctgtgttgcaggacttttcctcagtcagctaaaggcatctttgtccgtcccacagccacaaaaatttaggcttgcagatggtttgaagggtgagtgaagcagggttttattgggtgaaaaggcaaaaacggggaaacagggatgctctgcaaagccggagtcctgctagagcgcttcctgccaagccggtggaatttcaggttccacacaggaagaggaggggccagctgctcccagctacaaatgtcatcaacttcctgaggttccaccctagtgcacaggccagatggagttttccagagaccccctcccacctggctgtcttattcccccgtctaaagaagtacatataactgctgttagaataaggataagcgtaagaatgaagaccagtgttaactgcttcctgatgacagggggcactgttttggggaagcatcagtcagaggcccatgtaagggttccccgcagaaggggccatcctcagaggctctggttgggtgactggttggagtttgatggccaaagatgtcgcaggacttttccttagttcagctgaagacggggtccttgtctgtcccatggccacaaaaatttaggctcacaggctgtttgaagggtgagagaagcaggacttttttgggtgaaaaggaaaaatgggggaaacagcgatcctccataaggtcagagtccctgctagagagcttctcacccacagcnnnnn

SEQ ID NO: 25627 - DNA, 1782 bp, Homo sapiens; identical to SEQ ID NO: 21380
  misc_feature 1766, 1767, 1768, 1769, 1770, 1771, 1772, 1773, 1774, 1775,1776, 1777, 1778, 1779, 1780, 1781, 1782: n = A,T,C or G

SEQ ID NO: 25628 - DNA, 806 bp, Homo sapiens
  misc_feature 1, 2, 3, 56, 805, 806: n = A,T,C or G
nnncgagaccagtctggccaacatggtgaaaccccatctctactaaaaatacaaanattagctgggtgtggtggcaggcgcctgtaatcccagccactcaggaggctgaggcaggggaatcgcccgaaccgggaggcggagaggttgcagtgagctgagatcacgccactgcactccatcctgggagatggtgtctcactctgtctcaaaaaaataaaaataaaataaatctttctggctgctcctccttgggctagataattcttatagatagcaagggttcagctggaagatttctttgatatacaaactaaccaattcagagctatattccctctatctggcatggacaccccaagagacaacattccagtgtcctaatcaccccatggccaggtaccagacaactagggagcacccctataccttattcaaagtagccaatcctaaactgttcactcagccctgcattgcctttcccaaagaaactcaagtaacggcagtggcctaaaccttcccctcttctgtcttctgcctcctgcccaccctggtgtctttcccatgtagtcctatgtggcataatatgtctcctgtctctaggacctgtaagcataatagactttgttttcctgagcctctcctgtgtctcctcttgtggctatacctgacccaccctctaaagaaaagaatagaaaacattattttgttgctttaacagccatatttttctaagaaggaggcttctctagaatgtttgattgagaagaattaaaaataccagttaacctgatatcaccggacgcgnn

SEQ ID NO: 25629 - DNA, 974 bp, Homo sapiens
  misc_feature 967, 968, 969, 970, 971, 972, 973, 974: n = A,T,C or G
gcgtccgccccgcgtccgcccacgcgtccggactagttctagatcgcgagcagccgcccttttttttttttttttttttttttttttttttttttttttttttttttttaattttaaagaattttaatacaaacttaatataaactatttcagtccctcttaacatgtaagacactgactcaaaatacttttataccgtttttttcaagtattgcacaatataggtacaaaattaatatttacgattacatttttcttccataatatatagcaaaaatctttaaacttttaacagaaaatacatttttttgaaaaagcaagtattcgtacattttaattccaccactaaaggaatatcctgtacacaatttttagaatagttgatgtctttaagatggatattttacaatttcagtaaaaaaaatacaacatgaagctgctgctgtcacagatcactgtagtaaaaagatataaatgcaataccatgtcgtagaaacaatatatatatatcctctgatattttacaaactttgtactaaattaaattatacaattagaaaagaccaataaacccacttattagtgccaatttttataaaaaaaaatcagccatgtccttgctatatcttaaatactgtaagaggccatatctgagagtatactttaaaatatacagtcagtataaaataactttgtgcttggttggcaaatgaaaaatgatgcatgttttattattatttttttaaccaagcttgaatgtatccttactataagcttaaaaaaaaaaattctcaaggaggtgaaaaaaaaaatcccccttgggcccgtgcattttaacttgtacgatacattttcttttttttagttagccataacaggcgggaatggcgggtaagaatacggcatgtcattaaagctaaaatccaagccatctacaaaagacttctcatggaggcctctataggcnnnnnnnn

SEQ ID NO: 25630 - DNA, 2947 bp, Homo sapiens; identical to SEQ ID NO: 24719

SEQ ID NO: 25631 - DNA, 1357 bp, Homo sapiens
  misc_feature 1, 2, 3, 4, 5: n = A,T,C or G
nnnnnaggctaggtacgaggcgggtgttatcaagtccagcttgcgaccgtatccgctagcgcggcctgggatgcgcttgggctccctgttcgttcccacatgcagggcagcacaaggagaatgggcgtcatgactgatgtccaccggcgcttcctccagttgctgatgacccatggcgtgctagaggaatgggacgtgaagcgcttgcagacgcactgctacaaggtccatgaccgcaatgccaccgtagataagttggaggacttcatcaacaacattaacagtgtcttggagtccttgtatattgagataaagagaggagtcacggaagatgatgggagacccatttatgcgttggtgaatcttgctacaacttcaatttccaaaatggctacggattttgcagagaatgaactggatttgtttagaaaggctctggaactgattattgactcagaaaccggctttgcgtcttccacaaacatattgaacctggttgatcaacttaaaggcaagaagatgaggaagaaggaagcggagcaggtgctgcagaagtttgttcaaaacaagtggctgattgagaaggaaggggagttcaccctgcacggccgggccatcctggagatggagcaatacatccgggagacgtaccccgacgcggtgaagatctgcaatatctgtcacagcctcctcatccagggtcaaagctgcgaaacctgtgggatcaggatgcacttaccctgcgtggccaagtacttccagtcgaatgctgaaccgcgctgcccccactgcaacgactactggccccacgagatcccaaaagtcttcgaccctgagaaggagagggagtctggtgtcttgaaatcgaacaaaaagtccctgcggtccaggcagcattagccatcgtgccctgctgaggggctggctgccttgagtggcctgatcgccacagcccttcttggaagaaaggcgtccgtgtttcaggttccacgcgagtcacctctttcgtcttaatgttcaccgtccacagctttggaataaaccatcctgggaaggttgctgcaacctctagatgctatttccatcacaaaacacagtgggtggggaccgcacgcggcgcccccgaaaaaagctttaaagcacactcgttggggcgcggcgaccacagagcggtaacgcaacacggggccacaacggtgtcacaaggaagaccgtgggcccagacaccagtctctggcgtttcccccaaaaaaaagcgccggggggaaccgcggttctgaacaactccagatggcgcccgcgaccgcaacggcgcatcaccgcggcgccacggcgcgaattatacgcgccgcgtgga

SEQ ID NO: 25632 - DNA, 2391 bp, Homo sapiens
  misc_feature 2386, 2387, 2388, 2389, 2390, 2391: n = A,T,C or G
gtggtcgcggccgacgtaagcaggcagtgcagcctagagacgctgacaaaggagcggaggagcagtcgcagctgctttccgaggaagccggtgttgccgagattgccaaaatgctttggagtttttaactgaatctaagaaaagtccaaaatagatttgagactgtaaaaacagaaactgcagcaagggggattcagtgccaatgcatcaacaaaaaagacaaccagagttagtggaaggaaatcttcctgttttcgtgttccccacggagctcatattttatgcagatgatcagtcaacacataagcaagtgttgacactgtacaatccctatgagtttgccttaaagttcaaagttttgtgtactactccaaataagtatgttgtcgttgatgctgcaggtgcagtaaagcctcagtgttgtgtggatattgtgattcgtcatcgagatgttcgatcctgtcactatggtgtaatagacaaattccgtctccaagtttccgagcaaagccaaaggaaggctttgggaagaaaagaggttgttgctactcttctcccatcagcaaaagaacaacaaaaggaagaagaggaaaaaagattaaaggaacatttaactgaaagtttattttttgagcagtcgtttcaaccagaaaacagagctgtatcctcaggacctagtttactaactgtcttcctgggagtggtgtgcattgcagccctgatgctgcctacactgggggatgtggaatcgctggtgcctctctacctccacttaagtgtgaatcaaaaattagtggctgcttatatcttaggtcttatcacaatggccatacttagaacatgagcaaggatttcaattgacttctgaagtaaatctgtcttgaaaatatgaatgtggactgccttttatctctatttcactccattaacatgcaacaaactattgaatgatttcaaataattgcaaatgtataatatatattttaaattataatttaatttgaaggactgcagaacattattttacagacagcaaggatgcttctgagtgacacctaggaaattatttgaagaaattctttttatatctatacctgttgtgtaagaaactttaaaacatttgttattttctcacctttttttctaattcactttgattgctaggggtcatgtatgcttcgaagttacaggactaaaagagcaaactgaccggcctaaaactaaaatgacatttattccctagctacaaacatcagcgttattatgttaattataccttgccctctatcattataaatggttgccatggtgtttctaaaaataagtgttttaccattaatgtgtagagggcaaacaaagcataaagtactaagggatcatgcttatcctagggtctcacagaagagaggacatatttaattaatcttgtgaattacagaacaggttgtggtccagacaccaagaatcataggggtttttttttaaaaaacctaatagaagtagggtgacctctctctttggtctaagagttctaaaggaaggtaggcatctgtttaattagttggttcaccctggctttacctctggttaatgctttgtgttaataggaaggaaaaatcactttatcttttcttccaagcccctccctgcctgacttacccagactgggattaccagataccaggtgatttatgtggagatgatttttcacctttaaactctaagccaagtgtaagaaactcttgatagctatgtctattttatatcagtcactgagacttttttttaagtttttatttattattaagacaactttgccaaaaaagtcccctaagcacaactatttacatttctttatagcctcttctgatctctaacacatatgcagttttaactgttattttcatagtaactgatcttttgtctaaggatttttacctgaaagcacaatgtattgagtctcttgaaaatcatctttcagatctttttacagaatgaacttatgcactgctactgtagtattctcaaggaatatatgtaaacacaaatgtatgcctgaggttggtttttgcagaaaacagtctctgcttctaaaaacttctatgtctagtcttccataggaaatcctcactgtttaaccatgtgaggagcctaagtcattaaacggatcatgtctgtacattgtgtaatgaatgaaaagcacataaatgtaatctactttgaactttgtaaaaatgatgtgtggaggctattcttgtttctccatctcaagtcctgtgtgtgcacgtgtgtgcaagtgcacatgtgtgtgtgtaataacacattgtaaagaacagaaattactttaaaaaataaacagaaatggagacctgagcttcacattgannnnnn

SEQ ID NO: 25633 - DNA, 2587 bp, Homo sapiens; identical to SEQ ID NO: 22953
  misc_feature 1, 2, 2587: n = A,T,C or G

SEQ ID NO: 25634 - DNA, 506 bp, Homo sapiens
tgagggagagccgagggaaccagcgcggtgcctagcggaactccagggctggaatcccgagacacaagtgcatctgctagctgttagcacttggcagacggagttctcctctagggtagttctaactttgggtaataatgtttgtcagctacctgatattaacattgctccacgttcaaacagcagtgttagcaagacctgggggagaggtaagccaaataaaatatcttgtcagaagttgtattttttttcagcattatatttcctcttctatctaccaagagggatcagggaatggaattttatggggtgcaaagagtaatgctttatattacttttgtaggcttctcttgccttttcttatatgaagacttcttttcttcttgaagaattttatactttctaaaatgtcattttgaagctgtctgtgcagttgccacactgggaagttgctctggccttggtgacagatgcctgtagcacgcacgcttctcctgctgtagcag

SEQ ID NO: 25635 - DNA, 1380 bp, Homo sapiens; identical to SEQ ID NO: 20118
  misc_feature 1380: n = A,T,C or G

SEQ ID NO: 25636 - DNA, 776 bp, Homo sapiens
  misc_feature 1, 773, 774, 775, 776: n = A,T,C or G
ncacaagggttttttttacccctgggagaaactaagtggtgtggtttcgctgaatagattttgctaagtactttaagcactgcagatgctccagtaatatgcccataagttcctttccaatttcaattactgggaaaatatacatatggacaatagatggatgccacaataaaaggctggcagcctaaccctcacatgaatttttccctacctctatttagggtgacagtggagggcctctggtttgctttgagaaggacaaatacattttacaaggagtcacttcttggggtcttggctgtgcacgccccaataagcctggtgtctatgttcgtgtttcaaggtttgttacttggattgagggagtgatgagaaataattaattggacgggagacagagtgacgcactgactcacctagaggctggaacgtgggtagggatttagcatgctggaaataactggcagtaatcaaacgaagacactgtccccagctaccagctacgccaaacctcggcattttttgtgttattttctgactgctggattctgtagtaaggtgacatagctatgacatttgttaaaaataaactctgtacttaactttgaaaaaaaaaaaaaaaaaaaaaaaaaaaaaaaaaaaaaaaaaaaaaaaaataaagaggggaaaaagaaaaaaaaaaaaaaaaacctgggggggggcccgggtcccaatttgcccttttggggggcggtttaacatttaatgggccggcgttttacaacgtcgggacnnnn

SEQ ID NO: 25637 - DNA, 1077 bp, Homo sapiens
  misc_feature 1, 2, 937, 938, 939, 940, 941, 942, 943, 944, 945, 946, 947,948, 949, 950, 951, 952, 953, 954, 955, 956, 957, 958, 959,960, 961, 962, 963, 964, 965, 966, 967, 968: n = A,T,C or G
nnctaaggcaagacaaggtgaagagagaagacgcagtacgtgtcgccggccggcccagtgcgacgcagaacccgtgtaccggtgaggacggaccggacagcttcagaccgtcttcctggagtggggtcaaaactaggccaccaccggggacatgcaaccccaatgaaagaagtttaccaattctagcccacctcctataggggaagttcttcaagctctcaggacacagcagacattggatgatgggcccccccagcattaaaccagccgcaatacaattctgggataaccaccgcggtagacagaaacagtattcgcatgactgagaatcattttttagtgatcattactatctcattattcttgcttttatttctttcctcggtgtcctcttccctcttttttaatcagttcttaagacttcttttctgtcccaaatccagtaaagttacactctgaagggatatcatcctttccaacgggccatctaaggcccagctaattatgccttgccttggggtctctactgagaaaaattctgtgacttgaactaaatatttttaaatgtggattttttttgaaactaatatttaatattgcttctcctgcatggccaaactgcctattctgctatttaaaaaccctccatgactttattttctactgccgcctttttcatgtgccacccaaatgaaaatgtttaaattaactgtgttgtaccaatggtaccccacaccaactttttttaaattagtaatacttttgtttaaagttttaagtttgccttttgactttttttgtaaggatgtatgttgtgtgtttaacctttattaactaacgttaaaagctgtgatgtgtgcgtagaatattacgtatgcatgttcatgttctaaagaatggctgttgatgataaaataaaaatccgctttcatttttnnnnnnnnnnnnnnnnnnnnnnnnnnnnnnnncccaggggccttcagtgagacccagtgctgtgagggcttcaggggtgacccaacacattcctagctgtggtggccatggggagatactcctactgcttgaagaaaggag

SEQ ID NO: 25638 - DNA, 3209 bp, Homo sapiens
  misc_feature 3208, 3209: n = A,T,C or G
tatagggagtcgacccacgcgtccgtccttctctgcatcgaaggatcaggaagtttgtgctctctgcgtggctaagtttttcacctactaggacgggggtggggtggggagaacaggtgtccttctaaaatacagcacaagctacagcctgcgtccagccataacccaggagtaacatcagaaacaggtgagaatgaccactttaactcaccgggcccgtcgcactgaaataagcaagaactctgaaaagaagatggaaagtgaggaagacagtaattgggagaaaagtccagacaatgaagattctggagactctaaggatatccgccttactcttatggaagaagtattgcttctgggactaaaagataaagaggggtacacatctttctggaatgactgcatatcatcaggcctgcgagggggcatcctgatagagctggccatgcggggtcgaatctatctggaacccccgaccatgcgtaagaagcgactactagacagaaaggtactgctaaagtcagacagcccaacaggtgatgttttactggatgaaactctgaaacacatcaaagcaactgaacccacagaaactgtccaaacatggatagagctactcactggtgagacctggaaccccttcaaattacagtaccagctgagaaatgtacgagagcgcatcgcaaagaacctagtagagaaaggtattctaaccactgagaagcagaatttcctgctatttgacatgactactcatccagtgaccaatacaacagagaaacagcgactagtgaaaaaacttcaagatagtgtactagagcggtgggtaaatgaccctcagcgtatggacaagcgaacactagcactcctggtgctagcccactcctctgatgtgctagagaatgtcttctcctctctgacagatgacaagtatgatgtggcaatgaatcgagccaaggacttagtagaactggaccctgaagtggaagggacaaagcctagtgccacagaaatgatctgggctgtgctggcagccttcaataaatcttaaagccggcaggtggatttctccttttcccctgctggctggtgactgtcagagaccccatcactgagttttgtgtgatgagatgttttcatcatttttgtttccttttcttgaatcagacttgtgatttggggagagcaacttcagggcttctccatagaccttgaccattataagcagaccttatttctccctacacttccactccataggtaaataaactgggtgaacccacacacacccaatgaacattttctcccatttggtggtttagtttcacccagtgtgcttttggataagcagaaatatctaaatgggattttgagttctccagctatagaatgtgaatgagataaaaagtgaactatctattatatttttctgagtttgttttctatcataaatacatgttttcacagcctttgtctctcagactctgctaaataatgtagcttattgaaataactgtcgctgaataaggagcaatgagaaacaaaactaatttttggagcagatggtctctggaattgcatatcctgctagtgattttctcatctttccttttctaacctaatgagaatgtcccagattcaattacctggatgtcaaagtcctagagccagaaatatattctctcatccctcttagcattctcttgctccctcattcactagggcaaatgtctaaatgaagaaaagtctctctcaacacctcgttcatgcaatcagcattagaatttgtaaggaaggaaggggggtggcatgaaaatttccattcttggggtatatgactgtcctgtttcccccaggccactttttttttttttcttttgagacagggtcttgctcttgcccaggcaggagtacagtagtgcaatcacagctgactgcagccttgacctccagggctcaaggatcctcctgcctcagtctcccaactaagtgggactacaggcacgtgccaccatactcagcttttttttgtttgttttagacaagagtctcgctttgttgcccaggctggtcttgaattcctgggctcaagcaattcttccacctcagcctcccaaagtgctgagattactggcttgagccactgcacccacccctccagactactttaaatgtctctgctctgactgaattgaaggaattgtaagtttcagttgctgaatatatcagtatatctgaactccggatctttttatttcctatttttggcttcctacataaattaataaagtctgtctatatttaaggtttctgggagtagttttgtctatatttaatccatagatgtgctcctagtcatcagtcttatttcagtaaaaccatctttctggccaaatctctaacacgttttttacttcagtagtgagggcaatgagaagctttattaagaaagatcctatttaaagggctaatttggtattgaaagcatgctgatataaagtccagtatttgaggatataaagaggatgtgcactgagctgtgctgatgttcagcatttattatactttaatgggatagtgcttcttgaccattatagaacaacaaactgtcaaagggttaatacagatgacccagacctgacattaaatcctcttgattagaaataattaaatgaattatttattcatttctctcctctgccaaatctacttagccccacaaaaatgccccagctcagttaacatttttttgtttttcactttaggtatctcttaggcaaatagagatataaattgtaataggaaacagtctctaaatgtgaggctgaatacagcttcagtctggctctctaataggacaaaagccagtccatgtgttgtctctaactgatttagctttttcttttctttgaacaattcggcatgaattgaaaccaggttttcctgtggaaagttatagcttgattgggagatagaagttgaattgagttctttcttgcaactcttagtgtttatttttatatctcagtaagacgaggataccttcagtttgaatctgcataatgttcactgccaaactccttctcatttaatgcttatggccttcacatttctgtataataaagatcaattatcagctcaaaaaaaaaaaaaataaaaaactcgaggggggggcccggtacccaatttcgccctatagtgagtccgnn

SEQ ID NO: 25639 - DNA, 853 bp, Homo sapiens
  misc_feature 663: n = A,T,C or G
cgaatttaggtgacactatagaagagctatgacgtcgcatgcacgcgtacgtaagcttggatcctctagagcggccgcctactactactaaattcgcggccgcgtcgaccggaattgtactttgagaagggggagtactttgtggagatgtactaccggaatgagacgcagcacgagccgtatcccctcatgctacctggctgcagccccagctgtcctctggagaggtttgctgagctggttggccctgtgatccctcaagactggtccacggagtgtatgaccacaaacagccatcaaggtcctgctgaaactgcccactctgcaagaagaaatcatgatatagctttgccatgtggcagatctacatgtctagagaacactgtgctctattaccattatggataaagatgagatggtttctagagatggtttctactggctgccagaatctagagcaaagccatccccgctcctggttggtcacagaatgactgacaaagacatcgattgatatgcttctttgtgttatttccctcccaagtaaatgtttgtccttgggtccattttctaagcttgtaactgtcttctagcagtgagccaaatgtaaaatagtgaataaagtcattattaggaagttagaaaacaaacaaaaaaaataanagtacaacactgactgctcagacacatttaggttcagggtggacctttgtgtcttgtcaagatgtctaggcccggctgggcgtggtggctcacaccagtaatcccagcactttgggaggctgaggcgggcggatcacgaggtcaggagttcgagaccagcctgaccaacacggtgaaaccccgtctctac

SEQ ID NO: 25640 - DNA, 3983 bp, Homo sapiens; identical to SEQ ID NO: 21101

SEQ ID NO: 25641 - DNA, 1090 bp, Homo sapiens
  misc_feature 1, 2, 1087, 1088, 1089, 1090: n = A,T,C or G
nnactgtgtctggacttcactcgctgcgtctagtgggtgcggtgggtcctggtttgtgccgcggctggcgtgtgttatgtgcgtggtggtggttgctggttttgtatggttggttttcttctcgttttgtctagccctgccttgggtgtctttctgctaggtgttggtggttatggggccccgtctgcgcggtgtggctttgggtcgcgttcggtggtagtcctccggtgtgccgtccgttctgcctggtctgtttcccgtcgttcctgtctgtggcattgtgatgtgagtacaggctttttgtgttggtacagctctaaaaaatgttggcaccgaatgcacttaagaaaagtgttaaggcttaatacaaatacagagacgagtcatttctcaatgcagcttagagggtgagaacaggatgctaggtttttaaatcttccaaatacaggcagtccccaacgtacagacatacaggacacctcccaaatgtaaacgacagccacacagcagggcttgcatgcgcaggaactcttcttctcccagtgagcagactaagcactctgaatcccaccccactgcctcgcagagggaaagaaggcaggacagatgcaagaagagtaatgtcaggggctccatcacagctgcccaggggcttctgctgtagttcatattttcctcattcccatctctggtttctcccataacccagaagtccctgccaggggcggaagtaaagagcttttcctctcacctagcggactgcaagggctgggagaatcacagggcccagtaccgtcacgtcctatttcttcctggcaatctgatttggaattcgtgaatcattttctcaataaaaaaacagaagttataaatggtagttcatttccaccattaaactgtttcctttcaagttgcatcaatgactttgaagcacaaaccacctgaaatgtgtgtagagtcacacagagtgtttcttggctccaaagtctacaggcaatcaaaagggggaagctgtctttggttgacaaagccttgtgcagaccccagtgtgccaggtgtaggaaggggagcttggcaggcggctccnnnn

SEQ ID NO: 25642 - DNA, 671 bp, Homo sapiens
  misc_feature 1, 2, 630, 671: n = A,T,C or G
nnatactgtatctgagttggcattgccgggataaagactctgtccctttcaacttgattttctcttggggtttgtgcttgtttaacctgcgtttgaggttgtaatgttacaggcatttgaaccgcgggaggaggagttgatgtaattacagaatatgtgaaggcttgtgatgggattggaggagctatgcataaaggcaatgctaatggctcaagcaatgagcgggagctccctctaggaggacaagttagaacatttggagaaaaaatgttataattgtggtcaaatcggtcatccgaaaaggagttgcccagtcttaagtaaacagaatataataaatcaagctggccgggcacggtggctcacacccgtaatcccagcactttgggaggccgaggctggtagatcacaaggtcaggaggtcgagactatcctggctaacatggtgaaaccccatctctactaaaaatacaaaaaaattagccaggcgtggtggcgggtgcctatagtcccagctactcgggaggctgaggcaggagaatggcatgaacccaggatgcagagcttgcagtgagccgagatcgcaccactgcactccagcctgagcaacagagccagactccgtctcanaaaaaagaaaaatattaatataaataaatcaagctataacn

SEQ ID NO: 25643 - DNA, 3318 bp, Homo sapiens; identical to SEQ ID NO: 24330
  misc_feature 3145: n = A,T,C or G

SEQ ID NO: 25644 - DNA, 988 bp, Homo sapiens; identical to SEQ ID NO: 25014
  misc_feature 763, 988: n = A,T,C or G

SEQ ID NO: 25645 - DNA, 1362 bp, Homo sapiens
  misc_feature 1, 2, 1360, 1361, 1362: n = A,T,C or G
nncagaagtccggggctggcaaggcgcttcctgcgcagcgcctaggcgacctggagttgtgacgctgtgatggtctagaggctggagattcaagatctgggtgccatcattttctggttctgttgatgaccctcttccaggttacatacagcttacatctgtgcatcctcaagcgtttttcttataaggctaaaaattcacaaagcatatatcaatgaatcaggaggatctagatccggatagtactacagatgtgggagatgttacaaatactgaagaagaacttattagagaatgtgaagaaatgtggaaagatatggaagaatgtcagaataaattatcacttatgggaactgaaacactcaccgattcaaatgctcagctatcatggttaattatgcaagtaaaatgtttaaccgctgaactcagtcaatggcagaaaaaaacacctgaaataattcccttgactgaagacgttctcataacattaggaaaagaagagttccaaaagctgagacaagatcttgaaatggtactgtccactaaggagtcaaagaatgaaaagttaaaggaagacttagaaagggaacaacggtggttggatgaacagcaacagataatggaatctcttaatgtactacacagtgaattgaaaaataaggttgaaacattttctgaatcaagaatctttaatgaactgaaaactaaaatgcttaatataaaagaatataaggagaaactcttgagtaccttgggcgagtttctagaagaccattttcctctgcctgatagaagtgttaaaaagaaaaagaaaaacattcaagaatcatctgtaaacctgataacactgcatgaaatgttagagattcttataaatagattatttgatgttccacatgatccatatgtcaaaattagtgattccttttggccaccttatgttgagctgctgctgcgtaatggaattgccttgagacatccagaagatccaacccgaataagattagaagctttccatcagtaaaaggatgttttcttttttcacacagtaaaaattcttatcattcaaggatattggaaccacaggactatttggataaaaaacattatttgcaaattaatgcgcataggccatcttacttttattgcaaaatggcatgtgctgccatctattattcatttttaaatggtcatttcttattcagtgagtgctttagtgttttaaactatatggatagaatgcggtagaaaaaattaggctaaaaattaagacctaaccctgaatactggacggcggaaagaagggagcaaaatccaataaaaaaattaggcggacaacggctaaaaaaagcggtacacnnn

SEQ ID NO: 25646 - DNA, 453 bp, Homo sapiens
acccttttttctattttttatgctaaaaaataatcataataaatttttgagtctgcaaagtttatcatacagtatactctctcattggaattattattttcatcttctgtttgctgtttgtaattccttctggctgtgatttgaataatagactttgtattaataagagagatatggaaggcagaagtgaagaaagcattagtcaggttttatagccaccatatgtggagacagatggatgcataggagcttcagggacacctgcttccaccacattgtcctgatcctttgctctgccaattgagagtattcttagaaccaccactaactgcttgactgccatattttccttccttccttccttctttctttccctttccctttcttttctttctttactttctttttccgagatggagtcttgctctgtcgcccaggctggagtgcagtggt

SEQ ID NO: 25647 - DNA, 1979 bp, Homo sapiens
  misc_feature 1, 1831, 1978, 1979: n = A,T,C or G
nggagtggatgtttattttgacaatgaccataagggtaaacaactggtactcttcggtggactgtgttgccagatgattttgcccagccataagtgttctgagcatgttttaggtaggttaggctgagctatcatgttcagtaggttaggtatattgaatgcattttttgcttagcatattttcagtctaatgatggttttattggtacatatccctatcataagttgaggaacataagtcaacctttgttcaattttaataattcttttttaggatgacattgtctgccctcagttcttttagtttcaaattacttttcattaaaagcagcgtaatctaaccttaattgtaatgaacactgtcatatacctgtaatattttgtatactggtgacatttttacatttaaatgtgacaatataacagccatttaatattcaaatttccccccctagattgggcccatttcttaggttgttccagagtggtgggcatttgtggcgacacataagaaatgcattcctcttgacctcagaaatgggcttcgatgctgcaattaattataaaaaagacaatgtggcagaacagctccgtgaatcatgcccagctggagtggatgtttattttgacaatgttggtggtaacatcagtgatacagtgataagtcagatgaatgagaacagccacatcatcctgtgtggtcaaatttctcagtacaacaaagatgtgccttatcctcccccgctatcccctgctatagaggcaatccagaaagaaagaaacatcacaagggaaagatttctggtattaaattataaagacaaatttgagcctggcattctacagctgagtcagtggtttaaagaaggaaagctaaagattaaagagacggtaataaatgggttggaaaacatgggagctgcattccagtccatgatgacaggaggtaacattggaaagcagatagtttgcatttcagaagaaatctctttgtaattgctgtaaatgtcatcaaggcaatcatagatttcttttccattttgcatattttcaaagatatgttaaaaaatccttagactatacatagctcttgatttaaatgtgatcataggtgttatttttagttgcatagggtatttgatacaatcattaatggatcatacacaataggtttttaaaaattaataacttttagtaattacttttattaatttaaaatagaacgcttgagaggcactttgtaaagatttgttaaactggaaacgttttacatgatctgatacaaccattaatgaatcatacacaataggttttttaaaattaatattaataacttttattaatttaaaatagaatgcttaaaataaaatagaatgcttgagaggcactgagtaaagatttgttgaactggaaatgttttacatgattcttaaactgaaacttggtgtaaaaatagaattgagatggcctttttttcacattgtagactgaaaagagacttaatggtatgatgtgtacatagggactgggggcaggattgggggtttcggagcttgtgtaacagtttttgggataggagaccagcggttttgggttgggattactatgggaagataaataacttaggttggttaagttgacaagatttactccagaggatcatctctttgtatttgccaaataatttactgtgtcgcctaaaaactccatatatattgagaaaagcatatgtttattttaggttagcaggcacatactgtcaagttgtaaagattgagagggcaaacagatgtaaacatcacttgtaggtgattaaaaagattgacagccnggcctgatgtctcaagcctgtaatcctagcactttgggaggcagaggcgggcagatcacttgaggtcaggagttcgagaccagcctggccaacacggtgaaaccccatctctctaaaaatacaaaaattagctgggcgtggtggcann

SEQ ID NO: 25648 - DNA, 988 bp, Homo sapiens; identical to SEQ ID NO: 25014
  misc_feature 763, 988: n = A,T,C or G

SEQ ID NO: 25649 - DNA, 491 bp, Homo sapiens
  misc_feature 470, 471, 472, 473, 474, 475, 476, 477, 478, 479, 480, 481,482, 483, 484, 485, 486, 487, 488, 489, 490, 491: n = A,T,C or G
accagcattcataccaccagctttcagcttgtagaggtggccgccaaggggaactcgtagttggcagtgccaactacaactactacaccaaccagctggaaactatacaaagagtatgaacaaagttcacaggagaaacaaggctctgcaacatatgaaaatatattctacttcattcataatgagacgcatgaaaattgtaactgtatcaataccatttctcacctagtagatgggcaaaaatccaaatgtttgagcacacattctgtgggtgaggctgtggaaacgtaggttcacatacattgctcttggatatgcagattaggaccgctcctgtggagaggcagttagggaatatctttcaaaattaaaaaatgcagagttaagttttgatccaggagtctcactcctgaaaatatgtgctatagatatgcctacaagcatttgagatgaaaaagaagcattgctannnnnnnnnnnnnnnnnnnnnn

SEQ ID NO: 25650 - DNA, 1120 bp, Homo sapiens; identical to SEQ ID NO: 22234
  misc_feature 1, 1119, 1120: n = A,T,C or G

SEQ ID NO: 25651 - DNA, 676 bp, Homo sapiens
  misc_feature 1, 2, 3, 4: n = A,T,C or G
nnnnaatcatggcgtcagttccgaaaaccaacaaaatagaaccgcggtcctattccattactcctagctgcggtatccaggcggctcgggcatgctttgaacactctaattttttcaccgcgtacctcggccgaggtacgcgggatcaaacttggtctcaagagcctggtgagcaagggcactctggtgcaaacgaaaggcaccggtgcttctggctcctttaaactcaacaagaaggcagcctccggggaagcaagcccaaggttaaaaaggcgggcggaaccaaacctaagaagccagttggggcagccaagaagcccaagaaggcggctggcggcgcaactccgaagaagagcgctaagaaaacaccgaagaaagcgaagaagccggccgcggccactgtaaccaagaaagtggctaagagcccaaagaaggccaaggttgcgaagcccaagaaagctgccaaaagtgctgctaaggctgtgaagcccaaggccgctaagcccaaggttgtcaagcctaagaaggcggcgcccaagaagaaataggcgaacgcctacttctaaaacccaaaaggctcttttcagagccaccactgatctcaataaaagagctggataatttctttactatctgccttttcttgttctgccctgttaaaaaaaaaaaaaaaaaa

SEQ ID NO: 25652 - DNA, 818 bp, Homo sapiens
  misc_feature 1, 2, 3, 4, 5, 27, 803, 804, 805, 806, 807, 808, 809, 810,811, 812, 813, 814, 815, 816, 817, 818: n = A,T,C or G
nnnnnagaagaggcagcggcggtggcncagagacgattggtgccaaacagggcagaacgcaactcagctctgggtttgtgaatagcacaatggaagaagctggactttgtgggttaagagagaaagcagatatgttgtgtaactctgaatcacatgatattcttcaacatcaagactcaaattgcagtgccacaagtaataaacatttattggaagatgaagaaggccgtgactttataacaaagaacaggagttgggtgagcccagtgcactgcacacaagagtcaagaagggagcttcctgagcaagaagtagcccctccgtctggtcagcaagctttacaatgcaacaggaacaaagaaaaagtcttaggaaaagaagttttattattgatgcaagccctaaacactctttcgactccagaggagaagctggcagctctctgtaagaaatatgctgatcttggaaattcacctcttctatagaagagtttgttttgaactatacgatttgaaacaaaattctttttttggagactatggaaacattctcaacagggaaaccctactagactttgtaaagcaaataatggaaaagatacagaactttttgaagaatcatgggaaatttttataattaaataaatgctaaaattctgttttgtgaaacatttatgggaattatcactgacagtttttgtacactttcaaatagtgttaaagcagcaactccatgttgtaaatgcacaaaacaaatatttagttaataatcaactccaagaataaagctgtaacaataatagnnnnnnnnnnnnnnnn

SEQ ID NO: 25653 - DNA, 726 bp, Homo sapiens
  misc_feature 1, 2: n = A,T,C or G
nnagctagtggagccgggctgatttccgctgagtgacccttacaagtccttcttgatcctgaactgggttaggtgccgctgttgctgctcgtgttgaatctagaaccgtagccagacatgggactggaggacgagcaaaagatgcttaccgaatccggagatcctgaggaggaggaagaggaagaggaggaattagtgataggactgaggctttcagtgcatactggcaaccttggaaggcaggaatgtgaaacttttccctactacttagcatcagaattgaatgggagaccgcattctgccatttctggcggcagtgtggctctgccagctggccttctgcacggatcccctaacaacagtgagagagcaatgcgagcagttggagaaatgtgtaaaggcccgggagcggctagagctctgtgatgagcgtgtatcctctcgatcacatacagaagaggattgcacggaggagctctttgacttcttgcatgcgagggaccattgcgtggcccacaaactctttaacaacttgaaataaatgtgtggacttaattcaccccagtcttcatcatctgggcatcagaatatttccttatggttttggatgtaccatgtgtttccaagagcagacacaccccatttacagataagagaaccctccttgccttgtttacaaagctcttcagtatgctatatacacttggcttgacttttggccacaat

SEQ ID NO: 25654 - DNA, 477 bp, Homo sapiens
  misc_feature 390, 448, 469, 473, 474, 475, 476, 477: n = A,T,C or G
atattacagataacacaactcacaaatataccatcagacattgaaaactaaggccattctgtgagttattttaaaaacttggtgttttgcacataatgatcttaaaaaaaaaatgaattaccaaaaccaagattctcttctaaaatgaaaattggcggccggtgcgccgcgcagaacggcgagtagcggagcgggacccgctggaatcatcatccagggacgtgccagaaaccacaagaaaacatggggagggttttcctcacgggagaaaaagccaattccatattaaaacgctacccaagagctaatgggttttttgaagaaataagacagggcaacgtttgtggctccaaccttctgtccatctgcaaaacagctgagttccaaatnaccttccacctgtttattgctgcatttttgggggcttcaagctacactggttttcctnggtcaacttcatgattgctgncacnnnnn

SEQ ID NO: 25655 - DNA, 1659 bp, Homo sapiens; identical to SEQ ID NO: 24195
  misc_feature 1, 2, 1659: n = A,T,C or G

SEQ ID NO: 25656 - DNA, 3983 bp, Homo sapiens; identical to SEQ ID NO: 21101

SEQ ID NO: 25657 - DNA, 711 bp, Homo sapiens
  misc_feature 707, 708, 709, 710, 711: n = A,T,C or G
cgacccacgcgtccgcgttggcgctttatagctacacagtgctatgccagagccagcgaagtctgctcccgccccgaaaaagggctccaagaaggcggtgactaaggcgcagaagaaagacggcaagaagcgcaagcgcagccgcaaggagagctattccatctatgtgtacaaggttctgaagcaggtccaccctgacaccggcatttcgtccaaggccatgggcatcatgaattcgtttgtgaacgacattttcgagcgcatcgcaggtggagtggctgaaacttctcagcaggcgcatctacactagtgacctgaggagagaaaccctaaccccacaatggctgcatcttctctgaagacgagactgatgctcatctttgaaatgaagggcagtgtgtgcatttctccatgaaggtatccagaaacagccatgccagagctgctgtggggtggctgaactgctatgccttgtctagggtgggatccccactctttgtaaggaaggattttggggtcctgacactgggaactcatcttgtcagtgaggccttctttaactgctgtcttgcaattgagccaccccatctgtgtttcctgttcccatttaagacttttttttttattataatataaagatctgaaatgctatgttttccttattcattgcttattaactttactatgccatcctccacactaaaagnnnnn

SEQ ID NO: 25658 - DNA, 395 bp, Homo sapiens
  misc_feature 255, 256, 257, 258, 259, 260, 261, 262, 263, 264, 265, 266,267, 268, 269, 270, 271, 272, 273, 274, 275, 276, 277: n = A,T,C or G
ctttcattgaggggctatgtgatggagacagactaactcattttgttatttgcattaaaattattttgggtctctgttcaaatgagtttggagaatgcttgacttgttggtctgtgtaaatgtgtatatatatatacctgaatacaggaacatcggagacctattcactcccacacactctgctatagtttgcgtgcttttgtggacacccctcatgaacaggctggcgctctaggacgctctgtgttcactgannnnnnnnnnnnnnnnnnnnnnnacactctagcattgtaactttttccccctgagaagtaattttaagatctatcagtctcaatttaaatgatctgttaatcagccagagttttagtttcataatatcgttccattgcctg

SEQ ID NO: 25659 - DNA, 2638 bp, Homo sapiens
ctacagaatttgcttccaggcagctgtcatggaagttcagactttgagaccatcttactggaagttccttttaagactcaccaagggcaaatttgctgtcatgaaccgaaaagtccttgatgtttttggtactggtgcatctaaacactttcaggatttcatccccaggttggatccaagatacacaactgtaacaccagagttgcccacagagttttcctgaagatgactgtaacttattaatgtgactaaatgtttcatcttgaagagttaattatgttgaacacaaaggagggggcccaagctcgaacttcagtgttatttcagttagagatactcttttcatttgttttgtttttcttatgaatcagaaattcagaagctttttaggaagatgttgcttaataattaagcttcctccatagccagaataagattctggatcactgtagtgactgacattatatattattgatcaaattatgtccacaagcaatattatataatctacatagaagtgtaataacaaacaagagtacacttaaaattactttaaaagatgtctttagttcattccaatataattcttgattaaaattaggattatttctacattttaggatttacaaaggatcacgggtacatggatttggtctatatatttttttaaagttttgaattggtatctgtagtagtggaatgttatagatttgaagtaactctccacggacagtgctgctttcgtgtagagcaatttaattggagaagtggccattcttacttcagggatgcaaagatgggtctcataccatttggataaatgtcgtggtatccatgctttttttcaactaataacatcatctctcttcatgaccagttaattgggctatttggcagcccagtgaacctatgtactaatggcaagttaggggcaaatggaaatggacacatccgataaagttgaaatgtatgttttaatctttcacagaagtattacacttgaatatttaaaaacaaaacttttaaacttcctataggtttatgatgtttgttttcatttatatggacataatccttcatagctcagtttatatgccattgttgtattagaagggatcaaaatcctatggaacaaagtagtcttggcaagttggcagtttgtgtcctctcagctgtttaacttatgtaatggatgttttgcacctgaaaacactataaaaatccagtggttgtttaaaaagtccatttgtcactaattccattcaggttctccaaccttcttcttgaatatcattgtcaccatttttactgttagaataaagaggtgacaccataaagtcctgctgataatgagagtagttcaggacagctgtgattgaaatatggtcgctatttacagtttttcagggaaaagttatacttttctatgttaataaagagctgaagtggtctacagttaatgtgacatgtagggatgatgatatttttaaaatacattttgttgctaaaaagtttttaggccagtgcaaattatgcagtagaacttgtgttgcaaaaggaattataacccatactttaaaaatgcttaatccctcatattcaatttcatcaagccttgtatacttctgcttaaatgtaattcaatccttggttgttatggcaaacagaaacccaacaaaaagacagactctggtactatggtaacagagccactttatcatttggtcaaaatttggcattatgattagctttgtagaactgacctgtttatttggcaatgctgttaaaggatcatttcggtttcagacttcaaagttgattaataaatttaatcttaactttttattcactggaatcaaaacgatggttggtactgtgtttactgtttaaaatgaagtactaaagccctgagaactgcacctcattttctttatccagaaattgtgcttatatattttcctgtcaggtttaaaaagatgttttaattcataaattattgttttcattgacattaaaagactgtgatattgaaagatgaattacgaaatttgctgagattgtttagtaaaattttgctggtcaaaaaggtgtatttctacaatttaccttttcatttttataaattgcagtcatttttttaaattttatgtaaaatgtaaaatgaaatagctatcatgaagcagaatacaatgatgaatgtataggttgagtgaataaccaatttgcagtggtggattgagaagtccagtttgatttcattgggacagactgcaaagtgtagttgtttgagcaaacacaaagaaactttgtgtttttgaagacaatcagaatgattacctttctacctctaactaatcaggtattgattgacaactttttggcattataaataaagtaaaatagatctctgcattccaaaatatgttttttagtttatttatatcctgaagaaatggtaagttttcactggaactgattacagtaaacaataatatgtccccttagtctttctgacatttttatatagattgagattgaaaaaccgtgcatttggggcagtggtattatggtcatttcgttgctatttttctgttttaataaaatcctagaactagtagcaaccgagtaaagattggag

SEQ ID NO: 25660 - DNA, 669 bp, Homo sapiens; identical to SEQ ID NO: 22846
  misc_feature 1, 2, 3, 4, 5, 6, 7, 8, 9, 10, 11, 12, 13: n = A,T,C or G

SEQ ID NO: 25661 - DNA, 1041 bp, Homo sapiens
  misc_feature 1, 2, 1036, 1037, 1038, 1039, 1040, 1041: n = A,T,C or G
nnggtgaaggggagacagataaggttgtggcccaggcagtgctattcatgtgtatgaacacagctggaatcttcatcagttacctgtcagaccgggcccagcgccaagctttcctggagactcggaggagcggctcgtgctttctgtgctcccccggtttgttgtcctggaaatgatcaacgacatgaccaatgtggaagatgagcacctgcagcaccagttccatcggatctacatccatcgctatgagaacgtcagtattcttttgcagatgttaaaggatttaccaacctctccacgaccttgtctgctcaggagctggtcaggatgctcaacgagctcttgccagattgatcgactggcccatgagcatcactgccttcgtattaaaatcctgggggactgctactactgcgtgtctggacttcctgagccccgccaggaccatgcccactgctgtgttgaaatgggtctcagcatgatcaaaaccatcaggtatgtgcggtcaaggacaaaacacgatgttgacatgaggattggaatccactccggctcggtgctgtgcggtgtttgggactaaggaagtggccagttgatgttctggtcttgggatggtgcatatggcaaacaaaacctcgaatctggaggaatccccgaggaggatcacatttcccaaagcccacgcggacgtgtctccaacgggtgactaattaacgtggcacgagggcatgggtaaagagaaggaatgaattcctgagggaagcattaaaatcggaaatactaattacagcagcctgaggaaaggctggcggacttgcctggaagatacggcaagggagacgaggagcactcagacaggggaacgcgggggcccattcacggaggagaccgggagcctagatgccttggtcaatcgggggaacaggaatgtaagtcctctcttcctccttctgcttggccgtgaatgcatgctcgtgtgcatctccaatccagacacctcagagaaaactgattcatctttaaccttttctccaannnnnn

SEQ ID NO: 25662 - DNA, 1828 bp, Homo sapiens; identical to SEQ ID NO: 22656
  misc_feature 1, 2, 3, 4, 5, 6, 7, 8, 9, 1825, 1826, 1827, 1828: n = A,T,C or G

SEQ ID NO: 25663 - DNA, 2358 bp, Homo sapiens; identical to SEQ ID NO: 22430
  misc_feature 1, 2, 3, 2358: n = A,T,C or G

SEQ ID NO: 25664 - DNA, 897 bp, Homo sapiens; identical to SEQ ID NO: 22593
  misc_feature 1, 2, 3, 4: n = A,T,C or G

SEQ ID NO: 25665 - DNA, 501 bp, Homo sapiens
  misc_feature 1, 499, 500, 501: n = A,T,C or G
ncgaatggagctccaccgggggcggccgggtcacttaccctcgagtttcacctaggagaagagcaagaggtgatggggtgggaaaggcaaaatctgtttaagatgaatacacagaaagagaccacacaggaatccttctccctgcagcctctcacagggtctctgagctggcagggaaagagggctcctttccaaccctcacccagaacaggaaactcttgcatagttctttaagagaaagagatggtaaggaagggatgggccaatcccagggccaaaatccaccacgaagaagtgggaaacgatgcaaagcagggccacagaaggatacatccttcccagatttgggaagcagcaagtactcggaaaaatgaaaagaaattccatgtggaaatggcagagctcaaaaggaaccccttcacttctgcctcttggatgccccttctatgcagctttgactctggagcatgataatctagaagttctgactcaacccaannn

SEQ ID NO: 25666 - DNA, 130 bp, Homo sapiens
aggtacctaggttctccctccctgcaccacgtgcctggaaactctctcaaagcaacaagcctggggaagcaatagagactcacctcatttgttactagttaattaattaaaagtcactgtcctttattcc

SEQ ID NO: 25667 - DNA, 2384 bp, Homo sapiens
  misc_feature 1, 2, 3, 2382, 2383, 2384: n = A,T,C or G
nnnacggctaggtacgacgcgaggggggccggaagtgaggcaccctcgggctcgagacagcggcgacgtttaaagctgagcgacccagtgccactggagacggtcagcttctccactcaggctcctccagcccgagccagaagaccccctcccccagaattctgggggccgatggaagggagccgagtcagatcgcgaggtacccagagccgacagaccggagcgacagggagttgccagaagccccgcccctaggagtgatcggaaagcctcacccatccgggtgaggaacccggagggaccgcctccgggcggagcccgccgaccatggctacgcccctggtggcgggtcccgcagctctacgcttcgccgccgcggctagctggcaggttgtgcgcggacgctgcgtggaacattttccgcgagtactggagtttctgcgatctctgcgcgctgttgcccctggcttggttcgctaccggcaccacgaacgcctttgtatgggcctaaaggccaaggtggtggtggagctgatcctgcagggccggccttgggcccaagtcctgaaagccctgaatcaccactttccagaatctggacctatagtgcgggatcccaaggctacaaagcaggatctgaggaagattttggaggcacaggaaactttttaccagcaggtgaagcagctgtcagaggctcctgtggatttggcctcgaagctgcaggaacttgaacaagagtatggggaaccctttctggctgccatggaaaagctgctttttgagtacttgtgtcagctggagaaagcactgcctacaccgcaggcacagcagcttcaggatgtgctgagttggatgcagcctggagtctctatcacctcttctcttgcctggagacaatatggtgtggacatggggtggctgcttccagagtgctctgttactgactcagtgaacctggctgagcccatggaacagaatcctcctcagcaacaaagactagcactccacaatcccctgccaaaagccaagcctggcacacatcttcctcagggaccatcttcaaggacgcacccagaacctctagctggccgacacttcaatctggcccctctaggccgacgaagagttcagtcccaatgggcctccactaggggaggccataaggagcgccccacagtcatgctgtttccctttaggaatctcggctcaccaacccaggtcatatctaagcctgagagcaaggaagaacatgcgatatacacagcagacctagccatgggcacaagagcagcctccactgggaagtctaagagtccatgccagaccctggggggaagggctctgaaggagaacccagttgacttgcctgccacagagcaaaaggagtgagtggaacagagttgcttcttactaggagcacattctttgcctgccttcccttcatcctatcctctttgcttgctctcacctcaggaattgcttggattgctacatggaccccctgagactatcattattacctcctagggccaggaagccaggtaggtagtctgagtcaggattggatcaacagcctcctctcttggggactctcaagagcctgtgttcatctagaagtagtagtttgattctggtttccctcctacagtgtgtcctccgtctctgtgcagctccgtcattaccataggggacttggttttagactctgatgaggaagaaaatggccagggggaaggaaaggtgagtgggaaggagcagaaagctgggaaaggggatgggtagaacaagactgagaaatccacatgcttcagaattcagagggttcagggaatggtttcggatagtaggctctccctgctcccttctctacaggaatctctggaaaactatcagaagacaaagtttgacaccttgatacccactctctgtgaatacctacccccttctggccacggtgccatacctgtttcttcctgtgactgtagagacagttctagacctttgtgatagaactaaaatgctctctgtactctagtctcctgcctcctcagctctgcaagtagtttagtaggaatgaagtggaagtccaggcttggattgcctaactacactgctaaaaatatttgtaatccttaataattaaactttggatttgttaaaaaaaaaaaaaaaacacgacaaacaaaaaaaacttgtcggccgcctcggcccagtcgactctagactcgagcaagcttatgcatgcggccgcaattcgagctcactggggcaattcgccctatagtgagtcgtataccattccctgggcggcgtttaccaacgcgtgactgggtaaacagaaagggcgacaatggctccacaggggcgccgagggatgannn

SEQ ID NO: 25668 - DNA, 3228 bp, Homo sapiens; identical to SEQ ID NO: 22886
  misc_feature 1, 2, 3216, 3217, 3218, 3219, 3220, 3221, 3222, 3223, 3224,3225, 3226, 3227, 3228: n = A,T,C or G

SEQ ID NO: 25669 - DNA, 336 bp, Homo sapiens
aggtactcttaaaactaggcggctatggtataatacgcctcacactcattctcaaccccctgacaaaacacatagcctaccccttccttgtaccaatgccaatcagaggaaggcagtttggttcaggctttggagttagaaacacctgaagttgaatctgggctctgttgcttccttctttcatgggctagagcacgactctttacctctctcttggcctcaatttcctcacctgtaaaatagatgaggaagctgctcacttattattgtctcgttctgaaagcttggaaagctacatcgaagatgagctcttcattcagctttgatttgacccgt

SEQ ID NO: 25670 - DNA, 404 bp, Homo sapiens
attggagctcaccgcggtggcggccgaggtacgcgggggaagaagaggaagaagaagaagcagaaggaatggaaagcctggagaaagaggatgaaatgacggatgaagcagttggagactctgctgagaagcctccttctacttttgcctcacctgagactgctccagaagtggagaccagcagaactccaccagcctgtgaaaccacgaacccttcaatcaagaaaagacctttgatcaggagaagacttctcgtctcatttctggggacacattcaggatttctccaaagcagtgagtaacattgaacccctcttgcttgctattctgttctatcttctcattagaaattggaagaaaacaccaggcacctgtcagccatttaaatgcgacaagcggccgct

SEQ ID NO: 25671 - DNA, 3297 bp, Homo sapiens
ggttcccttggtcctcaagttgctacctgcaaatacagcacagaaatgctttatatgtatcaaggagccccccttcccctcccccactccagctctgcatctggacacactgtcagccatcagatcctgaccaggtgctcagcctctttagggatatgtcacaatttgccgtgcccggtggctctgggcagcctttggacatgtagtggttgtgtcttggaatacaagagttgtgcctgaatctgggactctctgtgaccctgggaaaatcacatcagctctctgaaccccaattgtctctgatctataaaatgaagacagtatctacttcataggattgatttgatggacatatgtataagcagtgccagggacaactagtaggtggtcattggagtgtggctacagttattatacagttacacatggattccttgattccccattaagccctggtggatgaatgaggaaaatgcagcagggggtccatcctagaaaacccaacccactccagataatcgcgccagcctcacacctgagaagctgcttctacgacctgctgaggacataatgataaacacacacaagaggctactgtgtcccaggcacttgtcttaactcatttaacttttctaacaaccctaaacctagggttctcattttccagatgagaaaactgaggcatgtaaggttaagtaacttgcctgagggtcgccgattagcatcagagccggcatttcaaatagacaggccagctctagaggccagggtgtttggacagactccaaattgtcaccctagccttcagggcaaggctgcacacacggcctctagtctcctacccctcttcctggcaggaggctggctctgacaggaggttgtttgtgccacaatttaaggaccaagctattctgggaagcccagaacagtctttcctttattattcatctcaattaaccattgtgttggtctggacttgggggtgcaggcattcccatctccctttcaaaaaagtttctaaaaaatgcagagcagcctttattcttgttttcccaggtaaatgtggtcctatgtacttgcagagtaagaatttaaaaaaataaacctgagaggtagtttagtggaatagggagtacagaggcctggaagatgagggagctgggtttaagccccatcaaccggcatcaactagccatgctaccttgggcaaaataaccgtagctaacacttagtgaccacttactgttgtgcgttctcatgttatcctgacagtaacacttatagggtaggtctgtcagaattttctgtccacaagcaacagaagcttacactgagaatttattggagggctttgagacagctcatgtaatggaaagctcttaagaactaggtttagaaggtgcagagaccagggcaacttcagggatccaggtagcaggaaggaatcggtagcctctttggtatggccactatggtggtagacactgtctaccttgtttgctgagtcttctggctttcttccactcttcctgctcttggacatcagactccaggttcttcagcctttggaatctaggacttgcaccagtgggttggttgccaggggctcttgggcctttggccacagactgaaggctggctgcactgtcagcttccccagttttgaggtttttgaactcaggctgagccactactggcttctctctaacccagcttgcagacggcctattgtgcgacttcgccttctaactgtgggagccagttctccctaataacctccctttcatatatacatatatcctactaattctgtccctctggagaaccctaatacatgaattataactctaagtttcagttctggccatagcattatgtcacaccaacaccagcatcaatattttaggttgcctaattaatgtatctgtaaacctatagccagcttgggtggggctattgagagtcagcaccagcactgatcatatataggatcagcctactggggttggccacgttgtatgtagctgcgaatagcaaggaggggaacagcaacatccctagggaaaccgatcacagaaaggcagctcactaccccacagtaaaaagaaccttgagtttcccagttcagtcccctgctgggtgcatgctacccccctcctctcccagaggctctggacctacacagctgctgaaaaagagaaaatgtccttacctacaatgaaccatcacaggcacccacctagaaattaaggtactgtggtcatttatcttatcccagaataacaggagtgtgtataaacaggaagctttagtttagataaataagattatccattacaaaaattttatattgaataacctgtaagtaatttgaaaaagagacttctggctagttttcacttatgtccaagtcagtgggggtaaatgcattgtgattcactgtaggttttagactcttacagccttaacaaccttgtaaatccataactagcatcttcctatctggcagaccctttacaaatgcattatctcaagcctcacaacaattctttgaggtagacatagaaagtgaaagttcagaaagggtttaaaaaaaaaaaaaaaaaaaaacttgtccagagacatagccaattagtggaagagggtttgaacccaggttcctaactacaaaatccacgggtttaactgctgctctcctgaaatgaaatatctacaagaagtagcaggcattgagaaacagatgggaagatagtgttttgatatgattttctgtttacaggaaggcctaactacgtcctgttcacctcatgctattgggtaactttccagtaaaaaacaattgcactttgttttcttttccaaaaagaggcagaaactgatttcttcaaagtaaaaaggcaccagggacccattctagactttccaaagctaggcacatattaaagagagtatacaaaataggcagagaagtagacttgctgacctgaggagctgagtgggaagcatggacttgccaacttacctaagtgaccttgagcgatccagctaactttgcatagtttcctcttgtgtaaagtgaggtgcaagtacagatgaaaatgtatagaaaacatagagcttagaatcctgtaccagaaagctgccctcatcacaatgaatgtccagtcagtactagctccagccagctgctcagcccatcaagaattcctcagggggatctgttagcattagttcagatctgttggcagcaacagaaacttatgcgagctagtatacatgacactgggtcctctggca

SEQ ID NO: 25672 - DNA, 1194 bp, Homo sapiens; identical to SEQ ID NO: 22456
  misc_feature 1193, 1194: n = A,T,C or G

SEQ ID NO: 25673 - DNA, 2981 bp, Homo sapiens
  misc_feature 1, 2, 2981: n = A,T,C or G
nnggcggctcctcccactggggggggggtggcgcggcggcggtggcatctgcggccatggcggcgactactgccaaccccgaaatgacatcagatgtaccatcactgggtccagccattgcctctggaaactctggacctggaattcaaggtggaggagccattgtccagagggctattaagcggcgaccagggctggattttgatgatgatggagaagggaacagtaaatttttgaggtgtgatgatgatcagatgtctaacgataaggagcggtttgccaggtcggatgatgagcagagctctgcggataaagagagacttgccagggaaaatcacagtgaaattgaacggcggcgacggaacaagatgacagcctacatcacagaactgtcagatatggtacccacctgtagtgccctggctcgaaaaccagacaagctaaccatcttacgcatggcagtttctcacatgaagtccttgcggggaactggcaacacatccactgatggctcctataagccgtctttcctcactgatcaggaactgaaacatttgatcttggaggcagcagatggctttctgtttattgtctcatgtgagacaggcagggtggtgtatgtgtctgactccgtgactcctgttttgaaccagccacagtctgaatggtttggcagcacactctatgatcaggtgcacccagatgatgtggataaacttcgtgagcagctttccacttcagaaaatgccctgacagggcgtatcctggatctaaagactggaacagtgaaaaaggaaggtcagcagtcttccatgagaatgtgtatgggctcaaggagatcgtttatttgccgaatgaggtgtggcagtagctctgtggacccagtttctgtgaataggctgagctttgtgaggaacagatgcaggaatggacttggctctgtaaaggatggggaacctcacttcgtggtggtccactgcacaggctacatcaaggcctggcccccagcaggtgtttccctcccagatgatgacccagaggctggccagggaagcaagttttgcctagtggccattggcagattgcaggtaactagttctcccaactgtacagacatgagtaatgtttgtcaaccaacagagttcatctcccgacacaacattgagggtatcttcacttttgtggatcaccgctgtgtggctactgttggctaccagccacaggaactcttaggaaagaatattgtagaattctgtcatcctgaagaccagcagcttctaagagacagcttccaacaggtagtgaaattaaaaggccaagtgctgtctgtcatgttccggttccggtctaagaaccaagaatggctctggatgagaaccagctcctttactttccagaacccttactcagatgaaattgagtacatcatctgtaccaacaccaatgtgaagaactctagccaagaaccacggcctacactctccaacacaatccagaggccacaactaggtcccacagctaatttacccctggagatgggctcaggacagctggcacccaggcagcagcaacagcaaacagaattggacatggtaccaggaagagatggactggccagctacaatcattcccaggtggttcagcctgtgacaaccacaggaccagaacacagcaagccccttgagaagtcagatggtttatttgcccaggatagagatccaagattttcagaaatctatcacaacatcaatgcggatcagagtaaaggcatctcctccagcactgtccctgccacccaacagctattctcccagggcaacacattccctcctaccccccggccggcagagaatttcaggaatagtggcctagcccctcctgtaaccattgtccagccatcagcttctgcaggacagatgttggcccagatttcccgccactccaaccccacccaaggagcaaccccaacttggacccctactacccgctcaggcttttctgcccagcaggtggctacccaggctactgctaagactcgtacttcccagtttggtgtgggcagctttcagactccatcctccttcagctccatgtccctccctggtgccccaactgcatcgcctggtgctgctgcctaccctagtctcaccaatcgtggatctaactttgctcctgagactggacagactgcaggacaattccagacacggacagcagagggtgtgggtgtctggccacagtggcagggccagcagcctcatcatcgttcaagttctagtgagcaacatgttcaacaaccgccagcacagcaacctggccagcctgaggtcttccaggagatgctgtccatgctgggagatcagagcaacagctacaacaatgaagaattccctgatctaactatgtttccccccttttcagaatagaactattggggtgaggataaggggtgggggagaaaaaatcactgtttgtttttaaaaagcaaatctttctgtaaacagaataaaagttcctctcccttcccttccctcacccctgacatgtaccccctttcccttctggctgttcccctgctctgttgcctctctaaggtaacatttatagaagaaatggaatgaatctccaaggcttttaggactgtctgaaaatttgaggctgggtgaagttaaaacacctttccttatgtctcctgacctgaaattgtatagtgtgattagtgctgagatcagacggcaggtaaaacgcaccctaccatcaacgggtaggccggaaacgactggagccataggcaagaactcggagagaggcgcggcaagacacactgccacaatatagaggacaggaacatggaggaaaaaagggctcacacgtggcacatagactcagcagctagaaagaccctgaaaccccagtaccaacaccaaactagaaaaaaaagtaggaagagcacagaaagcacacaacccaacaaacaacan

SEQ ID NO: 25674 - DNA, 2154 bp, Homo sapiens
  misc_feature 1, 2, 3, 2145, 2146, 2147, 2148, 2149, 2150, 2151, 2152,2153, 2154: n = A,T,C or G
nnnccgcggccgcgtggggtttggctgatatgcaggatcatgccccagccattgggcgctacatacggactttaatgtcaagcgggcagatggcaccctcatcatctaacaagagtggggagactaaccctgtccagatctacattggcctgcttcagcagctgttagcaggtgttggaggtttgccggttatgtactgtctattggaagctgtgtcagtgtatccagaaaagctggctaccaaatttgtagacaaaacagaatggataaagagtctgatgaataacagtaaagaagaaatgcgcgaactggcagcgttgttttattctgtagtggtatcaacagtgtcggggaatgagttgaaatcaatgatagaacagcttataaagactacaaaagacaatcacagcccggagatacagcatggatccttgcttgcattgggattcacggtgggaaggtatttggctaaaaagaaaatgagaatgtcagagcaacaagacctggagagaaatgctgacaccctccctgatcaagaggaactcattcagagtgctacagaaacaataggctcatttttggacagtacatcacccctcctggcaattgctgcctgcacagccctgggtgaaattggcagaaatggtccacttccaatccccagtgagggatctggctttaccaaattgcatcttgtagaaagcttactaagtagaataccttccagtaaagaaacaaataagatgaaagaacgagcaatccaaacactgggatattttccagttggggatggagattttcctcaccagaaactcctcttgcaaggtctgatggattctgtggaggccaagcagatagaacttcagttcactattggcgaagccattaccagtgctgcaataggaactagttctgtggctgcccgagatgcctggcaaatgactgaagaggaatatactccacctgctggagccaaagtgaatgatgtggttccatgggtgttggatgtgattttaaataaacatatcatcagccccaacccacacgtgaggcaagcagcctgcatctggctcctttcccttgtcaggaagctaagtacccacaaagaagtgaagtctcatcttaaagaaattcaaagtgcatttgtttcagttctatcagaaaatgatgaacttagccaagatgttgcatcaaagggccttgggttggtttatgaactaggcaatgaacaagatcaacaggaattggtttctacacttgtggaaacacttatgactggcaaaagagttaaacatgaagtttctggagagacagtggtatttcaagggggagctcttggcaaaacaccagatggtcagggcctttctacttacaaggaactttgttctctggcaagtgatcttagccagccagatctggtgtataaatttatgaatttagccaaccatcatgcaatgtggaactctaggaagggtgctgcttttggttttaatgtaattgctaccagagctggagagcagctggctccttttctgcctcagctagttcctcgactttatcgttaccagtttgatcccaaccttggcattcgacaggccatgacaagtatttggaatgcgttggtcactgacaaatccatggtggataaatatttgaaagaaattcttcaagatttggttaagaaccttacaagcaatatgtggcgagttcgagaatccagctgtttagctttgaatgatttattgagaggaagacccttagatgacatcattgataaacttccagaaatttgggaaacgctttagagtacaagatgatatcaaggaatctgtacacacaaagacggcagaataagctcgaaaactctgagcaaggtctgtgggaaatgtgtgccctggacaaggaaaacaggtggcaagagaaacaaaggcggcccaactgggacgtcaataggggaaaaagaatgttaacacccgcatgagaaaatagaccatgaaaaacaccaggataaataaaaagaaagaaaagaacagagcgcaaaacaacacaagcagacaaagtaatgcgaacaccatatacagaacaccaaaccagaaaaacttagaaaaaaaaaaaacgacaacactgaaacaacaatacacgaannnnnnnnnn

SEQ ID NO: 25675 - DNA, 1225 bp, Homo sapiens
  misc_feature 1223, 1224, 1225: n = A,T,C or G
cgtccgcacttctcccctgttcatcctttttcctcttccctgcttcctgggaataaaaggaacttttttaaaaaaataattagtccacaggtctcattatctttctttatgattaatctatgactttttggtacaagaacaatggaaaaagtgaattaaggtaatgaacaaaacctttcacccacttaaacattttccagttttgagattcctcttcgtgtttgtggtgtcttccccttgttaccccttctgccctttttctctgactatggtaatttggtctttaggctcatatcagtctccccgagacattctgcagtcattatcacctttttgggtggattttattttgttttattttgttttttttaaaaaaataactttttaacattggtgcatatttgcttgggatagagcttgtgtaatttaccaatcgtattgattgtaagtgattgtgccctgcagaggtatatttaacaagacaaaaataatcttggttaataaaggagcccatgagatttgagtcaggttgtaagtgaaatcacttacacttttggatagaatttatactcctgctcttataaatcagtggtagacttaccattttttaaagttttcttgcatttttttgtttttttattgccacagctccctattctttcttgcctgcctccacccccctgttcaggaaaaaaaaaaattgagccttaaagtgacagctgattttttaattgctgaattttgtgaaattttactttttccaagtgtttccaactttaaaaagagaagtgaagacaaataggttggaatggtgaagacaaatggattggaatttcacaggctgtgaataattccttaggatctggcaaaccgtgaagtcttatttggaagaccttatctcctgagaagttcttttggagtaggaaaaagaacctatttgaatttgacggtttcttctgctttaactcgtgaaattcctgatttaagcaggtttcacaccagttgtgcggccacacacgcattgtgtccggcagaggttagggccacgaactgggctaatagtccattcccctgtgccgatttgggagtaggggcccttccacatggtatacgggcggttatttacacgcccttgggaaggctcctcttcctgaggacacttttgcataggtaggcaggcgatgcttaaggagggccgctgatgacacgctgtcgctttaaannn

SEQ ID NO: 25676 - DNA, 3049 bp, Homo sapiens; identical to SEQ ID NO: 23930
  misc_feature 3049: n = A,T,C or G

SEQ ID NO: 25677 - DNA, 4852 bp, Homo sapiens
  misc_feature 1, 2, 4850, 4851, 4852: n = A,T,C or G
nnctgccggggccgccactgcagctgctgctgcctgctggttgccgcgtcttcccggaggcgactgctggaagctgcagggaacagctgcggtgctctgccatattgtgtcttccccggccggtccctcgcctcccggccgagctgacgaactgtaagagtaaatgggtccagtaattggaatgactccagataagagagctgaaaccccaggagctgaaaagattgcaggattaagccagatttacaaaatgggaagcttgcctgaagctgttgatgctgccaggccgaaggccactctagtggacagtgagtcagcagatgatgaactcacaaacttgaactggcttcatgaaagcactaatcttctaacaaacttcagcctcggaagtgagggtcttccaattgttagtccattgtatgacatagagggagatgatgtgccatcctttggaccagcttgctaccagaacccagaaaaaaaatcagcgacttcaaagcccccatactcctttagtcttctcatttatatggccattgagcactctccaaataaatgtttgcctgtcaaagaaatttatagctggattctggaccattttccatattttgctactgcaccaacaggctggaagaattctgttcgacataatctgtccctgaataaatgttttcagaaagtggaaagaagccatggcaaggttaatggaaaaggttccttatggtgtgttgatccggaatataaacccaatcttatccaggcactgaagaagcaacctttttcttcagcatcttcacaaaatggttctttatcacctcactatttaagctctgtaatcaagcagaaccaggtgcgaaacctcaaagaatctgatattgatgctgctgctgcaatgatgcttttaaatacttctatagaacaaggaattttagaatgtgagaagcctcttcctcttaaaacagcattgcaaaaaaagaggagttacggcaatgcatttcatcatcccagtgctgtacgattacaagagagtgattctttagccaccagcattgatccaaaagaagatcacaattacagtgcaagtagcatggcagcacagcgttgtgcatccaggtctagcgtgtcttccctgtcttctgtggatgaggtatatgaatttatcccaaagaatagtcacgtgggaagtgatggcagtgaaggatttcacagtgaagaagatacagacgttgattatgaagatgatcctcttggagacagtggctatgcatcacagccttgtgcaaaaatctctgaaaaagggcagtcaggcaaaaagatgcgaaaacagacatgtcaagaaattgatgaggagctcaaagaggcagctggatctctgctccaccttgctggaattcgtacatgtttaggttccctaataagtactgcaaagacacaaaatcaaaagcaacggaaaaaatagaaatacttaaagtgtggcaatactctttcacttaattctttacaagggatatcaaagccataatggacttcattagttttagggtagggaagggatactaattacttatttctttcaaaacatttttggtttttggtttttaaaatttttattaaaccattgctgttaggatcatgcctgatcagaaatacatgatgtgaagtcctaaaagcataatttttgtgataaatgtgtccaagatttgaaaatttttatataagaaaatccccagcctctgtcttaaacttgtgggacaaaaatcctttcttctgttaatatgtcagaatgtaagatttggcaactcgataaatttttttcattttcttttccaatctgtaactatagttactgaaccagctaaaaattttgctgatgtatttttcatatacttctctcctgacacgcaatccggtaacataagattgaaattttttttactttgtcttaatttgtttctaattttttttttgttgtcgtgtgagcaaagacaaacataaattgaaaaacatcctgatgtttagaaagtttcttttggttacgtaggtagagaatacaacaaagagttctaagacttagaaaagacaattttgtggtgtcatttcatccaagaacactcccaattcctattagaatggtagctttgaagtgtttttacttcagagatcctgcatagcatttattggggccttttattctttcccaaagtgctttgcaaacattaagttttagccactagctgcctttgttgagtataagttatccagtgagaggatatagccaattaagtgtgttatggagtacacccattttgacacacttgtaataagagaatctttcatttgcctgccatgtgtactgtattatgagaatcttataatcggaatggagtgaaatgaaacattttgagtactgatggcatgttatcatacataaagtaggtcatttaggaaaaaacttctgtccaagctttgtatgaattaaattcataagtataccaaattaaatcttaatagatttaatgcaattttacagacacaataccttcatgaatttcaaaattcatataaaatttgatcttatgcaatacacctttttgaggaggcagtgtaacaacctatagtgccattgatccatgagaaaaagattttctggtactactccaaaagtgctttgactaagtatcttaactatttgaacagtctgcttatatgagacagtttttcatagtatcatttgtataatttgattagattattcagaaacaataggatgctaaactaattcattgtatcttttttttacaatggtggaagcaactttctgaaagttcagtcttatgctacatcctaagtcatagacaatgaccttgttttcattattctgatagattgtatacatatgtacacatacatatacacatatgcacagtcaaggtcatgatgttgatttgctttcagctgtttctgtgattataaagcattttttaagagacaaattttaacttttaatttttattttggcaaaactgtcaaatgagaaaaatgattttaaaaacttttttttcaattgacaagactttaagtcagggataacagtattaatgttctctgttctgtttccatgttaaatttaatttaacctggatagccacattaatgaattggtgctgtcaaaatatagtaatttttaaatttgttaataatgaaaacccttaagcatgcaggatgaggtatttgggttttttttttagatcgatcacatctacagaaaatggctaaaccaagttaacttttattatagacagtgaataaaacaccaaaaacccaaaaatgctttaaccacagtataaataatagattatacacatcatcttaataactatttttaagttatttaccatagcctctgtatagaccttaggaacagtgtttcagtgatctggcaccagtttattttgttctgctgaaattctgtatcacaaatgtgctacctggtttttgtccattagataattactctttataaggaaaggaaagagaagcagagttagttccagctctaatagggatcttcaaagttattttgtcttgatgtatgtaacagtaattctttacatcttttgatttttctcttcctttttattcactcttcccacgaatttaaatgtttaagttatattcatcactagcaaggatgataaacacttgtgcactgaaagctaacagggagaggttacacaatattttacagtttcttaaacataatttaatgcatcaccttccacttgctaacataccaagtcagttattttcaagggaagaaccttttaaattatggtcctccatttactacttccattgagagtatgctctcattcctcaggtgttttgagaaacatgactaataaccacacaattaagtagagtcattccaagtcctatggcctggaaattgtattccctataatatacaaattttcctgtaataaagtcaacttagaaactccaaggaggttacatgttttccaacatatcctaaaaactgtgatataagctaacatataatttgccttacgtcaaaagaatatgttttgttgcagctgattccagtttataatagatccctagtaaaaagctttgattcaacacaattgttcatcttcacatcccaaacagaatcactgtttcttgaatatatatttttgaagtttttttgtgcaatatattactaaatcagttattattttacttttccaaattcagagaaagaaaacagattacctgaattcatggaaaaggtggatcacctccctttttccaccttcaagcctttcctgtcctcatagccagcatgacttcttttaacttggattcctttgtatatagtaaagtttagtatatatatatttttttctttttgctactttctgaggcattatgtaaagggctcatactagatgttcagttaaatatactttagcacaaagtcaaactagagaatgtgttaaggagggaatgtatatgtcttggtagaccaggaggcctttgccagcaatttaagcaacagatgtgaatacttcacaaagctgtaagacatgttctaatactacaaacactaacaccttgtgaagatacagcattactagaacgggaggttcggttacatatatctaccgggttcagggattacggtaagtggaagcgatcctgtggttacccagcttccgctgtagggtgcaaaataagagagggacgaataggaccgcaaaaaattcgacgagcaggaaattacggcatacgtaaaatgccaataaagaacacagacagaaatgtatcttcagtgagtccacaannn

SEQ ID NO: 25678 - DNA, 2727 bp, Homo sapiens; identical to SEQ ID NO: 24799
  misc_feature 1, 2, 3, 2720, 2721, 2722, 2723, 2724, 2725, 2726, 2727: n = A,T,C or G

SEQ ID NO: 25679 - DNA, 2493 bp, Homo sapiens
  misc_feature 1, 2407, 2408, 2409, 2410, 2411, 2412, 2413, 2414, 2415,2416, 2417, 2418, 2419, 2420, 2421, 2422, 2423, 2424, 2425,2426, 2427, 2428, 2429, 2430, 2431, 2432, 2433, 2434, 2435,2436, 2437, 2438, 2439, 2440, 2441, 2442, 2443, 2444: n = A,T,C or G
  misc_feature 2445, 2446, 2447, 2448, 2449, 2450, 2451, 2482, 2483, 2484,2485, 2486, 2487, 2488, 2489, 2490, 2491, 2492, 2493: n = A,T,C or G
ngtacaaatagctacagaactttgtgcctattttattcctctatttattcttctaggaagaagcctcttcctagaatcttgaaatagatcccttgactgaatgccaattcctctcctgtttttcaaatgagagaaccttttctgatcaccttgaccttttccctcatttcatatgtcttcccagaaagtagacagactgctctgctgccttcagtcattgtgcctcatttgggttgtccctccttctttgtggagaaatctggaaatgatgcacagtgtatccaaaagttgtgggatgaagtggatgaaagtgatttaattcatttttagaatttttttttgttttgttttagcaacatgctgaacaactaatttactttaaaaataagccagttaaaacaaaggacgctaagcccaagtggggggcaatattagtcaggatctttggggtctaattccagaccaactttcagaagcacttctttgtctctgttctcacctctgctgtccctctcttccctcatcccctaagagagacaaagataaaagcccacctgcatccctaagtcttactgagatcagccaccccaggggagagaaactggatctacttacagccaccccctgtttccatccatatacttacttcccccaatttgcatgtgattatggaaacaagtcatgctcatgaaagcaactgtaaaataaaaggttatggagtagttcagcaacttcttcacagccagctttgtggagctggggaggacttagggcccattggagtctcttatgtgtacagcttcagggctgtccctttcagtttgattttaagcaatgcctcacttcatagcttagggggtaaggattccattcaggtaggttgtctaaaggaactaatgggacctctcagtgaattagctgaccagattttaggaaatctttttaatttctatgattttccttctcacattttgaaatggtaaaattgactggaaataatttttcttggtgccttattggttttccttgcaaacctttctcatattttctcatgaccattgccagtgaccaaggcccatgtgtgtgttgtgtgtaattgtgggcatgtacaagcttaaataacgtgccgacagcactgtttcaaagttggtattcattaggctgttgcctcctgggctggagctgcgctaatcctgacaccggctgccaggagaaaacctcatggatcacacaccaaaccttaataacagcatccgtgacctgcactctccagtacagaatgggaaccccagagctaggaaatgtagttgtatattttaatgaactgctaccccagccaaagaagcttctttcacttttgtgctctacagaaagcccaaggggggtaggagggacagagctttgaataactgctttctaacactaaatgtggccaacaggacagagcacatcacacgtataggcaggtgtgagggacagtggctaagaattgcctgctccctctgcatgctctttcttgtttccaaagtccaatcaagtgatcctgggaaacaaatctgtctggattgcggagggtggttctgaaagaactgccaagacgttaaagaagggtgaagagtaggcagaatataagtagctaacctgagtcaagactctcaaaagctagcagcctgatgacaataggatttatttcagccaggatagtgtctgtctgtgagtgcatcattttaagacagtatgacttcatgttgttacaaactatgtatagtatgtatgttttgtgggttgtatatatacataatatatattatatatatatatgagagatttggtgacttttgatacgggtttggtgcaggtgaatttattactgagccaaatgaggcacataccgagtcagtagttgaagtccagggcattcgatactgtttatgatttccatatatgtatagtgcctatcccatgctgtagtcactgttatgttaaatccagaagttacactagagccagcgatactttatttgtagacaatcaatttgaatccatatgttattactggcagatgatacatgattacagttctgaatctgtaacacttacaaaaggaaacccagagcagcttgatgagtttttgtttctgcttcgttcctgggagtcagtagaaacagcagttgtatgtggttatgttagtctcaagatacttaatttgttgaccttacttcagaaaaattttgtatgtattatatttgtgggaaggtaaaataatcatttgagatttttatcaaatatgaagattagttatttatgaaaaacaaagaaatgtctatttttctttgttcccaattaatgtagataaattttaaaatgcattaaagtaatggtaaagacaataaaaagatgctgtaannnnnnnnnnnnnnnnnnnnnnnnnnnnnnnnnnnnnnnnnnnnnggggctgggctaaactaaaaaaaaaaaaaannnnnnnnnnnn

SEQ ID NO: 25680 - DNA, 359 bp, Homo sapiens
  misc_feature 1, 2: n = A,T,C or G
nnagaattttggtaaattatactggttacttatttaaaatttgagatgtgtttgtctttgtagttaattgaaagaaatagggtaattttgtgagtcattttagggtttattattggcaataaagaatttataaagagcaaaaaaaaaaaaaaaaagtatgtgggggtctgctgcctctggaactaaatggggtgaggtcacattaggttatctataacgttggaaaacgatggagttaacacccattatggagattaaccacttttcatcaggtttttaacttaagtcgtgaggaatacaacggtgaacacaagattcattttattttcatcaccatgggacgtatcctgttgttgagt

SEQ ID NO: 25681 - DNA, 967 bp, Homo sapiens
  misc_feature 965, 966, 967: n = A,T,C or G
acctaacaaacccacaggtcctaaactaccaaacctgcattaaaaatttcggttggggcgacctcggagcagaacccaacctccgagcagtacgcgggatcgcttcctggtcctcgcctcctccgctgtctcctccgctgtctccctggagttcttgcaagtcggccaggatgtctcaggctgagtttgagaaagctgcagaggaggttaggcaccttaagaccaagccatcggatgaggagatgctgttcatctatggccactacaaacaagcaactgtgggcgacataaatacagaacggccgggatgttggacttcacgggcaaggccaagtgggatgcctggaatgagctgaaagggacttccaaggaagatgccatgaaagcttacatcaacaaagtagaagagctaaagaaaaaatacgggatatgagagactggatttggttactgtgccatgtgtttatcctaaactgagacaatgccttgttttttttctaataccgtggatggtgggaattcgggaaaataaccagttaaaccagctactcaaggctgtcaccatacggtctaacagattaggggctaaaagattactgactttcctggagtagtttttatctgaaatcaattaaaagtgtatttgttactttaaaaaaaaaaaaaaaaaaaaaacaaaatttttggggggctcgacctcagaaagttttttaaaacattcggtgggcgcggggcccagtttgtgagtgaacatgggccaacgtggcccaggaaatccggctggactctgggcgtggtttcccccataaaaagcgcggggcccgttttgaaaaccagggttccggggctcaccgctcacaggccagcgtctatccgccctcccttctactgggacagcttacccagacgaaagttaatagatggcactaaatacaaacaagcatgaacaaacgcaacgcgctacnnn

SEQ ID NO: 25682 - DNA, 1641 bp, Homo sapiens; identical to SEQ ID NO: 20385
  misc_feature 1, 2, 1626, 1627, 1628, 1629, 1630, 1631, 1632, 1633, 1634,1635, 1636, 1637, 1638, 1639, 1640, 1641: n = A,T,C or G

SEQ ID NO: 25683 - DNA, 3523 bp, Homo sapiens; identical to SEQ ID NO: 24215
  misc_feature 1, 2, 3, 4, 5, 3520, 3521, 3522, 3523: n = A,T,C or G

SEQ ID NO: 25684 - DNA, 2170 bp, Homo sapiens; identical to SEQ ID NO: 22582
  misc_feature 1, 2, 2090, 2166, 2167, 2168, 2169, 2170: n = A,T,C or G

SEQ ID NO: 25685 - DNA, 1801 bp, Homo sapiens; identical to SEQ ID NO: 21112
  misc_feature 978, 979, 980, 981, 982, 983, 984, 985, 986, 987, 988, 989,990, 991, 992, 993, 994, 995, 996, 997, 998, 999, 1000,1001, 1002, 1003, 1004, 1005, 1006: n = A,T,C or G

SEQ ID NO: 25686 - DNA, 2571 bp, Homo sapiens; identical to SEQ ID NO: 22763
  misc_feature 2567, 2568, 2569, 2570, 2571: n = A,T,C or G

SEQ ID NO: 25687 - DNA, 2670 bp, Homo sapiens; identical to SEQ ID NO: 24256
  misc_feature 1, 2, 3, 4, 5, 6, 7, 8, 9, 10, 11, 12, 13, 14, 15, 16, 17,18, 19, 20, 21, 22, 23, 24, 2643, 2659, 2660, 2661, 2662,2663, 2664, 2665, 2666, 2667, 2668, 2669, 2670: n = A,T,C or G

SEQ ID NO: 25688 - DNA, 1241 bp, Homo sapiens
  misc_feature 1239, 1240, 1241: n = A,T,C or G
cgtccgccccgcgtccgggcggtgcctgcgtcccgccagtacaatgcctccaatttcattctggtcctgcaatgcgcgcgacccggcggcgggacaggcttgctgcttcctcctcctcggcctcaccattccagaccaaaattgaaaaaatggttgacctcacccaggtaatggatgatgaagtattcatggcttttgcatcctatgcaacaattattctttcaaaaatgatgcttatgagtactgcaactgcattctatagattgacaagaaaggtttttgccaatccagaagactgtgtagcatttggcaaaggagaaaatgccaagaagtatcttcgaacagatgacagagtagaacgtgtacgcagagcccacctgaatgaccttgaaaatattattccatttcttggaattggcctcctgtattccttgagtggtcccgacccctctacagccatcctgcacttcagactatttgtcggagcacggatctaccacaccattgcatatttgacaccccttccccagccaaatagagcttgagtttttttgtggatatggagttactctttccatggcttacaggttgctgaaaagtaaattgtacctgtaaagaaaatcatacaactcagcatccagttggctttttaagaattctgtacttccaatttataatgaatactttcttagattttaggtaggaggggagcagaggaattatgaactggggtaacccattttgaatattagcattgccaatatcctgtattcttgttttacatttggattagaaatttaacatagtaattcttaagtcttttgtctgatttttaaagtactttcttataaatttggatcatgttatgatttgtaacattcacacaacacctcacttgtgaatctataaaagaattgcacgtatgagaaacctatatttcaatactgctgaaacagacatgaaataaagaatttgaagaataaaaaacaacgggggccgcttctagccaatgctatcctagcgttcgaacggcatgaaagttacctggaggggcacagtatggactctcatcttttgtagaaagagtcgcaaaaggacgtataaaagagggcgaggataaaaatagtaggtgaaagaagtcgtgtatgtaagaaactgttggggtgaggaacacaacgtgacatatatgatagttgtgtggtagtatagatagattcagaatagtcaagatagtgaaannn

SEQ ID NO: 25689 - DNA, 1952 bp, Homo sapiens
  misc_feature 1950, 1951, 1952: n = A,T,C or G
gccagcggcgcggcgcggatatgggtctgcaggatggagttcttccggtctggcgtgctcctgatcagagttactctgatctgaagattttggcgttcaaggcattaagataatagcctgagttgttcatggagtttttcatcagtatgtctgaaaccattaaatataatgacgatgatcataaaactctgtttctgaaaacactaaatgaacaacgcctggaaggagaattttgtgatattgctattgtggttgaggatgtgaaattcagagcacacagatgtgttcttgctgcctgcagcacctactttaaaaagcttttcaagaagcttgaggttgatagttcttcggtcatagaaatagattttcttcgttctgatatatttgaagaggtcctgaactacatgtacacagcaaagatttccgtgaaaaaagaagatgttaacttaatgatgtcatcgggtcagattcttggtatccgatttttggataaactgtgttctcagaagcgtgatgtgtccagtcccgatgaaaacaatggtcagtccaaaagtaagtattgccttaaaataaatcgccccattggagatgctgctgacacccagggatgtgatgtagaggaaatcggggatcaggatgacagtccttctgatgacacagtagaaggcacacccccgagtcaggaggacggcaagtcgcccaccacaacgctcagggttcaggaagcgatcctgaaagagctggggagtgaggaagttcggaaggtcaattgctacggccaggaagtagaatccatggagaccccagaatcaaaagacttggggtcccagacccctcaagccttaacatttaatgatgggatgagtgaagtgaaagatgaacagacaccaggctggacaacagccgccagtgacatgaagtttgagtatttgctttatggtcaccatcgggagcagattgcctgccaggcgtgtgggaagacgttttctgatgaaggcagattgaggaagcatgagaaactccacacggcggacaggccatttgtttgtgaaatgtgcacaaaaggtttcaccacacaggcccacctgaaagaacacctaaaaatccacacaggatataagccctatagctgtgaggtgtgtggaaaatcatttatccgtgccccagacttaaagaagcatgagagagttcacagtaatgaaagaccgtttgcgtgccacatgtgtgacaaagccttcaaacacaagtctcacctcaaggatcatgaaagaagacacagaggggaaaagccttttgtgtgtggctcctgcaccaaggcatttgccaaggcatctgatctgaaaaggcacgagaacaatatgcacagtgaaaggaagcaggttacccccagtgccatccagagcgagacagaacagttgcaggcggcagcgatggctgcggaagcagaacagcagctggagacgatagcctgtagctagaggcggtgggacagggacactttgcctggaaagtggagactgagatgacgtggatcataatgagtgaatgccagttacaatatttttgtggaaacgtatggaacattgtactcactggacttaaggcagtgcttggttagctatttttaagacttttcaaggaaatggtgttcctcagttctgaccaaaccgtttcactgtcttgtctggtgtctagtattaatgttgccagtaagcacctctctcccttttttttttttattattttaatttgagaactcctgtgtccagtttagaagtgagagacttccatttttagttcctttacactcaccaccctagcaagtgccctgcacagagtaataagtaaattgatttcctaatcacaattctatgtgacttatggtcaaaacagcagtcgagaaaaatcactttttctttcatcatacacacctctaaaaagaactggaannn

SEQ ID NO: 25690 - DNA, 949 bp, Homo sapiens
  misc_feature 1, 2: n = A,T,C or G
nnctccaccgcggtggcggccggattgcctgaagtcagaagttcgagaccagcctgaccaacatggtgaaaccctgtccctacttaaaatacacaagagctgggcatggaggtggtgcgcgcctgtaatcctagctactcgggaggctgaggcctaagaatctcttgaacccaggaggcagaggttgtagtgagccgggatcacgccactgcactctagcctgggcgacagagagagagactgtctaaaaaaggaaaagaaaaaaatttatacgccaaaaaagatattctgagataacctgtagttaccactaactttgtgacaaaattataaaaatccacagccatctatgaatctgtaggcagacctgaagtttgaacgactggtgaagacatctgattttctttatagccaagttaggataacaaaatgcaaacaagtcattaatatttactatatgcaagatacagaaagatgaaggaaggagtaagaagttatccttcgtggaactattcaaagcaaaaatgcaaaataccagggaaagctttgaagaaccaagatttgagcaggttcttagaatatagattggattggatttgatttcaagaaagatgaacgtgtaaagcagaagtgggaagccaaaaacttttttccaaattagaattaagcattctttcaatgaacatttggaaatcaaggtagaaaaatatccctagggcctagctgaggagtctgtatgttgttgggttttgatagtaaccagtccaagattttgttattagacgtgggtttctgaatagacaggcatttctgaacagacatgacaggatcatggaatatagtgaaagataatggggctcatacagcagtctagacttaaggtgattcaactactatatattaaactagattatctttattttttaattttgaaatctgatgcttaagc

SEQ ID NO: 25691 - DNA, 940 bp, Homo sapiens; identical to SEQ ID NO: 23135
  misc_feature 1, 939, 940: n = A,T,C or G

SEQ ID NO: 25692 - DNA, 356 bp, Homo sapiens
acaggtggcataagccaggcagacatcagggaaagggcattccaagcagagggagaaagtgcacaggccctgagaggagatgagcctgaagtaagccagtgtcactagggccaacaaggcagcgagaaatgggagccggggcaaagcccctaaagggtgctgagcagagaagtggcataacctaaggtgcattccaaaagagctgccatggcgggaatcatctgtaaggagtaaagatcagaagcagggagaccagttggaggcaactgcattaatccaggggacagggggtggtggctgggaccagggtgagagcacatgaagtggtgagaaatgatcctggatctgccttgaag

SEQ ID NO: 25693 - DNA, 381 bp, Homo sapiens
accaaatcacaaataccacaaataaatgttaatgttaaattgtaacaatataatgaataaacattcagattcttaataaaatcttcctttaacattttttaacttaccattatactaaataatctatgcagacccgcgtacctgcacaggatttatgttcctctcatgctggttaatgcagctgacgatccgttggtgcatgaaagtcttctaaccattccaaaatctctttcagagaaacgagagaacgtcatgtttgtgctgcctctgcatgggggccacttgggcttctttgagggctctgtgctgttccccgagcccctgacatggatggataagctggtggtggagtacctcggccgccaccgcggggagctccaa

SEQ ID NO: 25694 - DNA, 599 bp, Homo sapiens
  misc_feature 1, 599: n = A,T,C or G
nagaacataagcccagagtcagagagggcctttgacgaacatttacacagtaagagtagtaagcaggatcagtccaaaactttctcacagagcctgataatttgtgtaaatcttaattatgaggccataacaagtttcatgcttcagaatttgaataattctcaggttgaattggtcaatagtactaagacttttcagaaataactaaatctaactctaaaccacattatattattattggattatatttcattctcttaacagattggttcagaatcacctgcagggcttattaaaacacagattgctgggtctcacctccagaatttctgattcagtagggcctgagaatttacatttctaacaggttttccagtcatgctgacactgttggtctcagacaccacacattgaaatccactactctaagatatggctaaattttggagaagcactacataaacatgtaactggtcccacccctgggaatcttttatatgaagctaaaacactgtccatctggtcaagtagtctcgccaccactctacattctcttaaaaaggcattctaaatcatgcaataagcctttaaaagccggn

SEQ ID NO: 25695 - DNA, 2452 bp, Homo sapiens; identical to SEQ ID NO: 22637

SEQ ID NO: 25696 - DNA, 1178 bp, Homo sapiens
  misc_feature 1, 2, 3, 4, 5, 6, 7, 8, 9, 10, 11, 12, 15, 18, 1174, 1175,1176, 1177, 1178: n = A,T,C or G
nnnnnnnnnnnnggntanggacgcgcgccattgtgttggtacccgggaattcggcccctatcccggctgacgtgggacgacaaagatggcggcagggaccagcagttactgggaagatctcaggaaacaggctcgacagctggaaaatgaacttgacctgaaactagtttccttcagcaaactatgtacaagttacagtcatagcagtacccgagatggaagacgcgacagttctgatacaacaccccttttaaatggatcaagccaagacagaatgtttgagacaatggcgattgagattgaacaacttttggcaaggcttacaggggtaaatgataaaatggcagaatataccaacagtgcaggtgtcccctccttgaatgcagccctgatgcatacattacagcggcatagagacatattgcaggattatacacatgaattccataaaaccaaagcaaactttatggcaatacgggaaagggagaatcttatgggatcagtacgaaaagatattgagtcatataaaagtgggtctggagtaaacaacagaagaactgagctatttttgaaagaacatgaccaccttcgaaactcagatcgtctgatagaagagacaataagcattgctatggcaacaaaagaaaatatgacttcacagagaggaatgttgaagtcaattcacagcaaaatgaacactttggccaatcgttttcctgctgtaaacagcctgatccagaggatcaacctgaggaagcggcgggactcgctcatcctagggggtgttattgggatctgtaccatcctgttgctgctgtatgcgttccattgatgggacatcttcagggactcttgacagccaccgctttcacaccctggtctggaataaggaaacatcggagggagaagttgactgtcttgataattagcctgaccagcaggatgaatgcaagactgacagtgatggactctgtgacatggtcaggttgagctgaagccacagtttctctgtgctgtgttttctaacacatttttctgtttttaattaaaaaaaaaaaaaaaaaagtcgacgcggccgcgaatttagtagtagtagtaggcggccgctctagaggatccaagcttacgtacgcgtgcatgcgacgtcatagctcttctatagtgtcacctaaannnnn

SEQ ID NO: 25697 - DNA, 1472 bp, Homo sapiens
tatagggagtcgacccacgcgtccggtttggtcgttcgttgggcggtgctggtttttcgctcgtcgactgcggctcttcctcgggcagcggaagcggcgcggcggtcggagaagtggcctaaaacttcggcgttgggtgaaagaaaatggcccgaaccaagcagactgctcgtaagtccaccggtgggaaagccccccgcaaacagctggccacgaaagccgccaggaaaagcgctccctctaccggcggggtgaagaagcctcatcgctacaggcccggggaccgtggcgcttcgagagattcgtcgttatcagaagtcgaccgagctgctcatccggaagctgcccttccagaggttggtgagggagatcgcgcaggatttcaaaaccgacctgaggtttcagagcgcagccatcggtgcgctgcaggaggctagcgaagcgtacctggtgggtctgttcgaagataccaacctgtgtgccatccacgctaagagagtcaccatcatgcccaaagacatccagttggctcgccggataccgggggagagagagcttaagtgaaggcagtttttatggcgttttgtagtaaattctgtaaaatactttggtttaatttgtgactttttttgtaagaaattgtttatatatatgttgcatttgtacttaagtcattccatctttcactcaggatgaatgcgaaaagtgactgttcacagacctcagtgatgtgagcactgttgctcaggagtgacaagttgctaatatgcagaagggatgggtgatacttcttgcttctcatgatgcatgtttctgtatgttaatgacttgttgggtagctattaaggtactaagagttgataacatgtgtacagggtccttttgcaataaaactggttatgacttgatccaagtgtttaacaattggggctgttaagtctgaccatacatcactgtgatagaatgtgggctttttcaagggtgaagatacaagtcttaaccacagtgtaacttacagtttcctttaaaaaaaaaaagtaaacctggcagctatagaatacactatgtgcatttataatagctattttatatattgtagtatcaacatttttaaattaaatgttttacattcacaagtggtggggagtcttgtcattaaggtgtgtgtaatttagtccagttggtatttcctgactagactgcatttgtttttaacagtagaaaaatgctatgcgtattaaaccttgcataagtcctcattctaccacatgttcactaacccctgaccctctggctggtaacacaacactaacggggattttatttataagggctctagagtaaaataacaagctattcacaccagcatcatctattactaatctagttagtgcagcttttcattgtgtttggtcttaggcctagattgagttcggtttcgtttctttttaatctttaagggggaaaactgt

SEQ ID NO: 25698 - DNA, 945 bp, Homo sapiens
  misc_feature 1, 2, 943, 944, 945: n = A,T,C or G
nncgggcagaggaagaaccagcagcgaagcaggcccgcgccttttttggaccttgtgtggtcgagccgtgggccttacactgggacacactgtcgctgaccaagtgcaccctggcaaccgtgtcttcgtctgctccggttcgtccagattgagccattccgtacaggtctaagcctcctcatatgccgctgcataagcagcaattgggatatacatccgtgcttttgttaataagaagaagtgacgggtattttctcacgattcttggacggacttgggcggcatgactcctaattgggagacagatcttggtggggtgaccttgagggccattaggagtagcattttcgcataaattgattggtaatagcttgaatgagatttttggtaggaactgagaggctagacgggaagagcaggtccaaataggagaaggagaatgatggaaatgaggggcccagctatagggagaagccacaacgcccagctccaaagattggtgttaaaagtctgaaagacattgtctgattttagaagccttgtcatttaactgcgaggcagcatctcgtactagtccagactggttggtggaaaaacaatcttcccctaaaaaggtgcatagcccacctttttcgacggttaggaggtctaagccacggtggttctgcagagttactgctgctaaggagtctatttgggattggagagtaagggtggattttgctatgtcttgtaggctgtctgagagatcctttaagagtgtatgatagtaggacagggaaggggacaaacctgctattccagttcctgtggcattggtaactcctagtcctataagcaagggtattatctgcacagccctatgctgatggacttgggctctgacagggactggtaaggtttggtttccaggggcaatgtcaattttggggcttaggaagannn

SEQ ID NO: 25699 - DNA, 4422 bp, Homo sapiens
  misc_feature 4406, 4407, 4408, 4409, 4410, 4411, 4412, 4413, 4414, 4415,4416, 4417, 4418, 4419, 4420, 4421, 4422: n = A,T,C or G
gggcttacagtggcgggagttggaggcgataacgatttgtgttgtgagaggcgcaagctgcgatttctgctgaacttggaggcatttctacgacttttctctcagctgaggcttttcctccgaccctgatgctcttcaattcggtgctccgccagccccagcttggcgtcctgagaaatggatggtcttcacaataccctcttcaatcccttctgactggttatcagtgcagtggtaatgatgaacacacttcttatggagaaacaggagtcccagttcctccttttggatgtaccttctcttctgctcccaatatggaacatgtactagcagttgccaatgaagaaggctttgttcgattgtataacacagaatcacaaagtttcagaaagaagtgcttcaaagaatggatggctcactggaatgccgtctttgacctggcctgggttcctggtgaacttaaacttgttacagcagcaggtgatcaaacagccaaattttgggacgtaaaagctggtgagctgattggaacatgcaaaggtcatcaatgcagcctcaagtcagttgccttttctaagtttgagaaagctgtattctgtacgggtggaagagatggcaacattatggtctgggataccaggtgcaacaaaaaagatgggttttataggcaagtgaatcaaatcagtggagctcacaatacctcagacaagcaaaccccttcaaaacccaagaagaaacagaattcaaaaggacttgctccttctgtggatttccagcaaagtgttactgtggtcctctttcaagacgagaataccttagtctcagcaggagctgtggatgggataatcaaagtatgggatttacgtaagaattatactgcttatcgacaagaacccatagcatccaagtctttcctgtacccaggtagcagcactcgaaaacttggatattcaagtctgattttggattccactggctctactttatttgctaattgcacagacgataacatctacatgtttaatatgactgggttgaagacttctccagtggctattttcaatggacaccagaactctaccttttatgtaaaatccagccttagtccagatgaccagtttttagtcagtggctcaagtgatgaagctgcctacatatggaaggtctccacaccctggcaacctcctactgtgctcctgggtcattctcaagaggtcacgtctgtgtgctggtgtccatctgacttcacaaagattgctacctgttctgatgacaatacactaaaaatctggcgcttgaatagaggcttagaggagaaaccaggaggtgataaactttccacggtgggttgggcctctcagaagaaaaaagagtcaagacctggcctagtaacagtaacgagtagccagagtactcctgccaaagcccccagggtaaagtgcaatccatccaattcttccccgtcatccgcagcttgtgccccaagctgtgctggagacctccctcttccttcaaatactcctacgttctctattaaaacctctcctgccaaggcccggtctcccatcaacagaagaggctctgtctcctccgtctctcccaagccaccttcatctttcaagatgtcgattagaaactgggtgacccgaacaccttcctcatcaccacccatcactccacctgcttcggagaccaagatcatgtctccgagaaaagcccttattcctgtgagccagaagtcatcccaagcagaggcttgctctgagtctagaaatagagtaaagaggaggctagactcaagctgtctggagagtgtgaaacaaaagtgtgtgaagagttgtaactgtgtgactgagcttgatggccaagttgaaaatcttcatttggatctgtgctgccttgctggtaaccaggaagaccttagtaaggactctctaggtcctaccaaatcaagcaaaattgaaggagctggtaccagtatctcagagcctccgtctcctatcagtccgtatgcttcagaaagctgtggaacgctacctcttcctttgagaccttgtggagaagggtctgaaatggtaggcaaagagaatagttccccagagaataaaaactggttgttggccatggcagccaaacggaaggctgagaatccatctccacgaagtccgtcatcccagacacccaattccaggagacagagcggaaagacattgccaagcccggtcaccatcacgcccagctccatgaggaaaatctgcacatacttccatagaaagtcccaggaggacttctgtggtcctgaacactcaacagaattatagattctaatctgagtgagttactgagctttggtccactaaaacaagctgagctttggtccactaaaacaagatgaaaaatacaagagtgactctataactctggtctttaagaaagctgccttttcatttttagacaaaatcttttcaacgctgaaatgtacctaatctggttctactaccataatgtatatgcagcttcccgaggatgaatgctgtgtttaaatttcataaagtaaatttgtcactctagcattttgaatgaatagtcttcactttttaaattattcatcttctctataataatgacatcccagttcatggaggcaaaaaacaagtttcttgttatcctgaaactttctatgctcagtggaaagtatctgccagccacagcatgaggcctgtgaaggctgactgagaaatcctctgctgaagacccctggttctgttctgcctccaacatgtataattttatttgaaatacataatcttttcactatgcttttgtggggttttttttaagtatgtgtaaaaatgtgatgctcagataagtacatttatatcagttcagtgttaaaatgcagtctcttgagttaaagtcatctttattttaaatgcagtgataaatgtcaactcttcggagaaactaggagaacaacaacagaaagctgtgtttgtcttttttctctcaaatatatctcccgtatgagatttcaggtccccatgttttcaccaagcaatctgctatgtcagccaacccaacatcactttctacaggaggttatgatttttgccatttactagaggaagatgttttatgaaatcaatttggggtttgaattcaggtgcagtcatcagttctttaggggctgcaatgttttaaaaaaaataagtcatcagattttaagaaaaaagtgatgatttcttattgatatttttgtaacagaatatagctcttaactgaaaatccagaaccagaaacataaatcttgagtttcttttcatgtacataaaaagcaatagccttttagtatagatagccctgagccaaaaagtaatagaattttctctagatatttaatacagagagtgtatagactgactctaagttaataatgtgcaaaatatcttaaacatccctccccttattcaacaattatgtatcagtgatcttgaaccattgttttatatttttcacctttgtaacctcatggaaagaggctttacatactttctatgtactatttacttagaagggagcccccttccagtcatgaaacttcatttgttttatccatatccctgaggactgtgtagactttatgtcagttctgtgtagactttatgtcagtttttgtcattatttgaaaatctattctgacaactttttaattcctttgatcttataagttaaagctgtaacaactgaaattgcatggatcaagtaagcatagttttatccagggagaaaaataaaaggaagccatagaattgctctggtcaaaaccaagcacaccatagccttaactgaatatttaggaaatctgcctaatctgcttatatttggtgtttgttttttgactgttgggctttgggaagatgttatttatgaccaatatctgccagtaacgctgtttatctcacttgctttgaaagccaatgggggaaaaaaatccatgaaaaaaaaaagattgataaagtagatgattttgtttgtatccctacccatctcctggcagccctactgagtgaaattgggatacatttggctgtcagaaattataccgagtctactgggtataacatgtctcacttggaaagctagtacttttaaatgggtgccaaaggtcaactgtaatgagataattatccctgcctgtgtccatgtcagactttgagctgatcctgaataataaagccttttaccttatctgatgtccttttttgagctttttgcattacctagaagcagtctacaaaaaagaactatagtagtcaagaatcccttctacttgttcattaaaatgtttattccccagttataatctatttcaagctgaaagagcttttaataaaaaacatcttgcnnnnnnnnnnnnnnnnn

SEQ ID NO: 25700 - DNA, 825 bp, Homo sapiens
  misc_feature 806, 807, 808, 809, 810, 811, 812, 813, 814, 815, 816, 817,818, 819, 820, 821, 822, 823, 824, 825: n = A,T,C or G
tcgagcggccgcccgggcaggtacatcacagaactcacacgggagagagaccctatggctgtgatgagtgttctggcctataggaacagacattttcagtaatggaagaaggagcttccaggctggggaagatcatcatttccagtggtagcttgacctgagatgatacctgaccaccacttctgggaaggcccagaatagacagaagagagagaacatactagagttgctagcccctaagagttgaacgaaatgggcaaggcccagctgaaataacaggaaacacatgaaaaatgccacgattgtaatgtctgtgaggagagagcaaggcagttcttcaggggaggggtcattgtcattcgaagatgtggctgtgggcttcaccagggaggagtggcagtttttggaccagtctcagaaggtcttgtacaaggaagtaatgttggagaactacatcaacctagtatcaatagggtatcgaggcaccaagccagattcgctcttcaagttggagcaaggagaacccccagggatagcagaaggagcagcccacagtcaaatctgtccagggtattcattcaggagaaggaccctacagatggagggaatgcaggaaagctaagaagaatcacacctcattgcagatctgcattaccgttggaaaacagcagcctcagaaccacagtagccatgaagaccatcagccttcaaccaccacccttgtatcagaggagacaaataagcttggaaatcctcaaaaagcctcatcctcagagcaatgtcattatatatcttgtcttacagcnnnnnnnnnnnnnnnnnnnn

SEQ ID NO: 25701 - DNA, 1295 bp, Homo sapiens
  misc_feature 1, 2, 3, 4, 5, 6, 7, 8, 9, 97, 98, 99, 100, 101, 102, 103,104, 105, 106, 107, 108, 109, 110, 111, 112, 113, 114, 115,116, 117, 118, 119, 120, 121, 122, 123, 1295: n = A,T,C or G
nnnnnnnnncccccactttgggcccagggtgggtcccccaaaaaaccccccccatgtggtgggaatttcccccaaagggggttccccccaaaaaacnnnnnnnnnnnnnnnnnnnnnnnnnnnctaacatttttctgtttttaccaaaacttttctcaaaatcttgtattactcttaggatgacaatgataaaatgtaatttccatttccaaaagaaaaattgaatgcacctacattgattcattctgctgctttacaattaaggcaatgtattacactgatagaagattaaaaacataattaatttatctttcattctttgtatcttagaatcacccatttggttccttaactccatatagatcatatgctaggccatccaatttctttataaaataatagtgaatgtatgtattttagagttgtattgaccaaatattttgtgtctagacatttttggtttttagttgtaaattatgttttgtacagatttaatgactcacaaatacaagaatatagaaagaattactagtactaccagggagtgttcatagagagtagtgtattttaagttcttagcattaaagaatgaattccaaaatatatgtagtcttggacacaaagggaaatctttagaaatttttatttaaccataaactataaaatggggagaatgtaattcagctaacagtatcactatgagattatattagcaagatttcttagataactgtcattgtaaaccagccatgtgttttgattaacaggtagcagcatgtctaccagaaaaatggtttgaaaattctgccatgaggacatctattccacagctagaaaacttcattcagtttttattgcagtctgcacataaattatctagaagtgaattcaggtaatgcatattttattttcacttctataaagagagttcatggattctgtatgctctcaacaacttttagaaagatttgtatttttactgtacttttaaaaatttgttaaaactttgtagagttagtagatatttttatggttacctttgggatggcttatgcatatccatattttaaaatgtaaatctcccccaaattaagcaaattcaaaaaactatagcacaggggaatatagaattaaaactataaatcaaaaacattttattaagcactttttaaatgtgtttttaattttcctgtccatttttagagactcaacagttgttaagtacaggtctccagcttggtatttatccagcagtagctagctctctgttctgaatgtttcgttcacagcaccan

SEQ ID NO: 25702 - DNA, 815 bp, Homo sapiens; identical to SEQ ID NO: 22858
  misc_feature 1, 2, 3, 4, 5, 6, 7, 8, 9, 10, 811, 812, 813, 814, 815: n = A,T,C or G

SEQ ID NO: 25703 - DNA, 1132 bp, Homo sapiens
  misc_feature 1, 1129, 1130, 1131, 1132: n = A,T,C or G
nttttttcacatgaagtttttagtttattaatgttcttgcgaaaaatccacagtggccacagctaacatcattgcagcacctttactccttcggctgtgatccaatctccagctcactgaatcagtggcggggaagggaaaaagagaaaggagggaaaagaaagatttcattaatagtcccttttcaaactccaaaataatctgcatttaagtgcatgcaatcaggtaccttaaagatgaccattttgttctttgcaattgtatacagagcactccttccagactcactgattttattcctcccaattctgacaatgccttgcctgattactgtagttcttatgcaaacgaggtagccggacttcacaatgaagagatcattaagccaatgtggtacccaggatggccttgcccacttgtcaatgaagtacatacctgagcctctgcccctctgctctgcccagcaacattgtgctggacacacaccaggaacagttacgagaatcattacagattcaagtctaatttaacctcaatgggagtgctctaaatgatcaggcaagtcttttaaaagctgcctcagttcaataaaagataccattcacagccacaaaagtagtacaagttagtatttaaaaagaggcattaatttagctgaactaaaaatacaattgctcctcagatatgagactactaatgccttagtataagtaacttagtatataactccatcgcaaccaaaaagcaagaacaaataccaattctaacatctaaacaaaactgaattaaaagcaatattgctatggcatttctttggagccaaagaatttatgtactcaaatgcattgatttttccagctggcttttcagagcagtgctagtgagaggcaccagtgtaacttgaagcaggaatagtgatggctcaggtccccacaggtagctcctccatacctgtgggactcaaaggctaagggcactaactcatagggctcaaaggctggatgaagagaacaatcaatgtgttaaatgtccttcagacctaggtcagaggacaaattttgactaattcttttgactaattctttttgcaacttctctcaacaggtacctgcccgggcggccgaggtannnn

SEQ ID NO: 25704 - DNA, 1177 bp, Homo sapiens; identical to SEQ ID NO: 23226
  misc_feature 971, 1176, 1177: n = A,T,C or G

SEQ ID NO: 25705 - DNA, 815 bp, Homo sapiens; identical to SEQ ID NO: 22858
  misc_feature 1, 2, 3, 4, 5, 6, 7, 8, 9, 10, 811, 812, 813, 814, 815: n = A,T,C or G

SEQ ID NO: 25706 - DNA, 1008 bp, Homo sapiens
  misc_feature 1: n = A,T,C or G
nactggagaggccagcacgcacagtgacttaatccaagaagatggaataaaaaggcctacctcattgggctcgtgtgggtgaggagaactgaagagtctgagagcgcggcacgagccagaggctacggaaaacactgccctcctacactccaccttggagagacccagaaaagaacaagcttcatttgtaaaaaaggaaaacaactcaggcaatgggggtggcttaaaggcactctacagtgtgcagatgccttccacttcttccatctgccctgtctctccaagaacccctatggccccggtctcagaacagagctgagtgcagaaatgaaaatctatggctctgtgttccaaaacgatgaagaatttcaagatggtggcagtggtaaaatccttctccaggaaaaatctgtccttggcccaatgtgtaaacacttgctgagtattgtgaaaccagcaacttgttcacaattcttctgaatttcttgggaaatttgaagtggagtacctgtaccaacatgaaatgacacgaatttaagtgacgctcaacaacgaaaagcaaaaagaaccaaagaggaagcaactgaaacaacatctggatgtatttaaaaatatacgatgcctccaaaatcaggtgtcattaatgaaaattctgaagaaatgccaccggacatagccaacgcacctacgctgttgttattcatttcctgcttttcacagaaaacaattttgttgcatggaagatcgtgaacttcaaagggcagaggggaaactgtcccttggcctctacccctccaaggccccactttttcgtcaacactccttggacgcagcagaagtatgaacataatatggtcctgaatgaggctgagtctttgggcgcagaagacccgggttaataaaaataggaaggtaagaaaagaaaagaaaaatcaagacacatcataggactaaattcctattatttatccactcaggattgaccacccctttgggccagatagttgt

SEQ ID NO: 25707 - DNA, 2670 bp, Homo sapiens; identical to SEQ ID NO: 24256
  misc_feature 1, 2, 3, 4, 5, 6, 7, 8, 9, 10, 11, 12, 13, 14, 15, 16, 17,18, 19, 20, 21, 22, 23, 24, 2643, 2659, 2660, 2661, 2662,2663, 2664, 2665, 2666, 2667, 2668, 2669, 2670: n = A,T,C or G

SEQ ID NO: 25708 - DNA, 1015 bp, Homo sapiens; identical to SEQ ID NO: 20270
  misc_feature 1, 2, 3, 4, 5, 6, 7, 8, 9, 10, 11, 12, 13, 14, 15, 16, 17,18, 19, 20, 21, 22, 23, 24, 25, 26, 27, 28, 29, 30, 1012,1013, 1014, 1015: n = A,T,C or G

SEQ ID NO: 25709 - DNA, 1348 bp, Homo sapiens
  misc_feature 1348: n = A,T,C or G
gtccggtttcgcctgttggccagtctggtcttgaactcctgacctcaagtgatccacccaccttagcctcccacagtgctgggattacaggcatgagtcaccacacccggccagtagaactctttaaacctgaaaaatcagtcaactttgcagactagaggaggatgttgaacacctatgtgtgttttttttttctttaccaactatgcacctatttttcagacacctaaaagtaatgtctgtgaaacagtggttttctttttctacatattacagcaggaagtgttcctatttatgtactgtctgtatcaatactaacggggcatgataagcaaaattttaaactttggtagttaaacctttatgttgcctcccctctgggctgccagctgtggggatgtgcttctcccttaaggactttggcaagaataacaagttcattggaatttgactttctgacatagagcagacagccttgccctgtcatgccaggcctttcatgtgaagttaccatttattagctgcttctgtctctccagggaaggatttcccttttataagcctgggccagggggatgatagtaagattccccatgtgataccagagttggaataggctgtagtgagattagggccaggactgtcccattttgattcttgaatggtttctgttacaacttgtcatggggaaaaagtaacacttattttttttttcctcccttagaagacaaaaatactaatgcatttgagaaagcggtagttttggggggagggggaaaaagcaactgctttcctgatctgcaacttggctggatgctaagatgtcagtggacatgaatagccaggggtctgacagcaatgaagaggactatgacccaaattgtgaggaagaggaagaagaagaagaagacgaccctggggacatagaggactattacgtgggagtagccagcgatgtggagcagcagggggctgatgcctttgatcccgaggagtaccagttcacttgcttgacctacaaggaatctgagggtgccctcaatgagcacatgaccagcttagcttctgtcctaaaggccgttgatgctcactgccatcagctgcatcctccctatggcactggtatctcattcagttgctaaacttatattagttaatttccactggcaagtttcagagatattggacagatacaagtccaattctgctcaactgcttgttgaggctcgagttcagcctaatccatcaaaacatgttcccacatcccatccccctcaccactgtgcagtgtgtatgcagtttgtgcgaaagggaaacctactctctctggcctgtcagcaccttacan

SEQ ID NO: 25710 - DNA, 1100 bp, Homo sapiens
  misc_feature 1098, 1099, 1100: n = A,T,C or G
agggagtcaaccctgaggctgccgcgcggcggtcactgcgccggggtagtgggccccagtgttgcgctctctggccgttccttacactttgcttcaggctccagtgcaggggcgtagtgggatatggccaactcgggctgcaaggacgtcacgggtccagatgaggagagttttctgtactttgcctacggcagcaacctgctgacagagaggatccacctccgaaacccctcggcggcgttcttctgtgtggcccgcctgcaggattttaagcttgactttggcaattcccaaggcaaaacaagtcaaacttggcatggagggatagccaccatttttcagagtcctggcgatgaagtgtggggagtagtatggaaaatgaacaaaagcaatttaaattctctggatgagcaagaaggggttaaaagtggaatgtatgttgtaatagaagttaaagttgcaactcaagaaggaaaagaaataacctgtcgaagttatctgatgacaaattacgaaagtgctcccccatccccacagtataaaaagattatttgcatgggtgcaaaagaaaatggtttgccgctggagtatcaagagaagttaaaagcaatagaaccaaatgactatacaggaaaggtctcagaagaaattgaagacatcatcaaaaagggggaaacacaaactctttagaacataacagaatatatctaagggtattctatgtgctatataaaatatttttaacacttgagaacagggtctgggggatctccacgtttgattcactttcagcagcgggctcgtgtagggaggtattcttactgggggcggattccgctggtttagactactttaacaggaactggggaagggggttggcacctcaacgggggggatataggagcgtgaagttgtgtggaagtagttgagtcccccttgtggagacagagaggatatcttgagtagagtaaaggtccctcgtgggtagagaatggtggttctaataagggaggagataattgcaggagagataaaaatactggagcgtgtacagacatattaaggaagaatggaggatattgtgtacaaagcatagcnnn

SEQ ID NO: 25711 - DNA, 755 bp, Homo sapiens
  misc_feature 754, 755: n = A,T,C or G
acagtatgatgtaggccaggaagatcttcaaaaccttaacgttaagctaaagatttttacaaatgtctattaaaaaaacatagtaacagtattttctctgtaatcctcaaggattacactcacctaccttattctggggattgacactgaactgatacacattggtagagccagatacattttttaaatactgtaatattgacggcaccgggacccagagaaaccccatctccatgttgaagacagtttaaaacctgaaagccaagctacaagttaaatccttggaccagattgagaacttgtcctcctgtttggtgtgctttcctctgattgatccccactcttcacctattttatgtatatctaccctttcctaattggttttctacactgtcatgcccatctttgagtagtgtcttcacttcaaccttttttgcttactcataagctaattcagcacattctcctcatcctgtgcctataaagaccccagactcagtaagtagaggaagagacaacctgacttcggggaagacgacttgctcttcctgtcccctctccagctcccctctctgctaagagctgttttcatcgctcaataaaattatcaccttcgccatcttttaaccatccctgtgacctcattcttcttggatgccagacaagagcttgggacccccaagtgtgggtacccagaaaggctgtcacactggcactttgcccttcctggtggagagcagctgccctaggtgann

SEQ ID NO: 25712 - DNA, 1394 bp, Homo sapiens
  misc_feature 1, 2, 1389, 1390, 1391, 1392, 1393, 1394: n = A,T,C or G
nngcggccgcaggaatcttgcttgtcttatattttttttttttttcacacagaaaccaaccacatttttactgcatctgctccacgctggattccaacatgctggcccggagcgtggctggctggaagcaactccaacaggtttttcccttccccgtcatgtacattatttatttttgatcctactcactgtcccaagtccagaggcagttacaaaaaacactcttgatgcaaaccgtgagtggctacaacacacggatgggggtgggcgcgattcccacaacagggagtggaatccgggaagatgatatataggggcaagacgcccccttacttgctaagagtatatggagctcaaaacccacaattgctttgttttgtttctcagttcctggagtatgttgaaactacttgctcttaacattagttcgtatttttcatcagatatctgacctgatttaaaacatgtttgtttgcatacatctttttgtagtgcaccttatagttattcctactgatataggatgaagattataaatatctgcataaaaagagaaaccatgtgactctatatgaagacaaccatcacattccacagcacatcattggttcattttcgaattgtcaagcagtatttgaaatgagagagagagagaatataactgaacacaagcaccacgacaaaacaatcataacaacagaaccaaacccaaacttctctattattaatcatgttaaaattttagctttgtttctaacacttttctttacttgttattttaagctccagtagcaggatcagatttctgctgcctctaggcaaatgagttatgatctgatctcgagttccaagggaaaatgctcaaagttttattttccccagttgaataaacagtaccatgtatattatctctcgtgttagaatagtgttgtcttcacataagactcaaataatggtattagtcattcatttccctgaacacagacaccctcatgcgtgctgacaggtttataaggatgcggtggcagccgcgggttctgggagctgctagacggccgagtttgatttcttgcagtcctgagcgatggagcccgggggtgcctggttattgtccgctttctctctcagatgcttggcttgtttttcaagagaacctttttcgatattcattgctccatcgattggatccagtccttgttcagaaaattgtttcaaggcacttaaggctgcctgaaagccttgaatccttgctaaatattccagttgttttgaaggttgtaccctggccggccgcccgggcaggtacattttgcttcttagaaaagctaagtcctgggttccctctgattttaggttccaggaactttcttggaacacccgatcgcagannnnnn

SEQ ID NO: 25713 - DNA, 2401 bp, Homo sapiens
  misc_feature 2313, 2314, 2315, 2316, 2317, 2318, 2319, 2320, 2321, 2322,2323, 2324, 2325, 2326, 2327, 2328, 2329, 2330, 2331, 2332,2333, 2334, 2335, 2336, 2337, 2338, 2339, 2340, 2341, 2342,2343, 2401: n = A,T,C or G
ccacgcgtccgcggacgcgtggggtgagactctgtctaaaaaaataaattaattaaattaaattaactagttgggtgtggtggcatgtgtctgtggtcccagctacttgggaggctgaggtgggaggatcacttgagtccagaaggtcaaggctgtcatgagctgtgattgcatcactgcactccagcctgggcgacagcaagaccctatctcagaagtgaataaataaaacaaatacagcatttaaatgaattgacattgagaaatttacaatttacaaatttatattaactgtagtttccaaaatatgttactgttggtcctgtaagttacaaagagactgaagaactttctttttatacattagagcattttcccctggaatgagtattgattaaaaagataacatttattaattaataaaggcaatttaaaatttagtgttatttgaagactgtcaacatctgaaggtatgaaacttggtacagtgaaataatttctcctttctccttccttttagttattcccacagaaaactcagcccagtgggaatttgtcatattatgcccatgttttaaaaatattcatagtttgaatcttattgacattttaaagaagagttttttcctccctggaatgtaaaacaaaaatattttttaatgatgtggaagtatatatttcatgttcattatgataaatctacaaacaaatgaattgtttttatgggtggagttcttctataagagtatattaaatgctttcagagttgtattaattttgtttctaaataatataccacttatttggagtgactaactcagtatgtaagtagatgagatttgttgattttgcccctaaaacgggctttagtcattttaggagtgagttgcacaaaaggacctaaaatgcattgttttttgccttcttttaagagatggggtctcgctctattgcccaggctggagtgcagtgtgctatcatacatagctcactgcagtctccaactcctcataccagaggcatgtgtcaccatgtcttactcctaaaatgcatttttaaaaagcgaatttttagattaaagtgcctagtttctgattaataaatagaagatgacaaaaagtgggcgggaatagcataatcttttaagattttgtaattttctgtatgtgccacatttatgtaaattagctatgaaatatggaattcaggatcatgctgttattgcatgtactttataggttatatagcatggaacatgcatattatcagtgttctttagtatatagctccttgccttttcttacatagatgcttaatttggcaatgacctattgatagttctcatcatcggccccaatatgattatgagcccctggacggtacattccattatgccctgttgacgtcttagctttgctattacatgttttgtaccttgttgcggtatctttggccttcagcacacacatgtgtgcgtgcacgtgcatttcattaccatgtagacaagacagttattgcttatagtaatttacccatttgagggctaagtgttttaagctgtggttttataagcaaagctgtaagtaaatgtaatttattttagaaagatattatttgaaatcaattttgaagaattgcactatttgataatgctgctactacatgagataactctggggaattaattttatgagataagatgaatggctttctagaaggtgttgctttttgttttttctttttcttttttacatttcatcttagaaaaagttgcttatattcagcaggttggtttgtcaaattcagtgtttgagtttgtttctggtcagttcagtagctgctactttagcaagatgtggcctttcacaaaagaggtaagagtgaccaaatagaattttaggacaataagtataggaaatatctctttatcgtaagataagaaacttgaactttttaaaggaaatgtcctcttgaaaagaacatttctgactgcatgcagaagggtacttaagacatatataacaggccaggagcagtggctcacgcctgtaatcccagcactttgggaggcccaagtgggcagataacctgaggtcaggagtttgagaccagcctgaccaacatggtgaaaccccatctctactaaaaatacaaaaattagccaggcatggtggcgcatgcctgtaatcccagctactcgagaggctgaggcaggagaatcgcttgaacccgggaggcggaggttgcagttagccgagatcgtgccattgcactccagcctgggcaacaagagtaaaactctgtctccttcannnnnnnnnnnnnnnnnnnnnnnnnnnnnnngacctatgtaaacggtttccatttgccttaaaattgggttaaatagcaaaagcaatgn

SEQ ID NO: 25714 - DNA, 369 bp, Homo sapiens
tgtgtcttctttactgtgactgggtcgtttttaagaaaggttatcagctttgtgtttggtttcccacagttgataaaaatctatcaaaaacattataatttgcaaggaaaaaggtttttcaatggctgcaggaaccagaaagaaatagcatttcttatctgtataaacacaaacatttaaagctagtcacactgcaggtaaatccaatatagtatgcaaaagttctataaaaatgaacaagagatacacgtttactttcattgctccaacagtcaaatgtaaatctgcatgagagttgcgctgcagcagtttgctggtccaatttaagagttcaaggtcctttttgtacctcggccgctctagaactag

SEQ ID NO: 25715 - DNA, 520 bp, Homo sapiens
  misc_feature 1, 2, 3: n = A,T,C or G
nnnaaccaggccttgtcacccatttcagatggctctggcaagcaattaacaaagctcctacacttcctctcctcgatgagctggctctgttactgggctggtggtgaaggaactggaagatcctcctctctgcgggccaacgagcagagcctccttgatttactaccctggcaattcctttacagtcacaaagtggtgggatccagatgaatccaccggccaccgccagatcaaacgctaacggtggccaccatggcatggcctcgcgtactcactttcatcctgggcgactgtcgtaagcgttcagtctgtcattgaattattccatcagcttctttgctagagtgggttttctggaatggttctgttttagagaactagttacagtgactccatgagcctcctcaaaagagttggccaaaatgttttctctccttcatcactgtctagtggtgctgtccctcgagtgagcattcacctgcctcgtgtcagagttcacacacgtgtgtgtcccccgcgt

SEQ ID NO: 25716 - DNA, 842 bp, Homo sapiens
  misc_feature 1, 2, 3, 4, 5, 6, 7, 8, 9, 10, 11, 12, 13, 14, 23: n = A,T,C or G
nnnnnnnnnnnnnnactgtctanaattaattaacgcggggtggggagaacaggtgtccttctaaattacagcacaagctacagcctgcgtccagccataacccaggagtaacatcagaaacaggtgagaatgaccactttaactcaccgggcccgtcgcactgaaataagcaagaactctgaaaagaagatggaaagtgaggaagacagtaattgggagaaaagtccagacaatgaagattctggagactctaaggatatccgccttactcttatggaagaagtattgcttctgggactaaaagataaagaggtactgctaaagtcagacagcccaacaggtgatgttttactggatgaaactctgaaacacatcaaagcaactgaacccacagaaactgtccaaacatggatagagctactcactggtgagacctggaaccccttcaaattacagtaccagctgagaaatgtacgagagcgcatcgcaaagaacctagtagagaaaggtattctaaccactgagaagcagaatttcctgctatttgacatgactactcatccagtgaccaatacaacagagaaacagcgactagtgaaaaaacttcaagatagtgtacatttaacaattggacatacagcactgtaaacaattcaaagtccattgagcttaccatgaaagaactgaaacgtatgtaggaactgtgtcctgctgcagacaagcagctgctctggctctggtgcggtgcggtgcggtgaggtgaggtgaggtgaggtgggcaggtgtggaagggagaattcctgaggccagtcacaattattgaagctaaattaatttcttac

SEQ ID NO: 25717 - DNA, 505 bp, Homo sapiens
  misc_feature 1, 107, 108, 109, 110, 111, 112, 113, 114, 115, 116, 117,118, 119, 120, 121, 122, 123, 124, 125, 126, 127, 128, 129: n = A,T,C or G
ncattgggaaaaccatgatgcagagtggcggcacctttggcacattcatggccattgggatgggcatccgatgctaaccatggttgccaactacatctgtcccttcnnnnnnnnnnnnnnnnnnnnnnnacatctcctaggttggcatgagaccagcctggtccccagttgaataaattagaaagagcagttgggggaattgaatatgatatgcaaattgcataaggtgacatctctctgtgtggccacagagatagatcatctgctcctggctccttgatctgagggaagcctctgctgttcaacctgctccagggtttaattctgttgggttgtggggctgacaacaatgtgttcctttccttcctctctcccacaagcagaggaagtcatacgtagacaaaacagatgtttaggttttctcttcagcaggcttcctcttgttcccctctatcacccccagataggtgaagttcagaattaggactgcccactgcgggggggt

SEQ ID NO: 25718 - DNA, 1643 bp, Homo sapiens; identical to SEQ ID NO: 21150
  misc_feature 1, 2, 3, 4, 1615, 1616, 1617, 1618, 1619, 1620, 1621, 1622,1623, 1624, 1625, 1626, 1627, 1628, 1629, 1630, 1631, 1632,1633, 1634, 1635, 1636, 1637, 1638, 1639, 1640, 1641, 1642,1643: n = A,T,C or G

SEQ ID NO: 25719 - DNA, 1366 bp, Homo sapiens; identical to SEQ ID NO: 24535

SEQ ID NO: 25720 - DNA, 429 bp, Homo sapiens
  misc_feature 1, 423, 424, 425, 426, 427, 428, 429: n = A,T,C or G
nacgcggcatttcctattcgcctacacaatactgcgatccgtccctaacaaactaagaggcgtacttgccctattactatcatcctcatcccagcaataatccccatcctccatatatccaaacaacaaagcataatatagcgcccactacgccaatcactttattgactcctagccgcagacctgctcattctaacctgaaacggcagacaaccagtaagctacccttctaccatcattggacaagtagcatccgtactgtgcaaaaagtggttgtcctttctactaacaactctgtcagtggcgagctcattatggaggagctggaagtctttaagaatcatgctcctataacaacgatgaaaatctcatctagaaagcaacaggtgtatgtgagttccaatgaaggggttttccaggtannnnnnn

SEQ ID NO: 25721 - DNA, 1120 bp, Homo sapiens; identical to SEQ ID NO: 22234
  misc_feature 1, 1119, 1120: n = A,T,C or G

SEQ ID NO: 25722 - DNA, 1148 bp, Homo sapiens
  misc_feature 1, 2, 3, 4, 5, 6, 7, 8, 37, 44, 45, 89, 157, 1148: n = A,T,C or G
nnnnnnnnagtgtctatatatcaatacatgaaaatanacaccanngtctctcttatatatttatctctttaagttcaaaatacaaaacnacaaatttattcttggagaaaatcttggggattacattaaaaatgaaaatttgagttcccacattctnttttttttgacatggagtctcgctctgtcacccagcctggagtgcagtggtgctatcttggctgactgcaacctccgcctcacaggttctagcgattctcgtgcctcagcctccccggtagctgggattacaggtgtgtgccaccgcacccggctaatttttttatttttagtagagacggggtctcacaccatgttggccaggctggtctcgaactcctggtctcaagtgatccgcccgcctcggcctcccaaagtgctgggattacaggcttgagccaccatgcccggccagacttacttttttgttaacagtctttgaaccttttcacggcacacatgtaaggccgcctgtgacatgtggtaccctggcctccaactggacacaactgcatttatagtttagcgaaaatacaaagttctgaaagtagccttaaaagaagtgccctttgctttgacatagcaatatcaaaagcaagtgggactgtgcaatcagagccatgagttttatgaaaactactttcctttcacatcatttgttagagaatgccacacccatgatcatgtaacattattacaatcatgaaatattactacattcgtgattaacattacccaaaaggcacatcttcaaatgttgaattaagaaaatccaaaaatcaaaacagtagagaatacattaaaaatcaagcatttaatttgtaaaccttaatgaaataacagcctactccagtttcttcaaaggtttgtgagctttttataagagtggtcaggaagtgcagaaaaacaacatggaagacaggatttggaaacaaggccaaaatttaaaagacttaaccttttttttcttttaaatgagccacagaagtgctcttttataatgttgacgcaaatcaacatttatattatagaaatgcactcagaagtaacagacacacaaggttaaaacctgattctttccactaagttctggaaatttattctaacataan

SEQ ID NO: 25723 - DNA, 1234 bp, Homo sapiens; identical to SEQ ID NO: 23496
  misc_feature 180: n = A,T,C or G

SEQ ID NO: 25724 - DNA, 1100 bp, Homo sapiens; identical to SEQ ID NO: 24433
  misc_feature 1, 2, 3, 4, 5, 50, 63, 94, 122, 130, 168, 172, 1099, 1100: n = A,T,C or G

SEQ ID NO: 25725 - DNA, 2071 bp, Homo sapiens; identical to SEQ ID NO: 21824

SEQ ID NO: 25726 - DNA, 1240 bp, Homo sapiens
gggaactctggagtatgagtaaggaaatgcttctcaccttctctgctccaaagagatatctgttacatcagggaacaagtcctctaggtcaggcacttcctcctgaccagtgcaacgggcactccaggttagaagctgtgtgtgctccctctctgtcagttacttgtctaagggctcctatccgtggtcatcagctctctggccatgagttctgtttgtgcttattgcagcagcatcttcacaacaaacaggtcagtaatcaacctgggaagggaaaagacgacagtaaatattaccccctgtagagccgggaggcatttacacctggaatggccttcttaactgatttctgcctggccccctcacccccagccaagtctgaacctgagcaataccaggcacagagaggtgtctacttgtaactccaacacttgacaaaaaacaaaactgaagctgtgattggtttaggcagcaagtggccaggtgcaacttgtttgtttttatttttgttttccccaacagtactgagatcacttgcacttttcctcatttcttaagaaaatccagtttgcttgccatgacttgtttagcgttaggtttacaaagcttgttgttgaatgttgaatatttgtccaaaggagtttgacaaaatagaagctgcttggtccctgttctgcctgctaggtcataaggatgaaggccatgtggctggggtacttatgtcaagtccagaatggggcagtgtccctctcctacctctctgcggagacgcaattgaaggtcaagtagactcagtgtagggcaggcagctgtcatgctgcaaagaagtttagaggagtctttgggttggggaggtgacaggtaggtaggacaggatctcttaagatgggaaagatactggggagaggagggctgcttggtcccagggaactgcagtgaggtggaactgagctccgctcctgaatctccaaaggagcccatgctgcccggcttccctgagtcattttttccagcatcctgtcagatccctcaatgtactgatttcccccttgtgttaactataccgatattatttttttagcaattgaaatgcacttttttatttcaactcaatcatgattttaagtataaaaaatttatagattgttaaaactacttttttggtgtatttttaaccactcaatgtagcattgtatattttattcctgtgagactctggtacaggtgtgccgcctaatga

SEQ ID NO: 25727 - DNA, 2391 bp, Homo sapiens
  misc_feature 1, 2, 3, 4, 5, 6, 7, 8, 9, 10, 11, 12, 13, 14, 15, 16, 17,18, 19, 20, 21, 22, 23, 24, 25, 26, 27, 28, 29, 30, 2384,2385, 2386, 2387, 2388, 2389, 2390, 2391: n = A,T,C or G
nnnnnnnnnnnnnnnnnnnnnnnnnnnnnnaaccaacgtggtttcatatcggagaatctcctcctcttgatgttacctcaactcctgtcgattctctccccattttcaaatttaggaaggtcttatataaacacatctgcctcccgacttgccatgccaagccaccttcgtttacatcagagtactttgccccaactgttgtacccccaacgagcccttcgatcgtccaggttttatcctgaaccatcttccctggaattattacaccgaattcatccatctaggatctaatagaaatttagagtatcacttctaaaagtcattttgaaagtcaatgatgttatctgttcaatgccaggaaatgggactggacaaatataagaacttatgggatttcctacacggagacaaaaaagatattcctttatgtttgtttaaaagtggcagctgctctttctttattccattttaatcaatgagtattgattcaagttttcctttctatttttccttatgataagtttcttacagtagcttatacaacaacaaatagcatagaaaaactactggattcaattgatcatcaggaataagttctcagaaaaacacaggcggaaaaataagcaagaatcccaaatacagaactttacaagctgtgaaacttggtctcttgcaatcatgttactgctcaaattagagacaatcttattgctgtctattggagcagcatcgtggcacatcagcaggcaatgatgatgttgagaacagcagcaaaaataaacaatcgtatgctcatgaagaacccaagcctacaaaatggatacctttcagaaaagtatatacttaaaagacccaagacgtcaggataataaagctctgtatttataatcttttatatgtcctattgtggctattatgcttaagtaaaatagctaaagaaaaaaaagaaaaaaaaaacagaaaagatgacaatatcataaaaatgtagctgtctattttggcagctatattgcagaatttcttgactatcttttaatcagctgggaaaaagtcaataactgtatgcaaatgaataaactgtccatatcaaaatacaaaagtactatcaataatcacctctgactttcagatttaaattcagtgcaattgacaaatgcatcactaaaggaaaatgcagcttaaaagatactcaaaacatttgtgtctattcctgggagcacattttaaaattattgcacagatttttttaatttttatttattttttttaaacaataacagaggtcaaccacagatgtggacctccagcaataaaagcaggaattcaagtgccagatactcagcatattaggtttcctacgtaagtcacagggtaatatgttctaaatatctctaatgtgatccaaaaccctaaaaagagctggcacaaaaccatcgtgaatgactgcctctcttgatgtaaatttttaaaaatattattacagtatcatagtccccactaacaacaactggggtacatataacaatgtattgtgaaattaagtgtatttattctctttaccaatagcaaatgctaccctaccttagtaaaaccaagacttgcttcaatcaatgctgttttgtaaaaatagcaaagcaacgaatgctgaaatcaatcaaagctgcattacttgggttaaatcagtttctacttagaacacaggttaaaattttagtactaaaaggcctcaaaataattagtgacagaaatagtgttattaatttgctaagctcaacaataagcaattccttaattaaaatcttcgagatataaatttgatgactattctcttcagaaatgacatacctggattatgttaatcatgacaagccttattagtcacacatataaacatggcctcatgcaatcatttgtctgtatatgttactctaagttgcatgagcacaaggtttaatatctatatctttaagaaaatacttgatattataaacagagtaaaagacatgatatagtagtgattactaaaaaaaaaaaaattagcagcttaaatctatctatatttgaaaaaacgtagtcacaagtaccacaaatgcagaatcagagcagcaggaagaaggttagtgcaattatactttcattaaaaaaaattctgaatcactgctatttaaaaacaccttgaagcaagtcttttgtttgagattgttttttaaactaaggtagcaaacattttgccatgtaatggcagtgttatatgccgttatcttgctttgtataaagaaaacaacatgagagatttttaatactggagttgggttacattacatatttaagcttctacacagaatgatggacacttcgagaagctaatccttatccagaaacannnnnnnn

SEQ ID NO: 25728 - DNA, 1301 bp, Homo sapiens; identical to SEQ ID NO: 24971
  misc_feature 1, 2, 3, 4, 5, 6, 1301: n = A,T,C or G

SEQ ID NO: 25729 - DNA, 1862 bp, Homo sapiens
acccacgcgtccggtattaaaatcttgcataccatgttcaccaactgtgccattaggacaatatcatcagtgggcttgttgtaaatgtaacaaacgctggaaaagatattcctacagaaggttgcatcaatgccacaagaagaacaagagctggtagtgaccatccctaagaacagcacagaagggggccaagttggcagcgctccggggcagtgttaccagtgcccatcaggtgcctgccgtctcttctgtgtcacacacagccctctatactcctccacctgagatacctaccactgtcctcaacattccccacccatcagtcatttcctctccacttctcaagtccttgcactctgctggacccccgctccttgctgttactgcagctcctccagcccagccccttgccaagaaaaaaggcgtaaagcggaaagcagatactaccacccctacacctacagccatcttggctcctggttctccagctagccctcctgggagtcttgagcctaaggcagcacggcttccccctatgcgtagagagagtggtcgccccatcaagcccccacgcaaagacttgcctgactctcagcaacaacaccacagctctaagaaaggaaagctttcagaacagttaaaacattgcaatggcattttgaaggagttactctctaagaagcatgctgcctatgcttggcctttctataaaccagtggatgcttctgcacttggcctgcatgactaccatgacatcattaagcaccccatggacctcagcactgtcaagcttctgatgctgcctccttctgcagcggaagatggagaaccgtgattaccgggatgcacaggagtttgctgctgatgtacggcttatgttctccaactgctataagtacaatcccccagatcacgatgttgtggcaatggcacgaaagctacaggatgtatttgagttccgttatgccaagatgccagatgaaccactagaaccagggcctttaccagtctctactgccatgccccctggcttggccaaatcgtcttcagagtcctccagtgaggaaagtagcagtgagagctcctctgaggaagaggaggaggaagatgaggaggacgaggaggaagaagagagtgaaagctcagactcagaggaagaaagggctcatcgcttagcagaactacaggaacagcttcgggcagtacatgaacaactggctgctctgtcccagggtccaatatccaagcccaagaggaaaagagagaaaaaagagaaaaagaagaaacggaaggcagagaagcatcgaggccgagctggggccgatgaagatgacaaggggcctagggcaccccgcccacctcaacctaagaagtccaagaaagcaagtggcagtgggggtggcagtgctgctttaggcccttctggcctttggaccttctggaggaagtggcaccaagctccccaaaaaggccacaaagacagccccacctgccctgcctacaggttatgattcagaggaggaggaagagagcaggcccatgagttacgatgagaagcggcagctgagcctggacatcaacaaattacctggaggcccaagaggaacggcctccccccaacttagcgggttatgctggaccgggcggtgaggggaaccgaggccacccggactttccgcggctgagggcagcgccggttccttgcggtcaagatgctgcaaaacgtgactccccacaataagctccctggggaagggaatgcagggttgctggggctgggcccagaagcagcagcaccagggaagaggattcgaaaaccctctctcttgtatgagggctttgagagccccacaatggcttcg

SEQ ID NO: 25730 - DNA, 1391 bp, Homo sapiens
  misc_feature 1390, 1391: n = A,T,C or G
actatctggatactaaaatgttacggaagtagctctttgttctccctcactctgcccttagttaatagaaattcagactcgccaagtaaggcttcgtgcatagtgtcttcatgtcgcgtatagttgagcgcgttcttagcagttggcttcatggacaactcattagtgttttgacttttcttacccagcgttaattgaattcttccttttagaaaacctcctttttggtacccgggaattctggctgccttcacttccggttctctgtcagtcgcgagcgaacgaccaagagggtgttcgactgctagagccgagcgaagcgatgcctaaatcaaaggaacttgtttcttcaagctcttctggcagtgattctgacagtgaggttgacaaaaagttaaagaggaaaaagcaagttgctccagaaaaacctgtaaagaaacaaaagacaggtgagacttcgagagccctgtcatcttctaaacagagcagcagcagcagagatgataacatgtttcagattgggaaaatgaggtacgttagtgttcgcgattttaaaggcaaagtgctaattgatattagagaatattggatggatcctgaaggtgaaatgaaaccaggaagaaaaggtatttctttaaatccagaacaatggagccagctgaaggaacagatttctgacattgatgatgcagtaagaaaactgtaaaattcgagccatataaataaaacctgtactgttctagttgttttaatctgtctttttacattggcttttgttttctaaatgttctccaagctattgtatgtttggattgcagaagaatttgtaagatgaatacttttttttaatgtgcattattaaaaatattgagtgaagctaattgtcaactttattaaggattactttgtctgcccaccacctagtgtaaaataaaatcaagtaatacaatcttaactgttgtggccttttttgatcataagagttggtactgtttaaggccaaaagtaacagtttttatagatcttttagtttcaactcagcttttacaataaaaaggatttgtattgcattgagtttataaacttttggtttgtgaacttcatatttgatcttttctcttccaatcaaatgtctaggcttgtttgacttccacccccaatggtttttcactctttttatttacttcattttcctttaataacttaatctcttcatgttcagtttttacttcactcttattcttttctttgattatgatatgagagtcgctgtgacaacgacaaggtagagcgtatcagacaatatatgaaagcacggtccacatagaagagagtcgatgcgatcacactataaacaaagatactaacatggctatcaacgtctgatccnn

SEQ ID NO: 25731 - DNA, 1657 bp, Homo sapiens
cgttcttacctgcgctgtgtctaggtgtactctggcctgcagtgaacccactagttgagactgttctcgtataaggtatgtctacctaatggatttgaggagatttcttcttccaggcacgagagtcaatccttgtttatgcctttaaagattaatatcagcattagctttttaaatggttttattttatgtacaaataatgaacatacgttgtacccataaattctactttccaaaaacaggagctttttaaaagaaaaccacataacaacttttaaaaggcgctgggattcctctgcttctagatcaatgctgggctagaaaagtaaagtctgttctatcaggaatcacaagttggaactgagtattctccaaagtggaaattctagagtgtagtgtcactccaggcaaagattattcagttctcatccccagcatccacaactacctatcagaagggttaaaccaggtcaaaacagtccagcataattaggcttcatcaaacaatgtcattatgctcttctaagatgcaaataaaccaaaacaggaaatactaaaataaaaatatctgacactgccatacaaattgttagttcctttttgtatccccccttctataacattaacaaagggaatattttactgcaaagaatattttattttatacatcactagccatgaatttttgccattagttactatacaaatgctgcctagtgccattatccaaatagcacaaccattttacgtccacaattcacttctatagttacaagtagaattttcatgatttacttaagtacatctatcagtaaagatttaacactgagatgcaatctaacatctaacatccgtaatatctgatattatgtagatggcaatgcaggaaagatgtcttttaatcgcttttcatttaagtgaccttatgtaaaaaataaaataatttagcagttccaagtatccaaagggcattttcaaatgtacataaaagaaatggttacagagatttttaaggagcatcttccatgtccacatcctcttgtaactgctgtaccattttctcttccaactgtttccctttgcctgcaagaggggctcggataagatggatgttttgcttgacttctttgatatcctgaactttctgtagctctttatttttcttcaatctgttcattataaatttagcttggcgcttctgtttgatttcttcaactctcttcatcgcatcaatagttttattccatagctctcgctggtatttgataggttcatttctacgtttttcaaattcaaatgaattatccactgtaagctctttaccagctgctttccggaatgctttggtccacctaactttgcgaggattgcgcttctttttaaagtttttatgacatttagatttgcaaaatctgaacaccttgcaatcgttgcggacgaacatcatgccgtgtccaggatagatgggccccgaacaaaaataacacttttcgatacgcatgttgaacccgcgtgtaaccccaccaaacaaacgccaagcttgagaggaagtgatgcaaccccgtcaccggaagttaccttcttcccccttccccgaccggaaaaaggcaagcgtccttcgttctcgcgggtctgttagaccagatgcgaacacgac

SEQ ID NO: 25732 - DNA, 804 bp, Homo sapiens
  misc_feature 1, 799, 800, 801, 802, 803, 804: n = A,T,C or G
nccgaagggctgtctggaaagggagggacaaaaggacccagaagtagaagaatggggatggagtggtgataattgaatggttaatgcactgccattcataattgccaattgaggacaacacaaatgggattggtactttatagtaataaatctgaccagcagagggagggatcaggcagcagtgtttagagcacaccacactggccactgtaaactgagaagctaagttaactggtattttatgattttgagtatagtctttttataagttgtatacactttacaatgtaaaagaaacaaactttgtataatagcaaatcgggaaggggactgcttaaaatgttaatgcagtgtttttctttttttctctgcataaatggcttgagcatactggcatttacacagaaatgatatatgctgcttttatcatataacaaatattttcccactattacagcctgagtaatacccgtattaaaagagcctcattttagaaagacatttaaaatttttggaacataccacatgtagaaaggttgaactggtttttcagctataatgcatatacaactatagtgtgtacgtataccacatatacatatacttgtatgaagatatgtgtaaaatgtttttactatggatcatggatttaagaaacttgaaaagctgggcacggtggctcacgcctgtaatcccagcactttgggaggctgaggcgggtggatcaagaggtcaggagatcgagaccatcctggctaagtcggtctctaataaaaatacaaaaaattagccaggcgtnnnnnn

SEQ ID NO: 25733 - DNA, 359 bp, Homo sapiens
ccgtgtgggtgagttggctgccggtgagttgggtgccggtggagtcgtgttggtcctcagaatccccgcgtagccgctgcctcctcctaccctcgccatgtttcttacccggtctgagtaccacaggagtcccctgcttctcaaggaggcactgaacaagattcctcctgcactctggttcctgcacatagttattggatctaacacaagataactcctcaatgacccctccattggaggctgtagtcagtttgcgcaacaaagaagctgtcgtccttctctgttctccaagatgaggagtctgcctagccatacaggcccaggtgagggggatcaggcggtgccaatcaaggacctga

SEQ ID NO: 25734 - DNA, 884 bp, Homo sapiens; identical to SEQ ID NO: 25350
  misc_feature 1, 2, 3, 4, 5, 883, 884: n = A,T,C or G

SEQ ID NO: 25735 - DNA, 372 bp, Homo sapiens
  misc_feature 372: n = A,T,C or G
actgttaggagtatactgcttacaggtttagatatagtctgttagaattaaaaccaagtttagtgttcatatttacctcatgggctttatcaagcccatattacctcagcttatatatagttaccatttttgtgtttttaaatgttttgacgatttcaatacaagataaaaaggatagtgaatcattctttacatgcaaacattttccagttacttaactgatcagtttattattgatacatcactccattaatgtaaagtcataggtcattattgcatatcagtaatctcttggactttgttaaatattttactgtggtaatatagagaagaattaaagcaagaaaatctgaagtattgtcttgtttttan

SEQ ID NO: 25736 - DNA, 3523 bp, Homo sapiens
  misc_feature 1, 2, 3506, 3507, 3508, 3509, 3510, 3511, 3512, 3513, 3514,3515, 3516, 3517, 3518, 3519, 3520, 3521, 3522, 3523: n = A,T,C or G
nncgtgccgaattcggcacgagaccgcgtgttcgcgcctggtagagatttctcgaagacaccagtgggcccgtgtggaaccaaacctgcgcgcgtggccgggccgtgggacaacgaggccgcggagacgaaggcgcaatggcgaggaagttatctgtaatcttgatcctgacctttgccctctctgtcacaaatccccttcatgaactaaaagcagctgctttcccccagaccactgagaaaattagtccgaattgggaatctggcattaatgttgacttggcaatttccacacggcaatatcatctacaacagcttttctaccgctatggagaaaataattctttgtcagttgaagggttcagaaaattacttcaaaatataggcatagataagattaaaagaatccatatacaccatgaccacgaccatcactcagaccacgagcatcactcagaccatgagcgtcactcagaccatgagcatcactcagaccacgagcatcactctgaccataatcatgctgcttctggtaaaaataagcgaaaagctctttgcccagaccatgactcagatagttcaggtaaagatcctagaaacagccaggggaaaggagctcaccgaccagaacatgccagtggtagaaggaatgtcaaggacagtgttagtgctagtgaagtgacctcaactgtgtacaacactgtctctgaaggaactcactttctagagacaatagagactccaagacctggaaaactcttccccaaagatgtaagcagctccactccacccagtgtcacatcaaagagccgggtgagccggctggctggtaggaaaacaaatgaatctgtgagtgagccccgaaaaggctttatgtattccagaaacacaaatgaaaatcctcaggagtgtttcaatgcatcaaagctactgacatctcatggcatgggcatccaggttccgctgaatgcaacagagttcaactatctctgtccagccatcatcaaccaaattgatgctagatcttgtctgattcatacaagtgaaaagaaggctgaaatccctccaaagacctattcattacaaatagcctgggttggtggttttatagccatttccatcatcagtttcctgtctctgctgggggttatcttagtgcctctcatgaatcgggtgtttttcaaatttctcctgagtttccttgtggcactggccgttgggactttgagtggtgatgcttttttacaccttcttccacattctcatgcaagtcaccaccatagtcatagccatgaagaaccagcaatggaaatgaaaagaggaccacttttcagtcatctgtcttctcaaaacatagaagaaagtgcctattttgattccacgtggaagggtctaacagctctaggaggcctgtatttcatgtttcttgttgaacatgtcctcacattgatcaaacaatttaaagataagaagaaaaagaatcagaagaaacctgaaaatgatgatgatgtggagattaagaagcagttgtccaagtatgaatctcaactttcaacaaatgaggagaaagtagatacagatgatcgaactgaaggctatttacgagcagactcacaagagccctcccactttgattctcagcagcctgcagtcttggaagaagaagaggtcatgatagctcatgctcatccacaggaagtctacaatgaatatgtacccagagggtgcaagaataaatgccattcacatttccacgatacactcggccagtcagacgatctcattcaccaccatcatgactaccatcatattctccatcatcaccaccaccaaaaccaccatcctcacagtcacagccagcgctactctcgggaggagctgaaagatgccggcgtcgccactctggcctggatggtgataatgggtgatggcctgcacaatttcagcgatggcctagcaattggtgctgcttttactgaaggcttatcaagtggtttaagtacttctgttgctgtgttctgtcatgagttgcctcatgaattaggtgactttgctgttctactaaaggctggcatgaccgttaagcaggctgtcctttataatgcattgtcagccatgctggcgtatcttggaatggcaacaggaattttcattggtcattatgctgaaaatgtttctatgtggatatttgcacttactgctggcttattcatgtatgttgctctggttgatatggtacctgaaatgctgcacaatgatgctagtgaccatggatgtagccgctgggggtatttctttttacagaatgctgggatgcttttgggttttggaattatgttacttatttccatatttgaacataaaatcgtgtttcgtataaatttctagttaaggtttaaatgctagagtagcttaaaaagttgtcatagtttcagtaggtcatagggagatgagtttgtatgctgtactatgcagcgtttaaagttagtgggttttgtgatttttgtattgaatattgctgtctgttacaaagtcagttaaaggtacgttttaatatttaagttattctatcttggagataaaatctgtatgtgcaattcaccggtattaccagtttattatgtaaacaagagatttggcatgacatgttctgtatgtttcagggaaaaatgtctttaatgctttttcaagaactaacacagttattcctatactggattttaggtctctgaagaactgctggtgtttaggaataagaatgtgcatgaagcctaaaataccaagaaagcttatactgaatttaagcaaagaaataaaggagaaaagagaagaatctgagaattggggaggcatagattcttataaaaatcacaaaatttgttgtaaattagaggggagaaatttagaattaagtataaaaaggcagaattagtatagagtacattcattaaacatttttgtcaggattatttcccgtaaaaacgtagtgagcacttttcatatactaatttagttgtacatttaactttgtataatacagaaatctaaatatatttaatgaattcaagcaatatatcacttgaccaagaaattggaatttcaaaatgttcgtgcgggtatataccagatgagtacagtgagtagttttatgtatcaccagactgggttattgccaagttatatatcaccaaaagctgtatgactggatgttctggttacctggtttacaaaattatcagagtagtaaaactttgatatatatgaggatattaaaactacactaagtatcatttgattcgattcagaaagtactttgatatctctcagtgcttcagtgctatcattgtgagcaattgtcttttatatacggtactgtagccatactaggcctgtctgtggcattctctagatgtttcttttttacacaataaattccttatatcagcaaaaaaaaaaaaaaaattcttgcgccgaagaagttagcttatagggatataaaaaaaaacnnnnnnnnnnnnnnnnnn

SEQ ID NO: 25737 - DNA, 1192 bp, Homo sapiens
  misc_feature 1, 1170, 1171, 1172, 1173, 1174, 1175, 1176, 1177, 1178,1179, 1180, 1181, 1182, 1183, 1184, 1185, 1186, 1187, 1188,1189, 1190, 1191, 1192: n = A,T,C or G
ncgtccgtttaaacagcacgatttcatctctcttttgctgtgttactaaagcatctttgtacctagatgacaaattctgttggatttagttattttcagccttccctcccctccattttgagctgcatttggtatggtcccagaccggtgcatacatctttgcacactagagcccctgagagcttgcattttgcttttatagaggcagtagattccaatgtatatctgcttaagccatcagcaaaaaactaataggcttactacaatttcttcggaaaaacctgcttctggcttcagcctcacttcctttgttctacatcccagaagatgcacgtgagggcagctgcctggtaactggaggcttcacttgaccagcactgagcttctgttcactcattcaggtctcacatccatgtcatctccaggactcaccgaaaatagtcagagggatccctctgaactagatgcagagcacgcccagaaggtcctggaaatggagcacacccagcagatggcgaaggagcggcagaagttttttgaggaagccttccagcaggacatggagcagtacctgtccactggctacctgcagattgcagagcggcgagagcccataggcagcatgtcatccatggaagtgaacgtggacatgctggagcagatggacctgatggacatatcggaccaggaggccctggacgtcttcctgaactctggaggagaagagaacactgtgctgtcccccgccttagggcctgaatccagtacctgtcagaatgagattaccctccaggttccaaatccctcagaattaagagccaagccaccttcttcttcctccacctgcaccgactcggccacccgggacatcagtgagggtggggagtcccccgttgttcagtccgatgaggaggaagttcaggtggacactgccctggccacatcacacactgacagagaggccactccggatggtggtgaggacagcgactcttaaattgggacatgggcgttgtctggccacactggaatccagttttggctgtatgcggaattccacctggaaagccaggttgttttatagaggttcttgatttttacataattgccaataatgtgtgagaaacttaaagaacagctaacaataaagtgtgaggacggtaaactgannnnnnnnnnnnnnnnnnnnnnn

SEQ ID NO: 25738 - DNA, 525 bp, Homo sapiens; identical to SEQ ID NO: 23801
  misc_feature 525: n = A,T,C or G

SEQ ID NO: 25739 - DNA, 694 bp, Homo sapiens; identical to SEQ ID NO: 23775
  misc_feature 1, 2, 3, 4, 5, 6, 7, 8, 9, 10, 11, 12, 13, 14, 15, 16, 17,18, 19, 20, 21, 22, 23, 24, 25, 693, 694: n = A,T,C or G

SEQ ID NO: 25740 - DNA, 1490 bp, Homo sapiens; identical to SEQ ID NO: 21073

SEQ ID NO: 25741 - DNA, 955 bp, Homo sapiens
accctcaataaggtaagagtccagcttgggggttggaggaagctgtctgatccaactggaggtgtgtcctagcctctgacctggctgggaaggataatagccctggtcacagttagtttcttctagatggtgagatgatctcatccaaaggacttctgactgggccaaaccatcaaatgtagtgacagcattgggttcctgccctctctgtcactgtcctcccaaaacaggttgccatgaagcatccgtcagctgtgacagcttgtaatctggatctggagaacctggtcacagattcaaaccgcagcattgccacgctggccatcaccaccctccttaagacgggcagcgagagcagcatcgaccgcctcatgaagcagatctcctccttcatgtcagaaatctcggatgaattcaaggtggtggttgtccaggccatcagtgccctgtgtcagaaatatcctcgcaaacacgccgtccttatgaacttcctgttcaccatgctgcgggaagagggtggctttgagtataagcgcgctatcgtggactgcatcatcagcatcattgaagagaactcagagagcaaggagacagggctgtcacatctgtgcgagttcatcgaggactgcgagttcacagtgctggccacccgtattctacatctcctgggccaggaggggcccaagaccaccaatccctcaaagtacatccgcttcatctataaccgagtggtcttggagcatgaggaggtccgggcaggtgctgtgagtgctctggcgaagtttggagcccagaatgaagagatgttacccagtatcttggtgttgctgaagaggtgagtctaggcccaggggccctaatggggacagtgttcccttggacccaagcagctttcctttgctttatttttttttaactgaaaagggagagaaaagttatacagctactgattgta

SEQ ID NO: 25742 - DNA, 622 bp, Homo sapiens
  misc_feature 1, 618, 619, 620, 621, 622: n = A,T,C or G
ncacgcgtccgaggcatcaaaggctgcataatgtctcctccacaggtattggtggttacttaggaccattgcctactagtgaaacaatcaacctcaacccagctttgcccttctgagcccctgaaagatcagctcgaatggggctgggaacatggaggggcgtgctgcctgcacatggacctgtgaagtagtcagggcttctgtcccacgtggctgccccaaaacctttgtgaggtactgccctctgtacagtaagccatcatagtgtacatccgtttacttttatagtaagagacagaagaagagggcacagttttaaaacaatgatatgtaaaacagtgcgaaggtatgatttcctctctgaactaagtgtgaccgtgggtaactcttggtgtgttggacacccacttgaacagccactaccctggcccagatcagaatacggcaatggcatcccgaaccactgtatggcactcagcctgcggaaggggaaagtcacagagcaatccccaagagccttgagtctgagaagtctgaggcaaacaaactcacacaggatcaatttaagtaacagagaacactgacaggggagctgttcctagacagcagtggctaccnnnnn

SEQ ID NO: 25743 - DNA, 276 bp, Homo sapiens; identical to SEQ ID NO: 20777

SEQ ID NO: 25744 - DNA, 1026 bp, Homo sapiens; identical to SEQ ID NO: 20190
  misc_feature 1, 2, 3, 4, 5, 6, 7, 8, 9, 10, 11, 12, 13, 28, 1012, 1013,1014, 1015, 1016, 1017, 1018, 1019, 1020, 1021, 1022, 1023,1024, 1025, 1026: n = A,T,C or G

SEQ ID NO: 25745 - DNA, 1214 bp, Homo sapiens; identical to SEQ ID NO: 20119

SEQ ID NO: 25746 - DNA, 3918 bp, Homo sapiens; identical to SEQ ID NO: 22949
  misc_feature 3915, 3916, 3917, 3918: n = A,T,C or G

SEQ ID NO: 25747 - DNA, 1490 bp, Homo sapiens; identical to SEQ ID NO: 21073

SEQ ID NO: 25748 - DNA, 1803 bp, Homo sapiens; identical to SEQ ID NO: 23745
  misc_feature 1802, 1803: n = A,T,C or G

SEQ ID NO: 25749 - DNA, 1214 bp, Homo sapiens; identical to SEQ ID NO: 20119

SEQ ID NO: 25750 - DNA, 1128 bp, Homo sapiens
  misc_feature 1114, 1115, 1116, 1117, 1118, 1119, 1120, 1121, 1122, 1123,1124, 1125, 1126, 1127, 1128: n = A,T,C or G
gcgtccgtctggtgatgtgcgcctgtggctccggttactcgggaggctgaggcggaagaattgcttgaacccggggggcggagtttgtagtgagctgagatggcagctgggcaacagattgagtgagactccatttcaaaaaaaaaagaaagaaagaaattatgtttcaacatcagggttccttgtttcatgatggatataactagccaaaacattactaaaaatattaaaactgtgtaaatgtcaacatctacatatcagtttgttgttacagtgtactattctcctcacctatagtattggactccttgaaaccaatgtgaatttacctggtattctgtgaggtgacctactgttgtttttctagaatagggagtagcaatagatgactgttcatggtgaactctaccctgtaaaacagaattatgtatttgcctgacttgcttgatcaaatggctactgtctgtcaccctgagaagaatattgaagcatagatgttcactgctacttcacttcactggctaagattcctgggtagacttcactgggctcctggtctctatttccattaagactcctttgccttgctatagcagcctgaaaaattccaagaattttaaaaagttatttttcatcttcagagaggacacattacttgatgtagagtggaggcagtcacttctgcacattctgtgctgctgaggcaatttctgctattcgttcctctgaacttccttgggtttgtttagcttctataaaattattcatttttccagagagtaaaagtgctactgcttctataatttggacttccctacttaaactattttaaactactcaaaactatattctgctttacaagagccttattttacttcattgctctgtttgggttcctgttttgcaagggcaaaaactgaataaaaattatagcattctattttccagccacaaatgtggtcctcagctctttctaattatataatcccatgctcctgagagctagaatttattgttaagtgaaaaaattttgtattttattgaatttaagctgtcatcaatggtgaaattcactgtttaccaataagaaataaaaatcatgctcaattaaacnnnnnnnnnnnnnnn

SEQ ID NO: 25751 - DNA, 1139 bp, Homo sapiens
  misc_feature 1, 2, 3, 4, 5, 1136, 1137, 1138, 1139: n = A,T,C or G
nnnnncgctaacccgcactctcttcggacctacgacatcgcggcttctctggcgttggccagtcagccacagggaactagtaaaaaaagaaaaagaaaaaataaagtgaaagaggcgtgttgtctagtttcaaaggagaggagagaagagactgagtcgccctgtgttgcccaggctggtcttgaactcctaggctcaagagatcctcctgcctcagcctcccaaagtgctgggattacaggcaactctggtagctctccttgtctggttgttttgaagaaagaagagtagaagaaaaagttgagtaaatcatgtcggagttactggacctttcttttctgtctgaggaggaaaaggatttgattctcagtgttctacagcgagatgaagaggtccggaaagcagatgagaaaaggattaggcgactaaagaatgagttactggagataaacaggaacaggggccaagaggggcagccaacactacagtgatcggacctgtgcccggtgccaggagagcctgggccgtttgagtccaaaaccaaatacttgtccggcggttgtaaatcaccctggtgtgtcgggactgccgcatacagggaaagcatggtacctggaggtgcaaggtgtgcgccaaggaaatagagttgaagaaagcaactggggactggttttatgaccagaaagtgaatcgctttgcttaccgcacaggtagtgagataatcaggatgtccctgcgccacaaacctgcagtgagtaaaagagagacagtgggacagtccctccttcatcagacacagatgggtgacatctggccaggaagaaagatcattcaggagcggcagaaggagcccagtgtgctatttgaagtgccaaagctgaaaagtggaaagagtgcattggaagctgggagtgagagtctggatagcttcacagctgactcggatagcacctccaggagagactctctggataaatctggcctctttccagaatggaagaagatgtctgctcccaaatctcaagtagaaaaggaaactcagcctggaggtcaaaatgtggtatttgtggatgagagtgagatgatatttaagaagaacaccagaaaaatcctcaggccttcagagtacctgcccnnnn

SEQ ID NO: 25752 - DNA, 1643 bp, Homo sapiens; identical to SEQ ID NO: 21150
  misc_feature 1, 2, 3, 4, 1615, 1616, 1617, 1618, 1619, 1620, 1621, 1622,1623, 1624, 1625, 1626, 1627, 1628, 1629, 1630, 1631, 1632,1633, 1634, 1635, 1636, 1637, 1638, 1639, 1640, 1641, 1642,1643: n = A,T,C or G

SEQ ID NO: 25753 - DNA, 1214 bp, Homo sapiens; identical to SEQ ID NO: 20119

SEQ ID NO: 25754 - DNA, 622 bp, Homo sapiens; identical to SEQ ID NO: 25742
  misc_feature 1, 618, 619, 620, 621, 622: n = A,T,C or G

SEQ ID NO: 25755 - DNA, 1214 bp, Homo sapiens; identical to SEQ ID NO: 20119

SEQ ID NO: 25756 - DNA, 1729 bp, Homo sapiens; identical to SEQ ID NO: 24015
  misc_feature 1, 2, 3, 4, 5, 6, 7, 8, 9, 10, 11, 12, 13, 14, 15, 16, 17: n = A,T,C or G

SEQ ID NO: 25757 - DNA, 793 bp, Homo sapiens; identical to SEQ ID NO: 23716
  misc_feature 1, 2, 3: n = A,T,C or G

SEQ ID NO: 25758 - DNA, 1715 bp, Homo sapiens; identical to SEQ ID NO: 23747

SEQ ID NO: 25759 - DNA, 1490 bp, Homo sapiens; identical to SEQ ID NO: 21073

SEQ ID NO: 25760 - DNA, 2648 bp, Homo sapiens
  misc_feature 1, 2633, 2634, 2635, 2636, 2637, 2638, 2639, 2640, 2641,2642, 2643, 2644, 2645, 2646, 2647, 2648: n = A,T,C or G
nctgaagctccaccgcggtggcggccgctctagaactagtggatcccccgggctgcaggaattcggcacgagaaaatcccacagtggaaactcttaagcctctgcgaagtaaatcattcttgtgaatgtgacacacgatctctccagtttccatatgttgagattctacttattcatcagtttgttgtgcttgtcaagatcagacgcagaagaaacatgtccttcattcaccaggctgagctttcacagtgcagtggttggtacgggactaaatgtgaggctgatgctctacacaaggaaaaacctgacctgcgcacaaaccatcaactcctcagcttttgggaacttgaatgtgaccaagaaaaccaccttcattgtccatggattcaggccaacaggctcccctcctgtttggatggatgacttagtaaagggtttgctctctgttgaagacatgaacgtagttgttgttgattggaatcgaggagctacaactttaatatatacccatgcctctagtaagaccagaaaagtagccatggtcttgaaggaatttattgaccagatgttggcagaaggagcttctcttgatgacatttacatgatcggagtaagtctaggagcccacatatctgggtttgttggagagatgtacgatggatggctggggagaattacaggcctcgaccctgcaggccctttattcaacgggaaacctcaccaagacagattagatcccagtgatgcgcagtttgttgatgtcatccattccgacactgatgcactgggctacaaggagccattaggaaacatagacttctacccaaatggaggattggatcaacctggctgccccaaaacaatattgggaggatttcagtattttaaatgtgaccaccagaggtctgtatacctgtacctgtcttccctgagagagagctgcaccatcactgcgtatccctgtgactcctaccaggattataggaatggcaagtgtgtcagctgcggcacgtcacaaaaagagtcctgtccccttctgggctattatgctgataattggaaagaccatctaagggggaaagatcctccaatgacgaaggcattctttgacacagctgaggagagcccattctgcatgtatcattactttgtggatattataacatggaacaagaatgtaagaagaggggacattaccatcaaattgagagacaaagctggaaacaccacagaatccaaaatcaatcatgaacccaccacatttcagaaatatcaccaagtgagtctacttgcaagatttaatcaagatctggataaagtggctgcaatttccttgatgttctctacaggatctctaataggcccaaggtacaagctcaggattctccgaatgaagttaaggtcccttgcccatccggagaggcctcagctgtgtcggtatgatcttgtcctgatggaaaacgttgaaacagtcttccaacctattctttgcccagagttgcagttgtaactgttgccaggacacatggccataaataatagaaagaaagctacaaccacaggctgtttgaaagcttcacctcacctttctgcaaagcagaaaaagtatgaaaaaaccaaggcttttttcagtagcgtcctatggatgtcacattgtacatcaaacaaccttgtgattataaaacgatcctgggaaggagcccctaactagggcaagtcagaaatagccaggctcgcagcagcgcagcgctgtgtctgctgtgtcctggggcctcccttgttccgacctgtcaattctgctgcctgtcacgcgggtggttctgcccatcgcggctgcgggtcaagcatcttcaagggaaggacggactggaggcctcaccgtggactcaactctgcattctccgtgccacattcctccagttcccacacgtagaagggaacgaaactgacgtctacctcatggggctgctgtgtgggtttgggaggcaaaaatctatgaagggttttttgaaatcccataggtgccacatctatgagatgtttgataaatgtgaatatgcttttacatttgggcttatctaatttgcaataagagagcctctctctatcaacaccagcttctctctcgggctgtttgctcagggaaggcaagaaagccacgtgctggccctctgccttctctaaagtgctgttggagcatggaggagctggaggagatggggatggactgacagctaagagggcggctgctgggactagatagtggatgaagaaagaaggacgaggaagccgtggggcagcctcttcacatggggacaggggatggagcatgaggcaagggaaggaaaagcagagcttatttttcacctaaggtggagaaggatcactttacaggcaacgctcattttaagcaacccttaagaaatgtttatgtttctttattaccaatgtaatctatgattattgaaggaaatttagaaaatgcgtagatacaaaaaaaaaaaaaaaaacctcgagggggggcccggtacccaattcgccctataccggtggggggagcgggggcccgggggaaggggcctcggggcccgcggcacttttccccccgggggggccggatcgggacggccccnnnnnnnnnnnnnnnn

SEQ ID NO: 25761 - DNA, 856 bp, Homo sapiens; identical to SEQ ID NO: 20855
  misc_feature 779, 810, 856: n = A,T,C or G

SEQ ID NO: 25762 - DNA, 2887 bp, Homo sapiens; identical to SEQ ID NO: 24617
  misc_feature 1, 2, 2885, 2886, 2887: n = A,T,C or G

SEQ ID NO: 25763 - DNA, 1490 bp, Homo sapiens; identical to SEQ ID NO: 21073

SEQ ID NO: 25764 - DNA, 2543 bp, Homo sapiens
  misc_feature 1, 2, 3, 213, 2541, 2542, 2543: n = A,T,C or G
nnncggtttaaacccgcgcgcccagaaaatccagccacaggtgaaacaagaaccattaagaacacttggaatctaaatgatgacccaagatttaaagccatacacagaatttaggagtaatcttccgaagtcattgccgatatcaaacccctcttttcccactaaccagtatacatttaacaaagtgcttcctgctatggtttgaatgctacncaaaagcatgtgttgaaaacttatgctaactgttgcattggaaggtggagcctaatggagatgtttagtcatgagggtgaagccctcatgaatggattaatgctcattataaaagagcttgaggttgcaacttccatctcttgctcactcttgccctctcttacccttctgccttctggcatgggatgacaaagcacaaaggccctcaccagatgctagcatcatgcctttggatttcccaggttccagaactgtgagccaaataaatttttgttcatcacgttacccagtctgtggtattctgttatagcagcccaaacggacttaaatacatactctctctacaactcagctttctcttctagtagtccaaagataaaaatcttcacaggattcttgccaaagtacaaatataataatatatatacagcagttagcatgttgcctggcacagaataagaatgcaaatgtttatcatcattattaatgcaatgtgaacagagaaatgagaatataactagaagatgtttaggagacaaaaattgacagcttgaataaagggagagtaacttctggcttagagagtaactctatttgattagatgagaaacataaacggtttgaatgttctgaaggtttgaagcaaagtatagtgttcattcttgaatatatggattgtgagagacaggccagtaggcaggcaaatatatagctctaaagtaaaggaaacagatcaaagctggagatctgagattcagagagacagatggtaagtcctttggtgttgggaagaacccctagggaaagaatatgcagaatgaagaaatgatgacactaggtagaacttaaggaacaccaacacttacaggacgttgagagcaagaggccagagaaataagagaataatagtgtgatatatgaaaagccaaaagaaaaaaagtatctcagagaatattcaatgtcaatactgccaagcagtgaaacaagaactgagagttttcactggatttggcaacaaagtatttattcacacaatatgcatcaagcattgtgctagacccttgagatacagacatgaataagaaaaataagacccttgcacaaacggacattatgttgtgaagacagtaaactagcaaacaaatcaaatacacattgtgataaggatggtgagcagagagtgacatgatagggagtaaaaggcagaggccagcttcagatggggagtttgggaaggcatctctctgaggaggcaaaatttaagctgaaatctgaggcaggaaagggcatggtcagagaactgaaaggagttccatatggctacagcacaatgatggcgggaagacggagagacagaagctagaccatgtttgtagatcatgctcaggacatagaagaatttagatgacccactgaacaattgtaagcaaggaagctaagatcactgtagctaatggtacttaatagcttggattttctcatttatactagtcttaataatcagaaataggacattttactaagtttcaaccattaactgtttattataataataatgaaaataagcttttgtatctaaaaggatactatatggttacaaacatgttacctatcgcattaattttactaatccccttttaaccttcctccatatttctttcaaagatatttctcatactatctgtttgagtctatcaaatttctctgaggtactcactcattttcaagcaatgtatatcagaatttgaatgttttataacaacatgactaagcaagatgttactaaaatccatatgggtcagtaacatacaaaaaacctgatgaaattatttttaaaaagtttatattccacagagtttcagtttcctatttccttaatctatgtatttatatacatacatacaatatagaaaagttgatgcaaaaaacattggcttgaatctgagaagctgaattacatgttcgtattattttttactttcctcatctgcaagaggaaaaacttatggtccttgcatattttaaagacattaataagaacaaatgccatcgttttcaggtagtgtgctaggcacattacattatttttaattatcctaatacccttcaaaaataaacataactcttcccattttacagatgaaaaaataatctcagtgagtttataggtgacttgcccaagactacagacctgaaatttaagcccaatacggcaggctcaaaaactctggttactataccggatgtcccagactgttaacagattgagttccaaaaaaaaaaaaaaaaaaaaaactgtcacatatgagatattaaatcggacggcgnnn

SEQ ID NO: 25765 - DNA, 890 bp, Homo sapiens
acccgaaaatagtgtttctgtcattcaggcaagattctagctttgccttttccctacttcccattttctacctcagaaacagaaattggaatatgagagggtggagaatcgctttagaggaactgaaacggagtttgtaagttgaatggtttctagcccatgtgtaaacctgggtgcggtgtgagaggagctctgcacgactccacggaagggaacccagtgagttgtagctatagtttcctaattgatttagaggtgacagcgtaaacaatggctctaaaaaaaggtgaaactccatttaccaaaaccaaatttgacactagctcccaaagctaacttgttaatacagatttatcttaggctagtgaagtggcactaaatttgaaactgagagtcttgggtgctgtcttttatctgtcttgtggcttactgaatggtcacaaataagtcaagtgacctcttcatgttccagttccttttcagtaatgggactaaccataggaaaaaatagtattggcctaaaatgctgatctctttcctttgaccctgaaaactccaaggaactccagttagggcttcctcaacctagtaagatttgtaagttggtagaatcttacttatcacccctgactttcttccttcttcctccttagtgaaatagacagcaagttagagcaaatggagcaatatttagtgctaaagctttagagccaggggagggtaatcaccaacacgggccaagccgtaatgacttggtacacccagagaaggctgggctgcagccgggcaggattaaccttaagggacttgctgctgtttctctcccggcacacacacgtgctcatcactcaacgcctggcgagatcagggctggagtgacacaggcatgc

SEQ ID NO: 25766 - DNA, 1490 bp, Homo sapiens; identical to SEQ ID NO: 21073

SEQ ID NO: 25767 - DNA, 1674 bp, Homo sapiens
cgaggtacaattggttcattccacagtttaaactaactggagctcctaaaagcagcagacaggaactgaatgaaaacccctgcgctgactgacttgtataatctagtggcctagcctggaagcctcatttttgtcacctgtaaaaggagattgtaagaggatgggtataaggagcttcataaacctggatgagatatttgagggggagggaacaatacttaccctcaaagctattaagaggcaggagatgggaatattccacaaagccacttctacaaacacgggagcctgttggagtcccagaagggacagtggttggtggcttccagacatgctgtgtcctcaagaatccaacaacgcatcttcttcatcctggtcctgcccccagctgagtccagcgttaaatgttcttaaaggacttctagggtcctgtgggctccaagcccagcctggctcttcactttggtcttggaagaaggcctcagcatcctcttcctcaccatcagtgagcagcagcagctcctcatggggcaaatggagatccccactctcttcattcacctcactggattccaccacaatagacggcagatgggacttttgagagaaatcctgaatgtgctggtgaccttcaaccttgccaatttttcctctgtcccagagagggttgggcagcctgggactttctggatgctgggaggagcctgggctatttctagtccaaagcccatcctccttgcttctccctggcacaagggccatggtggtgattctgagatccaagcgctccggattccaaacgtttcctcgagcaggtcctctctagccggccgcttatctatggtttctgctatagggcgctctagcctgcgccaaggggtagtgagaccgcgtccgcgcaacagcttgcggctgcggggagctcccgtgggcgctccgctggctgtgcaggcggccatggattccttgcggaaaatgctgatctcagtcgcaatgctgggcgcaggggctggcgtgggctacgcgctcctcgttatcgtgaccccgggagagcggcggaagcaggaaatgctaaaggagatgccactgcaggacccaaggagcagggaggaggcggccaggacccagcagctattgctggccactctgcaggaggcagcgaccacgcaggagaacgtggcctggaggaagaactggatggttggcggcgaaggcggcgccagcgggaggtcaccgtgagaccggacttgcctccgtgggcgccggaccttggcttgggcgcaggaatccgaggcagcctttctccttcgtgggcccagcggagagtccggaccgagataccatgccaggactctccggggtcctgtgagctgccgtcgggtgagcacgtttcccccaaacctggactgactgctttaaggtccgcaaggcgggccagggccgagacgcgagtcggatgtggtgaactgaaagaaccaataaaatcatgttcctccacccaaaaaaaaaaaaaaaaaaaaaaattggggggcgcccgcccccaaaaaattttacacccttctgggggcgcggccgggagggactgggcacgggcccgggacccgggcgaagggggggtccccaaaaaagcccggcccgcggtggcacaccagggggggcgggtacgggcagcta

SEQ ID NO: 25768 - DNA, 245 bp, Homo sapiens
ctgggcaggtacgcgggggccgcgggacgccaggaggcggaggcggagtggagttagattaaatgccttaatggataaagaaaaattggatgttaagattgaatattgtaactatgcaatggattcctcagtggaaaacatgtatgtaaacaaagtgtgggttcaatgtgagaatgaaaattgtttgaaatggagattgttatcaagtgaggattcagccaaggttgatcatgatgaaccatggt

SEQ ID NO: 25769 - DNA, 398 bp, Homo sapiens; identical to SEQ ID NO: 22245
  misc_feature 398: n = A,T,C or G

SEQ ID NO: 25770 - DNA, 2497 bp, Homo sapiens
  misc_feature 1, 2, 3, 2384, 2435, 2458, 2490, 2497: n = A,T,C or G
nnnggcgggcacgccccctcgcccgcggccccctccccgcctctctccaccgcctcctctggctccccggtcagagggccggagcgagaagatggcgaagacgtacgattatctcttcaagctcctgctgatcggcgactcgggggtaggcaagacctgcctcctgttccgcttctcagaggacgccttcaacaccaccttcatctccaccatcggaattgattttaaaattagaacgatagaactagatggaaagaaaattaagcttcagatatgggacacagcgggtcaggaaagattccgaacaatcacgacagcgtactacagaggagccatgggcattatgctggtctatgacatcacaaatgaaaaatcctttgacaatattaaaaattggatcagaaacattgaagagcatgcctcttccgatgtcgaaagaatgatcctgggtaacaaatgtgatatgaatgacaaaagacaagtgtcaaaagaaagaggggagaagctagcaattgactatgggattaaattcttggagacaagcgcaaaatccagtgcaaatgtagaagaggcattttttacacttgcacgagatataatgacaaaactcaacagaaaaatgaatgacagcaattcagcaggagcaggtggaccagtgaaaataacagaaaaccgatcaaagaagaccagtttctttcgttgctcgctactttgatgaactctttctgagagactgcagcacacctagagggccctttcctgcttctctgaaagcacaggtcacccagcctcagaatcacacctcccggctgctgctgagagcaccactgaacttagacctctcaacacagtatgccaagtggattccagcctcatggcctagcaaaagaacagactccctttttcaaacatggaagcaatgaagtggagacacatgcaggacctaactcgttttttccttgttttattacctgttgcagaagcggttatctttcttttttactttgcacatcagtgttagcctttccctatttcagcacaatcttagactcatatttgcacacttttgtgtcgtgaagttctagacaaatttgtacatgtggcaatgttaaaagagcatttacagcagaggttaatatactaaaattaaagggtatttggtctggttcatatggtcaaatattactgccttggtagcatttatttaagggctttttcttaaataagaatcattaaagtcattaaaaaaatttactgaaatgcccatcttgtcatcaaaggccacaatttctttatttcttcagattaagagctttgcctcatccccgacctgttttccagagtctgggtagctgaatgaatcactttaaaatgattacctctgcctaatctatagaaactgcatttggaaatcaccataatctcatttttccctggggtttgtatttgctattctttcccatgtttgacttaagtgtaatcactcttaagtaatatttgaacattattatctgtttctatttgtgaacttcttgagctgaaattttacgtgggctgagagatataccatttagggttttagtgcagcatctaactgtgattctgtcaataaggatatgtaatatattttttcttaggttcactccttagctggctggtttagttgtaataccaaattcctaccataatccctgtctacaaaagttaggtttagattttagtttgcggaaaccttccctatatagagacagattaacttgttgatataaatttaatagagctagctcttggtaatggtgaaaataatgagttttggttggttttatttggcagatgtttttagaaataaaagtacttagacctagtgcagcctctaggaaaagtcttgccttttcattagagaaaacaggaccaaggtttcagttttcaaacagctgttgttgaatgtgtagaacccagttccatctgttttggttcattgttacagaacttagtccagtcatttgggctaaagccaaccaaaagcttagttgcctttctcaacaaacactggtactggtatacttttgtagatgaaaccatcacaaggtatttagtgttaacttgtgtgccaaattcagatcactatgtcgttgttgctctagccttcagtgtcataacacaggggggataaaacagaggggatgagggaaatgaattctgttaataattattcttcctggtatgcctgttttgcttcacaaaggctactatcatgctggatagataagaacaggagatggcagtggaaagggattgcttggtaccacagagaattctcttcaaattaagatatgtcattagaatgcttggaccagtcaatcttttgtacttatttgaaaatntaggaacaatttaacagctgcaaatatgcccaaagctatttttaatagatntactaaacttattggtggccaanttcagcctccttaattttttttttttgggaantacctan

SEQ ID NO: 25771 - DNA, 690 bp, Homo sapiens
  misc_feature 1, 2, 18: n = A,T,C or G
nncgtccgggcacccatnaaaatgcaaaataaataattttatgtgggggaatattgaagaaaaagctagaaacttttttataattgcactttaaaattttggaaaagaaaaattgagaatgcaatcagtagtctcatttttgtcagtattctgtcagatattagctattcaataagcatatcttggattactatttttttagttgtcagtttttctagtttccccctttataggaaaaaataatacctatgtggttaaaaactgagacccatttaaaaaacaggacaggtacagttaagtactagaaatgccgtttttatcacttgaaaaatagattagaaatgtttttcttttcccagaattgtgtgagtttgttttgaagccttgaataccggtacatggttaacaggcagcttgtgcccaatcccaaagcgggaagaaaggcctggctttggctcactgatgataaagtctcctcccactgcctttcagcagctctgccgaagagctgatcaagatgctgcaaacccagcttccccagaccggccaagagggaagaatgatgagcgtgttttaaattacaaagagagagcagcgcaggcagtttctggtctgggtgataaattgaaatccataaatatagcagtgctaatttgaagttctgtaattgtttgtgccatgagaatgtgt

SEQ ID NO: 25772 - DNA, 463 bp, Homo sapiens
acttgacaggaaatctcacacttgtgaattcagagctcgtgagcataaaattgctcttctaatcacttgcttttatttgctgatctttattggtgcattttattggtcaggatgtgattgagattatgtaataaacccaactgactgcttcttttaacttctgctattgaagtaatccctcagattactgtcttgagagacggagagtgcacacagtccaacagtgtgcactcttcctctgtaaagacagtagaaaggtatccatcttgttttaaatagtagcagggaggtttatcaatggcttaacatggtaggctgggcctggagagctctcaatgtaacagagctcaaatgtggcatttacatgaattctaagttgattaagcgacacaatttgttcaactataaaacataatacattcttaatagattttacctattattgtatatgtaagttcctagt

SEQ ID NO: 25773 - DNA, 3617 bp, Homo sapiens
  misc_feature 1, 2, 3592, 3593, 3594, 3595, 3596, 3597, 3598, 3599, 3600,3601, 3602, 3603, 3604, 3605, 3606, 3607, 3608, 3609, 3610,3611, 3612, 3613, 3614, 3615, 3616, 3617: n = A,T,C or G
nncgtccgcccgtctgaagccggctgtcggtctccgtgtcgccgccgccgcccggcatcgtggagctggggcccccttttgcctgggagttttgtagtcgcctagggtcagcggtgacatcccaaagggcaggcccggcagccgccatggtggccaaggattaccccttctacctcacggtcaagagagcgaactgcagcctggagctacctccggccagcggtccggccaaggacgctgaggagcctagtaataaacgggtcaaacccctttcccgagtcacgtcgctagcaaacctcatcccgcccgtgaaggccacgccattaaagcgcttcagtcaaaccctgcagcgctccattagcttccgcagtgagagccgccctgacatcctcgccccccgaccctggtccagaaatgccgccccctcgagcacgaaacggagagatagcaagctgtggagtgagaccttcgatgtgtgcgtcaatcagatgcttacatccaaggaaatcaaacgtcaggaggcgatctttgagctttcccaaggagaagaagacttgatagaagacttgaaattagcaaaaaaggcctatcatgaccccatgctgaaactctccataatgacagaacaagagttgaatcaaatttttggaacactggactctctaattcctctacatgaagagctccttagtcagcttcgagatgttaggaagcctgatggctcgactgaacatgttggtcccatcctcgtgggctggctcccttgcctcagctcctatgatagctactgcagcaatcaagtagccgccaaagctctgctggaccacaaaaagcaagatcaccgagtccaggatttcctacagcgatgtttagaatccccctttagccgcaaactagatctctggaatttcctcgatattccaagaagccgcctggtaaaataccctctgcttctccgagaaatcttgaggcacacaccaaatgataatccagatcagcagcacttggaagaagctataaatatcattcagggaattgtggcagaaatcaacaccaagactggtgaatctgaatgccgctattataaagagcggcttctttacttggaagaaggccagaaagactccctgatcgacagctctcgagtcttgtgttgtcatggtgaactgaagaacaatcggggcgtgaaactgcatgttttcctgttccaagaagtgcttgtgatcactcgagccgtcacccacaatgagcagctttgctaccagctgtaccgtcagccaatccccgtgaaagacctcctgctggaagacctccaggatggagaagtgaggctgggtggctccctgcgaggggcattcagcaacaatgagagaattaaaaacttcttcagagtcagtttcaaaaatggatcccaaagtcagacccactcgctacaagccaatgacactttcaacaaacagcagtggcttaactgtattcgtcaagccaaagaaacagttttgtgtgctgccgggcaagctggggtgcttgactccgagggatcgttcctaaatcccaccaccgggagcagagagctacagggagaaacaaaacttgagcagatggaccaatcggacagtgagtcagactgtagtatggacacgagtgaggtcagcctcgactgtgagcgcatggaacagacagactcttcctgtggaaacagcaggcacggtgaaagtaacgtctgacagaagcatgtgcacttcgggaagcaggcctgcatcttacctgtacagtatttgcattccacagatggaacggtttggagaagcactttttcatacttttgtgaaagtatacatgttggcccagtctctcgtatctgtacctttgtccctagtactgtaactgccaatctgtctgtgtaagctggaatctgtggcaactattaccctgtgttgtatttcccaagtgtctggatggatggagaggtactcaaacaagttactttcagttgtcctgctggattttaaaaaaatagaaaaagaatctcaaaactactgttttacatagattgtttgaagagtccttcctcttgtgcttctgtaccactttcccagctcttagatgtggtagctaaaggcacggaatttagacggccttgtaaatagggcatgaggaactcatctgtgtattgggatggtattagagagagaatcaggaaagaccaactcatgaagtgaacttggtttgatcttactcaactagaaagcttgaaaacatccctggggattctgaaggcttaattttgcaaaggaggatgcattgtctgaactttgcaacttcatccagtgcaagtttgatgcaagaatgtattaggacataaaatagaggctgaccttaaaagggccaggacagaagcggctgccagctctgaatctttaactgaaatgcacatggcaccaggaggtgtctctcatagttggttgctagcctaaaacatcagaatagaacccaaagggcttaggaaggcctgccaggataacaagaaggccctgtattcattgtgtttcatctgcctaggcctactcattattttagagaatgaatgaagcaacaaggaagagagaccatgactctatcgatgacactgtttatagaaacacaggagaggaagaatttggaatgaaaagcacttcgtcagaaccttctgtgggagccattgagagaaaagcatggtccagtgccttctgagaaaggccagagctttgggctttcctgctctgcttttgggtcgtcaatttgccatctctggttctgtgctataatcagaattgtaattatgttctccagaggccaatttcattaactctgattaattagaatcagctagccagattagtaacctctttgtccagccttgatttacagtgcagggtaaagtgcagaccttaaaaacagctaagtacctagaagagctccctgcaagtgtaaatattaaggatgacctgtgcaaaattatacccacaccagcactagtggtaattattctaaattattgccaaaaagttttttttaatctgtctttcaagtttacagaaaagaaagcagtaaatgcattgatgtcattttattatgtacatatatcatgtgcattcaagctgtgtgacaagatatatcaatataaaaacaaggtatatactttattattttttgaaaacaaggatattgtgatcaattttaccctgtaaaacatatttctgtatttataggtcttaaacatgatgaattttttctattacaagtttatttaaaactgctttctcaagtcgttattgatacagcaagtgaacctgctgcagacagaagcagaggaaagccaagaacagcctttattggtgaagaaaagaatgaatgattctttgtaggcgccatcagccacttttagaagccatcagccagtgtgttgggaaaagaggtttgtcaagtgttggcctatgggaaggtggtcaatgaatgttttgatgaaatgaatgtttttgtataatggccttaaacttttctggaagtatttcaaataaattacattattaagtcatcaaaaaaaaaaaannnnnnnnnnnnnnnnnnnnnnnnnn

SEQ ID NO: 25774 - DNA, 463 bp, Homo sapiens; identical to SEQ ID NO: 25772

SEQ ID NO: 25775 - DNA, 1801 bp, Homo sapiens
  misc_feature 1795, 1796, 1797, 1798, 1799, 1800, 1801: n = A,T,C or G
ccacgcgtccgcggggacaaattattacaggatatctgcgccccctgttccgagtcactcggggccatcggttacttcagcaggttctctgcatcacggaccctgttgtggctccgtgtcagagagtgagagtacaaaaggaagtgctgattgccttcctaagctcagttatcaaaattcttccagtatcgttcgcctcactggtacaagtaacaacagtgctggtaaaatatcaggagaaagcatggaaagcacacctgagctgctcttaatatcatctcttgaagatacaaatgaaacacgaaacattcaaagtagatgcttcaggaaaagacataaaagtgacaatgaaactaatttgcagcagcaagtggtctggggaaatagaaaccgtaatcttagtggaggggtactgatgggatttatgctcaatagaattaaccaggaagcaacccctggagatatagttgaaaaattgggagctgatgcaaaaattctttcaaatgttatctcaaaaagcacgagaccaaatactcttgatattgggaagccacctttaagatcaaaaagagacagtctagaaaaggaatctagtgatgatgatacaccttttgatggttctaactatttggcagataaagtggattctcctgttatttttgacttagaagacttagacagtgaaacagatgtatcaaaagcaggatgtgttgctacacaaaatcccaagaggattcaacgtatgaacagcagcttttcagtaaaaccttttgaaaaaactgatgtcgcaacaggatttgatcccctctctcttttggttgctgagactgaacagcagcaaaaagaagaagaggaggaggatgaagatgatagcaaaagcatttcaacaccatctgctaggcgtgatttagctgaagaaattgtgatgtatatgaataacatgagcagtcctttgacaagtcgtacaccaagcattgatttacaacgggcatgtgatgataaattaaataagaaaagtccaccattggtcaaggcatgcagaagatctagtctgcctcctaattctcctaagccagtgagacttaccaaatctaaaagttacacaaaaagtgaggagaaaccaagggatagactttggtcttctccagccttctcacctacttgcccatttagggaagaatctcaggatacattaacccactcatcaccttcatttaacttagatacactactagtacctaaactagatgttctaagaaacagtatgttcactgctggaaaaggagttgcagagaaagcaagcaaatggtattcaagattcaccatgtacaccacatcatctaaggatcaaagttctgatcgtaccagtctttcttcagtgggagcccaggattctgaatctacctctttaacagatgaagatgtctgccatgagttggaaggacctatctcctctcaagagaccagtgctacttcagggactaacgagaatcgatctcaagccgaataagcctggaaagttctgatccttggaagggatctcgcgaagtttgcccaactgggaaatccgaaagcgacatcctactacaacgcgaagtaacacacaactctcgccagacaactatgcacagggagggccccaacatcaagaggccacggggagaacagtgatgtacggtccagactacgacaacccgatggagacacgagcgataccaaccacaaaaatgcacacagagacaaaagaaacacatagaacagacacaaccaacacagtgcaaaacaatacaacacnnnnnnn

SEQ ID NO: 25776 - DNA, 3772 bp, Homo sapiens
gactcgtggctcgtggcttatgttgagcgcgcacaagaagcttgctctgtgaggctgttgggattacactcgatgagtggcggtgtgacactgaagccgggagggacgaccgtccagaaagacggctgtggtttgctccccacagagaacagttatccgcctacgagaagtggagcgattcactaggggcggcagagcagcgctaagtagaaacgcggggtccagttcgatcgcaagataaacggtgttctctctgaagatagggtctaccgaagggagttggtgtgtgcgcgccacacaaagtatccacctgtctatagcgggggtcgtagattagagcaccgagcttcttagcgcccaaataaaccagggtaaacgcccgcgtttttgagttttcgggcccccctatggggggcccccgggtttttccccccctggtggaaaaaaaagaggggtgcgcgggaaaacgtgggcccggtgggccgcgctttcttagacccgtttggtgtcccgccccccgccaaaatgttgtcgcgcccgcgggtttttttttttttttgtgttttttggtttttttttttttttttttttttttgtcccttcatgtcaaactgctttattacatcttaaataacagtacagtttaatatagtatctatcttgcatccagcttccttgcagtacactgactttaaaattaaatacaaaaggtggaaaggggtaagggtgcagagagctctacagagttgttggacggaaagagaaagaaggggtttcatttgtattctctttgccagatccaggcctaccgcaaggtcacagcacagttttgtatagaatgttgcagaaaacaggatggagaagccactactgctgctatgaaggagtgcggggggcggggcggggggtcccacagaacctgctttccaaacgctgctgctgaacactggccttgaaatgaacaccaggacaatctgtgtgtgatgggaatgagccacctcagatgtggagggccctgaagaatccatataggagggcaggctcttcactccctctccctccctctctctccctccccaccctcagaatccaacagcagtcgtttgcaacagaacttttttttttttaaagaaataaagaaaacagtgacttatcccgctacccaagcgtgtagagccgcgcgctgtactgcttccgatatgtgccacagagcagcaacgagaagtggacagagccgcaatggttacaactgtaagaggttatttcttaaaagaaaaagaacacctaaggactgagtcccatatgcacttttgagcatttctacagcatgcgattctaagagtaaacccacccaatatggcaaacaatcaaaatttttaaaatttaacttagaaagtctgagatcattattttcaaaacattgatttgtacattgtttcatacacaaataattgactgactatccaagcacaggacaggcatctctcttgaaaacagaggttcctcctagttgggggtggggtagtgttaggctattataaacttccctccaacttcacaaggaaacccaaagtgagattaaaaactcaactgagaagatagacaggatgggtcaggaggaacatggtgctggatctgagctcacttttcagcaaaggtgaaggattctctgatcacgcatttgagaccgtccccgcatgtgcttggccccatggcttctgaacatgttcttttctatgccacgtttgtgtgcaacaatgatctgtgacatcagacagaaaattaaaaaccagggactgaatttacatcattgacaacatcagagaggctgccctagactctctggttttgattaactgttgaacacaaaggaatacattttaaaaaggaaatatgaatgcttccaaaatcttgctacaaacatgactgaaatttggacacgatgaccagatgaacaaagccctcagcatgttttgcatgaatgccacaaaacagggtcactggtctaaaattcaaatacactggtggaaaagtgtgtctgtctgacaattacactcaagtttaccttctggttaacatttttattatatatttccttttaaaattcattcaagacaaaaaagaaaacaaagacgatggccccggaaggaatgcacaatttgttttagtttacagcacagagatctttctctcaatgggaattgtgctcttggtttcagcaataagtgaaggaaaaaagatcttgcccttttgaagttctgaggggaggtgtagggtgtccacgttagtacggttggataggatatgctctcatggtacatggtaacgcgtccaagttggaatggtcttccagtctccatggcatccacatgctactggcgttagttccagatcttgaggaagctatcccaggaccctgtcgccacagccatgccatcgtcagtcacgcccaggcagctgacgcggttgtcatgcccagccaagacacctgcccggtcggctttgagtgcatcccagacgttgcagttgaagtcgtcgtacccagcaaggaggaggcgcccgctcttggagaaggagacagaggtgatcccgcagatgatgttgtcatgggagtaagtcatgagctcctggtcagcacgaaggtcaaacagcctgcaggtggcgtcgtctgagccagtggcaaatgcattgccatttggaaagaagcaaatggcattgatgtcagactcgtggccagtgaaggtctgccggcacatgccttctcgcacatcccagagtttggctgaagcatcacaagcaccagagacgaacagtctggtgtcaggagcaagagaaaggctcatgacatctccagtgtgtccggtaaacgtggtcgtctgctggccggtctcgatgtcccacagggcacacgtggtgtctccagagctggtgacgatctgattgtcatccaggaatcggcagcaggacaggtaacctgtgtgtcctgccagctcacgactcacgcgcacgttcccctcacgagttttcagattgtaaatggagcaaatgttatccaggccaccgcaggccacatagttcccagaaggggcatatgcacaggtcatgacccaggaggagcgcagagggatggcgtggaccttgttggtggtgtagctgtcccagatgataagtttaccatcctgcgaggcactgacgagaagcctggagtctgtgccccagtgcatggcgtagatcttggccaggtgcccccgcagtgtcctcctcgtgcgcatttggattcttcccactgggtcgatgttgtttgtgatctgagagagagttgcatctgcacatgctttcctggcgtctcgaatctggttcttaagttgctcggcctcctgccgtaactggtcaagctcactcatcttccgatcttagtgctcttcaatgccaccttcaagaatgtgagatcttaattcagaagggcttctggtctggtctccaatacatgtaaatttgtctcagcgccctcgtcgcggcctgacgcgcccacaccgccgcctcggccgccgctcggcaggtcgtcgcgctcgggccgcgctgcgcgctccgcgggcgctgcgggcaggtgcgcgccggcgaggctcggtccagtcccgccgcggcggctgctccactcccggccccgctccccactcgccgcccgctcccgctcccgccgccgccgccgccgcctccgtccgcccctcagacgcctccagccatcgggatgggcgcggcgggcccggacgcg

SEQ ID NO: 25777 - DNA, 2381 bp, Homo sapiens; identical to SEQ ID NO: 24154
  misc_feature 1, 2, 2371, 2372, 2373, 2374, 2375, 2376, 2377, 2378, 2379,2380, 2381: n = A,T,C or G

SEQ ID NO: 25778 - DNA, 617 bp, Homo sapiens
  misc_feature 616, 617: n = A,T,C or G
actcctaggtagatcggatattgacttggagaggtcttggagaaaggctgatgaaggtgatcgacagcctaaatctctgaagccgtctcttgatgcaacctctgacccaacaatctctgggtcttgctgttatcagctccatcagttttactggatggaataaaaaggcctacctcattgggctcgtgtgggtgaggagaactgaagagtctgagagcgcggcacgagccagaggctacggaaaacactgccctcctacactccaccttggagagacccagaaaagaacaagcttcatttgtaaaaaaggaaaacaactcaggcaatgggggtggcttaaaggcactctacagtgtgcagatgccttccacttcttccatctgccctgtctctccaagaacccctatggccccggtctcagaacagagctgagtgcagaaatgaaaatctatggctctgtgttccaaaacgatgaagaatttcaagatggtggcagtggaacttggaataacttgcagtgtcttgcagtattgtgaaaccagcaacttgttcacaattcttctgaatttcttgggaaattgaagtggagtacctcggccgcgaccacgctaagccnn

SEQ ID NO: 25779 - DNA, 1481 bp, Homo sapiens; identical to SEQ ID NO: 21476
  misc_feature 1, 2, 3, 4: n = A,T,C or G

SEQ ID NO: 25780 - DNA, 507 bp, Homo sapiens
  misc_feature 1: n = A,T,C or G
ncaggtacaaggcttgagtatcaaccacaaatgtgactttagcagctttattgcataatgatccacataacgctgcattatttgcttagtttagcctacatcataaagtgctattcatagatgggaaattaacagcctgctaaacactgaagttctccatgatatttgctacttgagttgagggtaaaaagctaatttaatgctaccagcctgagtaacagatttccattaaaaatataacaacaaggacaaccaaaaaaaacaggcctaaaagttttggttaccctgttaaaacatgtcaaaagcattccataaatgattactgctacaatgcataaaagtagtttccgaatattttaacctcaaaaaataagacagatattttaatagcatataaataagtatattccttttattttgaaacaaaaatgatcagacactgccttttgtgtgtttgctgcctgtggcatccttttttaaaaagactgttacatattaaaatagtgt

SEQ ID NO: 25781 - DNA, 862 bp, Homo sapiens; identical to SEQ ID NO: 21330

SEQ ID NO: 25782 - DNA, 802 bp, Homo sapiens
  misc_feature 415, 796, 797, 798, 799, 800, 801, 802: n = A,T,C or G
gagtcgacccacgcgtccgtgctgattgctttgagcataacgaaggtgtattggatatggtcattatagctccatacatctgatagatgagagaaaacttgtatgctgtgctaataattgcaatagaaatatataccgttttggatttgtaaacatcttagaaaaaatacctagaaaaaaactcttaatgagcaaatggattaacatgtctgctttccatttttaagtatcaggtatccaaccatattattaaaataaaaaccaccagagtacagtctccatagttagatttgtataagcaaccgcaaaacgatatagtccagtatctagcacagcatagtcaaacacatagtattatgcatatggtaaatgttaataaatgtttgtggaataactgcctatgaaaacttctttntgaggcttgtattagtaatgtaatttaccatagataactttcctcatgtttcaaactgctggtcattaccaattagtgggttgagaaaacactttagatctcatacagcatggtaaaaaagtagaatagaatggaagctatgagagtgtatcacatgtagttagaggattgttttttatgacattttagtttgttgtataaatgttgtatataaatgtatgttatgtgagtatatgcttgtgtacactaggtggtgatataaaatatgtttaatgggccgggcgcggtgcgtcacgcttgtaatcccagcactttgggaggccgaggtgggtggatcacgaggtcaggagatcgagaccacggtgaaaccccgtctctacnnnnnnn

SEQ ID NO: 25783 - DNA, 2720 bp, Homo sapiens; identical to SEQ ID NO: 22599
  misc_feature 2719, 2720: n = A,T,C or G

SEQ ID NO: 25784 - DNA, 1265 bp, Homo sapiens; identical to SEQ ID NO: 21987
  misc_feature 717, 718, 719, 720, 721, 722, 723, 724, 725, 726, 727, 728,729, 730, 731, 732, 733, 734, 735, 736, 737, 738, 739: n = A,T,C or G

SEQ ID NO: 25785 - DNA, 1649 bp, Homo sapiens
  misc_feature 1647, 1648, 1649: n = A,T,C or G
aatattttaatttagcttttggatttcctaatatgataagcttatatattcatggtatgaattcctttaaaaagagcatctgctcttggacttgtatctgttgcatcttgtcaatgtttgactcatggtcagcatccaatagttgttaaatgaataaataaaatataatacattacctatgtatcaaaaagcatgtgtaagaaagccaaatatgttaactgttctactttatttatgtaattatattttcattagtattttagtagatggggctgtatagaaaaacaaatgtatcatatgtagccaaatgaatctttttcttaaatgatattattatagtaggctacagtaatttcaacaattttacaatagagttttgatcctcttctttgcgatttgtttcagagacacctcatgaatcacacaagaaaattagtctcagtacttatagccctatttcatttttcaattcagttttatcacaccatggcttcgaagtgactttgattgtgacccctaagcaattctctgattaggggataaaaattcataattccaagatgtttctgaaaatgttctgaacaatgacaacatatttggaatgagggcgtaatttcactaagtgatgcttcgaagaacaatattcgtttggatatgcaaacacacattttcaaaagttatattactgtgttaccatacctgttataaaataataaaaatatataagtatttattaagtcaaacttcagctaccgcctgaaagtttagcatatgaaatttaaattaagtctttcagattatgattatgacaattgttcaacattttgtccttccttataactgagaaagcataacttaatataactactaagagaggcccatttattcttccagtgattctagaagaaatatggcacataatatcctttacttctaaataaaggagtcaatgactcagaaaataaagaggaaaaataaagtaaatgtgagagagatgaagaaaagatagaaggggaaaaagagatttagtacgaaagaaaggacaaaaagaatggacaacagaaatactcttttttaaaatcaagaagagtgactctgatgcggaacacactcagcagaaaattttcattagaaacataacacagagagatatttggagaagataataaagcactggttctcttttattgttaagatctcagctgatgtgggaacattgtgattgcactataaattgctaaagtgaagaagagaacaaataacttcatttatttattttgtttgttttttagacagagtctcgctctgtcacccaggttggagtgcagtggcacgatttcggctcacttcaacctccccctcccgggttcaagggattctcgtgcctcactcagcctcctgagtagctgggattacaggcgcccgccatcatacctggctaatttttgtatttttagtagagacggggtttcaccatgttggccaggctggtcttgaactcctgatctcaagtgatacactttgcctcagcctcccaaagtgttgggattacaggcgtgagccaccacacctggtcatctttatctttttgacatgttcatcctcatccccacactaaggtagagataaagcctttatcttctcaannn

SEQ ID NO: 25786 - DNA, 3657 bp, Homo sapiens
  misc_feature 1, 2, 3, 4, 5, 6, 7, 8, 9, 10, 11, 12, 13, 14, 15, 16, 17,18, 19, 20, 21, 22, 23, 24, 25, 26, 27, 28, 29, 30, 31,32, 33, 34, 35, 36, 37, 38, 39, 40, 41, 42, 43, 44, 45,46, 47, 48, 49, 50, 51, 52, 53, 54, 55, 56, 57, 58, 59,60: n = A,T,C or G
  misc_feature 61, 62, 63, 64, 65, 66, 67: n = A,T,C or G
nnnnnnnnnnnnnnnnnnnnnnnnnnnnnnnnnnnnnnnnnnnnnnnnnnnnnnnnnnnnnnnnnnnggtttcttgacggataccaatcatgatcacagagactcagagacgagagagaaagacacacacgaccttctccggcatcttttgttacacctctctctctcgatgcggtcttctatctcacctttcccgcccctttgcactaccttcccttacccccacggctcattacgattctcgcgcggtccccctaaggctatccggccacttcctcttggcatggaattgccactgatttgtacaattctattaattggggatgcgttacttgaatgttgggttatcatgcctgctcctgcccggccgtcacccattcgcctcgtatcatgatagctaggcccttgagagggtggaccatgccactctttccttggtccgcttgtgtcccgtccatggcgttcaaccacatgtcgctcctcaggatagtgctgtgatccacctcctcggtctgtgatgactcctctgtctccctctctgctcccgtaccccgaagcgctgctacgattcccagggggagcgcctctcacactgtgccctgatacttctctcccagatcgttctggcctttcaactcttgtttcccgtttgtcagtggacatgcttccttcacttttccagctggtgggtctggaaggattgggccctgcctctcgaggatgtctaggatgagtgatatcaggcctgtcatgaataatcaccgttctcctttcgtctcgctcccctcgtacttctcgcctgtctgattctctaagttcatttcttggtggtggaggctcatttcttctggagtcactgaaatttttgggatatctttcgaagcttggatcttcccttcgtgcagtaggtcgtgcttttttcccctcactttgaccaacaaagcgatcccgcctttcaaaagatgaagactgtactgctgaactctcaggaaacctgcccctctctcggtgatcaaagtcattaaatctgttctgttggcgagagtagtcggatccatggccaaatcgtgcatctgtatctagagacaactttttattctcgctccagtaaggatcatctcgcctatgatctacatcacgtgggcgtttcaaggaattccttttttcttgttcataacgaagctgctgttgttgccttctgagttcctctctttctcgagcaatccgttcagcttccttacgacgttcctgttcaatacgaatgcgttccctttccaagcgttcgcgttccattctctctctctctagtttttgcctttcaatttctaggcgctctctctctctctgtaagcgttcccgttcttcccgttcacgaattattctaatgcgttctcgctctcgacgctctctctctgcaatctctcttcgtcttcgaagttccattgctcgtcgcagcctttcaaaacgaactaaatgttctctcaacctttgttccttcatcttttcaaaaggcaagatctctttccttctgtagtctttatctctttttttatctagactagctctctccttttccttacttcttccatgaattttctcatatcttcctcttcttgatggtctacaatgatctcctttagtttggtctagtattaccatatgtcctggactcttggaacttattcgcttcttttcttcactttttttaatcgattctgatgtttggccacttgctccattatcattcttctcatctttaccttctattttcttagtatccttgctttcttttttttcagatttctcagacgatcttttctcttcttttttgacagaggcttgtgtcttgctacttctatcactcgtattttttttatctccagaacttcttgaactactcttttcatcattttctttcttcatttctttcttagagggatcaccttttactttttcaacagaaatcagctgtccatgcagctcagtgcgatgaagatgtgcaatacacctggacacctctgtgcttgaagacatagttacaatgccatagcattttgccccaggacttcgagcatttgtaactacttttgcactcagaacctttccatatttgccaaagaggttcttcaaatcagcagctttggtattagatgaaagtccactaacccagatatttttagttgagcttccactgctaccactagtactacttgtacttcctttgtcatctttagatgatgtcttgctgtctttagattcctttgaagagctctttgcttgaccagaggccccagtagacgagggccctttcttcaaagtatccttttctttgtctccagattctgctttcttagaactttctctggcttccttctcgacagggtcacccttcacgcagtcttccttcttaccatctttatggttcgcattcatctcataatccttgctttccttctccgggctctgtgcaatggcgtcctgcccatcttttggcttacttgcttcagaatctgtaattttcacatttttacctgtttctaggaggtcatcaccatcaaaatccagagtgatggcatcttcagcctggattgtgaccgagatgttgtcatcctcagcttctttcacagtcgtatgagcttccatctcttcatgagctgtgtgatcagcctcagctaggctcccttctgaaggaagaggtttagatacttcttgtgtaccatcaccagaacctgctatatctaagaggatttaacaggaataaatatggcaaaacaagaagtttaaacaatttcatattcataagctagaataggacctagaaaatataaagccagttattagcactgatggaagttagggaaaaaaaaaaaaaaacacaagggtattaactaacataaaccatcctttacccaggatcacttattcttcatggaaaaaatgatctctacatacaaacaccaaacaacaatagtgagaaaatggttccatcctgaagataccagctcttcatttctggttataagttaatggcatatggaagattttgttcctccatgtgacagtgacaaaagtgcagattgttgttcaatgctggaattatcctgggattgaaccctagtgaccttcagaactcccatggtgacttcttgacaggtaacagtctgaggatatcaatcagtcttcagagtatttcagggccccatcttttccactcttcaatgcttgagtagtccggattcgtagggaaaactggtacagaaggctccaaagatgctcctgctccgtgacgttcaggaaattggttatttccagtcttcatcctgtccagtcagtctgcaattaccgttttcaaagatgtcttgcattcccccaaaacagaaaggcttcgggcatgtgagattttcagtcagtagcttcatttcatcactgcttctaggctttttatttgccttgcttaaccctgctccatgtcctttctagtccaaagtaggatcctttgaccggacgcgaaggactcttccataacctcctactgaccacatgtattgctactgttgcccctgtaattgtattgaatgagacagctcgtctaaactaaaattgtcagacgactgtatggaagtttctctaagcagcaaacacaaagtcagcggacgc

SEQ ID NO: 25787 - DNA, 2600 bp, Homo sapiens; identical to SEQ ID NO: 22756
  misc_feature 1, 2, 2600: n = A,T,C or G

SEQ ID NO: 25788 - DNA, 1265 bp, Homo sapiens; identical to SEQ ID NO: 21987
  misc_feature 717, 718, 719, 720, 721, 722, 723, 724, 725, 726, 727, 728,729, 730, 731, 732, 733, 734, 735, 736, 737, 738, 739: n = A,T,C or G

SEQ ID NO: 25789 - DNA, 955 bp, Homo sapiens; identical to SEQ ID NO: 25741

SEQ ID NO: 25790 - DNA, 1715 bp, Homo sapiens; identical to SEQ ID NO: 23747

SEQ ID NO: 25791 - DNA, 1032 bp, Homo sapiens
  misc_feature 1032: n = A,T,C or G
gcgtccgggtggctcttggccagtcactgttttaaacaagcagcagtaaggcagactgaagacagtagggaaaaatgatcaacatggtggaaggaaagaaagcagtcagtaacaacttatataataatttgcaggaactcttagaactgaaccttacagttaagttgtgatatctggggtagattgtattatttccttatttcagaagaactgaggccccaggtcacatggctgtttatctgcagagctggcattccactctgcttagctaagtgctccctcaaccttgatgctatttttcctgagctgggtgccaggggagcttggatatgtaaagcttggttgatgtccttgataggtgcatggttctaagattgtgattttcatcctaagtttaggaagttacacacctgcgtggacaaggtgggtctaattatttttcattctggtttaatgttgacaagaaaacagacatggaagaggactttcctgcactcctggtcttccttttccttaagtagtgctacaagggtctgaccggaagatctttttactggtggcttgctgcttaatataatacaggttttgagtacaatcatttcttcgtattgtttttaaaagtaggagcaatgatatcgactagtctggaagtggaacatagtctaggaagttcacttgcttggtttcggggattaggagtatttgcaaggtgaaccacccattctcttctgcttatttacactacactgcttttatccataacttggagccatcattaagatagactgttttttctatctctgtccttggaacctgttcaggtatttaaagctgtgttcctctgctaggctttgagtttcttaagggttggagccatatcattatgtcccttgcacctggttgtggtatacaatatcattctttcagcaaatacttttatttatttatttattggaggcagaatctcgctctgttgctcaagctggagtgcagtggcacgatctggctcactgcaacctctgcctcccaggn

SEQ ID NO: 25792 - DNA, 564 bp, Homo sapiens; identical to SEQ ID NO: 22496
  misc_feature 564: n = A,T,C or G

SEQ ID NO: 25793 - DNA, 689 bp, Homo sapiens; identical to SEQ ID NO: 21367
  misc_feature 1, 2: n = A,T,C or G

SEQ ID NO: 25794 - DNA, 1821 bp, Homo sapiens; identical to SEQ ID NO: 24137
  misc_feature 1821: n = A,T,C or G

SEQ ID NO: 25795 - DNA, 5245 bp, Homo sapiens
  misc_feature 1, 2, 5245: n = A,T,C or G
nnactcccgccccctactcccccagcggggaggggcgcagaggcatcacgtgacgccccgcacccgcccggtcttggtcacatggtggcacggccgctgcgtcagtcacagccctggctgcaggagtccagctgccgtcgccgccgccagcggacggggcggggatcctggtgccaggtcttcgttaacccgcccccgcctgcctcagtcagctgtcccagcccgggcccgaccgtcatggagcggtgcggggcctacgcctgttccgtgtgaggcgcatcgctgccgccgccgccgacgccgccttcgtttgtcgaggcctccggaacccccgccgcctcccggagcccctcgcccttggcagcctgtcaccgccccctgggcgggctcgaatgcgcgtccggtgaaggtgcaggcccggcgccgccactgccgcagccaggagatggttcgggcctagcggagccgggactggagcaacatgaaccgtgaagaccggaatgtgctgcgtatgaaagaacgggaaaggcggaatcaggaaattcagcagggcgaagacgccttcccacctagctctcctctctttgcagagccatacaaagttactagcaaagaagataagttatcaagtcgtattcagagtatgcttggaaactacgatgaaatgaaggatttcataggagacagatctataccaaagcttgttgcaattcccaagcctacagtaccaccatcagcagatgaaaaatctaacccaaatttctttgaacagagacatggaggctctcatcagagtagcaaatggactccagtaggacccgcacccagcacttctcagtctcagaaacggtcctcaggcttacagagtggacatagtagccagcggaccagcgcaggtagcagtagtggcactaacagtagtggtcagaggcacgaccgtgagtcatataacaatagtgggagcagtagccggaaaaaaggccagcatggatcagaacactccaaatcacgttcttccagccctggaaaaccccaggctgtttcttcattaaactctagtcattccaggtctcatgggaatgatcaccatagcaaggaacatcaacgctccaaatcacctcgggaccctgatgcaaactgggattctccttcccgtgtacctttttcaagtgggcagcactcaactcaatctttcccaccctcattgatgtcaaagtccaattcaatgttacagaaacccactgcctatgtgcggcccatggacggacaggagtccatggaaccaaagctgtcctctgagcactacagcagccaatcccatggcaacagcatgactgagctgaagcccagcagcaaagcacatctcaccaagctgaaaataccttcccaaccactggatgcatcagcttctggtgatgtgagctgtgtggatgaaatcctaaaagagatgacgcattcatggcctccccctctaacggctattcatacaccatgcaaaacagaaccttccaaatttccttttccaactaaggagtctcagcagtccaattttggcactggagaacaaaaaagatataatccttctaaaacttcaaatgggcaccagtctaaatctatgttaaaagatgacttaaaactaagcagcagtgaagacagtgatggggaacaggattgtgataagacaatgccgaggagtacaccaggaagtaactctgaaccttcacaccataatagtgaaggagcagataactccagggatgattctagtagccacagtggatctgaaagcagctctggatctgactcagagagtgaaagtagttccagtgacagtgaggcaaatgagccatcccagagtgcatctcccgagcctgaacccccgccaacaaacaaatggcaacttgataattggctgaataaagtgaacccacataaagtgtcacccgcctcttcagtggacagtaacatcccatcatctcaaggctacaaaaaggaaggccgagagcagggcactgggaatagctacactgatacaagtggacctaaagaaacgagttccgctactccgggacgagactccaaaaccatccaaaagggatcagaaagtgggcgtgggaggcagaaatctcctgcacagagtgacagcacaacacagagaagaactgtaggcaaaaaacaacccaaaaaggctgagaaggcagctgctgaagagcctcgtggaggcctgaagatagaaagtgaaacccctgtagacttggctagcagcatgccctccagcagacacaaagcagccaccaaaggctcaaggaaacccaatataaagaaggagtctaagtcttcccctcgacctacagcagagaaaaagaaatataagtcaacaagtaaatcttcccagaaatcaagggaaatcatagaaacagatacctcatcctcagattcagatgaaagtgagagccttcctccttcctcacaaactcctaagtaccccgagagcaataggactcctgttaaaccctcctcagtggaggaagaagatagcttttttcggcaacgaatgttctctcctatggaagagaaggaacttctttcacccctcagtgagcctgatgacaggtacccacttattgtgaagattgacctgaatcttttgactagaataccaggaaagccttacaaagaaacagagccgcccaagggggaaaagaaaaatgtgccagaaaagcacacgagagaggctcagaaacaagcctcagaaaaagtttccaacaaaggcaagaggaagcataagaatgaagatgataaccgagccagtgagagcaagaaacccaaaacggaggacaagaattcagcaggccataagccatccagcaacagagagtcatctaagcagagtgctgcaaaagaaaaggatttgttgccttctcccgctgggcctgttccttcaaaagatccaaaaacagagcatggctctcggaagaggactattagtcagtcttcttccttaaagtcaagcagtaacagcaacaaggagacgagtggcagcagcaaaaacagttcctccacatcaaagcagaagaagaccgaagggaagacttccagtagctccaaggaggttaaggaaaaggctccaagtagctcctctaactgtcctccatctgcaccaactcttgattcttctaagcctcggagaacaaagcttgtctttgatgacagaaattattcagcagaccattatttacaagaagcaaaaaagctaaagcacaatgcagatgcattgtctgataggtttgagaaagctgtatactatcttgatgctgtggtatctttcattgaatgtgggaatgcattagagaagaatgctcaggaatccaaatccccattccctatgtattcagagacggtggatctcatcaaatacactatgaagctaaagaattacttggcaccagatgctacagctgcagataaacgactcacagtactttgcctgcgatgcgagtctttgctgtacctgaggctgttcaaactgaagaaggaaaatgctctgaagtactcaaagacactgacagagcacctgaagaattcttataataattctcaagcaccatcgcctggcttgggaagcaaagctgtggggatgccttcccctgtttctccaaagctgtcaccaggcaattcaggaaattattcatctggggccagtagtgcttctgcaagtggttcttcagtgaccattccacagaagatccaccagatggcagccagctatgttcaggtcacatccaacttcctctatgccaccgaaatttgggaccaagctgaacagctttccaaagagcaaaaagaattctttgctgaactggataaagtaatgggccctctcatctttaatgcaagcatcatgacagatctagttcgttatacccggcagggactgcactggcttcgccaggatgccaagttgatatcttgaactgaacacattctcgttgcctctgattttctccacaacactgtgtcacatcacgaaggaaaactgccataacataccacctagtcgacactaagaatgaggaatagttttctcctcgttggttcatgtgttgttgtttttgataatccaaagcgatcatgtcagttggccctttaatatttccaatgtgaaagattatttaaatgcttttaaatctgcagcacattgataagatggtttccgtgagctatgataagattgaaattccagttgcaattcataactaatgaattgaaattttatttattttaatttttttaagttcccagattggggctagtttaagacttagttatttctgcctataaatttactctgttgaatatttagcataaatttaatgtagacatttttatttatataccttgggagctttattacctaatatctttttgtggtagctgttctaagagtaagaattggttcgtctaaaataaggacatattctttctacacctgctacctgacctgatatttgaaatcttaactccaattttattattgtggaatttacagttagtattaaggatattcttctacacatgaaaaaatcacttaaatatgagaaaatggcattctacatgtatgtactatgaaatgtgtctgatttggtatgcattatttcaaaaactgtgaatgtgtgttaataacactacagcaatcacacagtgactatagcttgcatttaatgcattacaaaagagggaggacaaactttctagaagaagcatttcatgttgaagggtttcataaaaggacaatcctgaacgttacggattttattaaaaccatatgttattttttgttgctaatcatttgacacttaatcgaaacagaataagttactgtggaaaaaaggatgatccaactcctgaggattgccgcctgtgtgtctttaattgattatctttgatagttagagttatttttcagatttttccccctcatactggattgtgatgctctgatatgagcatgcaatgactgatacagaaataggctggagcttcggtgtgtgcttttgctatacagcttacagttctaatgcctgatgtagagatgatgaatttctcctttttaaacctatcttctgtttactccttttgcattatgaaggccctcttcaatgatgtatgtttctgatggaatcagaaaatttcacactagaaaagtgtacctaacttgatagtgtgagctcgtggggtaggaggn

SEQ ID NO: 25796 - DNA, 2538 bp, Homo sapiens; identical to SEQ ID NO: 20316
  misc_feature 2538: n = A,T,C or G

SEQ ID NO: 25797 - DNA, 635 bp, Homo sapiens
acatttttgttgtggattattttaaacataatgctatagtaatattttgaagatttgagctgttatttccatttgtttttacactgtgactaaatgattaggttttagttttagactctaaacggaacctgaattaataggaaataaacacggtgcaaatagcctcccctaaagtgatcccaattattacatagccatcttgctgtggctaatgtagaatgtttttgcagtatcacatgcacgaagggcatatccaaaaaacatttgagtgaagataatactagattctagaaagtatctagacacttaagagcaggtggtgatgatgttaattaataataacaatgttgaggggctggcttctgcccttccctaataagcataaagagcatataaactcagcaaatttgctcttattttcttcattatttggtttttgaatcagtaaatgctttccacaggggtcatcttgttagtcatcttgtcattttgctgtgtcccatcttcgtccttgcaatttttcctttttcccattttggcatgtattgagacgagtgttatgctgatgaaatgccctgccctgaattgctatctgattagaacttccctcaatttttaaaatgcttcttgacatg

SEQ ID NO: 25798 - DNA, 6221 bp, Homo sapiens; identical to SEQ ID NO: 25183
  misc_feature 1, 2, 604, 1889, 6215, 6216, 6217, 6218, 6219, 6220, 6221: n = A,T,C or G

SEQ ID NO: 25799 - DNA, 1412 bp, Homo sapiens
  misc_feature 1, 1411, 1412: n = A,T,C or G
nactttgtacaagaaagctgggtacgcgtaagcttgggcccctcgagggatactctagagcggccgccctttttttttttttttctttggtccagagaagtttaatgatgactgaagctttgaccacattgaggaaactcaaggtttctaaaatagattctttgataactagttaggcctgagtgtccaaagaacttttgatattactgctatattagtagagtttatttgcggtatgaattctttgatgtctaataagagctgaacttactcggaaaggccttccacactcatcacattcatagggtttttcacctgtgtggattctctgatgctgaataagacctgtgcgcccactgaagtctttcccacattctttacatttatagggttttactcccgtgtgtactctatgatgtccaatgagatgtgagcgctgaatgaaggcttttccacactcatcacatttatagggcttctctcccgtgtgagttctcctgtgtttactaaggtctgagctatgactgaaacttttcccacattcatcacatttatatcgtcttctttccctctgttgccattctgatctgccctcattttcaataatatctttggacttaggatgctgaggagtatctttgttcagtctgtcatttatctccccaaggaattccttgtctttgggcatatcttccttctggaacaactcttcattcttagtcctagttttatcaccattcctttgtggtttcccagcttcctgctccagctgggtctttttgggatggagctggacagtcagtgattcatatggccttcccaagggggccaacttgtccatgagtatgtcccgtctttctgaattgcctgggacctgctttccaggttcatcaagctctctctccagatcctccagtaccgtcactgcctcctctccagtctctggatggtgtgcacgcaccccatgcttgcaggtctttaggaagaatgctcaggaactgttctagcaccagcaggtctaaaatctgctccttggtgtggcattctggcctcagccactgacggcagagctcccacagctgggtaagagcttcacggggtccaggtgcatcctgatagcagagcttcctgaagtgttgtctatagagttccctcctgtgaggactgcacttttgtgagctggaatcctgtccccagtaatggtcctctgccttaattatcagaagtcctttttggtcctcaggttccagggctgtggtcattctgggctttgccaggagatttatcctctatcttacgcgcagggaggaacaggtgcaacagctagcgtcctttggacagccccgaacaaagactagactcaaagacaccaatcggcgcccggccgcttcagccgggcacttccgggccnn

SEQ ID NO: 25800 - DNA, 1782 bp, Homo sapiens; identical to SEQ ID NO: 21380
  misc_feature 1766, 1767, 1768, 1769, 1770, 1771, 1772, 1773, 1774, 1775,1776, 1777, 1778, 1779, 1780, 1781, 1782: n = A,T,C or G

SEQ ID NO: 25801 - DNA, 2538 bp, Homo sapiens; identical to SEQ ID NO: 20316
  misc_feature 2538: n = A,T,C or G

SEQ ID NO: 25802 - DNA, 2538 bp, Homo sapiens; identical to SEQ ID NO: 20316
  misc_feature 2538: n = A,T,C or G

SEQ ID NO: 25803 - DNA, 907 bp, Homo sapiens; identical to SEQ ID NO: 24171
  misc_feature 1, 2, 3, 4, 5, 6, 818, 819, 820, 821, 822, 823, 824, 825,826, 827, 828, 829, 830, 831, 832, 833, 834, 835, 836, 837,838, 839, 840, 841, 842, 843, 844, 845, 846, 847, 848, 849,850, 851, 852, 853, 854, 855, 856, 857, 858, 859, 860: n = A,T,C or G
  misc_feature 861: n = A,T,C or G

SEQ ID NO: 25804 - DNA, 2538 bp, Homo sapiens; identical to SEQ ID NO: 20316
  misc_feature 2538: n = A,T,C or G

SEQ ID NO: 25805 - DNA, 1792 bp, Homo sapiens
ctcagaatgaggaacgagacagacaacgacaaaaacaattagagcatcagctctgtcacctaggctggacttcagtggcacaatgttggatcactgcaacctccaccttctgggttcaagcaattcccatgcctcagccacccaagtagctggaattacaggtagaagagaagcgcaggaagaaacaactggaggaagagcaaagaaagaaggaagaacaagaagaggagcttcgcttagcacaggaacgtgaagagatgcagaaacagtatgaagaagacatacttaagcaaaaacaaaaggaagtaggaaatcatgactctcaagacaaatgagctattccagacaatgcagcgagcacaggaactggcacagagactaaaacaagaacaaagaatccgagaattggcgcaaaagggacatgacacttctagactgattaaaaatcttggtgttgatacaatacaaatggaatataatgcatctaacatttcaaattcaagacatgattctgatgaaatcagtggtaaaatgaatacatatatgaattctacgacttcttctaagaaggatactggtgtgcaaacagatgacttaaatataggaatattcaccaatgcagaatcacattgtggatcattaatggagagggacatcacaaattgttcatctcctgagatttcggcagaacttactggacagtttagcaccaagaaaaacaagcaagaactaactcaggataaaggagccagcttagaaaaagaaaacaatcggtgtaatgaccagtgtaatcagttcacaagaatagagaaacaaacaaaacacatgaagaaatatcctaaaaggcctgattggaatataaataagccacctaaaaggtatattccagcatcagaaaagtaccctaaacagcttcaaaagcagagagaagaaaaaaaagtaaggaggcagatggaattgcttcatttggtagaaaaaaataatcctgggcacctctctcaaaacagaggcatttcaccagaaatttttcattcatctcatcaagaaacggagtcaaagttgaggtggcatctagtcaaaaaggaagaagagcctctgaatattcattcattcagcaaggaaaggtctccatcatcaccagttccagtagtgaaaaacagaacccaacaaactcaaaatacattacatttaccactaaaaaacagtagctatgagagagagaatttgatctcaggaagtaatcaaacagaattatcatctgggatttctgaatcatcccattttattccgtatgttcgaacaaatgagatctattaccttgatcccgatgcaccattgtctgggccttcaacccaggaccctcagtaccaaaattcacaagactgtggccaaaaacgacagctatttgattctgactgtgtcagggatccacttcttaatcctaacatggtgaaaaatagggatcgacagcaagcaatccttaagggactttcagaactgagacagggccttctccagaagcaaaaggagttggaaagtagtctcctgcctttagctgaaaatcaagaagagagttttggttcttcattttaaatgtagaaaatcaaatccttcacatttgatttgtgtcttccaaattataaaatgtgctcactggctcaactgtatttttcaaatagcctagatttacttatttttttaaatgctcattaaaaacttgtatactatgtagtaaaatgctgtacttgttctatacaataaaacagatacttcttttgtaaaagcttagtag

SEQ ID NO: 25806 - DNA, 816 bp, Homo sapiens; identical to SEQ ID NO: 21390

SEQ ID NO: 25807 - DNA, 682 bp, Homo sapiens
cgggcggccgggcaggtactggacaattataaagaacttaaaaggagtctagaaaatccagcagaaaggaaaatggaaggtcagaattcccagagtcctcaatgtttcaaaacatgctcagagcaaaatggttatgttctcacattgtcaaatgcacaaccagttctgcaatatggtaatccttatgcatctcaggaaacaagaggttattacagtatttttggtttgggattagctgcatctggagatttttttatggtttatattttcatggattagcaaactgctggtataatcaaccctaatacaaacattattttatttgtataattagcagttttaatatttaacactgtaactggcttcatctagaagtgatgcaccatgagatgagtactttatttacttattgcatatagttcacaatttaaaaaatcacctgggttaaaaataaaaacatctatttttttcacatgccaaagtggttctttatatcctgttcatcatatctgtatatacagatgttagttgtagtaaccagtttcactctacctttccaaaaattttattacagatggagcagatggtgctttttacccagatgaaatacaaaggccacctgtcagagtcccctcttggggactggaagacaatgttgtctgcagccagcctgctcgaaact

SEQ ID NO: 25808 - DNA, 1884 bp, Homo sapiens; identical to SEQ ID NO: 22058
  misc_feature 1, 1870, 1871, 1872, 1873, 1874, 1875, 1876, 1877, 1878,1879, 1880, 1881, 1882, 1883, 1884: n = A,T,C or G

SEQ ID NO: 25809 - DNA, 2302 bp, Homo sapiens
  misc_feature 2288, 2289, 2290, 2291, 2292, 2293, 2294, 2295, 2296, 2297,2298, 2299, 2300, 2301, 2302: n = A,T,C or G
attaattaaggcggggtagagacggggtttcaccattttggccaggatggtctcaatcccctgacctcgtgatccacctgcctcggcctcccaaagtgttgggattacaggcatgagccactgtgcttggcctgttattttattttcttataactacaacttttcttcttgaattttcaggtcagaggcaagaaaaactctttacaggtttttagtggggggcttatggagtatttcaggagttctttgcaaattaaatcatcttttcacttgtattgtttttcaaaactttgttgatttctaaaatgtgccaactgtgagtaaactatggtatttgcaagtggtttttacataatatttgagatgaggaagtgagattgtgcatgacatacttctcctttgtattctctcagtgccttacagcaggttactccattctgctatgacaacttgtttcaaatgttaatttacataggattttttataagccattaaggcatatgtatagtatatcagtaaagatggatggtgcatatataaatagtcttctgtaatagtgattggatttacttctcaattatgagagacaaaaattatcccctcacctgtctctattctttcaacaggttgatcccttttcatgatttttcattaggtggttcaggaagtttccatattacagcgcttcagactgtatatgttagtttaaaaatcacttttctctctctcaacttctttcttttttttttgaagacttaatttaaaaaatttgggttgccagatccgtatcatagattcggcctagcctcttctgttaacctagtccacagatgagcgaatctggctagttgaaggacattgtgatttgactctggtcacgcgaggaagtagaagggcaaagacaggaccggcagtttacatttccagtggttaaacctcacggtactttgggactgcttgttaacttttgtggttgtctgaggccaatctaacgtgaccatttctgacacctcaacagagagaggaaagcaacttgagcaatgagagtaaataacttgggctctcagagatttgaagatagagatctcattgtgagggggactattttgcaggtcctcatttctccaagaaagagatggtgttacaggaacccactgaaagccatatcccattaaatgaggaactaattttggctgggccttcttgtaatgtcctcgcaggtgtgttgtgaagattaatgcagggtagtatgtttgtagattgacacctagtctaaacttgaggtaattggtgctctgtgaatactcagtcgtgttcttttatagccttaatcatgatttgaactagtcccttgctttttaaatgactgaatgaagtccttcgtggtaagggagtacgttgataacttagtttactatatgggtttgtggtcgcatcccagtcatcagctgctatcattttccttcttcatcccttatactgagatttgggttacagctttttattcttcgaaggatcacaaagcagtgtacagacacctgccttctttaaggatgaaaggaagataaagtggtctttttttgtttacttatttgtttcacctcttgtttgagtaacttctaaggtgctattctctctctctttttgctaccccatgagctcttgtcacagccatggaaaccagcctcgtttagaaagggaacttagttcagaaggggttaaaagccttccagaatttttctttagctgctgaagtttttacatgtggttacatgactttaagttttatgcattacgctcttaattctattacaaaatgtggactcaccaattgctttgtgttttccatgtgacctgttacttcaggctacttggggaacatcttagtcctctgtagctcctgaacccagcactggtgcttcaagagagaaggtagcacgtctttgttcaaaacaaaacaaaacgacacttctggaggccacatcctgaatatgaatgttctactaagtcactcagttatggttctaaagggaaactgtaagaagacccacaaggagtggaccaagactattatttaattgcacaacttgaaactttgctgccagaagaggcagctccattcctttgactccagtgttgggctgttaactgctgcacctcattgcctttttttgtttttgtttttgttttgtaggagggtaggcactgttgggccatatgcacaaatattgtaactcttggtatctttactgcatcatagtcaataaacttctttgtaccctttggcnnnnnnnnnnnnnnn

SEQ ID NO: 25810 - DNA, 1782 bp, Homo sapiens; identical to SEQ ID NO: 21380
  misc_feature 1766, 1767, 1768, 1769, 1770, 1771, 1772, 1773, 1774, 1775,1776, 1777, 1778, 1779, 1780, 1781, 1782: n = A,T,C or G

SEQ ID NO: 25811 - DNA, 956 bp, Homo sapiens; identical to SEQ ID NO: 25039

SEQ ID NO: 25812 - DNA, 1022 bp, Homo sapiens; identical to SEQ ID NO: 23803

SEQ ID NO: 25813 - DNA, 364 bp, Homo sapiens
acgcggggaaggctcttctgtgtcttcctgaccagctgctctgttcccagcttagaggaccagagggagaagccacctgctacacgctggatgctgcagcctgtgccactgtggcttacatcgctgtggttggtggcagcaacggagactgcagccagctggagtggtaggaggaaggaaatagttttggggtagatggaggagtaaagagggtgctgtgatgacagtgcttatcaatcctgtccccgccacaccaccaacatacacagaaaaaaagcaggcaatgagttggctccgggatgacctcgtatgaagatgtttcattccttagtcttggcaattgacatcacaaacttgggtacct

SEQ ID NO: 25814 - DNA, 2187 bp, Homo sapiens; identical to SEQ ID NO: 21516

SEQ ID NO: 25815 - DNA, 2302 bp, Homo sapiens; identical to SEQ ID NO: 25809
  misc_feature 2288, 2289, 2290, 2291, 2292, 2293, 2294, 2295, 2296, 2297,2298, 2299, 2300, 2301, 2302: n = A,T,C or G

SEQ ID NO: 25816 - DNA, 3430 bp, Homo sapiens; identical to SEQ ID NO: 21135
  misc_feature 2331: n = A,T,C or G

SEQ ID NO: 25817 - DNA, 1018 bp, Homo sapiens
  misc_feature 1, 2, 3, 4, 5, 6, 7, 8, 12, 1018: n = A,T,C or G
nnnnnnnncggnagtcttctaggattaattaacgcgggcgcgtgtcgaaggtcacggcgcgctcacaatggagctctcggagtctgtgcagaaaggcttccagatgctggcggatccccgctccttcgactccaacgccttcacgcttctcctccgggcggcattccagagtctgctggacgcccaggcggacgaggccgtgttagatcatccagacttgaaacatatcgacccagtggttttaaaacattgtcatgcagcagctgcaacttacatactagaggcaggaaagcaccgagctgacaagtcaactctaagcacttatctagaagactgtaaatttgacagagagcgaatagaactgttttgcacggaatatcagaataataagaattccctagaaatcctactgggaagtataggcagatctctccctcatataacggatgtttcttggcgcttggaatatcagataaagaccaatcaacttcataggatgtacagacctgcatatttggtgaccttaagtgtacagaacactgattccccatcctatccagagattagttttagttgcagcatggaacaattacaggacttggtggggaaacttaaagatgcttcgaaaagcctggaaagagcaactcagttgtaacttggggaagttaacgatccgcccgagtgcagaggaaaaccagaaacgccttgccttcagctgaaccaccgtttgtgcgagctggatgtccttttcagtagaaaagaattttccttttgaatttataccattcatcaattttgacactttaaaaacgtgtgaaagggttaagagggaaagatactgcccaagtatttgaatcgtttagtagtaactgtccatttatcctattttgatctttttcaagtcttctgaaaggaagtagacagtattacaccctgaataaataaggtgttgttttccacaaaaaaaacaaatattaaagatctttaattaagcggccgcaagcttattccctttagn

SEQ ID NO: 25818 - DNA, 662 bp, Homo sapiens
  misc_feature 1, 2, 3, 4, 5, 6, 7, 8, 9, 10, 11, 12, 13, 14, 15, 16, 17,18, 19, 20, 21, 22, 23, 662: n = A,T,C or G
nnnnnnnnnnnnnnnnnnnnnnngagacagagtcttgctctgtcacccaggctggagtgcagtggcacgatctcggctcactgcaagctccgcctcctgggttcacaccattctcctgcctcagcctcctgagtagctgggactacaggcacccgccaccgtgcccggctaattttttgtatttttagtagagacggggtttcaccatgttagccaggatggtctcgatctcctgacctcgtgatccgcccgcctcggcctcccaaagtgctgggattgcaggcgtgagccactgcgcccagcctaggtagatcatctttttagctcattttgttaatgatttcagactcagatggtgtaggtagaatcagactcacatcttccattaatgtaattatgaagatgtgtgtgcattgtgttactaataagttgctaaaactagtttcattttggagaaagcttttttaaatatcttctagtattgctttgaggatccagtttaagtagaacatgcgaaggggaggtcacaatgtctggcacatagtagttcaataaaagttagtttctttctcatctttaattaaagagtgttaaaatcttatttttgtaggaaaaaagcgaaagtgtgaatgaggatacattcgaatcctattttaacttan

SEQ ID NO: 25819 - DNA, 1620 bp, Homo sapiens
  misc_feature 1, 1618, 1619, 1620: n = A,T,C or G
nagtcgcctccggaggaaggaagaagaggacgccgggcgcgcagaatggaaacagactgtaatcccatggagctaagcagtatgtcaggattgaagaaggttcagagctgaacggtttgaaggaactgacatgaaagacatgaggctcgaagctgaagcagttgtaaatgatgttctctttgctgttaacaacatgtttgtctcgaaaagcctgcggtgtgcggatgatgtggcctatatcaatgtggaaacaaaggaaagaaacagatatggcctagaactcactgaagcagggctcaaggtggtaggctatgcttttgaccaggtagatgatcatttacagactccctaccatgaaacagtctactccttgttggatacactcagccccgcctaccgagaagcatttggaaacgcactgcttcaaagactggaagctttgaaaagagatggacagtcatgactacactttttcctttcagaggggctggtgctggtacagaatgttgatataaagcttaaaattcttgcatatggtcatagaaaatgcatctttggttttgtgtttttatcacttgcttccaacttaggcttttggctcagaagattattgaataatgatttgtcttagtttctgtttcagtaagggaattctgaggccgttgctatgataccatcattaagacattcacatgtcttcatataatatctcttcatttcaaatcctaatcactatttcatactattacagggctttgatgctgccagcactgtcttttacataggaaattctagatttgcacagtaatagaggaattagaagtacctaactatacactttgattcagcctgctaaatcaggggttcaatactagcttggacaaactttgtagtaattaattgctaccagccttattggaaacaaattatcaactagtttcccctgcacaaattttgaaattcactgcttcacttaatctatttatattactaataatggattaataaagatgaattaattatatattacttaactagtattaaatgaaaaacagggactgaaatagttctgtattccgtgtttgcaacagccagccaactaagcagaggataaaccgttagcaaatgaatgtaataattactcatttccaagatatctaagcacataagcaaatacaggaacagacttcattctttttcttaacaaaaaagcatcttcagtgtgtgatttaaaagaaagaagattctggtttcctagaaaacaatattttggcctgtgttgattcttatctgaatgtgtgtttacataatgtacagtatatattcagaaagtattttggcttcaacggttactttctatgatgtagtgcttgggtatgcctagaagaacccaccttcccaacagatggtaccgggttctgtctccatcgaactctacatgtcatatgggtgcattgtatgggttggaaccaccggagaatgagatcacagaattattttgaaagggaaagccggttatcttataacaggcgactttgctactcataacgtgccgcgcgtttcagtatttaactagttgggatgttcaaggcccagagccctaatggaacactgcgcnnn

SEQ ID NO: 25820 - DNA, 6952 bp, Homo sapiens
  misc_feature 1, 2, 3, 4, 5, 6, 7, 8, 9, 10, 11, 12, 13, 6951, 6952: n = A,T,C or G
nnnnnnnnnnnnncctcatttttaaacaacagtcgcacggaagttcccggcgggacaagggaacgtgggtgcccttgctactcccgtggacgcgggtagattgggacgctggaccgtatctccccgcccccgcccccacgcctcctcaggtgctcagcctgaggccttcgtccaggagcgctgccgctgacccaggctcaggagctgggggcccctgcacagacgcccaggtctcgggacaggcggcgactgcactcacggaagtacgctgagctctcccctgtagaagggcgcctctcctcccccacttcctcctccagctccacagcagcctcccgggccggctcctcctccttccaggtctcctcccagtgccgccgcggctctcaggcctgaggtgcggcgctcaccccggcagtccccagcctcagacgctgcgtggagcggcggagccggagggaagcaaaggaccgtctgcgctgctgtccccgccccgcgcgctctgcgcccctcgtccctggcggtcgctccgaagctcagccctcttgcctgccccggagctgtcccgggctagccgagaagagagcggccggcaagtttgggcgcgcgcaggcggcgggccgcgggcactgggcgcctcgctggggcggggggaggtggctaccgctcccggcttggcgtcccgcgcgcacttcggcgatggcttttccgccgcggcgacggctgcgcctcggtccccgcggcctcccgcttcttctctcgggactcctgctacctctgtgccgcgccttcaacctagacgtggacagtcctgccgagtactctggccccgagggaagttacttcggcttcgccgtggatttcttcgtgcccagcgcgtcttcccggatgtttcttctcgtgggagctcccaaagcaaacaccacccagcctgggattgtggaaggagggcaggtcctcaaatgtgactggtcttctacccgccggtgccagccaattgaatttgatgcaacaggcaatagagattatgccaaggatgatccattggaatttaagtcccatcagtggtttggagcatctgtgaggtcgaaacaggataaaattttggcctgtgccccattgtaccattggagaactgagatgaaacaggagcgagagcctgttggaacatgctttcttcaagatggaacaaagactgttgagtatgctccatgtagatcacaagatattgatgctgatggacagggattttgtcaaggaggattcagcattgattttactaaagctgacagagtacttcttggtggtcctggtagcttttattggcaaggtcagcttatttcggatcaagtggcagaaatcgtatctaaatacgaccccaatgtttacagcatcaagtataataaccaattagcaactcggactgcacaagctatttttgatgacagctatttgggttattctgtggctgtcggagatttcaatggtgatggcatagatgactttgtttcaggagttccaagagcagcaaggactttgggaatggtttatatttatgatgggaagaacatgtcctccttatacaattttactggcgagcagatggctgcatatttcggattttctgtagctgccactgacattaatggagatgattatgcagatgtgtttattggagcacctctcttcatggatcgtggctctgatggcaaactccaagaggtggggcaggtctcagtgtctctacagagagcttcaggagacttccagacgacaaagctgaatggatttgaggtctttgcacggtttggcagtgccatagctcctttgggagatctggaccaggatggtttcaatgatattgcaattgctgctccatatgggggtgaagataaaaaaggaattgtttatatcttcaatggaagatcaacaggcttgaacgcagtcccatctcaaatccttgaagggcagtgggctgctcgaagcatgccaccaagctttggctattcaatgaaaggagccacagatatagacaaaaatggatatccagacttaattgtaggagcttttggtgtagatcgagctatcttatacagggccagaccagttatcactgtaaatgctggtcttgaagtgtaccctagcattttaaatcaagacaataaaacctgctcactgcctggaacagctctcaaagtttcctgttttaatgttaggttctgcttaaaggcagatggcaaaggagtacttcccaggaaacttaatttccaggtggaacttcttttggataaactcaagcaaaagggagcaattcgacgagcactgtttctctacagcaggtccccaagtcactccaagaacatgactatttcaagggggggactgatgcagtgtgaggaattgatagcgtatctgcgggatgaatctgaatttagagacaaactcactccaattactatttttatggaatatcggttggattatagaacagctgctgatacaacaggcttgcaacccattcttaaccagttcacgcctgctaacattagtcgacaggctcacattctacttgactgtggtgaagacaatgtctgtaaacccaagctggaagtttctgtagatagtgatcaaaagaagatctatattggggatgacaaccctctgacattgattgttaaggctcagaatcaaggagaaggtgcctacgaagctgagctcatcgtttccattccactgcaggctgatttcatcggggttgtccgaaacaatgaagccttagcaagactttcctgtgcatttaagacagaaaaccaaactcgccaggtggtatgtgaccttggaaacccaatgaaggctggaactcaactcttagctggtcttcgtttcagtgtgcaccagcagtcagagatggatacttctgtgaaatttgacttacaaatccaaagctcaaatctatttgacaaagtaagcccagttgtatctcacaaagttgatcttgctgttttagctgcagttgagataagaggagtctcgagtcctgatcatatctttcttccgattccaaactgggagcacaaggagaaccctgagactgaagaagatgttgggccagttgttcagcacatctatgagctgagaaacaatggtccaagttcattcagcaaggcaatgctccatcttcagtggccttacaaatataataataacactctgttgtatatccttcattatgatattgatggaccaatgaactgcacttcagatatggagatcaaccctttgagaattaagatctcatctttgcaaacaactgaaaagaatgacacggttgccgggcaaggtgagcgggaccatctcatcactaagcgggatcttgccctcagtgaaggagatattcacactttgggttgtggagttgctcagtgcttgaagattgtctgccaagttgggagattagacagaggaaagagtgcaatcttgtacgtaaagtcattactgtggactgagacttttatgaataaagaaaatcagaatcattcctattctctgaagtcgtctgcttcatttaatgtcatagagtttccttataagaatcttccaattgaggatatcaccaactccacattggttaccactaatgtcacctggggcattcagccagcgcccatgcctgtgcctgtgtgggtgatcattttagcagttctagcaggattgttgctactggctgttttggtatttgtaatgtacaggatgggcttttttaaacgggtccggccacctcaagaagaacaagaaagggagcagcttcaacctcatgaaaatggtgaaggaaactcagaaacttaactgcagtttttaagttatgctacatcttgacccactagaattagcaactttattatagatttaaactttcttcatgaggagtaaaaatccaaggctttactgctgatagtgctaattggcattaaccacaaaatgagaattatatttgtcaaccttctccttataaataagttcagacatacatttaataacatagggtgacttgtgtttttaggtatttaaataataaaatttcaagggatagtttttattcaatgtatataagacaggtagtgcctgatttactactttatataaaatagtacctccttcagttactgtttctgatttaatgtacggaactttatttgttgttgttgttgttgttgttgttgttgttttaaagcagtccaaatttggaccttagcaatcatgtcttttgtataggtacttaatgttaatacatattacactacagtttacttttcagaatactaaagactttataactgcatgaacttggatttttttaatcactcatatggtagaattttataaacacatacatgataccatccaaattcttgcttttaataacaaaggtacaatattttgttttagtatgaaaatctggtagatcctattacacttctgtttatattaaatccacaatattttattacatttttaacttgtataaattttaggtcaaatccttcaagccaacctatactaaaaattagttccataatcacaaatggctcttttgtgtaattgtttaatttcacctgaatatcataatgcttaaagccatatggagttggaaattatttccaaagcatatttattccattgttttagtctggctatttacagtataaaaaaagcatttttattaaaatactgtgtagttctttgagatagttgcttatgcatatagtaagtattacattcttagagtagagcagagtttttagttagtattaatttattttcctccattcatgtacttttccttatatttccaaaactgttactgagaatgggtcaagatcagtgagaaatctttacagttgacaggaacctggaccccttaccccaactttatgagtaatgcttggaataaaaactcttaaggcaactcactgatttacttctagcaatagcatgatgttacaggaatattacctctgtttaagcaaggtaatgtgtaaaatcagtctcggctgtcagaataacttctaaaaggtatttttataagcagttcaagttactgaaaaccttttaaacctttctgaagttcgttagtataaattacttttctaggattattaataaaagccacataggtggcaagttgtagttttatatggctctgtagagtggtgaaccttctagaggaatatatgatttattcacagttcctcaaggcctggggatgatgatcagttatacctatttttgtgcaattacatcatgttgtacattagaaatggagagtttaatagctctttaactgctgtcctcattaggtaatgataaatatttcccttaaataattgactattttgctgtgttttaaaaatgattgaaatttatcttgccatatctcataatttcatgcacaagttgactgagctaatcttgagaatatattcgtaaaataggagcacatttagttgaggtatacaaggtaggactctagacaaaaccttctattttagctttagtgaatttcaaaagtaatgggtcttggagtatagatttttattagtagcttgaaagagcttaatcatatgcagtaagtatttttattaccaataaatttaaaattttttaagaaaaatatttttatcctagggccaagtgttgcctgccaccaatcagtaagttagtctataacaaattttaccctaacagttttaccacctagtaacagtcatttctgaaaatatgttggatagaaagtcactctttggcaaaagtgttagaatttgcttttgtgccatctattccttttatggcatctatcttgaaagtaatcttgtattggagattgaaagatgctgtaatttagaaattaacatgatatcttaaattacctttatgaaatatagttttgtataatagcatagattttccttcaaaaaatgaacatttatatatctacaaaaatatggagaagagtaatttgaaagcctactttctgaagaaaatggtgggatttttttttatcatgattaaatatcaaaaaattgccctatgaaaactttaaatctctaaaacatttgaaatactaccatatttgtgatttattgagaataaaaatccattttgaaatgtaaaatttttatgatctgattcagttttaagaaaacatgaatgaactagaagatattaaaaacatttgacattggtaagaaatattgatactgatattgatttttatataggtatttatttcagaattgatattttgagaaaaatacatgtgagtcattttttctgtttctcttttctcttaacgattatcactgtaattctgaatctgaaaggtaaaacaattagtcaaaatattattgccatcattctacctgtgttatgaaactacttattcatagttaattctcattaacacttacatttccataaagaaaactcaagtattaataaaagagactttactggcttaagagggctgtgaaagatttttgatagtgaatcatgaccctaagggagagatttgtgtgataaaagtattgtatataatagatcagcgatttttgtaaggcaaacagaatttgtaagttggcagatcttcctaagttgcaaaatgtaatgatgagcttggtggagaagaatgagtcgttcttggaatacctatgtgcagccactacccatctcaatgtcaccttgtttgcattcttggatagcttgtatatgtagtagtttgatgaataatttaaagaaaaacacctaaaatttgaaaaatgattgtaggatcaaaaaaggcagatgaaattacttaatactcagtgttttggagagtattccttaaccggcgctcgctggtcagacgtcacactcgtccctggacaatgctatttcctcacccgaatttagacnn

SEQ ID NO: 25821 - DNA, 2550 bp, Homo sapiens
ccatagcattagcaattttttatttttccttttttgttgcataggaaatgcagtacttgcttccagtaattgtattgtaatgtgagaaggtggtagcactaatggttgaatacaagagttaaactaatccacaccagctcaaaaaacctgtggagatttagttgaataagaatggacgcccacagtgattctcaaccaattacaaattttcacagaacacagtaaaactaaaagggtaactatgagagtcaatacaagtatactagaggcacagggggagggttttatttttgaagaaaatattgcaactgtgcatgaaactaaatagccatgtgatttcttacattttttttcttatttttccttttaatatgaggaggtctggtgtgaagacagatcaagcatgggtacctggcttgaacattgtccattaagaaaatgtatcagtctccgcatagcatcagtcaagggtcaaggaaaatgcccctgacttgcaaatgttctcagagtgtcttcgcagcacagttcttgaaattcaaatagtcgttttgagacaaaaatctcgccaggtactgatttctgaaatcaaacacccatgcttgtcccctaggaaaaagaaaacaaaaaacaaaaacaaaaacaaaacacgagtaatactgaatttaagtaaatgtatacctccaaaatactgaaaacagccgaaatcaagaaaagacagaatttgcgttctcagtgaaatacctttaaacctagctgacaagaaccaagtcggaaaaaaagactaacataactttgagtaatattcatacagttcactaagcattatggaatcgcatgcattaatattgtacggttattttacatcacctataccagaaggtcctgactgacagacagcgaaggctaccggtgtagaaaaatcttacttcagaagagcaatataatacagatttcacaggcactacattttaatatatcaggtattatgctggttttcttataattctttctgtcctaaagctggcattataacaatgaccaaaaaggcaaggattgaagtaaacggaaagtagataccaaagttgatatagtttttttcttcagatagattagtgcatagttctcatgcagataaacactgctatgcatttacactgttggaaagcagagtgaattgagcccaagttgtcacatttgtgtaaatcattttgtcagcctataatagcaccatgtaatggatttgcattaaacattaaattgatttcaaaattggtgacacagtattcactacagttaagtgctatggaatagcttcaatgttacctgctatatatcaaagcaattttcatcccactgcttttttattggaaaaaataaaaggaaaacatacacgacgctaattagacgaatgcacagccttggacgtggagaaggcagagcgggtttactgtcaaacagtaaatacatgcattgacttcaagacagaattggccttggaagcctttttgaatgaaagctgagccggtgggcagtgcagctttctgagactgtctttggacagatctcgaagggtgggttttgaggtgccactgaagctctccttacattactatggtggttgtgttttagatttgttctatggaggcctgctaccagaaataaaaaagaaaagaaagaatgaagacaagaaagaaaacagaagcaaacaaaaagagagagagagagagagactccaccaccactatggacaaagatatttctagagacatgatgcaaagtacattaaatgacattcttagaatccctttcccctaaaaaacaaaaaaaattcatagaaaaaaaaggtttttccttatccaggttttgtcagtcctttatgccactgtaactacaggattcaaagcttatggggctaagggcttggaaaaaatcaaagacaaacttttggagatgggtcttgcatattcctgtgggctgactgaacaccgtggctcgggaaagtctgggttccttcacactttgactgtcagaaaatgaagatcacaagctctgggaggtgtaaccttgtcggcctgcctagagcccacacctggcggcggcagggacgggcctggggagcgggctgaccacacgtaactgtcatgccagggtgtgaagacacagaacatcagttcaaacctcagaggaaagagaaggctctctagcatggagagcgtggcattactgggaggccctctgcgcacgaatgatcagaaaaggggcgttttgctggcagggacaagggccagaagaaaaagtctacagaaaaatgctaagagttagtgttcgtgcctctgacttcagttcccaaagaaaaaacaaacaaacaaacaaacaaaaaacacagaaatttgagggactcatctttgcccaatcttgttaatgccatttgatgggaaagaaaaaattcaaatgtgtctcagagtcaagggctgggcttcaaatgctgatagctctcagtctgtctgtctacacaccccaggtagcaaagtcttcatcaagcatcttcac

SEQ ID NO: 25822 - DNA, 2929 bp, Homo sapiens; identical to SEQ ID NO: 21129

SEQ ID NO: 25823 - DNA, 1973 bp, Homo sapiens
gtcgacccacgcgtccggctggttccagctggagctgggaggggcaattgagggaggaggaaggagaagggggaaggaaaacagggtatgggggaaaggaccctgaagagctaattggaggatacaaccttgggcctgcaggccaggctacctacccacttggaaacccacgccaaagccgcatctacagctgagccactctgaggcctcccctccatggcggtccccactcagctccaaagtctctctcccttttctctcccacactttatcatcccccggattcctctctacttggttctcattcttcctttgacttcctgcttccctttctcattcatctgtttctcactttctgcctggttttgttcttctctctctctttctctggcccatgtctgttgtctctatgtttctgtcttttctttctcatcctgtgtattttcggctcaccttgtttgtcactgttctcccctctgccctttcattctctctgtccttttaccctcttcctttttcccttggtttctctcagtttctgtatctgcccttcaccctctcacactgctgtttcccaactcgttgtctgtatttttggcctgaactgtgtcttccccaaccctgtgtttttctcactgtttctttttctcttttggagcctcctccttgctcctctgtcccttctctctttccttatcatcctcgctcctcattcctgcgtctgcttcctccccagcaaaagcgtgatcttgctgggtcggcacagcctgtttcatcctgaagacacaggccaggtatttcaggtcagccacagcttcccacacccgctctacgatatgagcctcctgaagaatcgattcctcaggccaggtgatgactccagccacgacctcatgctgctccgcctgtcagagcctgccgagctcacggatgctgtgaaggtcatggacctgcccacccaggagccagcactggggaccacctgctacgcctcaggctggggcagcattgaaccagaggagttcttgaccccaaagaaacttcagtgtgtggacctccacgttatttccaatgacgtgtgtgcgcaagttcaccctcagaaggtgaccaagttcatgctgtgtgctggacgctggacagggggcaaaagcacctgctcgggtgattctgggggcccacttgtctgtaatggtgtgcttcaaggtatcacgtcatggggcagtgaaccatgtgccctgcccgaaaggccttccctgtacaccaaggtggtgcattaccggaagtggatcaaggacaccatcgtggccaacccctgagcacccctatcaaccccctattgtagtaaacttggaaccttggaaatgaccaggccaagactcaggcctccccagttctactgacctttgtccttaggtgtgaggtccagggttgctaggaaaagaaatcagcagacacaggtgtagaccagagtgtttcttaaatggtgtaattttgtcctctctgtgtcctggggaatactggccatgcctggagacatatcactcaatttctctgaggacacagataggatggggtgtctgtgttatttgtggggtacagagatgaaagaggggtgggatccacactgagagagtggagagtgacatgtgctggacactgtccatgaagcactgagcagaagctggaggcacaacgcaccagacactcacagcaaggatggagctgaaaacataacccactctgtcctggaggcactgggaagcctagagaaggctgtgagccaaggagggagggtcttcctttggcatgggatggggatgaagtaaggagagggactggaccccctggaagctgattcactatggggggaggtgtattgaagtcctccagacaaccctcagatttgatgatttcctagtagaactcacagaaataaagagctgttatactgcaaaaaaaaaaaaaaaagtacc

SEQ ID NO: 25824 - DNA, 816 bp, Homo sapiens; identical to SEQ ID NO: 21390

SEQ ID NO: 25825 - DNA, 1408 bp, Homo sapiens
  misc_feature 1, 2, 3, 4, 1402, 1403, 1404, 1405, 1406, 1407, 1408: n = A,T,C or G
nnnnccgccactgcactccagcgcggaagacattagtgagcaaaaaaaaaaaaaaaaaaagaaaaagaaaacaaaaagaaaaaaatctcccaaggcagtcatgcatttgtatgccactagcatttttttgttatagaaatattcaaagtgtaccaacgtagagaaaatagctttaaacaaagcccatgtgtacctatcagtatgctttaactgttgtcacctttctgccccacttttatctatctcgaacacccctttctgcacactctttaaaccactgtattaacaaacacattagactgcatcctgccagacctacccatacagacatcaaagtaatgattattgcttattgcctgacctaggatgtgagctccatgagaacagagactgtttacctctcgctcccctgcacctaaaacaatgcctgcttggtgtaaagtaagtgctcagtaattttttaatgtgtgaccaatgaaataacttcaagagcagagagctcttttagattagaggcacatactaagtgccagcattcaacaaaagacagacggaaataagacagatgcaaatagatctcatttattaactgtgtaatgcagctgccactgcaattaaaaaaaaaattttagtatcaacctttcaaattcctcaaaattaaagttatgactaacttcaccagcaaaggaaaaattgaaggatgtatcaagttgccatttctagcccatcaaatcggctttataaagggaagcatagtatctggtattgacgaccttgtagagaaacaggccttttcctgcctcagggaagagagctgactcaaagtaaaggctttgctagaggcagtcggcagagtatttttagcatctaaaatgctcttccacttcggcagtgaccatgcgatgtaatcaaaggagaatacgtaagtgtatggaccaggaatggtcactggagtgttgatgtaggcacaacacaagaagtagtcacagaaattgctaagtctaggtttatgtgtgcatgctgtggagtgtctctgtggtggatttctttttaagaggcagaaaaaaattctaatttaaatgtattaaattataagttctaatttaaatgtattaaaattaaattataagttgataggattattattgacacacaaggagctccaaaagagatcgtatttttattagagacaagccagttgggattgaaacaaaaatggaggggggtatagccctgtgtatgttgccgaaaagatctgatgataaagcacaaggataaactggacagagatgggtttgggaagcacagaaagactggaaaaggggattttttccaaagaaggcgtatattaaaaagaaagaagagggccgggccaccttgaagaaaccaagggtgggactcnnnnnnn

SEQ ID NO: 25826 - DNA, 3063 bp, Homo sapiens
caaagagctactcaggaccagttgttaagagctctgtgcgtgtgtgtgtgtgtgagtgtacgcgggggtgcccgagtgcactgaagatggcggctgctgtaggacggttgctccgagcgtcggttgcccgacatgtgagtgccattccttggggcatttctgccactgcagccctcaggcctgctgcatgtggaagaacgagcttgacaaatttattgtgttctggttccagtcaagcaaaattattcagcaccagttcctcatgccatgcacctgctgtcacccagcatgcaccctattttaagggtacagccgttgtcaatggagagttcaaagacctaagccttgatgactttaaggggaaatatttggtgcttttcttctatcctttggatttcacctttgtgtgtcctacagaaattgttgcttttagtgacaaagctaacgaatttcacgatgtgaactgtgaagttgtcgcagtctcagtggattcccactttagccatcttgcctggataaatacaccaagaaagaatggtggtttgggccacatgaacatcgcactcttgtcagacttaactaagcagatttcccgagactacggtgtgctgttagaaggttctggtcttgcactaagaggtctcttcataattgaccccaatggagtcatcaagcatttgagcgtcaacgatctcccagtgggccgaagcgtggaagaaaccctccgcttggtgaaggcgttccagtatgtagaaacacatggagaagtctgcccagcgaactggacaccggattctcctacgatcaagccaagtccagctgcttccaaagagtactttcagaaggtaaatcagtagatcacccatgtgtatctgcaccttctcaactgagagaagaaccacagttgaaacctgcttttatcattttcaagatggttatttgtagaaggcaaggaaccaattatgcttgtattcataagtattactctaaatgttttgtttttgtaattctggctaagaccttttaaacatggttagttgctagtacaaggaatcctttattggtaacatcttggtggctggctagctagtttctacagaacataatttgcctctatagaaggctattcttagatcatgtctcaatggaaacactcttctttcttagccttacttgaatcttgcctataataaagtagagcaacacacattgaaagcttctgatcaacggtcctgaaattttcatcttgaatgtctttgtattaaactgaattttcttttaagctaacaaagatcataattttcaatgattagccgtgtaactcctgcaatgaatgtttatgtgattgaagcaaatgtgaatcgtattattttaaaaagtggcagagtgacttaactgatcatgcatgatccctcatccctgaaattgagtttatgtagtcattttacttattttattcattagctaactttgtctatgtatatttctagatattgattagtgtaatcgattataaaggatatttatcaaatccagggattgcattttgaaattataattattttctttgctgaagtattcattgtaaaacatacaaaataaacatattttaaaacgcattccctggatttgataaatatcctttataatcgattacactaatcaatatctagaaatatacatagacaaagttagctaatgaataaaataagtaaaatgactacataaactcaatttcagggatgagggatcatgcatgatcagttaagtcactctgccactttttaaaataatacgattcacatttgcttcaatcacataaacattcattgcaggagttacacggctaatcatggaaaattatgatctttgttagcttaaaagaaaattcagtttaatacaaagacattcaagatgaaaatttcaggaccgttgatcagaagctttcaatgtgtgttgctctactttattataggcaagattcaagtaaggctaagaaagaagagtgtttccattgagacatgatctaagaatagccttctatagaggcaaattatgttctgtagaaactagctagccagccaccaagatgttaccaataaaggattccttgtactagcaactaaccatgtttaaaaggtcttagccagaattacaaaaacaaaacatttagagtaatacttatgaatacaagcataattggttccttgccttctacaaataaccatcttgaaaatgataaaagcaggtttcaactgtggttcttctctcagttgagaaggtgcagatacacatgggtgatctactgatttaccttctgaaagtactctttggaagcagctggacttggcttgatcgtaggagaatccggtgtccagttcgctgggcagacttctccatgtgtttctacatactggaacgccttcaccaagcggagggtttcttccacgcttcggcccactgggagatcgttgacgctcaaatgcttgatgactccattggggtcaattatgaagagacctcttagtgcaagaccagaaccttctaacagcacaccgtagtctcgggaaatctgcttagttaagtctgacaagagtgcgatgttcatgtggcccaaaccaccattctttcttggtgtatttatccaggcaagatggctaaagtgggaatccactgagactgcgacaacttcacagttcacatcgtgaaattcgttagctttgtcactaaaagcaacaatttctgtaggacacacaaaggtgaaatccaaaggatagaagaaaagcaccaaatatttccccttaaagtcatcaaggcttaggtctttgaactctccattgacaacggctgtacccttaaaatagggtgcttgactggaaccagaacacaataaatttgtcaagctcgttcttccacatgcagcaggcctgagggctgcagtggcagaaatgccccaaggaatggcactcacatgtcgggcaaccgacgctcggagcaaccgtcctacagcagccgccatcttcagtgcccccttctgtcgtcttataagcagccgtatcgacg

SEQ ID NO: 25827 - DNA, 2410 bp, Homo sapiens; identical to SEQ ID NO: 24226

SEQ ID NO: 25828 - DNA, 1215 bp, Homo sapiens
gtccctcccgcgggcacattgggagttgtagtctaattatatatttccgcccttagtgtggggagagcgggaactactcgacccacgcgtccgagagccgatcgcggagcggattctgcttttaggagtacccgccaacaagcgggaccgagcaggaatccgtatctgggaacagagccctttgctcctccctcagaatgaacggagaccagaattcagatgtttatgcccaagaaaagcaggatttcgttcagcacttctcccagatcgttagggtgctgactgaggatgagatggggcacccagagataggagatgctattgcccggctcaaggaggtcctggagtacaatgccattggaggcaagtataaccggggtttgacggtggtagtagcattccgggagctggtggagccaaggaaacaggatgctgatagtctccagcgggcctggactgtgggctggtgtgtggaactgctgcaagctttcttcctggtggcagatgacatcatggattcatcccttacccgccggggacagatctgctggtatcagaagccgggcgtgggtttggatgccatcaatgatgctaacctcctggaagcatgtatctaccgcctgctgaagctctattgccgggagcagccctattacctgaacctgatcgagctcttcctgcagagttcctatcagactgagattgggcagaccctggacctcctcacagccccccagggcaatgtggatcttgtcagattcactgaaaagaggtacaaatctattgtcaagtacaagacagctttctactccttctaccttgcctataagctgcagccatgttcatgggcaggaaattgatggggagaaaggagcacgccaaatgccaaagaagatcctgctgggagatgggggaggtctttccagattccaggatgattacctttgacctctttgggggaccccagtgtgaacggaaaatgggctgacatcccaggacaacaatggcggtggtggtggttaggtctgcacgggcactcccgaaagtcggtcctgaggaatacggccagggtggaatgccgggaaggcatagaaaaggaatgcacaagtctgaaaagaaaaagatagggcagaaaagacaccccaggtggggcaacagggagcaggggagggccaggaaaaaattcgggcacatagagagaacatcggagcaaga

SEQ ID NO: 25829 - DNA, 777 bp, Homo sapiens; identical to SEQ ID NO: 24253
  misc_feature 1, 777: n = A,T,C or G

SEQ ID NO: 25830 - DNA, 1966 bp, Homo sapiens; identical to SEQ ID NO: 22146
  misc_feature 1961, 1962, 1963, 1964, 1965, 1966: n = A,T,C or G

SEQ ID NO: 25831 - DNA, 1836 bp, Homo sapiens; identical to SEQ ID NO: 25053
  misc_feature 1, 1829, 1830, 1831, 1832, 1833, 1834, 1835, 1836: n = A,T,C or G

SEQ ID NO: 25832 - DNA, 1710 bp, Homo sapiens; identical to SEQ ID NO: 22925
  misc_feature 1, 2, 3, 4, 1706, 1707, 1708, 1709, 1710: n = A,T,C or G

SEQ ID NO: 25833 - DNA, 2232 bp, Homo sapiens
  misc_feature 1, 2, 2227, 2228, 2229, 2230, 2231, 2232: n = A,T,C or G
nngacactgaacgccgcttgtcccctccggcttgccgtcctcgcagccatggcggccgccgcgctcccagcatggctgtctctgcagtcgagggcaaggactctgcgtgcattctccactgccgtctactcggccactccggtcccgacacctagcctgccggaaagaacacccggaaatgaaaggccaccaagaagaaaggcactacctcctaggacagagaaaatggctgttgaccaggactggcctagtgtttacccagttgcagcaccatttaaaccctctgcagtacctcttcctgttcgaatgggttatccagtaaaaaagggcgtgcccatggcaaaggagggaaatctagaacttttaaagattcccaattttctgcatttgactcctgtagcaattaaaaagcactgtgaagcccttaaagatttttgcactgagtggccagccgcactggacagtgacgagaaatgtgagaagcattttccaattgaaattgacagcactgattatgtttcatcaggaccatctgttcggaaccccagagcacgagtagtagtcttaagagtaaagctttccagtttgaatttagatgatcacgcaaagaagaaattaattaaacttgtaggagagcgatactgcaagaccacagatgtgcttaccatcaaaacagataggtgccctttaaggaggcagaattacgattatgcagtgtatctactaacagtgttataccatgagtcttggaatactgaagaatgggaaaaaagtaagactgaagcagacatggaagagtatatatgggaaaatagctcatcagaaagaaatatcctggaaacgcttctccagatgaaagctgctgagaaaaatatggaaataaataaagaagagctccttggtactaaagaaattgaagagtacaaaaagtctgttgttagtcttaaaaatgaggaggaaaatgaaaattccatttctcagtacaaagaatccgtgaagagactattaaatgtgacatgaattatggagtagaaaaatctgcttgatttattaattttatgatatatgtgatcagtatctaatttgatataaaattgaaaatgttaaaaaatcattttttttcctcagagttaaaattatttccctcatactaatgcttaatggcaatgattactccagagttttttaatttttacactggggcaatagactaggaggtctctgatttcttcttggtctaaagtgttttgattttatttctacataatagctttggtattcatgtatatacatgcatttaattgtgattttatcacctttcccatttctttccccacaagctggcatttcagtagttgcttttgaataatggttttggttacctgggaaggcaggcccagaacccatttccttgacttgcagttccgggctgtgttcacatgactgctgtctagctgatgcatttttcacatttgtcaactctggttagaaacaggtcctcaggagtattctctaacctgatattttctaaaaagatatgttgattcaactttgtttagcatcctactttctagattgtggggctcattttgccagggccaagctaccagaaaagtagaagtggagattacctggtatgtatctctctgggtgccccagttagagctgccacagctcaggaaaaagatgaggcataacgaccttgaatgtaattggagtaagtgacaaaataagaactaccctgggaaaccctgcattcaatgtagctgtcaattcagtatttttaagtacacctgtcagctgtttcttaccacttcgatggttgtgattaatttaaaatcaaaataaaggaattactgagtttaaaaaaaaaaaaccaaaaaaaaaaaaaaaaaaaaaaaaaaaaaaaaaaaaaagggggggaaaagaaaaagaaaaaaaaaaaaaaaagttgggccgcggcgacgcgcaccccgcacaacaaaaaggtttttccgaaaccaccacctgggggggcgggcccggcccccccatcgtgagatgcagcagccatcgagacaacagctaggtctccaacgagagaatcgcgccgggtcacaaccacaagcgggcggaggtccccccccccaaaaaaaaaggcccccgcggaaaacaacgagttggcagcaccacccccgcggcgccagaccaattaggtgtcaccacagaggcccgcacgcggcggtgnnnnnn

SEQ ID NO: 25834 - DNA, 1730 bp, Homo sapiens
agcgtccgccccgcgtccgggacggctttggggcagggcagatttatatctgcgggggatcagctgacgctccgcattgcagactgcggagtcagacggtgctatgtacgccctcttcctcctggccagcctcctgggcgcggctctagccggcccggtccttggactgaaagaatgcaccaggggctcggcagtgtggtgccagaatgtgaagacggcgtccgactgcggggcagtgaagcactgcctgcagaccgtttggaacaagccaacagtgaaatcccttccctgcgacatatgcaaagacgttgtcaccgcagctggtgatatgctgaaggacaatgccactgaggaggagatccttgtttacttggagaagacctgtgactggcttccgaaaccgaacatgtctgcttcatgcaaggagatagtggactcctacctccctgtcatcctggacatcattaaaggagaaatgagccgtcctggggaggtgtgctctgctctcaacctctgcgagtctctccagaagcacctagcagagctgaatcaccagaagcagctggagtccaataagatcccagagctggacatgactgaggtggtggcccccttcatggccaacatccctctcctcctctaccctcaggacggcccccgcagcaagccccagccaacggataaagggggacttttgccaaaacggcatccagatgtttactgtgaggtgtgtgaatccctggtgaaggaggtgcaccccctgattgacccccccaagactgagaaagaaatcctcgacgctttagacaatatgtgctcgaagctgccgaactctctgtcggaagagtgccaggaggtggtggacacgtacggcagctccatcctgtccatcctgctggaggaggtcagccctgagctggtgtgcagcatgctgcacctctgctctggcacgcggctgcctgcactgaccgttcacgtgactcagccaaaggacggtggcttctgcgaagtgtgcaagaagctggtgggttatttggatcgcaacctggagaaaaacagcaccaagcaggagatcctggctgctcttgagaaaggctgcagcttcctgccagacccttaccagaagcagtgtgatcagtttgtggcagagtacgagcccgtgctgatcgagatcctggtggaggtgatggatccttccttcgtgtgcttgaaaattggagcctgcccctcggcccataagcccttgttgggaactgagaagtgtatatggggccatcaaccctcttggttgaggccttgttctgagccctgacatgtgcttgggcactggtgggcctgggcttctgaggtggcctcctgccctgatcagggaccctccccgctttcctgggcctctcagttgaacaaagcagcaaaacaaaggcagttttatatgaaagattagaagcctggaataatcaggctttttaaatgatgtaattcccactgtaatagcatagggattttggaagcagctgctggtggcttgggacatcagtgggggccaagggttctctgtccctgggttcaactgtgatttgggctttcccgtgttcttttcctgggtgatgccttgtttgggggttctgtggggtttggggtggggaagagggccattttgctctaatgtaaccctgctagcttttcgaagggccttgcggcgcctggctttgtttgagctttttggacaa

SEQ ID NO: 25835 - DNA, 415 bp, Homo sapiens
  misc_feature 414, 415: n = A,T,C or G
actttttttttcctttttttttttaagagtataaggtttacacaatcattctcataatgtgacgcaagccagcaaggccaaaaatgctagagaaaataacgggatctcttccttgtaaacttgtactcttaaaaatctgttaagagagtggatctcattttaagggttcttaccacaataaaattaaatttttgaaataaatcagtcatatttgagtgaaatgaaacctttccgagtagtttcagacaattgataatacctagtttacagttcctgtagtcattttggagggtgaggacttgatgtgtttagtaaagttgagaaataaatacatgaaagaatgtgtggggaagagaaattgtggggaagagaaattgtctcaaaggaccattcttagtggcactggggaaatcnn

SEQ ID NO: 25836 - DNA, 2540 bp, Homo sapiens
  misc_feature 1, 2, 2540: n = A,T,C or G
nnaagctgcctccgccatcttggagatgggagacgggcgatggctgtggtccttctgctaatgcaaacaacaaaacgggcacactagtcacccccgagggaggccaccatcactgtaactgttggccaaagctacaaaagaagcgagggaatccaaccgagcgcagcgacactgagaacagcttcccctgccttctgcggcggcagaagtgaagtgcctgaggaccggaaggatggtgcagtcctgctccgcctacggctgcaagaaccgctacgacaaggacaagcccgtttctttccacaagtttcctcttactcgacccagtctttgtaaagaatgggaggcagctgtcagaagaaaaaactttaaacccaccaagtatagcagtatttgttcagagcactttactccagactgctttaagagagagtgcaacaacaagttactgaaagagaatgctgtgcccacaatatttctttgtactgagccacatgacaagaaagaagatcttctggagccacaggaacagcttcccccacctcctttaccgcctcctgtttcccaggttgatgctgctattggattactaatgccgcctcttcagacccctgttaatctctcagttttctgtgaccacaactatactgtggaggatacaatgcaccagcggaaaaggattcatcagctagaacagcaagttgaaaaactcagaaagaagctcaagaccgcacagcagcgatgcagaaggcaagaacggcagcttgaaaaattaaaggaggttgttcacttccagaaagagaaagacgacgtatcagaaagaggttatgtgattctaccaaatgactactttgaaatagttgaagtaccagcataaaaaaatgaaatgtgtattgatttctaatggggcaataccacatatcctcctctagcctgtaaaggagtttcatttaaaaaaataacatttgattacttatataaaaacagttcagaatatttttttaaaaaaaattctatatatactgtaaaattataaatttttttgtttgtaatttcaggttttttacattttaacaaaatattttaaaagttataaactaacctcagacctctaatgtaagttggtttcaagattggggattttggggttttttttttagtatttatagaaataatgtaaaaataaaaagtaaagagaatgagaacagtgtggtaaaagggtgatttcagtttaaaacttaaaattagtactgttttattgagagaatttagttatattttaaatcagaagtatgggtcagatcatgggacataacttcttagaatatatatatacatatgtacatattctcatatgtaaagtcacaaggttcatttatctttctgaatcagttatcaaagataaattggcaagtcagtacttaagaaaaaagatttgattatcatcacagcagaaaaaagtcattgcatatctgatcaataacttcagattctaagagtggattttttttttttacatgggctcctattttttcccctactgtcttgcattataaaattagaagtgtattttcagtggaagaaacatttttcaataaataaagtaaggcattgtcatcaatgaagtaattaaaactgggacctgatctatgatacgcttttttctttcattacaccctagctgaaggacatccagttccccagctgtagttatgtatctgccttcaagtctctgacaaatgtgctgtgttagtagagtttgatttgtatcatatgataatcttgcacttgactgagttgggacaaggcttcacataaaaaattatttcttcacttttaacacaagttagaaattatatcccatttagttaaatgcgtgatttatattcagaacaacctactatgtagcgtttattttactgaatgtggagatttaaacactgaggtttctgttcaaactgtgagttctgttctttgtgagaaattttacatatattggaagtgaaaatatgttctgagtaaacaaatattgctatgggagttatctttttagatttagaataactgttccaatgataattattacttttatatttcaaagtacactaagatcgttgaagagcaatagaacctttaagacagtattaaaggtgtgaaacaatggcattcaaagtgttgggaatacaggcatgagccaccgcgcccaggcggtctcaatcttttaatactgccttataatgcaaatataaaggtcacctgaattgctacttggcttgaattagcacattccaattgaagttttaagtttttaaaaactaatttaaatgtttactaattgtatagaagtgtactaaaaataattctgttgttgcaaaactttgtacttggaaatccaagtacatgaggggattttttttctttcaactataatttatgtgatccctttcttagaattataacaataatggtgatggcaaatgaaagtttcacatgatacgggctctttagcttgcattaatattccctgatcatcttttaatgcn

SEQ ID NO: 25837 - DNA, 1240 bp, Homo sapiens
  misc_feature 1, 2, 3, 4, 1239, 1240: n = A,T,C or G
nnnnaaagcaggacccagtggtgtgctcctgtagttccagctattcaggaggctgtggcaggaggaccacttgaggccagagggtcaaggctgcagtgtgctataattgggcctgtaaatagccactgtactccaagctgagcaacacagtaagacactgtctctaaaaataattaaagtaaaataaaaataaggaaagctcctgtgacatcaacctgatccagaattggggacagcgctactgcgggttcaatgtactgccatgttttccctgtcttatcagttctatcagcacactgaccccactcgagaccaactacaagactaaggctggaagtggttgagtagcagaagtgttatgtattctatcttcccaagggaaccatatccacatctacccctaactttggcctgagctgaaaatgggttttctctccctgtggctcatttgtttcctatattgagagaacacccaaaaaaaagattactcaagatgactttttacaagtcttttctttatcctaaaacatcctccaaccgaaggcatgggaagctatcctatactctgaccttgcctatattttaaatggcaggggccccaagctaagaatcagcaggcagtggcatctacagcttctggtctgtagtggcgtagaagcaggaaaatcaatgctccaaagcaacaatgtccagctttcctgccagtgagctgggcttgagggagtgaatgggactctttctgccttttctttttctcaaaatacgactgcattaactgggtgtatgcacacacaaacatgttcaaactagggcactcatacctagctagaacctactcagggaaagaaatatgtatttccacagtaccctgatcacccagtaaaagctaatatttattgaataattactatgcaaattatggtaagcaaattgtagtgtgaatacatgatatgagaatatcacttaattcacacagcaaccttcacaatggggttccttttggtacagtctgaaaagagaatgattatctgcgcagggtctcagagctagtgtggtagaataagaaattaaacctaagtagttgctaaacaatattacattctaatctatcctattgaaggtaatccgggaagtacaaacctaaatacacgaataacataagggatagagataacaagatagttagggacaccttggactcaaagaatctggatagatgtgaaacccgtaattttaaann

SEQ ID NO: 25838 - DNA, 3246 bp, Homo sapiens; identical to SEQ ID NO: 24842
  misc_feature 1, 2, 3, 4, 5, 6, 7, 3245, 3246: n = A,T,C or G

SEQ ID NO: 25839 - DNA, 4688 bp, Homo sapiens; identical to SEQ ID NO: 25461
  misc_feature 1, 2, 3, 4, 5, 6, 4686, 4687, 4688: n = A,T,C or G

SEQ ID NO: 25840 - DNA, 4399 bp, Homo sapiens; identical to SEQ ID NO: 20975

SEQ ID NO: 25841 - DNA, 1356 bp, Homo sapiens
  misc_feature 266: n = A,T,C or G
aagagtttagccttgcgactggcccagtatccaggtcgaggttctgcagaaggttgtgactttagtatacatttttcttctttcggggacgtggcctgcatggctatctgctcctgccagtgtccagcagccatggccttctgcttcctggagaccctgtggtgggaattcacagcttcctatgacactacctgcattggcctagcctccaggccatacgcttttcttgagtttgacagcatcattcagaaagtgaagtggcattntaactatgtaagttcctctcagatggagtgcagcttggaaaaaattcaggaggagctcaagttgcagcctccagcggttctcactctggaggacacagatgtggcaaatggggtgatgaatggtcacacaccgatgcacttggagcctgctcctaatttccgaatggaaccagtgacagccctgggtatcctctccctcattctcaacatcatgtgtgctgccctgaatctcattcgaggagttcaccttgcagaacattctttacaggttgcccatgaggaaattggaaacattctggcttttcttgttcctttcgtagcctgcatggtccagtgttatttgtacctgttctacagtccagccaggactatgaacgtggtgcttatgctgctctttatttgcctgggcaacatgtacctgcacgggctgaggaacctctggcaaatccttttccacataggagtggcttttctgtcttcatatcagatactaacaaggcagcttcaggagaagcagtctgactgtggagtatgaggatgacactgtgatgaatggattctttgattttcttttgaggatcaatctatgtttctctttctgcttctctactttacactccagtttccatccttttcagccaactggactgaaaaaccaggaattggggatgttaaacagttgcagtggaagtcatgaggttgcttgatacccagccttggttctgtgccaagcattactgcaggatctccagccagttcagcacgtttacctaggacagctggatctgggggctcatccagaaagagctttattggaagagagaaaggaaatattttggtcttttaagttgaatgatacagtaaaccacttgattcaataacactggttttagtcattgagagttgtctccaaggaaccactttaaaatccaaatcagctttcagtctaaacataacttgattagttttttttttcagagggtcagtacaggatgaattaaaaacctaaaaatatggttcataaatgtaagctaaataaattttgtttacattttttcaatatcttaggttcgatatacctttggaatat

SEQ ID NO: 25842 - DNA, 1462 bp, Homo sapiens
  misc_feature 1, 2, 3, 4, 5, 6, 7, 8, 9, 10, 11, 12, 13, 14, 15, 16, 17,18, 19, 20, 21, 22, 23, 24, 25, 26, 27, 28, 29: n = A,T,C or G
nnnnnnnnnnnnnnnnnnnnnnnnnnnnngcttccagttgggatggggaaggcctttgtgtgtgtattggggggaggggttaaaaaataattatcccaaactttttaatgtattgctttttttttttttttttccttctactataccattttaagttctgacctcaggcctccatttgggccgatggcctcttggaggcttaaagttttctgtactaagcggtgcctgtgtgatgaagggtgtattatacaagctgaatgtcatttctcgttgtagcttctgtcactcttcctctccttcagactcaccacgtttctctaagtcagaaaacttccgttttggtctttttcaaaaggtcccaatgctgcactctacactgaggcctctcacacgactgacgtcctgccgaaagagaatgatgacgaaaaaaaagggagagacaaactctaggaacatgccgattcattccacgcagcagtattgggggtggttcgggggaggggtgtttcggattttctttttttcttttcttttatttttttttttttgcagcaaccattaataaatgccaccacattctaccagcacaaggaaacataggcagcactgaaaaaaaaaaaaagctcatattaattagactgacaatatggccttggaaggctctcccttgtggaaccaagttgccatgggccttgggtgctctgcgataacgggtgtgggttggttttgtttgcaaaatggccaaaaaaaaaaaccggcttccccgagcagctgccctgaaagtaggggtggcggcggcggcgctgagtttatacattagttcagacctacttggtggcattaaactgtttgaatgcaaattcgatttcagattgaacttgttaagggagttaacgagggctgagttcagcaaatgctaaagtgttaatttcaaatatgcaaatttggtactgcagtttgttatgcaatattatatcaccaacccagtatcacaaaaactcatagaagatatcatgtaggccctgggctttgggggggtcccaaacatggtatgcagaaatgtgatggttacaggtcagtacaacctcagtccttagaacccctccacacttcagctctgcacccactttcctgtcatttatttatataggactgtagttttttttagttcgagagcctttcgaagcttaatttatattctttctttgtaccttttttctaaaattaccaaagatattacacaaaggtaaattatgttctctgttttatgctttatctgatgaagccaaatatcctcttattgttgatcaaaggaggcaaaagaatttagaggcaaatgacaagcgataggctattgcaacctgagaaagagaactgctccttcatcgtaaatttagaagaccaagtagataatggaaccaaagttgtgacttttttctagtagaacattcccccccccccg

SEQ ID NO: 25843 - DNA, 1548 bp, Homo sapiens
  misc_feature 1, 1544, 1545, 1546, 1547, 1548: n = A,T,C or G
ngtgcctttctgctgtttgctgctgtgttgccccttcttttgccttgtttgttcgtttgtgtattcgcttgttggtccccgcttgtggccgtctggggtgcagtgtttactcgtggccgcttatactcggcctgtttggtcccgcttcactccgcacttcctgggttcgtgtctccgctgtcatgcccttcctctttgactgttcttggcattaggcctgaacttgctggctcgccgtgttctggacatgtgacccgacggcctgtgatccttgtgcttgacagcaggcagtcaaaacgagctgcggcactggggagtagacagatttatactggtcccagcgggctccacagtatgaacactcttgacaccacatcactgttgtaggacagagcatagcgttcatcaaaaactaacaacttccctttgtaaaagccatcagtaactccttccaggtacttgtggatgccacccttgagctggaacacctccttgcacactcccttggctttgaggtaggctgaaccccgctcacagcggatgcccccggtacagtacatcagcactctcttctctctgaaaagttctagatttttgtcaacgtagctagggaagtaactgaatttcctgatgtctggggctaagcagccttggaatcgtcctattttgctttcatagaagtttctgcatcaagaaggatagtatcactttgttcttgatttgcctgagataaaaacttttctacttctttatgaaattcacctggggataaatggattccaggcttcttgtaggagatctttttggggctgatccccatgggcacgatttcttcaaatacaccacacgcaattctggaaaacagtgagctcctcctttgctggtcgtcagatcatctttacacaggtcatccttaaacaatgggaaggaaagcatgacttccacataaagtctggtagccaatttgcttccaccaactgtcccattgattccttctgcagcaattcgaatcttgcctgtgaggtgcaggtgctgacacagagctgtctgccaggcacagatccattggggatcctccaggtcatggtagcagtaataaaggagcacctccccttcttcactgccctggccacttatcagctcatcagggttaaagcagcttatatcagggagccaagcagacacgtcatggctatgtggaaggcactcttttaaagggttcttttcatctgcagacgaaagactctttgaggtgctcaatgtcacagccagttgctttaaaatagaagctgtctggtgataaatttcatcagcatgttgtgttgccacatgtctatggatgctggtttggtctgtgaatagctgctgacagcatttccacaatttttctttacattcaaaactcctttttgttggaacttctttttctttgcaaacgagtatttcttttttgtactgccatctaattctgctttaagactgctgctgggattaataagactcatatcttttaaatccaggtcagaaaatcttaaaattgcagnnnnn

SEQ ID NO: 25844 - DNA, 3807 bp, Homo sapiens; identical to SEQ ID NO: 21505
  misc_feature 1, 3805, 3806, 3807: n = A,T,C or G

SEQ ID NO: 25845 - DNA, 3057 bp, Homo sapiens; identical to SEQ ID NO: 24676

SEQ ID NO: 25846 - DNA, 4397 bp, Homo sapiens; identical to SEQ ID NO: 25186
  misc_feature 4356, 4363, 4364, 4372, 4373, 4374, 4381, 4392, 4393, 4394,4395, 4396, 4397: n = A,T,C or G

SEQ ID NO: 25847 - DNA, 1252 bp, Homo sapiens
  misc_feature 1, 2, 3, 1252: n = A,T,C or G
nnncctatcaacaagacatacccgatatattctaccaagtaattaatttaaatccttaaggattgacagactagaggttcaataaatgtagccattgttgttttaagtttttggaaattttatacaaaaattagcctggcgtggtagtacatgcctgtactctcagctactgggggccgcagggggcagcagaatcgcttgaacctgggaggccgggggtgcagtgagctgagatgccaccaccacaccagcctgggtgacagagtgaaactcgtatctccaaacaaacaaacaaaaagtccttaaacatatgtgaacaaaaattttgtgatggaaggattctagttaatgagtattgcatcaaggtttacatctttcttactaaggaaaagagttaataaaaattgttctttattttacaggcagttactgaggctcttcccagatctcagtaaacagccactcagccttgaaaatggagtgttgttgtttctaaacatatatttatgtcatttattaagtacagttcacttaaataacataagtagattttctcttgtagtgatttgggtaggaagaggccatgtttcagttcgttttctctgtagggtcgattgaattggaccttttcagttgttcagaaaaataaaaataatttctcatattaaatacagacgctcctcaacttatgatgtgggtaggtcccagtaaacccattataatttgaaaatatcatattgaaaatgcatttaatatctcttacctgaaatcataacttagccaagcctaccttaaatgttctcagaacatttagcctgcagttgggcaaaaccatttaacacaaagcctattttataatgaagtgttgaatagctcatgttatttactgaatactgttgtgaaagtgaaaaacaatgattgtatgggtactcaaagtataatttctactgaatgcatatcacttgtgcactgttgtaaagctgaaaaaccgttaagcctctacgatttttaagtaagttggggaccatcagtttaaaataaatgcaatactatttcatgataaacatggtcactgtaagttttactcttttgaatgagggtgcgacagaatgcagttagaatcagttcatatcaccattaaaatcatccattcagaaaccaaggccttgtctgcagaaattttttattcctttttctgttagcaaccagcactcaaacgttaaattttgggaggtgatgtactttgtaacan

SEQ ID NO: 25848 - DNA, 1205 bp, Homo sapiens
  misc_feature 1, 2, 3, 4, 5, 6, 7, 8, 9, 10, 11, 12, 13, 1204, 1205: n = A,T,C or G
nnnnnnnnnnnnnaaattagatgatacttattgttttaactagctataaaattccaatactatattccccatcattttcactaacttttacttaatctttatttgctacttttccacctataaagcgtaattttccatatcaagtaaacataaattcattaaaaaataaacacaaacccaaaatattcttattctaatatatctgcattaatagataaaaaggctttagctttaattttcatttttcatttctatctcttaaagtcaatgataaactcacaagtgtaaaatgaatgcatttaaaaacataaaagatacatttcaatgacaagaaatatgctctggcgatcgaggggtcctagtacaccgcaatcatgtctattatgtcctataacggaggggccgtcatggccatgaaggggaagaactgtgtggccatcgctgcagacaggcgcttcgggatccaggcccagatggtgaccacggacttccagaagatctttcccatgggtgaccggctgtacatcggtctggccgggctcgccactgacgtccagacagttgcccagcgcctcaagttccggctgaacctgtatgagttgaaggaaggtcggcagatcaaaccttataccctcatgagcatggtggccaacctcttgtatgagaaacggtttggcccttactacactgagccagtcattgccgggttggacccgaagacctttaagcccttcatttgctctctagacctcatcggctgccccatggtgactgatgactttgtggtcagtggcacctgcgccgaacaaatgtacggaatgtgtgagtccctctgggagcccaacatggatccggatcacctgtttgaaaccatctcccaagccatgctgaatgctgtggaccgggatgcagtgtcaggcatgggagtcattgtccacatcatcgagaaggacaaaatcaccaccaggacactgaaggccgaatggactaaccctggtccaagagcccactttgtttttcttttttgaaataaaataagcctgtctttcaaaaacaacacacaacagagaaaggagagagcacacctgagcaccaacaaaagacggggggggcgcacaaaaaactccccggggggcacatacgcacaccagttggcgaaacgggcccagggagacaaaaaggggggggcgaaaaaggtgggcann

SEQ ID NO: 25849 - DNA, 1012 bp, Homo sapiens; identical to SEQ ID NO: 25198
  misc_feature 1, 1009, 1010, 1011, 1012: n = A,T,C or G

SEQ ID NO: 25850 - DNA, 3855 bp, Homo sapiens; identical to SEQ ID NO: 20695
  misc_feature 1, 2, 3854, 3855: n = A,T,C or G

SEQ ID NO: 25851 - DNA, 2648 bp, Homo sapiens; identical to SEQ ID NO: 25760
  misc_feature 1, 2633, 2634, 2635, 2636, 2637, 2638, 2639, 2640, 2641,2642, 2643, 2644, 2645, 2646, 2647, 2648: n = A,T,C or G

SEQ ID NO: 25852 - DNA, 885 bp, Homo sapiens
  misc_feature 1, 885: n = A,T,C or G
nacccctggtccctatactctgggactggcgggcggtcaggcggcacagggggaatcccgggggcctaaggaggttgtcccagtttttgtcagcatctccaccccgaggtggtttgaactttgagccttttgtagtcctgatgaataatttcattttcctcaagtttatgacactcggaacgtcaagaactggaggtttgtgcaatttgagaccggtcggcactgtgcagagatcagagtactaagagacagagattaaaatggcttccagaggaaagacagagacaagcaaattaaagcagaatttagaagaacagttggatagactcatgcaacaattacaagatctggaggaatgcagagaggaacttgatacagatgaatatgaagaaaccaaaaaggaaactctggagcaactaagtgaatttaatgattcactaaagaaaattatgtctggaaatatgactttggtagatgaactaagtggaatgcagctggctattcaggcagctatcagccaggcctttaaaaccccagaggtcatcagattgtttgcaaagaaacaaccaggtcagcttcggacaaggttagcagagatggatagagatctgatggtaggaaagctggaaagagaactgtacccttccaacgacagtgggatactaacagtcttaggaacttgggagaagctgatgggatgatgaggccctgtcgcatgggtgttaatccgccgttggaaagtctacagccctggcttggcacaatttgtctggctttggctgaaccacaccgggcccgaccccaccagaagggggccggggtgaaaatgggcccaccactctttttgaacacaagccccatcgcgggggtaagtacagctccacn

SEQ ID NO: 25853 - DNA, 1609 bp, Homo sapiens
  misc_feature 1, 2, 3, 4, 5, 6, 7, 1607, 1608, 1609: n = A,T,C or G
nnnnnnncacctgcagtctcaacaatccttcctgattcttagaaaaagcacaaatctccagcagccaaagtaagtgctatttggagagggggctttcctctgagcccacatgcagccagcttctccaggtcatccttattgctgcagttctcttacattaacaccatgttgggcatggcaaaaaatgaagattgtagcacatcaacctttctgcttgagaaaaaaaatgcataaatgcatacgtttggcatttcataatcggtaaaagcctcctcctgtataatctactgataataacagtttatttgtccttaacccacgaaaaccaattacagccactgctggaggtaagcatgggcaaatcaaggagaaagcagctccaggagcaccaacttgaaaaaaagatcatctagccagtttcatctgtgaagaattctgtccacgttgcccctccccctctttcagattccaagacaaagggcgtttttaaatatggtaaactcagaaaattcctagaaagcatgtgttgagttgacacatattcagctgatgccatcattttcagggtcagaggaaatctggccaagagacatttaatgttcctcgataaggtagcatttgacaagactcctctgagaacttatttttttaaagctaaggcagattgtgtagtgtccagatactgtagggcctttccaatcttaggcattgggcataataacgacaaaagtcaagatttagggttcagttccagctgattttatttccttctcaaaaaaagttatttacagaaggtatatatcaacaatctgacaggcagtgaacttgacatgattagctggcatgattttttcttttttttcccccaaacattgtttttgtggccttgaattttaagacaaatattctacacggcatattgcacaggatggatggcaaaaaaaagtttaaaaacaaaaacccttaacggaactgccttaaaaaggcagacgtcctagtgcctgtcatgttatattaaacatacatacacacaatctttttgcttattataatacagacttaaatgtacaaagatgttttccacttttttcaatttttaaacacaacagctataaacctgaacacatatgctatcatcatgccataagactaaaacaattatatttagcgacaagtagaaaggattaaatagtcaaatacaagaatgaaaaacgcagtacatagtgtcgcgaactcaaatcggcatttagatagatccagtggtttaaacggcacgtttttgcttataaaaaaagtgcaaaaaagatgtggtttacaagttaaagctacagaatccctttttgctgtaattgcacccagttttaaagcctctggacagagcagtatttcgtttaaaactttgtttttcttaaaagcttacagtgtttggctaattctcctccccttgtttacaagacggggccggagggtggacactggtggcaggttaagggatactgtcactttaagaagcctgcagattgaagtgtaaacatggagaaattaggggctgattttttaaactgtgtgagatattaaccagccgccctgttataaaatcaggaaannn

SEQ ID NO: 25854 - DNA, 4219 bp, Homo sapiens; identical to SEQ ID NO: 21865
  misc_feature 1, 2, 4211, 4212, 4213, 4214, 4215, 4216, 4217, 4218, 4219: n = A,T,C or G

SEQ ID NO: 25855 - DNA, 799 bp, Homo sapiens
agtcacccacgcgtccgtgagctggtttgtgtccctgtgggtggacgtggtaggtgattgacaagatcctggtatccgctaacaggtcaaaacgcaacatcttcgtgaaaacccttaccggcaagaccatcacccttgaggtggagcccagtgacaccatcgaaaatgtgaaggccaagatccaggataaggaaggcattccccccgaccagcagaggctcatctttgcaggcaagcagctggaagatggccgtactctttctgactacaacatccagaaggagtcgaccctgcacctggtcctgcgtctgagaggtggtatgcagatcttcgtgaagaccctgaccggcaagaccatcaccctggaagtggagcccagtgacaccatcgaaaatgtgaaggccaagatccaggataaagaaggcatccctcccgaccagcagaggctcatctttgcaggcaagcagctggaagatggccgcactctttctgactacaacatccagaaggagtcgaccctgcacctggtcctgcgtctgagaggtggtatgcagatcttcgtgaagaccctgtagccggtgagaacatcacctctggagtgctggagcccagttgactcctgtcgaaaatgtgaatggccaagttccccagatataagaggtgtttcccaccgagtcagcagagggccatctttggcaggcaagctgtggaagattgcgcactctttctgactacgacatcctgtaaggagtcgacctgcacctgatctcggctaagggtggtggtattctcacatgga

SEQ ID NO: 25856 - DNA, 1440 bp, Homo sapiens; identical to SEQ ID NO: 23070
  misc_feature 1, 1440: n = A,T,C or G

SEQ ID NO: 25857 - DNA, 2071 bp, Homo sapiens; identical to SEQ ID NO: 21824

SEQ ID NO: 25858 - DNA, 2538 bp, Homo sapiens
  misc_feature 1, 2535, 2536, 2537, 2538: n = A,T,C or G
nctgattctttgagactaggttcttttactcccgcctttccgcgcttattaaacttttttttggtgttcagcgtcctttgccgtggtcttgctttcgcttccacgccgcctccggttaaaatttcctcccgcctcggtctggatacattcagcatgaccaccacccggctatttgatttgtatggagcggggttctcatgtgtcaggtgttgcgactacgattcaggtatccgcctgcccgcctcctaagtggcttagataacaggcatgagccaccgcggcccgcctaatttgaatgtttagtagagacggggtttctccttgttggtcagctggtctcgaacctccgacctcaggtgatccgcctggctcggcctcccaaagtgctgggattacaggcgtgaaccaccgcgcccggccgcgacttgtttttgtttacaaggttcctcatttcatttgcaaacgttcagacgcagtctgactagatttccatccggagtaaggaagagcagctcaagggcagtcacggaggccgcaggtgcggcttcttcacccgcggtgctggagttctctcaagtggaagcccaggacgatgaaacctcataggtaggctgctgcttacacacagcagccgccacggcgcaaaataaactacaaactacaagcctttaccttttcaaacacactgacgcgggccagccccagccctacgcccgcaggggcacgcagaaaagacttagttaccacggccaagtaggaagccttcgagatagcgttcttcttaccctacgtaaacacgcagtttcccgagctcgacaatcggctagccactcctgatagcgttcggcgctcgcctctcggcccttgctcctgcgtactacggcttcttccagtcacctcggcccggatcgggaagtgtcaagcgggcgctcccccatctccgccgctattaccactgaacccggaccccctacccaggtccagggccagccgccatgacgaacgtgtactccttggatgggattctggtgtttggtttgctctttgtttgcacctgtgcctacttcaagaaagtacctcgtctcaaaacctggctgctatcagagaagaagggtgtttggggtgtgttttacaaagccgctgtgattggaaccaggctgcatgctgctgtggcaattgcttgtgttgtaatggccttttacgtcctgtttataaaatgaattccaaagcacccaagtcatcaactgccaaccaaggggacggggatgaagaacctgttggagacctgaacccagtgtaggagagttcagctgaaatcatcggtccccaggatgacaccacagcatctgcccctgctatatgtggggaaaactcatggtcacgaacattatttatgcttcaggggactacagaaagccagcttcctttgatctatgtgtaaatcagtccttggcagagtgcatataatgtccggataaattacacccctcggtgataagattacatacctccttcataaaaacctgtcatcctgttttgttcttcagctcctcatcaggatcttttcaaactgaggctcattagggaaggaactaggctgtgttcagacttcttttgaagagagagaattttcaagacttcttttcactctttgatttggatctggcaaattggggaggggatgctgggtgggaaacagttatgaaatgccaagaaattctttggctttagaaatttatctttcatgtacccatccgggaacataaaagagaggcatagtgctcattgcaaaaagagaacagatgaagtagctgtgttatgtgctggtatcttgagagttttgccaagaaaatctgggcctacataaaatttgagaattatctgtgtgatgagaccagaaagcagtggcttagacaagaaaaaatctttctgttcaccagtatcctcaaatggagacttcacttgatcagatggtatatgaaaaatgaatcaactattgctatttcgtaaaacctttttatattttctaaatttacttagtgctaaatactgttactcagttttaaatgccacgactaggggaaaaagaaactattgaagaaataattgtttagtatatttgcagttggggtagaagaaagaaatctagtatattgattcatatactagtaaattcatctagtataagaacttgtgatgttagattgaagttttgtcatcttataaaagacaacaaacttattttctgtttaagtctgagtgttatggcaatttttagttgattacttatttttcttagccaaattttaattttcttcatattgcattgctctttagttgtctctggaaattctatttactttaaggacatgagaaattcaaatgagagaagttgctgatattcatcagtgtgtttggacagttcatagggtccacaaatcaaatgaggttgtttcctgaagtagaagaaaacagaactttgcaattgatactgaagtactttgccatggagttagtaactcctgagcagaccannnn

SEQ ID NO: 25859 - DNA, 365 bp, Homo sapiens; identical to SEQ ID NO: 21784

SEQ ID NO: 25860 - DNA, 1329 bp, Homo sapiens; identical to SEQ ID NO: 22577

SEQ ID NO: 25861 - DNA, 2670 bp, Homo sapiens; identical to SEQ ID NO: 24256
  misc_feature 1, 2, 3, 4, 5, 6, 7, 8, 9, 10, 11, 12, 13, 14, 15, 16, 17,18, 19, 20, 21, 22, 23, 24, 2643, 2659, 2660, 2661, 2662,2663, 2664, 2665, 2666, 2667, 2668, 2669, 2670: n = A,T,C or G

SEQ ID NO: 25862 - DNA, 1023 bp, Homo sapiens; identical to SEQ ID NO: 22481
  misc_feature 880: n = A,T,C or G

SEQ ID NO: 25863 - DNA, 2140 bp, Homo sapiens; identical to SEQ ID NO: 21912

SEQ ID NO: 25864 - DNA, 2702 bp, Homo sapiens
  misc_feature 1, 2, 2688, 2689, 2690, 2691, 2692, 2693, 2694, 2695, 2696,2697, 2698, 2699, 2700, 2701, 2702: n = A,T,C or G
nnctcaagtgtcctcctgcctcggcctacaagtagctgggattacaggtgtgagctaccacaaccagctagtgtctgtattgtggatgagccatagcaacagcgaggggtttctgacatcagtcagctgccgtggtttaatgcatttgagccatatctagacagtgcttcagtgtggctgacacagcagcatggtcttgacaagttttcttcatcctaccacaaaatcccagttggtaatagagactttactcctacctatcaaaaccacaaaatgtcccattagggggggacatgttgtacatgttaggatcattcaaataaccaagattataaggtgaggaaagatgcccctaactgattcttttgtctctcatcttgttggttccagggaccgagtggggtcaatcttctggtgctgcctctccaggtctcttccaggccggtcatagacgtactccctctgaggccgaccgatggttagaagaggtgtctaagagcgtccgggctcagcagccccaggcctcagctgctcctctgcagccagttctccagcctcctccacccactgccatctcccagccagcatcacctttccaagggaatgcattcctcacctctcagcctgtgccagtgggtgtggtcccagccctgcaaccagcctttgtccctgcccagtcctatcctgtggccaatggaatgccctatccagcccctaatgtgcctgtggtgggcatcactccctcccagatggtggccaacgtatttggcactgcaggccaccctcaggctgcccatccccatcagtcacccagcctggtcaggcagcagacattccctcactacgaggcaagcagtgctaccaccagtcccttctttaagcctcctgctcagcacctcaacggttctgcagctttcaatggtgtagatgatggcaggttggcctcagcagacaggcatacagaggttcctacaggcacctgcccagtggatccttttgaagcccagtgggctgcattagaaaataagtccaagcagcgtactaatccctcccctaccaaccctttctccagtgacttacagaagacgtttgaaattgaactttaagcaatcattatggctatgtatcttgtccataccagacagggagcagggggtagcggtcaaaggagcaaaacagactttgtctcctgattagtactcttttcactaatcccaaaggtcccaaggaacaagtccaggcccagagtactgtgaggggtgattttgaaagacatgggaaaaagcattcctagagaaaagctgccttgcaattaggctaaagaagtcaaggaaatgttgctttctgtactccctcttcccttacccccttacaaatctctggcaacagagaggcaaagtatctgaacaagaatctatattccaagcacatttactgaaatgtaaaacacaacaggaagcaaagcaatctccctttgtttttcaggccattcacctgcctcctgtcagtagtggcctgtattagagatcaagaagagtggtttgtgctcaggctggggaacagagaggcacgctatgctgccagaattcccaggagggcatatcagcaactgcccagcagagctatattttgggggagaagttgagcttccattttgagtaacagaataaatattatatatatcaaaagccaaaatctttatttttatgcatttagaatattttaaatagttctcagatattaagaagttgtatgagttgtaagtaatcttgccaaaggtaaaggggctagttgtaagaaattgtacataagattgatttatcattgatgcctactgaaataaaaagaggaaaggctggaagctgcagacaggatccctagcttgttttctgtcagtcattcattgtaagtagcacattgcaacaacaatcatgcttatgaccaatacagtcactaggttgtagttttttttaaataaaggaaaagcagtattgtcctggttttaaacctatgatggaattctaatgtcattattttaatggaatcaatcgaaatatgctctatagagaatatatcttttatatattgctgcagtttccttatgttaatcctttaacactaaggtaacatgacataatcataccatagaagggaacacaggttaccatattggtttgtaatatgggtcttggtgggttttgttttatcctttaaattttgttcccatgagttttgtggggatggggattctggttttattagctttgtgtgtgtcctcttcccccaaacccccttttggtgagaacatccccttgacagttgcagcctcttgacctcggataacaataagagagctcatctcatttttacttttgaacgttggccttacaatcaaatgtaagttatatatatttgtactgatgaaaatttataatctgctttaacaaaaataaatgttcatggtagaagcttttgcccatgaagggctgttctttcccctgtcctttattagtaaatgaatttatttttcgttcttttgtcttactctcatttcccggtagcttttatttattttgtacaagggcccactgtacattaaaaattttttttcttttgtttacacagaaaaaaagggtacccttgcccttgggcttaggttaacaggtcttttttggaaaagggggtcannnnnnnnnnnnnnn

SEQ ID NO: 25865 - DNA, 2876 bp, Homo sapiens
tatagggagtcgacccacgcgtccgctttttctacaaaggagtgcttgtggagatcggatcttttctccagcaattgggggaaagaaggctttttctctgaattcgcttagtgtaaccagcggcgtatattttttaggcgccttttcgaaaacctagtagttaatattcatttgtttaaatcttattttatttttaagctcaaactgcttaagaataccttaattccttaaagtgaaataattttttgcaaaggggtttcctcgatttggagctttttttttcttccaccgtcatttctaactcttaaaaccaactcagttccatcatggtgatgttcaaggagatcaagtcttttgaggtggtctttaacgaccctgaaaaggtgtacggcagtggcgagaaggtggctggccgggtgatagtggaggtgtgtgaagttactcgtgtcaaagccgttaggatcctggcttgcggagtggctaaagtgctttggatgcagggatcccagcagtgcaaacagacttcggagtacctgcgctatgaagacacgcttcttctggaagaccagccaacaggtgagaatgagatggtgatcatgagacctggaaacaaatatgagtacaagttcggctttgagcttcctcaggggcctctgggaacatccttcaaaggaaaatatgggtgtgtagactactgggtgaaggcttttcttgaccgcccgagccagccaactcaagagacaaagaaaaactttgaagtagtggatctggtggatgtcaatacccctgatttaatggcacctgtgtctgctaaaaaagaaaagaaagtttcctgcatgttcattcctgatgggcgggtgtctgtctctgctcgaattgacagaaaaggattctgtgaaggtgatgagatttccatccatgctgattttgagaatacatgttcccgaattgtggtccccaaagctgccattgtggcccgccacacttaccttgccaatggccagaccaaggtgctgactcagaagttgtcatcagtcagaggcaatcatattatctcagggacatgcgcatcatggcgtggcaagagccttcgggttcagaagatcaggccttctatcctgggctgcaacatccttcgagttgaatattccttactgatctatgttagcgttcctggatccaagaaggtcatccttgacctgcccctggtaattggcagcagatcaggtctaagcagcagaacatccagcatggccagccgaaccagctctgagatgagttgggtagatctgaacatccctgataccccagaagctcctccctgctatatggatgtcattcctgaagatcaccgattggagagcccaaccactcctctgctagatgacatggatggctctcaagacagccctatctttatgtatgcccctgagttcaagttcatgccaccaccgacttatactgaggtggatccctgcatcctcaacaacaatgtgcagtgagcatgtggaagaaaagaagcagctttacctacttgtttctttttgtctctcttcctggacactcactttttcagagactcaacagtctctgcaatggagtgtgggtccaccttagcctctgacttcctaatgtaggaggtggtcagcaggcaatctcctgggccttaaaggatgcggactcatcctcagccagcgcccatgttgtgatacaggggtgtttgttggatgggtttaaaaataactagaaaaactcaggcccatccattttctcagatctccttgaaaattgaggccttttcgatagtttcgggtcaggtaaaaatggcctcctggcgtaagcttttcaaggttttttggaggctttttgtaaattgtgataggaactttggaccttgaacttacgtatcatgtggagaagagccaatttaacaaactaggaagatgaaaagggaaattgtggccaaaactttgggaaaaggaggttcttaaaatcagtgtttcccctttgtgcacttgtagaaaaaaaagaaaaaccttctagagctgatttgatggacaatggagagagctttccctgtgattataaaaaaggaagctagctgctctacggtcatctttgcttagagtatactttaacctggcttttaaagcagtagtaactgccccaccaaaggtcttaaaagccatttttggagcctattgcactgtgttctcctactgcaaatattttcatatgggaggatggttttctcttcatgtaagtccttggaattgattctaaggtgatgttcttagcactttaattcctgtcaaattttttgttctccccttctgccatcttaaatgtaagctgaaactggtctactgtgtctctagggttaagccaaaagacaaaaaaaaattttactacttttgagattgccccaatgtacagaattatataattctaacgcttaaatcatgtgaaaggcttgctgctgtcagccttgcccactgtgacttcaaacccaagggaggaactcttgatcaagatgcccaaccctgtgatcagaacctccaaatactgccatgagaaactagagggcaggtgttcataaaagccctttgaacccccttcctgccctgtgttaggagatagggatattggcccctcactgcagctgccagcacttggtcagtcactctcagccatagcactttgttcactgtcctgtgtcagagcactgagctccacccttttctgagagttattacagccagaaagtgtgggctgaagatggttggtttcatgtttttgtattaggtatctttttgtatggcaaagactatattttgtacctgcccgggcggacgcttgaaagccgaattccagca

SEQ ID NO: 25866 - DNA, 1719 bp, Homo sapiens; identical to SEQ ID NO: 24297

SEQ ID NO: 25867 - DNA, 1541 bp, Homo sapiens
  misc_feature 1, 1446, 1447, 1539, 1540, 1541: n = A,T,C or G
nagatgcttcggttggcgccatttcacgcgtggtggtgtttccgcccggtgtaccagggtgaaccgtccccttgcctgttcgtggctttccagacgcgccgactagcgttgcccctcgcgccgttcccgacccgtgggattcgtttgcctccatcccgcttcacgaattcagtctgccattctgccggggtccccatctaaccaaggacatactcatttccatcactggacttcccaggtgtttcaatttttcactgttacaaacaaggtgcacatttatctacgaacctctggatatacacgtaggaagcttttggtatttccactagtgaaactgctcagttgaagggtatgtggatcttcatctttaataaatattacctacatgtgaaaagcccgacaatgtcaaggactggcaagagtgccacatgtgatgggtgtggaatggcagctcactgtagcaggtgctggggactcagttggggtcttggagaagcacttagttatagcaagaatgtctcataaatggtatctgatagagacaagagtagtggggaataaaaactagttgcttagaaataattatagatctaaagtcaacaaaaaccttttctaatgtaaaaatacatacttttttcagagggagggggaacacttaaactagaaaacaccttcatattaatcattcttctcatatacttcaaatttgtacttaatgcctttctcctcctggacatcagagagaacacctgggtattctggcagaagtttatatttctccaaatcatttctggaaaaaacgtgtcactttcaaagtcttgcatgatccttgtcacaaatagtttaagatggcctgggtgattcatggcttccttataaacagaactcgccaccactatccagaccatgtctactttatttgctaatgtaaaaatacatacttttttcagagggagggggaacaacttaaactagaaaacaccttcatattaatcattcttctcatatacttcaaatttgtacttaatgcctttctcctcctggacatcagagagaacacctgggtattctggcagaagtttatatttctccaaaatcaatttctggaaaaaaacgtgtcactttcaaagtcttgcatgatccttgtcacaaatagtttaagatggcctgggtgattcatggcttccttataaacagaactgccaccaactatccagaccatgtctactttatttgctaattctggttgttcagtaagttttaaggcatcatctagacttctggaaagaaaatgagctccttgtggaggttccttgagttctctgctgagaactaaattaattctaccctttaaaggtcgattcttctcaggaatggagaaccaggtcttcttacccataatcaccagattctgtttaccttttactgcagaggatataaacaatnnaattttaatttctgaaattggctgcgtcccccgcggcaagaggcagagtccccgttcttgccgatgcccatgttctgggacacagcgacgannn

SEQ ID NO: 25868 - DNA, 1015 bp, Homo sapiens; identical to SEQ ID NO: 22433
  misc_feature 1015: n = A,T,C or G

SEQ ID NO: 25869 - DNA, 2929 bp, Homo sapiens
  misc_feature 2929: n = A,T,C or G
cgggcaggtacgcgggggcggcaagtttgaatttcgtggaggctcgggttgtgagggttcctgcttcggagtcggcggtggtcgtccagaccgagtgttctttactttttgtttggttgaggtttcacgctagaaggtggctcaggatgtcttcatcacattttgccagtcgacacaggaaggatataagtactgaaatgattagaactaaaattgctcataggaaatcactgtctcagaaagaaaatagacataaggaatacgaacgaaatagacactttggtttgaaagatgtaaacattccaaccttggaaggtagaattcttgttgaattagatgagacatctcaagggcttgttccagaaaagaccaatgttaagccaagggcaatgaaaactattctaggtgatcaacgaaaacagatgctccaaaaatacaaagaagaaaagcaacttcaaaaattgaaagagcagagagagaaagctaaacgaggaatatttaaagtgggtcgttatagacctgatatgccttgttttcttttatcaaaccagaatgctgtgaaagctgagccaaaaaaggctattccatcttctgtacggattacaaggtcaaaggccaaagaccaaatggagcagactaagattgataacgagagtgatgttcgagcaatccgacctggtccaagacaaacttctgaaaagaaagtgtcagacaaagagaaaaaagttgtgcagcctgtaatgcccacgtcgttgagaatgactcgatcagctactcaagcagcaaagcaggttcccagaacagtctcatctaccacagcaagaaagccagtcacaagagctgctaatgaaaacgaaccagaaggaaaggtgccaagtaaaggaagacctgccaaaaatgtagaaacaaaacccgacaagggtatttcttgtaaagtcgatagtgaagaaaatactttgaattcacaaactaatgcaacaagtggaatgaatccagatggagtcttatcaaaaatggaaaacttacctgagataaatactgcaaaaataaaagggaagaattcctttgcacctaaggattttatgtttcagccactggatggtctgaagacctatcaagtaacacctatgactcccagaagtgccaatgcttttttgacacccagttacacctggactcctttaaaaacagaagttgatgagtctcaagcaacaaaagaaattttggcacaaaaatgtaaaacttactctaccaagacaatacagcaagattcaaataaattgccatgtcctttgggtcctctaactgtttggcatgaagaacatgttttaaataaaaatgaagctactactaaaaatttaaatggccttccaataaaagaagtcccatcacttgaaagaaatgaaggtcgaattgctcagccccaccatggtgtgccatatttcagaaatatcctccagtcagaaactgagaaattaacttcacattgcttcgagtgggacaggaaacttgaattggacattccagatgatgctaaagatcttattcgcacagcagttggtcaaacaagactccttatgaaggaaaggtttaaacagtttgaaggactggttgatgattgtgaatataaacgaggtataaaggagactacctgtacagatctggatggattttgggatatggttagttttcagatagaagatgtaatccacaaattcaacaatctgatcaaacttgaggaatctgggtggcaagtcaataataatatgaatcataatatgaacaaaaatgtctttaggaaaaaagttgtctcaggtatagcaagtaaaccaaaacaggatgatgctggaagaattgcagcgagaaatcgcctagctgccataaaaaatgcaatgagagagagaattaggcaggaagaatgtgctgaaacagcagtttctgtgataccaaaggaagttgataaaatagtgttcgatgctggatttttcagagttgaaagtcctgttaaattattctcaggactttctgtctcttctgaaggcccttctcaaagacttggaacacctaagtctgtcaacaaagctgtatctcagagtagaaatgagatgggcattccacaacaaactacatcaccagaaaatgccggtcctcagaatacgaaaagtgaacatgtgaagaagactttgtttttgagtattcctgaaagcaggagcagcatagaagatgctcagtgtcctggattaccagatttaattgaagaaaaccatgttgtaaataagacagacttgaaggtggattgtttatccagtgagagaatgagtttgcctcttcttgctggtggagtagcagatgatattaatactaacaaaaaagaaggaatttcagatgttgtggaaggaatggaactgaattcttcaattacatcacaggatgttttgatgagtagccctgaaaaaaatacagcttcacaaaatagcatcttagaagaaggggaaactaaaatttctcagtcagaactatttgataataaaagtctcactactgaatgccaccttcttgattcaccaggtctaaactgcagtaatccatttactcagctggagaggagacatcaagaacatgccagacacatttcttttggtggtaacctgattactttttcacctctacaaccaggagaattttgaatttaaaaataaatccaaacattttccttcatattatcaatgcttatatattccttagactattgaaattttggagaaaatgtatttgtgttcacttctatagcatataatgttttaatattctgtgttcatcaaagtgtattttagatatactctttctcaagggaagtggggatattttgtacattttcaacacagaataaaaaatgtactgtgccaaaaaaaaattgtgggcggccgcn

SEQ ID NO: 25870 - DNA, 1122 bp, Homo sapiens
aaaggtaagaactctatttatataatgaactatatagcttattgggcactttagtgaatactgaaacaaaatactaaaatgaagagttaaggttcgttctcattacaaatcaagagttcagcgtgtgtgtgtgtgtgtgtgtgtgtgtgtgtgtgtgtgtgtaatctttagtggctttaaagaataatattgccatttgtctactttgcaaataaagataacagaacacctttaaaatatatgtatgtgtacatatgtgtgtgtagatatagagagagagagatacggagagacagacagacagagagagagacagagagagagatgctttcccaagaggaaatgcatatgtaccttgatttaagcaaaactgataacagaaaattgaacttaatgaaagaaaaaagtctggatatggttactcactttacatagagtaagatttttaaaactaattttgcttagtagttaattttacaaaaatgaagagaaacaccctttaagtgtactcgtaatttaaaacacctttgaaatgtagttgtccaaatgtaatgctgctatgtatattatttgggttccagatttttccctttaaaattctcaaaacactcagtgtccttacaactgcagctaaaatggttaatcattctggcaagaaggtgacagtgtgtatattggaaaggcagacattcacatttgaaaatattttgcattattgttagctaaaatcaacctctccttgaatgtagatacaatatatggttttgcagtcaattctgaatggaaaaaaagaatcaagtctgaaatttatgtgacatgtggcttcagatcatttgaacgatatgtagaaatctagatgaacatatcattagaggtgaaagcaaaatttgaaagcctaatgagatgaagcaacattatctctctctaatctgccaacaatattccctagattgtgttgccactgtattgattctgagtaatttggcttgtttatgcgtgatttaaatgcatgtggctgaatgcagtaatttttcaagttattgagtagtagagaattcaccactattcactgtctcccagagatgaacatataaaagaaaaaaaattctacttcatatatgt

SEQ ID NO: 25871 - DNA, 1209 bp, Homo sapiens
  misc_feature 1207, 1208, 1209: n = A,T,C or G
gcatttctcccagggatctctgtgcttccttttgtgcttcctgtgtgtgtggatatttaaaggggctggaaatgtgcaaaaacatgtcactacttagacattatattcagcagctattcctttagggacactggttgccatattggccctttggtatctgcatatctgtgcctcatgacgtttattggtgcatactatggttttaagaagaatgccattgaacacccagattcgaaccaagtcagattccacgtcagattcctgaacagtcgttctacacgaagaccattgcctggtattatcatgggagggattaagccctttggctgcatctttatacaaaattattcttcattctgaatagtatttaggtcacaccagatgtattacatgttaggcttcctatttctggtgtatatacatttgggttattacctgttctgaagcaagtatacttctttgctatttccacctatgtgcagaggattatcattggcaatggcgttcattccttacgagtggctattaatgcagatttatatcttaatctatgcagtacactacttcttttcaaaactgcagatcacgggaacaggaagcacaattctgtacttaggttataccatgataatggttaagatcttctttctttttacaggaacaattggttcttggcatgctttaggattgtaccaaaatatacagtgtggtgaaggttgactgacgaagtccaagtgtgtacaggttaaaagagaagatagatgaacgtcttcagtcaagagaggactgatatagtgaatacttgaggtaatcagaattatggcctagtaatagtcaggaaaagcggaattctaaataaacgtgttcaataacattaccccccaacaacgcgtctccagacgtactaacgcaaggcacgccgacccggcacacacgcacaacaaaagaggagggacaacaaagaaaacgcacaaagaaactcaacagcatctgaacacaacgcgcttcacagtcacccccaccgctgcacccaacagggcccacaccacccacggcagaagacggacgaccatcgaaacagaaacacacaaccacagacaaacaatacatgacacgaacacaagccaacagactaagacaaccacaagaacacagaacgtcaacaaacacaaccaacagccgagaaacagcacacgagacattcaannn

SEQ ID NO: 25872 - DNA, 3489 bp, Homo sapiens
  misc_feature 1, 14: n = A,T,C or G
ncgcggccgcgtcnacgcgtggtagggggcccagagcaagccgaaggcaagcacgatggcgctcaccagccggcccacccgcgccccgtgccgcccggagccccagcgggcgccccgcagccgtgccagcgtcacgctgtagcagccgagcatcagccgaaaggaagcacgaaagcggtcagagtctccaggctcaggtgggcggcggcgtggaccggcgacgggtggcacagctggcatacgcggtccctccacaggtggcggtagacggcggccgggacggcgagcaacagggcggccagccagaccgccagcagcaggcggcgggccagggccgggctgcgcagccgaggcgccaggaaggggcgggtgactgcgaggcagcgctgcaggctgagcaggccggtgagcagcacgcttggcgtacatgctgagcgcgcacacgtagtacaccgccttgcagcccgcctggcccagcggccaggcctgccggtcaggaaggccacaaagagcggcgtgagcagcagcaccgcgccgtcggccagcgccaggtgcagcacaagcgtggccgccagcggtcgcccccgtgcaggctgccagcccgccaagctccacaccacgaagccgttgccaggcagccccagcagcgccgccagcagcaggaaggctgtgcctgtggcccgcgaagtcttccagctcagcagtgtctcgttccctgggggacggtagcagaccgacatccttctgggcctacaggacacagaaaaaaagtggggaagctgggggaccctacaaggatccttggcaggaaagcagggattgtgttcattttgagggtttcactgtcagtgagagtctcagcttccatgcaactgtccatcacggctgcaactgaaatcagagctgggacacagcgcaccagaagctaaagtcttgatgccatcaaaggacatcccctgccccattcacacattcacatctctgtcacgtccactaatcggcaaaaggagaaacgcgtccgagatgacctaagtgtgactgcagcaggcagctctggaaaatgaagccagagcagtgagccagcccctcctccgaccaaggaggaaggaaagagcagccccagcacaggagagaaccacccagcccagaagttccagggaaggaactctccggtccaccatggagtacctctcagctctgaaccccagtgacttactcaggtcagtatctaatataagctcggagtttggacggagggtctggacctcagctccaccaccccagcgacctttccgtgtctgtgatcacaagcggaccatccggaaaggcctgacagctgccacccgccaggagctgctagccaaagcattggagaccctactgctgaatggagtgctaaccctggtgctagaggaggatggaactgcagtggacagtgaggacttcttccagctgctggaggatgacacgtgcctgatggtgttgcagtctggtcagagctggagccctacaaggagtggagtgctgtcatatggcctgggacgggagaggcccaagcacagcaaggacatcgcccgattcacctttgacgtgtacaagcaaaaccctcgagacctctttggcagcctgaatgtcaaagccacattctacgggctctactctatgagttgtgactttcaaggacttggcccaaagaaagtactcagggagctccttcgttggacctccacactgctgcaaggcctgggccatatgttgctgggaatttcctccacccttcgtcatgcagtggagggggctgagcagtggcagcagaagggccgcctccattcctactaaggggctctgagcttctgcccccagaatcattccaaccgacccactgcaaagactatgacagcatcaaatttcaggacctgcagacagtacaggctagataacccacccaatttccccactgtcctctgatcccctcgtgacagaacctttcagcataacgcctcacatcccaagtctatacccttacctgaagaatgctgttctttcctagccacctttctagcctcccacttgccctgaaaggccaagatcaagatgtcccccaggcatcttgatcccagcctgactgctgctacatctaatcccctaccaatgcctcctgtccctaaactccccagcatactgatgacagccctctctgactttaccttgagatctgtcttcatacccttcccctcaaactaacaaaaacatttccaataaaaatatcaaatatttaccactaagacttctgactccaatttaaaccaggaaagggatggggtggataccccattttgccctcccccatcaacacccagtcccagatccaaagcctcagtcttcaagtatggagttcaatgcccgcctccgcttggccaccgcaccctgctgctgttcccaagcctctcgccgctttaggaaggtagtcaaggccacatttcgagccacatggtggccgaaagggtctcttatcagctcctggttctgctccccaagctcagcagcaatttccttccgggccctcaaggctgctccactccagatggcatctagcacacggctgccatggcgactacaggccagagccacatattgtccctttaggttctgcagcacacggcggcgcagcttgcgcgtcacagaggggctggtcaggatggcatcgagcacatgagagccagcgggactttgggcaagggacagaagctgtggtcccgtcaaggcacccagacttcgaagtacaagaccaggagtggagaagtgcagcagatgctggagcagtagagacccaaggactgtcacatcccccaaggctctggctgcggccattgccacctggtgctctgcaggcactgccccctcctcctccgtcagtccatagtacacctcataagccatcaaagtggcaaagagaggcacacaggccacttgccgggatgagggctctgcacagtggaatgcctccaacaagagctgtaggaccttggcttggtaggccccaactctgcgacaggcccccaccagggcaatgactacccctgggtggccctgggccaatacagcttccaagacagggctcagctcctcaaacacaggggacagcagctcaggggtagtgactgcatccagtaagcgctgcaaagggaagttggcaatgggatgtgcagccagggtctgcagctgcccctgcaagtgctcctcaaagaggctctggagtcttgggggctccaacaccagcaggacctgctccaggagtctggaactcgtctgatctcggagaaatagcagtaggggactgccatctactgaggaaccgcgagtactcaggtagccaatcacagcattgcagaggtgagcgcaaaactggggaagtttgcggtgtaaaacctgtaaagccacttgaagacagaagctggagatcttatcagtgataaaccggacgcgtgg

SEQ ID NO: 25873 - DNA, 2538 bp, Homo sapiens; identical to SEQ ID NO: 20316
  misc_feature 2538: n = A,T,C or G

SEQ ID NO: 25874 - DNA, 1090 bp, Homo sapiens; identical to SEQ ID NO: 22541
  misc_feature 1: n = A,T,C or G

SEQ ID NO: 25875 - DNA, 1409 bp, Homo sapiens
ggcccttgtatagccggccgggtggagctcttttggtgtggtgcgcccttgggcggctgtgttaatttctttttcgtgggtcggtgtgggtcgccgcctgtttgttgttcccccctcgcgatgtatgtgggtggtcctttctgtcgtcaagggttgtcgctcgttggtcccgtgttgttccccgctcatgcggcggcggtgttgttttatgggccgcgccgtctcgctggcggttgtattatgacgtccgcatgtgtggggcccccttgtgtgcgaggcaactggtggtgggtcgttgtgatgtgtgggccgctctcggggatggatgattcttttgtggcggcgcgcgcgccctcctcttctctttgttttcttttgttttttctttttttttttttttttttttttttttttttttttttttttttttttggtttctgctagcctttatttgagaaaatttacacaaaaatccccaatccaacatttacaagtgaatctgtataaatcccatatgcctctttcccaaacaaaccaagaaatggctttatgacaggggtccatgacaatggtataacaaggcttacttaaactgcatcattctcatttatattatacagaccattttggataatatgctcaaaaatggaggaaagcacataacacccgattttaaagcttatttgctcttgtgtcagtcttttgtcaaaggcaaatacatttactttttagataaaaccaaagtataatatcaattaacttttaaaccaaaagcacaaaatgtcccagttgatagtttcggcatgagtaaagggaagggacatgaaagaatgtcaactcctacaaagcttaagtttagggtcacacttgggaacaaaagcatcaacgaaataaaatattctcttctcctatcttcttgacattttgtcacatcacaagaacataactaagagagtagctttcgttgctcctaaaaaggggaaaggcaccagtcagaaataggaaagaaaatcttgttaggctaacggtacatgatagaaatttcacatttaaaagtttaaagatggaggctgggtgtggtggctcacgcgtgtaatcccagcactttgggaggctgaggcaggcagatcacttgaggtcaggagttcgagaccaacctggccaatatggtgaaactctgcttctactgaaaatacaaaaattagccaggcatggtggtgtgcacctatattcccagctactcaggaggctgaggcaggagaattgcttgaacccaggaggtgaaggttgcagcgagctgagatagtgccattgcactccagcctgggcgttgcagcaagactccgtccccccccccccaaaaaaaaaaaagtttaaggatgtatcttaacccacatattattttctct

SEQ ID NO: 25876 - DNA, 1148 bp, Homo sapiens
caacatggcaaaaccccatgtgtacaaaagattaaaaaattagccagatgcagtggcacatggctggggtcccagctacccaggaggctgagttgggaggatcatctgagcctgggaggttgaagcttgcagtgagctatgattgccactgtactctatactccagcctgggtgacagagtgaaaccctgtctcaaaaaaaaaagaggaaagaaaatagctaggagacaatcagagcagatcttgggcttctgtggctcatctcagccctttataactggcctgagaagagggtttatctacttgtgcaagtggcccagaaatctcactcgtacatgaggctttggaacatccttgcaaaggtacgctgaaagcaaattgctgttttcctggtggttctgcacgtttcctaacttttatcatagtttgattttcattatttaagaaaaaataaaaaatccaaagaccataagatggcattagattttttaccattaaattattaatgcctatttggtgctcataaagattaatcatgtcacgcatgtttccaatctttcttttgcagtatattattttctaaaaattgttacatgcaaatttaaaccaagatttatcagtaaaagaaaaaaatagaatccttaataatgtaaatgttgttatatatgctaccctggtgaaaatatttttataaatcatgttgtcatttatgctttatgtagcctatttttcaataacctttttttaaaagcaattttttttgacaccaagattgttgatttttaattaacaccagttggtggcactagaaacctgaaatttttcaaagatgaacaaagaaaaattgaaaaggtaatctaaacatggagaatttttaggaaaataaatgaaaaatataattgtatattagagatgtatttttcttctggaatggaattctttttctaaaatgcaaatcgctatccattttgactgcaatgatgaaacttgtttatcttccagaggacatatatatatgtgtgtgtgtgtgtattgtacagatacctttaatttgattacactgtttcttgtaaatatgtttctgtataaaatgaaacttttcaagaggattctatgtatatattgtacttattaaataggtaatgccta

SEQ ID NO: 25877 - DNA, 1703 bp, Homo sapiens
  misc_feature 1, 2, 3, 4, 5, 6, 7, 1697, 1698, 1699, 1700, 1701, 1702,1703: n = A,T,C or G
nnnnnnncgcgcgctccccggtccagcgctgcccagcgggaggggctggaccccgcgttcctcctccctgccggtccccatccttaaagcgagagtctggacgccccgcctgtgggagagagcgccgggatccggacggggagcaaccggggcaggccgtgccggctgaggaggtcctgaggctacagagctgccgcggctggcacacgagcgcctcggcactaaccgagtgttcgcgggggctgtgaggggagggccccgggcgccattgctggcggtgggagcgccgcccggtctcagcccgccctcggctgctctcctcctccggctgggaggggccgtagctcggggccgtcgccagccccggcccgggctcgagaatcaagggcctcggccgccgtcccgcagctcagtccatcgcccttgccgggcagcccgggcagagaccatgtttgacaagacgcggctgccgtacgtggccctcgatgtgctctgcgtgttgctggctggattgccttttgcaattcttacttcaaggcatacccccttccaacgaggagtattctgtaatgatgagtccatcaagtacccttacaaagaagacaccataccttatgcgttattaggtggaataatcattccattcagtattatcgttattattcttggagaaaccctgtctgtttactgtaaccttttgcactcaaattcctttatcaggaataactacatagccactatttacaaagccattggaacctttttatttggtgcagctgctagtcagtccctgactgacattgccaagtattcaataggcagactgcggcctcacttcttggatgtttgtgatccagattggtcaaaaatcaactgcagcgatggttacattgaatactacatatgtcgagggaatgcagaaagagttaaggaaggcaggttgtccttctattcaggccactcttcgttttccatgtactgcatgctgtttgtggcactttatcttcaagccaggatgaagggagactgggcaagactcttacgccccacactgcaatttggtcttgttgccgtatccatttatgtgggcctttctcgagtttctgattataaacaccactggagcgatgtgttgactggactcattcagggagctctggttgcaatattagttgctgtatatgtatcggatttcttcaaagaaagaacttcttttaaagaaagaaaagaggaggactctcatacaactctgcatgaaacaccaacaactgggaatcactatccgagcaatcaccagccttgaaaggcagcagggtgcccaggtgaagctggcctgttttctaaaggaaaatgattgccacaaggcaagaggatgcatctttcttcctggtgtacaagcctttaaagacttctgctgctgctatgcctcttggatgcacactttgtgtgtacatagttacctttaactcagtggttatctaatagctctaaactcattaaaaaaactccaagccttccaccaaaacagtgccccacctgtatacatttttattaaaaaaatgtaatgcttatgtataaacatgtatgtaatatgctttctatgaatgatgtttgatttaaatataatacatattaaaatgtatgggagaaccaaaaaataataacttcactcacctggtgctatctcttaaatcccnnnnnnn

SEQ ID NO: 25878 - DNA, 1014 bp, Homo sapiens
accgtttttgttggtttttttctccctcaaagtgaaatgagagactattgtagggttttgagccaaggagtgatattatctgaattctgttttaaaaggttcattatggctcctgtgtggaggcagggtagctacttagaaaccaagccatctcagcctcccgatttgtagagatgtggtctcactatgttgcccagactggtcttgaactcctggcctcatgtgatcctcccaccttggcctcccaaaatactaaaatgatagatatgagccgccacacctggccataagcttcagccttgagcagatactttctaaacactttatatagggaaaaaaaactaattcttgcgtagccaaggtgttcattttgccgagaataacgtagcatagtgtttacaattacgtgggtgtaatttctagctttgtgatcctgagagactgccttatcctccatatgcctcagttttctcatgtgtaaaaagggggtaataataatacctgacagggatgttgagaaatccatgtaaaagtacctgcccgggcggccgctcgattatcctcaaagtcatctcttgttcccacaacccactgcacctgggaagctggacagcaggcccagctgaaacaaggaggtctctttggttcaggttggcactaaggtgcccagtggtcagatgagcagcctcaggtttgcaggagccagtagttcctgtcttgctcctgggggtacttccagaaaagccagaagcggataaagctggtgacgattcctggaaagttggacaccatgatatagggatctctgagtcggaacccatagaggcaccaggaggcagaggtgagaagggtagcaatggtgagtgggtagtagagacattgggttgatttagtttgaatcaccttagccaagggtgaagaccacgcatgctccgtaaatgagcgagtccagacagccgcccgcctccattccgactagagtcggatcccgccggacgcgtgggtcgactccct

SEQ ID NO: 25879 - DNA, 2192 bp, Homo sapiens; identical to SEQ ID NO: 24673

SEQ ID NO: 25880 - DNA, 834 bp, Homo sapiens
  misc_feature 831, 832, 833, 834: n = A,T,C or G
tttttttttttcctttttttttttttttttttttttttttttttttttttttttttttttttttttttttttttttttaatagctaaataaaaagtttatttataatttatgattgggtcttctttcgtaagaatcaccctgtataataatacttctagtctaacttcccccaatatccagtatttttctaatctatgtctttgtccaccttctcacccttcactctttgcaggtaaaaggctgattggagtttggcttcttatttctctccggacaactgtggcagagaatacaaccatcctatgcataacagcctctttctagctgaacaagcagcctgcactaccactccattatgagaagacctaggtagcctgagtgttcatccagcagcagtctgtgggtcactgtgagttcagaccctgctctgggcagattcaaaaggcagggtgtgaggatggcaatgcccacatggcaaaagcctgtcctttagatgcggcaccactgagagatgctgtgtcacaggaggttggcctggcttatccagctgtctgttcagatgttcccataggattctctctgccagcagagtccacggcgaatgtggataaacagtagtaccattaggacagcagatatcaggcaaaaggcaacagcaaagatgacctttagaacttaatgcctgtttgtggtcatacactccgtggaccagtcttgagggatcacagggccaaccagctcagcaaacctctccagaggacagctgggactgcagccaggtagcatgaggggatacggctcgtgctgcgtctcagtccgacccacgcaannnn

SEQ ID NO: 25881 - DNA, 555 bp, Homo sapiens
  misc_feature 547, 548, 549, 550, 551, 552, 553, 554, 555: n = A,T,C or G
actacatgaaccatgtctgatggtagcttgttcccactgtcattttgttttctggttgaagattaatgagctcagccacacaaacaagagttcttcattgacctctacagtccctgcctgttggaaacatctatggttttgtataacccctgtcatttaactgacagtgttagaagatatccccctgatgtgttactgtaaccaagaaagcatgaacgttaccctttctggtgacagcctgccatgggctgctgtggctgatacttatagaattgttgctccaaaattttggctccacttgagctgtccagaagtgtacctgacatttgtgtattaccactcaccttggaagtttcagtgtaatgtgattcctagtaggcacatctgtgactcccttaaataaaaagggccagagatgaggggacgcctggtgaaaatggtgtttgttgtaacatcttggtatcattgtgggtaagtagaacaaatatttacatctgttatgaaaagctacctttagccgtagataaacattaaaaggaagactcannnnnnnnn

SEQ ID NO: 25882 - DNA, 943 bp, Homo sapiens; identical to SEQ ID NO: 24621
  misc_feature 1, 2: n = A,T,C or G

SEQ ID NO: 25883 - DNA, 1506 bp, Homo sapiens
  misc_feature 1505, 1506: n = A,T,C or G
tatagggagtcgacccacgcgtccgcttaaagaggaaaagagggaagaagatgaggagaatgacaatgataatgaaagtgaccatgatgaagctgactcctaaaccaaaagtgctttaaaaaccagcctggcgaggacagccctggacccactccactgtctctaagtaaacacagcactgcccgcttttagcgtcttcacttcttcacagagttccagtgcgtggtattctttcgaggtattctttccaggccgagattgagcacctcatgtacctacgccacagacagccagagggaaagcgacccagacagcagcccctcctcgacaggcccaccctgcagctcaggcaccaagaaaacagccgatactggcagccattgcagctccaaactgcagaggcaaggccaattttaacttttcaatttacagtcgattttgaagagcttctacatatcggttatgtaaattcatatatgtatttttggaatcagttcttataaacagctcgattcagttttagctaaatttatagtttaggtagtatgttacatttgaatttttgtcttaagaaaagttgactgttcagatatttttctactgtaaagaaatatacttttctattaaagatctgtacatatttttacagtaaaatgctttatggaactagttttagagccctctatggctttaaggccttgcttactgcctgcaaattttgagaaatttaaaaataagcattctaacacttttattcccacagaaaaattccaagtcaaattatcaaatcaaacacaaaaataagtcttacctcttgtataagcatgttgtactaaaaaaaaattttgaaacattttgtatattggagatctctctcatcttactgttctttgctttaaattcctggcacttctttttactgtctataagagaaaacctatcataagcccaattttttttttccacttagggtaaatgtttggctcttctcatttcattatcttttttttttttttttaaagacagattctcactcagttgcccaggctggattgcgggggcgctgtctcagctcactgcaacctccgcctcccaggttcaagtgattctcctgcctcatcctcctgagtagctgggattacaggcgtgtgccacctgcccaacctattttggcttttcagcagagccgggtcgcctctgtgggcccggttggtctccaattctaacttcatggtcccctggcctctacctccccaggggcgcggtggttatctggggttgccccagtctggggcctcataattcttttcttacacggacaacgctttttttttctctctcgaaaccccccttttgcttttcttggctttgcgcaaccccggtttggtcccccttctgaagtgtggcccacagcccctcttgttccttctcgtgccccgccaggggtgccccccgcgtatttaattctttttaaggggcggcgcccgccacgcgagaacggaagnn

SEQ ID NO: 25884 - DNA, 975 bp, Homo sapiens; identical to SEQ ID NO: 25369
  misc_feature 971, 972, 973, 974, 975: n = A,T,C or G

SEQ ID NO: 25885 - DNA, 2012 bp, Homo sapiens; identical to SEQ ID NO: 20122

SEQ ID NO: 25886 - DNA, 725 bp, Homo sapiens
  misc_feature 1, 2, 3, 4, 5, 6, 7, 717, 718, 719, 720, 721, 722, 723, 724,725: n = A,T,C or G
nnnnnnncaaaggaaagttgtaaatattaggaagtacctgaaaaataagaagcaagataaagtggggaggctatgagatcatataatgagctaataaacttttcaacaggggacgcctgttctcccttctaactgaagacactaaagagaagctaagatcctatctttcaatcatttagtaattcataaaatcccattatttcataactcaaagtttacctttgaggttgtatgtttacctcatttgaactcgaaatagaagaggtttaagtatttgaataagttgggaaaaaaaggaaaaatagtcttccctgcccttgtcactgatggtgacactacttgtaattactgtattttttggcagaacactcagatgaacggattcctatgctgtggacttttatcattctttttgatggctgatagtagaaagcacacagtaggtactccataaatgtaagactatggcagctgtctagtacaagtgcttctcactgattcttggttaccaggaaaaccagaaagcccgtcacttgccttgcctgcaaaggcgagcctaaagaaatttctctaaccaaaattggcagggtctttccaccacaaaaggctcttggaaatataacttatggggcttaaggctaatttgagttgaagggtatttgtaatatttgatttgcttttagcagagaaaacaataaaagaatccaggaaaagtannnnnnnnn

SEQ ID NO: 25887 - DNA, 1002 bp, Homo sapiens; identical to SEQ ID NO: 22660
  misc_feature 1, 2, 983, 984, 985, 986, 987, 988, 989, 990, 991, 992, 993,994, 995, 996, 997, 998, 999, 1000, 1001, 1002: n = A,T,C or G

SEQ ID NO: 25888 - DNA, 2931 bp, Homo sapiens
  misc_feature 1, 2919, 2920, 2921, 2922, 2923, 2924, 2925, 2926, 2927,2928, 2929, 2930, 2931: n = A,T,C or G
ncgaccacgcgtccgcatttattttagtggactttcagtaactgaaagatggaaaccctttttgtaccgtggaagaatttgcagaagactttcagtcgtttttgctggaatgattgagcttacattttttattctttccgcattcaaacttagagacactcacctctggtattttgtaatacctggcttttccatttttggaattttctggatgatttgtcatattatttttcttttaactctttggggattccataccaaattaaatgactgccataaagtatattttactcacaggacagattacaatagccttgatagaatcatggcatccaaagggatgcgccatttttgcttgatttcagagcagttggtgttctttagtcttcttgcaacagcgattttgggagcagtttcctggcagccaacaaatggaattttcttgagcatgtttctaatcgttttgccattggaatccatggctcatgggctcttccatgaattgggtaactgtttaggaggaacatctgttggatatgctattgtgattcccaccaacttctgcagtcctgatggtcagccaacactgcttcccccagaacatgtacaggagttaaatttgaggtctactggcatgctcaatgctatccaaagattttttgcatatcatatgattgagacctatggatgtgactattccacaagtggactgtcatttgatactctgcattccaaactaaaagctttcctcgaacttcggacagtggatggacccagacatgatacgtatattttgtattacagtgggcacacccatggtacaggagagtgggctctagcaggtggagatacactacgccttgacacacttatagaatggtggagagaaaagaatggttccttttgttcccggcttattatcgtattagacagcgaaaattcaaccccttgggtgaaagaagtgaggaaaattaatgaccagtatattgcagtgcaaggagcagagttgataaaaacagtagatattgaagaagctgacccgccacagctaggtgactttacaaaagactgggtagaatataactgcaactccagtaataacatctgctggactgaaaagggacgcacagtgaaagcagtatatggtgtgtcaaaacggtggagtgactacactctgcatttgccaacgggaagcgatgtggccaagcactggatgttacactttcctcgtattacatatcccctagtgcatttggcaaattggttatgcggtctgaaccttttttggatctgcaaaacttgttttaggtgcttgaaaagattaaaaatgagttggtttcttcctactgtgctggacacaggacaaggcttcaaacttgtcaaatcttaatttggaccccaaagcgggatattaataagcactcatactaccaattatcactaacttgccattttttgtatgctgtatttttatttgtggaaaataccttgctacttctgtagctgctctcactttgtcttttcttaagtaattatggtatatataaggcgttgggaaaaaacattttataatgaaagtatgtagggagtcaaatgcttactgtaaatgcataagagacgttaaaaataacactgcactttcaggaatgtttgcttatggtcctgattagaaagaaacagttgtctatgctctgcaatggtcaatgatgaattactaatgccttattttctaggcatataataatagtttagagaatgtagaccagataaatttgtttactgttttaagaaaactaccagtttacttacagaagattcttttttccaaacagtaggtttcatccaagaccatttgaagaactgcaaactctttctcttagaaaagaaagagggcagcctaaaataaacgcaaaatttgcttatactccatcacattcagatgtcttggttgtgacttattaccagtgtggcagagaacccaagttacattttagatcaaaatattctttatgtaggtattgttaaaaggctagagcctacaagttgctcttccatgcgttggtcagggggccctgaaaacactggtaatattaagagtctttctcagggtaacttaatgttttcttaatgaacaatgtttccagctacaaattcttccaataaattgtcttcctttttgaaaagtactctcatagaagaaatttagcaatttctcgttgactgactcagtctattttaagtattcagaaaagattttgatccccattgagttaatgctctgccttgaaaattatttttctgatccttgttagtgataacattttttttctactgaaggtcagaggataggaaacaagtatttctcttctggtatacatgtaatgtattctgtaaaaaagtattcatattggcaattttagttaggcataatattgtggttgtaatttttaaaacttagtgttttgtctgattaaagcaggcactgatcagggtatctcctaagaggtaattcacttcttattcctttccaataattattacattctaaattttcatctatgagaaataacaaacaagaagggaatagaattaaattggggtataatctaatcttcattgtttaaatggtttgccttctcaccattgaagccatttttttatagcctcagaaagaggaaataatgcctccaccattttctacctggtgacttgaaaattgaacttttaagttaggaagaagttagagtcagggaacttgtataccactatctatgcagcattgttatagtctgattatttctgtgttttgaatatgattttcctaatgctctaaataaaattttgttaaaaaacaaaaaaaaaaattggggctccgcccagaaattttaaaactttgggggggcccggataaagcaaggnnnnnnnnnnnnn

SEQ ID NO: 25889 - DNA, 364 bp, Homo sapiens; identical to SEQ ID NO: 25813

SEQ ID NO: 25890 - DNA, 4672 bp, Homo sapiens
ctggcggaccgcgcgaagggggagtgtctgcccgccgccgccactgctgctgccaccgccgtcgccgccgccgccgccgccgccgctgctgctgccggtgctaaggagttcgctggagccctttcctcagacccggcccggtcttcgcgcccggactcctggcgccagcgctaggcgcactcaccgctctgacgggtgcagacgcgggagttgtcccagactgtggagtggcgggcacggccccagccccccttcccttccctgaccccttcttgccatcgccccagacatggggaacgcggcgaccgccaagaaaggcagcgaggtggagagcgtgaaagagtttctagccaaagccaaagaagactttttgaaaaaatgggagaatccaactcagaataatgccggacttgaagattttgaaaggaaaaaaacccttggaacaggttcatttggaagagtcatgttggtaaaacacaaagccactgaacagtattatgccatgaagatcttagataagcagaaggttgttaaactgaagcaaatagagcatactttgaatgagaaaagaatattacaggcagtgaattttcctttccttgttcgactggagtatgcttttaaggataattctaatttatacatggttatggaatatgtccctgggggtgaaatgttttcacatctaagaagaattggaaggttcagtgagccccatgcacggttctatgcagctcagatagtgctaacattcgagtacctccattcactagacctcatctacagagatctaaaacctgaaaatctcttaattgaccatcaaggctatatccaggtcacagactttgggtttgccaaaagagttaaaggcagaacttggacattatgtggaactccagagtatttggctccagaaataattctcagcaagggctacaataaggcagtggattggtgggcattaggagtgctaatctatgaaatggcagctggctatcccccattctttgcagaccaaccaattcagatttatgaaaagattgtttctggaaaggtccgattcccatcccacttcagttcagatctcaaggaccttctacggaacctgctgcaggtggatttgaccaagagatttggaaatctaaagaatggtgtcagtgatataaaaactcacaagtggtttgccacgacagattggattgctatttaccagaggaaggttgaagctccattcataccaaagtttagaggctctggagataccagcaactttgatgactatgaagaagaagatatccgtgtctctataacagaaaaatgtgcaaaagaatttggtgaattttaaagaggaacaagatgacatctgagctcacactcagtgtttgcactctgttgagagataaggtagagctgagaccgtccttgttgaagcagttacctagttccttcattccaacgactgagtgaggtctttattgccatcatcccgtgtgcgcactctgcatccacctatgtaacaaggcaccgctaagcaagcattgtctgtgccataacacagtactagaccactttcttacttctctttgggttgtctttctcctctcctatatccatttcttccttttccaatttcattggttttctctaaacagtgctccattttattttgttggtgtttcagatgggcagtgttatggctacgtgatatttgaagggaaggataagtgttgctttcagtagttattgccaatattgttgttggtcaatggcttgaagataaactttctaataattattatttctttgagtagctcagacttggttttgccaaaactcttggtaatttttgaagatagactgtcttatcaccaaggaaatttatacaaattaagactaactttcttggaattcactattctggcaataaattttggtagactaatacagtacagctagacccagaaatttggaaggctgtagatcagaggttctagttccctttccctccttttatatcctcctctccttgagtaatgaagtgaccagcctgtgtagtgtgacaaacgtgtctcattcagcaggaaaaactaatgatatggatcatcacccagattctctcacttggtaccagcatttctgtaggtattagagaagagttctaagttttctaaaccttaactgttccttaaggattttagccagtattttaatagaacatgattaatgaaagtgacaaattttaaattttctctaatagtcctcatcataaactttttaaaggaaaataagcaaactaaaaagaacattggtttagataaatacttatactttgcaaagtcaaaaatggcttgatttttggaaacaatatagaggtattcatatttaaatgagggtttacatttgttttgttttgtaaccgttaaaaagaagttgtttccagctaattattgtggtgtactatatttgtgagcctagggtaggggcactgctgcaacttctgctttcatcccatgcctcatcaatgaggaaagggaacaaagtgtataaaactgccacaattgtattttaattttgaggtatgatattttcagatatttcataatttctaacctctgttctctcagtaaacagaatgtctgatcgatcatgcagatacaatgttggtatttgagaggttagtttttttcctacacttttttttgccaactgacttaacaacattgctgtcaggtggaaatttcaagcacttttgcacatttagttcagtgtttgttgagaatccatggcttaacccacttgttttgctatttttttctttgcttttaattttccccatctgattttatctctgcgtttcagtgacctaccttaaaacaacacacgagaagagttaaactgggttcattttaatgatcaatttacctgcatataaaatttatttttaatcaagctgatcttaatgtatataatcattctatttgctttattatcggtgcaggtaggtcattaacaccacttcttttcatctgtaccacaccctggtgaaacctttgaagacataaaaaaaacctgtctgagatgttctttctaccaatctatatgtctttcggttatcaagtgtttctgcatggtaatgtcatgtaaatgctgatattgatttcactggtccatctatatttaaaacgtgcaagaaaaaaataaaatactctgctctagcaagttttgtgtaacaaaggcatatcgtcatgttaataaatttaaaacatcattcgtataaaatattttaattttcttgtatttcatttagacccaagaacatgctgaccaatgtgttctatatgtaaactacaaattctatggtagctttgttgtatattattgtaaaattattttaataagtcatggggatgacaatttgattattacaatttagttttcagtaatcaaaaagatttctatgaattctaaaaaatatttttttctatgaaattactagtgcccagctgtagaatctaccttaggtagatgatccctagacatacgttggttttgagggctattcagccattccattttactctctatttaaaggccgtgagcaagcttgtcatgagcaaatatgtcaagggagtcaatttctgaccaatcaagtacactaaattagaatatttttaaagtatgtaacattcccagtttcagccacaatttagccaagaataagataaaaacttgaataagaagtaagtagcataaatcagtatttaacctaaaattacatatttgaaacagaagatattatgttatgctcagtaaataattaagagatggcattgtgtaagaaggagccctagactgaaagtcaagacatctgaatttcaggctggaaaactatcagtatgatctcagcctcagttctcttgtctgtaaaatggaagaactggattaggcagtttgtaagattcctcctaactttcacagtcgatgacaagattgtctttttatctgatattttgaagggtatattgctttgaagtaagtctcaataaggcaatatattttagggcatctttcttcttatctctgacagtgttcttaaaattatttgaatatcataagagccttggtgtctgtcctaattcctttctcactcaccgatgctgaatacccagttgaatcaaactgtcaacctaccaaaaacgatattgtggcttatgggtattgctgtctcattcttggtatattcttgtgttaactgcccattggcctgaaaatactcattgtaagcctgaaaaaaaaaatctttcccactgttttttctgcttgttgtaagaatcaaatgaaataatgtatgtgaaagcaccttgtaaactgtaacctatcaatgtaaaatgttaaggtgtgttgttatttcattaattacttctttgtttagaatggaatttcctatgcactactgtagctaggaaatgctgaaaacaactgtgttttttaattaatcaataactgcaaaattaaagtaccttcaatggataagacaaattataaaaatatattttttatatattaatatattttattattataaaataaaaacttcgaggggggccccggtcccaatttcccctttagggggtcgtttacaatcaatggcccgcgttttacacattgagac

SEQ ID NO: 25891 - DNA, 1643 bp, Homo sapiens; identical to SEQ ID NO: 21150
  misc_feature 1, 2, 3, 4, 1615, 1616, 1617, 1618, 1619, 1620, 1621, 1622,1623, 1624, 1625, 1626, 1627, 1628, 1629, 1630, 1631, 1632,1633, 1634, 1635, 1636, 1637, 1638, 1639, 1640, 1641, 1642,1643: n = A,T,C or G

SEQ ID NO: 25892 - DNA, 496 bp, Homo sapiens
  misc_feature 275, 490, 491, 492, 493, 494, 495, 496: n = A,T,C or G
acgggcatctagactgaaatgaactaaactgcatcatttcattttaatattaggagaaatcctaatgtgccattaattaagcagtcaatcatgaatacccatttaataatagaaataattccctttaagtatattttcctaagtaatacattttatatcacataaggctaatatacatgatgtaaaagtcatctattgtaccaagatgattgaaatattttgcagataaacttcttgtgctgctataattatcccaaagctgtttaaagaggctnccatgctgcagcatgaaagtacattagagaatacagcacatttcctgagtgaagaactgaaatttctcttaaaatttcaagtgtgtgttgaaacattgtcatagggcatcaccttgatactgtgctttaattcatgttgctttgagaagccaagaatttggtgtaaacacatgtagtttgaaagtttccactgttattaaaatagtataatccannnnnnn

SEQ ID NO: 25893 - DNA, 516 bp, Homo sapiens; identical to SEQ ID NO: 24056
  misc_feature 1, 2, 3, 4, 5, 6, 7, 8, 9, 10, 11, 12, 13, 14, 15, 16, 17,18, 19, 20, 21, 22, 23, 24, 25, 26, 27: n = A,T,C or G

SEQ ID NO: 25894 - DNA, 516 bp, Homo sapiens; identical to SEQ ID NO: 24056
  misc_feature 1, 2, 3, 4, 5, 6, 7, 8, 9, 10, 11, 12, 13, 14, 15, 16, 17,18, 19, 20, 21, 22, 23, 24, 25, 26, 27: n = A,T,C or G

SEQ ID NO: 25895 - DNA, 1565 bp, Homo sapiens
  misc_feature 1564, 1565: n = A,T,C or G
agggagtcgacccacgcgtccgattcaagaccctgcacagtgcaggggataggatgcaggatttccgcccaagcccagtctgctgagctgctgtcacagggcagaccttgtgtctgctttatcttggtgaagcagctgcactgagcagattgctcacacagcagcctgttccatctgtgggtaaccatgttccgaggcagcaaagagaaaccgctattgctccgtggaaataaactatctgaataaaacttcttaacgggggttgaggctgaagctgaaacgggagtaggacacgatcttggctcctgaagtctttaaagaaatgccagacgtgaaagctgaagatgaagtggattttagagcaagttcaatttctgaagaagtggctgtagggagcatagctgctacactgaagatgaagcaaggcccaatgacccaggcggtaagtggcatcaataaaccgagaaaactggtgtacaatagagccatgccctgatgcagcatctcttctggcttccaagcagagcccagaatgtgagaacttcctggatgttggactgggcagagagtgtacctcaaaacaaggtgtacttaaaagagaatctgggagtgattctgacctctttcactcacccagtgatgacatggacagcatcatcttcccaaagccagaggaagagcatttggcctgtgatatcaccggatccagttcatccaccgatgacacggcttcactggaccgacattcttctcatggcagtgatgtgtctctctcccagattttaaagccaaacaggtcaagagatcggcaaagccttgatggattctacagccatgggatgggagctgagggtcgagaaagtgagagtgagcctgctgacccaggcgacgtggaggaggaggagatggacagtatcactgaagtgcctgcaaactgctctgtcctaaggagctccatgcgctctctttctcccttccggaggcacagctgggggcctgggaaaaatgcagccagcgatgcagaaatgaaccaccggagttttcagtctagaaggcttgacaggaggagctggtgtcggaaacaagccatcctcatctctagaagtaagctctgcaaatgccgaagagctcagacacccattcagtggtgaggaacgggttgactctttggtgtcactttcagaagaggatctggagtcagaccagagagaacataggatgtttgatcagcagatatgtcacagatctaagcagcagggatttaattactgtacatcagccatttcctctccattgacaaaatccatctcattaatgacaatcagccatcctggattggacaattcacggcccttccacagtaccttccacaataccagtgctaatctgactgagagtataacagaagagaactataatttcctgccacatagcccctccaagaaagattctgaatggaagagtggaacaaaagtcagtcgtacattcagctacatcaagaataaaatgtctagcagcaagaagagaaaacaaagaggggcgtcgggggaaggggaaggagaann

SEQ ID NO: 25896 - DNA, 2071 bp, Homo sapiens; identical to SEQ ID NO: 21824

SEQ ID NO: 25897 - DNA, 868 bp, Homo sapiens
  misc_feature 196, 197, 198, 199, 200, 201, 202, 203, 204, 205, 206, 207,208, 209, 210, 211, 212, 213, 214, 215, 216, 217, 218, 843,844, 845, 846, 847, 848, 849, 850, 851, 852, 853, 854, 855,856, 857, 858, 859, 860, 861, 862, 863, 864, 865, 866: n = A,T,C or G
  misc_feature 867, 868: n = A,T,C or G
actgtggcatggcgcagtgggtgacagatggccacatagcggtcaaaagccatggccagcagcactgtggattccatgccagataaggagtggatggcaaacatctgtagcagacaagcatcaaactggatggtagtggaattgaaccagaagatggccagcattttgggcatggatgaggtggagatgaggatgnnnnnnnnnnnnnnnnnnnnnnnacgcggggatagccggacggggatctgagctggcaggatgaatgtgggggtggcacacagcgaagtaaaccccaacacccgagtgatgaatagccgaggcatctggctggcctacatcatcttggtaggattgctgcatatggttctactcagcatccccttcttcagcattcctgttgtctggaccctgaccaacgtcatccataacctggctacgtatgtcttccttcatacggtgaaagggacaccctttgagactcctgaccaaggaaaggctcggctactgacacactgggagcaaatggactatgggctccagtttacctcttcccgcaagttcctcagcatctctcctattgtgctctatctcctggccagcttctataccaagtatgatgctgcgcacttcctcatcaacacagcctcattgctaagtgtactgctgccgaagttgccccagttccatggggttcgtgtctttggcatcaacaaatactgagggatgggtctccgcgacagctccatgggcatggggaaggcactgaaaccagaggactataaaaacattccttctctttattctacaaaaaacacccccaacccacctccacacacaccattgtgnnnnnnnnnnnnnnnnnnnnnnnnnn

SEQ ID NO: 25898 - DNA, 1231 bp, Homo sapiens; identical to SEQ ID NO: 23782
  misc_feature 1, 2, 3, 9, 12, 15, 23, 27, 32, 35, 52, 1227, 1228, 1229,1230, 1231: n = A,T,C or G

SEQ ID NO: 25899 - DNA, 414 bp, Homo sapiens; identical to SEQ ID NO: 22484
  misc_feature 1: n = A,T,C or G

SEQ ID NO: 25900 - DNA, 4733 bp, Homo sapiens; identical to SEQ ID NO: 25500
  misc_feature 4720, 4721, 4722, 4723, 4724, 4725, 4726, 4727, 4728, 4729,4730, 4731, 4732, 4733: n = A,T,C or G

SEQ ID NO: 25901 - DNA, 431 bp, Homo sapiens
  misc_feature 431: n = A,T,C or G
acgcgggacattgtctttctcaaagtaacggattcaggaggagtccttttctgagtagagtccacagaagaggtattctattgatgggcttaggtcacgagcaaggatttgagccccttgtttaaaatgcaaagaaaaatgtgaaggattcgaactgcacttctggagaaaaatatgtcgtaactgcaagtgtggccaagaagagcatgatgtcctcttgagcaatgaagaggatcgaaaagtgggaaaactttttgaagacaccaagtataccactctgattgcaaaactaaagtcagatggaattcccatgtataaacgcaatgttatgatattgacgaatccagttgctgccaagaagaatgtctccatcaatacagttacctatgagtgggctcctcctgtccagaatcaagcattggccaggcagn

SEQ ID NO: 25902 - DNA, 2071 bp, Homo sapiens; identical to SEQ ID NO: 21824

SEQ ID NO: 25903 - DNA, 2961 bp, Homo sapiens; identical to SEQ ID NO: 24131
  misc_feature 1, 2, 3, 4, 2961: n = A,T,C or G

SEQ ID NO: 25904 - DNA, 573 bp, Homo sapiens; identical to SEQ ID NO: 20076
  misc_feature 563, 564, 565, 566, 567, 568, 569, 570, 571, 572, 573: n = A,T,C or G

SEQ ID NO: 25905 - DNA, 2070 bp, Homo sapiens; identical to SEQ ID NO: 20077
  misc_feature 2069, 2070: n = A,T,C or G

SEQ ID NO: 25906 - DNA, 2189 bp, Homo sapiens; identical to SEQ ID NO: 20078
  misc_feature 1, 2: n = A,T,C or G

SEQ ID NO: 25907 - DNA, 444 bp, Homo sapiens; identical to SEQ ID NO: 20079
  misc_feature 1, 444: n = A,T,C or G

SEQ ID NO: 25908 - DNA, 584 bp, Homo sapiens; identical to SEQ ID NO: 20080
  misc_feature 584: n = A,T,C or G

SEQ ID NO: 25909 - DNA, 1409 bp, Homo sapiens; identical to SEQ ID NO: 20290
  misc_feature 1, 2, 3, 4, 5, 6, 7, 1409: n = A,T,C or G

SEQ ID NO: 25910 - DNA, 721 bp, Homo sapiens; identical to SEQ ID NO: 20081
  misc_feature 709, 721: n = A,T,C or G

SEQ ID NO: 25911 - DNA, 498 bp, Homo sapiens; identical to SEQ ID NO: 20082
  misc_feature 1, 2, 3, 4, 497, 498: n = A,T,C or G

SEQ ID NO: 25912 - DNA, 1056 bp, Homo sapiens; identical to SEQ ID NO: 20083
  misc_feature 1, 206: n = A,T,C or G

SEQ ID NO: 25913 - DNA, 692 bp, Homo sapiens; identical to SEQ ID NO: 20084
  misc_feature 1, 2, 3, 688, 689, 690, 691, 692: n = A,T,C or G

SEQ ID NO: 25914 - DNA, 732 bp, Homo sapiens; identical to SEQ ID NO: 20088
  misc_feature 732: n = A,T,C or G

SEQ ID NO: 25915 - DNA, 427 bp, Homo sapiens; identical to SEQ ID NO: 20085

SEQ ID NO: 25916 - DNA, 1006 bp, Homo sapiens; identical to SEQ ID NO: 20086
  misc_feature 1, 1004, 1005, 1006: n = A,T,C or G

SEQ ID NO: 25917 - DNA, 347 bp, Homo sapiens; identical to SEQ ID NO: 20087
  misc_feature 1, 2, 3, 4, 347: n = A,T,C or G

SEQ ID NO: 25918 - DNA, 732 bp, Homo sapiens; identical to SEQ ID NO: 20088
  misc_feature 732: n = A,T,C or G

SEQ ID NO: 25919 - DNA, 452 bp, Homo sapiens; identical to SEQ ID NO: 20089
  misc_feature 452: n = A,T,C or G

SEQ ID NO: 25920 - DNA, 1076 bp, Homo sapiens; identical to SEQ ID NO: 20090
  misc_feature 1, 2, 3, 4, 5, 6, 7, 8, 9, 10, 11, 12, 13, 14, 15, 16, 17: n = A,T,C or G

SEQ ID NO: 25921 - DNA, 420 bp, Homo sapiens; identical to SEQ ID NO: 21659
  misc_feature 1, 2, 3, 4: n = A,T,C or G

SEQ ID NO: 25922 - DNA, 338 bp, Homo sapiens; identical to SEQ ID NO: 20091
  misc_feature 338: n = A,T,C or G

SEQ ID NO: 25923 - DNA, 981 bp, Homo sapiens; identical to SEQ ID NO: 20092
  misc_feature 1, 2, 3, 4, 5, 6, 7, 8, 9, 10, 865, 866, 867, 868, 869, 870,871, 872, 873, 874, 875, 876, 877, 878, 879, 880, 881, 882,883, 884, 885, 886, 887, 888, 889, 890, 891, 892, 893, 981: n = A,T,C or G

SEQ ID NO: 25924 - DNA, 524 bp, Homo sapiens; identical to SEQ ID NO: 20093

SEQ ID NO: 25925 - DNA, 929 bp, Homo sapiens; identical to SEQ ID NO: 20094
  misc_feature 1, 2, 3, 4, 5, 6, 7, 8, 9, 10, 11, 12, 13, 14, 15, 16, 17,18, 19, 20, 926, 927, 928, 929: n = A,T,C or G

SEQ ID NO: 25926 - DNA, 618 bp, Homo sapiens; identical to SEQ ID NO: 20095
  misc_feature 1, 2, 3, 4, 5, 6, 7, 8, 9, 10, 11, 12, 13, 14, 15, 16, 17,618: n = A,T,C or G

SEQ ID NO: 25927 - DNA, 413 bp, Homo sapiens; identical to SEQ ID NO: 20096

SEQ ID NO: 25928 - DNA, 536 bp, Homo sapiens; identical to SEQ ID NO: 20097
  misc_feature 536: n = A,T,C or G

SEQ ID NO: 25929 - DNA, 402 bp, Homo sapiens; identical to SEQ ID NO: 20098
  misc_feature 1, 2, 3, 4, 401, 402: n = A,T,C or G

SEQ ID NO: 25930 - DNA, 649 bp, Homo sapiens; identical to SEQ ID NO: 20099
  misc_feature 1, 2, 3, 4, 5, 6, 7, 8, 9, 649: n = A,T,C or G

SEQ ID NO: 25931 - DNA, 429 bp, Homo sapiens; identical to SEQ ID NO: 20100
  misc_feature 424, 425, 426, 427, 428, 429: n = A,T,C or G

SEQ ID NO: 25932 - DNA, 553 bp, Homo sapiens; identical to SEQ ID NO: 20101
  misc_feature 1, 550, 551, 552, 553: n = A,T,C or G

SEQ ID NO: 25933 - DNA, 482 bp, Homo sapiens; identical to SEQ ID NO: 20102

SEQ ID NO: 25934 - DNA, 466 bp, Homo sapiens; identical to SEQ ID NO: 20103
  misc_feature 1, 2, 3, 4, 5, 6, 7, 8, 9, 10, 73, 74, 75, 76, 77, 78, 79,80, 81, 82, 83, 84, 85, 86, 87, 88, 89, 90, 91, 92, 93,94, 95, 96, 97, 98, 99, 100, 101: n = A,T,C or G

SEQ ID NO: 25935 - DNA, 802 bp, Homo sapiens; identical to SEQ ID NO: 20104
  misc_feature 1, 2, 3, 25, 49, 73, 76, 94, 214, 802: n = A,T,C or G

SEQ ID NO: 25936 - DNA, 613 bp, Homo sapiens; identical to SEQ ID NO: 20105

SEQ ID NO: 25937 - DNA, 478 bp, Homo sapiens; identical to SEQ ID NO: 20106
  misc_feature 478: n = A,T,C or G

SEQ ID NO: 25938 - DNA, 756 bp, Homo sapiens; identical to SEQ ID NO: 20107

SEQ ID NO: 25939 - DNA, 402 bp, Homo sapiens; identical to SEQ ID NO: 20098
  misc_feature 1, 2, 3, 4, 401, 402: n = A,T,C or G

SEQ ID NO: 25940 - DNA, 498 bp, Homo sapiens; identical to SEQ ID NO: 20082
  misc_feature 1, 2, 3, 4, 497, 498: n = A,T,C or G

SEQ ID NO: 25941 - DNA, 397 bp, Homo sapiens; identical to SEQ ID NO: 20110

SEQ ID NO: 25942 - DNA, 443 bp, Homo sapiens; identical to SEQ ID NO: 20111
  misc_feature 1, 2, 3, 439, 440, 441, 442, 443: n = A,T,C or G

SEQ ID NO: 25943 - DNA, 1695 bp, Homo sapiens; identical to SEQ ID NO: 20112
  misc_feature 1, 1688, 1689, 1690, 1691, 1692, 1693, 1694, 1695: n = A,T,C or G

SEQ ID NO: 25944 - DNA, 2007 bp, Homo sapiens; identical to SEQ ID NO: 20113
  misc_feature 1, 2, 2002, 2003, 2004, 2005, 2006, 2007: n = A,T,C or G

SEQ ID NO: 25945 - DNA, 596 bp, Homo sapiens; identical to SEQ ID NO: 20114
  misc_feature 1, 2, 3, 95, 595, 596: n = A,T,C or G

SEQ ID NO: 25946 - DNA, 616 bp, Homo sapiens; identical to SEQ ID NO: 20115
  misc_feature 613, 614, 615, 616: n = A,T,C or G

SEQ ID NO: 25947 - DNA, 418 bp, Homo sapiens; identical to SEQ ID NO: 20116
  misc_feature 1: n = A,T,C or G

SEQ ID NO: 25948 - DNA, 675 bp, Homo sapiens; identical to SEQ ID NO: 20117
  misc_feature 645, 672, 673, 674, 675: n = A,T,C or G

SEQ ID NO: 25949 - DNA, 1380 bp, Homo sapiens; identical to SEQ ID NO: 20118
  misc_feature 1380: n = A,T,C or G

SEQ ID NO: 25950 - DNA, 1214 bp, Homo sapiens; identical to SEQ ID NO: 20119

SEQ ID NO: 25951 - DNA, 681 bp, Homo sapiens; identical to SEQ ID NO: 20120
  misc_feature 1, 2, 12: n = A,T,C or G

SEQ ID NO: 25952 - DNA, 1108 bp, Homo sapiens; identical to SEQ ID NO: 20121
  misc_feature 1, 2, 1103, 1104, 1105, 1106, 1107, 1108: n = A,T,C or G

SEQ ID NO: 25953 - DNA, 2012 bp, Homo sapiens; identical to SEQ ID NO: 20122

SEQ ID NO: 25954 - DNA, 571 bp, Homo sapiens; identical to SEQ ID NO: 20123
  misc_feature 1, 2, 3, 4, 5, 6, 7, 8, 9, 10, 11, 567, 568, 569, 570, 571: n = A,T,C or G

SEQ ID NO: 25955 - DNA, 2361 bp, Homo sapiens; identical to SEQ ID NO: 20124
  misc_feature 1, 2, 3, 2361: n = A,T,C or G

SEQ ID NO: 25956 - DNA, 392 bp, Homo sapiens; identical to SEQ ID NO: 20125

SEQ ID NO: 25957 - DNA, 506 bp, Homo sapiens; identical to SEQ ID NO: 20126
  misc_feature 506: n = A,T,C or G

SEQ ID NO: 25958 - DNA, 255 bp, Homo sapiens; identical to SEQ ID NO: 20127
  misc_feature 252, 253, 254, 255: n = A,T,C or G

SEQ ID NO: 25959 - DNA, 2680 bp, Homo sapiens; identical to SEQ ID NO: 20128
  misc_feature 1, 2, 2679, 2680: n = A,T,C or G

SEQ ID NO: 25960 - DNA, 331 bp, Homo sapiens; identical to SEQ ID NO: 20129
  misc_feature 331: n = A,T,C or G

SEQ ID NO: 25961 - DNA, 402 bp, Homo sapiens; identical to SEQ ID NO: 20098
  misc_feature 1, 2, 3, 4, 401, 402: n = A,T,C or G

SEQ ID NO: 25962 - DNA, 741 bp, Homo sapiens; identical to SEQ ID NO: 20131

SEQ ID NO: 25963 - DNA, 822 bp, Homo sapiens; identical to SEQ ID NO: 20132
  misc_feature 1, 2: n = A,T,C or G

SEQ ID NO: 25964 - DNA, 573 bp, Homo sapiens; identical to SEQ ID NO: 20133

SEQ ID NO: 25965 - DNA, 1363 bp, Homo sapiens; identical to SEQ ID NO: 20134
  misc_feature 1361, 1362, 1363: n = A,T,C or G

SEQ ID NO: 25966 - DNA, 681 bp, Homo sapiens; identical to SEQ ID NO: 20120
  misc_feature 1, 2, 12: n = A,T,C or G

SEQ ID NO: 25967 - DNA, 652 bp, Homo sapiens; identical to SEQ ID NO: 20136
  misc_feature 647, 652: n = A,T,C or G

SEQ ID NO: 25968 - DNA, 626 bp, Homo sapiens; identical to SEQ ID NO: 20137
  misc_feature 1, 2, 33: n = A,T,C or G

SEQ ID NO: 25969 - DNA, 1152 bp, Homo sapiens; identical to SEQ ID NO: 20138
  misc_feature 1146, 1147, 1148, 1149, 1150, 1151, 1152: n = A,T,C or G

SEQ ID NO: 25970 - DNA, 389 bp, Homo sapiens; identical to SEQ ID NO: 20139
  misc_feature 1, 2, 17, 389: n = A,T,C or G

SEQ ID NO: 25971 - DNA, 385 bp, Homo sapiens; identical to SEQ ID NO: 20140
  misc_feature 382, 383, 384, 385: n = A,T,C or G

SEQ ID NO: 25972 - DNA, 929 bp, Homo sapiens; identical to SEQ ID NO: 20094
  misc_feature 1, 2, 3, 4, 5, 6, 7, 8, 9, 10, 11, 12, 13, 14, 15, 16, 17,18, 19, 20, 926, 927, 928, 929: n = A,T,C or G

SEQ ID NO: 25973 - DNA, 1361 bp, Homo sapiens; identical to SEQ ID NO: 20142
  misc_feature 1, 2, 3, 4, 5, 6, 7, 8, 9, 10, 11, 12, 13: n = A,T,C or G

SEQ ID NO: 25974 - DNA, 392 bp, Homo sapiens; identical to SEQ ID NO: 20125

SEQ ID NO: 25975 - DNA, 629 bp, Homo sapiens; identical to SEQ ID NO: 20144
  misc_feature 1, 2: n = A,T,C or G

SEQ ID NO: 25976 - DNA, 497 bp, Homo sapiens; identical to SEQ ID NO: 20145
  misc_feature 493, 494, 495, 496, 497: n = A,T,C or G

SEQ ID NO: 25977 - DNA, 726 bp, Homo sapiens; identical to SEQ ID NO: 20146
  misc_feature 1, 2, 3, 717, 718, 719, 720, 721, 722, 723, 724, 725, 726: n = A,T,C or G

SEQ ID NO: 25978 - DNA, 462 bp, Homo sapiens; identical to SEQ ID NO: 20147
  misc_feature 461, 462: n = A,T,C or G

SEQ ID NO: 25979 - DNA, 387 bp, Homo sapiens; identical to SEQ ID NO: 20148
  misc_feature 380, 381, 382, 383, 384, 385, 386, 387: n = A,T,C or G

SEQ ID NO: 25980 - DNA, 779 bp, Homo sapiens; identical to SEQ ID NO: 20149
  misc_feature 1: n = A,T,C or G

SEQ ID NO: 25981 - DNA, 601 bp, Homo sapiens; identical to SEQ ID NO: 20150
  misc_feature 601: n = A,T,C or G

SEQ ID NO: 25982 - DNA, 664 bp, Homo sapiens; identical to SEQ ID NO: 20151
  misc_feature 1, 642, 662, 663, 664: n = A,T,C or G

SEQ ID NO: 25983 - DNA, 352 bp, Homo sapiens; identical to SEQ ID NO: 20152
  misc_feature 352: n = A,T,C or G

SEQ ID NO: 25984 - DNA, 474 bp, Homo sapiens; identical to SEQ ID NO: 20153
  misc_feature 473, 474: n = A,T,C or G

SEQ ID NO: 25985 - DNA, 832 bp, Homo sapiens; identical to SEQ ID NO: 20154
  misc_feature 830, 831, 832: n = A,T,C or G

SEQ ID NO: 25986 - DNA, 649 bp, Homo sapiens; identical to SEQ ID NO: 20099
  misc_feature 1, 2, 3, 4, 5, 6, 7, 8, 9, 649: n = A,T,C or G

SEQ ID NO: 25987 - DNA, 333 bp, Homo sapiens; identical to SEQ ID NO: 20156

SEQ ID NO: 25988 - DNA, 398 bp, Homo sapiens; identical to SEQ ID NO: 20157
  misc_feature 1, 393, 394, 395, 396, 397, 398: n = A,T,C or G

SEQ ID NO: 25989 - DNA, 340 bp, Homo sapiens; identical to SEQ ID NO: 20158

SEQ ID NO: 25990 - DNA, 445 bp, Homo sapiens; identical to SEQ ID NO: 20159
  misc_feature 1, 2, 3, 445: n = A,T,C or G

SEQ ID NO: 25991 - DNA, 528 bp, Homo sapiens; identical to SEQ ID NO: 20160

SEQ ID NO: 25992 - DNA, 556 bp, Homo sapiens; identical to SEQ ID NO: 20162
  misc_feature 555, 556: n = A,T,C or G

SEQ ID NO: 25993 - DNA, 1028 bp, Homo sapiens; identical to SEQ ID NO: 20163
  misc_feature 1022, 1023, 1024, 1025, 1026, 1027, 1028: n = A,T,C or G

SEQ ID NO: 25994 - DNA, 2506 bp, Homo sapiens; identical to SEQ ID NO: 20164
  misc_feature 1, 2, 2506: n = A,T,C or G

SEQ ID NO: 25995 - DNA, 309 bp, Homo sapiens; identical to SEQ ID NO: 20165

SEQ ID NO: 25996 - DNA, 1840 bp, Homo sapiens; identical to SEQ ID NO: 20166
  misc_feature 1, 2, 3, 1643, 1657, 1677, 1752, 1768, 1779, 1799, 1806,1813, 1824, 1839, 1840: n = A,T,C or G

SEQ ID NO: 25997 - DNA, 993 bp, Homo sapiens; identical to SEQ ID NO: 20167
  misc_feature 1, 2, 3, 4, 5, 6, 7, 8, 9, 10, 11, 21, 62, 70, 104, 993: n = A,T,C or G

SEQ ID NO: 25998 - DNA, 587 bp, Homo sapiens; identical to SEQ ID NO: 20170
  misc_feature 1, 570, 584, 585, 586, 587: n = A,T,C or G

SEQ ID NO: 25999 - DNA, 445 bp, Homo sapiens; identical to SEQ ID NO: 20171
  misc_feature 442, 443, 444, 445: n = A,T,C or G

SEQ ID NO: 26000 - DNA, 2079 bp, Homo sapiens; identical to SEQ ID NO: 20172
  misc_feature 1, 2, 2079: n = A,T,C or G

SEQ ID NO: 26001 - DNA, 376 bp, Homo sapiens; identical to SEQ ID NO: 20173
  misc_feature 376: n = A,T,C or G

SEQ ID NO: 26002 - DNA, 587 bp, Homo sapiens; identical to SEQ ID NO: 20170
  misc_feature 1, 570, 584, 585, 586, 587: n = A,T,C or G

SEQ ID NO: 26003 - DNA, 524 bp, Homo sapiens; identical to SEQ ID NO: 20176
  misc_feature 1, 524: n = A,T,C or G

SEQ ID NO: 26004 - DNA, 515 bp, Homo sapiens; identical to SEQ ID NO: 20177

SEQ ID NO: 26005 - DNA, 2159 bp, Homo sapiens; identical to SEQ ID NO: 20178
  misc_feature 1, 2, 3, 4, 5, 6, 7, 8, 9, 10, 11, 12, 13, 14, 15, 16, 17,18, 19, 20, 21, 22, 23, 24, 25, 26, 27, 28, 29, 30, 2155,2156, 2157, 2158, 2159: n = A,T,C or G

SEQ ID NO: 26006 - DNA, 601 bp, Homo sapiens; identical to SEQ ID NO: 20150
  misc_feature 601: n = A,T,C or G

SEQ ID NO: 26007 - DNA, 398 bp, Homo sapiens; identical to SEQ ID NO: 20157
  misc_feature 1, 393, 394, 395, 396, 397, 398: n = A,T,C or G

SEQ ID NO: 26008 - DNA, 4602 bp, Homo sapiens
  misc_feature 1, 105, 4602: n = A,T,C or G
naatgtcggcacaagtgttcatggtgcgccccgagttgccgtttcttgtcccgttgcccgcatttttataggggccaaggtttattctctttgagtcttttagancggccgctgttggcaaattaccttggggtaagtcatacggccgggaacaactgcttcatgtattcaatagagggcggtcttcctccaaataacattttcttagtcttccgtgatgattcacatccggtgccatcttgtctgtgttagtaaataaataatcttgtgcgaacagcgttgcatgttttaaccaacacttgggcctcggcactgtggatgttgtgtccgcccaaaacggtttgcactatttgccgagacgagttgtcttcccggaggaaaatgtcatctaggacccgttccatggggcaagtctattggaggtaccccaattaggccctatactactttaacgcgtaggctcttttatttttttttttacgtagtacactgataaccacaaagctctgagtatctccccaaagtaagtgatataggcagatatgataaggtatacatacatatttttcaaagtaacagtaaaaaaaaaaaacaaaaaaaaaacacaaaacattcaggccaatactaactaagccttatttcaggatagatgaccaaggtgagggtacagggatagtgatggtgggggagggggtgtgtgtgtgtgtaagacaaaaaaaaaattactgttaacttttgagggattaaaccacagatttttatactctatattaactgaggtagtgtttaaaatgaatgtctaaaatatgttaatcccattatgaataagattacattacttcctttggaggttttaaccactatttggtctagtaactctgacatttggttctctggaaaggcagtttagttatccaagaccaaagaccacgatgacaggcaacgttcttagaagtactgttgacatttaaataaacacttgggttcagtgataaagtataaaaaaattatttatcttcaactggattttatgagagaaaatctgaagaaccacttttcaacataagcagcagcttacagcccttatctgctttgttataatgtaagttgctacacagtgcacataagaacaattcactgaagtgcagtcaaagaggtgttatgaagtgagatgaaatgcttcatcccaactggaactttcagttccagtaaataaattttttaaaaaagtatctctgtgagttatgttttctagttcacagggttctttacagagatctcaaagaacaagcccattacaaaaaggatctgcatcatgggaaaatattaatgttgctatgactgtgtcaaaactgatgtgtaattgtaataaactatttctatttatatatagatctcaaaaaagataatcctttcatttacaagcattcaaatgatggccatgctatttttatatacaaatttgcatatatgtttaattcctgtaaaaagttccaaatacctttagacatatacaaattaaacaaacaaaaaccttgccctcatcaacttaacttcacaaatggataaaggcaattaatatactcataaacccacctaccactgcatttagtttgtgcaaaacaaaaacactgatataaaaattaagttactgctgctttaaaatttggtacttaaggcttttcactacaatttttctcaataacaagctttattaatttttttttaaggaaatatggctcttctttccccatggaatgtgtaaattgcaagcaaacttatcttttcctcaggagatccaaagtattatttaatgctttcctatcctttaggtctaaactaacagtgcttgttcaagttcctgtttaaagcgatgagatggaaagttgatgaaagtggaagtccattgcaaatatatgcattctataaatgggaaatatttttaattaaaataaaaaatgatttttaaattttattcaagaactgtagtgaaaaaccttaattggttcatatatcctgtaataacacattgcaacaaaatgaagagttggaaaacaagaatctttatgcaagtctagtaacataaaaataacttataagtcccgggttgttgaggctcttcttctgctttgaggttataaacctctgaagtagtgttacaaacattaagaaaaacgtgaaagggccaaagttccctctctaataccagcagttatagcacaccccattgtggtaataggatgcagccttagagacactgattcctgctttccacaagttagttaacaaacaaggcatctgtattatttaccctaaaaatcattcagaaataacttgtgaagggtgcttctgcatatcccattattgttccactgtcattacgcttttaaaatgaaagaaaatagaaaacctatgtaggtattcagtgcttggctcttgcatacaatggtaactgaaactcttaaaactgtggtaatgaatcatgaacccctcaaaaggctcaacaaaggagagaaggaagttgttttggttaggaaagtcagcagttccaactgttcatgtaccagtaactgcggaacagtgtacagaagatactcctgtctttgctgcctagtcagtcgtattttctgaggcttttaggaaatccacaaatatgaatatatatagtatgtatctatatccatcataaatatgaggtcaggattcagcagatgtatcaactataggttgctttggtggtgttgccaacacagcctctgcttcttcatgcatttgtagaaactgtacatcttgaaataattcttgtatgaacctccgacacggaagtctgaatgtgcagtgtgacagcaaatgggaaacctcagagtaaaggcatatgtcatcaaatgtttgaggatacttctccttaattgttaaaagcccagtctcatgacatttagttgaaactgaactactcaaattaatgactaatcttagaacttctttgcgaaggagtatacggcacattggtgtatcatctggaattgttttaacacctagtaacaattctgtgcttttggtgctgctagctgagccttcttgagacaccccatcactgcatccagaaatccccgaaaacttagagggaaccacttctaaaggattatggatagtctgctcacaccaatcagaatatggaatatcttgaaagtctgaatgactacatattgcactcagttggttgctgggctggaaacccagaatttcaatacagacacaataaaggcagttatcatctgtatgttcctgtagtccagtgtcttctgtactttctaaaaacagagaggcatctgaatggattgaattcattatttccgtaagactcatctgctgtcgtagcaagtgaaaagaattttttacaagacctccagttccagatggaagacctcctgcatcatgggcaaatgctcttgcacctcgatcatcatgtggtggtatgttttttgtctgaaaatagggaatatcctttacctggaatatatcatttatatccaccgggagagcaagaccaatgtaatcatctgaacccccatatgtggcactggacaccatggaccgcactgaggaagatcgttgcagggtattttgattaataggactcaataaatcttctttatctaatgatgcataacttaaggctttcatgaacctgcttggtgttaatctggactcaaaactgttggccttcatggtgatggtatcagtaaatagcacatcttttgctggagatgccaaagcttcagagtgagataaggatggatgcattctttgttgctgtagtcttttcagtgtagcatagccaaaagcatctctagaacttgtgtaactaaagttacaatctgctagacttttaattgtagcaatagagggtgctttaagggactgtgctcttctaggaagcctgacggaagaaccacagtactcatgcttccacagtctgtgtccatagttgtagcatctacacctactgtctctcgtgaaggacttgagctcattgaacttatgccacttgttgtagtgtctgtattgaaactttggctacgtatcttcatatgtgagctcgttgaactttctactactaacctctctcggcttgtattttctctgtgattctctgtaccaaaattcttggtgaattttaagtcattttctccaatgcttggtgtactaccagtgtcttcaatgtgcttattccccataaatgaagtctctaattgtaatgttttctgtacagtggatatgggtgtaaaatcatcactatgattaaaatcaacactgggctccgtaagtgttctgattcgcctgttgcttgtcttactttcagatgataatttccctccttttggatcactgctactacgatgttttttgttaggcaaagtaagcgaatttaagatacgattcttcacaagtttactagaagcaaagaaagggaatgaatttttatcctttatgggtccagatcggtcataaaatgttggctctgtatcttcattgatatcaaggaaaaatgtactagtagagctgctgccaaaccggtcggacgcgtggtcgactccctan

SEQ ID NO: 26009 - DNA, 1404 bp, Homo sapiens; identical to SEQ ID NO: 20182

SEQ ID NO: 26010 - DNA, 524 bp, Homo sapiens; identical to SEQ ID NO: 20176
  misc_feature 1, 524: n = A,T,C or G

SEQ ID NO: 26011 - DNA, 316 bp, Homo sapiens; identical to SEQ ID NO: 20184

SEQ ID NO: 26012 - DNA, 1189 bp, Homo sapiens; identical to SEQ ID NO: 20185
  misc_feature 1179, 1180, 1181, 1182, 1183, 1184, 1185, 1186, 1187, 1188,1189: n = A,T,C or G

SEQ ID NO: 26013 - DNA, 783 bp, Homo sapiens; identical to SEQ ID NO: 20186
  misc_feature 1, 725, 758, 782, 783: n = A,T,C or G

SEQ ID NO: 26014 - DNA, 581 bp, Homo sapiens; identical to SEQ ID NO: 20187
  misc_feature 579, 580, 581: n = A,T,C or G

SEQ ID NO: 26015 - DNA, 430 bp, Homo sapiens; identical to SEQ ID NO: 20188

SEQ ID NO: 26016 - DNA, 4348 bp, Homo sapiens; identical to SEQ ID NO: 20189
  misc_feature 1, 2, 3, 4339, 4340, 4341, 4342, 4343, 4344, 4345, 4346,4347, 4348: n = A,T,C or G

SEQ ID NO: 26017 - DNA, 1026 bp, Homo sapiens; identical to SEQ ID NO: 20190
  misc_feature 1, 2, 3, 4, 5, 6, 7, 8, 9, 10, 11, 12, 13, 28, 1012, 1013,1014, 1015, 1016, 1017, 1018, 1019, 1020, 1021, 1022, 1023,1024, 1025, 1026: n = A,T,C or G

SEQ ID NO: 26018 - DNA, 977 bp, Homo sapiens; identical to SEQ ID NO: 20191
  misc_feature 972, 973, 974, 975, 976, 977: n = A,T,C or G

SEQ ID NO: 26019 - DNA, 668 bp, Homo sapiens; identical to SEQ ID NO: 20192

SEQ ID NO: 26020 - DNA, 668 bp, Homo sapiens; identical to SEQ ID NO: 20192

SEQ ID NO: 26021 - DNA, 3565 bp, Homo sapiens; identical to SEQ ID NO: 20194

SEQ ID NO: 26022 - DNA, 418 bp, Homo sapiens; identical to SEQ ID NO: 20116
  misc_feature 1: n = A,T,C or G

SEQ ID NO: 26023 - DNA, 1979 bp, Homo sapiens; identical to SEQ ID NO: 20196
  misc_feature 1978, 1979: n = A,T,C or G

SEQ ID NO: 26024 - DNA, 308 bp, Homo sapiens; identical to SEQ ID NO: 20197
  misc_feature 308: n = A,T,C or G

SEQ ID NO: 26025 - DNA, 1028 bp, Homo sapiens; identical to SEQ ID NO: 20198

SEQ ID NO: 26026 - DNA, 835 bp, Homo sapiens; identical to SEQ ID NO: 20199
  misc_feature 1, 2, 834, 835: n = A,T,C or G

SEQ ID NO: 26027 - DNA, 774 bp, Homo sapiens; identical to SEQ ID NO: 20200
  misc_feature 774: n = A,T,C or G

SEQ ID NO: 26028 - DNA, 3265 bp, Homo sapiens; identical to SEQ ID NO: 20201

SEQ ID NO: 26029 - DNA, 491 bp, Homo sapiens; identical to SEQ ID NO: 20202
  misc_feature 1, 2, 3, 4, 5: n = A,T,C or G

SEQ ID NO: 26030 - DNA, 2609 bp, Homo sapiens; identical to SEQ ID NO: 20203
  misc_feature 1, 2, 3, 4, 2609: n = A,T,C or G

SEQ ID NO: 26031 - DNA, 822 bp, Homo sapiens; identical to SEQ ID NO: 20132
  misc_feature 1, 2: n = A,T,C or G

SEQ ID NO: 26032 - DNA, 984 bp, Homo sapiens; identical to SEQ ID NO: 20205

SEQ ID NO: 26033 - DNA, 529 bp, Homo sapiens; identical to SEQ ID NO: 20206
  misc_feature 1, 2, 3, 4, 5, 525, 526, 527, 528, 529: n = A,T,C or G

SEQ ID NO: 26034 - DNA, 441 bp, Homo sapiens; identical to SEQ ID NO: 20207
  misc_feature 1, 2, 3, 423, 424, 425, 426, 427, 428, 429, 430, 431, 432,433, 434, 435, 436, 437, 438, 439, 440, 441: n = A,T,C or G

SEQ ID NO: 26035 - DNA, 450 bp, Homo sapiens; identical to SEQ ID NO: 20208
  misc_feature 443, 444, 445, 446, 447, 448, 449, 450: n = A,T,C or G

SEQ ID NO: 26036 - DNA, 561 bp, Homo sapiens; identical to SEQ ID NO: 20209
  misc_feature 1, 2, 3, 4, 5, 6, 7, 8, 9, 147, 148, 149, 150, 151, 152,153, 154, 155, 156, 157, 158, 159, 160, 161, 162, 163, 164,165, 166, 167, 168, 169, 170: n = A,T,C or G

SEQ ID NO: 26037 - DNA, 898 bp, Homo sapiens; identical to SEQ ID NO: 20210
  misc_feature 898: n = A,T,C or G

SEQ ID NO: 26038 - DNA, 1115 bp, Homo sapiens; identical to SEQ ID NO: 20211

SEQ ID NO: 26039 - DNA, 1712 bp, Homo sapiens; identical to SEQ ID NO: 20212
  misc_feature 1, 1693, 1698, 1705, 1711, 1712: n = A,T,C or G

SEQ ID NO: 26040 - DNA, 445 bp, Homo sapiens; identical to SEQ ID NO: 20171
  misc_feature 442, 443, 444, 445: n = A,T,C or G

SEQ ID NO: 26041 - DNA, 386 bp, Homo sapiens; identical to SEQ ID NO: 20214
  misc_feature 381, 382, 383, 384, 385, 386: n = A,T,C or G

SEQ ID NO: 26042 - DNA, 346 bp, Homo sapiens; identical to SEQ ID NO: 20215
  misc_feature 341, 342, 343, 344, 345, 346: n = A,T,C or G

SEQ ID NO: 26043 - DNA, 962 bp, Homo sapiens; identical to SEQ ID NO: 20216
  misc_feature 1, 2, 3: n = A,T,C or G

SEQ ID NO: 26044 - DNA, 478 bp, Homo sapiens; identical to SEQ ID NO: 20217
  misc_feature 476, 477, 478: n = A,T,C or G

SEQ ID NO: 26045 - DNA, 543 bp, Homo sapiens; identical to SEQ ID NO: 20218
  misc_feature 1, 2, 3, 4, 5, 541, 542, 543: n = A,T,C or G

SEQ ID NO: 26046 - DNA, 454 bp, Homo sapiens; identical to SEQ ID NO: 20219
  misc_feature 451, 452, 453, 454: n = A,T,C or G

SEQ ID NO: 26047 - DNA, 625 bp, Homo sapiens; identical to SEQ ID NO: 20220
  misc_feature 1, 2, 625: n = A,T,C or G

SEQ ID NO: 26048 - DNA, 430 bp, Homo sapiens; identical to SEQ ID NO: 20188

SEQ ID NO: 26049 - DNA, 459 bp, Homo sapiens; identical to SEQ ID NO: 20222
  misc_feature 1, 459: n = A,T,C or G

SEQ ID NO: 26050 - DNA, 1717 bp, Homo sapiens; identical to SEQ ID NO: 20223
  misc_feature 1, 2, 1690, 1691, 1692, 1693, 1694, 1695, 1696, 1697, 1698,1699, 1700, 1701, 1702, 1703, 1704, 1705, 1706, 1707, 1708,1709, 1710, 1711, 1712, 1713, 1714, 1715, 1716, 1717: n = A,T,C or G

SEQ ID NO: 26051 - DNA, 774 bp, Homo sapiens; identical to SEQ ID NO: 20200
  misc_feature 774: n = A,T,C or G

SEQ ID NO: 26052 - DNA, 699 bp, Homo sapiens; identical to SEQ ID NO: 20225
  misc_feature 1, 2, 699: n = A,T,C or G

SEQ ID NO: 26053 - DNA, 2062 bp, Homo sapiens; identical to SEQ ID NO: 20226
  misc_feature 1, 2, 3, 4, 5, 6, 7: n = A,T,C or G

SEQ ID NO: 26054 - DNA, 412 bp, Homo sapiens; identical to SEQ ID NO: 20227
  misc_feature 390, 391, 392, 393, 394, 395, 396, 397, 398, 399, 400, 401,402, 403, 404, 405, 406, 407, 408, 409, 410, 411, 412: n = A,T,C or G

SEQ ID NO: 26055 - DNA, 338 bp, Homo sapiens; identical to SEQ ID NO: 20091
  misc_feature 338: n = A,T,C or G

SEQ ID NO: 26056 - DNA, 616 bp, Homo sapiens; identical to SEQ ID NO: 20115
  misc_feature 613, 614, 615, 616: n = A,T,C or G

SEQ ID NO: 26057 - DNA, 1214 bp, Homo sapiens; identical to SEQ ID NO: 20119

SEQ ID NO: 26058 - DNA, 746 bp, Homo sapiens; identical to SEQ ID NO: 20230
  misc_feature 741, 742, 743, 744, 745, 746: n = A,T,C or G

SEQ ID NO: 26059 - DNA, 1407 bp, Homo sapiens; identical to SEQ ID NO: 20231
  misc_feature 1, 2, 3, 4, 5, 6, 7, 8, 9, 10, 11, 14, 19, 1402, 1403, 1404,1405, 1406, 1407: n = A,T,C or G

SEQ ID NO: 26060 - DNA, 867 bp, Homo sapiens; identical to SEQ ID NO: 20232
  misc_feature 1, 2, 3, 4, 5, 6, 867: n = A,T,C or G

SEQ ID NO: 26061 - DNA, 825 bp, Homo sapiens; identical to SEQ ID NO: 20233
  misc_feature 825: n = A,T,C or G

SEQ ID NO: 26062 - DNA, 1108 bp, Homo sapiens; identical to SEQ ID NO: 20121
  misc_feature 1, 2, 1103, 1104, 1105, 1106, 1107, 1108: n = A,T,C or G

SEQ ID NO: 26063 - DNA, 389 bp, Homo sapiens; identical to SEQ ID NO: 20139
  misc_feature 1, 2, 17, 389: n = A,T,C or G

SEQ ID NO: 26064 - DNA, 625 bp, Homo sapiens; identical to SEQ ID NO: 20220
  misc_feature 1, 2, 625: n = A,T,C or G

SEQ ID NO: 26065 - DNA, 569 bp, Homo sapiens; identical to SEQ ID NO: 20236
  misc_feature 567, 568, 569: n = A,T,C or G

SEQ ID NO: 26066 - DNA, 307 bp, Homo sapiens; identical to SEQ ID NO: 20237

SEQ ID NO: 26067 - DNA, 1115 bp, Homo sapiens; identical to SEQ ID NO: 20211

SEQ ID NO: 26068 - DNA, 825 bp, Homo sapiens; identical to SEQ ID NO: 20233
  misc_feature 825: n = A,T,C or G

SEQ ID NO: 26069 - DNA, 498 bp, Homo sapiens; identical to SEQ ID NO: 20082
  misc_feature 1, 2, 3, 4, 497, 498: n = A,T,C or G

SEQ ID NO: 26070 - DNA, 1214 bp, Homo sapiens; identical to SEQ ID NO: 20119

SEQ ID NO: 26071 - DNA, 716 bp, Homo sapiens; identical to SEQ ID NO: 20242
  misc_feature 1, 2, 716: n = A,T,C or G

SEQ ID NO: 26072 - DNA, 1380 bp, Homo sapiens; identical to SEQ ID NO: 20118
  misc_feature 1380: n = A,T,C or G

SEQ ID NO: 26073 - DNA, 1008 bp, Homo sapiens; identical to SEQ ID NO: 20244
  misc_feature 1, 2, 3, 4, 5, 6, 7, 8, 9, 10, 11, 12, 13, 14, 15, 16, 17,1007, 1008: n = A,T,C or G

SEQ ID NO: 26074 - DNA, 629 bp, Homo sapiens; identical to SEQ ID NO: 20245
  misc_feature 1, 2, 3, 4, 5, 626, 627, 628, 629: n = A,T,C or G

SEQ ID NO: 26075 - DNA, 929 bp, Homo sapiens; identical to SEQ ID NO: 20094
  misc_feature 1, 2, 3, 4, 5, 6, 7, 8, 9, 10, 11, 12, 13, 14, 15, 16, 17,18, 19, 20, 926, 927, 928, 929: n = A,T,C or G

SEQ ID NO: 26076 - DNA, 434 bp, Homo sapiens; identical to SEQ ID NO: 20247
  misc_feature 1, 2, 3, 26: n = A,T,C or G

SEQ ID NO: 26077 - DNA, 736 bp, Homo sapiens; identical to SEQ ID NO: 20248
  misc_feature 732, 733, 734, 735, 736: n = A,T,C or G

SEQ ID NO: 26078 - DNA, 690 bp, Homo sapiens; identical to SEQ ID NO: 20249
  misc_feature 1: n = A,T,C or G

SEQ ID NO: 26079 - DNA, 402 bp, Homo sapiens; identical to SEQ ID NO: 20098
  misc_feature 1, 2, 3, 4, 401, 402: n = A,T,C or G

SEQ ID NO: 26080 - DNA, 418 bp, Homo sapiens; identical to SEQ ID NO: 20251
  misc_feature 1, 413, 414, 415, 416, 417, 418: n = A,T,C or G

SEQ ID NO: 26081 - DNA, 1526 bp, Homo sapiens; identical to SEQ ID NO: 20252
  misc_feature 1, 2, 3, 4, 5, 6, 7, 8, 9, 10, 11, 1427, 1526: n = A,T,C or G

SEQ ID NO: 26082 - DNA, 962 bp, Homo sapiens; identical to SEQ ID NO: 20216
  misc_feature 1, 2, 3: n = A,T,C or G

SEQ ID NO: 26083 - DNA, 444 bp, Homo sapiens; identical to SEQ ID NO: 20254
  misc_feature 1, 2, 3, 268, 322, 419, 443, 444: n = A,T,C or G

SEQ ID NO: 26084 - DNA, 679 bp, Homo sapiens; identical to SEQ ID NO: 20255
  misc_feature 1, 676, 677, 678, 679: n = A,T,C or G

SEQ ID NO: 26085 - DNA, 635 bp, Homo sapiens; identical to SEQ ID NO: 20256

SEQ ID NO: 26086 - DNA, 726 bp, Homo sapiens; identical to SEQ ID NO: 20257
  misc_feature 724, 725, 726: n = A,T,C or G

SEQ ID NO: 26087 - DNA, 354 bp, Homo sapiens; identical to SEQ ID NO: 20258

SEQ ID NO: 26088 - DNA, 378 bp, Homo sapiens; identical to SEQ ID NO: 20259
  misc_feature 378: n = A,T,C or G

SEQ ID NO: 26089 - DNA, 375 bp, Homo sapiens; identical to SEQ ID NO: 20260
  misc_feature 1, 2, 3, 375: n = A,T,C or G

SEQ ID NO: 26090 - DNA, 830 bp, Homo sapiens; identical to SEQ ID NO: 20261

SEQ ID NO: 26091 - DNA, 446 bp, Homo sapiens; identical to SEQ ID NO: 20262
  misc_feature 397, 428, 429, 430, 431, 432, 433, 434, 435, 436, 437, 438,439, 440, 441, 442, 443, 444, 445, 446: n = A,T,C or G

SEQ ID NO: 26092 - DNA, 474 bp, Homo sapiens; identical to SEQ ID NO: 20153
  misc_feature 473, 474: n = A,T,C or G

SEQ ID NO: 26093 - DNA, 682 bp, Homo sapiens; identical to SEQ ID NO: 20264
  misc_feature 1, 2, 3, 4, 681, 682: n = A,T,C or G

SEQ ID NO: 26094 - DNA, 402 bp, Homo sapiens; identical to SEQ ID NO: 20098
  misc_feature 1, 2, 3, 4, 401, 402: n = A,T,C or G

SEQ ID NO: 26095 - DNA, 375 bp, Homo sapiens; identical to SEQ ID NO: 20260
  misc_feature 1, 2, 3, 375: n = A,T,C or G

SEQ ID NO: 26096 - DNA, 806 bp, Homo sapiens; identical to SEQ ID NO: 20267
  misc_feature 1: n = A,T,C or G

SEQ ID NO: 26097 - DNA, 385 bp, Homo sapiens; identical to SEQ ID NO: 20268

SEQ ID NO: 26098 - DNA, 649 bp, Homo sapiens; identical to SEQ ID NO: 20099
  misc_feature 1, 2, 3, 4, 5, 6, 7, 8, 9, 649: n = A,T,C or G

SEQ ID NO: 26099 - DNA, 1015 bp, Homo sapiens; identical to SEQ ID NO: 20270
  misc_feature 1, 2, 3, 4, 5, 6, 7, 8, 9, 10, 11, 12, 13, 14, 15, 16, 17,18, 19, 20, 21, 22, 23, 24, 25, 26, 27, 28, 29, 30, 1012,1013, 1014, 1015: n = A,T,C or G

SEQ ID NO: 26100 - DNA, 5999 bp, Homo sapiens
  misc_feature 1, 2, 3, 4, 26, 5996, 5997, 5998, 5999: n = A,T,C or G
nnnngacgtcatgagcattgcaatcntctgggagtcaccacatcagatacatcctactcagatatggcttgctgaatcagaccctgaatctctggccgcctagtcctgcagttaatgagaagagcgtgtattccactcataattatgggaccactcagaggcatgggtgtcgaggactgccttatgctacgatcatccctcgttctgacctgaatggcctgccgtcgcctgtagaggaacgctgtggagacagcccgaactctgaaggagaaactgtacctacctggtgtccttgtggtctttctcaggatggcttccttctcaactgtgacaagtgcaggggaatgagcagggggaaggttattagacttcatcggcggaagcaggacaacatatcaggtggggatagcagtgcaacagaaagctgggatgaggagctttctccttccactgtgttgtatacagcaacacagcacacacctacaagcatcaccttaactgttagaagaaccaaacccaagaagcggaaaaagagtccagaaaagggtcgtgcagcaccaaagacgaagaaaatcaagaattctccctctgaagcacagaatttagatgagaatacaactgagggctgggaaaatcggataagactatggactgaccagtatgaagaagctttcactaatcagtacagtgcagatgtacagaacgcgcttgaacaacacctacattctagcaaggaatttgtgggcaaacctactattttagacactattaataagactgaattggcctgtaataacacagttattggttcccaaatgcagttacagctgggaagagtcactcgtgttcaaaagcaccggaagatcctgagggctgcaagagatttggctttggacactcttataatagagtatcgtgggaaagtcatgttacgacagcaatttgaggtcaatgggcatttcttcaaaaaaccatacccctttgtgctcttctactcaaaattcaatggtgtagagatgtgtgtggatgcccgtactttcggtaatgatgctcggttcatcagaagatcatgtacaccaaatgcagaggtgcgacacatgattgcagatgggatgattcacctgtgcatctatgctgtgtctgccatcaccaaggatgctgaggtcaccatagcatttgattatgagtatagtaactgtaattataaagtggactgtgcctgtcacaagggaaaccggaattgtcctatacaaaaaaggaatcctaatgctacagaactgccactcctaccacctcctccaagcctacccaccattggagcagagactagacgtagaaaagcacgacggaaagagctagagatggagcagcagaatgaggcttcagaggagaataatgaccagcaatcacaagaagttccagaaaaagtaactgtatccagtgatcatgaggaagtagacaatccagaagaaaaaccagaagaagagaaagaagaggttatagatgaccaggagaacctagctcatagcaggaggaccagggaagatagaaaggtagaagccatcatgcatgcttttgaaaacttagagaaaagaaagaagcggcgggatcagcccttggaacagagcaactctgatgtagagattactacaaccacctcagagactcctgttggtgaagagacaaaaactgaagcccctgaatctgaagttagcaactctgtttcaaatgttaccatcccaagcaccccacagagtgttggtgtgaatacccggaggtcttcccaagcaggggatattgctgcagaaaaactagtccccaagccacctccagcaaagccttctaggccccggccgaagagtcgaatttctcggtacaggaccagttcagcccaaagactaaagcgtcagaagcaggccaatgcacagcaggcagaattgtcacaagctgccttggaagagggaggaagtaacagtttagtaactcctactgaagctggaagtctagacagttcaggagaaaacaggccattaacagggtctgacccaactgtggtgtcaattactggatcccatgtcaaccgtgctgcatctaaataccccaaaaccaaaaagtatctagttacagaatggttgaatgacaaagcagagaagcaagagtgccctgttgagtgccctttacgtatcacaacggatccaactgtactggcaacgaccctaaacatgttaccaggtcttatccattccccgttaatttgcaccacccccaaacactacattcgctttggctcaccctttatccctgagagacgtcgaaggccccttctgcctgatggcacattcagctcctgtaagaagcgctggataaaacaagccttagaagaagggatgactcaaacatcatctgtaccccaagagactagaactcagcacctataccaaagcaatgagaatagtagctcttctagtatctgcaaagacaatgcagacttgttgagcccattaaagaaatggaagtctcgctatctgatggagcagaatgtcaccaagttacttcggcctctgtctccagtcacaccaccccctcccaattcaggctcaaagagtccccagctggccacacctggctcatctcacccaggagaagaggagtgtcgaaatggatacagcctcatgttttcaccagtcacatctcttactactgctagtcgctgcaacactcctctacagtttgagctttgtcaccgaaaagacctggatttggcaaaagtaggataccttgactccaacactaacagctgtgctgatagaccttccctactcaactcaggtcattctgacctggctcctcatccctccctcggacccacttctgagactggtttcccaagcagaagtggagatggacatcagaccctcgtgagaaactcagaccaggcatttcggacagagttcaacttgatgtatgcctactcccctttgaatgctatgcctcgagcagatggactgtatcgaggatctcctctagtgggggataggaagcctttacatttggatgggggatattgttcccctgcagaaggattttccagcagatatgaacatggcttaatgaaagacctctctcgtggatccttgtcacctggtggtgaaagggcctgtgaaggagtcccatctgccccccagaacccaccacagaggaaaaaagtatccctgctggagtaccgaaaacggaaacaagaagctaaggaaaattctgctggtgggggaggtgactctgcacagagcaaaagcaagtctgcaggagctgggcaaggcagcagtaactccgtttccgacactggtgcccatggtgtgcagggatcctcagcccgaactccatcttcccctcacaaaaaattctccccatctcattcctctatgtcccatttggaggcggtaagcccatcagattccagaggcacttcttcatctcactgcagacctcaagagaatatcagcagtaggtggatggttcccacatcagtagaacgactccgagaaggagggagcatccccaaggtcctccgaagcagcgtgagggtggcccaaaagggagagccctctcccacatgggagagtaacatcacagagaaagactcagaccctgcagatggagaaggcccagagacattaagctcagcactctctaaaggagcaacagtttacagcccttccagatacagctaccagctcctgcagtgtgatagtcctcggacagaatcacaaagcctccttcagcagagttcctcccccttcagaggacatcctacacagtctccaggatacagttatcgaactactgcactgagacctggaaaccccccctctcacggttcttcagaatcatccctctcttccacgtcctattccagccccgcccaccctgtgtccacagactcgttggccccatttacggggacaccagggtattttagcagccagccacattctggaaacagcactggcagcaatcttccaaggaggagctgcccttctagtgctgctagccctaccctgcagggaccctcagactcgccaacctcagattcagtttctcagtccagcacaggaactctgagttccacctcctttcctcagaactctaggtcgtcattgccatcagacttacggactatcagtctgcccagtgctgggcagtcagctgtctaccaggcctccagggtatctgcggtttccaattcacagcactacccacaccgtgggagtgggggtgtgcaccagtaccgactccagccactgcaagggtcaggagtcaagactcagacgggactttcctagggcttctggatttgggcaaacagaactgaatgagcccatagctgcttccttccagctgcctctggaacctaggccgagcatattgctgaggaacggggggtacaaggtgccagaggattgggtctggtggacaagaaacaagacttgtggtcacaattggcctctggccttggagaaagctgtaaatcttgtctgaagcagagactataaagaagtttctccctgctgtcaagggtacattgttgacaagcaaatggtgtttcggttagtaacggttctaagtgcaatgagttgtgttgaagcctccgtctcccatccttgcctgtagcccgtagtcacttgtgcagtgaggacatctttttaaatttaaaaaaaaaaaaaaaaaagttttcaaaggaaaaaaagttaaaagagccaatctcaaagccccaagccatctgagtactgttagggttttatgcacttaagaaaaaaggtaggtatgtaaatgttcatcctaagacaaccattccaaaagcaggtatctggccaatgtgtgtccaccaagaatactgtttatctttgtcttaagatcaccaagaaataggcaaggatagtaaagcttggaacctgcaccaactggagggtgcctggctctttgaagaaaagctcatggtcagctcttgattattcgggagcagattatttgagtagattgtctgagcctccaactgttaccatcctactcccccttcccaagctatttcacagctcagtaacccatgaagtaagtagacaagaaaaggaggaatgagacatgatataggccaattgcattgctacttaccagcttttggcaataaatttcattaggaaggataccgagtggtttgggaatgcttcgaattttattttttctactcccaattaatcaggagttgatgatcccatgagcaggaccgcctccatgattggggagcatgcacttgtgactgcagggtaagagtgggaagataggtttgtggagtggcaccgacaggactgtgattgtgtgtgggcctgccccacatttctctgggggatgcttatgtgagagtgggcccagtgaaagagttaccaagccacccacacccctaacactgttctggatgagagatgagagcagaccggcttctccccatcagtgcattgtgcctgttgtacacccctggaggagccctggagccagcccaggtggggtacacaatctttttaaattccatatggttgccagcttatttctttcacttgtttactgtaatatctggcgtgtttttatttatctaattttgtattcagttataaccatggtaggggtagtgaatatatgacaggtgtaatccctggtgctgcagtggaccttcttttcttttggacaagataatactgtgagtttccctccttccttccctctaatttgttttccttttttccccagcctctagcaccccaagaggtctggtcttgacagcaccctgcccacacagagtggctgggggggtaggggcgggggggtggggggaactcttggaagggaagaagtatcacttctttctcaagtggagtgtttacaccttgctgtaacatttgaactttcacaagagatgtaataattttgataataaaattcttaaccannnn

SEQ ID NO: 26101 - DNA, 412 bp, Homo sapiens; identical to SEQ ID NO: 20227
  misc_feature 390, 391, 392, 393, 394, 395, 396, 397, 398, 399, 400, 401,402, 403, 404, 405, 406, 407, 408, 409, 410, 411, 412: n = A,T,C or G

SEQ ID NO: 26102 - DNA, 454 bp, Homo sapiens; identical to SEQ ID NO: 20273
  misc_feature 1, 2, 3: n = A,T,C or G

SEQ ID NO: 26103 - DNA, 659 bp, Homo sapiens; identical to SEQ ID NO: 20274

SEQ ID NO: 26104 - DNA, 529 bp, Homo sapiens; identical to SEQ ID NO: 20275

SEQ ID NO: 26105 - DNA, 407 bp, Homo sapiens; identical to SEQ ID NO: 20276
  misc_feature 386, 387, 388, 389, 390, 391, 392, 393, 394, 395, 396, 397,398, 399, 400, 401, 402, 403, 404, 405, 406, 407: n = A,T,C or G

SEQ ID NO: 26106 - DNA, 1108 bp, Homo sapiens; identical to SEQ ID NO: 20121
  misc_feature 1, 2, 1103, 1104, 1105, 1106, 1107, 1108: n = A,T,C or G

SEQ ID NO: 26107 - DNA, 1115 bp, Homo sapiens; identical to SEQ ID NO: 20211

SEQ ID NO: 26108 - DNA, 645 bp, Homo sapiens; identical to SEQ ID NO: 20279
  misc_feature 1, 644, 645: n = A,T,C or G

SEQ ID NO: 26109 - DNA, 869 bp, Homo sapiens; identical to SEQ ID NO: 20280
  misc_feature 1, 2, 867, 868, 869: n = A,T,C or G

SEQ ID NO: 26110 - DNA, 445 bp, Homo sapiens; identical to SEQ ID NO: 20159
  misc_feature 1, 2, 3, 445: n = A,T,C or G

SEQ ID NO: 26111 - DNA, 1189 bp, Homo sapiens; identical to SEQ ID NO: 20185
  misc_feature 1179, 1180, 1181, 1182, 1183, 1184, 1185, 1186, 1187, 1188,1189: n = A,T,C or G

SEQ ID NO: 26112 - DNA, 1429 bp, Homo sapiens; identical to SEQ ID NO: 20283
  misc_feature 1, 2, 3, 4, 5, 6, 7, 1426, 1427, 1428, 1429: n = A,T,C or G

SEQ ID NO: 26113 - DNA, 443 bp, Homo sapiens; identical to SEQ ID NO: 20111
  misc_feature 1, 2, 3, 439, 440, 441, 442, 443: n = A,T,C or G

SEQ ID NO: 26114 - DNA, 572 bp, Homo sapiens; identical to SEQ ID NO: 20285
  misc_feature 571, 572: n = A,T,C or G

SEQ ID NO: 26115 - DNA, 831 bp, Homo sapiens; identical to SEQ ID NO: 21826
  misc_feature 1, 2: n = A,T,C or G

SEQ ID NO: 26116 - DNA, 1214 bp, Homo sapiens; identical to SEQ ID NO: 20119

SEQ ID NO: 26117 - DNA, 813 bp, Homo sapiens; identical to SEQ ID NO: 20287
  misc_feature 1, 2, 3, 4: n = A,T,C or G

SEQ ID NO: 26118 - DNA, 770 bp, Homo sapiens; identical to SEQ ID NO: 20288
  misc_feature 765, 766, 767, 768, 769, 770: n = A,T,C or G

SEQ ID NO: 26119 - DNA, 1128 bp, Homo sapiens; identical to SEQ ID NO: 20289
  misc_feature 1, 2, 1127, 1128: n = A,T,C or G

SEQ ID NO: 26120 - DNA, 1409 bp, Homo sapiens; identical to SEQ ID NO: 20290
  misc_feature 1, 2, 3, 4, 5, 6, 7, 1409: n = A,T,C or G

SEQ ID NO: 26121 - DNA, 1835 bp, Homo sapiens; identical to SEQ ID NO: 20291
  misc_feature 1, 2, 3, 4, 1835: n = A,T,C or G

SEQ ID NO: 26122 - DNA, 449 bp, Homo sapiens; identical to SEQ ID NO: 20292

SEQ ID NO: 26123 - DNA, 3073 bp, Homo sapiens; identical to SEQ ID NO: 20293
  misc_feature 1, 2, 3, 3070, 3071, 3072, 3073: n = A,T,C or G

SEQ ID NO: 26124 - DNA, 1409 bp, Homo sapiens; identical to SEQ ID NO: 20290
  misc_feature 1, 2, 3, 4, 5, 6, 7, 1409: n = A,T,C or G

SEQ ID NO: 26125 - DNA, 929 bp, Homo sapiens; identical to SEQ ID NO: 20094
  misc_feature 1, 2, 3, 4, 5, 6, 7, 8, 9, 10, 11, 12, 13, 14, 15, 16, 17,18, 19, 20, 926, 927, 928, 929: n = A,T,C or G

SEQ ID NO: 26126 - DNA, 553 bp, Homo sapiens; identical to SEQ ID NO: 20101
  misc_feature 1, 550, 551, 552, 553: n = A,T,C or G

SEQ ID NO: 26127 - DNA, 1214 bp, Homo sapiens; identical to SEQ ID NO: 20119

SEQ ID NO: 26128 - DNA, 1074 bp, Homo sapiens; identical to SEQ ID NO: 20298
  misc_feature 1, 2, 3, 4, 5, 1073, 1074: n = A,T,C or G

SEQ ID NO: 26129 - DNA, 809 bp, Homo sapiens; identical to SEQ ID NO: 20299

SEQ ID NO: 26130 - DNA, 1012 bp, Homo sapiens; identical to SEQ ID NO: 20300
  misc_feature 1011, 1012: n = A,T,C or G

SEQ ID NO: 26131 - DNA, 473 bp, Homo sapiens; identical to SEQ ID NO: 20301
  misc_feature 411, 440, 446, 471, 472, 473: n = A,T,C or G

SEQ ID NO: 26132 - DNA, 466 bp, Homo sapiens; identical to SEQ ID NO: 20303
  misc_feature 1, 2, 3, 466: n = A,T,C or G

SEQ ID NO: 26133 - DNA, 353 bp, Homo sapiens; identical to SEQ ID NO: 20304
  misc_feature 1: n = A,T,C or G

SEQ ID NO: 26134 - DNA, 587 bp, Homo sapiens; identical to SEQ ID NO: 20170
  misc_feature 1, 570, 584, 585, 586, 587: n = A,T,C or G

SEQ ID NO: 26135 - DNA, 1084 bp, Homo sapiens; identical to SEQ ID NO: 20306

SEQ ID NO: 26136 - DNA, 1108 bp, Homo sapiens; identical to SEQ ID NO: 20121
  misc_feature 1, 2, 1103, 1104, 1105, 1106, 1107, 1108: n = A,T,C or G

SEQ ID NO: 26137 - DNA, 2031 bp, Homo sapiens; identical to SEQ ID NO: 20308
  misc_feature 2027, 2029, 2030, 2031: n = A,T,C or G

SEQ ID NO: 26138 - DNA, 515 bp, Homo sapiens; identical to SEQ ID NO: 20177

SEQ ID NO: 26139 - DNA, 939 bp, Homo sapiens; identical to SEQ ID NO: 20309
  misc_feature 1, 938, 939: n = A,T,C or G

SEQ ID NO: 26140 - DNA, 1189 bp, Homo sapiens; identical to SEQ ID NO: 20185
  misc_feature 1179, 1180, 1181, 1182, 1183, 1184, 1185, 1186, 1187, 1188,1189: n = A,T,C or G

SEQ ID NO: 26141 - DNA, 1409 bp, Homo sapiens; identical to SEQ ID NO: 20290
  misc_feature 1, 2, 3, 4, 5, 6, 7, 1409: n = A,T,C or G

SEQ ID NO: 26142 - DNA, 573 bp, Homo sapiens; identical to SEQ ID NO: 20076
  misc_feature 563, 564, 565, 566, 567, 568, 569, 570, 571, 572, 573: n = A,T,C or G

SEQ ID NO: 26143 - DNA, 449 bp, Homo sapiens; identical to SEQ ID NO: 20313

SEQ ID NO: 26144 - DNA, 582 bp, Homo sapiens; identical to SEQ ID NO: 20314
  misc_feature 582: n = A,T,C or G

SEQ ID NO: 26145 - DNA, 986 bp, Homo sapiens; identical to SEQ ID NO: 20315
  misc_feature 1, 8, 9, 15, 985, 986: n = A,T,C or G

SEQ ID NO: 26146 - DNA, 2538 bp, Homo sapiens; identical to SEQ ID NO: 20316
  misc_feature 2538: n = A,T,C or G

SEQ ID NO: 26147 - DNA, 561 bp, Homo sapiens; identical to SEQ ID NO: 20209
  misc_feature 1, 2, 3, 4, 5, 6, 7, 8, 9, 147, 148, 149, 150, 151, 152,153, 154, 155, 156, 157, 158, 159, 160, 161, 162, 163, 164,165, 166, 167, 168, 169, 170: n = A,T,C or G

SEQ ID NO: 26148 - DNA, 482 bp, Homo sapiens; identical to SEQ ID NO: 20102

SEQ ID NO: 26149 - DNA, 619 bp, Homo sapiens; identical to SEQ ID NO: 20319
  misc_feature 1, 2, 3, 4, 501, 617, 618, 619: n = A,T,C or G

SEQ ID NO: 26150 - DNA, 308 bp, Homo sapiens; identical to SEQ ID NO: 20197
  misc_feature 308: n = A,T,C or G

SEQ ID NO: 26151 - DNA, 1063 bp, Homo sapiens; identical to SEQ ID NO: 20321

SEQ ID NO: 26152 - DNA, 668 bp, Homo sapiens; identical to SEQ ID NO: 20192

SEQ ID NO: 26153 - DNA, 951 bp, Homo sapiens; identical to SEQ ID NO: 20322
  misc_feature 947, 948, 949, 950, 951: n = A,T,C or G

SEQ ID NO: 26154 - DNA, 2506 bp, Homo sapiens; identical to SEQ ID NO: 20323
  misc_feature 2503, 2504, 2505, 2506: n = A,T,C or G

SEQ ID NO: 26155 - DNA, 727 bp, Homo sapiens; identical to SEQ ID NO: 20324

SEQ ID NO: 26156 - DNA, 617 bp, Homo sapiens; identical to SEQ ID NO: 20325

SEQ ID NO: 26157 - DNA, 466 bp, Homo sapiens; identical to SEQ ID NO: 20303
  misc_feature 1, 2, 3, 466: n = A,T,C or G

SEQ ID NO: 26158 - DNA, 187 bp, Homo sapiens; identical to SEQ ID NO: 20327
  misc_feature 178, 179, 180, 181, 182, 183, 184, 185, 186, 187: n = A,T,C or G

SEQ ID NO: 26159 - DNA, 668 bp, Homo sapiens; identical to SEQ ID NO: 20192

SEQ ID NO: 26160 - DNA, 1084 bp, Homo sapiens; identical to SEQ ID NO: 20306

SEQ ID NO: 26161 - DNA, 792 bp, Homo sapiens; identical to SEQ ID NO: 20330
  misc_feature 783, 784, 785, 786, 787, 788, 789, 790, 791, 792: n = A,T,C or G

SEQ ID NO: 26162 - DNA, 371 bp, Homo sapiens; identical to SEQ ID NO: 20331
  misc_feature 369, 370, 371: n = A,T,C or G

SEQ ID NO: 26163 - DNA, 419 bp, Homo sapiens; identical to SEQ ID NO: 20332
  misc_feature 418, 419: n = A,T,C or G

SEQ ID NO: 26164 - DNA, 207 bp, Homo sapiens; identical to SEQ ID NO: 20333
  misc_feature 1, 2, 205, 206, 207: n = A,T,C or G

SEQ ID NO: 26165 - DNA, 651 bp, Homo sapiens; identical to SEQ ID NO: 20334
  misc_feature 1, 650, 651: n = A,T,C or G

SEQ ID NO: 26166 - DNA, 806 bp, Homo sapiens; identical to SEQ ID NO: 20267
  misc_feature 1: n = A,T,C or G

SEQ ID NO: 26167 - DNA, 440 bp, Homo sapiens; identical to SEQ ID NO: 20336
  misc_feature 440: n = A,T,C or G

SEQ ID NO: 26168 - DNA, 479 bp, Homo sapiens; identical to SEQ ID NO: 20337
  misc_feature 478, 479: n = A,T,C or G

SEQ ID NO: 26169 - DNA, 397 bp, Homo sapiens; identical to SEQ ID NO: 20338

SEQ ID NO: 26170 - DNA, 2843 bp, Homo sapiens; identical to SEQ ID NO: 20339
  misc_feature 1, 2, 3, 4, 2815, 2816, 2817, 2818, 2819, 2820, 2821, 2822,2823, 2824, 2825, 2826, 2827, 2828, 2829, 2830, 2831, 2832,2833, 2834, 2835, 2836, 2837, 2838, 2839, 2840, 2841, 2842,2843: n = A,T,C or G

SEQ ID NO: 26171 - DNA, 539 bp, Homo sapiens; identical to SEQ ID NO: 20340
  misc_feature 535, 536, 537, 538, 539: n = A,T,C or G

SEQ ID NO: 26172 - DNA, 592 bp, Homo sapiens; identical to SEQ ID NO: 20341
  misc_feature 592: n = A,T,C or G

SEQ ID NO: 26173 - DNA, 376 bp, Homo sapiens; identical to SEQ ID NO: 20342
  misc_feature 376: n = A,T,C or G

SEQ ID NO: 26174 - DNA, 382 bp, Homo sapiens; identical to SEQ ID NO: 20343

SEQ ID NO: 26175 - DNA, 563 bp, Homo sapiens; identical to SEQ ID NO: 20344
  misc_feature 1, 563: n = A,T,C or G

SEQ ID NO: 26176 - DNA, 697 bp, Homo sapiens; identical to SEQ ID NO: 20345
  misc_feature 688, 689, 690, 691, 692, 693, 694, 695, 696, 697: n = A,T,C or G

SEQ ID NO: 26177 - DNA, 561 bp, Homo sapiens; identical to SEQ ID NO: 20209
  misc_feature 1, 2, 3, 4, 5, 6, 7, 8, 9, 147, 148, 149, 150, 151, 152,153, 154, 155, 156, 157, 158, 159, 160, 161, 162, 163, 164,165, 166, 167, 168, 169, 170: n = A,T,C or G

SEQ ID NO: 26178 - DNA, 466 bp, Homo sapiens; identical to SEQ ID NO: 20303
  misc_feature 1, 2, 3, 466: n = A,T,C or G

SEQ ID NO: 26179 - DNA, 833 bp, Homo sapiens; identical to SEQ ID NO: 20348
  misc_feature 1, 2, 833: n = A,T,C or G

SEQ ID NO: 26180 - DNA, 383 bp, Homo sapiens; identical to SEQ ID NO: 20349
  misc_feature 383: n = A,T,C or G

SEQ ID NO: 26181 - DNA, 683 bp, Homo sapiens; identical to SEQ ID NO: 20350
  misc_feature 683: n = A,T,C or G

SEQ ID NO: 26182 - DNA, 822 bp, Homo sapiens; identical to SEQ ID NO: 20132
  misc_feature 1, 2: n = A,T,C or G

SEQ ID NO: 26183 - DNA, 441 bp, Homo sapiens; identical to SEQ ID NO: 20352
  misc_feature 440, 441: n = A,T,C or G

SEQ ID NO: 26184 - DNA, 546 bp, Homo sapiens; identical to SEQ ID NO: 20353

SEQ ID NO: 26185 - DNA, 466 bp, Homo sapiens; identical to SEQ ID NO: 20303
  misc_feature 1, 2, 3, 466: n = A,T,C or G

SEQ ID NO: 26186 - DNA, 529 bp, Homo sapiens; identical to SEQ ID NO: 20275

SEQ ID NO: 26187 - DNA, 902 bp, Homo sapiens; identical to SEQ ID NO: 20356
  misc_feature 900, 901, 902: n = A,T,C or G

SEQ ID NO: 26188 - DNA, 533 bp, Homo sapiens; identical to SEQ ID NO: 20357
  misc_feature 386, 529, 530, 531, 532, 533: n = A,T,C or G

SEQ ID NO: 26189 - DNA, 554 bp, Homo sapiens; identical to SEQ ID NO: 20358

SEQ ID NO: 26190 - DNA, 517 bp, Homo sapiens; identical to SEQ ID NO: 20359
  misc_feature 1, 515, 516, 517: n = A,T,C or G

SEQ ID NO: 26191 - DNA, 604 bp, Homo sapiens; identical to SEQ ID NO: 20360
  misc_feature 596, 604: n = A,T,C or G

SEQ ID NO: 26192 - DNA, 567 bp, Homo sapiens; identical to SEQ ID NO: 20361

SEQ ID NO: 26193 - DNA, 455 bp, Homo sapiens; identical to SEQ ID NO: 20362
  misc_feature 455: n = A,T,C or G

SEQ ID NO: 26194 - DNA, 618 bp, Homo sapiens
  misc_feature 613, 614, 615, 616, 617, 618: n = A,T,C or G
acgggttaacatttaaagaatctacattatagataacattttattgcaagtaaatgtatttcaaaatttgttattggttttgtatgagattattctcagcctacttcattatcaagctatattattttattaatgtagttcgatgatcttacagcaaagctgaaagctgtatcttcaaaatatgtctatttgactaaaaagttattcaacaggagttattatctataaaaaaatacaacaggaatataaaaaacttgaggataaaaagatgttggaaaaagtaatattaaatcttaaaaaacgtatggaaactacacattggtggagacacattggtgaagtacaaaaatataaattggatctagaagaaagggcaatgcaggcaatggaaaaattagtacaaatccctttacagtaatgattctcagtgtggaggcatttgattattaagacccattgacatgagaatacatcctctgcctataaaaatcctggaagaaaacctaggaaatattcacctggacattgcacttggcaatgaatttatggatagaaaatgccgttgaaagatatttcattaaaggagaaaaagtaagaatacagctttaccgcnnnnnn

SEQ ID NO: 26195 - DNA, 638 bp, Homo sapiens; identical to SEQ ID NO: 20363

SEQ ID NO: 26196 - DNA, 447 bp, Homo sapiens; identical to SEQ ID NO: 20364
  misc_feature 443, 444, 445, 446, 447: n = A,T,C or G

SEQ ID NO: 26197 - DNA, 1529 bp, Homo sapiens; identical to SEQ ID NO: 20365
  misc_feature 1, 1485, 1495, 1500, 1527, 1528, 1529: n = A,T,C or G

SEQ ID NO: 26198 - DNA, 1189 bp, Homo sapiens; identical to SEQ ID NO: 20185
  misc_feature 1179, 1180, 1181, 1182, 1183, 1184, 1185, 1186, 1187, 1188,1189: n = A,T,C or G

SEQ ID NO: 26199 - DNA, 1098 bp, Homo sapiens; identical to SEQ ID NO: 20367
  misc_feature 1097, 1098: n = A,T,C or G

SEQ ID NO: 26200 - DNA, 571 bp, Homo sapiens; identical to SEQ ID NO: 20123
  misc_feature 1, 2, 3, 4, 5, 6, 7, 8, 9, 10, 11, 567, 568, 569, 570, 571: n = A,T,C or G

SEQ ID NO: 26201 - DNA, 617 bp, Homo sapiens; identical to SEQ ID NO: 20325

SEQ ID NO: 26202 - DNA, 562 bp, Homo sapiens; identical to SEQ ID NO: 20370

SEQ ID NO: 26203 - DNA, 1189 bp, Homo sapiens; identical to SEQ ID NO: 20185
  misc_feature 1179, 1180, 1181, 1182, 1183, 1184, 1185, 1186, 1187, 1188,1189: n = A,T,C or G

SEQ ID NO: 26204 - DNA, 527 bp, Homo sapiens; identical to SEQ ID NO: 20372
  misc_feature 1: n = A,T,C or G

SEQ ID NO: 26205 - DNA, 1189 bp, Homo sapiens; identical to SEQ ID NO: 20185
  misc_feature 1179, 1180, 1181, 1182, 1183, 1184, 1185, 1186, 1187, 1188,1189: n = A,T,C or G

SEQ ID NO: 26206 - DNA, 529 bp, Homo sapiens; identical to SEQ ID NO: 20275

SEQ ID NO: 26207 - DNA, 532 bp, Homo sapiens; identical to SEQ ID NO: 20375
  misc_feature 1, 520, 521, 522, 523, 524, 525, 526, 527, 528, 529, 530,531, 532: n = A,T,C or G

SEQ ID NO: 26208 - DNA, 406 bp, Homo sapiens; identical to SEQ ID NO: 20376
  misc_feature 406: n = A,T,C or G

SEQ ID NO: 26209 - DNA, 811 bp, Homo sapiens; identical to SEQ ID NO: 20377
  misc_feature 804, 805, 806, 807, 808, 809, 810, 811: n = A,T,C or G

SEQ ID NO: 26210 - DNA, 1108 bp, Homo sapiens; identical to SEQ ID NO: 20121
  misc_feature 1, 2, 1103, 1104, 1105, 1106, 1107, 1108: n = A,T,C or G

SEQ ID NO: 26211 - DNA, 401 bp, Homo sapiens; identical to SEQ ID NO: 20379

SEQ ID NO: 26212 - DNA, 1189 bp, Homo sapiens; identical to SEQ ID NO: 20185
  misc_feature 1179, 1180, 1181, 1182, 1183, 1184, 1185, 1186, 1187, 1188,1189: n = A,T,C or G

SEQ ID NO: 26213 - DNA, 619 bp, Homo sapiens; identical to SEQ ID NO: 20381

SEQ ID NO: 26214 - DNA, 401 bp, Homo sapiens; identical to SEQ ID NO: 20382
  misc_feature 400, 401: n = A,T,C or G

SEQ ID NO: 26215 - DNA, 404 bp, Homo sapiens; identical to SEQ ID NO: 20629
  misc_feature 404: n = A,T,C or G

SEQ ID NO: 26216 - DNA, 557 bp, Homo sapiens; identical to SEQ ID NO: 20384
  misc_feature 556, 557: n = A,T,C or G

SEQ ID NO: 26217 - DNA, 1641 bp, Homo sapiens; identical to SEQ ID NO: 20385
  misc_feature 1, 2, 1626, 1627, 1628, 1629, 1630, 1631, 1632, 1633, 1634,1635, 1636, 1637, 1638, 1639, 1640, 1641: n = A,T,C or G

SEQ ID NO: 26218 - DNA, 961 bp, Homo sapiens; identical to SEQ ID NO: 20386
  misc_feature 958, 959, 960, 961: n = A,T,C or G

SEQ ID NO: 26219 - DNA, 420 bp, Homo sapiens; identical to SEQ ID NO: 20387
  misc_feature 420: n = A,T,C or G

SEQ ID NO: 26220 - DNA, 571 bp, Homo sapiens; identical to SEQ ID NO: 20123
  misc_feature 1, 2, 3, 4, 5, 6, 7, 8, 9, 10, 11, 567, 568, 569, 570, 571: n = A,T,C or G

SEQ ID NO: 26221 - DNA, 642 bp, Homo sapiens; identical to SEQ ID NO: 20389

SEQ ID NO: 26222 - DNA, 1380 bp, Homo sapiens; identical to SEQ ID NO: 20118
  misc_feature 1380: n = A,T,C or G

SEQ ID NO: 26223 - DNA, 538 bp, Homo sapiens; identical to SEQ ID NO: 20391
  misc_feature 1, 2, 3, 4, 5, 6, 7, 8, 9, 10, 11, 12, 13, 536, 537, 538: n = A,T,C or G

SEQ ID NO: 26224 - DNA, 554 bp, Homo sapiens; identical to SEQ ID NO: 20358

SEQ ID NO: 26225 - DNA, 423 bp, Homo sapiens; identical to SEQ ID NO: 20393

SEQ ID NO: 26226 - DNA, 466 bp, Homo sapiens; identical to SEQ ID NO: 20303
  misc_feature 1, 2, 3, 466: n = A,T,C or G

SEQ ID NO: 26227 - DNA, 409 bp, Homo sapiens; identical to SEQ ID NO: 20395
  misc_feature 409: n = A,T,C or G

SEQ ID NO: 26228 - DNA, 779 bp, Homo sapiens; identical to SEQ ID NO: 20396
  misc_feature 774, 775, 776, 777, 778, 779: n = A,T,C or G

SEQ ID NO: 26229 - DNA, 403 bp, Homo sapiens; identical to SEQ ID NO: 20397
  misc_feature 403: n = A,T,C or G

SEQ ID NO: 26230 - DNA, 809 bp, Homo sapiens; identical to SEQ ID NO: 20398
  misc_feature 1, 2, 3, 4, 5, 6, 7, 8, 9, 10, 11, 12, 13, 14, 15, 16, 17,18, 19, 20, 21, 22, 23, 24, 25, 809: n = A,T,C or G

SEQ ID NO: 26231 - DNA, 1361 bp, Homo sapiens; identical to SEQ ID NO: 20142
  misc_feature 1, 2, 3, 4, 5, 6, 7, 8, 9, 10, 11, 12, 13: n = A,T,C or G

SEQ ID NO: 26232 - DNA, 510 bp, Homo sapiens; identical to SEQ ID NO: 20400
  misc_feature 508, 509, 510: n = A,T,C or G

SEQ ID NO: 26233 - DNA, 642 bp, Homo sapiens; identical to SEQ ID NO: 20389

SEQ ID NO: 26234 - DNA, 1361 bp, Homo sapiens; identical to SEQ ID NO: 20142
  misc_feature 1, 2, 3, 4, 5, 6, 7, 8, 9, 10, 11, 12, 13: n = A,T,C or G

SEQ ID NO: 26235 - DNA, 1592 bp, Homo sapiens
ccaagaacgtttgaaagcaaaaccatagggttggagggttcctcttttgtaagctgtaggagtcccagggggatgtatgggagacacttagtgacttttaaattgattctgagctgtgatcactggtgttaagaaattatgtcctcttcttgaggggtgtacaaaatggggagtttaataataatcctctgaagcgtgaaatgaattacttagtgtctactgcaagccaggctcttgcagacacaaggctgtttggggacaacagtctaaccttcaaaagatgtgtaagagtgttctgttgggaatggcagctggcagagcagcatatataagatggttatgttcacgttttttaaagtgtgtgtatcctttatacctatgtttttgtacctagaaaaatacgtaaatttatacctagaaaatatctgaaaggttatgtattaaactgttaacggggtggattggtggcttatagggtagggggctaggcattttcacttttaatacctgtatttttttgaggatttgttttacttgggtgtcacattcataatttttaatcctttaaggagaaaaatgtgcttattaaatttttggtctctgaatgctaccaagtcttagtcatacagaacaatatgctgcaactgtttacaattcctaaaactgtaaactcctcaaggacttggaggctaaacatgaagaatataaaattaagttgacaatcactgtctcctgcataacactgacttcacttctcttgagaaatgtgcatctgctaatccatatttattactttttaggggtgggtgaacccataaataagatactgttctttgaatgcctttagctggtgttatttaccagtaatgcttggagaaagaatccaaaattacccccactaaaatgctcacgacccagttgtttctgtgtttgtcaaagtgtttctggtatattctagaatataccaaagataattacttgaatcatttagaaaattttacattatatcctcttataaggcacttggaaattcacccttttttttttttcggcttggctttctaaatgtactttaacatcaatttataatattaagagttcctaaggagagagatttcttagaagaataatcgtggcttgtcttagagccacagcctttcacaatctgaagtgaatggtgcagagagctttcttgtcaagtcgtatgtttcttcctgcagctcggcttgcccttcccctgcttgtgccgtgtaccctgtaacactatgtttggatcccagcatcagatggtgagttctacttttggtttgtaaaatcatgtgggattgtgtttggaaactgcctttcaagtgaagttctttttgctggcctccagataattagtaacttactgatgtattgcttggacccttgcattgtgtaatatatgcttctgttaatatgtgaatgtccatgaaggttggttggtatataggtcaggagcacctggcttttaaggagtcttgtaattactgtatcacctgctttaagtagaaacatggcagctcaattaagcaccagaaatttcttcccacgcgtccgcccacgcgtcc

SEQ ID NO: 26236 - DNA, 571 bp, Homo sapiens; identical to SEQ ID NO: 20123
  misc_feature 1, 2, 3, 4, 5, 6, 7, 8, 9, 10, 11, 567, 568, 569, 570, 571: n = A,T,C or G

SEQ ID NO: 26237 - DNA, 629 bp, Homo sapiens; identical to SEQ ID NO: 20404
  misc_feature 618, 619, 620, 621, 622, 623, 624, 625, 626, 627, 628, 629: n = A,T,C or G

SEQ ID NO: 26238 - DNA, 351 bp, Homo sapiens; identical to SEQ ID NO: 20405
  misc_feature 344, 345, 346, 347, 348, 349, 350, 351: n = A,T,C or G

SEQ ID NO: 26239 - DNA, 335 bp, Homo sapiens; identical to SEQ ID NO: 20406

SEQ ID NO: 26240 - DNA, 393 bp, Homo sapiens; identical to SEQ ID NO: 20407

SEQ ID NO: 26241 - DNA, 924 bp, Homo sapiens; identical to SEQ ID NO: 20408

SEQ ID NO: 26242 - DNA, 411 bp, Homo sapiens; identical to SEQ ID NO: 20409

SEQ ID NO: 26243 - DNA, 517 bp, Homo sapiens; identical to SEQ ID NO: 20410

SEQ ID NO: 26244 - DNA, 421 bp, Homo sapiens; identical to SEQ ID NO: 20411

SEQ ID NO: 26245 - DNA, 406 bp, Homo sapiens; identical to SEQ ID NO: 20412
  misc_feature 400, 401, 402, 403, 404, 405, 406: n = A,T,C or G

SEQ ID NO: 26246 - DNA, 434 bp, Homo sapiens; identical to SEQ ID NO: 20413

SEQ ID NO: 26247 - DNA, 424 bp, Homo sapiens; identical to SEQ ID NO: 20414
  misc_feature 421, 422, 423, 424: n = A,T,C or G

SEQ ID NO: 26248 - DNA, 457 bp, Homo sapiens; identical to SEQ ID NO: 20415
  misc_feature 456, 457: n = A,T,C or G

SEQ ID NO: 26249 - DNA, 891 bp, Homo sapiens; identical to SEQ ID NO: 20416

SEQ ID NO: 26250 - DNA, 685 bp, Homo sapiens; identical to SEQ ID NO: 20417
  misc_feature 1, 2, 3, 4, 5, 6: n = A,T,C or G

SEQ ID NO: 26251 - DNA, 1189 bp, Homo sapiens; identical to SEQ ID NO: 20185
  misc_feature 1179, 1180, 1181, 1182, 1183, 1184, 1185, 1186, 1187, 1188,1189: n = A,T,C or G

SEQ ID NO: 26252 - DNA, 1211 bp, Homo sapiens; identical to SEQ ID NO: 20419
  misc_feature 1207, 1208, 1209, 1210, 1211: n = A,T,C or G

SEQ ID NO: 26253 - DNA, 427 bp, Homo sapiens; identical to SEQ ID NO: 20085

SEQ ID NO: 26254 - DNA, 898 bp, Homo sapiens; identical to SEQ ID NO: 20210
  misc_feature 898: n = A,T,C or G

SEQ ID NO: 26255 - DNA, 470 bp, Homo sapiens; identical to SEQ ID NO: 20422
  misc_feature 469, 470: n = A,T,C or G

SEQ ID NO: 26256 - DNA, 506 bp, Homo sapiens; identical to SEQ ID NO: 20423
  misc_feature 506: n = A,T,C or G

SEQ ID NO: 26257 - DNA, 619 bp, Homo sapiens; identical to SEQ ID NO: 20381

SEQ ID NO: 26258 - DNA, 387 bp, Homo sapiens; identical to SEQ ID NO: 20425
  misc_feature 1: n = A,T,C or G

SEQ ID NO: 26259 - DNA, 668 bp, Homo sapiens; identical to SEQ ID NO: 20192

SEQ ID NO: 26260 - DNA, 522 bp, Homo sapiens; identical to SEQ ID NO: 20427
  misc_feature 1, 2, 500, 518, 519, 520, 521, 522: n = A,T,C or G

SEQ ID NO: 26261 - DNA, 757 bp, Homo sapiens; identical to SEQ ID NO: 20428
  misc_feature 1, 2, 3, 4, 5: n = A,T,C or G

SEQ ID NO: 26262 - DNA, 396 bp, Homo sapiens; identical to SEQ ID NO: 20429
  misc_feature 395, 396: n = A,T,C or G

SEQ ID NO: 26263 - DNA, 409 bp, Homo sapiens; identical to SEQ ID NO: 20670
  misc_feature 409: n = A,T,C or G

SEQ ID NO: 26264 - DNA, 1128 bp, Homo sapiens; identical to SEQ ID NO: 20289
  misc_feature 1, 2, 1127, 1128: n = A,T,C or G

SEQ ID NO: 26265 - DNA, 381 bp, Homo sapiens; identical to SEQ ID NO: 20431

SEQ ID NO: 26266 - DNA, 379 bp, Homo sapiens; identical to SEQ ID NO: 20432
  misc_feature 379: n = A,T,C or G

SEQ ID NO: 26267 - DNA, 394 bp, Homo sapiens; identical to SEQ ID NO: 20433

SEQ ID NO: 26268 - DNA, 631 bp, Homo sapiens; identical to SEQ ID NO: 20434

SEQ ID NO: 26269 - DNA, 895 bp, Homo sapiens; identical to SEQ ID NO: 20435
  misc_feature 1, 2, 3, 4, 5, 6, 7, 8, 9, 884, 895: n = A,T,C or G

SEQ ID NO: 26270 - DNA, 2491 bp, Homo sapiens; identical to SEQ ID NO: 20436

SEQ ID NO: 26271 - DNA, 421 bp, Homo sapiens; identical to SEQ ID NO: 20411

SEQ ID NO: 26272 - DNA, 538 bp, Homo sapiens; identical to SEQ ID NO: 20438

SEQ ID NO: 26273 - DNA, 1189 bp, Homo sapiens; identical to SEQ ID NO: 20185
  misc_feature 1179, 1180, 1181, 1182, 1183, 1184, 1185, 1186, 1187, 1188,1189: n = A,T,C or G

SEQ ID NO: 26274 - DNA, 579 bp, Homo sapiens; identical to SEQ ID NO: 20440
  misc_feature 1, 2, 578, 579: n = A,T,C or G

SEQ ID NO: 26275 - DNA, 727 bp, Homo sapiens; identical to SEQ ID NO: 20441
  misc_feature 1: n = A,T,C or G

SEQ ID NO: 26276 - DNA, 554 bp, Homo sapiens; identical to SEQ ID NO: 20358

SEQ ID NO: 26277 - DNA, 1189 bp, Homo sapiens; identical to SEQ ID NO: 20185
  misc_feature 1179, 1180, 1181, 1182, 1183, 1184, 1185, 1186, 1187, 1188,1189: n = A,T,C or G

SEQ ID NO: 26278 - DNA, 491 bp, Homo sapiens; identical to SEQ ID NO: 20444
  misc_feature 382, 489, 490, 491: n = A,T,C or G

SEQ ID NO: 26279 - DNA, 1076 bp, Homo sapiens; identical to SEQ ID NO: 20090
  misc_feature 1, 2, 3, 4, 5, 6, 7, 8, 9, 10, 11, 12, 13, 14, 15, 16, 17: n = A,T,C or G

SEQ ID NO: 26280 - DNA, 656 bp, Homo sapiens; identical to SEQ ID NO: 20445
  misc_feature 1, 2, 3, 4, 5, 6, 7, 8, 9, 10, 11, 12, 13, 14, 15, 16, 17: n = A,T,C or G

SEQ ID NO: 26281 - DNA, 3983 bp, Homo sapiens; identical to SEQ ID NO: 21101

SEQ ID NO: 26282 - DNA, 594 bp, Homo sapiens; identical to SEQ ID NO: 20446
  misc_feature 586, 587, 588, 589, 590, 591, 592, 593, 594: n = A,T,C or G

SEQ ID NO: 26283 - DNA, 538 bp, Homo sapiens; identical to SEQ ID NO: 20391
  misc_feature 1, 2, 3, 4, 5, 6, 7, 8, 9, 10, 11, 12, 13, 536, 537, 538: n = A,T,C or G

SEQ ID NO: 26284 - DNA, 619 bp, Homo sapiens; identical to SEQ ID NO: 20381

SEQ ID NO: 26285 - DNA, 583 bp, Homo sapiens; identical to SEQ ID NO: 20449
  misc_feature 569, 583: n = A,T,C or G

SEQ ID NO: 26286 - DNA, 719 bp, Homo sapiens; identical to SEQ ID NO: 20450
  misc_feature 1, 2: n = A,T,C or G

SEQ ID NO: 26287 - DNA, 656 bp, Homo sapiens; identical to SEQ ID NO: 20451

SEQ ID NO: 26288 - DNA, 367 bp, Homo sapiens; identical to SEQ ID NO: 20452
  misc_feature 365, 366, 367: n = A,T,C or G

SEQ ID NO: 26289 - DNA, 1380 bp, Homo sapiens; identical to SEQ ID NO: 20118
  misc_feature 1380: n = A,T,C or G

SEQ ID NO: 26290 - DNA, 1176 bp, Homo sapiens; identical to SEQ ID NO: 20454
  misc_feature 1, 503, 572, 588, 605, 609, 610, 618, 626, 633, 636, 651,655, 659, 679, 689, 723, 728, 745, 750, 756, 764, 770, 783,804, 808, 822, 823, 835, 837, 841, 848, 852, 882, 885, 897,905, 915, 918, 919, 927, 933, 934, 938, 942, 954, 958: n = A,T,C or G
  misc_feature 972, 983, 1005, 1035, 1045, 1057, 1072, 1077, 1086, 1094,1105, 1110, 1115, 1123, 1141, 1147, 1154, 1155, 1156, 1157,1158, 1159, 1160, 1161, 1162, 1163, 1164, 1165, 1166, 1167,1168, 1169, 1170, 1171, 1172, 1173, 1174, 1175, 1176: n = A,T,C or G

SEQ ID NO: 26291 - DNA, 668 bp, Homo sapiens; identical to SEQ ID NO: 20192

SEQ ID NO: 26292 - DNA, 668 bp, Homo sapiens; identical to SEQ ID NO: 20192

SEQ ID NO: 26293 - DNA, 389 bp, Homo sapiens; identical to SEQ ID NO: 20457
  misc_feature 389: n = A,T,C or G

SEQ ID NO: 26294 - DNA, 510 bp, Homo sapiens; identical to SEQ ID NO: 20400
  misc_feature 508, 509, 510: n = A,T,C or G

SEQ ID NO: 26295 - DNA, 471 bp, Homo sapiens; identical to SEQ ID NO: 20459
  misc_feature 469, 470, 471: n = A,T,C or G

SEQ ID NO: 26296 - DNA, 668 bp, Homo sapiens; identical to SEQ ID NO: 20192

SEQ ID NO: 26297 - DNA, 546 bp, Homo sapiens; identical to SEQ ID NO: 20461
  misc_feature 546: n = A,T,C or G

SEQ ID NO: 26298 - DNA, 485 bp, Homo sapiens; identical to SEQ ID NO: 20462
  misc_feature 485: n = A,T,C or G

SEQ ID NO: 26299 - DNA, 420 bp, Homo sapiens; identical to SEQ ID NO: 20387
  misc_feature 420: n = A,T,C or G

SEQ ID NO: 26300 - DNA, 667 bp, Homo sapiens; identical to SEQ ID NO: 20464

SEQ ID NO: 26301 - DNA, 528 bp, Homo sapiens; identical to SEQ ID NO: 20160

SEQ ID NO: 26302 - DNA, 455 bp, Homo sapiens; identical to SEQ ID NO: 20466
  misc_feature 453, 454, 455: n = A,T,C or G

SEQ ID NO: 26303 - DNA, 486 bp, Homo sapiens; identical to SEQ ID NO: 20467
  misc_feature 479, 480, 481, 482, 483, 484, 485, 486: n = A,T,C or G

SEQ ID NO: 26304 - DNA, 1380 bp, Homo sapiens; identical to SEQ ID NO: 20118
  misc_feature 1380: n = A,T,C or G

SEQ ID NO: 26305 - DNA, 470 bp, Homo sapiens; identical to SEQ ID NO: 20422
  misc_feature 469, 470: n = A,T,C or G

SEQ ID NO: 26306 - DNA, 642 bp, Homo sapiens; identical to SEQ ID NO: 20389

SEQ ID NO: 26307 - DNA, 1189 bp, Homo sapiens; identical to SEQ ID NO: 20185
  misc_feature 1179, 1180, 1181, 1182, 1183, 1184, 1185, 1186, 1187, 1188,1189: n = A,T,C or G

SEQ ID NO: 26308 - DNA, 1098 bp, Homo sapiens; identical to SEQ ID NO: 20367
  misc_feature 1097, 1098: n = A,T,C or G

SEQ ID NO: 26309 - DNA, 906 bp, Homo sapiens; identical to SEQ ID NO: 20473
  misc_feature 1, 2, 3, 4, 5, 6, 7, 8, 9, 10, 11, 12, 880, 881, 882, 883,884, 885, 886, 887, 888, 889, 890, 891, 892, 893, 894, 895,896, 897, 898, 899, 900, 901, 902, 903, 904, 905, 906: n = A,T,C or G

SEQ ID NO: 26310 - DNA, 378 bp, Homo sapiens; identical to SEQ ID NO: 20474

SEQ ID NO: 26311 - DNA, 619 bp, Homo sapiens; identical to SEQ ID NO: 20475
  misc_feature 619: n = A,T,C or G

SEQ ID NO: 26312 - DNA, 1076 bp, Homo sapiens; identical to SEQ ID NO: 20090
  misc_feature 1, 2, 3, 4, 5, 6, 7, 8, 9, 10, 11, 12, 13, 14, 15, 16, 17: n = A,T,C or G

SEQ ID NO: 26313 - DNA, 741 bp, Homo sapiens; identical to SEQ ID NO: 20131

SEQ ID NO: 26314 - DNA, 1189 bp, Homo sapiens; identical to SEQ ID NO: 20185
  misc_feature 1179, 1180, 1181, 1182, 1183, 1184, 1185, 1186, 1187, 1188,1189: n = A,T,C or G

SEQ ID NO: 26315 - DNA, 448 bp, Homo sapiens; identical to SEQ ID NO: 20479
  misc_feature 1, 2: n = A,T,C or G

SEQ ID NO: 26316 - DNA, 396 bp, Homo sapiens; identical to SEQ ID NO: 20480

SEQ ID NO: 26317 - DNA, 533 bp, Homo sapiens; identical to SEQ ID NO: 20481
  misc_feature 533: n = A,T,C or G

SEQ ID NO: 26318 - DNA, 660 bp, Homo sapiens; identical to SEQ ID NO: 20482
  misc_feature 657, 658, 659, 660: n = A,T,C or G

SEQ ID NO: 26319 - DNA, 466 bp, Homo sapiens; identical to SEQ ID NO: 20303
  misc_feature 1, 2, 3, 466: n = A,T,C or G

SEQ ID NO: 26320 - DNA, 375 bp, Homo sapiens; identical to SEQ ID NO: 20484
  misc_feature 374, 375: n = A,T,C or G

SEQ ID NO: 26321 - DNA, 1022 bp, Homo sapiens; identical to SEQ ID NO: 21580
  misc_feature 1, 2, 3, 4, 5, 6, 7, 24, 26, 37, 1012, 1013, 1017, 1018,1019, 1020, 1021, 1022: n = A,T,C or G

SEQ ID NO: 26322 - DNA, 549 bp, Homo sapiens; identical to SEQ ID NO: 20485
  misc_feature 1, 2, 3: n = A,T,C or G

SEQ ID NO: 26323 - DNA, 420 bp, Homo sapiens; identical to SEQ ID NO: 20387
  misc_feature 420: n = A,T,C or G

SEQ ID NO: 26324 - DNA, 427 bp, Homo sapiens; identical to SEQ ID NO: 20487
  misc_feature 418, 419, 420, 421, 422, 423, 424, 425, 426, 427: n = A,T,C or G

SEQ ID NO: 26325 - DNA, 573 bp, Homo sapiens; identical to SEQ ID NO: 20488
  misc_feature 1, 2, 573: n = A,T,C or G

SEQ ID NO: 26326 - DNA, 538 bp, Homo sapiens; identical to SEQ ID NO: 20391
  misc_feature 1, 2, 3, 4, 5, 6, 7, 8, 9, 10, 11, 12, 13, 536, 537, 538: n = A,T,C or G

SEQ ID NO: 26327 - DNA, 638 bp, Homo sapiens; identical to SEQ ID NO: 20363

SEQ ID NO: 26328 - DNA, 761 bp, Homo sapiens; identical to SEQ ID NO: 20491
  misc_feature 761: n = A,T,C or G

SEQ ID NO: 26329 - DNA, 842 bp, Homo sapiens; identical to SEQ ID NO: 20492
  misc_feature 1, 2, 3, 836, 837, 838, 839, 840, 841, 842: n = A,T,C or G

SEQ ID NO: 26330 - DNA, 593 bp, Homo sapiens; identical to SEQ ID NO: 20493
  misc_feature 1, 589, 590, 591, 592, 593: n = A,T,C or G

SEQ ID NO: 26331 - DNA, 515 bp, Homo sapiens; identical to SEQ ID NO: 20177

SEQ ID NO: 26332 - DNA, 450 bp, Homo sapiens; identical to SEQ ID NO: 20208
  misc_feature 443, 444, 445, 446, 447, 448, 449, 450: n = A,T,C or G

SEQ ID NO: 26333 - DNA, 528 bp, Homo sapiens; identical to SEQ ID NO: 20160

SEQ ID NO: 26334 - DNA, 434 bp, Homo sapiens; identical to SEQ ID NO: 20413

SEQ ID NO: 26335 - DNA, 395 bp, Homo sapiens; identical to SEQ ID NO: 20498

SEQ ID NO: 26336 - DNA, 557 bp, Homo sapiens; identical to SEQ ID NO: 20384
  misc_feature 556, 557: n = A,T,C or G

SEQ ID NO: 26337 - DNA, 629 bp, Homo sapiens; identical to SEQ ID NO: 20144
  misc_feature 1, 2: n = A,T,C or G

SEQ ID NO: 26338 - DNA, 806 bp, Homo sapiens; identical to SEQ ID NO: 20267
  misc_feature 1: n = A,T,C or G

SEQ ID NO: 26339 - DNA, 1044 bp, Homo sapiens; identical to SEQ ID NO: 20502
  misc_feature 1, 2, 3, 4, 1043, 1044: n = A,T,C or G

SEQ ID NO: 26340 - DNA, 1108 bp, Homo sapiens; identical to SEQ ID NO: 20121
  misc_feature 1, 2, 1103, 1104, 1105, 1106, 1107, 1108: n = A,T,C or G

SEQ ID NO: 26341 - DNA, 546 bp, Homo sapiens; identical to SEQ ID NO: 20353

SEQ ID NO: 26342 - DNA, 1529 bp, Homo sapiens; identical to SEQ ID NO: 20365
  misc_feature 1, 1485, 1495, 1500, 1527, 1528, 1529: n = A,T,C or G

SEQ ID NO: 26343 - DNA, 274 bp, Homo sapiens; identical to SEQ ID NO: 20507

SEQ ID NO: 26344 - DNA, 466 bp, Homo sapiens; identical to SEQ ID NO: 20303
  misc_feature 1, 2, 3, 466: n = A,T,C or G

SEQ ID NO: 26345 - DNA, 492 bp, Homo sapiens; identical to SEQ ID NO: 20509
  misc_feature 488, 489, 490, 491, 492: n = A,T,C or G

SEQ ID NO: 26346 - DNA, 540 bp, Homo sapiens; identical to SEQ ID NO: 20510
  misc_feature 1: n = A,T,C or G

SEQ ID NO: 26347 - DNA, 405 bp, Homo sapiens; identical to SEQ ID NO: 20511
  misc_feature 404, 405: n = A,T,C or G

SEQ ID NO: 26348 - DNA, 466 bp, Homo sapiens; identical to SEQ ID NO: 20303
  misc_feature 1, 2, 3, 466: n = A,T,C or G

SEQ ID NO: 26349 - DNA, 1214 bp, Homo sapiens; identical to SEQ ID NO: 20119

SEQ ID NO: 26350 - DNA, 424 bp, Homo sapiens; identical to SEQ ID NO: 20514

SEQ ID NO: 26351 - DNA, 396 bp, Homo sapiens; identical to SEQ ID NO: 20515
  misc_feature 394, 395, 396: n = A,T,C or G

SEQ ID NO: 26352 - DNA, 822 bp, Homo sapiens; identical to SEQ ID NO: 20132
  misc_feature 1, 2: n = A,T,C or G

SEQ ID NO: 26353 - DNA, 402 bp, Homo sapiens; identical to SEQ ID NO: 20517
  misc_feature 1, 2: n = A,T,C or G

SEQ ID NO: 26354 - DNA, 389 bp, Homo sapiens
  misc_feature 389: n = A,T,C or G
acctactaaacagcaaagaaaccatcctagaggaaacaaagagcctgactcagaagcgctcaacaagcagcacattaagccagagcctaatttggtctgtggtctcttaactgtggagcctagaacaaggagaacaaagttgggggcagagagagacacaggacatgaggagcagaaatattgccatctccaagccaaagccacttagggatggaataggcagcaattgtttgaagggttaatgcatccatcccagctcctacttaagacagtgagaattatgcgcaaagttgtattggatttgcttttgggaaatgtgctttctggccgaatcaagtaaacatggaacaaaggcacacgcttgtgtaataaccactcagccaacatan

SEQ ID NO: 26355 - DNA, 518 bp, Homo sapiens; identical to SEQ ID NO: 20518
  misc_feature 518: n = A,T,C or G

SEQ ID NO: 26356 - DNA, 559 bp, Homo sapiens; identical to SEQ ID NO: 20519

SEQ ID NO: 26357 - DNA, 470 bp, Homo sapiens; identical to SEQ ID NO: 20422
  misc_feature 469, 470: n = A,T,C or G

SEQ ID NO: 26358 - DNA, 494 bp, Homo sapiens; identical to SEQ ID NO: 20521
  misc_feature 492, 493, 494: n = A,T,C or G

SEQ ID NO: 26359 - DNA, 525 bp, Homo sapiens; identical to SEQ ID NO: 20522
  misc_feature 522, 523, 524, 525: n = A,T,C or G

SEQ ID NO: 26360 - DNA, 785 bp, Homo sapiens; identical to SEQ ID NO: 20523

SEQ ID NO: 26361 - DNA, 865 bp, Homo sapiens; identical to SEQ ID NO: 20524

SEQ ID NO: 26362 - DNA, 405 bp, Homo sapiens; identical to SEQ ID NO: 20511
  misc_feature 404, 405: n = A,T,C or G

SEQ ID NO: 26363 - DNA, 423 bp, Homo sapiens; identical to SEQ ID NO: 20393

SEQ ID NO: 26364 - DNA, 858 bp, Homo sapiens; identical to SEQ ID NO: 20527
  misc_feature 1, 2, 858: n = A,T,C or G

SEQ ID NO: 26365 - DNA, 1409 bp, Homo sapiens; identical to SEQ ID NO: 20290
  misc_feature 1, 2, 3, 4, 5, 6, 7, 1409: n = A,T,C or G

SEQ ID NO: 26366 - DNA, 731 bp, Homo sapiens; identical to SEQ ID NO: 20529
  misc_feature 1, 2, 3, 4: n = A,T,C or G

SEQ ID NO: 26367 - DNA, 1409 bp, Homo sapiens; identical to SEQ ID NO: 20290
  misc_feature 1, 2, 3, 4, 5, 6, 7, 1409: n = A,T,C or G

SEQ ID NO: 26368 - DNA, 466 bp, Homo sapiens; identical to SEQ ID NO: 20303
  misc_feature 1, 2, 3, 466: n = A,T,C or G

SEQ ID NO: 26369 - DNA, 830 bp, Homo sapiens; identical to SEQ ID NO: 20532

SEQ ID NO: 26370 - DNA, 895 bp, Homo sapiens; identical to SEQ ID NO: 20435
  misc_feature 1, 2, 3, 4, 5, 6, 7, 8, 9, 884, 895: n = A,T,C or G

SEQ ID NO: 26371 - DNA, 582 bp, Homo sapiens; identical to SEQ ID NO: 20314
  misc_feature 582: n = A,T,C or G

SEQ ID NO: 26372 - DNA, 493 bp, Homo sapiens; identical to SEQ ID NO: 20535

SEQ ID NO: 26373 - DNA, 631 bp, Homo sapiens; identical to SEQ ID NO: 20434

SEQ ID NO: 26374 - DNA, 1044 bp, Homo sapiens; identical to SEQ ID NO: 20502
  misc_feature 1, 2, 3, 4, 1043, 1044: n = A,T,C or G

SEQ ID NO: 26375 - DNA, 416 bp, Homo sapiens; identical to SEQ ID NO: 20538

SEQ ID NO: 26376 - DNA, 375 bp, Homo sapiens; identical to SEQ ID NO: 20539

SEQ ID NO: 26377 - DNA, 668 bp, Homo sapiens; identical to SEQ ID NO: 20192

SEQ ID NO: 26378 - DNA, 571 bp, Homo sapiens; identical to SEQ ID NO: 20123
  misc_feature 1, 2, 3, 4, 5, 6, 7, 8, 9, 10, 11, 567, 568, 569, 570, 571: n = A,T,C or G

SEQ ID NO: 26379 - DNA, 707 bp, Homo sapiens; identical to SEQ ID NO: 20542

SEQ ID NO: 26380 - DNA, 513 bp, Homo sapiens; identical to SEQ ID NO: 20543

SEQ ID NO: 26381 - DNA, 375 bp, Homo sapiens; identical to SEQ ID NO: 20484
  misc_feature 374, 375: n = A,T,C or G

SEQ ID NO: 26382 - DNA, 383 bp, Homo sapiens; identical to SEQ ID NO: 20349
  misc_feature 383: n = A,T,C or G

SEQ ID NO: 26383 - DNA, 1380 bp, Homo sapiens; identical to SEQ ID NO: 20118
  misc_feature 1380: n = A,T,C or G

SEQ ID NO: 26384 - DNA, 1214 bp, Homo sapiens; identical to SEQ ID NO: 20119

SEQ ID NO: 26385 - DNA, 961 bp, Homo sapiens; identical to SEQ ID NO: 20386
  misc_feature 958, 959, 960, 961: n = A,T,C or G

SEQ ID NO: 26386 - DNA, 844 bp, Homo sapiens; identical to SEQ ID NO: 20549

SEQ ID NO: 26387 - DNA, 575 bp, Homo sapiens; identical to SEQ ID NO: 20550
  misc_feature 1, 2, 3, 4, 5: n = A,T,C or G

SEQ ID NO: 26388 - DNA, 372 bp, Homo sapiens; identical to SEQ ID NO: 20551
  misc_feature 1, 2, 3, 4, 5: n = A,T,C or G

SEQ ID NO: 26389 - DNA, 375 bp, Homo sapiens; identical to SEQ ID NO: 20552

SEQ ID NO: 26390 - DNA, 379 bp, Homo sapiens; identical to SEQ ID NO: 20553

SEQ ID NO: 26391 - DNA, 629 bp, Homo sapiens; identical to SEQ ID NO: 20404
  misc_feature 618, 619, 620, 621, 622, 623, 624, 625, 626, 627, 628, 629: n = A,T,C or G

SEQ ID NO: 26392 - DNA, 1608 bp, Homo sapiens; identical to SEQ ID NO: 20555
  misc_feature 1, 1594, 1595, 1596, 1597, 1598, 1599, 1600, 1601, 1602,1603, 1604, 1605, 1606, 1607, 1608: n = A,T,C or G

SEQ ID NO: 26393 - DNA, 485 bp, Homo sapiens; identical to SEQ ID NO: 20462
  misc_feature 485: n = A,T,C or G

SEQ ID NO: 26394 - DNA, 546 bp, Homo sapiens; identical to SEQ ID NO: 20461
  misc_feature 546: n = A,T,C or G

SEQ ID NO: 26395 - DNA, 597 bp, Homo sapiens; identical to SEQ ID NO: 20558

SEQ ID NO: 26396 - DNA, 513 bp, Homo sapiens; identical to SEQ ID NO: 20543

SEQ ID NO: 26397 - DNA, 2843 bp, Homo sapiens; identical to SEQ ID NO: 20339
  misc_feature 1, 2, 3, 4, 2815, 2816, 2817, 2818, 2819, 2820, 2821, 2822,2823, 2824, 2825, 2826, 2827, 2828, 2829, 2830, 2831, 2832,2833, 2834, 2835, 2836, 2837, 2838, 2839, 2840, 2841, 2842,2843: n = A,T,C or G

SEQ ID NO: 26398 - DNA, 379 bp, Homo sapiens; identical to SEQ ID NO: 20553

SEQ ID NO: 26399 - DNA, 1214 bp, Homo sapiens; identical to SEQ ID NO: 20119

SEQ ID NO: 26400 - DNA, 411 bp, Homo sapiens; identical to SEQ ID NO: 20409

SEQ ID NO: 26401 - DNA, 1108 bp, Homo sapiens; identical to SEQ ID NO: 20121
  misc_feature 1, 2, 1103, 1104, 1105, 1106, 1107, 1108: n = A,T,C or G

SEQ ID NO: 26402 - DNA, 939 bp, Homo sapiens; identical to SEQ ID NO: 20565
  misc_feature 1, 937, 938, 939: n = A,T,C or G

SEQ ID NO: 26403 - DNA, 939 bp, Homo sapiens; identical to SEQ ID NO: 20565
  misc_feature 1, 937, 938, 939: n = A,T,C or G

SEQ ID NO: 26404 - DNA, 745 bp, Homo sapiens; identical to SEQ ID NO: 20567
  misc_feature 745: n = A,T,C or G

SEQ ID NO: 26405 - DNA, 396 bp, Homo sapiens; identical to SEQ ID NO: 20480

SEQ ID NO: 26406 - DNA, 512 bp, Homo sapiens; identical to SEQ ID NO: 20569
  misc_feature 511, 512: n = A,T,C or G

SEQ ID NO: 26407 - DNA, 1231 bp, Homo sapiens; identical to SEQ ID NO: 20570
  misc_feature 791, 1228, 1229, 1230, 1231: n = A,T,C or G

SEQ ID NO: 26408 - DNA, 1522 bp, Homo sapiens; identical to SEQ ID NO: 20571
  misc_feature 1, 2, 440, 1404, 1459, 1467, 1520, 1521, 1522: n = A,T,C or G

SEQ ID NO: 26409 - DNA, 411 bp, Homo sapiens; identical to SEQ ID NO: 20409

SEQ ID NO: 26410 - DNA, 546 bp, Homo sapiens; identical to SEQ ID NO: 20353

SEQ ID NO: 26411 - DNA, 510 bp, Homo sapiens; identical to SEQ ID NO: 20400
  misc_feature 508, 509, 510: n = A,T,C or G

SEQ ID NO: 26412 - DNA, 642 bp, Homo sapiens; identical to SEQ ID NO: 20389

SEQ ID NO: 26413 - DNA, 552 bp, Homo sapiens; identical to SEQ ID NO: 20576
  misc_feature 1: n = A,T,C or G

SEQ ID NO: 26414 - DNA, 498 bp, Homo sapiens; identical to SEQ ID NO: 21110

SEQ ID NO: 26415 - DNA, 469 bp, Homo sapiens; identical to SEQ ID NO: 20577
  misc_feature 446, 455, 456, 457, 458, 459, 460, 461, 462, 463, 464, 465,466, 467, 468, 469: n = A,T,C or G

SEQ ID NO: 26416 - DNA, 961 bp, Homo sapiens; identical to SEQ ID NO: 20386
  misc_feature 958, 959, 960, 961: n = A,T,C or G

SEQ ID NO: 26417 - DNA, 378 bp, Homo sapiens; identical to SEQ ID NO: 20259
  misc_feature 378: n = A,T,C or G

SEQ ID NO: 26418 - DNA, 656 bp, Homo sapiens; identical to SEQ ID NO: 20451

SEQ ID NO: 26419 - DNA, 494 bp, Homo sapiens; identical to SEQ ID NO: 20521
  misc_feature 492, 493, 494: n = A,T,C or G

SEQ ID NO: 26420 - DNA, 381 bp, Homo sapiens; identical to SEQ ID NO: 20431

SEQ ID NO: 26421 - DNA, 572 bp, Homo sapiens; identical to SEQ ID NO: 20583
  misc_feature 571, 572: n = A,T,C or G

SEQ ID NO: 26422 - DNA, 1060 bp, Homo sapiens; identical to SEQ ID NO: 20584
  misc_feature 1, 2: n = A,T,C or G

SEQ ID NO: 26423 - DNA, 396 bp, Homo sapiens; identical to SEQ ID NO: 20585

SEQ ID NO: 26424 - DNA, 387 bp, Homo sapiens; identical to SEQ ID NO: 20586

SEQ ID NO: 26425 - DNA, 901 bp, Homo sapiens; identical to SEQ ID NO: 20587
  misc_feature 1, 886, 887, 888, 889, 890, 891, 892, 893, 894, 895, 896,897, 898, 899, 900, 901: n = A,T,C or G

SEQ ID NO: 26426 - DNA, 491 bp, Homo sapiens; identical to SEQ ID NO: 20444
  misc_feature 382, 489, 490, 491: n = A,T,C or G

SEQ ID NO: 26427 - DNA, 566 bp, Homo sapiens; identical to SEQ ID NO: 20589
  misc_feature 561, 562, 563, 564, 565, 566: n = A,T,C or G

SEQ ID NO: 26428 - DNA, 447 bp, Homo sapiens; identical to SEQ ID NO: 20364
  misc_feature 443, 444, 445, 446, 447: n = A,T,C or G

SEQ ID NO: 26429 - DNA, 423 bp, Homo sapiens; identical to SEQ ID NO: 20393

SEQ ID NO: 26430 - DNA, 455 bp, Homo sapiens; identical to SEQ ID NO: 20362
  misc_feature 455: n = A,T,C or G

SEQ ID NO: 26431 - DNA, 1641 bp, Homo sapiens; identical to SEQ ID NO: 20385
  misc_feature 1, 2, 1626, 1627, 1628, 1629, 1630, 1631, 1632, 1633, 1634,1635, 1636, 1637, 1638, 1639, 1640, 1641: n = A,T,C or G

SEQ ID NO: 26432 - DNA, 403 bp, Homo sapiens; identical to SEQ ID NO: 20397
  misc_feature 403: n = A,T,C or G

SEQ ID NO: 26433 - DNA, 545 bp, Homo sapiens; identical to SEQ ID NO: 20595
  misc_feature 524, 543, 544, 545: n = A,T,C or G

SEQ ID NO: 26434 - DNA, 1380 bp, Homo sapiens; identical to SEQ ID NO: 20118
  misc_feature 1380: n = A,T,C or G

SEQ ID NO: 26435 - DNA, 758 bp, Homo sapiens; identical to SEQ ID NO: 20597

SEQ ID NO: 26436 - DNA, 506 bp, Homo sapiens; identical to SEQ ID NO: 20423
  misc_feature 506: n = A,T,C or G

SEQ ID NO: 26437 - DNA, 466 bp, Homo sapiens; identical to SEQ ID NO: 20303
  misc_feature 1, 2, 3, 466: n = A,T,C or G

SEQ ID NO: 26438 - DNA, 538 bp, Homo sapiens; identical to SEQ ID NO: 20391
  misc_feature 1, 2, 3, 4, 5, 6, 7, 8, 9, 10, 11, 12, 13, 536, 537, 538: n = A,T,C or G

SEQ ID NO: 26439 - DNA, 965 bp, Homo sapiens; identical to SEQ ID NO: 20600
  misc_feature 964, 965: n = A,T,C or G

SEQ ID NO: 26440 - DNA, 785 bp, Homo sapiens; identical to SEQ ID NO: 20523

SEQ ID NO: 26441 - DNA, 593 bp, Homo sapiens; identical to SEQ ID NO: 20602
  misc_feature 1, 2, 3, 4, 588, 589, 590, 591, 592, 593: n = A,T,C or G

SEQ ID NO: 26442 - DNA, 1641 bp, Homo sapiens; identical to SEQ ID NO: 20385
  misc_feature 1, 2, 1626, 1627, 1628, 1629, 1630, 1631, 1632, 1633, 1634,1635, 1636, 1637, 1638, 1639, 1640, 1641: n = A,T,C or G

SEQ ID NO: 26443 - DNA, 588 bp, Homo sapiens; identical to SEQ ID NO: 20604

SEQ ID NO: 26444 - DNA, 411 bp, Homo sapiens; identical to SEQ ID NO: 20409

SEQ ID NO: 26445 - DNA, 668 bp, Homo sapiens; identical to SEQ ID NO: 20192

SEQ ID NO: 26446 - DNA, 668 bp, Homo sapiens; identical to SEQ ID NO: 20192

SEQ ID NO: 26447 - DNA, 1128 bp, Homo sapiens; identical to SEQ ID NO: 20289
  misc_feature 1, 2, 1127, 1128: n = A,T,C or G

SEQ ID NO: 26448 - DNA, 652 bp, Homo sapiens; identical to SEQ ID NO: 20609
  misc_feature 547, 548, 549, 550, 551, 552, 553, 554, 555, 556, 557, 558,559, 560, 561, 562, 563, 564, 565, 566, 567, 568, 569, 570,571, 572, 573, 574: n = A,T,C or G

SEQ ID NO: 26449 - DNA, 902 bp, Homo sapiens; identical to SEQ ID NO: 20356
  misc_feature 900, 901, 902: n = A,T,C or G

SEQ ID NO: 26450 - DNA, 604 bp, Homo sapiens; identical to SEQ ID NO: 20360
  misc_feature 596, 604: n = A,T,C or G

SEQ ID NO: 26451 - DNA, 370 bp, Homo sapiens; identical to SEQ ID NO: 20612

SEQ ID NO: 26452 - DNA, 501 bp, Homo sapiens; identical to SEQ ID NO: 20613
  misc_feature 1: n = A,T,C or G

SEQ ID NO: 26453 - DNA, 1189 bp, Homo sapiens; identical to SEQ ID NO: 20185
  misc_feature 1179, 1180, 1181, 1182, 1183, 1184, 1185, 1186, 1187, 1188,1189: n = A,T,C or G

SEQ ID NO: 26454 - DNA, 758 bp, Homo sapiens; identical to SEQ ID NO: 20597

SEQ ID NO: 26455 - DNA, 396 bp, Homo sapiens; identical to SEQ ID NO: 20585

SEQ ID NO: 26456 - DNA, 668 bp, Homo sapiens; identical to SEQ ID NO: 20192

SEQ ID NO: 26457 - DNA, 903 bp, Homo sapiens; identical to SEQ ID NO: 20618
  misc_feature 1, 2, 3, 4, 5, 6, 7, 8, 9, 10, 11, 12, 13, 14, 15, 899, 900,901, 902, 903: n = A,T,C or G

SEQ ID NO: 26458 - DNA, 631 bp, Homo sapiens; identical to SEQ ID NO: 20619
  misc_feature 629, 630, 631: n = A,T,C or G

SEQ ID NO: 26459 - DNA, 416 bp, Homo sapiens; identical to SEQ ID NO: 20538

SEQ ID NO: 26460 - DNA, 668 bp, Homo sapiens; identical to SEQ ID NO: 20192

SEQ ID NO: 26461 - DNA, 1189 bp, Homo sapiens; identical to SEQ ID NO: 20185
  misc_feature 1179, 1180, 1181, 1182, 1183, 1184, 1185, 1186, 1187, 1188,1189: n = A,T,C or G

SEQ ID NO: 26462 - DNA, 870 bp, Homo sapiens; identical to SEQ ID NO: 20623
  misc_feature 1, 2, 3, 4, 867, 868, 869, 870: n = A,T,C or G

SEQ ID NO: 26463 - DNA, 512 bp, Homo sapiens; identical to SEQ ID NO: 20569
  misc_feature 511, 512: n = A,T,C or G

SEQ ID NO: 26464 - DNA, 515 bp, Homo sapiens; identical to SEQ ID NO: 20177

SEQ ID NO: 26465 - DNA, 387 bp, Homo sapiens; identical to SEQ ID NO: 20626

SEQ ID NO: 26466 - DNA, 349 bp, Homo sapiens; identical to SEQ ID NO: 20627
  misc_feature 342, 343, 344, 345, 346, 347, 348, 349: n = A,T,C or G

SEQ ID NO: 26467 - DNA, 486 bp, Homo sapiens; identical to SEQ ID NO: 20467
  misc_feature 479, 480, 481, 482, 483, 484, 485, 486: n = A,T,C or G

SEQ ID NO: 26468 - DNA, 404 bp, Homo sapiens; identical to SEQ ID NO: 20629
  misc_feature 404: n = A,T,C or G

SEQ ID NO: 26469 - DNA, 369 bp, Homo sapiens; identical to SEQ ID NO: 20630
  misc_feature 364, 365, 366, 367, 368, 369: n = A,T,C or G

SEQ ID NO: 26470 - DNA, 376 bp, Homo sapiens; identical to SEQ ID NO: 20342
  misc_feature 376: n = A,T,C or G

SEQ ID NO: 26471 - DNA, 446 bp, Homo sapiens; identical to SEQ ID NO: 20632
  misc_feature 441, 442, 443, 444, 445, 446: n = A,T,C or G

SEQ ID NO: 26472 - DNA, 460 bp, Homo sapiens; identical to SEQ ID NO: 20633
  misc_feature 1, 460: n = A,T,C or G

SEQ ID NO: 26473 - DNA, 1380 bp, Homo sapiens; identical to SEQ ID NO: 20118
  misc_feature 1380: n = A,T,C or G

SEQ ID NO: 26474 - DNA, 1316 bp, Homo sapiens; identical to SEQ ID NO: 25082

SEQ ID NO: 26475 - DNA, 891 bp, Homo sapiens; identical to SEQ ID NO: 20416

SEQ ID NO: 26476 - DNA, 471 bp, Homo sapiens; identical to SEQ ID NO: 20637
  misc_feature 469, 470, 471: n = A,T,C or G

SEQ ID NO: 26477 - DNA, 759 bp, Homo sapiens; identical to SEQ ID NO: 20638
  misc_feature 749, 750, 751, 752, 753, 754, 755, 756, 757, 758, 759: n = A,T,C or G

SEQ ID NO: 26478 - DNA, 362 bp, Homo sapiens; identical to SEQ ID NO: 20639
  misc_feature 362: n = A,T,C or G

SEQ ID NO: 26479 - DNA, 589 bp, Homo sapiens; identical to SEQ ID NO: 20640
  misc_feature 522, 589: n = A,T,C or G

SEQ ID NO: 26480 - DNA, 642 bp, Homo sapiens; identical to SEQ ID NO: 20389

SEQ ID NO: 26481 - DNA, 617 bp, Homo sapiens; identical to SEQ ID NO: 20325

SEQ ID NO: 26482 - DNA, 896 bp, Homo sapiens; identical to SEQ ID NO: 20643
  misc_feature 891, 892, 893, 894, 895, 896: n = A,T,C or G

SEQ ID NO: 26483 - DNA, 387 bp, Homo sapiens; identical to SEQ ID NO: 20148
  misc_feature 380, 381, 382, 383, 384, 385, 386, 387: n = A,T,C or G

SEQ ID NO: 26484 - DNA, 515 bp, Homo sapiens; identical to SEQ ID NO: 20177

SEQ ID NO: 26485 - DNA, 420 bp, Homo sapiens; identical to SEQ ID NO: 20387
  misc_feature 420: n = A,T,C or G

SEQ ID NO: 26486 - DNA, 1020 bp, Homo sapiens; identical to SEQ ID NO: 20647
  misc_feature 1, 2, 3, 14, 20, 35, 42, 48, 81, 1019, 1020: n = A,T,C or G

SEQ ID NO: 26487 - DNA, 901 bp, Homo sapiens; identical to SEQ ID NO: 20587
  misc_feature 1, 886, 887, 888, 889, 890, 891, 892, 893, 894, 895, 896,897, 898, 899, 900, 901: n = A,T,C or G

SEQ ID NO: 26488 - DNA, 830 bp, Homo sapiens; identical to SEQ ID NO: 20532

SEQ ID NO: 26489 - DNA, 2012 bp, Homo sapiens; identical to SEQ ID NO: 20122

SEQ ID NO: 26490 - DNA, 466 bp, Homo sapiens; identical to SEQ ID NO: 20303
  misc_feature 1, 2, 3, 466: n = A,T,C or G

SEQ ID NO: 26491 - DNA, 367 bp, Homo sapiens; identical to SEQ ID NO: 20651
  misc_feature 367: n = A,T,C or G

SEQ ID NO: 26492 - DNA, 1380 bp, Homo sapiens; identical to SEQ ID NO: 20118
  misc_feature 1380: n = A,T,C or G

SEQ ID NO: 26493 - DNA, 594 bp, Homo sapiens; identical to SEQ ID NO: 20446
  misc_feature 586, 587, 588, 589, 590, 591, 592, 593, 594: n = A,T,C or G

SEQ ID NO: 26494 - DNA, 1098 bp, Homo sapiens; identical to SEQ ID NO: 20367
  misc_feature 1097, 1098: n = A,T,C or G

SEQ ID NO: 26495 - DNA, 586 bp, Homo sapiens; identical to SEQ ID NO: 20655
  misc_feature 1, 2, 3, 4, 5, 6, 7, 8, 9, 10, 11, 12: n = A,T,C or G

SEQ ID NO: 26496 - DNA, 686 bp, Homo sapiens; identical to SEQ ID NO: 20656
  misc_feature 1, 2, 3: n = A,T,C or G

SEQ ID NO: 26497 - DNA, 592 bp, Homo sapiens; identical to SEQ ID NO: 20657
  misc_feature 569, 592: n = A,T,C or G

SEQ ID NO: 26498 - DNA, 396 bp, Homo sapiens; identical to SEQ ID NO: 20658
  misc_feature 396: n = A,T,C or G

SEQ ID NO: 26499 - DNA, 450 bp, Homo sapiens; identical to SEQ ID NO: 20659
  misc_feature 448, 449, 450: n = A,T,C or G

SEQ ID NO: 26500 - DNA, 4515 bp, Homo sapiens; identical to SEQ ID NO: 20660

SEQ ID NO: 26501 - DNA, 662 bp, Homo sapiens; identical to SEQ ID NO: 20661
  misc_feature 656, 657, 658, 659, 660, 661, 662: n = A,T,C or G

SEQ ID NO: 26502 - DNA, 421 bp, Homo sapiens; identical to SEQ ID NO: 20662
  misc_feature 1, 2, 3, 4, 5: n = A,T,C or G

SEQ ID NO: 26503 - DNA, 404 bp, Homo sapiens; identical to SEQ ID NO: 20663
  misc_feature 404: n = A,T,C or G

SEQ ID NO: 26504 - DNA, 411 bp, Homo sapiens; identical to SEQ ID NO: 20409

SEQ ID NO: 26505 - DNA, 416 bp, Homo sapiens; identical to SEQ ID NO: 20665
  misc_feature 1, 2, 3, 4, 5, 6, 7, 8, 9, 10, 11, 12, 13, 14, 15, 16, 17,18, 19, 20, 407, 408, 409, 410, 411, 412, 413, 414, 415,416: n = A,T,C or G

SEQ ID NO: 26506 - DNA, 1409 bp, Homo sapiens; identical to SEQ ID NO: 20290
  misc_feature 1, 2, 3, 4, 5, 6, 7, 1409: n = A,T,C or G

SEQ ID NO: 26507 - DNA, 556 bp, Homo sapiens; identical to SEQ ID NO: 20162
  misc_feature 555, 556: n = A,T,C or G

SEQ ID NO: 26508 - DNA, 379 bp, Homo sapiens; identical to SEQ ID NO: 20432
  misc_feature 379: n = A,T,C or G

SEQ ID NO: 26509 - DNA, 727 bp, Homo sapiens; identical to SEQ ID NO: 20324

SEQ ID NO: 26510 - DNA, 409 bp, Homo sapiens; identical to SEQ ID NO: 20670
  misc_feature 409: n = A,T,C or G

SEQ ID NO: 26511 - DNA, 475 bp, Homo sapiens; identical to SEQ ID NO: 20671
  misc_feature 475: n = A,T,C or G

SEQ ID NO: 26512 - DNA, 1189 bp, Homo sapiens; identical to SEQ ID NO: 20185
  misc_feature 1179, 1180, 1181, 1182, 1183, 1184, 1185, 1186, 1187, 1188,1189: n = A,T,C or G

SEQ ID NO: 26513 - DNA, 520 bp, Homo sapiens; identical to SEQ ID NO: 20673
  misc_feature 520: n = A,T,C or G

SEQ ID NO: 26514 - DNA, 1096 bp, Homo sapiens; identical to SEQ ID NO: 20674
  misc_feature 1, 2, 3, 4, 5, 6, 7: n = A,T,C or G

SEQ ID NO: 26515 - DNA, 218 bp, Homo sapiens; identical to SEQ ID NO: 20675

SEQ ID NO: 26516 - DNA, 466 bp, Homo sapiens; identical to SEQ ID NO: 20303
  misc_feature 1, 2, 3, 466: n = A,T,C or G

SEQ ID NO: 26517 - DNA, 584 bp, Homo sapiens; identical to SEQ ID NO: 20677
  misc_feature 581, 582, 583, 584: n = A,T,C or G

SEQ ID NO: 26518 - DNA, 643 bp, Homo sapiens; identical to SEQ ID NO: 20678
  misc_feature 1, 2, 640, 641, 642, 643: n = A,T,C or G

SEQ ID NO: 26519 - DNA, 1023 bp, Homo sapiens; identical to SEQ ID NO: 20679
  misc_feature 1022, 1023: n = A,T,C or G

SEQ ID NO: 26520 - DNA, 668 bp, Homo sapiens; identical to SEQ ID NO: 20192

SEQ ID NO: 26521 - DNA, 377 bp, Homo sapiens; identical to SEQ ID NO: 20681
  misc_feature 1, 2, 3, 377: n = A,T,C or G

SEQ ID NO: 26522 - DNA, 466 bp, Homo sapiens; identical to SEQ ID NO: 20303
  misc_feature 1, 2, 3, 466: n = A,T,C or G

SEQ ID NO: 26523 - DNA, 485 bp, Homo sapiens; identical to SEQ ID NO: 20462
  misc_feature 485: n = A,T,C or G

SEQ ID NO: 26524 - DNA, 1044 bp, Homo sapiens; identical to SEQ ID NO: 20502
  misc_feature 1, 2, 3, 4, 1043, 1044: n = A,T,C or G

SEQ ID NO: 26525 - DNA, 450 bp, Homo sapiens; identical to SEQ ID NO: 20659
  misc_feature 448, 449, 450: n = A,T,C or G

SEQ ID NO: 26526 - DNA, 668 bp, Homo sapiens; identical to SEQ ID NO: 20192

SEQ ID NO: 26527 - DNA, 661 bp, Homo sapiens; identical to SEQ ID NO: 20687
  misc_feature 1, 2, 3, 4, 5, 6, 7, 8, 9, 10, 11, 12, 659, 660, 661: n = A,T,C or G

SEQ ID NO: 26528 - DNA, 651 bp, Homo sapiens; identical to SEQ ID NO: 20688
  misc_feature 651: n = A,T,C or G

SEQ ID NO: 26529 - DNA, 556 bp, Homo sapiens; identical to SEQ ID NO: 20162
  misc_feature 555, 556: n = A,T,C or G

SEQ ID NO: 26530 - DNA, 557 bp, Homo sapiens; identical to SEQ ID NO: 20384
  misc_feature 556, 557: n = A,T,C or G

SEQ ID NO: 26531 - DNA, 695 bp, Homo sapiens; identical to SEQ ID NO: 20691
  misc_feature 1, 52, 694, 695: n = A,T,C or G

SEQ ID NO: 26532 - DNA, 1060 bp, Homo sapiens; identical to SEQ ID NO: 20584
  misc_feature 1, 2: n = A,T,C or G

SEQ ID NO: 26533 - DNA, 405 bp, Homo sapiens; identical to SEQ ID NO: 20693
  misc_feature 403, 404, 405: n = A,T,C or G

SEQ ID NO: 26534 - DNA, 419 bp, Homo sapiens; identical to SEQ ID NO: 20332
  misc_feature 418, 419: n = A,T,C or G

SEQ ID NO: 26535 - DNA, 3855 bp, Homo sapiens; identical to SEQ ID NO: 20695
  misc_feature 1, 2, 3854, 3855: n = A,T,C or G

SEQ ID NO: 26536 - DNA, 389 bp, Homo sapiens; identical to SEQ ID NO: 20696

SEQ ID NO: 26537 - DNA, 758 bp, Homo sapiens; identical to SEQ ID NO: 20597

SEQ ID NO: 26538 - DNA, 549 bp, Homo sapiens; identical to SEQ ID NO: 20485
  misc_feature 1, 2, 3: n = A,T,C or G

SEQ ID NO: 26539 - DNA, 396 bp, Homo sapiens; identical to SEQ ID NO: 20515
  misc_feature 394, 395, 396: n = A,T,C or G

SEQ ID NO: 26540 - DNA, 446 bp, Homo sapiens; identical to SEQ ID NO: 20700
  misc_feature 1, 2, 446: n = A,T,C or G

SEQ ID NO: 26541 - DNA, 427 bp, Homo sapiens; identical to SEQ ID NO: 20085

SEQ ID NO: 26542 - DNA, 1361 bp, Homo sapiens; identical to SEQ ID NO: 20142
  misc_feature 1, 2, 3, 4, 5, 6, 7, 8, 9, 10, 11, 12, 13: n = A,T,C or G

SEQ ID NO: 26543 - DNA, 1060 bp, Homo sapiens; identical to SEQ ID NO: 20584
  misc_feature 1, 2: n = A,T,C or G

SEQ ID NO: 26544 - DNA, 741 bp, Homo sapiens; identical to SEQ ID NO: 20131

SEQ ID NO: 26545 - DNA, 385 bp, Homo sapiens; identical to SEQ ID NO: 20705
  misc_feature 385: n = A,T,C or G

SEQ ID NO: 26546 - DNA, 2012 bp, Homo sapiens; identical to SEQ ID NO: 20122

SEQ ID NO: 26547 - DNA, 414 bp, Homo sapiens; identical to SEQ ID NO: 20707
  misc_feature 1: n = A,T,C or G

SEQ ID NO: 26548 - DNA, 1365 bp, Homo sapiens; identical to SEQ ID NO: 20708
  misc_feature 1348: n = A,T,C or G

SEQ ID NO: 26549 - DNA, 628 bp, Homo sapiens; identical to SEQ ID NO: 20709
  misc_feature 624, 625, 626, 627, 628: n = A,T,C or G

SEQ ID NO: 26550 - DNA, 658 bp, Homo sapiens; identical to SEQ ID NO: 20710
  misc_feature 606, 656, 657, 658: n = A,T,C or G

SEQ ID NO: 26551 - DNA, 3983 bp, Homo sapiens; identical to SEQ ID NO: 21101

SEQ ID NO: 26552 - DNA, 1079 bp, Homo sapiens
ccccccctcggaagtcttctagaattaattaacgcggggctctcgagtccgggccgcaagtcccagacgctgcccatggaggcgtccagcgagccgccgctggatgctaagtccgatgtcaccaaccagcttgtagattttcagtggaaactgggtatggctgtgagctcagacacttgcagatctcttaagtatccttacgttgcagtgatgctaaaagtggcagatcattcaggccaagtaaagaccaagtgctttgaaatgacgattccacagtttcagaatttctacagacagttcaaggaaattgctgcagttattgaaacggtgtgaagacggattctttggttgataaattgctatcattctaaagtcatggacttcactttcggcaacaaaactaaataaggatggaacatttattgaatgaaaaatgcacttttgtttttccatttttttaaataataaaaatcagacaaaccgggtgaatctgatggaaacaaggtctttagataagcggcccgaagcttatccccttaggtgcgggtaaattttaccttgggacttggccgcggtgttacaacgcgggtggcctgtggaaactctgtgcggttcgcccacattaatcgccccttgagggcgattcccgccgttgtccacgcggggcgatatgtcgcgacaaggcccggaccgtgttgccgtgtccacagatggggccccccgaagtcgcgcttggagcgtccccctttgggcgcgtttgacgcgcgtggggtttgtgggtatgcgcgggagccggggaaccttgtagtgcgctgtcccgggggtttagggtgtcgccgcctttcgcggtttccggggtctcccgaagtgtattaggggcccctggcgcccagagagtgtttgccgccccacatatgtttgggggcgctgtgtgccccccgagggagctcttcgggagcggcggtatatgtcctttgaaacaccgctctcttttttgccgcgccgcaggagtgtataggaggagttgtgcgcgtggcttacgtcaccaaagtggttgtttctgagagccgtccggccta

SEQ ID NO: 26553 - DNA, 447 bp, Homo sapiens; identical to SEQ ID NO: 20364
  misc_feature 443, 444, 445, 446, 447: n = A,T,C or G

SEQ ID NO: 26554 - DNA, 593 bp, Homo sapiens; identical to SEQ ID NO: 20493
  misc_feature 1, 589, 590, 591, 592, 593: n = A,T,C or G

SEQ ID NO: 26555 - DNA, 811 bp, Homo sapiens; identical to SEQ ID NO: 20377
  misc_feature 804, 805, 806, 807, 808, 809, 810, 811: n = A,T,C or G

SEQ ID NO: 26556 - DNA, 1126 bp, Homo sapiens; identical to SEQ ID NO: 20715

SEQ ID NO: 26557 - DNA, 638 bp, Homo sapiens; identical to SEQ ID NO: 20363

SEQ ID NO: 26558 - DNA, 466 bp, Homo sapiens; identical to SEQ ID NO: 20303
  misc_feature 1, 2, 3, 466: n = A,T,C or G

SEQ ID NO: 26559 - DNA, 629 bp, Homo sapiens; identical to SEQ ID NO: 20404
  misc_feature 618, 619, 620, 621, 622, 623, 624, 625, 626, 627, 628, 629: n = A,T,C or G

SEQ ID NO: 26560 - DNA, 446 bp, Homo sapiens; identical to SEQ ID NO: 20700
  misc_feature 1, 2, 446: n = A,T,C or G

SEQ ID NO: 26561 - DNA, 593 bp, Homo sapiens; identical to SEQ ID NO: 20493
  misc_feature 1, 589, 590, 591, 592, 593: n = A,T,C or G

SEQ ID NO: 26562 - DNA, 619 bp, Homo sapiens; identical to SEQ ID NO: 20381

SEQ ID NO: 26563 - DNA, 522 bp, Homo sapiens; identical to SEQ ID NO: 20427
  misc_feature 1, 2, 500, 518, 519, 520, 521, 522: n = A,T,C or G

SEQ ID NO: 26564 - DNA, 388 bp, Homo sapiens; identical to SEQ ID NO: 20723

SEQ ID NO: 26565 - DNA, 447 bp, Homo sapiens; identical to SEQ ID NO: 20364
  misc_feature 443, 444, 445, 446, 447: n = A,T,C or G

SEQ ID NO: 26566 - DNA, 1096 bp, Homo sapiens; identical to SEQ ID NO: 20674
  misc_feature 1, 2, 3, 4, 5, 6, 7: n = A,T,C or G

SEQ ID NO: 26567 - DNA, 347 bp, Homo sapiens; identical to SEQ ID NO: 20726

SEQ ID NO: 26568 - DNA, 571 bp, Homo sapiens; identical to SEQ ID NO: 20123
  misc_feature 1, 2, 3, 4, 5, 6, 7, 8, 9, 10, 11, 567, 568, 569, 570, 571: n = A,T,C or G

SEQ ID NO: 26569 - DNA, 466 bp, Homo sapiens; identical to SEQ ID NO: 20303
  misc_feature 1, 2, 3, 466: n = A,T,C or G

SEQ ID NO: 26570 - DNA, 2538 bp, Homo sapiens; identical to SEQ ID NO: 20316
  misc_feature 2538: n = A,T,C or G

SEQ ID NO: 26571 - DNA, 556 bp, Homo sapiens; identical to SEQ ID NO: 20162
  misc_feature 555, 556: n = A,T,C or G

SEQ ID NO: 26572 - DNA, 613 bp, Homo sapiens; identical to SEQ ID NO: 20105

SEQ ID NO: 26573 - DNA, 562 bp, Homo sapiens; identical to SEQ ID NO: 20370

SEQ ID NO: 26574 - DNA, 455 bp, Homo sapiens; identical to SEQ ID NO: 20362
  misc_feature 455: n = A,T,C or G

SEQ ID NO: 26575 - DNA, 952 bp, Homo sapiens; identical to SEQ ID NO: 20734

SEQ ID NO: 26576 - DNA, 446 bp, Homo sapiens; identical to SEQ ID NO: 20700
  misc_feature 1, 2, 446: n = A,T,C or G

SEQ ID NO: 26577 - DNA, 811 bp, Homo sapiens; identical to SEQ ID NO: 20377
  misc_feature 804, 805, 806, 807, 808, 809, 810, 811: n = A,T,C or G

SEQ ID NO: 26578 - DNA, 390 bp, Homo sapiens; identical to SEQ ID NO: 20737
  misc_feature 387, 388, 389, 390: n = A,T,C or G

SEQ ID NO: 26579 - DNA, 903 bp, Homo sapiens; identical to SEQ ID NO: 20738
  misc_feature 1, 2, 13, 896, 897, 898, 899, 900, 901, 902, 903: n = A,T,C or G

SEQ ID NO: 26580 - DNA, 1529 bp, Homo sapiens; identical to SEQ ID NO: 20365
  misc_feature 1, 1485, 1495, 1500, 1527, 1528, 1529: n = A,T,C or G

SEQ ID NO: 26581 - DNA, 431 bp, Homo sapiens; identical to SEQ ID NO: 20740

SEQ ID NO: 26582 - DNA, 675 bp, Homo sapiens; identical to SEQ ID NO: 20117
  misc_feature 645, 672, 673, 674, 675: n = A,T,C or G

SEQ ID NO: 26583 - DNA, 2063 bp, Homo sapiens; identical to SEQ ID NO: 22272

SEQ ID NO: 26584 - DNA, 1290 bp, Homo sapiens; identical to SEQ ID NO: 20742
  misc_feature 1, 2, 1281, 1282, 1283, 1284, 1285, 1286, 1287, 1288, 1289,1290: n = A,T,C or G

SEQ ID NO: 26585 - DNA, 458 bp, Homo sapiens; identical to SEQ ID NO: 20743
  misc_feature 458: n = A,T,C or G

SEQ ID NO: 26586 - DNA, 373 bp, Homo sapiens; identical to SEQ ID NO: 20744

SEQ ID NO: 26587 - DNA, 640 bp, Homo sapiens; identical to SEQ ID NO: 20745
  misc_feature 1, 42, 635, 636, 637, 638, 639, 640: n = A,T,C or G

SEQ ID NO: 26588 - DNA, 542 bp, Homo sapiens; identical to SEQ ID NO: 20746
  misc_feature 1, 2, 3, 4, 5: n = A,T,C or G

SEQ ID NO: 26589 - DNA, 758 bp, Homo sapiens; identical to SEQ ID NO: 20747
  misc_feature 757, 758: n = A,T,C or G

SEQ ID NO: 26590 - DNA, 1189 bp, Homo sapiens; identical to SEQ ID NO: 20185
  misc_feature 1179, 1180, 1181, 1182, 1183, 1184, 1185, 1186, 1187, 1188,1189: n = A,T,C or G

SEQ ID NO: 26591 - DNA, 2026 bp, Homo sapiens; identical to SEQ ID NO: 20749
  misc_feature 1, 2: n = A,T,C or G

SEQ ID NO: 26592 - DNA, 466 bp, Homo sapiens; identical to SEQ ID NO: 20303
  misc_feature 1, 2, 3, 466: n = A,T,C or G

SEQ ID NO: 26593 - DNA, 402 bp, Homo sapiens; identical to SEQ ID NO: 20517
  misc_feature 1, 2: n = A,T,C or G

SEQ ID NO: 26594 - DNA, 373 bp, Homo sapiens; identical to SEQ ID NO: 20752
  misc_feature 372, 373: n = A,T,C or G

SEQ ID NO: 26595 - DNA, 469 bp, Homo sapiens; identical to SEQ ID NO: 20577
  misc_feature 446, 455, 456, 457, 458, 459, 460, 461, 462, 463, 464, 465,466, 467, 468, 469: n = A,T,C or G

SEQ ID NO: 26596 - DNA, 450 bp, Homo sapiens; identical to SEQ ID NO: 20208
  misc_feature 443, 444, 445, 446, 447, 448, 449, 450: n = A,T,C or G

SEQ ID NO: 26597 - DNA, 373 bp, Homo sapiens; identical to SEQ ID NO: 20744

SEQ ID NO: 26598 - DNA, 397 bp, Homo sapiens; identical to SEQ ID NO: 20338

SEQ ID NO: 26599 - DNA, 803 bp, Homo sapiens; identical to SEQ ID NO: 20757
  misc_feature 698, 802, 803: n = A,T,C or G

SEQ ID NO: 26600 - DNA, 932 bp, Homo sapiens; identical to SEQ ID NO: 20758
  misc_feature 1: n = A,T,C or G

SEQ ID NO: 26601 - DNA, 560 bp, Homo sapiens; identical to SEQ ID NO: 20759
  misc_feature 560: n = A,T,C or G

SEQ ID NO: 26602 - DNA, 418 bp, Homo sapiens; identical to SEQ ID NO: 20251
  misc_feature 1, 413, 414, 415, 416, 417, 418: n = A,T,C or G

SEQ ID NO: 26603 - DNA, 675 bp, Homo sapiens; identical to SEQ ID NO: 20117
  misc_feature 645, 672, 673, 674, 675: n = A,T,C or G

SEQ ID NO: 26604 - DNA, 439 bp, Homo sapiens; identical to SEQ ID NO: 20762
  misc_feature 1: n = A,T,C or G

SEQ ID NO: 26605 - DNA, 1189 bp, Homo sapiens; identical to SEQ ID NO: 20185
  misc_feature 1179, 1180, 1181, 1182, 1183, 1184, 1185, 1186, 1187, 1188,1189: n = A,T,C or G

SEQ ID NO: 26606 - DNA, 466 bp, Homo sapiens; identical to SEQ ID NO: 20303
  misc_feature 1, 2, 3, 466: n = A,T,C or G

SEQ ID NO: 26607 - DNA, 861 bp, Homo sapiens; identical to SEQ ID NO: 20765
  misc_feature 858, 859, 860, 861: n = A,T,C or G

SEQ ID NO: 26608 - DNA, 524 bp, Homo sapiens; identical to SEQ ID NO: 20093

SEQ ID NO: 26609 - DNA, 483 bp, Homo sapiens; identical to SEQ ID NO: 20169
  misc_feature 1, 2, 477, 478, 479, 480, 481, 482, 483: n = A,T,C or G

SEQ ID NO: 26610 - DNA, 393 bp, Homo sapiens; identical to SEQ ID NO: 20407

SEQ ID NO: 26611 - DNA, 668 bp, Homo sapiens; identical to SEQ ID NO: 20192

SEQ ID NO: 26612 - DNA, 542 bp, Homo sapiens; identical to SEQ ID NO: 20746
  misc_feature 1, 2, 3, 4, 5: n = A,T,C or G

SEQ ID NO: 26613 - DNA, 383 bp, Homo sapiens; identical to SEQ ID NO: 20349
  misc_feature 383: n = A,T,C or G

SEQ ID NO: 26614 - DNA, 631 bp, Homo sapiens; identical to SEQ ID NO: 20434

SEQ ID NO: 26615 - DNA, 466 bp, Homo sapiens; identical to SEQ ID NO: 20303
  misc_feature 1, 2, 3, 466: n = A,T,C or G

SEQ ID NO: 26616 - DNA, 466 bp, Homo sapiens; identical to SEQ ID NO: 20303
  misc_feature 1, 2, 3, 466: n = A,T,C or G

SEQ ID NO: 26617 - DNA, 1189 bp, Homo sapiens; identical to SEQ ID NO: 20185
  misc_feature 1179, 1180, 1181, 1182, 1183, 1184, 1185, 1186, 1187, 1188,1189: n = A,T,C or G

SEQ ID NO: 26618 - DNA, 808 bp, Homo sapiens; identical to SEQ ID NO: 20776
  misc_feature 1, 2, 3, 4, 5, 6, 7, 8, 9, 10, 11, 188, 261, 806, 807, 808: n = A,T,C or G

SEQ ID NO: 26619 - DNA, 276 bp, Homo sapiens; identical to SEQ ID NO: 20777

SEQ ID NO: 26620 - DNA, 642 bp, Homo sapiens; identical to SEQ ID NO: 20389

SEQ ID NO: 26621 - DNA, 1108 bp, Homo sapiens; identical to SEQ ID NO: 20121
  misc_feature 1, 2, 1103, 1104, 1105, 1106, 1107, 1108: n = A,T,C or G

SEQ ID NO: 26622 - DNA, 396 bp, Homo sapiens; identical to SEQ ID NO: 20585

SEQ ID NO: 26623 - DNA, 575 bp, Homo sapiens; identical to SEQ ID NO: 20550
  misc_feature 1, 2, 3, 4, 5: n = A,T,C or G

SEQ ID NO: 26624 - DNA, 466 bp, Homo sapiens; identical to SEQ ID NO: 20303
  misc_feature 1, 2, 3, 466: n = A,T,C or G

SEQ ID NO: 26625 - DNA, 363 bp, Homo sapiens; identical to SEQ ID NO: 20782

SEQ ID NO: 26626 - DNA, 610 bp, Homo sapiens; identical to SEQ ID NO: 20783

SEQ ID NO: 26627 - DNA, 1361 bp, Homo sapiens; identical to SEQ ID NO: 20142
  misc_feature 1, 2, 3, 4, 5, 6, 7, 8, 9, 10, 11, 12, 13: n = A,T,C or G

SEQ ID NO: 26628 - DNA, 538 bp, Homo sapiens; identical to SEQ ID NO: 20391
  misc_feature 1, 2, 3, 4, 5, 6, 7, 8, 9, 10, 11, 12, 13, 536, 537, 538: n = A,T,C or G

SEQ ID NO: 26629 - DNA, 390 bp, Homo sapiens; identical to SEQ ID NO: 20737
  misc_feature 387, 388, 389, 390: n = A,T,C or G

SEQ ID NO: 26630 - DNA, 891 bp, Homo sapiens; identical to SEQ ID NO: 20416

SEQ ID NO: 26631 - DNA, 520 bp, Homo sapiens; identical to SEQ ID NO: 20673
  misc_feature 520: n = A,T,C or G

SEQ ID NO: 26632 - DNA, 397 bp, Homo sapiens; identical to SEQ ID NO: 20338

SEQ ID NO: 26633 - DNA, 556 bp, Homo sapiens; identical to SEQ ID NO: 20162
  misc_feature 555, 556: n = A,T,C or G

SEQ ID NO: 26634 - DNA, 425 bp, Homo sapiens; identical to SEQ ID NO: 20790
  misc_feature 1, 2, 3, 4, 423, 424, 425: n = A,T,C or G

SEQ ID NO: 26635 - DNA, 567 bp, Homo sapiens; identical to SEQ ID NO: 20361

SEQ ID NO: 26636 - DNA, 865 bp, Homo sapiens; identical to SEQ ID NO: 20792

SEQ ID NO: 26637 - DNA, 707 bp, Homo sapiens; identical to SEQ ID NO: 20793
  misc_feature 1, 2, 3: n = A,T,C or G

SEQ ID NO: 26638 - DNA, 728 bp, Homo sapiens; identical to SEQ ID NO: 21701
  misc_feature 1, 2, 727, 728: n = A,T,C or G

SEQ ID NO: 26639 - DNA, 409 bp, Homo sapiens; identical to SEQ ID NO: 20670
  misc_feature 409: n = A,T,C or G

SEQ ID NO: 26640 - DNA, 460 bp, Homo sapiens; identical to SEQ ID NO: 20633
  misc_feature 1, 460: n = A,T,C or G

SEQ ID NO: 26641 - DNA, 389 bp, Homo sapiens; identical to SEQ ID NO: 20457
  misc_feature 389: n = A,T,C or G

SEQ ID NO: 26642 - DNA, 1128 bp, Homo sapiens; identical to SEQ ID NO: 20289
  misc_feature 1, 2, 1127, 1128: n = A,T,C or G

SEQ ID NO: 26643 - DNA, 1249 bp, Homo sapiens; identical to SEQ ID NO: 20798
  misc_feature 1, 2, 1249: n = A,T,C or G

SEQ ID NO: 26644 - DNA, 533 bp, Homo sapiens; identical to SEQ ID NO: 20481
  misc_feature 533: n = A,T,C or G

SEQ ID NO: 26645 - DNA, 562 bp, Homo sapiens; identical to SEQ ID NO: 20800
  misc_feature 1, 2, 3: n = A,T,C or G

SEQ ID NO: 26646 - DNA, 419 bp, Homo sapiens; identical to SEQ ID NO: 20801
  misc_feature 418, 419: n = A,T,C or G

SEQ ID NO: 26647 - DNA, 397 bp, Homo sapiens; identical to SEQ ID NO: 20110

SEQ ID NO: 26648 - DNA, 735 bp, Homo sapiens; identical to SEQ ID NO: 20803
  misc_feature 733, 734, 735: n = A,T,C or G

SEQ ID NO: 26649 - DNA, 1020 bp, Homo sapiens; identical to SEQ ID NO: 20647
  misc_feature 1, 2, 3, 14, 20, 35, 42, 48, 81, 1019, 1020: n = A,T,C or G

SEQ ID NO: 26650 - DNA, 407 bp, Homo sapiens; identical to SEQ ID NO: 20805

SEQ ID NO: 26651 - DNA, 2506 bp, Homo sapiens; identical to SEQ ID NO: 20323
  misc_feature 2503, 2504, 2505, 2506: n = A,T,C or G

SEQ ID NO: 26652 - DNA, 396 bp, Homo sapiens; identical to SEQ ID NO: 20429
  misc_feature 395, 396: n = A,T,C or G

SEQ ID NO: 26653 - DNA, 394 bp, Homo sapiens; identical to SEQ ID NO: 20808
  misc_feature 1, 2, 3: n = A,T,C or G

SEQ ID NO: 26654 - DNA, 572 bp, Homo sapiens; identical to SEQ ID NO: 20583
  misc_feature 571, 572: n = A,T,C or G

SEQ ID NO: 26655 - DNA, 633 bp, Homo sapiens; identical to SEQ ID NO: 20810

SEQ ID NO: 26656 - DNA, 830 bp, Homo sapiens; identical to SEQ ID NO: 20532

SEQ ID NO: 26657 - DNA, 671 bp, Homo sapiens; identical to SEQ ID NO: 20812
  misc_feature 619, 649, 669, 670, 671: n = A,T,C or G

SEQ ID NO: 26658 - DNA, 811 bp, Homo sapiens; identical to SEQ ID NO: 20377
  misc_feature 804, 805, 806, 807, 808, 809, 810, 811: n = A,T,C or G

SEQ ID NO: 26659 - DNA, 387 bp, Homo sapiens; identical to SEQ ID NO: 20586

SEQ ID NO: 26660 - DNA, 604 bp, Homo sapiens; identical to SEQ ID NO: 20360
  misc_feature 596, 604: n = A,T,C or G

SEQ ID NO: 26661 - DNA, 1380 bp, Homo sapiens; identical to SEQ ID NO: 20118
  misc_feature 1380: n = A,T,C or G

SEQ ID NO: 26662 - DNA, 1498 bp, Homo sapiens; identical to SEQ ID NO: 20817
  misc_feature 1, 2, 1498: n = A,T,C or G

SEQ ID NO: 26663 - DNA, 404 bp, Homo sapiens; identical to SEQ ID NO: 20663
  misc_feature 404: n = A,T,C or G

SEQ ID NO: 26664 - DNA, 611 bp, Homo sapiens; identical to SEQ ID NO: 20819
  misc_feature 609, 610, 611: n = A,T,C or G

SEQ ID NO: 26665 - DNA, 1108 bp, Homo sapiens; identical to SEQ ID NO: 20121
  misc_feature 1, 2, 1103, 1104, 1105, 1106, 1107, 1108: n = A,T,C or G

SEQ ID NO: 26666 - DNA, 1365 bp, Homo sapiens; identical to SEQ ID NO: 20708
  misc_feature 1348: n = A,T,C or G

SEQ ID NO: 26667 - DNA, 614 bp, Homo sapiens; identical to SEQ ID NO: 20822

SEQ ID NO: 26668 - DNA, 375 bp, Homo sapiens; identical to SEQ ID NO: 20552

SEQ ID NO: 26669 - DNA, 5145 bp, Homo sapiens; identical to SEQ ID NO: 20824
  misc_feature 1, 5144, 5145: n = A,T,C or G

SEQ ID NO: 26670 - DNA, 421 bp, Homo sapiens; identical to SEQ ID NO: 20662
  misc_feature 1, 2, 3, 4, 5: n = A,T,C or G

SEQ ID NO: 26671 - DNA, 396 bp, Homo sapiens; identical to SEQ ID NO: 20826

SEQ ID NO: 26672 - DNA, 1214 bp, Homo sapiens; identical to SEQ ID NO: 20119

SEQ ID NO: 26673 - DNA, 418 bp, Homo sapiens; identical to SEQ ID NO: 20116
  misc_feature 1: n = A,T,C or G

SEQ ID NO: 26674 - DNA, 920 bp, Homo sapiens; identical to SEQ ID NO: 20829
  misc_feature 1, 2, 3, 4, 5, 6, 7, 8, 9, 10, 915, 916, 917, 918, 919, 920: n = A,T,C or G

SEQ ID NO: 26675 - DNA, 455 bp, Homo sapiens; identical to SEQ ID NO: 20362
  misc_feature 455: n = A,T,C or G

SEQ ID NO: 26676 - DNA, 901 bp, Homo sapiens; identical to SEQ ID NO: 20587
  misc_feature 1, 886, 887, 888, 889, 890, 891, 892, 893, 894, 895, 896,897, 898, 899, 900, 901: n = A,T,C or G

SEQ ID NO: 26677 - DNA, 378 bp, Homo sapiens; identical to SEQ ID NO: 20832

SEQ ID NO: 26678 - DNA, 611 bp, Homo sapiens; identical to SEQ ID NO: 20819
  misc_feature 609, 610, 611: n = A,T,C or G

SEQ ID NO: 26679 - DNA, 572 bp, Homo sapiens; identical to SEQ ID NO: 20583
  misc_feature 571, 572: n = A,T,C or G

SEQ ID NO: 26680 - DNA, 466 bp, Homo sapiens; identical to SEQ ID NO: 20303
  misc_feature 1, 2, 3, 466: n = A,T,C or G

SEQ ID NO: 26681 - DNA, 802 bp, Homo sapiens; identical to SEQ ID NO: 21464

SEQ ID NO: 26682 - DNA, 731 bp, Homo sapiens; identical to SEQ ID NO: 20837
  misc_feature 1, 2, 52, 63: n = A,T,C or G

SEQ ID NO: 26683 - DNA, 401 bp, Homo sapiens; identical to SEQ ID NO: 20379

SEQ ID NO: 26684 - DNA, 617 bp, Homo sapiens; identical to SEQ ID NO: 20325

SEQ ID NO: 26685 - DNA, 786 bp, Homo sapiens; identical to SEQ ID NO: 20840
  misc_feature 783, 784, 785, 786: n = A,T,C or G

SEQ ID NO: 26686 - DNA, 549 bp, Homo sapiens; identical to SEQ ID NO: 20485
  misc_feature 1, 2, 3: n = A,T,C or G

SEQ ID NO: 26687 - DNA, 675 bp, Homo sapiens; identical to SEQ ID NO: 20117
  misc_feature 645, 672, 673, 674, 675: n = A,T,C or G

SEQ ID NO: 26688 - DNA, 1096 bp, Homo sapiens; identical to SEQ ID NO: 20674
  misc_feature 1, 2, 3, 4, 5, 6, 7: n = A,T,C or G

SEQ ID NO: 26689 - DNA, 387 bp, Homo sapiens; identical to SEQ ID NO: 20626

SEQ ID NO: 26690 - DNA, 460 bp, Homo sapiens; identical to SEQ ID NO: 20845

SEQ ID NO: 26691 - DNA, 806 bp, Homo sapiens; identical to SEQ ID NO: 20267
  misc_feature 1: n = A,T,C or G

SEQ ID NO: 26692 - DNA, 809 bp, Homo sapiens; identical to SEQ ID NO: 20847
  misc_feature 809: n = A,T,C or G

SEQ ID NO: 26693 - DNA, 658 bp, Homo sapiens; identical to SEQ ID NO: 20848
  misc_feature 642, 643, 644, 645, 646, 647, 648, 649, 650, 651, 652, 653,654, 655, 656, 657, 658: n = A,T,C or G

SEQ ID NO: 26694 - DNA, 642 bp, Homo sapiens; identical to SEQ ID NO: 20389

SEQ ID NO: 26695 - DNA, 903 bp, Homo sapiens; identical to SEQ ID NO: 20618
  misc_feature 1, 2, 3, 4, 5, 6, 7, 8, 9, 10, 11, 12, 13, 14, 15, 899, 900,901, 902, 903: n = A,T,C or G

SEQ ID NO: 26696 - DNA, 2538 bp, Homo sapiens; identical to SEQ ID NO: 20316
  misc_feature 2538: n = A,T,C or G

SEQ ID NO: 26697 - DNA, 668 bp, Homo sapiens; identical to SEQ ID NO: 20192

SEQ ID NO: 26698 - DNA, 447 bp, Homo sapiens; identical to SEQ ID NO: 20364
  misc_feature 443, 444, 445, 446, 447: n = A,T,C or G

SEQ ID NO: 26699 - DNA, 409 bp, Homo sapiens; identical to SEQ ID NO: 20395
  misc_feature 409: n = A,T,C or G

SEQ ID NO: 26700 - DNA, 377 bp, Homo sapiens; identical to SEQ ID NO: 20681
  misc_feature 1, 2, 3, 377: n = A,T,C or G

SEQ ID NO: 26701 - DNA, 856 bp, Homo sapiens; identical to SEQ ID NO: 20855
  misc_feature 779, 810, 856: n = A,T,C or G

SEQ ID NO: 26702 - DNA, 398 bp, Homo sapiens; identical to SEQ ID NO: 20856

SEQ ID NO: 26703 - DNA, 1132 bp, Homo sapiens; identical to SEQ ID NO: 20857
  misc_feature 1, 2, 3, 1132: n = A,T,C or G

SEQ ID NO: 26704 - DNA, 515 bp, Homo sapiens; identical to SEQ ID NO: 20177

SEQ ID NO: 26705 - DNA, 418 bp, Homo sapiens; identical to SEQ ID NO: 20859
  misc_feature 418: n = A,T,C or G

SEQ ID NO: 26706 - DNA, 642 bp, Homo sapiens; identical to SEQ ID NO: 20389

SEQ ID NO: 26707 - DNA, 398 bp, Homo sapiens; identical to SEQ ID NO: 20856

SEQ ID NO: 26708 - DNA, 727 bp, Homo sapiens; identical to SEQ ID NO: 20324

SEQ ID NO: 26709 - DNA, 601 bp, Homo sapiens; identical to SEQ ID NO: 20756

SEQ ID NO: 26710 - DNA, 512 bp, Homo sapiens; identical to SEQ ID NO: 20569
  misc_feature 511, 512: n = A,T,C or G

SEQ ID NO: 26711 - DNA, 418 bp, Homo sapiens; identical to SEQ ID NO: 20859
  misc_feature 418: n = A,T,C or G

SEQ ID NO: 26712 - DNA, 396 bp, Homo sapiens; identical to SEQ ID NO: 20585

SEQ ID NO: 26713 - DNA, 406 bp, Homo sapiens; identical to SEQ ID NO: 20412
  misc_feature 400, 401, 402, 403, 404, 405, 406: n = A,T,C or G

SEQ ID NO: 26714 - DNA, 1189 bp, Homo sapiens; identical to SEQ ID NO: 20185
  misc_feature 1179, 1180, 1181, 1182, 1183, 1184, 1185, 1186, 1187, 1188,1189: n = A,T,C or G

SEQ ID NO: 26715 - DNA, 2184 bp, Homo sapiens; identical to SEQ ID NO: 20869

SEQ ID NO: 26716 - DNA, 466 bp, Homo sapiens; identical to SEQ ID NO: 20870

SEQ ID NO: 26717 - DNA, 593 bp, Homo sapiens; identical to SEQ ID NO: 20493
  misc_feature 1, 589, 590, 591, 592, 593: n = A,T,C or G

SEQ ID NO: 26718 - DNA, 3351 bp, Homo sapiens; identical to SEQ ID NO: 20872
  misc_feature 1, 3351: n = A,T,C or G

SEQ ID NO: 26719 - DNA, 741 bp, Homo sapiens; identical to SEQ ID NO: 20131

SEQ ID NO: 26720 - DNA, 1648 bp, Homo sapiens; identical to SEQ ID NO: 20874
  misc_feature 1, 2: n = A,T,C or G

SEQ ID NO: 26721 - DNA, 479 bp, Homo sapiens; identical to SEQ ID NO: 20337
  misc_feature 478, 479: n = A,T,C or G

SEQ ID NO: 26722 - DNA, 546 bp, Homo sapiens; identical to SEQ ID NO: 20461
  misc_feature 546: n = A,T,C or G

SEQ ID NO: 26723 - DNA, 628 bp, Homo sapiens; identical to SEQ ID NO: 20877
  misc_feature 1, 2, 3, 4, 5, 6, 7, 8, 9, 10, 11, 12: n = A,T,C or G

SEQ ID NO: 26724 - DNA, 396 bp, Homo sapiens; identical to SEQ ID NO: 20826

SEQ ID NO: 26725 - DNA, 415 bp, Homo sapiens; identical to SEQ ID NO: 20879
  misc_feature 1, 2, 3, 4, 5, 6, 7, 415: n = A,T,C or G

SEQ ID NO: 26726 - DNA, 556 bp, Homo sapiens; identical to SEQ ID NO: 20162
  misc_feature 555, 556: n = A,T,C or G

SEQ ID NO: 26727 - DNA, 387 bp, Homo sapiens; identical to SEQ ID NO: 20626

SEQ ID NO: 26728 - DNA, 3983 bp, Homo sapiens; identical to SEQ ID NO: 21101

SEQ ID NO: 26729 - DNA, 1189 bp, Homo sapiens; identical to SEQ ID NO: 20185
  misc_feature 1179, 1180, 1181, 1182, 1183, 1184, 1185, 1186, 1187, 1188,1189: n = A,T,C or G

SEQ ID NO: 26730 - DNA, 741 bp, Homo sapiens; identical to SEQ ID NO: 20131

SEQ ID NO: 26731 - DNA, 668 bp, Homo sapiens; identical to SEQ ID NO: 20192

SEQ ID NO: 26732 - DNA, 2315 bp, Homo sapiens; identical to SEQ ID NO: 20885
  misc_feature 1, 2, 2313, 2314, 2315: n = A,T,C or G

SEQ ID NO: 26733 - DNA, 447 bp, Homo sapiens; identical to SEQ ID NO: 20364
  misc_feature 443, 444, 445, 446, 447: n = A,T,C or G

SEQ ID NO: 26734 - DNA, 1380 bp, Homo sapiens; identical to SEQ ID NO: 20118
  misc_feature 1380: n = A,T,C or G

SEQ ID NO: 26735 - DNA, 1189 bp, Homo sapiens; identical to SEQ ID NO: 20185
  misc_feature 1179, 1180, 1181, 1182, 1183, 1184, 1185, 1186, 1187, 1188,1189: n = A,T,C or G

SEQ ID NO: 26736 - DNA, 924 bp, Homo sapiens; identical to SEQ ID NO: 20889
  misc_feature 1, 924: n = A,T,C or G

SEQ ID NO: 26737 - DNA, 350 bp, Homo sapiens; identical to SEQ ID NO: 20890
  misc_feature 218, 219, 220, 221, 222, 223, 224, 225, 226, 227, 228, 229,230, 231, 232, 233, 234, 235, 236, 237, 238, 239, 240, 241,242, 243, 244, 245, 246, 247, 248, 249, 250, 251, 252, 253,254, 255, 350: n = A,T,C or G

SEQ ID NO: 26738 - DNA, 396 bp, Homo sapiens; identical to SEQ ID NO: 20480

SEQ ID NO: 26739 - DNA, 656 bp, Homo sapiens; identical to SEQ ID NO: 20451

SEQ ID NO: 26740 - DNA, 1108 bp, Homo sapiens; identical to SEQ ID NO: 20121
  misc_feature 1, 2, 1103, 1104, 1105, 1106, 1107, 1108: n = A,T,C or G

SEQ ID NO: 26741 - DNA, 533 bp, Homo sapiens; identical to SEQ ID NO: 20357
  misc_feature 386, 529, 530, 531, 532, 533: n = A,T,C or G

SEQ ID NO: 26742 - DNA, 508 bp, Homo sapiens; identical to SEQ ID NO: 21293
  misc_feature 502, 503, 504, 505, 506, 507, 508: n = A,T,C or G

SEQ ID NO: 26743 - DNA, 779 bp, Homo sapiens; identical to SEQ ID NO: 20149
  misc_feature 1: n = A,T,C or G

SEQ ID NO: 26744 - DNA, 363 bp, Homo sapiens; identical to SEQ ID NO: 20782

SEQ ID NO: 26745 - DNA, 466 bp, Homo sapiens; identical to SEQ ID NO: 20303
  misc_feature 1, 2, 3, 466: n = A,T,C or G

SEQ ID NO: 26746 - DNA, 466 bp, Homo sapiens; identical to SEQ ID NO: 20303
  misc_feature 1, 2, 3, 466: n = A,T,C or G

SEQ ID NO: 26747 - DNA, 447 bp, Homo sapiens; identical to SEQ ID NO: 20364
  misc_feature 443, 444, 445, 446, 447: n = A,T,C or G

SEQ ID NO: 26748 - DNA, 440 bp, Homo sapiens; identical to SEQ ID NO: 20900
  misc_feature 435, 436, 437, 438, 439, 440: n = A,T,C or G

SEQ ID NO: 26749 - DNA, 405 bp, Homo sapiens; identical to SEQ ID NO: 20693
  misc_feature 403, 404, 405: n = A,T,C or G

SEQ ID NO: 26750 - DNA, 588 bp, Homo sapiens; identical to SEQ ID NO: 20604

SEQ ID NO: 26751 - DNA, 424 bp, Homo sapiens; identical to SEQ ID NO: 20414
  misc_feature 421, 422, 423, 424: n = A,T,C or G

SEQ ID NO: 26752 - DNA, 588 bp, Homo sapiens; identical to SEQ ID NO: 20604

SEQ ID NO: 26753 - DNA, 466 bp, Homo sapiens; identical to SEQ ID NO: 20303
  misc_feature 1, 2, 3, 466: n = A,T,C or G

SEQ ID NO: 26754 - DNA, 405 bp, Homo sapiens; identical to SEQ ID NO: 20906

SEQ ID NO: 26755 - DNA, 538 bp, Homo sapiens; identical to SEQ ID NO: 20391
  misc_feature 1, 2, 3, 4, 5, 6, 7, 8, 9, 10, 11, 12, 13, 536, 537, 538: n = A,T,C or G

SEQ ID NO: 26756 - DNA, 1076 bp, Homo sapiens; identical to SEQ ID NO: 20090
  misc_feature 1, 2, 3, 4, 5, 6, 7, 8, 9, 10, 11, 12, 13, 14, 15, 16, 17: n = A,T,C or G

SEQ ID NO: 26757 - DNA, 362 bp, Homo sapiens; identical to SEQ ID NO: 20639
  misc_feature 362: n = A,T,C or G

SEQ ID NO: 26758 - DNA, 1189 bp, Homo sapiens; identical to SEQ ID NO: 20185
  misc_feature 1179, 1180, 1181, 1182, 1183, 1184, 1185, 1186, 1187, 1188,1189: n = A,T,C or G

SEQ ID NO: 26759 - DNA, 668 bp, Homo sapiens; identical to SEQ ID NO: 20192

SEQ ID NO: 26760 - DNA, 1189 bp, Homo sapiens; identical to SEQ ID NO: 20185
  misc_feature 1179, 1180, 1181, 1182, 1183, 1184, 1185, 1186, 1187, 1188,1189: n = A,T,C or G

SEQ ID NO: 26761 - DNA, 337 bp, Homo sapiens; identical to SEQ ID NO: 20913
  misc_feature 337: n = A,T,C or G

SEQ ID NO: 26762 - DNA, 779 bp, Homo sapiens; identical to SEQ ID NO: 20149
  misc_feature 1: n = A,T,C or G

SEQ ID NO: 26763 - DNA, 588 bp, Homo sapiens; identical to SEQ ID NO: 20604

SEQ ID NO: 26764 - DNA, 604 bp, Homo sapiens; identical to SEQ ID NO: 20360
  misc_feature 596, 604: n = A,T,C or G

SEQ ID NO: 26765 - DNA, 593 bp, Homo sapiens; identical to SEQ ID NO: 20493
  misc_feature 1, 589, 590, 591, 592, 593: n = A,T,C or G

SEQ ID NO: 26766 - DNA, 446 bp, Homo sapiens; identical to SEQ ID NO: 20632
  misc_feature 441, 442, 443, 444, 445, 446: n = A,T,C or G

SEQ ID NO: 26767 - DNA, 594 bp, Homo sapiens; identical to SEQ ID NO: 20919
  misc_feature 1, 593, 594: n = A,T,C or G

SEQ ID NO: 26768 - DNA, 373 bp, Homo sapiens; identical to SEQ ID NO: 20744

SEQ ID NO: 26769 - DNA, 457 bp, Homo sapiens; identical to SEQ ID NO: 20921

SEQ ID NO: 26770 - DNA, 2487 bp, Homo sapiens; identical to SEQ ID NO: 20922
  misc_feature 1, 2, 3, 4, 5, 6, 7, 8, 2459, 2460, 2461, 2462, 2463, 2464,2465, 2466, 2467, 2468, 2469, 2470, 2471, 2472, 2473, 2474,2475, 2476, 2477, 2478, 2479, 2480, 2481, 2482, 2483, 2484,2485, 2486, 2487: n = A,T,C or G

SEQ ID NO: 26771 - DNA, 897 bp, Homo sapiens; identical to SEQ ID NO: 20923
  misc_feature 894, 895, 896, 897: n = A,T,C or G

SEQ ID NO: 26772 - DNA, 1479 bp, Homo sapiens; identical to SEQ ID NO: 20924
  misc_feature 1478, 1479: n = A,T,C or G

SEQ ID NO: 26773 - DNA, 364 bp, Homo sapiens; identical to SEQ ID NO: 20925

SEQ ID NO: 26774 - DNA, 1274 bp, Homo sapiens; identical to SEQ ID NO: 20926
  misc_feature 1271, 1272, 1273, 1274: n = A,T,C or G

SEQ ID NO: 26775 - DNA, 479 bp, Homo sapiens; identical to SEQ ID NO: 20927

SEQ ID NO: 26776 - DNA, 3132 bp, Homo sapiens; identical to SEQ ID NO: 20928
  misc_feature 3132: n = A,T,C or G

SEQ ID NO: 26777 - DNA, 505 bp, Homo sapiens; identical to SEQ ID NO: 20929

SEQ ID NO: 26778 - DNA, 620 bp, Homo sapiens; identical to SEQ ID NO: 20930

SEQ ID NO: 26779 - DNA, 505 bp, Homo sapiens; identical to SEQ ID NO: 20929

SEQ ID NO: 26780 - DNA, 668 bp, Homo sapiens; identical to SEQ ID NO: 20192

SEQ ID NO: 26781 - DNA, 424 bp, Homo sapiens; identical to SEQ ID NO: 20414
  misc_feature 421, 422, 423, 424: n = A,T,C or G

SEQ ID NO: 26782 - DNA, 435 bp, Homo sapiens; identical to SEQ ID NO: 20934
  misc_feature 429, 430, 431, 432, 433, 434, 435: n = A,T,C or G

SEQ ID NO: 26783 - DNA, 968 bp, Homo sapiens; identical to SEQ ID NO: 20935

SEQ ID NO: 26784 - DNA, 905 bp, Homo sapiens; identical to SEQ ID NO: 20936
  misc_feature 904, 905: n = A,T,C or G

SEQ ID NO: 26785 - DNA, 789 bp, Homo sapiens; identical to SEQ ID NO: 20937
  misc_feature 1, 2, 3, 788, 789: n = A,T,C or G

SEQ ID NO: 26786 - DNA, 2943 bp, Homo sapiens; identical to SEQ ID NO: 20938

SEQ ID NO: 26787 - DNA, 533 bp, Homo sapiens; identical to SEQ ID NO: 20939
  misc_feature 533: n = A,T,C or G

SEQ ID NO: 26788 - DNA, 5221 bp, Homo sapiens; identical to SEQ ID NO: 20940
  misc_feature 5193, 5194, 5195, 5196, 5197, 5198, 5199, 5200, 5201, 5202,5203, 5204, 5205, 5206, 5207, 5208, 5209, 5210, 5211, 5212,5213, 5214, 5215, 5216, 5217, 5218, 5219, 5220, 5221: n = A,T,C or G

SEQ ID NO: 26789 - DNA, 633 bp, Homo sapiens; identical to SEQ ID NO: 20941
  misc_feature 1, 2, 598, 632, 633: n = A,T,C or G

SEQ ID NO: 26790 - DNA, 745 bp, Homo sapiens; identical to SEQ ID NO: 20943
  misc_feature 1, 2, 3, 4, 5, 6, 7, 8, 9, 10, 11, 12, 741, 742, 743, 744,745: n = A,T,C or G

SEQ ID NO: 26791 - DNA, 533 bp, Homo sapiens; identical to SEQ ID NO: 20939
  misc_feature 533: n = A,T,C or G

SEQ ID NO: 26792 - DNA, 505 bp, Homo sapiens; identical to SEQ ID NO: 20929

SEQ ID NO: 26793 - DNA, 1190 bp, Homo sapiens; identical to SEQ ID NO: 20946
  misc_feature 1, 2, 1185, 1186, 1187, 1188, 1189, 1190: n = A,T,C or G

SEQ ID NO: 26794 - DNA, 435 bp, Homo sapiens; identical to SEQ ID NO: 20934
  misc_feature 429, 430, 431, 432, 433, 434, 435: n = A,T,C or G

SEQ ID NO: 26795 - DNA, 2968 bp, Homo sapiens; identical to SEQ ID NO: 20948
  misc_feature 1, 2, 3: n = A,T,C or G

SEQ ID NO: 26796 - DNA, 505 bp, Homo sapiens; identical to SEQ ID NO: 20929

SEQ ID NO: 26797 - DNA, 301 bp, Homo sapiens; identical to SEQ ID NO: 20951
  misc_feature 301: n = A,T,C or G

SEQ ID NO: 26798 - DNA, 362 bp, Homo sapiens; identical to SEQ ID NO: 20952

SEQ ID NO: 26799 - DNA, 620 bp, Homo sapiens; identical to SEQ ID NO: 20953

SEQ ID NO: 26800 - DNA, 2199 bp, Homo sapiens; identical to SEQ ID NO: 20954
  misc_feature 1, 2, 3, 4, 2198, 2199: n = A,T,C or G

SEQ ID NO: 26801 - DNA, 567 bp, Homo sapiens; identical to SEQ ID NO: 20955
  misc_feature 1, 2, 567: n = A,T,C or G

SEQ ID NO: 26802 - DNA, 2353 bp, Homo sapiens; identical to SEQ ID NO: 20956
  misc_feature 2252, 2280, 2346, 2347, 2348, 2349, 2350, 2351, 2352, 2353: n = A,T,C or G

SEQ ID NO: 26803 - DNA, 388 bp, Homo sapiens; identical to SEQ ID NO: 20957

SEQ ID NO: 26804 - DNA, 2762 bp, Homo sapiens; identical to SEQ ID NO: 20958
  misc_feature 1, 2, 2757, 2758, 2759, 2760, 2761, 2762: n = A,T,C or G

SEQ ID NO: 26805 - DNA, 620 bp, Homo sapiens; identical to SEQ ID NO: 20930

SEQ ID NO: 26806 - DNA, 1468 bp, Homo sapiens; identical to SEQ ID NO: 20960
  misc_feature 1465, 1466, 1467, 1468: n = A,T,C or G

SEQ ID NO: 26807 - DNA, 1022 bp, Homo sapiens; identical to SEQ ID NO: 20961
  misc_feature 1, 2, 3, 1022: n = A,T,C or G

SEQ ID NO: 26808 - DNA, 1037 bp, Homo sapiens; identical to SEQ ID NO: 20962
  misc_feature 1, 2, 858, 1035, 1036, 1037: n = A,T,C or G

SEQ ID NO: 26809 - DNA, 540 bp, Homo sapiens; identical to SEQ ID NO: 20963
  misc_feature 539, 540: n = A,T,C or G

SEQ ID NO: 26810 - DNA, 1022 bp, Homo sapiens; identical to SEQ ID NO: 20961
  misc_feature 1, 2, 3, 1022: n = A,T,C or G

SEQ ID NO: 26811 - DNA, 721 bp, Homo sapiens; identical to SEQ ID NO: 20081
  misc_feature 709, 721: n = A,T,C or G

SEQ ID NO: 26812 - DNA, 435 bp, Homo sapiens; identical to SEQ ID NO: 20934
  misc_feature 429, 430, 431, 432, 433, 434, 435: n = A,T,C or G

SEQ ID NO: 26813 - DNA, 1275 bp, Homo sapiens; identical to SEQ ID NO: 20967
  misc_feature 1273, 1274, 1275: n = A,T,C or G

SEQ ID NO: 26814 - DNA, 968 bp, Homo sapiens; identical to SEQ ID NO: 20935

SEQ ID NO: 26815 - DNA, 5145 bp, Homo sapiens; identical to SEQ ID NO: 20824
  misc_feature 1, 5144, 5145: n = A,T,C or G

SEQ ID NO: 26816 - DNA, 505 bp, Homo sapiens; identical to SEQ ID NO: 20929

SEQ ID NO: 26817 - DNA, 616 bp, Homo sapiens; identical to SEQ ID NO: 20971
  misc_feature 1, 605, 606, 607, 608, 609, 610, 611, 612, 613, 614, 615,616: n = A,T,C or G

SEQ ID NO: 26818 - DNA, 505 bp, Homo sapiens; identical to SEQ ID NO: 20929

SEQ ID NO: 26819 - DNA, 4399 bp, Homo sapiens; identical to SEQ ID NO: 20975

SEQ ID NO: 26820 - DNA, 493 bp, Homo sapiens; identical to SEQ ID NO: 20976
  misc_feature 487, 488, 489, 490, 491, 492, 493: n = A,T,C or G

SEQ ID NO: 26821 - DNA, 505 bp, Homo sapiens; identical to SEQ ID NO: 20929

SEQ ID NO: 26822 - DNA, 546 bp, Homo sapiens; identical to SEQ ID NO: 20353

SEQ ID NO: 26823 - DNA, 510 bp, Homo sapiens; identical to SEQ ID NO: 20979
  misc_feature 1, 2, 509, 510: n = A,T,C or G

SEQ ID NO: 26824 - DNA, 681 bp, Homo sapiens; identical to SEQ ID NO: 20120
  misc_feature 1, 2, 12: n = A,T,C or G

SEQ ID NO: 26825 - DNA, 399 bp, Homo sapiens; identical to SEQ ID NO: 20981

SEQ ID NO: 26826 - DNA, 435 bp, Homo sapiens; identical to SEQ ID NO: 20934
  misc_feature 429, 430, 431, 432, 433, 434, 435: n = A,T,C or G

SEQ ID NO: 26827 - DNA, 2968 bp, Homo sapiens; identical to SEQ ID NO: 20983
  misc_feature 1, 2: n = A,T,C or G

SEQ ID NO: 26828 - DNA, 579 bp, Homo sapiens; identical to SEQ ID NO: 20440
  misc_feature 1, 2, 578, 579: n = A,T,C or G

SEQ ID NO: 26829 - DNA, 633 bp, Homo sapiens; identical to SEQ ID NO: 20941
  misc_feature 1, 2, 598, 632, 633: n = A,T,C or G

SEQ ID NO: 26830 - DNA, 409 bp, Homo sapiens; identical to SEQ ID NO: 20986
  misc_feature 402, 403, 404, 405, 406, 407, 408, 409: n = A,T,C or G

SEQ ID NO: 26831 - DNA, 379 bp, Homo sapiens; identical to SEQ ID NO: 20987
  misc_feature 379: n = A,T,C or G

SEQ ID NO: 26832 - DNA, 1275 bp, Homo sapiens; identical to SEQ ID NO: 20967
  misc_feature 1273, 1274, 1275: n = A,T,C or G

SEQ ID NO: 26833 - DNA, 546 bp, Homo sapiens; identical to SEQ ID NO: 20353

SEQ ID NO: 26834 - DNA, 493 bp, Homo sapiens; identical to SEQ ID NO: 20976
  misc_feature 487, 488, 489, 490, 491, 492, 493: n = A,T,C or G

SEQ ID NO: 26835 - DNA, 505 bp, Homo sapiens; identical to SEQ ID NO: 20929

SEQ ID NO: 26836 - DNA, 479 bp, Homo sapiens; identical to SEQ ID NO: 20927

SEQ ID NO: 26837 - DNA, 391 bp, Homo sapiens; identical to SEQ ID NO: 20994

SEQ ID NO: 26838 - DNA, 1972 bp, Homo sapiens; identical to SEQ ID NO: 20996
  misc_feature 1935: n = A,T,C or G

SEQ ID NO: 26839 - DNA, 271 bp, Homo sapiens; identical to SEQ ID NO: 20997
  misc_feature 271: n = A,T,C or G

SEQ ID NO: 26840 - DNA, 662 bp, Homo sapiens; identical to SEQ ID NO: 20998

SEQ ID NO: 26841 - DNA, 681 bp, Homo sapiens; identical to SEQ ID NO: 20999
  misc_feature 1, 2, 3, 4, 5, 6, 7, 8, 9, 10, 675, 676, 677, 678, 679, 680,681: n = A,T,C or G

SEQ ID NO: 26842 - DNA, 435 bp, Homo sapiens; identical to SEQ ID NO: 20934
  misc_feature 429, 430, 431, 432, 433, 434, 435: n = A,T,C or G

SEQ ID NO: 26843 - DNA, 763 bp, Homo sapiens; identical to SEQ ID NO: 21001
  misc_feature 1, 2, 759, 760, 761, 762, 763: n = A,T,C or G

SEQ ID NO: 26844 - DNA, 3351 bp, Homo sapiens; identical to SEQ ID NO: 20872
  misc_feature 1, 3351: n = A,T,C or G

SEQ ID NO: 26845 - DNA, 698 bp, Homo sapiens; identical to SEQ ID NO: 21003
  misc_feature 697, 698: n = A,T,C or G

SEQ ID NO: 26846 - DNA, 505 bp, Homo sapiens; identical to SEQ ID NO: 20929

SEQ ID NO: 26847 - DNA, 505 bp, Homo sapiens; identical to SEQ ID NO: 20929

SEQ ID NO: 26848 - DNA, 1896 bp, Homo sapiens; identical to SEQ ID NO: 21007
  misc_feature 1, 2: n = A,T,C or G

SEQ ID NO: 26849 - DNA, 596 bp, Homo sapiens; identical to SEQ ID NO: 21008
  misc_feature 596: n = A,T,C or G

SEQ ID NO: 26850 - DNA, 4742 bp, Homo sapiens; identical to SEQ ID NO: 21009
  misc_feature 1, 4740, 4741, 4742: n = A,T,C or G

SEQ ID NO: 26851 - DNA, 871 bp, Homo sapiens; identical to SEQ ID NO: 21010
  misc_feature 1, 2, 3, 4, 5, 6, 7, 8, 9, 871: n = A,T,C or G

SEQ ID NO: 26852 - DNA, 1290 bp, Homo sapiens; identical to SEQ ID NO: 20742
  misc_feature 1, 2, 1281, 1282, 1283, 1284, 1285, 1286, 1287, 1288, 1289,1290: n = A,T,C or G

SEQ ID NO: 26853 - DNA, 905 bp, Homo sapiens; identical to SEQ ID NO: 20936
  misc_feature 904, 905: n = A,T,C or G

SEQ ID NO: 26854 - DNA, 745 bp, Homo sapiens; identical to SEQ ID NO: 20943
  misc_feature 1, 2, 3, 4, 5, 6, 7, 8, 9, 10, 11, 12, 741, 742, 743, 744,745: n = A,T,C or G

SEQ ID NO: 26855 - DNA, 368 bp, Homo sapiens; identical to SEQ ID NO: 21014
  misc_feature 364, 365, 366, 367, 368: n = A,T,C or G

SEQ ID NO: 26856 - DNA, 1189 bp, Homo sapiens; identical to SEQ ID NO: 20185
  misc_feature 1179, 1180, 1181, 1182, 1183, 1184, 1185, 1186, 1187, 1188,1189: n = A,T,C or G

SEQ ID NO: 26857 - DNA, 505 bp, Homo sapiens; identical to SEQ ID NO: 20929

SEQ ID NO: 26858 - DNA, 5893 bp, Homo sapiens; identical to SEQ ID NO: 21018
  misc_feature 1, 2, 3, 4, 5, 6, 7, 8, 9, 10, 11, 12, 13, 14, 15, 16, 17,18, 19, 20, 21, 22, 23, 24, 25, 5892, 5893: n = A,T,C or G

SEQ ID NO: 26859 - DNA, 526 bp, Homo sapiens; identical to SEQ ID NO: 21044
  misc_feature 1, 2, 3, 4, 5, 6, 7, 8, 526: n = A,T,C or G

SEQ ID NO: 26860 - DNA, 579 bp, Homo sapiens; identical to SEQ ID NO: 20440
  misc_feature 1, 2, 578, 579: n = A,T,C or G

SEQ ID NO: 26861 - DNA, 379 bp, Homo sapiens; identical to SEQ ID NO: 20987
  misc_feature 379: n = A,T,C or G

SEQ ID NO: 26862 - DNA, 505 bp, Homo sapiens; identical to SEQ ID NO: 20929

SEQ ID NO: 26863 - DNA, 748 bp, Homo sapiens; identical to SEQ ID NO: 21023
  misc_feature 1: n = A,T,C or G

SEQ ID NO: 26864 - DNA, 505 bp, Homo sapiens; identical to SEQ ID NO: 20929

SEQ ID NO: 26865 - DNA, 1463 bp, Homo sapiens; identical to SEQ ID NO: 22794
  misc_feature 1, 1463: n = A,T,C or G

SEQ ID NO: 26866 - DNA, 362 bp, Homo sapiens; identical to SEQ ID NO: 20952

SEQ ID NO: 26867 - DNA, 4409 bp, Homo sapiens; identical to SEQ ID NO: 21026
  misc_feature 1, 2, 4400, 4401, 4402, 4403, 4404, 4405, 4406, 4407, 4408,4409: n = A,T,C or G

SEQ ID NO: 26868 - DNA, 3055 bp, Homo sapiens; identical to SEQ ID NO: 21027
  misc_feature 1, 3055: n = A,T,C or G

SEQ ID NO: 26869 - DNA, 528 bp, Homo sapiens; identical to SEQ ID NO: 21029

SEQ ID NO: 26870 - DNA, 505 bp, Homo sapiens; identical to SEQ ID NO: 20929

SEQ ID NO: 26871 - DNA, 364 bp, Homo sapiens; identical to SEQ ID NO: 20925

SEQ ID NO: 26872 - DNA, 984 bp, Homo sapiens; identical to SEQ ID NO: 21032
  misc_feature 1, 2, 3, 966, 967, 968, 969, 970, 971, 972, 973, 974, 975,976, 977, 978, 979, 980, 981, 982, 983, 984: n = A,T,C or G

SEQ ID NO: 26873 - DNA, 905 bp, Homo sapiens; identical to SEQ ID NO: 20936
  misc_feature 904, 905: n = A,T,C or G

SEQ ID NO: 26874 - DNA, 620 bp, Homo sapiens
  misc_feature 1, 2, 3, 4, 5, 6, 7, 8, 9, 10, 11, 12, 13, 513, 620: n = A,T,C or G
nnnnnnnnnnnnncggggtacttctagcaataattaacgcgggtaagctggggcttcatgacaatcactgggttcctgcctgccacagctttaatcgggcaatccataagaaagcaaaagggactgaagctgaagaggaatactaaagtccatgtgagaggcaacaaaaggaccggtttctaaagctgcaaaacacctagatacaccgttcaaatgagcgtagccccctgagtcatcactctagaagaatctgtacatcatcaggactgcattgctcaggcattttctaaactctaaatttacgagctgtacaaaaaaattggtcttgttgtttatagtggcatctcatgtttgaacccgggtggtatcccacagttggattcagttggctgtgaataactgcctgttttcctaaatcaaacccatcctcaaaggatgaagactcaccaccatccaggacattcagaagagttcactgcagatgctgcagatcagccactcttgatctggttntcatgtgggacacaaagctgtgactgcgtgaggggttaaagtgaccaagagcagagggcacacccttacttgatcatctgaagcaaaaaccagaccagggaaactan

SEQ ID NO: 26875 - DNA, 2506 bp, Homo sapiens; identical to SEQ ID NO: 20323
  misc_feature 2503, 2504, 2505, 2506: n = A,T,C or G

SEQ ID NO: 26876 - DNA, 533 bp, Homo sapiens; identical to SEQ ID NO: 20939
  misc_feature 533: n = A,T,C or G

SEQ ID NO: 26877 - DNA, 1275 bp, Homo sapiens; identical to SEQ ID NO: 20967
  misc_feature 1273, 1274, 1275: n = A,T,C or G

SEQ ID NO: 26878 - DNA, 715 bp, Homo sapiens; identical to SEQ ID NO: 21037
  misc_feature 711, 712, 713, 714, 715: n = A,T,C or G

SEQ ID NO: 26879 - DNA, 1275 bp, Homo sapiens; identical to SEQ ID NO: 20967
  misc_feature 1273, 1274, 1275: n = A,T,C or G

SEQ ID NO: 26880 - DNA, 2412 bp, Homo sapiens; identical to SEQ ID NO: 21039
  misc_feature 1, 2212, 2213, 2214, 2215, 2216, 2217, 2218, 2219, 2220,2221, 2222, 2223, 2224, 2225, 2226, 2227, 2228, 2229, 2230,2231, 2232, 2233, 2234, 2235, 2236, 2237, 2238, 2239, 2240,2241, 2242, 2243, 2412: n = A,T,C or G

SEQ ID NO: 26881 - DNA, 1551 bp, Homo sapiens; identical to SEQ ID NO: 21040

SEQ ID NO: 26882 - DNA, 727 bp, Homo sapiens; identical to SEQ ID NO: 20324

SEQ ID NO: 26883 - DNA, 875 bp, Homo sapiens; identical to SEQ ID NO: 21042
  misc_feature 875: n = A,T,C or G

SEQ ID NO: 26884 - DNA, 968 bp, Homo sapiens; identical to SEQ ID NO: 20935

SEQ ID NO: 26885 - DNA, 526 bp, Homo sapiens; identical to SEQ ID NO: 21044
  misc_feature 1, 2, 3, 4, 5, 6, 7, 8, 526: n = A,T,C or G

SEQ ID NO: 26886 - DNA, 604 bp, Homo sapiens; identical to SEQ ID NO: 21045
  misc_feature 1: n = A,T,C or G

SEQ ID NO: 26887 - DNA, 520 bp, Homo sapiens; identical to SEQ ID NO: 21046
  misc_feature 1, 2, 3, 4, 5, 6: n = A,T,C or G

SEQ ID NO: 26888 - DNA, 968 bp, Homo sapiens; identical to SEQ ID NO: 20935

SEQ ID NO: 26889 - DNA, 671 bp, Homo sapiens; identical to SEQ ID NO: 21048

SEQ ID NO: 26890 - DNA, 546 bp, Homo sapiens; identical to SEQ ID NO: 20353

SEQ ID NO: 26891 - DNA, 528 bp, Homo sapiens; identical to SEQ ID NO: 21029

SEQ ID NO: 26892 - DNA, 505 bp, Homo sapiens; identical to SEQ ID NO: 20929

SEQ ID NO: 26893 - DNA, 1275 bp, Homo sapiens; identical to SEQ ID NO: 20967
  misc_feature 1273, 1274, 1275: n = A,T,C or G

SEQ ID NO: 26894 - DNA, 721 bp, Homo sapiens; identical to SEQ ID NO: 20081
  misc_feature 709, 721: n = A,T,C or G

SEQ ID NO: 26895 - DNA, 1468 bp, Homo sapiens; identical to SEQ ID NO: 20960
  misc_feature 1465, 1466, 1467, 1468: n = A,T,C or G

SEQ ID NO: 26896 - DNA, 493 bp, Homo sapiens; identical to SEQ ID NO: 20976
  misc_feature 487, 488, 489, 490, 491, 492, 493: n = A,T,C or G

SEQ ID NO: 26897 - DNA, 2412 bp, Homo sapiens; identical to SEQ ID NO: 21039
  misc_feature 1, 2212, 2213, 2214, 2215, 2216, 2217, 2218, 2219, 2220,2221, 2222, 2223, 2224, 2225, 2226, 2227, 2228, 2229, 2230,2231, 2232, 2233, 2234, 2235, 2236, 2237, 2238, 2239, 2240,2241, 2242, 2243, 2412: n = A,T,C or G

SEQ ID NO: 26898 - DNA, 442 bp, Homo sapiens; identical to SEQ ID NO: 21057
  misc_feature 442: n = A,T,C or G

SEQ ID NO: 26899 - DNA, 459 bp, Homo sapiens; identical to SEQ ID NO: 21058
  misc_feature 1, 2: n = A,T,C or G

SEQ ID NO: 26900 - DNA, 546 bp, Homo sapiens; identical to SEQ ID NO: 20353

SEQ ID NO: 26901 - DNA, 3518 bp, Homo sapiens; identical to SEQ ID NO: 21060
  misc_feature 1, 2, 3, 4, 5, 3510, 3511, 3512, 3513, 3514, 3515, 3516,3517, 3518: n = A,T,C or G

SEQ ID NO: 26902 - DNA, 435 bp, Homo sapiens; identical to SEQ ID NO: 20934
  misc_feature 429, 430, 431, 432, 433, 434, 435: n = A,T,C or G

SEQ ID NO: 26903 - DNA, 4294 bp, Homo sapiens; identical to SEQ ID NO: 21062
  misc_feature 1, 2, 3, 4293, 4294: n = A,T,C or G

SEQ ID NO: 26904 - DNA, 2487 bp, Homo sapiens; identical to SEQ ID NO: 20922
  misc_feature 1, 2, 3, 4, 5, 6, 7, 8, 2459, 2460, 2461, 2462, 2463, 2464,2465, 2466, 2467, 2468, 2469, 2470, 2471, 2472, 2473, 2474,2475, 2476, 2477, 2478, 2479, 2480, 2481, 2482, 2483, 2484,2485, 2486, 2487: n = A,T,C or G

SEQ ID NO: 26905 - DNA, 4646 bp, Homo sapiens; identical to SEQ ID NO: 21064

SEQ ID NO: 26906 - DNA, 2061 bp, Homo sapiens; identical to SEQ ID NO: 21065
  misc_feature 1, 2054, 2055, 2056, 2057, 2058, 2059, 2060, 2061: n = A,T,C or G

SEQ ID NO: 26907 - DNA, 1670 bp, Homo sapiens; identical to SEQ ID NO: 21066

SEQ ID NO: 26908 - DNA, 387 bp, Homo sapiens; identical to SEQ ID NO: 21067

SEQ ID NO: 26909 - DNA, 1150 bp, Homo sapiens; identical to SEQ ID NO: 21068
  misc_feature 1, 1142, 1143, 1144, 1145, 1146, 1147, 1148, 1149, 1150: n = A,T,C or G

SEQ ID NO: 26910 - DNA, 3122 bp, Homo sapiens; identical to SEQ ID NO: 21069
  misc_feature 1, 3113, 3114, 3115, 3116, 3117, 3118, 3119, 3120, 3121,3122: n = A,T,C or G

SEQ ID NO: 26911 - DNA, 252 bp, Homo sapiens; identical to SEQ ID NO: 21070

SEQ ID NO: 26912 - DNA, 5145 bp, Homo sapiens; identical to SEQ ID NO: 20824
  misc_feature 1, 5144, 5145: n = A,T,C or G

SEQ ID NO: 26913 - DNA, 411 bp, Homo sapiens; identical to SEQ ID NO: 20409

SEQ ID NO: 26914 - DNA, 1490 bp, Homo sapiens; identical to SEQ ID NO: 21073

SEQ ID NO: 26915 - DNA, 968 bp, Homo sapiens; identical to SEQ ID NO: 20935

SEQ ID NO: 26916 - DNA, 540 bp, Homo sapiens; identical to SEQ ID NO: 20963
  misc_feature 539, 540: n = A,T,C or G

SEQ ID NO: 26917 - DNA, 520 bp, Homo sapiens; identical to SEQ ID NO: 21046
  misc_feature 1, 2, 3, 4, 5, 6: n = A,T,C or G

SEQ ID NO: 26918 - DNA, 3281 bp, Homo sapiens; identical to SEQ ID NO: 21078
  misc_feature 1, 2, 3280, 3281: n = A,T,C or G

SEQ ID NO: 26919 - DNA, 435 bp, Homo sapiens; identical to SEQ ID NO: 20934
  misc_feature 429, 430, 431, 432, 433, 434, 435: n = A,T,C or G

SEQ ID NO: 26920 - DNA, 4037 bp, Homo sapiens; identical to SEQ ID NO: 21080
  misc_feature 4026, 4027, 4028, 4029, 4030, 4031, 4032, 4033, 4034, 4035,4036, 4037: n = A,T,C or G

SEQ ID NO: 26921 - DNA, 374 bp, Homo sapiens; identical to SEQ ID NO: 21081
  misc_feature 371, 372, 373, 374: n = A,T,C or G

SEQ ID NO: 26922 - DNA, 332 bp, Homo sapiens; identical to SEQ ID NO: 21082

SEQ ID NO: 26923 - DNA, 5145 bp, Homo sapiens; identical to SEQ ID NO: 20824
  misc_feature 1, 5144, 5145: n = A,T,C or G

SEQ ID NO: 26924 - DNA, 905 bp, Homo sapiens; identical to SEQ ID NO: 20936
  misc_feature 904, 905: n = A,T,C or G

SEQ ID NO: 26925 - DNA, 505 bp, Homo sapiens; identical to SEQ ID NO: 20929

SEQ ID NO: 26926 - DNA, 650 bp, Homo sapiens; identical to SEQ ID NO: 21087
  misc_feature 650: n = A,T,C or G

SEQ ID NO: 26927 - DNA, 387 bp, Homo sapiens; identical to SEQ ID NO: 21067

SEQ ID NO: 26928 - DNA, 364 bp, Homo sapiens; identical to SEQ ID NO: 20925

SEQ ID NO: 26929 - DNA, 3399 bp, Homo sapiens; identical to SEQ ID NO: 21090
  misc_feature 1, 2, 3230, 3231, 3232, 3233, 3389, 3390, 3391, 3392, 3393,3394, 3395, 3396, 3397, 3398, 3399: n = A,T,C or G

SEQ ID NO: 26930 - DNA, 505 bp, Homo sapiens; identical to SEQ ID NO: 20929

SEQ ID NO: 26931 - DNA, 505 bp, Homo sapiens; identical to SEQ ID NO: 20929

SEQ ID NO: 26932 - DNA, 1274 bp, Homo sapiens; identical to SEQ ID NO: 20926
  misc_feature 1271, 1272, 1273, 1274: n = A,T,C or G

SEQ ID NO: 26933 - DNA, 1275 bp, Homo sapiens; identical to SEQ ID NO: 20967
  misc_feature 1273, 1274, 1275: n = A,T,C or G

SEQ ID NO: 26934 - DNA, 1275 bp, Homo sapiens; identical to SEQ ID NO: 20967
  misc_feature 1273, 1274, 1275: n = A,T,C or G

SEQ ID NO: 26935 - DNA, 2487 bp, Homo sapiens; identical to SEQ ID NO: 20922
  misc_feature 1, 2, 3, 4, 5, 6, 7, 8, 2459, 2460, 2461, 2462, 2463, 2464,2465, 2466, 2467, 2468, 2469, 2470, 2471, 2472, 2473, 2474,2475, 2476, 2477, 2478, 2479, 2480, 2481, 2482, 2483, 2484,2485, 2486, 2487: n = A,T,C or G

SEQ ID NO: 26936 - DNA, 526 bp, Homo sapiens; identical to SEQ ID NO: 21044
  misc_feature 1, 2, 3, 4, 5, 6, 7, 8, 526: n = A,T,C or G

SEQ ID NO: 26937 - DNA, 528 bp, Homo sapiens; identical to SEQ ID NO: 21029

SEQ ID NO: 26938 - DNA, 505 bp, Homo sapiens; identical to SEQ ID NO: 20929

SEQ ID NO: 26939 - DNA, 360 bp, Homo sapiens; identical to SEQ ID NO: 21100
  misc_feature 1, 2, 3: n = A,T,C or G

SEQ ID NO: 26940 - DNA, 3983 bp, Homo sapiens; identical to SEQ ID NO: 21101

SEQ ID NO: 26941 - DNA, 576 bp, Homo sapiens; identical to SEQ ID NO: 21102
  misc_feature 543: n = A,T,C or G

SEQ ID NO: 26942 - DNA, 1685 bp, Homo sapiens; identical to SEQ ID NO: 21103

SEQ ID NO: 26943 - DNA, 1552 bp, Homo sapiens; identical to SEQ ID NO: 21133

SEQ ID NO: 26944 - DNA, 690 bp, Homo sapiens; identical to SEQ ID NO: 21104

SEQ ID NO: 26945 - DNA, 3025 bp, Homo sapiens; identical to SEQ ID NO: 21105
  misc_feature 3022, 3023, 3024, 3025: n = A,T,C or G

SEQ ID NO: 26946 - DNA, 876 bp, Homo sapiens; identical to SEQ ID NO: 21106
  misc_feature 1, 2, 3, 4, 5, 6, 7, 8, 9, 10, 11, 872, 873, 874, 875, 876: n = A,T,C or G

SEQ ID NO: 26947 - DNA, 1307 bp, Homo sapiens; identical to SEQ ID NO: 21107

SEQ ID NO: 26948 - DNA, 3540 bp, Homo sapiens; identical to SEQ ID NO: 21108
  misc_feature 1, 2, 3, 4, 5, 6, 7, 8, 9, 10, 11, 12, 13, 14, 15, 16, 17,18, 67, 68, 69, 70, 72, 73, 3538, 3539, 3540: n = A,T,C or G

SEQ ID NO: 26949 - DNA, 362 bp, Homo sapiens; identical to SEQ ID NO: 21109
  misc_feature 362: n = A,T,C or G

SEQ ID NO: 26950 - DNA, 498 bp, Homo sapiens; identical to SEQ ID NO: 21110

SEQ ID NO: 26951 - DNA, 2325 bp, Homo sapiens; identical to SEQ ID NO: 21111
  misc_feature 1, 2, 3, 5, 2321, 2322, 2323, 2324, 2325: n = A,T,C or G

SEQ ID NO: 26952 - DNA, 1801 bp, Homo sapiens; identical to SEQ ID NO: 21112
  misc_feature 978, 979, 980, 981, 982, 983, 984, 985, 986, 987, 988, 989,990, 991, 992, 993, 994, 995, 996, 997, 998, 999, 1000,1001, 1002, 1003, 1004, 1005, 1006: n = A,T,C or G

SEQ ID NO: 26953 - DNA, 3122 bp, Homo sapiens; identical to SEQ ID NO: 21069
  misc_feature 1, 3113, 3114, 3115, 3116, 3117, 3118, 3119, 3120, 3121,3122: n = A,T,C or G

SEQ ID NO: 26954 - DNA, 2522 bp, Homo sapiens; identical to SEQ ID NO: 21114
  misc_feature 1, 2: n = A,T,C or G

SEQ ID NO: 26955 - DNA, 1641 bp, Homo sapiens; identical to SEQ ID NO: 20385
  misc_feature 1, 2, 1626, 1627, 1628, 1629, 1630, 1631, 1632, 1633, 1634,1635, 1636, 1637, 1638, 1639, 1640, 1641: n = A,T,C or G

SEQ ID NO: 26956 - DNA, 372 bp, Homo sapiens; identical to SEQ ID NO: 21116

SEQ ID NO: 26957 - DNA, 1913 bp, Homo sapiens; identical to SEQ ID NO: 21117
  misc_feature 1, 2, 3: n = A,T,C or G

SEQ ID NO: 26958 - DNA, 403 bp, Homo sapiens; identical to SEQ ID NO: 20397
  misc_feature 403: n = A,T,C or G

SEQ ID NO: 26959 - DNA, 1125 bp, Homo sapiens; identical to SEQ ID NO: 21119
  misc_feature 1, 2, 1119, 1120, 1121, 1122, 1123, 1124, 1125: n = A,T,C or G

SEQ ID NO: 26960 - DNA, 2912 bp, Homo sapiens; identical to SEQ ID NO: 21120
  misc_feature 2908, 2909, 2910, 2911, 2912: n = A,T,C or G

SEQ ID NO: 26961 - DNA, 1515 bp, Homo sapiens; identical to SEQ ID NO: 21121

SEQ ID NO: 26962 - DNA, 920 bp, Homo sapiens; identical to SEQ ID NO: 21122
  misc_feature 917, 918, 919, 920: n = A,T,C or G

SEQ ID NO: 26963 - DNA, 611 bp, Homo sapiens; identical to SEQ ID NO: 21123
  misc_feature 1, 2: n = A,T,C or G

SEQ ID NO: 26964 - DNA, 2298 bp, Homo sapiens; identical to SEQ ID NO: 21124
  misc_feature 1, 2, 5, 14, 51, 2293, 2294, 2295, 2296, 2297, 2298: n = A,T,C or G

SEQ ID NO: 26965 - DNA, 1685 bp, Homo sapiens; identical to SEQ ID NO: 21103

SEQ ID NO: 26966 - DNA, 405 bp, Homo sapiens; identical to SEQ ID NO: 21127
  misc_feature 404, 405: n = A,T,C or G

SEQ ID NO: 26967 - DNA, 1325 bp, Homo sapiens
  misc_feature 1, 2, 3, 4, 5, 6, 1324, 1325: n = A,T,C or G
nnnnnncgcgcacggcataccgagactacacgcagtacggagagcctacccgcaggcggactgtgatctcaggtagcatactaatcctaagcgttgcacatatcgcgttatgagatgcctactgatacaacacgggtctgtcggccgagtccgcatgtgcgccggaagatggcggctgtgtcggtgtatgctccaccagttggaggcttctcttttgataactgccgcaggaatgccgtcttggaagccgattttgcaaagaggggatacaagcttccaaaggcccggaaaactggcacgaccatcgctggggtggtctataaggatggcatagttcttggagcagatacaagagcaactgaagggatggttgttgctgacaagaactgttcaaaaatacacttcatatctcctaatatttattgttgtggtgctgggacagctgcagacacagacatgacaacccagctcatttcttccaacctggagctccactccctctccactggccgtcttcccagagttgtgacagccaatcggatgctgaagcagatgcttttcaggtatcaaggttacattggtgcagccctagttttagggggagtagatgttactggacctcacctctacagcatctatcctcatggatcaactgataagttgccttatgtcaccatgggttctggctccttggcagcaatggctgtatttgaagataagtttaggccagacatggaggaggaggaagccaagaatctggtgagcgaagccatcgcagctggcatcttcaacgacctgggctccggaagcaacattgacctctgcgtcatcagcaagaacaagctggattttctccgcccatacacagtgcccaacaagaaggggaccaggcttggccggtacaggtgtgagaaagggactactgcagtcctcactgagaaaatcactcctctggagattgaggtgctggaagaaacagtccaaacaatggacacttcctgaatggcatcagtgggtggctggccgcggttctggaaggtggtgagcattgaggcccagtaagacactcatgtggctagtgtttgccgaatgaaactcaactcaataaaaaacaaaaaccaaattgggcagccgaaaaaaaaaaaaaactaataacataaaaacatctctgcagagggactatttgacgggggggggggaaacagagggttttagaaggggcgcattgtgactaagagttgttctcttacacgacgtttttttgcaacagcgtgtaattgccgggccccacataagaggacgaataattcaataacgcggtacnn

SEQ ID NO: 26968 - DNA, 2929 bp, Homo sapiens; identical to SEQ ID NO: 21129

SEQ ID NO: 26969 - DNA, 376 bp, Homo sapiens; identical to SEQ ID NO: 21130
  misc_feature 376: n = A,T,C or G

SEQ ID NO: 26970 - DNA, 278 bp, Homo sapiens; identical to SEQ ID NO: 21131
  misc_feature 1, 2, 3, 123, 124, 125, 126, 127, 128, 129, 130, 131, 132,133, 134, 135, 136, 137, 138, 139, 140, 141, 142, 143, 144,145, 146, 147, 148, 149, 150, 151, 152, 153, 154, 155, 156,157: n = A,T,C or G

SEQ ID NO: 26971 - DNA, 374 bp, Homo sapiens; identical to SEQ ID NO: 21132
  misc_feature 1: n = A,T,C or G

SEQ ID NO: 26972 - DNA, 1552 bp, Homo sapiens; identical to SEQ ID NO: 21133

SEQ ID NO: 26973 - DNA, 387 bp, Homo sapiens; identical to SEQ ID NO: 21134
  misc_feature 1, 386, 387: n = A,T,C or G

SEQ ID NO: 26974 - DNA, 3430 bp, Homo sapiens; identical to SEQ ID NO: 21135
  misc_feature 2331: n = A,T,C or G

SEQ ID NO: 26975 - DNA, 3678 bp, Homo sapiens; identical to SEQ ID NO: 21136

SEQ ID NO: 26976 - DNA, 882 bp, Homo sapiens; identical to SEQ ID NO: 21137
  misc_feature 1, 2, 3, 853, 881, 882: n = A,T,C or G

SEQ ID NO: 26977 - DNA, 817 bp, Homo sapiens; identical to SEQ ID NO: 21138
  misc_feature 805, 806, 807, 808, 809, 810, 811, 812, 813, 814, 815, 816,817: n = A,T,C or G

SEQ ID NO: 26978 - DNA, 601 bp, Homo sapiens; identical to SEQ ID NO: 20756

SEQ ID NO: 26979 - DNA, 843 bp, Homo sapiens; identical to SEQ ID NO: 21141
  misc_feature 604, 843: n = A,T,C or G

SEQ ID NO: 26980 - DNA, 965 bp, Homo sapiens; identical to SEQ ID NO: 21142
  misc_feature 1, 2, 3, 4, 5: n = A,T,C or G

SEQ ID NO: 26981 - DNA, 405 bp, Homo sapiens; identical to SEQ ID NO: 21127
  misc_feature 404, 405: n = A,T,C or G

SEQ ID NO: 26982 - DNA, 611 bp, Homo sapiens; identical to SEQ ID NO: 21123
  misc_feature 1, 2: n = A,T,C or G

SEQ ID NO: 26983 - DNA, 1552 bp, Homo sapiens; identical to SEQ ID NO: 21133

SEQ ID NO: 26984 - DNA, 1201 bp, Homo sapiens; identical to SEQ ID NO: 21146
  misc_feature 959: n = A,T,C or G

SEQ ID NO: 26985 - DNA, 1552 bp, Homo sapiens; identical to SEQ ID NO: 21133

SEQ ID NO: 26986 - DNA, 3983 bp, Homo sapiens; identical to SEQ ID NO: 21101

SEQ ID NO: 26987 - DNA, 1643 bp, Homo sapiens; identical to SEQ ID NO: 21150
  misc_feature 1, 2, 3, 4, 1615, 1616, 1617, 1618, 1619, 1620, 1621, 1622,1623, 1624, 1625, 1626, 1627, 1628, 1629, 1630, 1631, 1632,1633, 1634, 1635, 1636, 1637, 1638, 1639, 1640, 1641, 1642,1643: n = A,T,C or G

SEQ ID NO: 26988 - DNA, 875 bp, Homo sapiens; identical to SEQ ID NO: 21042
  misc_feature 875: n = A,T,C or G

SEQ ID NO: 26989 - DNA, 1643 bp, Homo sapiens; identical to SEQ ID NO: 21150
  misc_feature 1, 2, 3, 4, 1615, 1616, 1617, 1618, 1619, 1620, 1621, 1622,1623, 1624, 1625, 1626, 1627, 1628, 1629, 1630, 1631, 1632,1633, 1634, 1635, 1636, 1637, 1638, 1639, 1640, 1641, 1642,1643: n = A,T,C or G

SEQ ID NO: 26990 - DNA, 2242 bp, Homo sapiens; identical to SEQ ID NO: 21153
  misc_feature 2084, 2085, 2086, 2087, 2088, 2089, 2090, 2091, 2092, 2093,2094, 2095, 2096, 2097, 2098, 2099, 2100, 2101, 2102, 2103,2104, 2105, 2106, 2107, 2108, 2109, 2110, 2111, 2112, 2113,2114, 2115, 2116, 2117, 2118, 2119, 2120, 2121, 2122: n = A,T,C or G
  misc_feature 2123, 2124, 2125, 2126, 2127, 2128, 2129, 2130, 2131, 2132,2133, 2134, 2135, 2136, 2137, 2138, 2139, 2140, 2141, 2142,2143, 2144, 2145, 2146, 2147, 2148, 2149, 2150, 2151, 2152,2153, 2154, 2155, 2156, 2157, 2158, 2159, 2160, 2161: n = A,T,C or G
  misc_feature 2162, 2163, 2164, 2165, 2166, 2167, 2168, 2169, 2170, 2171,2172, 2173, 2227, 2228, 2229, 2230, 2231, 2232, 2233, 2234,2235, 2236, 2237, 2238, 2239, 2240, 2241, 2242: n = A,T,C or G

SEQ ID NO: 26991 - DNA, 875 bp, Homo sapiens; identical to SEQ ID NO: 21154
  misc_feature 875: n = A,T,C or G

SEQ ID NO: 26992 - DNA, 2912 bp, Homo sapiens; identical to SEQ ID NO: 21155
  misc_feature 1867, 2200, 2910, 2911, 2912: n = A,T,C or G

SEQ ID NO: 26993 - DNA, 3122 bp, Homo sapiens; identical to SEQ ID NO: 21069
  misc_feature 1, 3113, 3114, 3115, 3116, 3117, 3118, 3119, 3120, 3121,3122: n = A,T,C or G

SEQ ID NO: 26994 - DNA, 1546 bp, Homo sapiens; identical to SEQ ID NO: 21157

SEQ ID NO: 26995 - DNA, 634 bp, Homo sapiens; identical to SEQ ID NO: 21158
  misc_feature 551, 631, 632, 633, 634: n = A,T,C or G

SEQ ID NO: 26996 - DNA, 3122 bp, Homo sapiens; identical to SEQ ID NO: 21069
  misc_feature 1, 3113, 3114, 3115, 3116, 3117, 3118, 3119, 3120, 3121,3122: n = A,T,C or G

SEQ ID NO: 26997 - DNA, 531 bp, Homo sapiens; identical to SEQ ID NO: 21160
  misc_feature 1, 2, 3, 4, 5, 6, 7, 8, 9, 10, 11, 12, 13, 14, 15, 16, 17,18, 19, 20, 21, 22, 23, 24, 25, 26, 27, 28, 29, 30, 529,530, 531: n = A,T,C or G

SEQ ID NO: 26998 - DNA, 1913 bp, Homo sapiens; identical to SEQ ID NO: 21117
  misc_feature 1, 2, 3: n = A,T,C or G

SEQ ID NO: 26999 - DNA, 2296 bp, Homo sapiens; identical to SEQ ID NO: 21162

SEQ ID NO: 27000 - DNA, 309 bp, Homo sapiens; identical to SEQ ID NO: 21163

SEQ ID NO: 27001 - DNA, 587 bp, Homo sapiens; identical to SEQ ID NO: 21164
  misc_feature 1, 581, 582, 583, 584, 585, 586, 587: n = A,T,C or G

SEQ ID NO: 27002 - DNA, 650 bp, Homo sapiens; identical to SEQ ID NO: 21165

SEQ ID NO: 27003 - DNA, 771 bp, Homo sapiens; identical to SEQ ID NO: 21166
  misc_feature 1, 2, 3, 754, 770, 771: n = A,T,C or G

SEQ ID NO: 27004 - DNA, 618 bp, Homo sapiens; identical to SEQ ID NO: 21167
  misc_feature 1, 2, 3, 4, 5, 6, 7, 8, 9, 10, 11, 12, 13, 14, 15, 16, 17,18, 19, 614, 615, 616, 617, 618: n = A,T,C or G

SEQ ID NO: 27005 - DNA, 567 bp, Homo sapiens; identical to SEQ ID NO: 21168
  misc_feature 562, 563, 564, 565, 566, 567: n = A,T,C or G

SEQ ID NO: 27006 - DNA, 587 bp, Homo sapiens; identical to SEQ ID NO: 21164
  misc_feature 1, 581, 582, 583, 584, 585, 586, 587: n = A,T,C or G

SEQ ID NO: 27007 - DNA, 565 bp, Homo sapiens; identical to SEQ ID NO: 21169
  misc_feature 563, 564, 565: n = A,T,C or G

SEQ ID NO: 27008 - DNA, 587 bp, Homo sapiens; identical to SEQ ID NO: 21164
  misc_feature 1, 581, 582, 583, 584, 585, 586, 587: n = A,T,C or G

SEQ ID NO: 27009 - DNA, 771 bp, Homo sapiens; identical to SEQ ID NO: 21166
  misc_feature 1, 2, 3, 754, 770, 771: n = A,T,C or G

SEQ ID NO: 27010 - DNA, 523 bp, Homo sapiens; identical to SEQ ID NO: 21172
  misc_feature 1, 2, 3, 490, 522, 523: n = A,T,C or G

SEQ ID NO: 27011 - DNA, 771 bp, Homo sapiens; identical to SEQ ID NO: 21166
  misc_feature 1, 2, 3, 754, 770, 771: n = A,T,C or G

SEQ ID NO: 27012 - DNA, 371 bp, Homo sapiens; identical to SEQ ID NO: 21173
  misc_feature 371: n = A,T,C or G

SEQ ID NO: 27013 - DNA, 313 bp, Homo sapiens; identical to SEQ ID NO: 21174
  misc_feature 1, 311, 312, 313: n = A,T,C or G

SEQ ID NO: 27014 - DNA, 371 bp, Homo sapiens; identical to SEQ ID NO: 21173
  misc_feature 371: n = A,T,C or G

SEQ ID NO: 27015 - DNA, 569 bp, Homo sapiens; identical to SEQ ID NO: 21176
  misc_feature 563, 564, 565, 566, 567, 568, 569: n = A,T,C or G

SEQ ID NO: 27016 - DNA, 313 bp, Homo sapiens; identical to SEQ ID NO: 21174
  misc_feature 1, 311, 312, 313: n = A,T,C or G

SEQ ID NO: 27017 - DNA, 313 bp, Homo sapiens; identical to SEQ ID NO: 21174
  misc_feature 1, 311, 312, 313: n = A,T,C or G

SEQ ID NO: 27018 - DNA, 815 bp, Homo sapiens; identical to SEQ ID NO: 21179
  misc_feature 1, 2, 3, 798, 799, 800, 801, 802, 803, 804, 805, 806, 807,808, 809, 810, 811, 812, 813, 814, 815: n = A,T,C or G

SEQ ID NO: 27019 - DNA, 869 bp, Homo sapiens; identical to SEQ ID NO: 21180
  misc_feature 1, 2, 3, 820, 821, 822, 846, 867, 868, 869: n = A,T,C or G

SEQ ID NO: 27020 - DNA, 587 bp, Homo sapiens; identical to SEQ ID NO: 21164
  misc_feature 1, 581, 582, 583, 584, 585, 586, 587: n = A,T,C or G

SEQ ID NO: 27021 - DNA, 587 bp, Homo sapiens; identical to SEQ ID NO: 21164
  misc_feature 1, 581, 582, 583, 584, 585, 586, 587: n = A,T,C or G

SEQ ID NO: 27022 - DNA, 533 bp, Homo sapiens
  misc_feature 531, 532, 533: n = A,T,C or G
gaaggagtttcactcctgttgccaaggctggagtgcaatggcgcaattaggctcactgcaacctcctcttcccgggctcaagtgattctcctgcctcagcctcccgagtagctgggattacaggtacccaccaccatgcccagctaattttttgtatttttaatagagatggggtttcaccatgttggccaggctggtcttgaactcctgacctcaggtgatccacctgcctcggcctcccaaagtgctgggattacaggtgtgagccatggtacccagccttcctcagcatttctgtctgtccccacacacaggctcagcagccagagaaagccaagggcatataggcagggcaacaacatctgtgcaccttgcggctgcctgctagtttcctagaaacatattctcagacatgcctaagaagaaatgcacttgtaggtgtttcaaacgcaggggtccctgagttaccaggataaaacccatagagtcccaacagacatctgtaccaaaagaggaaagcacttgattacnnn

SEQ ID NO: 27023 - DNA, 569 bp, Homo sapiens; identical to SEQ ID NO: 21176
  misc_feature 563, 564, 565, 566, 567, 568, 569: n = A,T,C or G

SEQ ID NO: 27024 - DNA, 869 bp, Homo sapiens; identical to SEQ ID NO: 21180
  misc_feature 1, 2, 3, 820, 821, 822, 846, 867, 868, 869: n = A,T,C or G

SEQ ID NO: 27025 - DNA, 545 bp, Homo sapiens; identical to SEQ ID NO: 21184
  misc_feature 1, 2, 37, 542, 543, 544, 545: n = A,T,C or G

SEQ ID NO: 27026 - DNA, 587 bp, Homo sapiens; identical to SEQ ID NO: 21164
  misc_feature 1, 581, 582, 583, 584, 585, 586, 587: n = A,T,C or G

SEQ ID NO: 27027 - DNA, 488 bp, Homo sapiens; identical to SEQ ID NO: 21185
  misc_feature 1, 2, 3, 4, 5, 6: n = A,T,C or G

SEQ ID NO: 27028 - DNA, 313 bp, Homo sapiens; identical to SEQ ID NO: 21174
  misc_feature 1, 311, 312, 313: n = A,T,C or G

SEQ ID NO: 27029 - DNA, 499 bp, Homo sapiens; identical to SEQ ID NO: 21187
  misc_feature 1, 2, 3, 8, 12, 13, 15, 24, 25, 28, 31, 497, 498, 499: n = A,T,C or G

SEQ ID NO: 27030 - DNA, 2653 bp, Homo sapiens; identical to SEQ ID NO: 23624
  misc_feature 1, 2, 2642, 2643, 2644, 2645, 2646, 2647, 2648, 2649, 2650,2651, 2652, 2653: n = A,T,C or G

SEQ ID NO: 27031 - DNA, 520 bp, Homo sapiens; identical to SEQ ID NO: 21188
  misc_feature 1, 2, 3, 519, 520: n = A,T,C or G

SEQ ID NO: 27032 - DNA, 313 bp, Homo sapiens; identical to SEQ ID NO: 21174
  misc_feature 1, 311, 312, 313: n = A,T,C or G

SEQ ID NO: 27033 - DNA, 575 bp, Homo sapiens; identical to SEQ ID NO: 21190
  misc_feature 1, 2, 575: n = A,T,C or G

SEQ ID NO: 27034 - DNA, 565 bp, Homo sapiens; identical to SEQ ID NO: 21169
  misc_feature 563, 564, 565: n = A,T,C or G

SEQ ID NO: 27035 - DNA, 520 bp, Homo sapiens; identical to SEQ ID NO: 21188
  misc_feature 1, 2, 3, 519, 520: n = A,T,C or G

SEQ ID NO: 27036 - DNA, 557 bp, Homo sapiens; identical to SEQ ID NO: 21245
  misc_feature 1, 2, 3, 4, 5, 6: n = A,T,C or G

SEQ ID NO: 27037 - DNA, 313 bp, Homo sapiens; identical to SEQ ID NO: 21174
  misc_feature 1, 311, 312, 313: n = A,T,C or G

SEQ ID NO: 27038 - DNA, 545 bp, Homo sapiens; identical to SEQ ID NO: 21184
  misc_feature 1, 2, 37, 542, 543, 544, 545: n = A,T,C or G

SEQ ID NO: 27039 - DNA, 869 bp, Homo sapiens; identical to SEQ ID NO: 21180
  misc_feature 1, 2, 3, 820, 821, 822, 846, 867, 868, 869: n = A,T,C or G

SEQ ID NO: 27040 - DNA, 313 bp, Homo sapiens; identical to SEQ ID NO: 21174
  misc_feature 1, 311, 312, 313: n = A,T,C or G

SEQ ID NO: 27041 - DNA, 610 bp, Homo sapiens; identical to SEQ ID NO: 21197
  misc_feature 1, 2, 609, 610: n = A,T,C or G

SEQ ID NO: 27042 - DNA, 2505 bp, Homo sapiens; identical to SEQ ID NO: 21198
  misc_feature 1, 2, 3, 4, 5, 2505: n = A,T,C or G

SEQ ID NO: 27043 - DNA, 2505 bp, Homo sapiens; identical to SEQ ID NO: 21198
  misc_feature 1, 2, 3, 4, 5, 2505: n = A,T,C or G

SEQ ID NO: 27044 - DNA, 569 bp, Homo sapiens; identical to SEQ ID NO: 21176
  misc_feature 563, 564, 565, 566, 567, 568, 569: n = A,T,C or G

SEQ ID NO: 27045 - DNA, 467 bp, Homo sapiens; identical to SEQ ID NO: 21201
  misc_feature 1, 2, 3, 4, 5, 6, 7, 8, 9, 10, 11, 12: n = A,T,C or G

SEQ ID NO: 27046 - DNA, 618 bp, Homo sapiens; identical to SEQ ID NO: 21167
  misc_feature 1, 2, 3, 4, 5, 6, 7, 8, 9, 10, 11, 12, 13, 14, 15, 16, 17,18, 19, 614, 615, 616, 617, 618: n = A,T,C or G

SEQ ID NO: 27047 - DNA, 569 bp, Homo sapiens; identical to SEQ ID NO: 21176
  misc_feature 563, 564, 565, 566, 567, 568, 569: n = A,T,C or G

SEQ ID NO: 27048 - DNA, 420 bp, Homo sapiens; identical to SEQ ID NO: 21204
  misc_feature 420: n = A,T,C or G

SEQ ID NO: 27049 - DNA, 869 bp, Homo sapiens; identical to SEQ ID NO: 21180
  misc_feature 1, 2, 3, 820, 821, 822, 846, 867, 868, 869: n = A,T,C or G

SEQ ID NO: 27050 - DNA, 618 bp, Homo sapiens; identical to SEQ ID NO: 21167
  misc_feature 1, 2, 3, 4, 5, 6, 7, 8, 9, 10, 11, 12, 13, 14, 15, 16, 17,18, 19, 614, 615, 616, 617, 618: n = A,T,C or G

SEQ ID NO: 27051 - DNA, 467 bp, Homo sapiens; identical to SEQ ID NO: 21201
  misc_feature 1, 2, 3, 4, 5, 6, 7, 8, 9, 10, 11, 12: n = A,T,C or G

SEQ ID NO: 27052 - DNA, 545 bp, Homo sapiens; identical to SEQ ID NO: 21184
  misc_feature 1, 2, 37, 542, 543, 544, 545: n = A,T,C or G

SEQ ID NO: 27053 - DNA, 557 bp, Homo sapiens; identical to SEQ ID NO: 21209
  misc_feature 556, 557: n = A,T,C or G

SEQ ID NO: 27054 - DNA, 650 bp, Homo sapiens; identical to SEQ ID NO: 21165

SEQ ID NO: 27055 - DNA, 390 bp, Homo sapiens; identical to SEQ ID NO: 21211

SEQ ID NO: 27056 - DNA, 313 bp, Homo sapiens; identical to SEQ ID NO: 21174
  misc_feature 1, 311, 312, 313: n = A,T,C or G

SEQ ID NO: 27057 - DNA, 2505 bp, Homo sapiens; identical to SEQ ID NO: 21198
  misc_feature 1, 2, 3, 4, 5, 2505: n = A,T,C or G

SEQ ID NO: 27058 - DNA, 618 bp, Homo sapiens; identical to SEQ ID NO: 21167
  misc_feature 1, 2, 3, 4, 5, 6, 7, 8, 9, 10, 11, 12, 13, 14, 15, 16, 17,18, 19, 614, 615, 616, 617, 618: n = A,T,C or G

SEQ ID NO: 27059 - DNA, 313 bp, Homo sapiens; identical to SEQ ID NO: 21174
  misc_feature 1, 311, 312, 313: n = A,T,C or G

SEQ ID NO: 27060 - DNA, 618 bp, Homo sapiens; identical to SEQ ID NO: 21167
  misc_feature 1, 2, 3, 4, 5, 6, 7, 8, 9, 10, 11, 12, 13, 14, 15, 16, 17,18, 19, 614, 615, 616, 617, 618: n = A,T,C or G

SEQ ID NO: 27061 - DNA, 618 bp, Homo sapiens; identical to SEQ ID NO: 21167
  misc_feature 1, 2, 3, 4, 5, 6, 7, 8, 9, 10, 11, 12, 13, 14, 15, 16, 17,18, 19, 614, 615, 616, 617, 618: n = A,T,C or G

SEQ ID NO: 27062 - DNA, 618 bp, Homo sapiens; identical to SEQ ID NO: 21167
  misc_feature 1, 2, 3, 4, 5, 6, 7, 8, 9, 10, 11, 12, 13, 14, 15, 16, 17,18, 19, 614, 615, 616, 617, 618: n = A,T,C or G

SEQ ID NO: 27063 - DNA, 618 bp, Homo sapiens; identical to SEQ ID NO: 21167
  misc_feature 1, 2, 3, 4, 5, 6, 7, 8, 9, 10, 11, 12, 13, 14, 15, 16, 17,18, 19, 614, 615, 616, 617, 618: n = A,T,C or G

SEQ ID NO: 27064 - DNA, 420 bp, Homo sapiens; identical to SEQ ID NO: 21204
  misc_feature 420: n = A,T,C or G

SEQ ID NO: 27065 - DNA, 618 bp, Homo sapiens; identical to SEQ ID NO: 21167
  misc_feature 1, 2, 3, 4, 5, 6, 7, 8, 9, 10, 11, 12, 13, 14, 15, 16, 17,18, 19, 614, 615, 616, 617, 618: n = A,T,C or G

SEQ ID NO: 27066 - DNA, 650 bp, Homo sapiens; identical to SEQ ID NO: 21165

SEQ ID NO: 27067 - DNA, 618 bp, Homo sapiens; identical to SEQ ID NO: 21167
  misc_feature 1, 2, 3, 4, 5, 6, 7, 8, 9, 10, 11, 12, 13, 14, 15, 16, 17,18, 19, 614, 615, 616, 617, 618: n = A,T,C or G

SEQ ID NO: 27068 - DNA, 771 bp, Homo sapiens; identical to SEQ ID NO: 21166
  misc_feature 1, 2, 3, 754, 770, 771: n = A,T,C or G

SEQ ID NO: 27069 - DNA, 313 bp, Homo sapiens; identical to SEQ ID NO: 21174
  misc_feature 1, 311, 312, 313: n = A,T,C or G

SEQ ID NO: 27070 - DNA, 587 bp, Homo sapiens; identical to SEQ ID NO: 21164
  misc_feature 1, 581, 582, 583, 584, 585, 586, 587: n = A,T,C or G

SEQ ID NO: 27071 - DNA, 618 bp, Homo sapiens; identical to SEQ ID NO: 21167
  misc_feature 1, 2, 3, 4, 5, 6, 7, 8, 9, 10, 11, 12, 13, 14, 15, 16, 17,18, 19, 614, 615, 616, 617, 618: n = A,T,C or G

SEQ ID NO: 27072 - DNA, 650 bp, Homo sapiens; identical to SEQ ID NO: 21165

SEQ ID NO: 27073 - DNA, 610 bp, Homo sapiens; identical to SEQ ID NO: 21197
  misc_feature 1, 2, 609, 610: n = A,T,C or G

SEQ ID NO: 27074 - DNA, 869 bp, Homo sapiens; identical to SEQ ID NO: 21180
  misc_feature 1, 2, 3, 820, 821, 822, 846, 867, 868, 869: n = A,T,C or G

SEQ ID NO: 27075 - DNA, 545 bp, Homo sapiens; identical to SEQ ID NO: 21184
  misc_feature 1, 2, 37, 542, 543, 544, 545: n = A,T,C or G

SEQ ID NO: 27076 - DNA, 618 bp, Homo sapiens; identical to SEQ ID NO: 21167
  misc_feature 1, 2, 3, 4, 5, 6, 7, 8, 9, 10, 11, 12, 13, 14, 15, 16, 17,18, 19, 614, 615, 616, 617, 618: n = A,T,C or G

SEQ ID NO: 27077 - DNA, 587 bp, Homo sapiens; identical to SEQ ID NO: 21164
  misc_feature 1, 581, 582, 583, 584, 585, 586, 587: n = A,T,C or G

SEQ ID NO: 27078 - DNA, 771 bp, Homo sapiens; identical to SEQ ID NO: 21166
  misc_feature 1, 2, 3, 754, 770, 771: n = A,T,C or G

SEQ ID NO: 27079 - DNA, 313 bp, Homo sapiens; identical to SEQ ID NO: 21174
  misc_feature 1, 311, 312, 313: n = A,T,C or G

SEQ ID NO: 27080 - DNA, 544 bp, Homo sapiens; identical to SEQ ID NO: 21236
  misc_feature 1, 2, 3, 4, 5, 6, 7, 8, 9, 10, 11, 12, 13, 535, 536, 537,538, 539, 540, 541, 542, 543, 544: n = A,T,C or G

SEQ ID NO: 27081 - DNA, 313 bp, Homo sapiens; identical to SEQ ID NO: 21174
  misc_feature 1, 311, 312, 313: n = A,T,C or G

SEQ ID NO: 27082 - DNA, 360 bp, Homo sapiens; identical to SEQ ID NO: 21238
  misc_feature 360: n = A,T,C or G

SEQ ID NO: 27083 - DNA, 386 bp, Homo sapiens; identical to SEQ ID NO: 21239
  misc_feature 1, 383, 384, 385, 386: n = A,T,C or G

SEQ ID NO: 27084 - DNA, 587 bp, Homo sapiens; identical to SEQ ID NO: 21164
  misc_feature 1, 581, 582, 583, 584, 585, 586, 587: n = A,T,C or G

SEQ ID NO: 27085 - DNA, 2608 bp, Homo sapiens; identical to SEQ ID NO: 21241
  misc_feature 1, 2, 3, 4, 5, 6, 7, 8, 9, 10, 11, 12, 13, 14, 15, 16, 17,18, 19, 20, 21, 22, 2607, 2608: n = A,T,C or G

SEQ ID NO: 27086 - DNA, 520 bp, Homo sapiens; identical to SEQ ID NO: 21188
  misc_feature 1, 2, 3, 519, 520: n = A,T,C or G

SEQ ID NO: 27087 - DNA, 587 bp, Homo sapiens; identical to SEQ ID NO: 21164
  misc_feature 1, 581, 582, 583, 584, 585, 586, 587: n = A,T,C or G

SEQ ID NO: 27088 - DNA, 390 bp, Homo sapiens; identical to SEQ ID NO: 21211

SEQ ID NO: 27089 - DNA, 557 bp, Homo sapiens; identical to SEQ ID NO: 21245
  misc_feature 1, 2, 3, 4, 5, 6: n = A,T,C or G

SEQ ID NO: 27090 - DNA, 313 bp, Homo sapiens; identical to SEQ ID NO: 21174
  misc_feature 1, 311, 312, 313: n = A,T,C or G

SEQ ID NO: 27091 - DNA, 618 bp, Homo sapiens; identical to SEQ ID NO: 21167
  misc_feature 1, 2, 3, 4, 5, 6, 7, 8, 9, 10, 11, 12, 13, 14, 15, 16, 17,18, 19, 614, 615, 616, 617, 618: n = A,T,C or G

SEQ ID NO: 27092 - DNA, 434 bp, Homo sapiens; identical to SEQ ID NO: 21248

SEQ ID NO: 27093 - DNA, 467 bp, Homo sapiens; identical to SEQ ID NO: 21201
  misc_feature 1, 2, 3, 4, 5, 6, 7, 8, 9, 10, 11, 12: n = A,T,C or G

SEQ ID NO: 27094 - DNA, 1866 bp, Homo sapiens; identical to SEQ ID NO: 21250
  misc_feature 1, 2, 168, 1861, 1862, 1863, 1864, 1865, 1866: n = A,T,C or G

SEQ ID NO: 27095 - DNA, 313 bp, Homo sapiens; identical to SEQ ID NO: 21174
  misc_feature 1, 311, 312, 313: n = A,T,C or G

SEQ ID NO: 27096 - DNA, 650 bp, Homo sapiens; identical to SEQ ID NO: 21165

SEQ ID NO: 27097 - DNA, 618 bp, Homo sapiens; identical to SEQ ID NO: 21167
  misc_feature 1, 2, 3, 4, 5, 6, 7, 8, 9, 10, 11, 12, 13, 14, 15, 16, 17,18, 19, 614, 615, 616, 617, 618: n = A,T,C or G

SEQ ID NO: 27098 - DNA, 545 bp, Homo sapiens; identical to SEQ ID NO: 21184
  misc_feature 1, 2, 37, 542, 543, 544, 545: n = A,T,C or G

SEQ ID NO: 27099 - DNA, 492 bp, Homo sapiens; identical to SEQ ID NO: 21256
  misc_feature 492: n = A,T,C or G

SEQ ID NO: 27100 - DNA, 650 bp, Homo sapiens; identical to SEQ ID NO: 21165

SEQ ID NO: 27101 - DNA, 313 bp, Homo sapiens; identical to SEQ ID NO: 21174
  misc_feature 1, 311, 312, 313: n = A,T,C or G

SEQ ID NO: 27102 - DNA, 569 bp, Homo sapiens; identical to SEQ ID NO: 21176
  misc_feature 563, 564, 565, 566, 567, 568, 569: n = A,T,C or G

SEQ ID NO: 27103 - DNA, 618 bp, Homo sapiens; identical to SEQ ID NO: 21167
  misc_feature 1, 2, 3, 4, 5, 6, 7, 8, 9, 10, 11, 12, 13, 14, 15, 16, 17,18, 19, 614, 615, 616, 617, 618: n = A,T,C or G

SEQ ID NO: 27104 - DNA, 434 bp, Homo sapiens; identical to SEQ ID NO: 21248

SEQ ID NO: 27105 - DNA, 467 bp, Homo sapiens; identical to SEQ ID NO: 21201
  misc_feature 1, 2, 3, 4, 5, 6, 7, 8, 9, 10, 11, 12: n = A,T,C or G

SEQ ID NO: 27106 - DNA, 618 bp, Homo sapiens; identical to SEQ ID NO: 21167
  misc_feature 1, 2, 3, 4, 5, 6, 7, 8, 9, 10, 11, 12, 13, 14, 15, 16, 17,18, 19, 614, 615, 616, 617, 618: n = A,T,C or G

SEQ ID NO: 27107 - DNA, 2591 bp, Homo sapiens; identical to SEQ ID NO: 21265
  misc_feature 1, 2, 3, 4, 5, 6, 7, 8, 9, 10, 11, 12, 13, 14, 15, 2589,2590, 2591: n = A,T,C or G

SEQ ID NO: 27108 - DNA, 523 bp, Homo sapiens; identical to SEQ ID NO: 21172
  misc_feature 1, 2, 3, 490, 522, 523: n = A,T,C or G

SEQ ID NO: 27109 - DNA, 492 bp, Homo sapiens; identical to SEQ ID NO: 21256
  misc_feature 492: n = A,T,C or G

SEQ ID NO: 27110 - DNA, 467 bp, Homo sapiens; identical to SEQ ID NO: 21201
  misc_feature 1, 2, 3, 4, 5, 6, 7, 8, 9, 10, 11, 12: n = A,T,C or G

SEQ ID NO: 27111 - DNA, 386 bp, Homo sapiens; identical to SEQ ID NO: 21239
  misc_feature 1, 383, 384, 385, 386: n = A,T,C or G

SEQ ID NO: 27112 - DNA, 520 bp, Homo sapiens; identical to SEQ ID NO: 21188
  misc_feature 1, 2, 3, 519, 520: n = A,T,C or G

SEQ ID NO: 27113 - DNA, 492 bp, Homo sapiens; identical to SEQ ID NO: 21256
  misc_feature 492: n = A,T,C or G

SEQ ID NO: 27114 - DNA, 650 bp, Homo sapiens; identical to SEQ ID NO: 21165

SEQ ID NO: 27115 - DNA, 523 bp, Homo sapiens; identical to SEQ ID NO: 21172
  misc_feature 1, 2, 3, 490, 522, 523: n = A,T,C or G

SEQ ID NO: 27116 - DNA, 650 bp, Homo sapiens; identical to SEQ ID NO: 21165

SEQ ID NO: 27117 - DNA, 569 bp, Homo sapiens; identical to SEQ ID NO: 21176
  misc_feature 563, 564, 565, 566, 567, 568, 569: n = A,T,C or G

SEQ ID NO: 27118 - DNA, 569 bp, Homo sapiens; identical to SEQ ID NO: 21176
  misc_feature 563, 564, 565, 566, 567, 568, 569: n = A,T,C or G

SEQ ID NO: 27119 - DNA, 492 bp, Homo sapiens; identical to SEQ ID NO: 21256
  misc_feature 492: n = A,T,C or G

SEQ ID NO: 27120 - DNA, 569 bp, Homo sapiens; identical to SEQ ID NO: 21176
  misc_feature 563, 564, 565, 566, 567, 568, 569: n = A,T,C or G

SEQ ID NO: 27121 - DNA, 557 bp, Homo sapiens; identical to SEQ ID NO: 21245
  misc_feature 1, 2, 3, 4, 5, 6: n = A,T,C or G

SEQ ID NO: 27122 - DNA, 545 bp, Homo sapiens; identical to SEQ ID NO: 21184
  misc_feature 1, 2, 37, 542, 543, 544, 545: n = A,T,C or G

SEQ ID NO: 27123 - DNA, 523 bp, Homo sapiens; identical to SEQ ID NO: 21172
  misc_feature 1, 2, 3, 490, 522, 523: n = A,T,C or G

SEQ ID NO: 27124 - DNA, 313 bp, Homo sapiens; identical to SEQ ID NO: 21174
  misc_feature 1, 311, 312, 313: n = A,T,C or G

SEQ ID NO: 27125 - DNA, 557 bp, Homo sapiens; identical to SEQ ID NO: 21245
  misc_feature 1, 2, 3, 4, 5, 6: n = A,T,C or G

SEQ ID NO: 27126 - DNA, 2376 bp, Homo sapiens; identical to SEQ ID NO: 21284

SEQ ID NO: 27127 - DNA, 1026 bp, Homo sapiens; identical to SEQ ID NO: 21285
  misc_feature 1, 2, 1025, 1026: n = A,T,C or G

SEQ ID NO: 27128 - DNA, 1227 bp, Homo sapiens; identical to SEQ ID NO: 21286
  misc_feature 1, 2, 1227: n = A,T,C or G

SEQ ID NO: 27129 - DNA, 866 bp, Homo sapiens; identical to SEQ ID NO: 21287
  misc_feature 1, 2, 862, 863, 864, 865, 866: n = A,T,C or G

SEQ ID NO: 27130 - DNA, 929 bp, Homo sapiens; identical to SEQ ID NO: 20094
  misc_feature 1, 2, 3, 4, 5, 6, 7, 8, 9, 10, 11, 12, 13, 14, 15, 16, 17,18, 19, 20, 926, 927, 928, 929: n = A,T,C or G

SEQ ID NO: 27131 - DNA, 759 bp, Homo sapiens; identical to SEQ ID NO: 20638
  misc_feature 749, 750, 751, 752, 753, 754, 755, 756, 757, 758, 759: n = A,T,C or G

SEQ ID NO: 27132 - DNA, 905 bp, Homo sapiens; identical to SEQ ID NO: 21290
  misc_feature 1, 2, 3, 4, 5, 6, 7, 8, 9, 10, 11, 12, 13, 14, 15, 16, 17,18, 19, 20, 21, 855, 905: n = A,T,C or G

SEQ ID NO: 27133 - DNA, 625 bp, Homo sapiens; identical to SEQ ID NO: 20220
  misc_feature 1, 2, 625: n = A,T,C or G

SEQ ID NO: 27134 - DNA, 510 bp, Homo sapiens; identical to SEQ ID NO: 21292
  misc_feature 493, 508, 509, 510: n = A,T,C or G

SEQ ID NO: 27135 - DNA, 508 bp, Homo sapiens; identical to SEQ ID NO: 21293
  misc_feature 502, 503, 504, 505, 506, 507, 508: n = A,T,C or G

SEQ ID NO: 27136 - DNA, 1026 bp, Homo sapiens; identical to SEQ ID NO: 21285
  misc_feature 1, 2, 1025, 1026: n = A,T,C or G

SEQ ID NO: 27137 - DNA, 1026 bp, Homo sapiens; identical to SEQ ID NO: 21285
  misc_feature 1, 2, 1025, 1026: n = A,T,C or G

SEQ ID NO: 27138 - DNA, 1026 bp, Homo sapiens; identical to SEQ ID NO: 21285
  misc_feature 1, 2, 1025, 1026: n = A,T,C or G

SEQ ID NO: 27139 - DNA, 475 bp, Homo sapiens; identical to SEQ ID NO: 21297

SEQ ID NO: 27140 - DNA, 794 bp, Homo sapiens; identical to SEQ ID NO: 21298
  misc_feature 784, 785, 786, 787, 788, 789, 790, 791, 792, 793, 794: n = A,T,C or G

SEQ ID NO: 27141 - DNA, 740 bp, Homo sapiens; identical to SEQ ID NO: 21299
  misc_feature 1: n = A,T,C or G

SEQ ID NO: 27142 - DNA, 2569 bp, Homo sapiens; identical to SEQ ID NO: 21300
  misc_feature 2557, 2558, 2559, 2560, 2561, 2562, 2563, 2564, 2565, 2566,2567, 2568, 2569: n = A,T,C or G

SEQ ID NO: 27143 - DNA, 1026 bp, Homo sapiens; identical to SEQ ID NO: 21285
  misc_feature 1, 2, 1025, 1026: n = A,T,C or G

SEQ ID NO: 27144 - DNA, 620 bp, Homo sapiens; identical to SEQ ID NO: 20930

SEQ ID NO: 27145 - DNA, 5145 bp, Homo sapiens; identical to SEQ ID NO: 20824
  misc_feature 1, 5144, 5145: n = A,T,C or G

SEQ ID NO: 27146 - DNA, 1304 bp, Homo sapiens; identical to SEQ ID NO: 21304
  misc_feature 1, 2, 3, 4, 5, 6, 7, 8, 9, 10, 11, 12, 13, 14, 15, 1304: n = A,T,C or G

SEQ ID NO: 27147 - DNA, 425 bp, Homo sapiens; identical to SEQ ID NO: 21305
  misc_feature 425: n = A,T,C or G

SEQ ID NO: 27148 - DNA, 3440 bp, Homo sapiens; identical to SEQ ID NO: 21306
  misc_feature 1, 2, 3438, 3439, 3440: n = A,T,C or G

SEQ ID NO: 27149 - DNA, 5145 bp, Homo sapiens; identical to SEQ ID NO: 20824
  misc_feature 1, 5144, 5145: n = A,T,C or G

SEQ ID NO: 27150 - DNA, 2407 bp, Homo sapiens; identical to SEQ ID NO: 21308
  misc_feature 1, 2383, 2384, 2385, 2386, 2387, 2388, 2389, 2390, 2391,2392, 2393, 2394, 2395, 2396, 2397, 2398, 2399, 2400, 2401,2402, 2403, 2404, 2405, 2406, 2407: n = A,T,C or G

SEQ ID NO: 27151 - DNA, 920 bp, Homo sapiens; identical to SEQ ID NO: 21309

SEQ ID NO: 27152 - DNA, 513 bp, Homo sapiens; identical to SEQ ID NO: 20543

SEQ ID NO: 27153 - DNA, 572 bp, Homo sapiens; identical to SEQ ID NO: 21311
  misc_feature 459, 460, 527, 560, 561, 562, 563, 564, 565, 566, 567, 568,569, 570, 571, 572: n = A,T,C or G

SEQ ID NO: 27154 - DNA, 997 bp, Homo sapiens; identical to SEQ ID NO: 21312
  misc_feature 997: n = A,T,C or G

SEQ ID NO: 27155 - DNA, 713 bp, Homo sapiens; identical to SEQ ID NO: 21313
  misc_feature 1, 2, 60, 712, 713: n = A,T,C or G

SEQ ID NO: 27156 - DNA, 1001 bp, Homo sapiens; identical to SEQ ID NO: 21314
  misc_feature 681, 682, 683, 684, 685, 686, 687, 688, 689, 690, 691, 692,693, 694, 695, 696, 697, 698, 699, 700, 701, 702, 703, 704,705, 706, 707, 708, 709, 710, 711, 712, 713, 714, 715, 716,717, 718: n = A,T,C or G

SEQ ID NO: 27157 - DNA, 635 bp, Homo sapiens; identical to SEQ ID NO: 21315

SEQ ID NO: 27158 - DNA, 1415 bp, Homo sapiens; identical to SEQ ID NO: 21316
  misc_feature 1, 2, 3, 4, 5, 6, 7, 8, 9, 10, 11, 1415: n = A,T,C or G

SEQ ID NO: 27159 - DNA, 360 bp, Homo sapiens; identical to SEQ ID NO: 21317

SEQ ID NO: 27160 - DNA, 349 bp, Homo sapiens; identical to SEQ ID NO: 21318

SEQ ID NO: 27161 - DNA, 360 bp, Homo sapiens; identical to SEQ ID NO: 21317

SEQ ID NO: 27162 - DNA, 516 bp, Homo sapiens; identical to SEQ ID NO: 21320

SEQ ID NO: 27163 - DNA, 673 bp, Homo sapiens; identical to SEQ ID NO: 21321
  misc_feature 669, 670, 671, 672, 673: n = A,T,C or G

SEQ ID NO: 27164 - DNA, 508 bp, Homo sapiens; identical to SEQ ID NO: 21293
  misc_feature 502, 503, 504, 505, 506, 507, 508: n = A,T,C or G

SEQ ID NO: 27165 - DNA, 606 bp, Homo sapiens; identical to SEQ ID NO: 21323
  misc_feature 1, 2, 592, 593, 594, 595, 596, 597, 598, 599, 600, 601, 602,603, 604, 605, 606: n = A,T,C or G

SEQ ID NO: 27166 - DNA, 1411 bp, Homo sapiens; identical to SEQ ID NO: 21324
  misc_feature 1411: n = A,T,C or G

SEQ ID NO: 27167 - DNA, 1647 bp, Homo sapiens; identical to SEQ ID NO: 21325
  misc_feature 1, 1646, 1647: n = A,T,C or G

SEQ ID NO: 27168 - DNA, 935 bp, Homo sapiens; identical to SEQ ID NO: 21326
  misc_feature 927, 928, 929, 930, 931, 932, 933, 934, 935: n = A,T,C or G

SEQ ID NO: 27169 - DNA, 562 bp, Homo sapiens; identical to SEQ ID NO: 21327
  misc_feature 1, 2, 3, 4, 5, 6, 7, 8, 9, 10, 11, 12, 13, 14, 15, 16, 17,18, 19, 20, 21, 22, 23, 24, 25, 26, 27, 28, 29, 30, 31,32, 33, 34: n = A,T,C or G

SEQ ID NO: 27170 - DNA, 681 bp, Homo sapiens; identical to SEQ ID NO: 20120
  misc_feature 1, 2, 12: n = A,T,C or G

SEQ ID NO: 27171 - DNA, 809 bp, Homo sapiens; identical to SEQ ID NO: 20847
  misc_feature 809: n = A,T,C or G

SEQ ID NO: 27172 - DNA, 862 bp, Homo sapiens; identical to SEQ ID NO: 21330

SEQ ID NO: 27173 - DNA, 1512 bp, Homo sapiens; identical to SEQ ID NO: 21331
  misc_feature 1, 2, 3, 4, 5, 6, 7, 8, 9: n = A,T,C or G

SEQ ID NO: 27174 - DNA, 635 bp, Homo sapiens; identical to SEQ ID NO: 21332
  misc_feature 1, 6, 628, 629, 630, 631, 632, 633, 634, 635: n = A,T,C or G

SEQ ID NO: 27175 - DNA, 471 bp, Homo sapiens; identical to SEQ ID NO: 21333
  misc_feature 401, 405, 407, 425, 441, 469, 470, 471: n = A,T,C or G

SEQ ID NO: 27176 - DNA, 613 bp, Homo sapiens; identical to SEQ ID NO: 21334
  misc_feature 612, 613: n = A,T,C or G

SEQ ID NO: 27177 - DNA, 569 bp, Homo sapiens; identical to SEQ ID NO: 21335
  misc_feature 552, 553, 554, 555, 556, 557, 558, 559, 560, 561, 562, 563,564, 565, 566, 567, 568, 569: n = A,T,C or G

SEQ ID NO: 27178 - DNA, 491 bp, Homo sapiens; identical to SEQ ID NO: 20202
  misc_feature 1, 2, 3, 4, 5: n = A,T,C or G

SEQ ID NO: 27179 - DNA, 209 bp, Homo sapiens; identical to SEQ ID NO: 21337
  misc_feature 209: n = A,T,C or G

SEQ ID NO: 27180 - DNA, 1231 bp, Homo sapiens; identical to SEQ ID NO: 20570
  misc_feature 791, 1228, 1229, 1230, 1231: n = A,T,C or G

SEQ ID NO: 27181 - DNA, 4742 bp, Homo sapiens; identical to SEQ ID NO: 21339
  misc_feature 1, 2, 3, 4, 5, 4742: n = A,T,C or G

SEQ ID NO: 27182 - DNA, 522 bp, Homo sapiens; identical to SEQ ID NO: 21340
  misc_feature 520, 521, 522: n = A,T,C or G

SEQ ID NO: 27183 - DNA, 448 bp, Homo sapiens; identical to SEQ ID NO: 21341
  misc_feature 448: n = A,T,C or G

SEQ ID NO: 27184 - DNA, 2976 bp, Homo sapiens; identical to SEQ ID NO: 21342
  misc_feature 2910, 2941, 2970, 2975, 2976: n = A,T,C or G

SEQ ID NO: 27185 - DNA, 1498 bp, Homo sapiens; identical to SEQ ID NO: 20817
  misc_feature 1, 2, 1498: n = A,T,C or G

SEQ ID NO: 27186 - DNA, 537 bp, Homo sapiens; identical to SEQ ID NO: 21344
  misc_feature 1, 536, 537: n = A,T,C or G

SEQ ID NO: 27187 - DNA, 652 bp, Homo sapiens; identical to SEQ ID NO: 21345
  misc_feature 635, 645, 646, 647, 648, 649, 650, 651, 652: n = A,T,C or G

SEQ ID NO: 27188 - DNA, 407 bp, Homo sapiens; identical to SEQ ID NO: 21346
  misc_feature 407: n = A,T,C or G

SEQ ID NO: 27189 - DNA, 900 bp, Homo sapiens; identical to SEQ ID NO: 21347
  misc_feature 1, 2, 3, 4, 895, 896, 897, 898, 899, 900: n = A,T,C or G

SEQ ID NO: 27190 - DNA, 670 bp, Homo sapiens; identical to SEQ ID NO: 21348
  misc_feature 1, 670: n = A,T,C or G

SEQ ID NO: 27191 - DNA, 501 bp, Homo sapiens; identical to SEQ ID NO: 21349
  misc_feature 1, 2, 3, 4, 495, 496, 497, 498, 499, 500, 501: n = A,T,C or G

SEQ ID NO: 27192 - DNA, 853 bp, Homo sapiens; identical to SEQ ID NO: 21350
  misc_feature 1, 2, 3, 4, 5, 6, 7, 8, 853: n = A,T,C or G

SEQ ID NO: 27193 - DNA, 729 bp, Homo sapiens; identical to SEQ ID NO: 21351

SEQ ID NO: 27194 - DNA, 1214 bp, Homo sapiens; identical to SEQ ID NO: 20119

SEQ ID NO: 27195 - DNA, 1213 bp, Homo sapiens; identical to SEQ ID NO: 21353
  misc_feature 1, 2, 3, 4: n = A,T,C or G

SEQ ID NO: 27196 - DNA, 2538 bp, Homo sapiens; identical to SEQ ID NO: 20316
  misc_feature 2538: n = A,T,C or G

SEQ ID NO: 27197 - DNA, 2688 bp, Homo sapiens; identical to SEQ ID NO: 21355
  misc_feature 1, 2, 3, 4, 2660, 2661, 2662, 2663, 2664, 2665, 2666, 2667,2668, 2669, 2670, 2671, 2672, 2673, 2674, 2675, 2676, 2677,2678, 2679, 2680, 2681, 2682, 2683, 2684, 2685, 2686, 2687,2688: n = A,T,C or G

SEQ ID NO: 27198 - DNA, 488 bp, Homo sapiens; identical to SEQ ID NO: 21356
  misc_feature 488: n = A,T,C or G

SEQ ID NO: 27199 - DNA, 490 bp, Homo sapiens; identical to SEQ ID NO: 21357
  misc_feature 1, 2, 3, 4, 5, 6, 7, 8, 9, 10: n = A,T,C or G

SEQ ID NO: 27200 - DNA, 508 bp, Homo sapiens; identical to SEQ ID NO: 21293
  misc_feature 502, 503, 504, 505, 506, 507, 508: n = A,T,C or G

SEQ ID NO: 27201 - DNA, 649 bp, Homo sapiens; identical to SEQ ID NO: 20099
  misc_feature 1, 2, 3, 4, 5, 6, 7, 8, 9, 649: n = A,T,C or G

SEQ ID NO: 27202 - DNA, 351 bp, Homo sapiens; identical to SEQ ID NO: 21360
  misc_feature 1, 2: n = A,T,C or G

SEQ ID NO: 27203 - DNA, 2315 bp, Homo sapiens; identical to SEQ ID NO: 20885
  misc_feature 1, 2, 2313, 2314, 2315: n = A,T,C or G

SEQ ID NO: 27204 - DNA, 649 bp, Homo sapiens; identical to SEQ ID NO: 20099
  misc_feature 1, 2, 3, 4, 5, 6, 7, 8, 9, 649: n = A,T,C or G

SEQ ID NO: 27205 - DNA, 1018 bp, Homo sapiens; identical to SEQ ID NO: 21363

SEQ ID NO: 27206 - DNA, 731 bp, Homo sapiens; identical to SEQ ID NO: 20529
  misc_feature 1, 2, 3, 4: n = A,T,C or G

SEQ ID NO: 27207 - DNA, 953 bp, Homo sapiens; identical to SEQ ID NO: 21365
  misc_feature 1, 948, 949, 950, 951, 952, 953: n = A,T,C or G

SEQ ID NO: 27208 - DNA, 634 bp, Homo sapiens; identical to SEQ ID NO: 21366

SEQ ID NO: 27209 - DNA, 689 bp, Homo sapiens; identical to SEQ ID NO: 21367
  misc_feature 1, 2: n = A,T,C or G

SEQ ID NO: 27210 - DNA, 879 bp, Homo sapiens; identical to SEQ ID NO: 21368
  misc_feature 1, 2, 3, 4, 5, 6, 750, 846, 852, 872, 879: n = A,T,C or G

SEQ ID NO: 27211 - DNA, 906 bp, Homo sapiens; identical to SEQ ID NO: 21369
  misc_feature 1, 2, 3, 4, 5, 889, 906: n = A,T,C or G

SEQ ID NO: 27212 - DNA, 891 bp, Homo sapiens; identical to SEQ ID NO: 20416

SEQ ID NO: 27213 - DNA, 1462 bp, Homo sapiens; identical to SEQ ID NO: 21372
  misc_feature 1, 2, 3, 4, 5, 6, 7, 8, 1462: n = A,T,C or G

SEQ ID NO: 27214 - DNA, 508 bp, Homo sapiens; identical to SEQ ID NO: 21293
  misc_feature 502, 503, 504, 505, 506, 507, 508: n = A,T,C or G

SEQ ID NO: 27215 - DNA, 799 bp, Homo sapiens; identical to SEQ ID NO: 21374
  misc_feature 1, 2, 3, 4, 5, 6, 7, 790, 791, 792, 793, 794, 795, 796, 797,798, 799: n = A,T,C or G

SEQ ID NO: 27216 - DNA, 2745 bp, Homo sapiens; identical to SEQ ID NO: 21375
  misc_feature 1, 2, 3, 2734, 2735, 2736, 2737, 2738, 2739, 2740, 2741,2742, 2743, 2744, 2745: n = A,T,C or G

SEQ ID NO: 27217 - DNA, 417 bp, Homo sapiens; identical to SEQ ID NO: 21376

SEQ ID NO: 27218 - DNA, 436 bp, Homo sapiens; identical to SEQ ID NO: 21377

SEQ ID NO: 27219 - DNA, 227 bp, Homo sapiens; identical to SEQ ID NO: 21378

SEQ ID NO: 27220 - DNA, 1231 bp, Homo sapiens; identical to SEQ ID NO: 21379

SEQ ID NO: 27221 - DNA, 1782 bp, Homo sapiens; identical to SEQ ID NO: 21380
  misc_feature 1766, 1767, 1768, 1769, 1770, 1771, 1772, 1773, 1774, 1775,1776, 1777, 1778, 1779, 1780, 1781, 1782: n = A,T,C or G

SEQ ID NO: 27222 - DNA, 1782 bp, Homo sapiens; identical to SEQ ID NO: 21380
  misc_feature 1766, 1767, 1768, 1769, 1770, 1771, 1772, 1773, 1774, 1775,1776, 1777, 1778, 1779, 1780, 1781, 1782: n = A,T,C or G

SEQ ID NO: 27223 - DNA, 1214 bp, Homo sapiens; identical to SEQ ID NO: 20119

SEQ ID NO: 27224 - DNA, 445 bp, Homo sapiens; identical to SEQ ID NO: 21383
  misc_feature 1, 2, 3, 445: n = A,T,C or G

SEQ ID NO: 27225 - DNA, 673 bp, Homo sapiens; identical to SEQ ID NO: 21384
  misc_feature 1, 2, 672, 673: n = A,T,C or G

SEQ ID NO: 27226 - DNA, 338 bp, Homo sapiens; identical to SEQ ID NO: 21385
  misc_feature 1: n = A,T,C or G

SEQ ID NO: 27227 - DNA, 1512 bp, Homo sapiens; identical to SEQ ID NO: 21331
  misc_feature 1, 2, 3, 4, 5, 6, 7, 8, 9: n = A,T,C or G

SEQ ID NO: 27228 - DNA, 580 bp, Homo sapiens; identical to SEQ ID NO: 21387
  misc_feature 1, 2, 3, 4, 5, 6, 7, 8, 9, 10: n = A,T,C or G

SEQ ID NO: 27229 - DNA, 5032 bp, Homo sapiens; identical to SEQ ID NO: 21388
  misc_feature 1, 2, 3, 4, 5, 6, 7, 8, 9, 10, 11, 12, 5025, 5026, 5027,5028, 5029, 5030, 5031, 5032: n = A,T,C or G

SEQ ID NO: 27230 - DNA, 466 bp, Homo sapiens; identical to SEQ ID NO: 21389
  misc_feature 466: n = A,T,C or G

SEQ ID NO: 27231 - DNA, 816 bp, Homo sapiens; identical to SEQ ID NO: 21390

SEQ ID NO: 27232 - DNA, 458 bp, Homo sapiens; identical to SEQ ID NO: 21391
  misc_feature 1, 2, 432, 434, 435, 436, 437, 438, 439, 440, 441, 442, 443,444, 445, 446, 447, 448, 449, 450, 451, 452, 453, 454, 455,456, 457, 458: n = A,T,C or G

SEQ ID NO: 27233 - DNA, 1203 bp, Homo sapiens; identical to SEQ ID NO: 21392
  misc_feature 1203: n = A,T,C or G

SEQ ID NO: 27234 - DNA, 508 bp, Homo sapiens; identical to SEQ ID NO: 21293
  misc_feature 502, 503, 504, 505, 506, 507, 508: n = A,T,C or G

SEQ ID NO: 27235 - DNA, 1000 bp, Homo sapiens; identical to SEQ ID NO: 21394
  misc_feature 1000: n = A,T,C or G

SEQ ID NO: 27236 - DNA, 549 bp, Homo sapiens; identical to SEQ ID NO: 21395
  misc_feature 1, 549: n = A,T,C or G

SEQ ID NO: 27237 - DNA, 498 bp, Homo sapiens; identical to SEQ ID NO: 21110

SEQ ID NO: 27238 - DNA, 1867 bp, Homo sapiens; identical to SEQ ID NO: 21397
  misc_feature 1, 2, 1842, 1843, 1844, 1845, 1846, 1847, 1848, 1849, 1850,1851, 1852, 1853, 1854, 1855, 1856, 1857, 1858, 1859, 1860,1861, 1862, 1863, 1864, 1865, 1866, 1867: n = A,T,C or G

SEQ ID NO: 27239 - DNA, 2297 bp, Homo sapiens; identical to SEQ ID NO: 21398

SEQ ID NO: 27240 - DNA, 3261 bp, Homo sapiens; identical to SEQ ID NO: 21399
  misc_feature 1, 2, 3, 4, 3260, 3261: n = A,T,C or G

SEQ ID NO: 27241 - DNA, 483 bp, Homo sapiens; identical to SEQ ID NO: 21400
  misc_feature 482, 483: n = A,T,C or G

SEQ ID NO: 27242 - DNA, 865 bp, Homo sapiens; identical to SEQ ID NO: 21401
  misc_feature 1, 865: n = A,T,C or G

SEQ ID NO: 27243 - DNA, 758 bp, Homo sapiens; identical to SEQ ID NO: 21402
  misc_feature 1, 2, 756, 757, 758: n = A,T,C or G

SEQ ID NO: 27244 - DNA, 1373 bp, Homo sapiens; identical to SEQ ID NO: 21403
  misc_feature 1369, 1370, 1371, 1372, 1373: n = A,T,C or G

SEQ ID NO: 27245 - DNA, 1941 bp, Homo sapiens; identical to SEQ ID NO: 21404
  misc_feature 1, 2, 14, 15, 20, 71, 1941: n = A,T,C or G

SEQ ID NO: 27246 - DNA, 1498 bp, Homo sapiens; identical to SEQ ID NO: 20817
  misc_feature 1, 2, 1498: n = A,T,C or G

SEQ ID NO: 27247 - DNA, 2491 bp, Homo sapiens; identical to SEQ ID NO: 20436

SEQ ID NO: 27248 - DNA, 414 bp, Homo sapiens; identical to SEQ ID NO: 21407

SEQ ID NO: 27249 - DNA, 676 bp, Homo sapiens; identical to SEQ ID NO: 21408
  misc_feature 1, 2, 31, 671, 672, 673, 674, 675, 676: n = A,T,C or G

SEQ ID NO: 27250 - DNA, 607 bp, Homo sapiens; identical to SEQ ID NO: 21409
  misc_feature 1, 2, 3, 4, 5, 606, 607: n = A,T,C or G

SEQ ID NO: 27251 - DNA, 3061 bp, Homo sapiens; identical to SEQ ID NO: 21410

SEQ ID NO: 27252 - DNA, 408 bp, Homo sapiens; identical to SEQ ID NO: 21411
  misc_feature 1, 2, 3: n = A,T,C or G

SEQ ID NO: 27253 - DNA, 460 bp, Homo sapiens; identical to SEQ ID NO: 21412
  misc_feature 460: n = A,T,C or G

SEQ ID NO: 27254 - DNA, 419 bp, Homo sapiens; identical to SEQ ID NO: 21413

SEQ ID NO: 27255 - DNA, 293 bp, Homo sapiens; identical to SEQ ID NO: 21414

SEQ ID NO: 27256 - DNA, 729 bp, Homo sapiens; identical to SEQ ID NO: 21351

SEQ ID NO: 27257 - DNA, 456 bp, Homo sapiens; identical to SEQ ID NO: 21416

SEQ ID NO: 27258 - DNA, 2538 bp, Homo sapiens; identical to SEQ ID NO: 20316
  misc_feature 2538: n = A,T,C or G

SEQ ID NO: 27259 - DNA, 809 bp, Homo sapiens; identical to SEQ ID NO: 20847
  misc_feature 809: n = A,T,C or G

SEQ ID NO: 27260 - DNA, 474 bp, Homo sapiens; identical to SEQ ID NO: 21419
  misc_feature 468, 469, 470, 471, 472, 473, 474: n = A,T,C or G

SEQ ID NO: 27261 - DNA, 547 bp, Homo sapiens; identical to SEQ ID NO: 21420
  misc_feature 545, 546, 547: n = A,T,C or G

SEQ ID NO: 27262 - DNA, 681 bp, Homo sapiens; identical to SEQ ID NO: 20120
  misc_feature 1, 2, 12: n = A,T,C or G

SEQ ID NO: 27263 - DNA, 543 bp, Homo sapiens; identical to SEQ ID NO: 21422
  misc_feature 541, 542, 543: n = A,T,C or G

SEQ ID NO: 27264 - DNA, 318 bp, Homo sapiens; identical to SEQ ID NO: 21423
  misc_feature 1, 2, 3, 4, 5: n = A,T,C or G

SEQ ID NO: 27265 - DNA, 383 bp, Homo sapiens; identical to SEQ ID NO: 21424
  misc_feature 367, 368, 369, 370, 371, 372, 373, 374, 375, 376, 377, 378,379, 380, 381, 382, 383: n = A,T,C or G

SEQ ID NO: 27266 - DNA, 508 bp, Homo sapiens; identical to SEQ ID NO: 21293
  misc_feature 502, 503, 504, 505, 506, 507, 508: n = A,T,C or G

SEQ ID NO: 27267 - DNA, 832 bp, Homo sapiens; identical to SEQ ID NO: 21426
  misc_feature 832: n = A,T,C or G

SEQ ID NO: 27268 - DNA, 2538 bp, Homo sapiens; identical to SEQ ID NO: 20316
  misc_feature 2538: n = A,T,C or G

SEQ ID NO: 27269 - DNA, 414 bp, Homo sapiens; identical to SEQ ID NO: 21428
  misc_feature 1, 2, 3, 4, 5, 6, 7, 8, 9, 10, 11, 12, 13, 414: n = A,T,C or G

SEQ ID NO: 27270 - DNA, 2538 bp, Homo sapiens; identical to SEQ ID NO: 20316
  misc_feature 2538: n = A,T,C or G

SEQ ID NO: 27271 - DNA, 671 bp, Homo sapiens; identical to SEQ ID NO: 21430
  misc_feature 1, 2, 3, 4, 8, 34, 83, 106: n = A,T,C or G

SEQ ID NO: 27272 - DNA, 388 bp, Homo sapiens; identical to SEQ ID NO: 22508

SEQ ID NO: 27273 - DNA, 689 bp, Homo sapiens; identical to SEQ ID NO: 21367
  misc_feature 1, 2: n = A,T,C or G

SEQ ID NO: 27274 - DNA, 1293 bp, Homo sapiens; identical to SEQ ID NO: 21433

SEQ ID NO: 27275 - DNA, 547 bp, Homo sapiens; identical to SEQ ID NO: 21434
  misc_feature 1, 2, 3, 4, 5, 6, 7, 8, 9, 547: n = A,T,C or G

SEQ ID NO: 27276 - DNA, 491 bp, Homo sapiens
  misc_feature 491: n = A,T,C or G
acaaaaatgaggcaggtgtattttctcccatctaacaggggatgaccacatgaaaagaactggtggcctgtgtgtcccatggtcttacagggcagtggtggagggtggcccggtcatccactttcatatgatttcatgtatttggaaataaaaactcatggatagtgactggaagtggatcagtggttacccataaattcattgccaagtgcaatgtccagacgaatatttcctaggttttcttccaggatttttatagtcagaggatgtaatcttatgccaacgggtcttaataatcaaatgactccacagtgagaatcattactctgaaaaattgattttgttataatgatggaaatttaaatattttgaaagtaaaaacacatgccacctttttcctagaactctgcaaggcaaattgctgtaagacaggcagaggaagcacaatatatatatatatccaaaatataatttgcagtgaaaaaaaaaan

SEQ ID NO: 27277 - DNA, 727 bp, Homo sapiens; identical to SEQ ID NO: 21436
  misc_feature 1, 2, 3, 4, 5, 722, 723, 724, 725, 726, 727: n = A,T,C or G

SEQ ID NO: 27278 - DNA, 2928 bp, Homo sapiens; identical to SEQ ID NO: 21437
  misc_feature 1, 2, 3, 2928: n = A,T,C or G

SEQ ID NO: 27279 - DNA, 361 bp, Homo sapiens; identical to SEQ ID NO: 21438
  misc_feature 361: n = A,T,C or G

SEQ ID NO: 27280 - DNA, 2304 bp, Homo sapiens; identical to SEQ ID NO: 21439

SEQ ID NO: 27281 - DNA, 2163 bp, Homo sapiens; identical to SEQ ID NO: 21440
  misc_feature 1, 2, 2159, 2160, 2161, 2162, 2163: n = A,T,C or G

SEQ ID NO: 27282 - DNA, 365 bp, Homo sapiens; identical to SEQ ID NO: 21441
  misc_feature 363, 364, 365: n = A,T,C or G

SEQ ID NO: 27283 - DNA, 816 bp, Homo sapiens; identical to SEQ ID NO: 21390

SEQ ID NO: 27284 - DNA, 1284 bp, Homo sapiens; identical to SEQ ID NO: 21443
  misc_feature 1254, 1270, 1271, 1272, 1273, 1274, 1275, 1276, 1277, 1278,1279, 1280, 1281, 1282, 1283, 1284: n = A,T,C or G

SEQ ID NO: 27285 - DNA, 549 bp, Homo sapiens; identical to SEQ ID NO: 21395
  misc_feature 1, 549: n = A,T,C or G

SEQ ID NO: 27286 - DNA, 5252 bp, Homo sapiens; identical to SEQ ID NO: 21445
  misc_feature 1, 2, 3, 4, 5, 6, 7, 8, 9, 10, 11, 12, 13, 5239, 5240, 5241,5242, 5243, 5244, 5245, 5246, 5247, 5248, 5249, 5250, 5251,5252: n = A,T,C or G

SEQ ID NO: 27287 - DNA, 956 bp, Homo sapiens; identical to SEQ ID NO: 21446
  misc_feature 1, 2, 3, 4, 5, 6, 7, 8, 9, 10, 11, 12, 956: n = A,T,C or G

SEQ ID NO: 27288 - DNA, 5301 bp, Homo sapiens; identical to SEQ ID NO: 21447
  misc_feature 1, 2, 3, 4, 5, 5179, 5180, 5181, 5182, 5183, 5184, 5185,5186, 5187, 5188, 5189, 5190, 5191, 5192, 5193, 5194, 5195,5196, 5197, 5198, 5199, 5200, 5201, 5202, 5203, 5204, 5205,5206, 5207, 5208, 5209, 5210, 5211, 5212, 5213, 5214: n = A,T,C or G
  misc_feature 5295, 5296, 5297, 5298, 5299, 5300, 5301: n = A,T,C or G

SEQ ID NO: 27289 - DNA, 3552 bp, Homo sapiens; identical to SEQ ID NO: 21448
  misc_feature 3552: n = A,T,C or G

SEQ ID NO: 27290 - DNA, 2538 bp, Homo sapiens; identical to SEQ ID NO: 20316
  misc_feature 2538: n = A,T,C or G

SEQ ID NO: 27291 - DNA, 508 bp, Homo sapiens; identical to SEQ ID NO: 21293
  misc_feature 502, 503, 504, 505, 506, 507, 508: n = A,T,C or G

SEQ ID NO: 27292 - DNA, 341 bp, Homo sapiens; identical to SEQ ID NO: 21451

SEQ ID NO: 27293 - DNA, 689 bp, Homo sapiens; identical to SEQ ID NO: 21367
  misc_feature 1, 2: n = A,T,C or G

SEQ ID NO: 27294 - DNA, 657 bp, Homo sapiens; identical to SEQ ID NO: 21453
  misc_feature 655, 656, 657: n = A,T,C or G

SEQ ID NO: 27295 - DNA, 392 bp, Homo sapiens; identical to SEQ ID NO: 21454

SEQ ID NO: 27296 - DNA, 1060 bp, Homo sapiens; identical to SEQ ID NO: 20584
  misc_feature 1, 2: n = A,T,C or G

SEQ ID NO: 27297 - DNA, 440 bp, Homo sapiens; identical to SEQ ID NO: 20336
  misc_feature 440: n = A,T,C or G

SEQ ID NO: 27298 - DNA, 929 bp, Homo sapiens; identical to SEQ ID NO: 20094
  misc_feature 1, 2, 3, 4, 5, 6, 7, 8, 9, 10, 11, 12, 13, 14, 15, 16, 17,18, 19, 20, 926, 927, 928, 929: n = A,T,C or G

SEQ ID NO: 27299 - DNA, 734 bp, Homo sapiens; identical to SEQ ID NO: 21458
  misc_feature 734: n = A,T,C or G

SEQ ID NO: 27300 - DNA, 1145 bp, Homo sapiens; identical to SEQ ID NO: 21459
  misc_feature 1145: n = A,T,C or G

SEQ ID NO: 27301 - DNA, 2538 bp, Homo sapiens; identical to SEQ ID NO: 20316
  misc_feature 2538: n = A,T,C or G

SEQ ID NO: 27302 - DNA, 2315 bp, Homo sapiens; identical to SEQ ID NO: 20885
  misc_feature 1, 2, 2313, 2314, 2315: n = A,T,C or G

SEQ ID NO: 27303 - DNA, 1949 bp, Homo sapiens; identical to SEQ ID NO: 21462
  misc_feature 1, 2, 1944, 1945, 1946, 1947, 1948, 1949: n = A,T,C or G

SEQ ID NO: 27304 - DNA, 5381 bp, Homo sapiens; identical to SEQ ID NO: 21463

SEQ ID NO: 27305 - DNA, 802 bp, Homo sapiens; identical to SEQ ID NO: 21464

SEQ ID NO: 27306 - DNA, 508 bp, Homo sapiens; identical to SEQ ID NO: 21465
  misc_feature 485, 506, 507, 508: n = A,T,C or G

SEQ ID NO: 27307 - DNA, 1859 bp, Homo sapiens; identical to SEQ ID NO: 21466
  misc_feature 1859: n = A,T,C or G

SEQ ID NO: 27308 - DNA, 406 bp, Homo sapiens; identical to SEQ ID NO: 21467
  misc_feature 1, 2, 3, 4, 5: n = A,T,C or G

SEQ ID NO: 27309 - DNA, 713 bp, Homo sapiens; identical to SEQ ID NO: 21468
  misc_feature 1, 2, 3, 4, 5, 24, 713: n = A,T,C or G

SEQ ID NO: 27310 - DNA, 1532 bp, Homo sapiens; identical to SEQ ID NO: 21469

SEQ ID NO: 27311 - DNA, 4607 bp, Homo sapiens; identical to SEQ ID NO: 21470
  misc_feature 1, 4604, 4605, 4606, 4607: n = A,T,C or G

SEQ ID NO: 27312 - DNA, 2538 bp, Homo sapiens; identical to SEQ ID NO: 20316
  misc_feature 2538: n = A,T,C or G

SEQ ID NO: 27313 - DNA, 816 bp, Homo sapiens; identical to SEQ ID NO: 21390

SEQ ID NO: 27314 - DNA, 666 bp, Homo sapiens; identical to SEQ ID NO: 21473

SEQ ID NO: 27315 - DNA, 460 bp, Homo sapiens; identical to SEQ ID NO: 21412
  misc_feature 460: n = A,T,C or G

SEQ ID NO: 27316 - DNA, 2538 bp, Homo sapiens; identical to SEQ ID NO: 20316
  misc_feature 2538: n = A,T,C or G

SEQ ID NO: 27317 - DNA, 608 bp, Homo sapiens; identical to SEQ ID NO: 25580
  misc_feature 1, 2, 3, 4, 5: n = A,T,C or G

SEQ ID NO: 27318 - DNA, 689 bp, Homo sapiens; identical to SEQ ID NO: 21367
  misc_feature 1, 2: n = A,T,C or G

SEQ ID NO: 27319 - DNA, 670 bp, Homo sapiens; identical to SEQ ID NO: 21478
  misc_feature 623, 625, 670: n = A,T,C or G

SEQ ID NO: 27320 - DNA, 879 bp, Homo sapiens; identical to SEQ ID NO: 21368
  misc_feature 1, 2, 3, 4, 5, 6, 750, 846, 852, 872, 879: n = A,T,C or G

SEQ ID NO: 27321 - DNA, 2538 bp, Homo sapiens; identical to SEQ ID NO: 20316
  misc_feature 2538: n = A,T,C or G

SEQ ID NO: 27322 - DNA, 420 bp, Homo sapiens; identical to SEQ ID NO: 21481

SEQ ID NO: 27323 - DNA, 1498 bp, Homo sapiens; identical to SEQ ID NO: 20817
  misc_feature 1, 2, 1498: n = A,T,C or G

SEQ ID NO: 27324 - DNA, 508 bp, Homo sapiens; identical to SEQ ID NO: 21293
  misc_feature 502, 503, 504, 505, 506, 507, 508: n = A,T,C or G

SEQ ID NO: 27325 - DNA, 516 bp, Homo sapiens; identical to SEQ ID NO: 21320

SEQ ID NO: 27326 - DNA, 1380 bp, Homo sapiens; identical to SEQ ID NO: 20118
  misc_feature 1380: n = A,T,C or G

SEQ ID NO: 27327 - DNA, 1498 bp, Homo sapiens; identical to SEQ ID NO: 20817
  misc_feature 1, 2, 1498: n = A,T,C or G

SEQ ID NO: 27328 - DNA, 1001 bp, Homo sapiens; identical to SEQ ID NO: 21314
  misc_feature 681, 682, 683, 684, 685, 686, 687, 688, 689, 690, 691, 692,693, 694, 695, 696, 697, 698, 699, 700, 701, 702, 703, 704,705, 706, 707, 708, 709, 710, 711, 712, 713, 714, 715, 716,717, 718: n = A,T,C or G

SEQ ID NO: 27329 - DNA, 516 bp, Homo sapiens; identical to SEQ ID NO: 21320

SEQ ID NO: 27330 - DNA, 516 bp, Homo sapiens; identical to SEQ ID NO: 21320

SEQ ID NO: 27331 - DNA, 549 bp, Homo sapiens; identical to SEQ ID NO: 21395
  misc_feature 1, 549: n = A,T,C or G

SEQ ID NO: 27332 - DNA, 1380 bp, Homo sapiens; identical to SEQ ID NO: 20118
  misc_feature 1380: n = A,T,C or G

SEQ ID NO: 27333 - DNA, 1380 bp, Homo sapiens; identical to SEQ ID NO: 20118
  misc_feature 1380: n = A,T,C or G

SEQ ID NO: 27334 - DNA, 236 bp, Homo sapiens; identical to SEQ ID NO: 21493
  misc_feature 1, 230, 231, 232, 233, 234, 235, 236: n = A,T,C or G

SEQ ID NO: 27335 - DNA, 921 bp, Homo sapiens; identical to SEQ ID NO: 21494
  misc_feature 1: n = A,T,C or G

SEQ ID NO: 27336 - DNA, 862 bp, Homo sapiens; identical to SEQ ID NO: 21330

SEQ ID NO: 27337 - DNA, 2538 bp, Homo sapiens; identical to SEQ ID NO: 20316
  misc_feature 2538: n = A,T,C or G

SEQ ID NO: 27338 - DNA, 381 bp, Homo sapiens; identical to SEQ ID NO: 21497

SEQ ID NO: 27339 - DNA, 1498 bp, Homo sapiens; identical to SEQ ID NO: 20817
  misc_feature 1, 2, 1498: n = A,T,C or G

SEQ ID NO: 27340 - DNA, 508 bp, Homo sapiens; identical to SEQ ID NO: 21293
  misc_feature 502, 503, 504, 505, 506, 507, 508: n = A,T,C or G

SEQ ID NO: 27341 - DNA, 570 bp, Homo sapiens; identical to SEQ ID NO: 21500

SEQ ID NO: 27342 - DNA, 1250 bp, Homo sapiens; identical to SEQ ID NO: 21501
  misc_feature 1, 1250: n = A,T,C or G

SEQ ID NO: 27343 - DNA, 1060 bp, Homo sapiens; identical to SEQ ID NO: 20584
  misc_feature 1, 2: n = A,T,C or G

SEQ ID NO: 27344 - DNA, 425 bp, Homo sapiens; identical to SEQ ID NO: 21503

SEQ ID NO: 27345 - DNA, 905 bp, Homo sapiens; identical to SEQ ID NO: 21290
  misc_feature 1, 2, 3, 4, 5, 6, 7, 8, 9, 10, 11, 12, 13, 14, 15, 16, 17,18, 19, 20, 21, 855, 905: n = A,T,C or G

SEQ ID NO: 27346 - DNA, 3807 bp, Homo sapiens; identical to SEQ ID NO: 21505
  misc_feature 1, 3805, 3806, 3807: n = A,T,C or G

SEQ ID NO: 27347 - DNA, 420 bp, Homo sapiens; identical to SEQ ID NO: 21506

SEQ ID NO: 27348 - DNA, 1380 bp, Homo sapiens; identical to SEQ ID NO: 20118
  misc_feature 1380: n = A,T,C or G

SEQ ID NO: 27349 - DNA, 432 bp, Homo sapiens; identical to SEQ ID NO: 21508
  misc_feature 431, 432: n = A,T,C or G

SEQ ID NO: 27350 - DNA, 2538 bp, Homo sapiens; identical to SEQ ID NO: 20316
  misc_feature 2538: n = A,T,C or G

SEQ ID NO: 27351 - DNA, 2473 bp, Homo sapiens; identical to SEQ ID NO: 23320
  misc_feature 1, 2, 3, 2472, 2473: n = A,T,C or G

SEQ ID NO: 27352 - DNA, 550 bp, Homo sapiens; identical to SEQ ID NO: 21510
  misc_feature 539, 540, 541, 542, 543, 544, 545, 546, 547, 548, 549, 550: n = A,T,C or G

SEQ ID NO: 27353 - DNA, 862 bp, Homo sapiens; identical to SEQ ID NO: 21330

SEQ ID NO: 27354 - DNA, 1380 bp, Homo sapiens; identical to SEQ ID NO: 20118
  misc_feature 1380: n = A,T,C or G

SEQ ID NO: 27355 - DNA, 1117 bp, Homo sapiens; identical to SEQ ID NO: 21513
  misc_feature 1: n = A,T,C or G

SEQ ID NO: 27356 - DNA, 3054 bp, Homo sapiens; identical to SEQ ID NO: 21514
  misc_feature 1, 2, 3, 4, 5, 3054: n = A,T,C or G

SEQ ID NO: 27357 - DNA, 862 bp, Homo sapiens; identical to SEQ ID NO: 21330

SEQ ID NO: 27358 - DNA, 2187 bp, Homo sapiens; identical to SEQ ID NO: 21516

SEQ ID NO: 27359 - DNA, 1162 bp, Homo sapiens; identical to SEQ ID NO: 21517

SEQ ID NO: 27360 - DNA, 2538 bp, Homo sapiens; identical to SEQ ID NO: 20316
  misc_feature 2538: n = A,T,C or G

SEQ ID NO: 27361 - DNA, 816 bp, Homo sapiens; identical to SEQ ID NO: 21390

SEQ ID NO: 27362 - DNA, 1380 bp, Homo sapiens; identical to SEQ ID NO: 20118
  misc_feature 1380: n = A,T,C or G

SEQ ID NO: 27363 - DNA, 238 bp, Homo sapiens; identical to SEQ ID NO: 21521
  misc_feature 1, 36, 47, 236, 237, 238: n = A,T,C or G

SEQ ID NO: 27364 - DNA, 1448 bp, Homo sapiens; identical to SEQ ID NO: 22551
  misc_feature 1444, 1445, 1446, 1447, 1448: n = A,T,C or G

SEQ ID NO: 27365 - DNA, 3855 bp, Homo sapiens; identical to SEQ ID NO: 20695
  misc_feature 1, 2, 3854, 3855: n = A,T,C or G

SEQ ID NO: 27366 - DNA, 879 bp, Homo sapiens; identical to SEQ ID NO: 21368
  misc_feature 1, 2, 3, 4, 5, 6, 750, 846, 852, 872, 879: n = A,T,C or G

SEQ ID NO: 27367 - DNA, 862 bp, Homo sapiens; identical to SEQ ID NO: 21330

SEQ ID NO: 27368 - DNA, 4038 bp, Homo sapiens; identical to SEQ ID NO: 21526
  misc_feature 4023, 4024, 4025, 4026, 4027, 4028, 4029, 4030, 4031, 4032,4033, 4034, 4035, 4036, 4037, 4038: n = A,T,C or G

SEQ ID NO: 27369 - DNA, 2538 bp, Homo sapiens; identical to SEQ ID NO: 20316
  misc_feature 2538: n = A,T,C or G

SEQ ID NO: 27370 - DNA, 981 bp, Homo sapiens; identical to SEQ ID NO: 21528
  misc_feature 1, 2, 36, 45: n = A,T,C or G

SEQ ID NO: 27371 - DNA, 892 bp, Homo sapiens; identical to SEQ ID NO: 21529
  misc_feature 892: n = A,T,C or G

SEQ ID NO: 27372 - DNA, 2133 bp, Homo sapiens; identical to SEQ ID NO: 21530
  misc_feature 1, 2, 3, 4, 5, 6, 7, 8, 2133: n = A,T,C or G

SEQ ID NO: 27373 - DNA, 862 bp, Homo sapiens; identical to SEQ ID NO: 21330

SEQ ID NO: 27374 - DNA, 1185 bp, Homo sapiens; identical to SEQ ID NO: 21532
  misc_feature 1, 2, 3, 4, 5, 6, 7, 8, 9, 10, 11, 12, 13, 14, 15, 16, 17,18, 19, 20, 21, 22: n = A,T,C or G

SEQ ID NO: 27375 - DNA, 2538 bp, Homo sapiens; identical to SEQ ID NO: 20316
  misc_feature 2538: n = A,T,C or G

SEQ ID NO: 27376 - DNA, 390 bp, Homo sapiens; identical to SEQ ID NO: 21534

SEQ ID NO: 27377 - DNA, 890 bp, Homo sapiens; identical to SEQ ID NO: 21535
  misc_feature 1, 2: n = A,T,C or G

SEQ ID NO: 27378 - DNA, 1481 bp, Homo sapiens; identical to SEQ ID NO: 21476
  misc_feature 1, 2, 3, 4: n = A,T,C or G

SEQ ID NO: 27379 - DNA, 394 bp, Homo sapiens; identical to SEQ ID NO: 20808
  misc_feature 1, 2, 3: n = A,T,C or G

SEQ ID NO: 27380 - DNA, 2538 bp, Homo sapiens; identical to SEQ ID NO: 20316
  misc_feature 2538: n = A,T,C or G

SEQ ID NO: 27381 - DNA, 1380 bp, Homo sapiens; identical to SEQ ID NO: 20118
  misc_feature 1380: n = A,T,C or G

SEQ ID NO: 27382 - DNA, 1892 bp, Homo sapiens; identical to SEQ ID NO: 21540
  misc_feature 1, 1891, 1892: n = A,T,C or G

SEQ ID NO: 27383 - DNA, 387 bp, Homo sapiens; identical to SEQ ID NO: 21541
  misc_feature 1: n = A,T,C or G

SEQ ID NO: 27384 - DNA, 1214 bp, Homo sapiens; identical to SEQ ID NO: 20119

SEQ ID NO: 27385 - DNA, 2187 bp, Homo sapiens; identical to SEQ ID NO: 21516

SEQ ID NO: 27386 - DNA, 2538 bp, Homo sapiens; identical to SEQ ID NO: 20316
  misc_feature 2538: n = A,T,C or G

SEQ ID NO: 27387 - DNA, 666 bp, Homo sapiens; identical to SEQ ID NO: 21473

SEQ ID NO: 27388 - DNA, 802 bp, Homo sapiens; identical to SEQ ID NO: 21464

SEQ ID NO: 27389 - DNA, 935 bp, Homo sapiens; identical to SEQ ID NO: 21547
  misc_feature 906, 935: n = A,T,C or G

SEQ ID NO: 27390 - DNA, 2538 bp, Homo sapiens; identical to SEQ ID NO: 20316
  misc_feature 2538: n = A,T,C or G

SEQ ID NO: 27391 - DNA, 981 bp, Homo sapiens; identical to SEQ ID NO: 21549
  misc_feature 1, 906, 981: n = A,T,C or G

SEQ ID NO: 27392 - DNA, 860 bp, Homo sapiens; identical to SEQ ID NO: 21550
  misc_feature 1, 2: n = A,T,C or G

SEQ ID NO: 27393 - DNA, 420 bp, Homo sapiens; identical to SEQ ID NO: 21506

SEQ ID NO: 27394 - DNA, 362 bp, Homo sapiens; identical to SEQ ID NO: 21552
  misc_feature 312, 349, 350, 351, 352, 353, 354, 355, 356, 357, 358, 359,360, 361, 362: n = A,T,C or G

SEQ ID NO: 27395 - DNA, 1020 bp, Homo sapiens; identical to SEQ ID NO: 20647
  misc_feature 1, 2, 3, 14, 20, 35, 42, 48, 81, 1019, 1020: n = A,T,C or G

SEQ ID NO: 27396 - DNA, 492 bp, Homo sapiens; identical to SEQ ID NO: 21554
  misc_feature 1, 2: n = A,T,C or G

SEQ ID NO: 27397 - DNA, 568 bp, Homo sapiens; identical to SEQ ID NO: 21555
  misc_feature 1, 2, 3, 4, 5, 568: n = A,T,C or G

SEQ ID NO: 27398 - DNA, 1498 bp, Homo sapiens; identical to SEQ ID NO: 20817
  misc_feature 1, 2, 1498: n = A,T,C or G

SEQ ID NO: 27399 - DNA, 498 bp, Homo sapiens; identical to SEQ ID NO: 21110

SEQ ID NO: 27400 - DNA, 689 bp, Homo sapiens; identical to SEQ ID NO: 21367
  misc_feature 1, 2: n = A,T,C or G

SEQ ID NO: 27401 - DNA, 4399 bp, Homo sapiens; identical to SEQ ID NO: 20975

SEQ ID NO: 27402 - DNA, 2187 bp, Homo sapiens; identical to SEQ ID NO: 21516

SEQ ID NO: 27403 - DNA, 516 bp, Homo sapiens; identical to SEQ ID NO: 21320

SEQ ID NO: 27404 - DNA, 1481 bp, Homo sapiens; identical to SEQ ID NO: 21476
  misc_feature 1, 2, 3, 4: n = A,T,C or G

SEQ ID NO: 27405 - DNA, 378 bp, Homo sapiens; identical to SEQ ID NO: 21563
  misc_feature 1: n = A,T,C or G

SEQ ID NO: 27406 - DNA, 996 bp, Homo sapiens; identical to SEQ ID NO: 21564
  misc_feature 427, 572, 597, 601, 649, 670, 695, 717, 755, 759, 775, 782,803, 805, 815, 816, 817, 821, 825, 836, 843, 845, 846, 847,848, 849, 850, 851, 852, 853, 854, 855, 856, 857, 858, 859,860, 861, 862, 863, 864, 865, 866, 867, 868, 869, 870: n = A,T,C or G
  misc_feature 871, 872, 873, 874, 875, 876, 877, 878, 879, 880, 881, 882,883, 884, 885, 886, 887, 888, 889, 890, 891, 892, 893, 894,895, 896, 897, 898, 899, 900, 901, 902, 903, 904, 905, 906,907, 908, 909, 910, 911, 912, 913, 914, 915, 916, 917: n = A,T,C or G
  misc_feature 918, 919, 920, 921, 922, 923, 924, 925, 926, 927, 928, 929,930, 931, 932, 933, 934, 935, 936, 937, 938, 939, 940, 941,942, 943, 944, 945, 946, 947, 948, 949, 950, 951, 952, 953,954, 955, 956, 957, 958, 959, 960, 961, 962, 963, 964: n = A,T,C or G
  misc_feature 965, 966, 967, 968, 969, 970, 971, 972, 973, 974, 975, 976,977, 978, 979, 980, 981, 982, 983, 984, 985, 986, 987, 988,989, 990, 991, 992, 993, 994, 995, 996: n = A,T,C or G

SEQ ID NO: 27407 - DNA, 561 bp, Homo sapiens; identical to SEQ ID NO: 20209
  misc_feature 1, 2, 3, 4, 5, 6, 7, 8, 9, 147, 148, 149, 150, 151, 152,153, 154, 155, 156, 157, 158, 159, 160, 161, 162, 163, 164,165, 166, 167, 168, 169, 170: n = A,T,C or G

SEQ ID NO: 27408 - DNA, 543 bp, Homo sapiens; identical to SEQ ID NO: 21566
  misc_feature 1, 2: n = A,T,C or G

SEQ ID NO: 27409 - DNA, 408 bp, Homo sapiens
cagtcatggtggcacgttcctctagtcccagctactcgggaggccgaggcagaagaattacttcaacatgggatgtggaggttgcagtgagccgagatcgcgccaccgcactccagcctggtgacagagcgagaccccatctcaaaaaaaaaaaaaagttgtatgtgacagctaaccataataaaaaaaagaaagaaaaaagagagagaaagtagggacaacactaaatcattagtaatttgagcacatttcctccaaggcatatgctatttttcaacttggtttcaatcatgtatctttattgtttttcttaatgttataagcatgtttggttttattgtagtctttaaatcatgtaatacttcattagtatgtattattccacataatagtcctttaggtagatgt

SEQ ID NO: 27410 - DNA, 349 bp, Homo sapiens; identical to SEQ ID NO: 20627
  misc_feature 342, 343, 344, 345, 346, 347, 348, 349: n = A,T,C or G

SEQ ID NO: 27411 - DNA, 2538 bp, Homo sapiens; identical to SEQ ID NO: 20316
  misc_feature 2538: n = A,T,C or G

SEQ ID NO: 27412 - DNA, 408 bp, Homo sapiens; identical to SEQ ID NO: 21570
  misc_feature 1: n = A,T,C or G

SEQ ID NO: 27413 - DNA, 596 bp, Homo sapiens; identical to SEQ ID NO: 21571
  misc_feature 560, 589, 590, 591, 592, 593, 594, 595, 596: n = A,T,C or G

SEQ ID NO: 27414 - DNA, 2242 bp, Homo sapiens; identical to SEQ ID NO: 21153
  misc_feature 2084, 2085, 2086, 2087, 2088, 2089, 2090, 2091, 2092, 2093,2094, 2095, 2096, 2097, 2098, 2099, 2100, 2101, 2102, 2103,2104, 2105, 2106, 2107, 2108, 2109, 2110, 2111, 2112, 2113,2114, 2115, 2116, 2117, 2118, 2119, 2120, 2121, 2122: n = A,T,C or G
  misc_feature 2123, 2124, 2125, 2126, 2127, 2128, 2129, 2130, 2131, 2132,2133, 2134, 2135, 2136, 2137, 2138, 2139, 2140, 2141, 2142,2143, 2144, 2145, 2146, 2147, 2148, 2149, 2150, 2151, 2152,2153, 2154, 2155, 2156, 2157, 2158, 2159, 2160, 2161: n = A,T,C or G
  misc_feature 2162, 2163, 2164, 2165, 2166, 2167, 2168, 2169, 2170, 2171,2172, 2173, 2227, 2228, 2229, 2230, 2231, 2232, 2233, 2234,2235, 2236, 2237, 2238, 2239, 2240, 2241, 2242: n = A,T,C or G

SEQ ID NO: 27415 - DNA, 2538 bp, Homo sapiens; identical to SEQ ID NO: 20316
  misc_feature 2538: n = A,T,C or G

SEQ ID NO: 27416 - DNA, 1380 bp, Homo sapiens; identical to SEQ ID NO: 20118
  misc_feature 1380: n = A,T,C or G

SEQ ID NO: 27417 - DNA, 639 bp, Homo sapiens; identical to SEQ ID NO: 21575
  misc_feature 613, 638, 639: n = A,T,C or G

SEQ ID NO: 27418 - DNA, 1211 bp, Homo sapiens; identical to SEQ ID NO: 20419
  misc_feature 1207, 1208, 1209, 1210, 1211: n = A,T,C or G

SEQ ID NO: 27419 - DNA, 2187 bp, Homo sapiens; identical to SEQ ID NO: 21516

SEQ ID NO: 27420 - DNA, 608 bp, Homo sapiens; identical to SEQ ID NO: 25580
  misc_feature 1, 2, 3, 4, 5: n = A,T,C or G

SEQ ID NO: 27421 - DNA, 1151 bp, Homo sapiens; identical to SEQ ID NO: 21579

SEQ ID NO: 27422 - DNA, 1022 bp, Homo sapiens; identical to SEQ ID NO: 21580
  misc_feature 1, 2, 3, 4, 5, 6, 7, 24, 26, 37, 1012, 1013, 1017, 1018,1019, 1020, 1021, 1022: n = A,T,C or G

SEQ ID NO: 27423 - DNA, 460 bp, Homo sapiens; identical to SEQ ID NO: 21412
  misc_feature 460: n = A,T,C or G

SEQ ID NO: 27424 - DNA, 2538 bp, Homo sapiens; identical to SEQ ID NO: 20316
  misc_feature 2538: n = A,T,C or G

SEQ ID NO: 27425 - DNA, 390 bp, Homo sapiens; identical to SEQ ID NO: 21534

SEQ ID NO: 27426 - DNA, 385 bp, Homo sapiens; identical to SEQ ID NO: 21584

SEQ ID NO: 27427 - DNA, 879 bp, Homo sapiens; identical to SEQ ID NO: 21368
  misc_feature 1, 2, 3, 4, 5, 6, 750, 846, 852, 872, 879: n = A,T,C or G

SEQ ID NO: 27428 - DNA, 1380 bp, Homo sapiens; identical to SEQ ID NO: 20118
  misc_feature 1380: n = A,T,C or G

SEQ ID NO: 27429 - DNA, 624 bp, Homo sapiens; identical to SEQ ID NO: 21587
  misc_feature 624: n = A,T,C or G

SEQ ID NO: 27430 - DNA, 1097 bp, Homo sapiens; identical to SEQ ID NO: 21588
  misc_feature 1, 2, 3, 4, 1097: n = A,T,C or G

SEQ ID NO: 27431 - DNA, 816 bp, Homo sapiens; identical to SEQ ID NO: 21390

SEQ ID NO: 27432 - DNA, 879 bp, Homo sapiens; identical to SEQ ID NO: 21368
  misc_feature 1, 2, 3, 4, 5, 6, 750, 846, 852, 872, 879: n = A,T,C or G

SEQ ID NO: 27433 - DNA, 1020 bp, Homo sapiens; identical to SEQ ID NO: 20647
  misc_feature 1, 2, 3, 14, 20, 35, 42, 48, 81, 1019, 1020: n = A,T,C or G

SEQ ID NO: 27434 - DNA, 2538 bp, Homo sapiens; identical to SEQ ID NO: 20316
  misc_feature 2538: n = A,T,C or G

SEQ ID NO: 27435 - DNA, 2538 bp, Homo sapiens; identical to SEQ ID NO: 20316
  misc_feature 2538: n = A,T,C or G

SEQ ID NO: 27436 - DNA, 508 bp, Homo sapiens; identical to SEQ ID NO: 21293
  misc_feature 502, 503, 504, 505, 506, 507, 508: n = A,T,C or G

SEQ ID NO: 27437 - DNA, 2475 bp, Homo sapiens; identical to SEQ ID NO: 21595

SEQ ID NO: 27438 - DNA, 469 bp, Homo sapiens; identical to SEQ ID NO: 20836

SEQ ID NO: 27439 - DNA, 585 bp, Homo sapiens; identical to SEQ ID NO: 22537
  misc_feature 1, 582, 583, 584, 585: n = A,T,C or G

SEQ ID NO: 27440 - DNA, 385 bp, Homo sapiens; identical to SEQ ID NO: 21584

SEQ ID NO: 27441 - DNA, 2538 bp, Homo sapiens; identical to SEQ ID NO: 20316
  misc_feature 2538: n = A,T,C or G

SEQ ID NO: 27442 - DNA, 809 bp, Homo sapiens; identical to SEQ ID NO: 20847
  misc_feature 809: n = A,T,C or G

SEQ ID NO: 27443 - DNA, 2538 bp, Homo sapiens; identical to SEQ ID NO: 20316
  misc_feature 2538: n = A,T,C or G

SEQ ID NO: 27444 - DNA, 2538 bp, Homo sapiens; identical to SEQ ID NO: 20316
  misc_feature 2538: n = A,T,C or G

SEQ ID NO: 27445 - DNA, 3090 bp, Homo sapiens; identical to SEQ ID NO: 21602
  misc_feature 1, 2, 3089, 3090: n = A,T,C or G

SEQ ID NO: 27446 - DNA, 2187 bp, Homo sapiens; identical to SEQ ID NO: 21516

SEQ ID NO: 27447 - DNA, 731 bp, Homo sapiens; identical to SEQ ID NO: 20529
  misc_feature 1, 2, 3, 4: n = A,T,C or G

SEQ ID NO: 27448 - DNA, 1513 bp, Homo sapiens; identical to SEQ ID NO: 21605
  misc_feature 1, 2, 3, 4, 5, 6, 7, 8, 9, 10, 11, 12, 13, 27: n = A,T,C or G

SEQ ID NO: 27449 - DNA, 485 bp, Homo sapiens; identical to SEQ ID NO: 20462
  misc_feature 485: n = A,T,C or G

SEQ ID NO: 27450 - DNA, 1380 bp, Homo sapiens; identical to SEQ ID NO: 20118
  misc_feature 1380: n = A,T,C or G

SEQ ID NO: 27451 - DNA, 2538 bp, Homo sapiens; identical to SEQ ID NO: 20316
  misc_feature 2538: n = A,T,C or G

SEQ ID NO: 27452 - DNA, 2786 bp, Homo sapiens; identical to SEQ ID NO: 21609
  misc_feature 1, 2, 2777, 2778, 2779, 2780, 2781, 2782, 2783, 2784, 2785,2786: n = A,T,C or G

SEQ ID NO: 27453 - DNA, 879 bp, Homo sapiens; identical to SEQ ID NO: 21368
  misc_feature 1, 2, 3, 4, 5, 6, 750, 846, 852, 872, 879: n = A,T,C or G

SEQ ID NO: 27454 - DNA, 2538 bp, Homo sapiens; identical to SEQ ID NO: 20316
  misc_feature 2538: n = A,T,C or G

SEQ ID NO: 27455 - DNA, 6204 bp, Homo sapiens; identical to SEQ ID NO: 21612

SEQ ID NO: 27456 - DNA, 2538 bp, Homo sapiens; identical to SEQ ID NO: 20316
  misc_feature 2538: n = A,T,C or G

SEQ ID NO: 27457 - DNA, 747 bp, Homo sapiens; identical to SEQ ID NO: 21614

SEQ ID NO: 27458 - DNA, 349 bp, Homo sapiens; identical to SEQ ID NO: 21615
  misc_feature 347, 348, 349: n = A,T,C or G

SEQ ID NO: 27459 - DNA, 3793 bp, Homo sapiens; identical to SEQ ID NO: 21616
  misc_feature 1, 2, 3, 968, 3789, 3790, 3791, 3792, 3793: n = A,T,C or G

SEQ ID NO: 27460 - DNA, 2841 bp, Homo sapiens; identical to SEQ ID NO: 21617

SEQ ID NO: 27461 - DNA, 2475 bp, Homo sapiens; identical to SEQ ID NO: 21595

SEQ ID NO: 27462 - DNA, 450 bp, Homo sapiens; identical to SEQ ID NO: 20659
  misc_feature 448, 449, 450: n = A,T,C or G

SEQ ID NO: 27463 - DNA, 1396 bp, Homo sapiens; identical to SEQ ID NO: 21620

SEQ ID NO: 27464 - DNA, 446 bp, Homo sapiens; identical to SEQ ID NO: 20632
  misc_feature 441, 442, 443, 444, 445, 446: n = A,T,C or G

SEQ ID NO: 27465 - DNA, 1020 bp, Homo sapiens; identical to SEQ ID NO: 20647
  misc_feature 1, 2, 3, 14, 20, 35, 42, 48, 81, 1019, 1020: n = A,T,C or G

SEQ ID NO: 27466 - DNA, 508 bp, Homo sapiens; identical to SEQ ID NO: 21293
  misc_feature 502, 503, 504, 505, 506, 507, 508: n = A,T,C or G

SEQ ID NO: 27467 - DNA, 2538 bp, Homo sapiens; identical to SEQ ID NO: 20316
  misc_feature 2538: n = A,T,C or G

SEQ ID NO: 27468 - DNA, 1132 bp, Homo sapiens; identical to SEQ ID NO: 21625
  misc_feature 1125, 1126, 1127, 1128, 1129, 1130, 1131, 1132: n = A,T,C or G

SEQ ID NO: 27469 - DNA, 689 bp, Homo sapiens; identical to SEQ ID NO: 21367
  misc_feature 1, 2: n = A,T,C or G

SEQ ID NO: 27470 - DNA, 879 bp, Homo sapiens; identical to SEQ ID NO: 21368
  misc_feature 1, 2, 3, 4, 5, 6, 750, 846, 852, 872, 879: n = A,T,C or G

SEQ ID NO: 27471 - DNA, 791 bp, Homo sapiens; identical to SEQ ID NO: 21628
  misc_feature 1, 2, 3, 4, 5, 6, 786, 787, 788, 789, 790, 791: n = A,T,C or G

SEQ ID NO: 27472 - DNA, 816 bp, Homo sapiens; identical to SEQ ID NO: 21390

SEQ ID NO: 27473 - DNA, 2187 bp, Homo sapiens; identical to SEQ ID NO: 21516

SEQ ID NO: 27474 - DNA, 558 bp, Homo sapiens; identical to SEQ ID NO: 21631
  misc_feature 1, 2, 3, 4, 5, 6, 7, 558: n = A,T,C or G

SEQ ID NO: 27475 - DNA, 508 bp, Homo sapiens; identical to SEQ ID NO: 21293
  misc_feature 502, 503, 504, 505, 506, 507, 508: n = A,T,C or G

SEQ ID NO: 27476 - DNA, 2538 bp, Homo sapiens; identical to SEQ ID NO: 20316
  misc_feature 2538: n = A,T,C or G

SEQ ID NO: 27477 - DNA, 643 bp, Homo sapiens; identical to SEQ ID NO: 20678
  misc_feature 1, 2, 640, 641, 642, 643: n = A,T,C or G

SEQ ID NO: 27478 - DNA, 407 bp, Homo sapiens; identical to SEQ ID NO: 21635
  misc_feature 403, 404, 405, 406, 407: n = A,T,C or G

SEQ ID NO: 27479 - DNA, 689 bp, Homo sapiens; identical to SEQ ID NO: 21367
  misc_feature 1, 2: n = A,T,C or G

SEQ ID NO: 27480 - DNA, 2538 bp, Homo sapiens; identical to SEQ ID NO: 20316
  misc_feature 2538: n = A,T,C or G

SEQ ID NO: 27481 - DNA, 1702 bp, Homo sapiens; identical to SEQ ID NO: 21884

SEQ ID NO: 27482 - DNA, 758 bp, Homo sapiens; identical to SEQ ID NO: 21402
  misc_feature 1, 2, 756, 757, 758: n = A,T,C or G

SEQ ID NO: 27483 - DNA, 1264 bp, Homo sapiens; identical to SEQ ID NO: 21640
  misc_feature 1, 1260, 1261, 1262, 1263, 1264: n = A,T,C or G

SEQ ID NO: 27484 - DNA, 508 bp, Homo sapiens; identical to SEQ ID NO: 21293
  misc_feature 502, 503, 504, 505, 506, 507, 508: n = A,T,C or G

SEQ ID NO: 27485 - DNA, 905 bp, Homo sapiens; identical to SEQ ID NO: 21290
  misc_feature 1, 2, 3, 4, 5, 6, 7, 8, 9, 10, 11, 12, 13, 14, 15, 16, 17,18, 19, 20, 21, 855, 905: n = A,T,C or G

SEQ ID NO: 27486 - DNA, 3186 bp, Homo sapiens; identical to SEQ ID NO: 21643
  misc_feature 3143, 3166: n = A,T,C or G

SEQ ID NO: 27487 - DNA, 349 bp, Homo sapiens; identical to SEQ ID NO: 21615
  misc_feature 347, 348, 349: n = A,T,C or G

SEQ ID NO: 27488 - DNA, 594 bp, Homo sapiens; identical to SEQ ID NO: 20446
  misc_feature 586, 587, 588, 589, 590, 591, 592, 593, 594: n = A,T,C or G

SEQ ID NO: 27489 - DNA, 508 bp, Homo sapiens; identical to SEQ ID NO: 21293
  misc_feature 502, 503, 504, 505, 506, 507, 508: n = A,T,C or G

SEQ ID NO: 27490 - DNA, 2538 bp, Homo sapiens; identical to SEQ ID NO: 20316
  misc_feature 2538: n = A,T,C or G

SEQ ID NO: 27491 - DNA, 365 bp, Homo sapiens; identical to SEQ ID NO: 21648
  misc_feature 362, 363, 364, 365: n = A,T,C or G

SEQ ID NO: 27492 - DNA, 692 bp, Homo sapiens; identical to SEQ ID NO: 21649
  misc_feature 690, 691, 692: n = A,T,C or G

SEQ ID NO: 27493 - DNA, 858 bp, Homo sapiens; identical to SEQ ID NO: 20527
  misc_feature 1, 2, 858: n = A,T,C or G

SEQ ID NO: 27494 - DNA, 369 bp, Homo sapiens; identical to SEQ ID NO: 21651
  misc_feature 1, 2, 3, 4, 5, 6, 7, 8: n = A,T,C or G

SEQ ID NO: 27495 - DNA, 1020 bp, Homo sapiens; identical to SEQ ID NO: 20647
  misc_feature 1, 2, 3, 14, 20, 35, 42, 48, 81, 1019, 1020: n = A,T,C or G

SEQ ID NO: 27496 - DNA, 2538 bp, Homo sapiens; identical to SEQ ID NO: 20316
  misc_feature 2538: n = A,T,C or G

SEQ ID NO: 27497 - DNA, 1210 bp, Homo sapiens; identical to SEQ ID NO: 21654
  misc_feature 1, 2: n = A,T,C or G

SEQ ID NO: 27498 - DNA, 1060 bp, Homo sapiens; identical to SEQ ID NO: 20584
  misc_feature 1, 2: n = A,T,C or G

SEQ ID NO: 27499 - DNA, 879 bp, Homo sapiens; identical to SEQ ID NO: 21368
  misc_feature 1, 2, 3, 4, 5, 6, 750, 846, 852, 872, 879: n = A,T,C or G

SEQ ID NO: 27500 - DNA, 666 bp, Homo sapiens; identical to SEQ ID NO: 21657
  misc_feature 1, 2, 3, 4, 5, 6, 7, 8, 9: n = A,T,C or G

SEQ ID NO: 27501 - DNA, 374 bp, Homo sapiens; identical to SEQ ID NO: 21658

SEQ ID NO: 27502 - DNA, 420 bp, Homo sapiens; identical to SEQ ID NO: 21659
  misc_feature 1, 2, 3, 4: n = A,T,C or G

SEQ ID NO: 27503 - DNA, 882 bp, Homo sapiens; identical to SEQ ID NO: 21660
  misc_feature 1: n = A,T,C or G

SEQ ID NO: 27504 - DNA, 506 bp, Homo sapiens; identical to SEQ ID NO: 21661
  misc_feature 1, 2: n = A,T,C or G

SEQ ID NO: 27505 - DNA, 560 bp, Homo sapiens; identical to SEQ ID NO: 20759
  misc_feature 560: n = A,T,C or G

SEQ ID NO: 27506 - DNA, 878 bp, Homo sapiens; identical to SEQ ID NO: 21663

SEQ ID NO: 27507 - DNA, 492 bp, Homo sapiens; identical to SEQ ID NO: 21704

SEQ ID NO: 27508 - DNA, 386 bp, Homo sapiens; identical to SEQ ID NO: 21664

SEQ ID NO: 27509 - DNA, 1214 bp, Homo sapiens; identical to SEQ ID NO: 20119

SEQ ID NO: 27510 - DNA, 1498 bp, Homo sapiens; identical to SEQ ID NO: 20817
  misc_feature 1, 2, 1498: n = A,T,C or G

SEQ ID NO: 27511 - DNA, 2538 bp, Homo sapiens; identical to SEQ ID NO: 20316
  misc_feature 2538: n = A,T,C or G

SEQ ID NO: 27512 - DNA, 2538 bp, Homo sapiens; identical to SEQ ID NO: 20316
  misc_feature 2538: n = A,T,C or G

SEQ ID NO: 27513 - DNA, 1060 bp, Homo sapiens; identical to SEQ ID NO: 20584
  misc_feature 1, 2: n = A,T,C or G

SEQ ID NO: 27514 - DNA, 689 bp, Homo sapiens; identical to SEQ ID NO: 21367
  misc_feature 1, 2: n = A,T,C or G

SEQ ID NO: 27515 - DNA, 414 bp, Homo sapiens; identical to SEQ ID NO: 21428
  misc_feature 1, 2, 3, 4, 5, 6, 7, 8, 9, 10, 11, 12, 13, 414: n = A,T,C or G

SEQ ID NO: 27516 - DNA, 1264 bp, Homo sapiens; identical to SEQ ID NO: 21640
  misc_feature 1, 1260, 1261, 1262, 1263, 1264: n = A,T,C or G

SEQ ID NO: 27517 - DNA, 2187 bp, Homo sapiens; identical to SEQ ID NO: 21516

SEQ ID NO: 27518 - DNA, 642 bp, Homo sapiens; identical to SEQ ID NO: 21674
  misc_feature 1, 2: n = A,T,C or G

SEQ ID NO: 27519 - DNA, 689 bp, Homo sapiens; identical to SEQ ID NO: 21367
  misc_feature 1, 2: n = A,T,C or G

SEQ ID NO: 27520 - DNA, 496 bp, Homo sapiens; identical to SEQ ID NO: 21676
  misc_feature 496: n = A,T,C or G

SEQ ID NO: 27521 - DNA, 860 bp, Homo sapiens; identical to SEQ ID NO: 21677
  misc_feature 851, 852, 853, 854, 855, 856, 857, 858, 859, 860: n = A,T,C or G

SEQ ID NO: 27522 - DNA, 2007 bp, Homo sapiens
  misc_feature 1, 2, 3, 2007: n = A,T,C or G
nnngggataataatccccgcggccccgtatccctggtgagaaatcccttaagcttctgagccctaccccatatggtcatatgaagaacccaaggacttcttaaacatagattctctctaacttaaatttgaggcagacaaacgtctaactttaaaacagatgagaccccgaacatttccaggatacataaatctgaattttgtgtacatttatgcctgagacagctaacccatcccaatttgatggtgaggattttccgttactcattgttgtttcctatcgtgttccttgtctaacatccaaatttaacacattcagtatttctttttcataatcctatggatgaccataccagaatgtttatgattttcataatttgctctgtgatctgtaatcctaagtgtgtgcatatatttaatcaacacataataataagtaataccaattcatggaatccaacatatgtactctggcataaaaaaagaaacgcgaattgccacaaataaaatgagtttattttatattaaagttatcaaaaaacacacctgtaaaattacccacatactaggcttagagatagccttttacaaacagattattaaaaatctgcaaacttattttctcttaactattaaagtacatagatttaaaaggtgttagaaggcaaaatgttaagtcatggtcaatgtcttaaaaaagagttaatataattaaatctgtagcatactacaaaaagattaaatcttaaaaatattttgggaaaaaagctataattttctttctgaaaaatttaatcttaagtgatatttactaagaaatatatactgcaaaccacaataacaatgatcttctcaaaatttgcctaattgcttcacaaatgagtcaacttacaaagaagaaaacacagaaaattgcttttaaatatataactccttaattttcctgataatcaaatgaaaatttagtccatcccaattaatacaaattagactcatgcttaatgtaagatatcattatatatttcttaacaacataaaagttcaagcatttttggaaagcacagactgtgttattctaaaaaaggaaaaaaaagaaaaaaatatttaaccacagaaatttggaatatttatatactttataacactgtagaaatctttggtggtgacatatggaataagatccctgaaaatactttaatcattttgtcccatcaatcagtgtagtcaagtatttataatcagtaattttggcagtataattttttagccaaatacacacacacacacacacacacacacacacacacacacacacatatatattgtgaagtatgtgagggggatcttatgcaggacctaggtgggcttacataattaattatttagcaataaggcttatttctggctcctttttataccaggaaaaaatatggtaaactaacgaatgggtcaattcttactcctaaacaaactctggaaatagttaaatactaatggacaagttgagtaaatgtacagcaaaataaaataccagctgcaatttctgtataaactcaaacatctaccaaaatagttccctaaataggtttgtgcatctaatcccgtgctccatgtgctggcagaggaaaaagcaaggcactgtggtctatggatacatttacctcttttaaaaccagtagacttaaaaggagaaacaaaaaaagatctgttctaccttaaaagaaacaaaaatgtacaggctaattagacaaagttcaaagaaaagggccccgctaaaacacatgtacaggaaaagaaccaaaatttaagaaatgtagaagagaaagaagagtaaaatgatatcaacagtgtataatgatgtaaggaaagatatcagagtaagctctgtgaatgtggaaaagagcaggtaaacggaatgggctgtatggatgtgcacgatctccttcatggcgggcgcggatttgcgataggaactggctatgcgcccacgcgtccgcggacgcgtggn

SEQ ID NO: 27523 - DNA, 2538 bp, Homo sapiens; identical to SEQ ID NO: 20316
  misc_feature 2538: n = A,T,C or G

SEQ ID NO: 27524 - DNA, 981 bp, Homo sapiens; identical to SEQ ID NO: 21549
  misc_feature 1, 906, 981: n = A,T,C or G

SEQ ID NO: 27525 - DNA, 634 bp, Homo sapiens; identical to SEQ ID NO: 21681
  misc_feature 1, 2, 3, 4, 20, 40, 617, 618, 619, 620, 621, 622, 623, 624,625, 626, 627, 628, 629, 630, 631, 632, 633, 634: n = A,T,C or G

SEQ ID NO: 27526 - DNA, 396 bp, Homo sapiens; identical to SEQ ID NO: 21682

SEQ ID NO: 27527 - DNA, 530 bp, Homo sapiens; identical to SEQ ID NO: 21683
  misc_feature 527, 528, 529, 530: n = A,T,C or G

SEQ ID NO: 27528 - DNA, 2538 bp, Homo sapiens; identical to SEQ ID NO: 20316
  misc_feature 2538: n = A,T,C or G

SEQ ID NO: 27529 - DNA, 1631 bp, Homo sapiens; identical to SEQ ID NO: 21685
  misc_feature 1630, 1631: n = A,T,C or G

SEQ ID NO: 27530 - DNA, 2538 bp, Homo sapiens; identical to SEQ ID NO: 20316
  misc_feature 2538: n = A,T,C or G

SEQ ID NO: 27531 - DNA, 2854 bp, Homo sapiens; identical to SEQ ID NO: 21687
  misc_feature 2852, 2853, 2854: n = A,T,C or G

SEQ ID NO: 27532 - DNA, 981 bp, Homo sapiens; identical to SEQ ID NO: 21549
  misc_feature 1, 906, 981: n = A,T,C or G

SEQ ID NO: 27533 - DNA, 632 bp, Homo sapiens; identical to SEQ ID NO: 21689

SEQ ID NO: 27534 - DNA, 1380 bp, Homo sapiens; identical to SEQ ID NO: 20118
  misc_feature 1380: n = A,T,C or G

SEQ ID NO: 27535 - DNA, 398 bp, Homo sapiens; identical to SEQ ID NO: 21690

SEQ ID NO: 27536 - DNA, 1498 bp, Homo sapiens; identical to SEQ ID NO: 20817
  misc_feature 1, 2, 1498: n = A,T,C or G

SEQ ID NO: 27537 - DNA, 3695 bp, Homo sapiens; identical to SEQ ID NO: 21692
  misc_feature 1, 2, 3694, 3695: n = A,T,C or G

SEQ ID NO: 27538 - DNA, 1380 bp, Homo sapiens; identical to SEQ ID NO: 20118
  misc_feature 1380: n = A,T,C or G

SEQ ID NO: 27539 - DNA, 663 bp, Homo sapiens; identical to SEQ ID NO: 21694

SEQ ID NO: 27540 - DNA, 1211 bp, Homo sapiens; identical to SEQ ID NO: 20419
  misc_feature 1207, 1208, 1209, 1210, 1211: n = A,T,C or G

SEQ ID NO: 27541 - DNA, 1001 bp, Homo sapiens; identical to SEQ ID NO: 21314
  misc_feature 681, 682, 683, 684, 685, 686, 687, 688, 689, 690, 691, 692,693, 694, 695, 696, 697, 698, 699, 700, 701, 702, 703, 704,705, 706, 707, 708, 709, 710, 711, 712, 713, 714, 715, 716,717, 718: n = A,T,C or G

SEQ ID NO: 27542 - DNA, 2538 bp, Homo sapiens; identical to SEQ ID NO: 20316
  misc_feature 2538: n = A,T,C or G

SEQ ID NO: 27543 - DNA, 2389 bp, Homo sapiens; identical to SEQ ID NO: 21698
  misc_feature 2382, 2383, 2384, 2385, 2386, 2387, 2388, 2389: n = A,T,C or G

SEQ ID NO: 27544 - DNA, 781 bp, Homo sapiens; identical to SEQ ID NO: 21699
  misc_feature 625: n = A,T,C or G

SEQ ID NO: 27545 - DNA, 1716 bp, Homo sapiens; identical to SEQ ID NO: 21700
  misc_feature 1694, 1695, 1696, 1697, 1698, 1699, 1700, 1701, 1702, 1703,1704, 1705, 1706, 1707, 1708, 1709, 1710, 1711, 1712, 1713,1714, 1715, 1716: n = A,T,C or G

SEQ ID NO: 27546 - DNA, 728 bp, Homo sapiens; identical to SEQ ID NO: 21701
  misc_feature 1, 2, 727, 728: n = A,T,C or G

SEQ ID NO: 27547 - DNA, 395 bp, Homo sapiens; identical to SEQ ID NO: 20498

SEQ ID NO: 27548 - DNA, 2187 bp, Homo sapiens; identical to SEQ ID NO: 21516

SEQ ID NO: 27549 - DNA, 492 bp, Homo sapiens; identical to SEQ ID NO: 21704

SEQ ID NO: 27550 - DNA, 802 bp, Homo sapiens; identical to SEQ ID NO: 21464

SEQ ID NO: 27551 - DNA, 2841 bp, Homo sapiens; identical to SEQ ID NO: 21617

SEQ ID NO: 27552 - DNA, 414 bp, Homo sapiens; identical to SEQ ID NO: 21707

SEQ ID NO: 27553 - DNA, 2538 bp, Homo sapiens; identical to SEQ ID NO: 20316
  misc_feature 2538: n = A,T,C or G

SEQ ID NO: 27554 - DNA, 372 bp, Homo sapiens; identical to SEQ ID NO: 21709
  misc_feature 370, 371, 372: n = A,T,C or G

SEQ ID NO: 27555 - DNA, 1270 bp, Homo sapiens; identical to SEQ ID NO: 21710
  misc_feature 1, 2, 3, 4, 5, 6, 1263, 1264, 1265, 1266, 1267, 1268, 1269,1270: n = A,T,C or G

SEQ ID NO: 27556 - DNA, 1290 bp, Homo sapiens; identical to SEQ ID NO: 20742
  misc_feature 1, 2, 1281, 1282, 1283, 1284, 1285, 1286, 1287, 1288, 1289,1290: n = A,T,C or G

SEQ ID NO: 27557 - DNA, 385 bp, Homo sapiens; identical to SEQ ID NO: 21712
  misc_feature 384, 385: n = A,T,C or G

SEQ ID NO: 27558 - DNA, 981 bp, Homo sapiens; identical to SEQ ID NO: 21549
  misc_feature 1, 906, 981: n = A,T,C or G

SEQ ID NO: 27559 - DNA, 388 bp, Homo sapiens; identical to SEQ ID NO: 20723

SEQ ID NO: 27560 - DNA, 4740 bp, Homo sapiens; identical to SEQ ID NO: 21715
  misc_feature 4537, 4538, 4539, 4540, 4542, 4543, 4544, 4546, 4547, 4548,4549, 4550, 4552, 4554, 4556, 4557, 4558, 4559, 4560, 4561,4563, 4564, 4565, 4574, 4575, 4599, 4603, 4608, 4616, 4617,4623, 4624, 4638, 4643, 4644, 4650, 4659, 4662, 4673: n = A,T,C or G
  misc_feature 4678, 4687, 4693, 4694, 4695, 4696, 4698, 4699, 4701, 4702,4712, 4714, 4715, 4717, 4721, 4729, 4730, 4731, 4732, 4733,4734, 4735, 4736, 4737, 4738, 4739, 4740: n = A,T,C or G

SEQ ID NO: 27561 - DNA, 731 bp, Homo sapiens; identical to SEQ ID NO: 20529
  misc_feature 1, 2, 3, 4: n = A,T,C or G

SEQ ID NO: 27562 - DNA, 341 bp, Homo sapiens; identical to SEQ ID NO: 21717

SEQ ID NO: 27563 - DNA, 515 bp, Homo sapiens; identical to SEQ ID NO: 20177

SEQ ID NO: 27564 - DNA, 1074 bp, Homo sapiens; identical to SEQ ID NO: 21719
  misc_feature 1, 1018, 1037, 1040, 1073, 1074: n = A,T,C or G

SEQ ID NO: 27565 - DNA, 2538 bp, Homo sapiens; identical to SEQ ID NO: 20316
  misc_feature 2538: n = A,T,C or G

SEQ ID NO: 27566 - DNA, 826 bp, Homo sapiens; identical to SEQ ID NO: 21721

SEQ ID NO: 27567 - DNA, 1211 bp, Homo sapiens; identical to SEQ ID NO: 20419
  misc_feature 1207, 1208, 1209, 1210, 1211: n = A,T,C or G

SEQ ID NO: 27568 - DNA, 2187 bp, Homo sapiens; identical to SEQ ID NO: 21516

SEQ ID NO: 27569 - DNA, 516 bp, Homo sapiens; identical to SEQ ID NO: 21320

SEQ ID NO: 27570 - DNA, 386 bp, Homo sapiens; identical to SEQ ID NO: 21725
  misc_feature 383, 384, 385, 386: n = A,T,C or G

SEQ ID NO: 27571 - DNA, 1344 bp, Homo sapiens; identical to SEQ ID NO: 21726
  misc_feature 1: n = A,T,C or G

SEQ ID NO: 27572 - DNA, 2538 bp, Homo sapiens; identical to SEQ ID NO: 20316
  misc_feature 2538: n = A,T,C or G

SEQ ID NO: 27573 - DNA, 1365 bp, Homo sapiens; identical to SEQ ID NO: 20708
  misc_feature 1348: n = A,T,C or G

SEQ ID NO: 27574 - DNA, 2538 bp, Homo sapiens; identical to SEQ ID NO: 20316
  misc_feature 2538: n = A,T,C or G

SEQ ID NO: 27575 - DNA, 966 bp, Homo sapiens; identical to SEQ ID NO: 21730
  misc_feature 966: n = A,T,C or G

SEQ ID NO: 27576 - DNA, 2725 bp, Homo sapiens; identical to SEQ ID NO: 21731

SEQ ID NO: 27577 - DNA, 672 bp, Homo sapiens; identical to SEQ ID NO: 21732
  misc_feature 1, 2, 65, 66, 67, 68, 69, 70, 71, 72, 73, 74, 75, 76, 77,78, 79, 80, 81, 82, 83, 84, 85, 86, 87, 88, 89, 90, 91,92, 93, 94, 95, 96, 97, 98, 99, 100, 101, 670, 671, 672: n = A,T,C or G

SEQ ID NO: 27578 - DNA, 2538 bp, Homo sapiens; identical to SEQ ID NO: 20316
  misc_feature 2538: n = A,T,C or G

SEQ ID NO: 27579 - DNA, 2538 bp, Homo sapiens; identical to SEQ ID NO: 20316
  misc_feature 2538: n = A,T,C or G

SEQ ID NO: 27580 - DNA, 879 bp, Homo sapiens; identical to SEQ ID NO: 21368
  misc_feature 1, 2, 3, 4, 5, 6, 750, 846, 852, 872, 879: n = A,T,C or G

SEQ ID NO: 27581 - DNA, 420 bp, Homo sapiens; identical to SEQ ID NO: 21481

SEQ ID NO: 27582 - DNA, 4742 bp, Homo sapiens; identical to SEQ ID NO: 21339
  misc_feature 1, 2, 3, 4, 5, 4742: n = A,T,C or G

SEQ ID NO: 27583 - DNA, 516 bp, Homo sapiens; identical to SEQ ID NO: 21320

SEQ ID NO: 27584 - DNA, 3483 bp, Homo sapiens; identical to SEQ ID NO: 21739

SEQ ID NO: 27585 - DNA, 2187 bp, Homo sapiens; identical to SEQ ID NO: 21516

SEQ ID NO: 27586 - DNA, 3793 bp, Homo sapiens; identical to SEQ ID NO: 21616
  misc_feature 1, 2, 3, 968, 3789, 3790, 3791, 3792, 3793: n = A,T,C or G

SEQ ID NO: 27587 - DNA, 611 bp, Homo sapiens; identical to SEQ ID NO: 21742
  misc_feature 610, 611: n = A,T,C or G

SEQ ID NO: 27588 - DNA, 440 bp, Homo sapiens; identical to SEQ ID NO: 21743

SEQ ID NO: 27589 - DNA, 2315 bp, Homo sapiens; identical to SEQ ID NO: 20885
  misc_feature 1, 2, 2313, 2314, 2315: n = A,T,C or G

SEQ ID NO: 27590 - DNA, 2538 bp, Homo sapiens; identical to SEQ ID NO: 20316
  misc_feature 2538: n = A,T,C or G

SEQ ID NO: 27591 - DNA, 2538 bp, Homo sapiens; identical to SEQ ID NO: 20316
  misc_feature 2538: n = A,T,C or G

SEQ ID NO: 27592 - DNA, 2538 bp, Homo sapiens; identical to SEQ ID NO: 20316
  misc_feature 2538: n = A,T,C or G

SEQ ID NO: 27593 - DNA, 3855 bp, Homo sapiens; identical to SEQ ID NO: 20695
  misc_feature 1, 2, 3854, 3855: n = A,T,C or G

SEQ ID NO: 27594 - DNA, 809 bp, Homo sapiens; identical to SEQ ID NO: 20847
  misc_feature 809: n = A,T,C or G

SEQ ID NO: 27595 - DNA, 3432 bp, Homo sapiens; identical to SEQ ID NO: 21750
  misc_feature 1, 4, 3412, 3413, 3414, 3415, 3416, 3417, 3418, 3419, 3420,3421, 3422, 3423, 3424, 3425, 3426, 3427, 3428, 3429, 3430,3431, 3432: n = A,T,C or G

SEQ ID NO: 27596 - DNA, 731 bp, Homo sapiens; identical to SEQ ID NO: 20529
  misc_feature 1, 2, 3, 4: n = A,T,C or G

SEQ ID NO: 27597 - DNA, 1380 bp, Homo sapiens; identical to SEQ ID NO: 20118
  misc_feature 1380: n = A,T,C or G

SEQ ID NO: 27598 - DNA, 2538 bp, Homo sapiens; identical to SEQ ID NO: 20316
  misc_feature 2538: n = A,T,C or G

SEQ ID NO: 27599 - DNA, 596 bp, Homo sapiens; identical to SEQ ID NO: 21754

SEQ ID NO: 27600 - DNA, 750 bp, Homo sapiens; identical to SEQ ID NO: 21755
  misc_feature 1, 2, 3, 4, 5, 6, 749, 750: n = A,T,C or G

SEQ ID NO: 27601 - DNA, 390 bp, Homo sapiens; identical to SEQ ID NO: 21534

SEQ ID NO: 27602 - DNA, 374 bp, Homo sapiens; identical to SEQ ID NO: 21658

SEQ ID NO: 27603 - DNA, 3483 bp, Homo sapiens; identical to SEQ ID NO: 21739

SEQ ID NO: 27604 - DNA, 816 bp, Homo sapiens; identical to SEQ ID NO: 21390

SEQ ID NO: 27605 - DNA, 1268 bp, Homo sapiens; identical to SEQ ID NO: 21760
  misc_feature 1, 2, 3, 4, 5, 6, 7, 8, 1266, 1267, 1268: n = A,T,C or G

SEQ ID NO: 27606 - DNA, 953 bp, Homo sapiens; identical to SEQ ID NO: 21761
  misc_feature 1, 949, 950, 951, 952, 953: n = A,T,C or G

SEQ ID NO: 27607 - DNA, 387 bp, Homo sapiens; identical to SEQ ID NO: 21762

SEQ ID NO: 27608 - DNA, 731 bp, Homo sapiens; identical to SEQ ID NO: 20529
  misc_feature 1, 2, 3, 4: n = A,T,C or G

SEQ ID NO: 27609 - DNA, 731 bp, Homo sapiens; identical to SEQ ID NO: 20529
  misc_feature 1, 2, 3, 4: n = A,T,C or G

SEQ ID NO: 27610 - DNA, 1203 bp, Homo sapiens; identical to SEQ ID NO: 21765
  misc_feature 1, 7, 9, 11, 1199, 1200, 1201, 1202, 1203: n = A,T,C or G

SEQ ID NO: 27611 - DNA, 929 bp, Homo sapiens; identical to SEQ ID NO: 20094
  misc_feature 1, 2, 3, 4, 5, 6, 7, 8, 9, 10, 11, 12, 13, 14, 15, 16, 17,18, 19, 20, 926, 927, 928, 929: n = A,T,C or G

SEQ ID NO: 27612 - DNA, 1082 bp, Homo sapiens
gcgtccggttcgtaaaacgctggacatgatcaagaagattgctgatgataaatacaatgatactttttggaaagaatttggtaccaacatcaagcttggtgtgattgaagaccactcgaatcgaacacgtcttgctaaacttcttaggttccagtcttctcatcatccaactgacattactagcctagaccagtatgtggaaagaatgaaggaaaaacaagacaaaatctacttcatggctgggtccagcagaaaagaggctgaatcttctccatttgttgagcgacttctgaaaaagggctatgaagttatttacctcacagaacctgtggatgaatactgtattcaggcccttcccgaatttgatgggaagaggttccagaatgttgccaaggaaggagtgaagttcgatgaaagtgagaaaactaaggagagtcgtgaagcagttgagaaagaatttgagcctctgctgaattggatgaaagataaagcccttaaggacaagattgaaaaggctgtggtgtctcagcgcctgacagaatctccgtgtgctttggtggccagccagtacggatggtctggcaacatggagagaatcatgaaagcacaagcgtaccaaacgggcaaggacatctctacaaattactatgcgagtcagaagaaaaccatttgaaattaatcccagacacccgctgatcagagacatgcttcgacgaattaaggaagatgaagatgataaaccacgtttggatcttgctgtgggttggtttgaaacagcaacgcttcggtcagggtatccttttaccagacactaagcatatggagatagaatagacaggatgccttcggctcagttggaacattgacccgatgcaagtgggagagagcctgaaaagaactgagagaagcgagaacacggagaccgagcagaccattgagaagggttgtggcgctttaaaaaaacggcagatctcctggaaaatgattgttttcccctggccgtggggggggccccctcttggaagtggggccccctccggaaggtggcccaaggtgttcccgggtctcgtggttaaacaccc

SEQ ID NO: 27613 - DNA, 2187 bp, Homo sapiens; identical to SEQ ID NO: 21516

SEQ ID NO: 27614 - DNA, 728 bp, Homo sapiens; identical to SEQ ID NO: 21701
  misc_feature 1, 2, 727, 728: n = A,T,C or G

SEQ ID NO: 27615 - DNA, 463 bp, Homo sapiens; identical to SEQ ID NO: 21769
  misc_feature 455, 456, 457, 458, 459, 460, 461, 462, 463: n = A,T,C or G

SEQ ID NO: 27616 - DNA, 1380 bp, Homo sapiens; identical to SEQ ID NO: 20118
  misc_feature 1380: n = A,T,C or G

SEQ ID NO: 27617 - DNA, 4085 bp, Homo sapiens; identical to SEQ ID NO: 21771
  misc_feature 1, 2, 3, 4, 5, 6, 7, 8, 9, 10, 11, 12, 13, 4085: n = A,T,C or G

SEQ ID NO: 27618 - DNA, 506 bp, Homo sapiens; identical to SEQ ID NO: 21661
  misc_feature 1, 2: n = A,T,C or G

SEQ ID NO: 27619 - DNA, 2538 bp, Homo sapiens; identical to SEQ ID NO: 20316
  misc_feature 2538: n = A,T,C or G

SEQ ID NO: 27620 - DNA, 461 bp, Homo sapiens; identical to SEQ ID NO: 21774
  misc_feature 461: n = A,T,C or G

SEQ ID NO: 27621 - DNA, 375 bp, Homo sapiens; identical to SEQ ID NO: 20539

SEQ ID NO: 27622 - DNA, 366 bp, Homo sapiens; identical to SEQ ID NO: 21776

SEQ ID NO: 27623 - DNA, 378 bp, Homo sapiens; identical to SEQ ID NO: 21777
  misc_feature 1, 373, 374, 375, 376, 377, 378: n = A,T,C or G

SEQ ID NO: 27624 - DNA, 742 bp, Homo sapiens; identical to SEQ ID NO: 21778
  misc_feature 1, 2, 741, 742: n = A,T,C or G

SEQ ID NO: 27625 - DNA, 862 bp, Homo sapiens; identical to SEQ ID NO: 21330

SEQ ID NO: 27626 - DNA, 2538 bp, Homo sapiens; identical to SEQ ID NO: 20316
  misc_feature 2538: n = A,T,C or G

SEQ ID NO: 27627 - DNA, 283 bp, Homo sapiens; identical to SEQ ID NO: 21781

SEQ ID NO: 27628 - DNA, 2187 bp, Homo sapiens; identical to SEQ ID NO: 21516

SEQ ID NO: 27629 - DNA, 735 bp, Homo sapiens; identical to SEQ ID NO: 20803
  misc_feature 733, 734, 735: n = A,T,C or G

SEQ ID NO: 27630 - DNA, 365 bp, Homo sapiens; identical to SEQ ID NO: 21784

SEQ ID NO: 27631 - DNA, 2187 bp, Homo sapiens; identical to SEQ ID NO: 21516

SEQ ID NO: 27632 - DNA, 354 bp, Homo sapiens; identical to SEQ ID NO: 21786

SEQ ID NO: 27633 - DNA, 2133 bp, Homo sapiens; identical to SEQ ID NO: 21530
  misc_feature 1, 2, 3, 4, 5, 6, 7, 8, 2133: n = A,T,C or G

SEQ ID NO: 27634 - DNA, 757 bp, Homo sapiens; identical to SEQ ID NO: 20428
  misc_feature 1, 2, 3, 4, 5: n = A,T,C or G

SEQ ID NO: 27635 - DNA, 731 bp, Homo sapiens; identical to SEQ ID NO: 20529
  misc_feature 1, 2, 3, 4: n = A,T,C or G

SEQ ID NO: 27636 - DNA, 2187 bp, Homo sapiens; identical to SEQ ID NO: 21516

SEQ ID NO: 27637 - DNA, 498 bp, Homo sapiens; identical to SEQ ID NO: 21110

SEQ ID NO: 27638 - DNA, 2133 bp, Homo sapiens; identical to SEQ ID NO: 21530
  misc_feature 1, 2, 3, 4, 5, 6, 7, 8, 2133: n = A,T,C or G

SEQ ID NO: 27639 - DNA, 351 bp, Homo sapiens; identical to SEQ ID NO: 21793
  misc_feature 1: n = A,T,C or G

SEQ ID NO: 27640 - DNA, 2187 bp, Homo sapiens; identical to SEQ ID NO: 21516

SEQ ID NO: 27641 - DNA, 2360 bp, Homo sapiens; identical to SEQ ID NO: 21878

SEQ ID NO: 27642 - DNA, 728 bp, Homo sapiens; identical to SEQ ID NO: 21701
  misc_feature 1, 2, 727, 728: n = A,T,C or G

SEQ ID NO: 27643 - DNA, 2187 bp, Homo sapiens; identical to SEQ ID NO: 21516

SEQ ID NO: 27644 - DNA, 635 bp, Homo sapiens; identical to SEQ ID NO: 20256

SEQ ID NO: 27645 - DNA, 656 bp, Homo sapiens; identical to SEQ ID NO: 20451

SEQ ID NO: 27646 - DNA, 1109 bp, Homo sapiens; identical to SEQ ID NO: 21799

SEQ ID NO: 27647 - DNA, 905 bp, Homo sapiens; identical to SEQ ID NO: 21290
  misc_feature 1, 2, 3, 4, 5, 6, 7, 8, 9, 10, 11, 12, 13, 14, 15, 16, 17,18, 19, 20, 21, 855, 905: n = A,T,C or G

SEQ ID NO: 27648 - DNA, 2315 bp, Homo sapiens; identical to SEQ ID NO: 20885
  misc_feature 1, 2, 2313, 2314, 2315: n = A,T,C or G

SEQ ID NO: 27649 - DNA, 946 bp, Homo sapiens; identical to SEQ ID NO: 21802
  misc_feature 940, 941, 942, 943, 944, 945, 946: n = A,T,C or G

SEQ ID NO: 27650 - DNA, 420 bp, Homo sapiens; identical to SEQ ID NO: 21481

SEQ ID NO: 27651 - DNA, 2538 bp, Homo sapiens; identical to SEQ ID NO: 20316
  misc_feature 2538: n = A,T,C or G

SEQ ID NO: 27652 - DNA, 508 bp, Homo sapiens; identical to SEQ ID NO: 21293
  misc_feature 502, 503, 504, 505, 506, 507, 508: n = A,T,C or G

SEQ ID NO: 27653 - DNA, 2187 bp, Homo sapiens; identical to SEQ ID NO: 21516

SEQ ID NO: 27654 - DNA, 2538 bp, Homo sapiens; identical to SEQ ID NO: 20316
  misc_feature 2538: n = A,T,C or G

SEQ ID NO: 27655 - DNA, 2061 bp, Homo sapiens; identical to SEQ ID NO: 21808

SEQ ID NO: 27656 - DNA, 414 bp, Homo sapiens; identical to SEQ ID NO: 21407

SEQ ID NO: 27657 - DNA, 492 bp, Homo sapiens; identical to SEQ ID NO: 21704

SEQ ID NO: 27658 - DNA, 508 bp, Homo sapiens; identical to SEQ ID NO: 21293
  misc_feature 502, 503, 504, 505, 506, 507, 508: n = A,T,C or G

SEQ ID NO: 27659 - DNA, 656 bp, Homo sapiens; identical to SEQ ID NO: 20445
  misc_feature 1, 2, 3, 4, 5, 6, 7, 8, 9, 10, 11, 12, 13, 14, 15, 16, 17: n = A,T,C or G

SEQ ID NO: 27660 - DNA, 523 bp, Homo sapiens; identical to SEQ ID NO: 21813
  misc_feature 522, 523: n = A,T,C or G

SEQ ID NO: 27661 - DNA, 879 bp, Homo sapiens; identical to SEQ ID NO: 21368
  misc_feature 1, 2, 3, 4, 5, 6, 750, 846, 852, 872, 879: n = A,T,C or G

SEQ ID NO: 27662 - DNA, 570 bp, Homo sapiens; identical to SEQ ID NO: 21500

SEQ ID NO: 27663 - DNA, 516 bp, Homo sapiens; identical to SEQ ID NO: 21320

SEQ ID NO: 27664 - DNA, 420 bp, Homo sapiens; identical to SEQ ID NO: 21506

SEQ ID NO: 27665 - DNA, 2538 bp, Homo sapiens; identical to SEQ ID NO: 20316
  misc_feature 2538: n = A,T,C or G

SEQ ID NO: 27666 - DNA, 2315 bp, Homo sapiens; identical to SEQ ID NO: 20885
  misc_feature 1, 2, 2313, 2314, 2315: n = A,T,C or G

SEQ ID NO: 27667 - DNA, 506 bp, Homo sapiens; identical to SEQ ID NO: 21820
  misc_feature 495, 496, 497, 498, 499, 500, 501, 502, 503, 504, 505, 506: n = A,T,C or G

SEQ ID NO: 27668 - DNA, 2187 bp, Homo sapiens; identical to SEQ ID NO: 21516

SEQ ID NO: 27669 - DNA, 1380 bp, Homo sapiens; identical to SEQ ID NO: 20118
  misc_feature 1380: n = A,T,C or G

SEQ ID NO: 27670 - DNA, 689 bp, Homo sapiens; identical to SEQ ID NO: 21367
  misc_feature 1, 2: n = A,T,C or G

SEQ ID NO: 27671 - DNA, 2071 bp, Homo sapiens; identical to SEQ ID NO: 21824

SEQ ID NO: 27672 - DNA, 460 bp, Homo sapiens; identical to SEQ ID NO: 20633
  misc_feature 1, 460: n = A,T,C or G

SEQ ID NO: 27673 - DNA, 831 bp, Homo sapiens; identical to SEQ ID NO: 21826
  misc_feature 1, 2: n = A,T,C or G

SEQ ID NO: 27674 - DNA, 2538 bp, Homo sapiens; identical to SEQ ID NO: 20316
  misc_feature 2538: n = A,T,C or G

SEQ ID NO: 27675 - DNA, 463 bp, Homo sapiens; identical to SEQ ID NO: 21769
  misc_feature 455, 456, 457, 458, 459, 460, 461, 462, 463: n = A,T,C or G

SEQ ID NO: 27676 - DNA, 2538 bp, Homo sapiens; identical to SEQ ID NO: 20316
  misc_feature 2538: n = A,T,C or G

SEQ ID NO: 27677 - DNA, 718 bp, Homo sapiens; identical to SEQ ID NO: 21830
  misc_feature 1, 2, 3, 718: n = A,T,C or G

SEQ ID NO: 27678 - DNA, 741 bp, Homo sapiens; identical to SEQ ID NO: 21831

SEQ ID NO: 27679 - DNA, 2224 bp, Homo sapiens; identical to SEQ ID NO: 21832
  misc_feature 1, 2, 3, 4, 5, 6, 2220, 2221, 2222, 2223, 2224: n = A,T,C or G

SEQ ID NO: 27680 - DNA, 2538 bp, Homo sapiens; identical to SEQ ID NO: 20316
  misc_feature 2538: n = A,T,C or G

SEQ ID NO: 27681 - DNA, 731 bp, Homo sapiens; identical to SEQ ID NO: 20529
  misc_feature 1, 2, 3, 4: n = A,T,C or G

SEQ ID NO: 27682 - DNA, 578 bp, Homo sapiens; identical to SEQ ID NO: 21835
  misc_feature 1, 2: n = A,T,C or G

SEQ ID NO: 27683 - DNA, 1001 bp, Homo sapiens; identical to SEQ ID NO: 21314
  misc_feature 681, 682, 683, 684, 685, 686, 687, 688, 689, 690, 691, 692,693, 694, 695, 696, 697, 698, 699, 700, 701, 702, 703, 704,705, 706, 707, 708, 709, 710, 711, 712, 713, 714, 715, 716,717, 718: n = A,T,C or G

SEQ ID NO: 27684 - DNA, 1270 bp, Homo sapiens; identical to SEQ ID NO: 21710
  misc_feature 1, 2, 3, 4, 5, 6, 1263, 1264, 1265, 1266, 1267, 1268, 1269,1270: n = A,T,C or G

SEQ ID NO: 27685 - DNA, 3053 bp, Homo sapiens; identical to SEQ ID NO: 21838
  misc_feature 3050, 3051, 3052, 3053: n = A,T,C or G

SEQ ID NO: 27686 - DNA, 801 bp, Homo sapiens; identical to SEQ ID NO: 21839
  misc_feature 528, 532, 587, 624, 635, 651, 657, 666, 669, 678, 689, 696,699, 714, 720, 732, 733, 743, 744, 774, 796, 797, 798, 799,800, 801: n = A,T,C or G

SEQ ID NO: 27687 - DNA, 383 bp, Homo sapiens; identical to SEQ ID NO: 20349
  misc_feature 383: n = A,T,C or G

SEQ ID NO: 27688 - DNA, 1357 bp, Homo sapiens; identical to SEQ ID NO: 25631
  misc_feature 1, 2, 3, 4, 5: n = A,T,C or G

SEQ ID NO: 27689 - DNA, 3881 bp, Homo sapiens; identical to SEQ ID NO: 21841
  misc_feature 1, 41, 3878, 3879, 3880, 3881: n = A,T,C or G

SEQ ID NO: 27690 - DNA, 390 bp, Homo sapiens
  misc_feature 389, 390: n = A,T,C or G
acaattgaagtatgtgcagtttattgcatgtaaataaaccttttaaaaattaaccgatacaagttgacttacatgaccagaaagctcttgaaaaactctcctgttttctcccctatttttattcttgcatgcccttatagactgtgttaacacattttctcatcttacggttcttttgtgtctacatttctccaggtcaatataactatcaccatgatttcttggtttctctttagttcatcagtaattatgagtaatgtgttgaaatgttaatgatatgttcatgcattcagaatcctctgctctccgatctacataatagtgaattatgctgtcaacgattacacaggatattgctttttttttcttttttgagacagagtcgcgcnn

SEQ ID NO: 27691 - DNA, 643 bp, Homo sapiens; identical to SEQ ID NO: 20678
  misc_feature 1, 2, 640, 641, 642, 643: n = A,T,C or G

SEQ ID NO: 27692 - DNA, 2012 bp, Homo sapiens; identical to SEQ ID NO: 20122

SEQ ID NO: 27693 - DNA, 2491 bp, Homo sapiens; identical to SEQ ID NO: 20436

SEQ ID NO: 27694 - DNA, 1839 bp, Homo sapiens; identical to SEQ ID NO: 21845
  misc_feature 1, 2, 3, 4, 1834, 1835, 1836, 1837, 1838, 1839: n = A,T,C or G

SEQ ID NO: 27695 - DNA, 862 bp, Homo sapiens; identical to SEQ ID NO: 21330

SEQ ID NO: 27696 - DNA, 668 bp, Homo sapiens; identical to SEQ ID NO: 20192

SEQ ID NO: 27697 - DNA, 2028 bp, Homo sapiens
  misc_feature 1804, 1805, 1806, 1807, 1808, 1809, 1810, 1811, 1812, 1813,1814, 1815, 1816, 1817, 1818, 1819, 1820, 1821, 1822, 1823,1824, 1825, 1826, 1827, 1828, 1829, 1830, 1831, 1832, 1833,1834, 1835, 1836, 1837, 1838, 1839, 1840, 1841, 1842: n = A,T,C or G
  misc_feature 1843, 1844, 1845, 1846, 1847, 1848, 1849, 1850, 1851, 1852,1853, 1854, 1855, 1856, 1857, 1858, 1859, 1860, 1861, 1862,2022, 2023, 2024, 2025, 2026, 2027, 2028: n = A,T,C or G
taaggagtcgacccacgcgtccgggagccccagcgtgcagagtcgacccacgcgtccgccacgcatccgtcttgggtttgctgagaactcacgggctccagctacctggccatgaccaccacatttctgcaaacttcttcctccacctttgggggtggctcaacccgagggggttccctcctggctgggggaggtggctttggtggggggagtctctctgggggaggtggaagccgaagtatctcagcttcttctgctaggtttgtctcttcagggtcaggaggaggatatgggggtggcatgagggtctgtggctttggtggaggggctggtagtgttttcggtggaggctttggagggggcgttggtgggggttttggtggtggctttggtggtggcgatggtggtctcctctctggcaatgagaaaattaccatgcagaacctcaatgaccgcctggcctcctacctggacaaggtacgtgccctggaggaggccaatgctgacctggaggtgaagatccatgactggtaccagaagcagaccccagccagcccagaatgcgactacagccaatacttcaagaccattgaagagctccgggacaagatcatggccaccaccatcgacaactcccgggtcatcctggagatcgacaatgccaggctggctgcggacgacttcaggctcaagtatgagaatgagctggccctgcgccagggcgttgaggctgacatcaacggcttgcgccgagtcctggatgagctgaccctggccaggactgacctggagatgcagatcgagggcctgaatgaggagctagcctacctgaagaagaaccacgaagaggagatgaaggagttcagcagccagctggccggccaggtcaatgtggagatggacgcagcaccgggtgtggacctgacccgtgtgctggcagagatgagggagcagtacgaggccatggcggagaagaaccgccgggatgtcgaggcctggttcttcagcaagactgaggagctgaacaaagaggtggcctccaacacagaaatgatccagaccagcaagacggagatcacagacctgagacgcacgatgcaggagctggagatcgagctgcagtcccagctcagcatgaaagctgggctggagaactcactggccgagacagagtgccgctatgccacgcagctgcagcagatccaggggctcattggtggcctggaggcccagctgagtgagctccgatgcgagatggaggctcagaaccaggagtacaagatgctgcttgacataaagacacggctggagcaggagatcgctacttaccgcagcctgctcgagggccaggatgccaagatggctggcattggcatcagggaagcctcttcaggaggtggtggtagcagcagcaatttccacatcaatgtagaagagtcagtggatggacaggtggtttcttcccacaagagagaaatctaagtgtctattgcaggagaaacgtcccttgccactccccactctcatcaggccaagtggaggactggccagagggcctgcacatgcaaactccagtccctgccttcagagagctgaaaagggtccctcggtcttttatttcagggctttgcatgcgctctattccccctctgcctctccccaccttctttggagcaaggagatgcagctgtattgtgtaacaagctcatttgtacagtgtctgttcatgtaataaagaattacttttccttttgcaaataaaaaaaaaaaaaaaactcgagggggggcgccggtacccaattcnnnnnnnnnnnnnnnnnnnnnnnnnnnnnnnnnnnnnnnnnnnnnnnnnnnnnnnnnnnctcctcaaaacaaaagaaaacggccaccccccagaggggccccggggggggggccattataagggggaacaaaaaaaaaggggggccccaaaaaaaatcaaaaaaaaaaacaaattgttttaaaaaaagaaaatattttttggggggggggaaaaaaaannnnnnn

SEQ ID NO: 27698 - DNA, 1001 bp, Homo sapiens; identical to SEQ ID NO: 21314
  misc_feature 681, 682, 683, 684, 685, 686, 687, 688, 689, 690, 691, 692,693, 694, 695, 696, 697, 698, 699, 700, 701, 702, 703, 704,705, 706, 707, 708, 709, 710, 711, 712, 713, 714, 715, 716,717, 718: n = A,T,C or G

SEQ ID NO: 27699 - DNA, 4333 bp, Homo sapiens; identical to SEQ ID NO: 21849
  misc_feature 4152, 4164, 4225, 4244, 4257, 4266, 4278, 4324, 4333: n = A,T,C or G

SEQ ID NO: 27700 - DNA, 7328 bp, Homo sapiens
cgacccacgcgtccgagtcactcatcattatcttgtacaagagtccactgataaagaaggaaaggatgagttattagaggatgttgttccacaatctatgcaagatttgctgggtatgaataatgactttcctccaagagcacattgcctggtaagatggtatgggctacgtgagttcgtggtgattgcccctgctgcacacagtgacgctgttctcagcgaatctaagtgcaaccttcttctgagttctgtttctattgccttgggaaacactggctgtcaggtgccactctttgtgcaaattcaccacaaatggcgaagaatgtatgtaggagaatgtcaaggtcctggtgtacgaactgatttcgaaatggttcatcttagaaaagtgccaaatcagtacactcacttatcaggtctgctggatatcttcaaatcaaagattggatgtcctttaactccattgcctccagttagtattgctattcgatttacctatgtacttcaagattggcagcagtatttttggcctcagcaacctccagacatagatgcccttgtaggaggagaagttggaggcttggagtttggcaagttaccatttggtgcctgcgaagatcctattagtgaactccatttagctactacatggcctcatctgaccgaagggatcattgtggataatgatgtttattctgatttggatcctattcaagctccacattggtctgttagagttcgaaaagctgagaatcctcagtgtttgctaggtgattttgtcactgaattttttaaaatttgccgtcgaaaggagtcaactgatgagattcttggacgatctgcatttgaggaagaaggcaaagaaactgctgatataactcatgctttgtcaaaattgacagagccggcatcagttccaattcataaattatcagtttcaaatatggtacacactgcaaagaagaaaatccgaaaacacagaggtgtagaggagtcaccgctaaataatgatgttcttaatactattctcctgttcttattccctgatgctgtttctgagaaaccattagatggaactacttcaacagataataataatcctccatcagagagtgaagactataatctctacaatcagttcaagtctgcaccatctgacagtttaacatacaaactggctttgtgtctctgtatgatcaatttttaccatggagggttgaaaggagtggcacacctctggcaggaatttgttcttgaaatgcgtttccgatgggaaaacaactttctgattccaggattagcaagtggacccccagatctgaggtgttgtttactgcatcagaaactacagatgttaaattgttgtattgaaagaaagaaggcacgtgatgaggggaaaaagacaagtgcttcagatgtcactaatatatatccaggggatgctggaaaagcaggagaccagttggtgccagataatctaaaagaaacagataaggaaaagggagaggtaggaaaatcttgggattcctggagtgacagcgaagaagaattttttgaatgcctaagtgatactgaagaacttaaaggaaatggacaagagagtggcaagaaaggaggacctaaggagatggcaaatttaaggccggaaggacggctctatcagcatgggaaacttacactgctgcataatggagaacctctctacattccagtaacccaggaaccagcacctatgacagaagatctgctagaagagcagtctgaagttttagctaaattaggtacatcggcagagggggctcaccttcgagcacgcatgcagagtgcctgtctgctctcagatatggagtcttttaaggcagctaatccaggttgctccctggaagattttgtgaggtggtattcaccccgggattatattgaagaggaggtgattgatgaaaagggcaatgtggtgctgaaaggagaactgagtgcccggatgaagattccaagcaatatgtgggtagaagcctgggaaacagctaagccaattcctgctagaaggcaaaggagactctttgatgatacacgggaagcagaaaaggtgctgcactatctggcaatccagaaacctgcagaccttgctcggcacctgttaccttgtgtgattcatgcagctgtactcaaggtaaaggaagaagaaagtctcgaaaacatttcttcagttaagaagatcataaagcagataatatcccattccagtaaagttttgcacttccccaatccagaagacaagaaattggaagaaatcattcaccagattactaatgtggaagctctcattgccagagctcggtcactaaaagccaagtttggaactgagaaatgtgaacaggaggaggaaaaggaagatcttgaaaggtttgtgagttgcctgctggagcagcctgaagtgttagtcaccggtgcaggaagaggacatgctggcaggatcattcacaagctgtttgtgaatgcccagagggctgcagctatgactccaccagaggaggaattgaagagaatgggctccccagaggaaagaaggcagaactccgtgtcagacttcccaccccctgctggccgggaattcattttgcgcaccactgtgccgcgccctgctccctactccaaagctctgcctcagcggatgtacagtgttctcaccaaagaggactttagacttgcaggtgccttttcatcagatacttccttcttctgattcttctagcattactcgttggtggcttcagagacagtgctgcctcctcctgagggagggaaggtaccagggagaacctgggaggtcctggagagggccctgtccagttgggtgatcaggaatcaaaccagcatcggaaagacttcccagcaccaagcttgagctgtgtcgtttcgtggagggggcagcgaggatgggcttgagctgttgagagatttctgccctagagatggcctttgtatatgggggggtggtggggggacacaaacacatcagacactccgtcctcacactggcaggacggtgttcatcgcattctcttctgtgaccagcctctaggctagcggctgcattcgtggtctgtgcaaacacttcgtggttctatatatcagcagcaagtgtgcaaaataaaggacctgttaactcagatttctggatattttggtggtagcttctagtcccagaatctgtgtttttaaaatactacatgacattctgtctattcaatcacctggtggtcatctttcttgtactattttttctagaaccatagagggatgacagtaactggcttcttagagcaattttgcctggtgtctggatcctgtgggaatttattagcctgctttgtggcccttggccaaccctggtaggacatctagagaagaattcaattctgctttttcccagaataattgttgactaactcggcaacaccaaagtgtcacaggcatctttgtgtcccccagagtccaatgatatgtggacccaagaccagcgagggtcatgtttctgggaatacagtgttggttcttagaatttatatattttttctcatgaacttataaaaatgtttaaaaacaaactcaacaaccctgattttaaagagaatgagcacacgccccacgacttccctctagaagcattttaagcattttgcttttcaaaaaacaatcatttctttttgatgaccatgacttcaaatgccctgcctgctgggccagttgtgactcatcaaatagcaactgatttcaataattcacccttagaatgggggtgcttgcaggagccctagtttataactggatgaaatgatacgcagccaagggcctttatttgagaaattaaatctaaacgcagacactaacagccatgtgtcttctgctcttaggagggtttactgtgaaagagccacacagagtgttcgacatgcctcttagcagccgaatgaccttcaaagttctttaaccttgtaactgcaaataggaaaatggtctcacatacgttagtctaccccctttcaatgtagatcaggtgttttttttttttttttggacatctcagatgtgactcttgctgccaggctagaatttaggctatgtgataattctcagctgtcctacaatgcctgcttcttgaaagaagtcggcactttctagaatagctaaataacctgggcttattttaaagaactatttgtagctcagattggttttcctatggctaaaataagtgcttcttgtgaaaattaaataaaacagttaattcaaagccttgatatatgttaccactaacaatcatactaaatatattttgaagtacaaagtttgacatgctctagaatgacaacccaaatgtgtcttacaaaacacgttcctaacaaggtatgctttacactaccaatgcagaaactgtgtttgttttcctctctaaaaaacaggatgtgtcaaaatgataaatattctaagattaaagtggcaatgctcagattcccaatcttaccagttctgggattcactctgccctcctagaagactgaggggaatatgctgtacttacatgtccatggaaccttccttcctcctagaatcccaagcgttatgcagattcattatagcacaacattcccgtcaggaagagaggtttgacacatgattaaggggaaacttgtggaaagagaaatgtttaaggtcctgcagaaagtcagtgactgtaatgacctttttcatttatattccagtgcctgtatttaaaccatgcagtggatttgggataatatacataaggcacctaacataacataggaactcgtaaatgattgtcgctcttgagctggcaatgaaaaccgacttcgtggatgctctgcctagaaattatgctaaggacaaaggaagaggcaaagtcctaaaaactaaacaaaaactgcctccctacacctcataaccagcggaccaaccaatcaagctaataccaacacagctaaggcaacaacactcagattgaaaatgtaccccatgggagggaggctgacgtctggaggtctaactctcccttctgtcacactgacatcacttccttggccccaacctgaaaggtggcacatatagcccctggtgggcagacagggaaagcaaattcctcttactccagggagctggttagtccttcttcctcccacttcccatctccctcagagtgaggtcagactttgttgtggatattgttttggagaacttccaccctcttctataaagtgggactgtatggtccaagatgagacctatgctgccagtgcccagctgaagttgtagatgcttttactgcatgcctgacatgcctcttacaaggttttggagaactccaaatagtcctaggatgaccagaaggcatagtcatgttatttgcatctttagttatcaactccaaatagtggctctgctaagattgccacctgtccaacaggaaatggaaagaaaacacttctcattcctgcataccacaccactagacaactggaaatacttctgggtcattaccatcctaggatacttttaagccgatgatctcaaaccgactacctgtgtgttccatgtctttcctctaattcatgccgctctttaaatgctatgttaagaatgcaaagctataaaaatgatcttttttcctgctgcaccataagaagccttttttggttgttctattagaaaagaattcaaaatgcaagcattcaacagatttcctttgcagggaacaagtaatacaaacaactgtgttatataatgaatagattgcttttttcctttatcctgtattaatcttaattggtttcccaaaaaggcaaataagagaccaagctacatcctgtggttgtaacctctaggtaaatttccaccaaaagcaatgaaagattttccagagaaaaagcagaagaatcagccccattgttctgcagctgacttaattctcctctttatgttttagaaatacctaaggattacagttttacaatgtatggagaaatagatatgctaacaacaatgaaattgttgtgggagccatatagagaaatatcagagaaattatttggatcagaatagctcatacaaggaagatttttttaaaatatggacattgaacagataaaggagacagtaatattttaataggatagtgaaaaatatagcagattgacagtgacagcagaaaaagagcaggaatacagatattttcagaagattaaaatggtactgtgtaccctcaaaccaggcaagtttttctgagaggtctctaaacatatctcctgcatagagtagatgatttttcttggagctgtcataaatgctttatagttctctacattaattcatgtcgaatattttccatggttggtcagactcagacttaaaatagatctgagaaaggtcttcaggtttactttcagtaccattattcacttcatagccagctgggtgacaacatggtgtgtggccaattaaagtttacaaggtaaccttgcctgaattatcctggtccatcgaatacaaatagtaaagtgaaggtgagagaatagaattgcaaggaacgtgggagaagcagttgtcaaaaagcaaagcaaacacaagaaaaaaaatctgtgagatcactcagaaatgatgctaataattgtgtgctctcaccctacagtctccacacacatggggttcctcgtgcttcacaatcagcccctgtagtcagtcagtaaaccttcaggtcccaatcatgtggtttctccaggtgaaacaatagccatgtacacctttatgtgcgtcctgccttttacatgttacttcgttatcctgtatactctaccacttgcctcagctgaggaaaacaaacttatgctttcatgggcaactggagatgtactcacttagttccttaagtaactggggagggagggtgggaatcaacctttaaagataattatccttctttccttatcccatttacttcattattactattattattattattattattattgagacagggtctcactatgttgctcaggctggtctccaactcccggcctcaagcagtcctcctacctcagcctcccaaagtgctaggattccaggcatgaaccaccatacccggccccatttactttaaataagttttctgaaatgagtttatatatgtaaaaacatctggcaaagaacctaatacataataagtgctcagtaattaagaccctctttcttacccacttcttactaaactatatacattccaacaatcctccgagtatcttctctgtgat

SEQ ID NO: 27701 - DNA, 2366 bp, Homo sapiens
  misc_feature 1: n = A,T,C or G
natagcttgtccacctttgggaaacctttaatcttccttactattccttggtgacatccaccccaatgccaaagtgtcccctgcggtaaaaaatttttaaagccctattagtctcttaagtgccattgttgtaataattaacaacaatagtaatatttcaaattaaccgatatccttgtttaccttgactaatgaataggtttatttaactctaccgcacctgattaatagaaataaaccgtactatatttctaatggtcccaatggtgatgggttccaagaaccccctaggatactaaagtccatgatgttcaagtcccttatagaaaatggtgtagtatttgcatataacctgtgcacatcctaccatacactttaaatcatctctagattacctataatagctaatacaatgtaaatgctttgtaaatagttgttatactatattgtttaatgacaaaaaaaagtttgtacatgttcagcaaaggcgcaaccatccatttttttccccaaatatttttgacccacagtgggctgaatcacagatgcgaagcctatggacatggagggccaactggagaagcataagcaggggatactttttaggttgctacttcagcaggcaacattcagaccatggaagtctagagaaagattataaatctgaacttaccgctaaaaattttaaaatgggaaataaatccaaggagtttttagtcatgcattatgattttaatctatgttatgccaagtatagcattccaaaatatacatctagagactaaaagtaaatgctctatagtgaagaagtaataattaaaaaatgctactaatatagaaaatttataatcagaaaaataaatattcagggagctcaccagaagaataaagtgctctgccagttattaaaggattactgctggtgaattaaatatggcattccccaagggaaatagagagattcttctggattatgttcaatatttatttcacaggattaactgttttaggaacagatataaagcttcgccacggaagagatggacaaagcacaaagacaacatgataccttaggaagcaacactaccctttcaggcataaaatttggagaaatgcaacattatgcttcatgaataatatgtagaaagaaggtctgatgaaaatgacatccttaatgtaagataactttataagaaatctgggtcaaataaaattctttgaagaaaacatccaaatgtcattgacttatcaaatactatcttggcatataacctatgaaggcaaaactaaacaaacaaacaaaaagctcacaccaaacaaaaccatcaacttattttgtattctataacatacaagactgtaaagatgtgacagtgtacattatatgacaatgcacattagccagcaagtcttttataggtggtttcagcagcaacgataagtaatgcagaattcagctccagcactttatttcaaaagaaatttcctgcctccctccaagatgcagggtgaggaggtagcttggggttgctattggagaagtattcagtttgctactttgtgtcaccccttgccattcttttatccccagttaattattatctgcatataatataaatctgctagaccataaattaacagctttcaggacagatgccttgaaagttcttagggaggttaaacaaatattgtagcctaaaacctcctctataacaaacatgcacacaatggaagtgatgtcgtaagtgagtgatggggcaggaaggacctagggctctgtctcgactataaaatcaccttgccccaaacaaatttaaattataacttaggaggttcatggactttcatccattctggaaacaaagagaaaaaccaaatcaaataccagaatctgttttctcactgggcaaatagcaacaggatccacagttttaccacaattgtttccctgtctccatgtggtatctacataattcttttcccaaaggaggaaatcaaataacaggccaatctgagtaattaaactcccctcccaacactacccaacctctgtgaataaaagctttccaaactttgtgatcacatttgaaattggttcacttattattgagagaaaaccacaaaaagtctcaatttcatcacatcctcaaaccaatcttttaatttttaaatgcagaagaagaaaccaaacggaaccaaaaaaaaaagagagagagagaataaatagaaaagaatgtggctgggaattgtgaatcagaagattataccccccaatttttttcaatccccttttctcaaataataaattagttaaatcagtttctgagttatgccactggctgatgaagagttgagaggtctctttg

SEQ ID NO: 27702 - DNA, 2538 bp, Homo sapiens; identical to SEQ ID NO: 20316
  misc_feature 2538: n = A,T,C or G

SEQ ID NO: 27703 - DNA, 2928 bp, Homo sapiens; identical to SEQ ID NO: 21852
  misc_feature 1, 2, 3, 2923, 2924, 2925, 2926, 2927, 2928: n = A,T,C or G

SEQ ID NO: 27704 - DNA, 3966 bp, Homo sapiens; identical to SEQ ID NO: 21853
  misc_feature 1, 2, 3965, 3966: n = A,T,C or G

SEQ ID NO: 27705 - DNA, 2586 bp, Homo sapiens; identical to SEQ ID NO: 22522
  misc_feature 1, 2332, 2348, 2372, 2375, 2383, 2387, 2399, 2412, 2425,2429, 2438, 2454, 2459, 2469, 2495, 2514, 2524, 2538, 2545,2552, 2562, 2566, 2572, 2573, 2574, 2575, 2576, 2577, 2578,2579, 2580, 2581, 2582, 2583, 2584, 2585, 2586: n = A,T,C or G

SEQ ID NO: 27706 - DNA, 689 bp, Homo sapiens; identical to SEQ ID NO: 21367
  misc_feature 1, 2: n = A,T,C or G

SEQ ID NO: 27707 - DNA, 2538 bp, Homo sapiens; identical to SEQ ID NO: 20316
  misc_feature 2538: n = A,T,C or G

SEQ ID NO: 27708 - DNA, 1013 bp, Homo sapiens; identical to SEQ ID NO: 22649
  misc_feature 174: n = A,T,C or G

SEQ ID NO: 27709 - DNA, 1390 bp, Homo sapiens; identical to SEQ ID NO: 24490
  misc_feature 1, 1385, 1386, 1387, 1388, 1389, 1390: n = A,T,C or G

SEQ ID NO: 27710 - DNA, 2538 bp, Homo sapiens; identical to SEQ ID NO: 20316
  misc_feature 2538: n = A,T,C or G

SEQ ID NO: 27711 - DNA, 2002 bp, Homo sapiens
acgcggggagagagggcgaaggtaggctggcagatacgttcgtcagcttgctcctttctgcccgtggacgccgccgaagaagcatcgttaaagtctctcttcaccctgccgtcatgtctaagtcagagtctcctaaagagcccgaacagctgaggaagctcttcattggagggttgagctttgaaacaactgatgagagcctgaggagccattttgagcaatggggaacgctcacggactgtgtggtaatgagagatccaaacaccaagcgctccaggggctttgggtttgtcacatatgccactgtggaggaggtggatgcagctatgaatgcaaggccacacaaggtggatggaagagttgtggaaccaaagagagctgtctccagagaagattctcaaagaccaggtgcccacttaactgtgaaaaagatatttgttggtggcattaaagaagacactgaagaacatcacctaagagattattttgaacagtatggaaaaattgaagtgattgaaatcatgactgaccgaggcagtggcaagaaaaggggctttgcctttgtaacctttgacgaccatgactccgtggataagattgtcattcagaaataccatactgtgaatggccacaactgtgaagttagaaaagccctgtcaaagcaagagatggctagtgcttcatccagccaaagaggtcgaagtggttctggaaactttggtggtggtcgtggaggtggtttcggtgggaatgacaacttcggtcgtggaggaaacttcagtggtcgtggtggctttggtggcagccgtggtggtggtggatatgcgtggcagtggggatggctatatggatttggtaatgatggtggttatggaggaggcggccctggttactctggcaggaagcagagcgctatggcaagtggtggacagggttatggaaaccagggcagtggctatggccgggagtggcagctatgacagctataacaacggaggccggaggcggctttggcggtggtagtggaagcaattttggaggtggtggaagctacagtgattttgggaattacaacaatcagtcttcaaattttggacccatgaagggaggaaattttggaggcagaagctctggcccctatggcggtggaggccaatactttgcaaaaccacgaaaccaaggtggctatggcggttccagcagcagcagtagctatggcagtggcagaagattttaattaggaaacaaagcttagcaggagaggagagccagagaagtgacagggaagctacaggttacaacagatttgtgaactcagccaagcacagtggtggcagggcctagctgctacaaagaagacatgttttagacaaatactcatgtgtatgggcaaaaaactcgaggactgtatttgtgactaattgtataacaggttattttagtttctgttctgtggaaagtgtaaagcattccaacaaagggttttaatgtagatttttttttttgcaccccatgctgttgattgctaaatgtaacagtctgatcgtgacgctgaataaatgtcttttttttaaaaaaaaaaaaaaaaaaaaaaaaaaaaaaaaaaaaaaaaaggggggggggggtcaaaatgatacccaggagagggcaccagagtctagggtgatacaccacattttctgttcacacagggtggccccaaaagaggggagcgcaatacaaaaagatacagacaggggacgcgctttaaaacacgtcgtgctgtcgacacaagggcaaggaggagggaaaatctctgggagcaagacacccactaaactctcggggggcgggggaacccctatgtgcgggcgccacaactaccctcacgaggacagttttcacacgtccacggggagtacccacttcacactctctacgggctctagggctgccaacacacccgcgatatcgcgcgtggccgtgaaaattggcgtacagcggaattacttcgcccaactac

SEQ ID NO: 27712 - DNA, 953 bp, Homo sapiens; identical to SEQ ID NO: 22139
  misc_feature 1, 2, 3, 4, 952, 953: n = A,T,C or G

SEQ ID NO: 27713 - DNA, 370 bp, Homo sapiens; identical to SEQ ID NO: 20612

SEQ ID NO: 27714 - DNA, 1700 bp, Homo sapiens; identical to SEQ ID NO: 21861
  misc_feature 1, 1603, 1604, 1605, 1606, 1607, 1608, 1609, 1610, 1611,1612, 1613, 1614, 1615, 1616, 1617, 1618, 1619, 1620, 1621,1622, 1623, 1624, 1625, 1626, 1627, 1628, 1629, 1630, 1631,1632, 1633, 1634, 1635, 1636, 1637, 1638, 1639, 1640: n = A,T,C or G
  misc_feature 1641, 1642, 1643, 1644, 1645, 1700: n = A,T,C or G

SEQ ID NO: 27715 - DNA, 3453 bp, Homo sapiens; identical to SEQ ID NO: 21862

SEQ ID NO: 27716 - DNA, 683 bp, Homo sapiens; identical to SEQ ID NO: 21863
  misc_feature 679, 680, 681, 682, 683: n = A,T,C or G

SEQ ID NO: 27717 - DNA, 689 bp, Homo sapiens; identical to SEQ ID NO: 21367
  misc_feature 1, 2: n = A,T,C or G

SEQ ID NO: 27718 - DNA, 4219 bp, Homo sapiens; identical to SEQ ID NO: 21865
  misc_feature 1, 2, 4211, 4212, 4213, 4214, 4215, 4216, 4217, 4218, 4219: n = A,T,C or G

SEQ ID NO: 27719 - DNA, 941 bp, Homo sapiens; identical to SEQ ID NO: 21866

SEQ ID NO: 27720 - DNA, 801 bp, Homo sapiens; identical to SEQ ID NO: 21839
  misc_feature 528, 532, 587, 624, 635, 651, 657, 666, 669, 678, 689, 696,699, 714, 720, 732, 733, 743, 744, 774, 796, 797, 798, 799,800, 801: n = A,T,C or G

SEQ ID NO: 27721 - DNA, 1262 bp, Homo sapiens; identical to SEQ ID NO: 21868
  misc_feature 1, 2, 1261, 1262: n = A,T,C or G

SEQ ID NO: 27722 - DNA, 2538 bp, Homo sapiens; identical to SEQ ID NO: 20316
  misc_feature 2538: n = A,T,C or G

SEQ ID NO: 27723 - DNA, 1268 bp, Homo sapiens; identical to SEQ ID NO: 21760
  misc_feature 1, 2, 3, 4, 5, 6, 7, 8, 1266, 1267, 1268: n = A,T,C or G

SEQ ID NO: 27724 - DNA, 516 bp, Homo sapiens; identical to SEQ ID NO: 21320

SEQ ID NO: 27725 - DNA, 1294 bp, Homo sapiens; identical to SEQ ID NO: 22613

SEQ ID NO: 27726 - DNA, 3855 bp, Homo sapiens; identical to SEQ ID NO: 20695
  misc_feature 1, 2, 3854, 3855: n = A,T,C or G

SEQ ID NO: 27727 - DNA, 469 bp, Homo sapiens; identical to SEQ ID NO: 21874
  misc_feature 1, 2, 3, 4, 5: n = A,T,C or G

SEQ ID NO: 27728 - DNA, 417 bp, Homo sapiens; identical to SEQ ID NO: 21875

SEQ ID NO: 27729 - DNA, 2538 bp, Homo sapiens; identical to SEQ ID NO: 20316
  misc_feature 2538: n = A,T,C or G

SEQ ID NO: 27730 - DNA, 758 bp, Homo sapiens; identical to SEQ ID NO: 21402
  misc_feature 1, 2, 756, 757, 758: n = A,T,C or G

SEQ ID NO: 27731 - DNA, 2360 bp, Homo sapiens; identical to SEQ ID NO: 21878

SEQ ID NO: 27732 - DNA, 2200 bp, Homo sapiens; identical to SEQ ID NO: 21879
  misc_feature 2020, 2038, 2086, 2165, 2184: n = A,T,C or G

SEQ ID NO: 27733 - DNA, 2538 bp, Homo sapiens; identical to SEQ ID NO: 20316
  misc_feature 2538: n = A,T,C or G

SEQ ID NO: 27734 - DNA, 886 bp, Homo sapiens; identical to SEQ ID NO: 21881
  misc_feature 1, 2, 3, 4, 5, 6, 886: n = A,T,C or G

SEQ ID NO: 27735 - DNA, 862 bp, Homo sapiens; identical to SEQ ID NO: 21330

SEQ ID NO: 27736 - DNA, 728 bp, Homo sapiens; identical to SEQ ID NO: 21701
  misc_feature 1, 2, 727, 728: n = A,T,C or G

SEQ ID NO: 27737 - DNA, 1702 bp, Homo sapiens; identical to SEQ ID NO: 21884

SEQ ID NO: 27738 - DNA, 11422 bp, Homo sapiens
  misc_feature 1, 2, 3, 4, 5, 6, 7, 8, 9, 10, 11, 12, 13, 14, 11418, 11419,11420, 11421, 11422: n = A,T,C or G
nnnnnnnnnnnnnngatttagctcctctttaatttccttcaacagtgttctgtagtttccagtctacaagtcttacacttttgggttaaatttattcataattattttattatgtttgataatattataaatggaattgtttacttaattttacttgaattgttccttgctggtgtataagtagacatctcatttttttagttgacctcgtatggtacaatctctttgaactcatttattatcactgatagtttaggtctttttttttcgaggtttcattaaggttttctatagataagatcatgtcaagacaccctcagaccacagggcggcgccacgagcccggccgagtgcagctggagcgccgacgtctgccgaggatacacagctgctgaggcagaacgcaggttcgtcacagtgggcctccgtgggcggcgccgcacgctcgtcacagtgggcctccgccggctacgccgctgcttcagtggcttgcaggcactttcctcttggaagtggcgactgctgcggggctgagcggtgctcgcacgcgtctcgggagccaggttggcggcgcgatgaggcgcagcaaggccgatgtggagcggtacgtcgcctcggtgctgggtctcaccccgtcgcctcgacagaagtcaatgaaaggattctattttgcaaagctgtattatgaagctaaagaatatgatcttgctaaaaaatacatatgtacttacattaatgtgcaagagagggatcccaaagctcacagatttctgggtcttctttatgaattggaagaaaacacagagaaagccgttgaatgttacaggcgttcagtggaattaaacccaacacaaaaagatcttgtgttgaagattgcagaattgctttgtaaaaatgatgttactgatggaagagcaaaatactgggtcgaaagagcagcaaaacttttcccaggaagtcctgcaatttataaactaaaggaacagcttctagattgtgaaggtgaagatggatggaataaactttttgacttgattcagtcagaactttatgtaagacctgatgacgtccatgtgaacatccggctagtggaggtgtatcgctcaactaaaagattgaaggatgctgtggcccactgccatgaggcagagaggaacatagctttgcgttcaagtttagaatggaattcgtgtgttgtacagacccttaaggaatatctggagtctttacagtgtttggagtctgataaaagtgactggcgagcaaccaatacagacttactgctggcctatgctaatcttatgcttcttacgctttccactagagatgtgcaggaaagtagagaattactgcaaagttttgatagtgctcttcagtctgtgaaatctttgggtggaaatgatgaactgtcagctactttcttagaaatgaaaggacatttctacatgcatgctggttctctgcttttgaagatgggtcagcatagtagtaatgttcaatggcgagctctttctgagctggctgcattgtgctatctcatagcatttcaggttccaagaccaaagattaaattaataaaaggtgaagctggacaaaatctgctggaaatgatggcctgtgaccgactgagccaatcagggcacatgttgctaaacttaagtcgtggcaagcaagattttttaaaagaggttgttgaaacttttgccaacaaaagcgggcagtctgcattatatgatgctctgttttctagtcagtcacctaaggatacatcttttcttggtagcgatgatattggaaacattgatgtacaagaaccagagcttgaagatttggctagatacgatgttggtgctattcgagcacataatggtagtcttcagcatcttacttggcttggcttacagtggaattcattgcctgctttacctggaatccgaaaatggctaaaacagcttttccatcatttgccccatgaaacctcaaggcttgaaacaaatgcgcctgaatcaatatgtattttagatcttgaagtatttctccttggagtagtatataccagccacttacaattaaaggagaaatgtaattctcaccacagctcctatcagccgttatgcctgccccttcctgtgtgtaaacagctttgtacagaaagacaaaaatcttggtgggatgcggtttgtactctgattcacagaaaagcagtacctggaaacgtagcaaaattgagacttctagttcagcatgaaataaacactctaagagcccaggaaaaacatggccttcaacctgctctgcttgtacattgggcagaatgccttcagaaaacgggcagcggtcttaattctttttatggtcaactagaatacatagggagaagtgttcattattggaagaaagttttgccattgttgaagataataaaaaagaagaacagtattcctgaacctattgatcctctgtttaaacattttcatagtgtagacattcaggcatcagaaattgttgaatatgaagaagacgcacacataacttttgctatattggatgcagtaaatggaaatatagaagatgctgtgactgcttttgaatctataaaaagtgttgtttcttattggaatcttgcactgatttttcacaggaaggcagaagacattgaaaatgatgccctttctcctgaagaacaagaagaatgcaaaaattatctgagaaagaccagggactacctaataaagattatagatgacagtgattcaaatctttcagtggtcaagaaattgcctgtgcccctggagtctgtaaaacagatgcttaattcagtcatgcaggaactcgaagactatagtgaaggaggtcctctctataaaaatggttctttgcgaaatgcagattcagaaataaaacattctacaccgtctcctaccaaatattcactatcaccaagtaaaagttacaagtattctcccgaaacaccacctcgatggacagaagatcggaattctttactgaaaatgatttgccaacaagtagaggccattaagaaagaaatgcaggagttgaaactaaatagcagtaagtcagcatcccgtcatcgttggcccacagagaattatggaccagactcggtgcctgatggatatcaggggtcacagacatttcatggggctccactaacagttgcaactactggcccttcagtatattatagtcagtcaccagcatataattcccagtatcttctcagaccagcagctaatgttactcccacaaagggcccagtctatggcatgaataggcttccaccccaacagcatatttatgcctatccgcaacagatgcacacaccgccagtgcaaagctcatctgcttgtatgttctctcaggagatgtatggtcctcctgcattgcgttttgagtctcctgcaacgggaattctatcgcccaggggtgatgattactttaattacaatgttcaacagacaagcacaaatccacctttgccagaaccaggatatttcacaaaacctccgattgcagctcatgcttcaagatctgcagaatctaagactatagaatttgggaaaactaattttgttcagcccatgccgggtgaaggattaaggccatctttgccaacacaagcacacacaacacagccaactccttttaaatttaactcaaatttcaaatcaaatgatggtgacttcacgttttcctcaccacaggttgtgacacagccccctcctgcagcttacagtaacagtgaaagccttttaggtctcctgacttcagataaacccttgcaaggagatggctatagtggagccaaaccaattcctggtggtcaaaccattgggcctcgaaatacattcaattttggaagcaaaaatgtgtctggaatttcatttacagaaaacatggggtcgagtcagcaaaagaattctggttttcggcgaagtgatgatatgtttactttccatggtccagggaaatcagtatttggaacacccactttagagacagcaaacaagaatcatgagacagatggaggaagtgcccatggggatgatgatgatgacggtcctcactttgagcctgtagtacctcttcctgataagattgaagtaaaaactggtgaggaagatgaagaagaattcttttgcaaccgcgcgaaattgtttcgtttcgatgtagaatccaaagaatggaaagaacgtgggattggcaatgtaaaaatactgaggcataaaacatctggtaaaattcgccttctaatgagacgagagcaagtattgaaaatctgtgcaaatcattacatcagtccagatatgaaattgacaccaaatgctggatcagacagatcttttgtatggcatgcccttgattatgcagatgagttgccaaaaccagaacaacttgctattaggttcaaaactcctgaggaagcagcactttttaaatgcaagtttgaagaagcccagagcattttaaaagccccaggaacaaatgtagccatggcgtcaaatcaggctgtcagaattgtaaaagaacccacaagtcatgataacaaggatatttgcaaatctgatgctggaaacctgaattttgaatttcaggttgcaaagaaagaagggtcttggtggcattgtaacagctgctcattaaagaatgcttcaactgctaagaaatgtgtatcatgccaaaatctaaacccaagcaataaagagctcgttggcccaccattagctgaaactgtttttactcctaaaaccagcccagagaatgttcaagatcgatttgcattggtgactccaaagaaagaaggtcactgggattgtagtatttgtttagtaagaaatgaacctactgtatctaggtgcattgcgtgtcagaatacaaaatctgctaacaaaagtggatcttcatttgttcatcaagcttcatttaaatttggccagggagatcttcctaaacctattaacagtgatttcagatctgttttttctacaaaggaaggacagtgggattgcagtgcatgtttggtacaaaatgaggggagctctacaaaatgtgctgcttgtcagaatccgagaaaacagagtctacctgctacttctattccaacacctgcctcttttaagtttggtacttcagagacaagtaaaactctaaaaagtggatttgaagacatgtttgctaagaaggaaggacagtgggattgcagttcatgcttagtgcgaaatgaagcaaatgctacaagatgtgttgcttgtcagaatccggataaaccaagtccatctacttctgttccagctcctgcctcttttaagtttggtacttcagagacaagcaaggctccaaagagcggatttgagggaatgttcactaagaaggagggacagtgggattgcagtgtgtgcttagtaagaaatgaagccagtgctaccaaatgtattgcttgtcagaatccaggtaaacaaaatcaaactacttctgcagtttcaacacctgcctcttcagagacaagcaaggctccaaagagcggatttgagggaatgttcactaagaaggagggacagtgggattgcagtgtgtgcttagtaagaaatgaagccagtgctaccaaatgtattgcttgtcagaatccaggtaaacaaaatcaaactacttctgcagtttcaacacctgcctcttcagagacaagcaaggctccaaagagcggatttgagggaatgttcactaagaaggaaggacagtgggattgcagtgtgtgcttagtaagaaatgaagccagtgctaccaaatgtattgcttgtcagtgtccaagtaaacaaaatcaaacaactgcaatttcaacacctgcctcttcggagataagcaaggctccaaagagtggatttgaaggaatgttcatcaggaaaggacagtgggattgtagtgtttgctgtgtacaaaatgagagttcttccttaaaatgtgtggcttgtgatgcctctaaaccaactcataaacctattgcagaagctccttcagctttcacactgggctcagaaatgaagttgcatgactcttctggaagtcaggtgggaacaggatttaaaagtaatttctcagaaaaagcttctaagtttggcaatacagagcaaggattcaaatttgggcatgtggatcaagaaaattcaccttcatttatgtttcagggttcttctaatacagaatttaagtcaaccaaagaaggattttccatccctgtgtctgctgatggatttaaatttggcatttcggaaccaggaaatcaagaaaagaaaagtgaaaagcctcttgaaaatggtactggcttccaggctcaggatattagtggccagaagaatggccgtggtgtgatttttggccaaacaagtagcacttttacatttgcagatcttgcaaaatcaacttcaggagaaggatttcagtttggcaaaaaagaccccaatttcaagggattttcaggtgctggagaaaaattattctcatcacaatacggtaaaatggccaataaagcaaacacttccggtgactttgagaaagatgatgatgcctataagactgaggacagcgatgacatccattttgaaccagtagttcaaatgcctgaaaaagtagaacttgtaacaggagaagaaggtgaaaaagttctgtattcacagggggtaaaactatttagatttgatgctgaggtaagtcagtggaaagaaaggggcttggggaacttaaaaattctcaaaaacgaggtcaatggcaaactaagaatgctgatgcgaagagaacaagtactaaaagtgtgtgctaatcattggataacgactacgatgaacctgaagcctctctctggatcagatagagcatggatgtggttagccagtgatttctctgatggtgatgccaaactagagcagttggcagcaaaatttaaaacaccagagctggctgaagaattcaagcagaaatttgaggaatgccagcggcttctgttagacataccacttcaaactccccataaacttgtagatactggcagagctgccaagttaatacagagagctgaagaaatgaagagtggactgaaagatttcaaaacatttttgacaaatgatcaaacaaaagtcactgaggaagaaaataagggttcaggtacaggtgcggccggtgcctcagacacaacaataaaacccaatcctgaaaacactgggcccacattagaatgggataactatgatttaagggaagatgctttggatgatagtgtcagtagtagctcagtacatgcttctccattggcaagtagccctgtgagaaaaaatcttttccgctttgatgagtcaacaacaggatttaacttcagttttaaatctgctttgagtctatctaagtctcctgccaagttgaatcagagtgggacttcagttggcactgatgaagaatctgatgttactcaagaagaagagagagatggacagtactttgaacctgttgttcctttacctgatctagttgaagtatccagtggtgaggaaaatgaacaagttgtttttagtcacagggcaaaactctacagatatgataaagatgttggtcaatggaaagaaaggggcattggtgatataaagattttacagaattatgataataagcaagttcgtatagtgatgagaagggaccaagtattaaaactttgtgccaatcacagaataactccagacatgagtttgcaaaatatgaaagggacagaaagagtatgggtgtggactgcatgtgattttgcagatggagaaagaaaagtagagcatttagctgttcgttttaaactacaggatgttgcagactcgtttaagaaaatttttgatgaagcaaaaacagcccaggaaaaagattctttgataacacctcatgtttctcggtcaagcactcccagagagtcaccatgtggcaaaattgctgtagctgtattagaagaaaccacaagagagaggacagatgttattcagggtgatgatgtagcagatgcaacttcagaagttgaagtgtctagcacatctgaaacaacaccaaaagcagtggtttctcctccaaagtttgtatttggttcagagtctgttaaaagcatttttagtagtgaaaaatcaaaaccatttgcattcggcaacagttcagccactgggtctttgtttggatttagttttaatgcacctttgaaaagtaacaatagtgaaactagttcagtagcccagagtggatctgaaagcaaagtggaacctaaaaaatgtgaactgtcaaagaactctgatatcgaacagtcttcagatagcaaagtcaaaaatctctttgcttcctttccaacggaagaatcttcaatcaactacacatttaaaacaccagaaaaggcaaaagagaagaaaaaacctgaagattctccctcagatgatgatgttctcattgtatatgaactaactccaaccgctgagcagaaagcccttgcaaccaaacttaaacttcctccaactttcttctgctacaagaatagaccagattatgttagtgaagaagaggaggatgatgaagatttcgaaacagctgtcaagaaacttaatggaaaactatatttggatggctcagaaaaatgtagacccttggaagaaaatacagcagataatgagaaagaatgtattattgtttgggaaaagaaaccaacagttgaagagaaggcaaaagcagatacgttaaaacttccacctacatttttttgtggagtctgtagtgatactgatgaagacaatggaaatggggaagactttcaatcagagcttcaaaaagttcaggaagctcaaaaatctcagacagaagaaataactagcacaactgacagtgtatatacaggtgggactgaagtgatggtaccttctttctgtaaatctgaagaacctgattctattaccaaatccattagttcaccatctgtttcctctgaaactatggacaaacctgtagatttgtcaactagaaaggaaattgatacagattctacaagccaaggggaaagcaagatagtttcatttggatttggaagtagcacagggctctcatttgcagacttggcttccagtaattctggagattttgcttttggttctaaagataaaaatttccaatgggcaaatactggagcagctgtgtttggaacacagtcagtcggaacccagtcagccggtaaagttggtgaagatgaagatggtagtgatgaagaagtagttcataatgaagatatccattttgaaccaatagtgtcactaccagaggtagaagtaaaatctggagaagaagatgaagaaattttgtttaaagagagagccaaactttatagatgggatcgggatgtcagtcagtggaaggagcgcggtgttggagatataaagattctttggcatacaatgaagaattattaccggatcctaatgagaagagaccaggtttttaaagtgtgtgcaaaccacgttattactaaaacaatggaattaaagcccttaaatgtttcaaataatgctttagtttggactgcctcagattatgctgatggagaagcaaaagtagaacagcttgcagtgagatttaaaactaaagaagtagctgattgtttcaagaaaacatttgaagaatgtcagcagaatttaatgaaactccagaaaggacatgtatcactggcagcagaattatcaaaggagaccaatcctgtggtgttttttgatgtttgtgcggacggtgaacctctagggcggataactatggaattattttcaaacattgttcctcggactgctgagaacttcagagcactatgcactggagagaaaggctttggtttcaagaattccatttttcacagagtaattccagattttgtttgccaaggaggagatatcaccaaacatgatggaacaggcggacagtccatttatggagacaaatttgaagatgaaaattttgatgtgaaacatactggtcctggtttactatccatggccaatcaaggccagaataccaataattctcaatttgttataacactgaagaaagcagaacatttggactttaagcatgtagtatttgggtttgttaaggatggcatggatactgtgaaaaagattgaatcatttggttctcccaaagggtctgtttgtcgaagaataactatcacagaatgtggacagatataaaatcattgttgttcatagaaaatttcatctgtataagcagttggattgaagcttagctattacaatttgatagttatgttcagcttttgaaaatggacgtttccgatttacaaatgtaaaattgcagcttatagctgttgtcactttttaatgtgttataattgaccttgcatggtgtgaaataaaagtttaaacactggtgtatttcaggtgtacttgtgtttatgtactcctgacgtattaaaatggaataatactaatcttgttaaaagcaatagacctcaaactattgaaggaatatgatatatgcaatttaattttaattccttttaagatatttggacttcctgcatggatatacttaccatttgaataaagggaccacaacttggataatttaattttaggtttgaaatatatttggtaatcttaactattggtgtactcatttatgcatagagactcgtttatgaatgggtagagccacagaacgtatagagttaaccaaagtgctcttctctagaatctttacacctcctgtgtggttacaagttaactttgtaagtagcgtaccttccttccttaaaatatctagcttcctgtgccctttcatagatattcgattaatttttacattttaaacaagttgactatttcctttaggggttttgtttcaaacttttctgtcatctgtctctactacctcagaaactgcagcttggttctgatgatagaaattgaatttttccttgtagttattgtgataaagtatgaatatttttagaaagtctataccatgttctttcgttaaagatttgctttatacaagattgttgcagtacctttttctggtaaattttgtagcagaaataaaatgacaattcctaagagccactgacatccaaaaaaaattcatttacttacgcttcggggtcatctaaagtaaggagaccatttaaggccgtaattcaactgtgctaatttcagagtcctaattctcagtgtgtacacaccaaaagtttggacagcttgttccactgtcggccatgtagaaaaggggtttgggcaacaatgggtaagatcggggaacacattgtttggttgctttggggtccccttggtctcggaccttttgggcaagccgccggggggctacaagcgcccccannnnn

SEQ ID NO: 27739 - DNA, 862 bp, Homo sapiens; identical to SEQ ID NO: 21330

SEQ ID NO: 27740 - DNA, 1162 bp, Homo sapiens; identical to SEQ ID NO: 21517

SEQ ID NO: 27741 - DNA, 420 bp, Homo sapiens; identical to SEQ ID NO: 21659
  misc_feature 1, 2, 3, 4: n = A,T,C or G

SEQ ID NO: 27742 - DNA, 2572 bp, Homo sapiens
  misc_feature 1, 2, 3, 4, 2572: n = A,T,C or G
nnnnggccctcgaggccaaaaattagggcccctttcctaaacatttatttggagtccttttatcaagttcttcctaatgaattttaggattattttggcttatttcatcaaggaagtttggtgtaagaacttgttacctaatgagtgcccctccttgtaagttcatatttcaagttacatggttcatgccataaataaaccacacttgctttaacatcgttcagaatggtacatttaacaattggacatacagcactgtaaacaattcaaagtccattgagcttaccatgaaagaactgaaacgtatgtaggaactgtgtcctgctgcagacaagcagctgctctggctctggtgcggtgcggtgcggtgaggtgaggtgaggtgaggtgggcaggtgtggaagggagaattcctgaggccagtcacaattattgaagctaaattaatttcttcctgacactttagcattaattctaagtagttctaagttctaaaccattaactgtatagttaatttttttaaatcaaagaagaaaaaggctttcacacagatgaatgtataggaaaacacaagtaatgacaattttcaagagccttattgtaaaaaaaaaaagaaagaaaaaaggacaattatttttggagttactgtctctaattcttaaaaagtaagtacagtgtctgtatctctaagttttagtgctatacagcactaaatgtactttatgaatttggggtaggtaaagtttgtattttatcttaaacatgttttctatgatgaaaaggaacaaaattgtaaaaaatgaggatcttccctctaaaggtttcaaagcgttagaggacatgcaattaaatgttgttacaccttgaacaatgagcctcttgagtttgtaggaagggcagaccggctccattaccaacaactttggggtagaaagcacagctctcctcttttacccagcacaaatgcaatcctgattataaaactatttgtgtttctaaatacaaccaaaggaaatcttagagaaacataaattagaaacctcttttattaaggggaaacaacaaaaaaaggtgcttttttaaaaaaaaaaaagaaaagaaaagaaaaagaaaaaacaagctgtaaaaccatgaagttaaagagctgggtctggagcagatgtgcataataactagttagttgctcccagcaggatcagaaacagctttgggggagcagaggaatatgggttggtgtgtttcagaagaggcaccagttaatactcttccaataaaaatgatgtgtcaacagtgttcagcctcaaccagtgctttctcacagaatctgcttggtaagttcagttcacaatgtgtttacctttcatggcaatgcacgatgcaattattgggtaggtcactgtcaagcaaaaacgagatataattacagagaaggcattaatgcccaaagagtacataaagcagtaagtagcttctgaggctggttcaatgcagaagtaaaactaacaggtttgctaacagctaaagacttttaattgcctcatattttctgcagctctgaccagcatccttcttacacgacaaaaaaaaaaaaacaaaaagaaaaaaagtgtgcagctccaacagagtgaaaatgacaacacttttcttttgcctcagaagaagactggtgcttggtgtgctggattttccactgactccaaatgacaagaatatttgggcaaacaattggtcaaaagtgggtttaaatattactattgaaaaaggaaggctaaaactaaaaagaaagatcacttgctatcattattaaggattaatttttgtgtttcattttggttttaaggtaaaatttgtcaaggctacaaggggttgagtaatttaggataaaccattactgccctgtctgcaagccatttgttgttttaatggtagatgttagatacccaagcacatgtagaaaaaacaaccttccttttttggtaggttgtaaagaaatatttcaaaagacagtttctgactggaatgacagaatgttctgagtgttcctttaaaaaagtatgtgacttcatgtataccatttttaacagaaaaagctacacctgccaaaatgttgtaagaaaaccagcactaagcatgcaatactgagtgtgagaaaggaacttaaactgtattacttcctatcttttaaaattcaaactaaagtttcaaagtggagagcctgtggttgctccctgagtccaggttttatcttccacgagagaaaagggcacaggtggtcttctgacgtcttggtcagcatacaatgttatgaataatgaagggcttcctgtcaaaatgcttgatcggtttcacgacaaagggggttccattttctgatcttaaggatgagatgggtttggcgcaggaagaaggacgccaagggagggagcctgggcaccacctgcctgagtacctggagggacagcgctcacctcaatgaggtgacctgggcagtccagtaacagcatgtgatccgggctgttgttgacgagttccagatctgcctctggtacggggagtctgtaggattggccn

SEQ ID NO: 27743 - DNA, 1185 bp, Homo sapiens; identical to SEQ ID NO: 21532
  misc_feature 1, 2, 3, 4, 5, 6, 7, 8, 9, 10, 11, 12, 13, 14, 15, 16, 17,18, 19, 20, 21, 22: n = A,T,C or G

SEQ ID NO: 27744 - DNA, 2538 bp, Homo sapiens; identical to SEQ ID NO: 20316
  misc_feature 2538: n = A,T,C or G

SEQ ID NO: 27745 - DNA, 658 bp, Homo sapiens; identical to SEQ ID NO: 21891

SEQ ID NO: 27746 - DNA, 2538 bp, Homo sapiens; identical to SEQ ID NO: 20316
  misc_feature 2538: n = A,T,C or G

SEQ ID NO: 27747 - DNA, 2538 bp, Homo sapiens; identical to SEQ ID NO: 20316
  misc_feature 2538: n = A,T,C or G

SEQ ID NO: 27748 - DNA, 1380 bp, Homo sapiens; identical to SEQ ID NO: 20118
  misc_feature 1380: n = A,T,C or G

SEQ ID NO: 27749 - DNA, 446 bp, Homo sapiens; identical to SEQ ID NO: 20632
  misc_feature 441, 442, 443, 444, 445, 446: n = A,T,C or G

SEQ ID NO: 27750 - DNA, 2187 bp, Homo sapiens; identical to SEQ ID NO: 21516

SEQ ID NO: 27751 - DNA, 1297 bp, Homo sapiens; identical to SEQ ID NO: 21897
  misc_feature 1280, 1281, 1282, 1283, 1284, 1285, 1286, 1287, 1288, 1289,1290, 1291, 1292, 1293, 1294, 1295, 1296, 1297: n = A,T,C or G

SEQ ID NO: 27752 - DNA, 1651 bp, Homo sapiens; identical to SEQ ID NO: 21898
  misc_feature 1, 2: n = A,T,C or G

SEQ ID NO: 27753 - DNA, 436 bp, Homo sapiens; identical to SEQ ID NO: 21377

SEQ ID NO: 27754 - DNA, 724 bp, Homo sapiens; identical to SEQ ID NO: 21900
  misc_feature 664, 700, 701, 702, 703, 704, 705, 706, 707, 708, 709, 710,711, 712, 713, 714, 715, 716, 717, 718, 719, 720, 721, 722,723, 724: n = A,T,C or G

SEQ ID NO: 27755 - DNA, 670 bp, Homo sapiens; identical to SEQ ID NO: 21478
  misc_feature 623, 625, 670: n = A,T,C or G

SEQ ID NO: 27756 - DNA, 1380 bp, Homo sapiens; identical to SEQ ID NO: 20118
  misc_feature 1380: n = A,T,C or G

SEQ ID NO: 27757 - DNA, 1221 bp, Homo sapiens; identical to SEQ ID NO: 21903
  misc_feature 1, 2, 3, 4, 5, 6, 7, 8, 9, 53: n = A,T,C or G

SEQ ID NO: 27758 - DNA, 2071 bp, Homo sapiens; identical to SEQ ID NO: 21824

SEQ ID NO: 27759 - DNA, 538 bp, Homo sapiens; identical to SEQ ID NO: 20391
  misc_feature 1, 2, 3, 4, 5, 6, 7, 8, 9, 10, 11, 12, 13, 536, 537, 538: n = A,T,C or G

SEQ ID NO: 27760 - DNA, 1272 bp, Homo sapiens; identical to SEQ ID NO: 21906
  misc_feature 1133, 1197, 1215, 1223, 1231: n = A,T,C or G

SEQ ID NO: 27761 - DNA, 1380 bp, Homo sapiens; identical to SEQ ID NO: 20118
  misc_feature 1380: n = A,T,C or G

SEQ ID NO: 27762 - DNA, 594 bp, Homo sapiens; identical to SEQ ID NO: 20446
  misc_feature 586, 587, 588, 589, 590, 591, 592, 593, 594: n = A,T,C or G

SEQ ID NO: 27763 - DNA, 764 bp, Homo sapiens; identical to SEQ ID NO: 21909

SEQ ID NO: 27764 - DNA, 4345 bp, Homo sapiens; identical to SEQ ID NO: 21910
  misc_feature 1, 2, 3, 4, 5, 6, 7, 8, 9, 10, 11, 12, 13, 14, 15, 16, 17,18, 19, 20, 21, 22, 23, 24, 25, 26, 27, 28, 29, 30: n = A,T,C or G

SEQ ID NO: 27765 - DNA, 1684 bp, Homo sapiens; identical to SEQ ID NO: 21911
  misc_feature 1, 2, 3, 4, 5, 6, 7, 8, 9, 10, 11, 12, 13, 14, 15, 16, 17,1681, 1682, 1683, 1684: n = A,T,C or G

SEQ ID NO: 27766 - DNA, 2140 bp, Homo sapiens; identical to SEQ ID NO: 21912

SEQ ID NO: 27767 - DNA, 879 bp, Homo sapiens; identical to SEQ ID NO: 21368
  misc_feature 1, 2, 3, 4, 5, 6, 750, 846, 852, 872, 879: n = A,T,C or G

SEQ ID NO: 27768 - DNA, 387 bp, Homo sapiens; identical to SEQ ID NO: 21762

SEQ ID NO: 27769 - DNA, 619 bp, Homo sapiens; identical to SEQ ID NO: 20475
  misc_feature 619: n = A,T,C or G

SEQ ID NO: 27770 - DNA, 1380 bp, Homo sapiens; identical to SEQ ID NO: 20118
  misc_feature 1380: n = A,T,C or G

SEQ ID NO: 27771 - DNA, 392 bp, Homo sapiens; identical to SEQ ID NO: 21454

SEQ ID NO: 27772 - DNA, 499 bp, Homo sapiens; identical to SEQ ID NO: 21918
  misc_feature 479, 499: n = A,T,C or G

SEQ ID NO: 27773 - DNA, 1060 bp, Homo sapiens; identical to SEQ ID NO: 20584
  misc_feature 1, 2: n = A,T,C or G

SEQ ID NO: 27774 - DNA, 460 bp, Homo sapiens; identical to SEQ ID NO: 21412
  misc_feature 460: n = A,T,C or G

SEQ ID NO: 27775 - DNA, 786 bp, Homo sapiens; identical to SEQ ID NO: 20840
  misc_feature 783, 784, 785, 786: n = A,T,C or G

SEQ ID NO: 27776 - DNA, 2187 bp, Homo sapiens; identical to SEQ ID NO: 21516

SEQ ID NO: 27777 - DNA, 756 bp, Homo sapiens; identical to SEQ ID NO: 21923
  misc_feature 1, 2, 3, 4, 5, 738, 739, 740, 741, 742, 743, 744, 745, 746,747, 748, 749, 750, 751, 752, 753, 754, 755, 756: n = A,T,C or G

SEQ ID NO: 27778 - DNA, 1211 bp, Homo sapiens; identical to SEQ ID NO: 20419
  misc_feature 1207, 1208, 1209, 1210, 1211: n = A,T,C or G

SEQ ID NO: 27779 - DNA, 374 bp, Homo sapiens; identical to SEQ ID NO: 21925

SEQ ID NO: 27780 - DNA, 1380 bp, Homo sapiens; identical to SEQ ID NO: 20118
  misc_feature 1380: n = A,T,C or G

SEQ ID NO: 27781 - DNA, 463 bp, Homo sapiens; identical to SEQ ID NO: 21769
  misc_feature 455, 456, 457, 458, 459, 460, 461, 462, 463: n = A,T,C or G

SEQ ID NO: 27782 - DNA, 2187 bp, Homo sapiens; identical to SEQ ID NO: 21516

SEQ ID NO: 27783 - DNA, 467 bp, Homo sapiens; identical to SEQ ID NO: 21929
  misc_feature 445, 456, 460, 461, 462, 463, 464, 465, 466, 467: n = A,T,C or G

SEQ ID NO: 27784 - DNA, 1627 bp, Homo sapiens; identical to SEQ ID NO: 21930
  misc_feature 1, 1620, 1621, 1622, 1623, 1624, 1625, 1626, 1627: n = A,T,C or G

SEQ ID NO: 27785 - DNA, 886 bp, Homo sapiens; identical to SEQ ID NO: 21881
  misc_feature 1, 2, 3, 4, 5, 6, 886: n = A,T,C or G

SEQ ID NO: 27786 - DNA, 985 bp, Homo sapiens; identical to SEQ ID NO: 21932
  misc_feature 1, 2, 3, 4, 5, 6, 7, 8, 9, 10, 11, 12, 13, 14, 983, 984, 985: n = A,T,C or G

SEQ ID NO: 27787 - DNA, 1001 bp, Homo sapiens; identical to SEQ ID NO: 21314
  misc_feature 681, 682, 683, 684, 685, 686, 687, 688, 689, 690, 691, 692,693, 694, 695, 696, 697, 698, 699, 700, 701, 702, 703, 704,705, 706, 707, 708, 709, 710, 711, 712, 713, 714, 715, 716,717, 718: n = A,T,C or G

SEQ ID NO: 27788 - DNA, 743 bp, Homo sapiens; identical to SEQ ID NO: 21371

SEQ ID NO: 27789 - DNA, 1590 bp, Homo sapiens; identical to SEQ ID NO: 21935
  misc_feature 1589, 1590: n = A,T,C or G

SEQ ID NO: 27790 - DNA, 2475 bp, Homo sapiens; identical to SEQ ID NO: 21595

SEQ ID NO: 27791 - DNA, 724 bp, Homo sapiens; identical to SEQ ID NO: 21937

SEQ ID NO: 27792 - DNA, 2538 bp, Homo sapiens; identical to SEQ ID NO: 20316
  misc_feature 2538: n = A,T,C or G

SEQ ID NO: 27793 - DNA, 1384 bp, Homo sapiens; identical to SEQ ID NO: 21939

SEQ ID NO: 27794 - DNA, 2670 bp, Homo sapiens; identical to SEQ ID NO: 21940
  misc_feature 1, 2, 3, 4, 5, 6, 7, 8, 9, 10, 11, 12, 13, 14, 15, 2670: n = A,T,C or G

SEQ ID NO: 27795 - DNA, 405 bp, Homo sapiens; identical to SEQ ID NO: 21941
  misc_feature 395, 396, 397, 398, 399, 400, 401, 402, 403, 404, 405: n = A,T,C or G

SEQ ID NO: 27796 - DNA, 550 bp, Homo sapiens; identical to SEQ ID NO: 21510
  misc_feature 539, 540, 541, 542, 543, 544, 545, 546, 547, 548, 549, 550: n = A,T,C or G

SEQ ID NO: 27797 - DNA, 886 bp, Homo sapiens; identical to SEQ ID NO: 21943
  misc_feature 1, 2: n = A,T,C or G

SEQ ID NO: 27798 - DNA, 553 bp, Homo sapiens; identical to SEQ ID NO: 21944
  misc_feature 548, 549, 550, 551, 552, 553: n = A,T,C or G

SEQ ID NO: 27799 - DNA, 421 bp, Homo sapiens; identical to SEQ ID NO: 21945

SEQ ID NO: 27800 - DNA, 2538 bp, Homo sapiens; identical to SEQ ID NO: 20316
  misc_feature 2538: n = A,T,C or G

SEQ ID NO: 27801 - DNA, 985 bp, Homo sapiens; identical to SEQ ID NO: 21932
  misc_feature 1, 2, 3, 4, 5, 6, 7, 8, 9, 10, 11, 12, 13, 14, 983, 984, 985: n = A,T,C or G

SEQ ID NO: 27802 - DNA, 446 bp, Homo sapiens; identical to SEQ ID NO: 20632
  misc_feature 441, 442, 443, 444, 445, 446: n = A,T,C or G

SEQ ID NO: 27803 - DNA, 689 bp, Homo sapiens; identical to SEQ ID NO: 21367
  misc_feature 1, 2: n = A,T,C or G

SEQ ID NO: 27804 - DNA, 1023 bp, Homo sapiens; identical to SEQ ID NO: 21950
  misc_feature 1, 660, 764, 829, 976, 1009, 1010, 1011, 1012, 1013, 1014,1015, 1016, 1017, 1018, 1019, 1020, 1021, 1022, 1023: n = A,T,C or G

SEQ ID NO: 27805 - DNA, 425 bp, Homo sapiens; identical to SEQ ID NO: 21503

SEQ ID NO: 27806 - DNA, 2538 bp, Homo sapiens; identical to SEQ ID NO: 20316
  misc_feature 2538: n = A,T,C or G

SEQ ID NO: 27807 - DNA, 1108 bp, Homo sapiens; identical to SEQ ID NO: 20121
  misc_feature 1, 2, 1103, 1104, 1105, 1106, 1107, 1108: n = A,T,C or G

SEQ ID NO: 27808 - DNA, 2538 bp, Homo sapiens; identical to SEQ ID NO: 20316
  misc_feature 2538: n = A,T,C or G

SEQ ID NO: 27809 - DNA, 992 bp, Homo sapiens; identical to SEQ ID NO: 21955
  misc_feature 992: n = A,T,C or G

SEQ ID NO: 27810 - DNA, 689 bp, Homo sapiens; identical to SEQ ID NO: 21367
  misc_feature 1, 2: n = A,T,C or G

SEQ ID NO: 27811 - DNA, 3008 bp, Homo sapiens; identical to SEQ ID NO: 21957

SEQ ID NO: 27812 - DNA, 2905 bp, Homo sapiens; identical to SEQ ID NO: 21958
  misc_feature 2904, 2905: n = A,T,C or G

SEQ ID NO: 27813 - DNA, 689 bp, Homo sapiens; identical to SEQ ID NO: 21367
  misc_feature 1, 2: n = A,T,C or G

SEQ ID NO: 27814 - DNA, 471 bp, Homo sapiens; identical to SEQ ID NO: 20637
  misc_feature 469, 470, 471: n = A,T,C or G

SEQ ID NO: 27815 - DNA, 2538 bp, Homo sapiens; identical to SEQ ID NO: 20316
  misc_feature 2538: n = A,T,C or G

SEQ ID NO: 27816 - DNA, 1001 bp, Homo sapiens; identical to SEQ ID NO: 21314
  misc_feature 681, 682, 683, 684, 685, 686, 687, 688, 689, 690, 691, 692,693, 694, 695, 696, 697, 698, 699, 700, 701, 702, 703, 704,705, 706, 707, 708, 709, 710, 711, 712, 713, 714, 715, 716,717, 718: n = A,T,C or G

SEQ ID NO: 27817 - DNA, 596 bp, Homo sapiens; identical to SEQ ID NO: 21754

SEQ ID NO: 27818 - DNA, 530 bp, Homo sapiens; identical to SEQ ID NO: 21964

SEQ ID NO: 27819 - DNA, 3353 bp, Homo sapiens; identical to SEQ ID NO: 25269

SEQ ID NO: 27820 - DNA, 549 bp, Homo sapiens; identical to SEQ ID NO: 21395
  misc_feature 1, 549: n = A,T,C or G

SEQ ID NO: 27821 - DNA, 2397 bp, Homo sapiens; identical to SEQ ID NO: 21966

SEQ ID NO: 27822 - DNA, 1380 bp, Homo sapiens; identical to SEQ ID NO: 20118
  misc_feature 1380: n = A,T,C or G

SEQ ID NO: 27823 - DNA, 2187 bp, Homo sapiens; identical to SEQ ID NO: 21516

SEQ ID NO: 27824 - DNA, 4105 bp, Homo sapiens; identical to SEQ ID NO: 21969

SEQ ID NO: 27825 - DNA, 707 bp, Homo sapiens; identical to SEQ ID NO: 20542

SEQ ID NO: 27826 - DNA, 2538 bp, Homo sapiens; identical to SEQ ID NO: 20316
  misc_feature 2538: n = A,T,C or G

SEQ ID NO: 27827 - DNA, 1380 bp, Homo sapiens; identical to SEQ ID NO: 20118
  misc_feature 1380: n = A,T,C or G

SEQ ID NO: 27828 - DNA, 421 bp, Homo sapiens; identical to SEQ ID NO: 21973
  misc_feature 1, 2, 3, 4, 5, 6: n = A,T,C or G

SEQ ID NO: 27829 - DNA, 690 bp, Homo sapiens; identical to SEQ ID NO: 21974
  misc_feature 1, 2, 3, 4, 5, 6, 7, 8, 9: n = A,T,C or G

SEQ ID NO: 27830 - DNA, 474 bp, Homo sapiens; identical to SEQ ID NO: 21975
  misc_feature 1, 2: n = A,T,C or G

SEQ ID NO: 27831 - DNA, 2538 bp, Homo sapiens; identical to SEQ ID NO: 20316
  misc_feature 2538: n = A,T,C or G

SEQ ID NO: 27832 - DNA, 461 bp, Homo sapiens; identical to SEQ ID NO: 21774
  misc_feature 461: n = A,T,C or G

SEQ ID NO: 27833 - DNA, 1380 bp, Homo sapiens; identical to SEQ ID NO: 20118
  misc_feature 1380: n = A,T,C or G

SEQ ID NO: 27834 - DNA, 508 bp, Homo sapiens; identical to SEQ ID NO: 21293
  misc_feature 502, 503, 504, 505, 506, 507, 508: n = A,T,C or G

SEQ ID NO: 27835 - DNA, 862 bp, Homo sapiens; identical to SEQ ID NO: 21330

SEQ ID NO: 27836 - DNA, 414 bp, Homo sapiens; identical to SEQ ID NO: 21407

SEQ ID NO: 27837 - DNA, 862 bp, Homo sapiens; identical to SEQ ID NO: 21330

SEQ ID NO: 27838 - DNA, 432 bp, Homo sapiens; identical to SEQ ID NO: 21508
  misc_feature 431, 432: n = A,T,C or G

SEQ ID NO: 27839 - DNA, 457 bp, Homo sapiens; identical to SEQ ID NO: 20415
  misc_feature 456, 457: n = A,T,C or G

SEQ ID NO: 27840 - DNA, 2538 bp, Homo sapiens; identical to SEQ ID NO: 20316
  misc_feature 2538: n = A,T,C or G

SEQ ID NO: 27841 - DNA, 706 bp, Homo sapiens; identical to SEQ ID NO: 21986
  misc_feature 706: n = A,T,C or G

SEQ ID NO: 27842 - DNA, 1265 bp, Homo sapiens; identical to SEQ ID NO: 21987
  misc_feature 717, 718, 719, 720, 721, 722, 723, 724, 725, 726, 727, 728,729, 730, 731, 732, 733, 734, 735, 736, 737, 738, 739: n = A,T,C or G

SEQ ID NO: 27843 - DNA, 2538 bp, Homo sapiens; identical to SEQ ID NO: 20316
  misc_feature 2538: n = A,T,C or G

SEQ ID NO: 27844 - DNA, 675 bp, Homo sapiens; identical to SEQ ID NO: 21989
  misc_feature 658, 659, 660, 661, 662, 663, 664, 665, 666, 667, 668, 669,670, 671, 672, 673, 674, 675: n = A,T,C or G

SEQ ID NO: 27845 - DNA, 460 bp, Homo sapiens; identical to SEQ ID NO: 21412
  misc_feature 460: n = A,T,C or G

SEQ ID NO: 27846 - DNA, 2187 bp, Homo sapiens; identical to SEQ ID NO: 21516

SEQ ID NO: 27847 - DNA, 862 bp, Homo sapiens; identical to SEQ ID NO: 21330

SEQ ID NO: 27848 - DNA, 2538 bp, Homo sapiens; identical to SEQ ID NO: 20316
  misc_feature 2538: n = A,T,C or G

SEQ ID NO: 27849 - DNA, 2187 bp, Homo sapiens; identical to SEQ ID NO: 21516

SEQ ID NO: 27850 - DNA, 1380 bp, Homo sapiens; identical to SEQ ID NO: 20118
  misc_feature 1380: n = A,T,C or G

SEQ ID NO: 27851 - DNA, 801 bp, Homo sapiens; identical to SEQ ID NO: 21839
  misc_feature 528, 532, 587, 624, 635, 651, 657, 666, 669, 678, 689, 696,699, 714, 720, 732, 733, 743, 744, 774, 796, 797, 798, 799,800, 801: n = A,T,C or G

SEQ ID NO: 27852 - DNA, 431 bp, Homo sapiens; identical to SEQ ID NO: 20740

SEQ ID NO: 27853 - DNA, 886 bp, Homo sapiens; identical to SEQ ID NO: 21881
  misc_feature 1, 2, 3, 4, 5, 6, 886: n = A,T,C or G

SEQ ID NO: 27854 - DNA, 2538 bp, Homo sapiens; identical to SEQ ID NO: 20316
  misc_feature 2538: n = A,T,C or G

SEQ ID NO: 27855 - DNA, 2538 bp, Homo sapiens; identical to SEQ ID NO: 20316
  misc_feature 2538: n = A,T,C or G

SEQ ID NO: 27856 - DNA, 691 bp, Homo sapiens; identical to SEQ ID NO: 22001
  misc_feature 688, 689, 690, 691: n = A,T,C or G

SEQ ID NO: 27857 - DNA, 1380 bp, Homo sapiens; identical to SEQ ID NO: 20118
  misc_feature 1380: n = A,T,C or G

SEQ ID NO: 27858 - DNA, 1214 bp, Homo sapiens; identical to SEQ ID NO: 20119

SEQ ID NO: 27859 - DNA, 879 bp, Homo sapiens; identical to SEQ ID NO: 21368
  misc_feature 1, 2, 3, 4, 5, 6, 750, 846, 852, 872, 879: n = A,T,C or G

SEQ ID NO: 27860 - DNA, 2187 bp, Homo sapiens; identical to SEQ ID NO: 21516

SEQ ID NO: 27861 - DNA, 2538 bp, Homo sapiens; identical to SEQ ID NO: 20316
  misc_feature 2538: n = A,T,C or G

SEQ ID NO: 27862 - DNA, 672 bp, Homo sapiens; identical to SEQ ID NO: 22007
  misc_feature 672: n = A,T,C or G

SEQ ID NO: 27863 - DNA, 517 bp, Homo sapiens; identical to SEQ ID NO: 20410

SEQ ID NO: 27864 - DNA, 809 bp, Homo sapiens; identical to SEQ ID NO: 20847
  misc_feature 809: n = A,T,C or G

SEQ ID NO: 27865 - DNA, 886 bp, Homo sapiens; identical to SEQ ID NO: 21881
  misc_feature 1, 2, 3, 4, 5, 6, 886: n = A,T,C or G

SEQ ID NO: 27866 - DNA, 414 bp, Homo sapiens; identical to SEQ ID NO: 21407

SEQ ID NO: 27867 - DNA, 2187 bp, Homo sapiens; identical to SEQ ID NO: 21516

SEQ ID NO: 27868 - DNA, 1020 bp, Homo sapiens; identical to SEQ ID NO: 20647
  misc_feature 1, 2, 3, 14, 20, 35, 42, 48, 81, 1019, 1020: n = A,T,C or G

SEQ ID NO: 27869 - DNA, 2187 bp, Homo sapiens; identical to SEQ ID NO: 21516

SEQ ID NO: 27870 - DNA, 2071 bp, Homo sapiens; identical to SEQ ID NO: 21824

SEQ ID NO: 27871 - DNA, 489 bp, Homo sapiens; identical to SEQ ID NO: 22015
  misc_feature 489: n = A,T,C or G

SEQ ID NO: 27872 - DNA, 383 bp, Homo sapiens; identical to SEQ ID NO: 22016
  misc_feature 380, 381, 382, 383: n = A,T,C or G

SEQ ID NO: 27873 - DNA, 1290 bp, Homo sapiens; identical to SEQ ID NO: 20742
  misc_feature 1, 2, 1281, 1282, 1283, 1284, 1285, 1286, 1287, 1288, 1289,1290: n = A,T,C or G

SEQ ID NO: 27874 - DNA, 2020 bp, Homo sapiens; identical to SEQ ID NO: 22018

SEQ ID NO: 27875 - DNA, 455 bp, Homo sapiens; identical to SEQ ID NO: 22019
  misc_feature 1, 454, 455: n = A,T,C or G

SEQ ID NO: 27876 - DNA, 1380 bp, Homo sapiens; identical to SEQ ID NO: 20118
  misc_feature 1380: n = A,T,C or G

SEQ ID NO: 27877 - DNA, 2716 bp, Homo sapiens; identical to SEQ ID NO: 22021
  misc_feature 1, 2, 3, 4, 5, 6, 7, 8, 9, 10, 11, 12, 2716: n = A,T,C or G

SEQ ID NO: 27878 - DNA, 924 bp, Homo sapiens; identical to SEQ ID NO: 22022
  misc_feature 1, 2, 3, 4, 923, 924: n = A,T,C or G

SEQ ID NO: 27879 - DNA, 1189 bp, Homo sapiens; identical to SEQ ID NO: 20185
  misc_feature 1179, 1180, 1181, 1182, 1183, 1184, 1185, 1186, 1187, 1188,1189: n = A,T,C or G

SEQ ID NO: 27880 - DNA, 862 bp, Homo sapiens; identical to SEQ ID NO: 21330

SEQ ID NO: 27881 - DNA, 1039 bp, Homo sapiens; identical to SEQ ID NO: 22025
  misc_feature 1, 1039: n = A,T,C or G

SEQ ID NO: 27882 - DNA, 1394 bp, Homo sapiens; identical to SEQ ID NO: 22026
  misc_feature 1, 2, 3, 4, 5: n = A,T,C or G

SEQ ID NO: 27883 - DNA, 452 bp, Homo sapiens; identical to SEQ ID NO: 22027
  misc_feature 1, 441, 442, 443, 444, 445, 446, 447, 448, 449, 450, 451,452: n = A,T,C or G

SEQ ID NO: 27884 - DNA, 481 bp, Homo sapiens; identical to SEQ ID NO: 22028
  misc_feature 479, 480, 481: n = A,T,C or G

SEQ ID NO: 27885 - DNA, 489 bp, Homo sapiens; identical to SEQ ID NO: 22029
  misc_feature 1, 2, 3, 4, 488, 489: n = A,T,C or G

SEQ ID NO: 27886 - DNA, 2193 bp, Homo sapiens; identical to SEQ ID NO: 22030
  misc_feature 1, 2, 3, 4, 5, 6, 7, 8, 9, 10, 11, 12, 13, 14: n = A,T,C or G

SEQ ID NO: 27887 - DNA, 897 bp, Homo sapiens; identical to SEQ ID NO: 20923
  misc_feature 894, 895, 896, 897: n = A,T,C or G

SEQ ID NO: 27888 - DNA, 1432 bp, Homo sapiens; identical to SEQ ID NO: 22032

SEQ ID NO: 27889 - DNA, 717 bp, Homo sapiens
  misc_feature 715, 716, 717: n = A,T,C or G
actttaaaaagaaaacagcctaatccttctttgcctatgcacgacgcgggcaattatacgcagatcccgaagcagcgctgggagcgtaagtgcgggcagagcactgcgccgtttgggaacgcaactttgaggagacagtgcggtggacttcagtgaagttccttatgacttcccctgaaattgcttccttatcatgggggcaaatgaaagtaaaaggctctaatacaacctataaggactgcaaagtatggccagggggtagtcggacttgggattggagagaaacaggaactgagcattctcctggtgtgcagcctgcagatgtgaaggaagttgttgagaagggtgtacagactcttgtgattggccgagggatgagtgaggccttgaaggtgccttcatcaactgtggagtacctcaagaaacatggcattgatgtgcgggtcctccagacagagcaggcagtgaaggagtataatgccttggttgcccaaggggtcagggtgggaggtgtcttccattccacctgctgatggagccttaagaggagaataaatcactaagtgcctaagttagaaaaaacataaaaaaaaactcgggggggcccggtcccaatcgccctattggagtgattacaattaatggccgccgtttacaacgcgggctggaaaacctgcgttcccaactaatgcttggaaacatcccttttgccgcnnn

SEQ ID NO: 27890 - DNA, 1328 bp, Homo sapiens; identical to SEQ ID NO: 22034
  misc_feature 1324, 1325, 1326, 1327, 1328: n = A,T,C or G

SEQ ID NO: 27891 - DNA, 609 bp, Homo sapiens; identical to SEQ ID NO: 22035
  misc_feature 606, 607, 608, 609: n = A,T,C or G

SEQ ID NO: 27892 - DNA, 408 bp, Homo sapiens; identical to SEQ ID NO: 22036

SEQ ID NO: 27893 - DNA, 745 bp, Homo sapiens; identical to SEQ ID NO: 20943
  misc_feature 1, 2, 3, 4, 5, 6, 7, 8, 9, 10, 11, 12, 741, 742, 743, 744,745: n = A,T,C or G

SEQ ID NO: 27894 - DNA, 906 bp, Homo sapiens; identical to SEQ ID NO: 22038
  misc_feature 1, 2, 864, 902, 906: n = A,T,C or G

SEQ ID NO: 27895 - DNA, 2865 bp, Homo sapiens; identical to SEQ ID NO: 22039
  misc_feature 1, 2, 3, 4, 5, 6, 7, 8, 9, 10, 2865: n = A,T,C or G

SEQ ID NO: 27896 - DNA, 420 bp, Homo sapiens; identical to SEQ ID NO: 22040

SEQ ID NO: 27897 - DNA, 584 bp, Homo sapiens; identical to SEQ ID NO: 22041

SEQ ID NO: 27898 - DNA, 351 bp, Homo sapiens; identical to SEQ ID NO: 22042
  misc_feature 347, 348, 349, 350, 351: n = A,T,C or G

SEQ ID NO: 27899 - DNA, 932 bp, Homo sapiens; identical to SEQ ID NO: 22043
  misc_feature 445: n = A,T,C or G

SEQ ID NO: 27900 - DNA, 1559 bp, Homo sapiens; identical to SEQ ID NO: 22044
  misc_feature 1: n = A,T,C or G

SEQ ID NO: 27901 - DNA, 342 bp, Homo sapiens; identical to SEQ ID NO: 22045

SEQ ID NO: 27902 - DNA, 745 bp, Homo sapiens; identical to SEQ ID NO: 20943
  misc_feature 1, 2, 3, 4, 5, 6, 7, 8, 9, 10, 11, 12, 741, 742, 743, 744,745: n = A,T,C or G

SEQ ID NO: 27903 - DNA, 745 bp, Homo sapiens; identical to SEQ ID NO: 20943
  misc_feature 1, 2, 3, 4, 5, 6, 7, 8, 9, 10, 11, 12, 741, 742, 743, 744,745: n = A,T,C or G

SEQ ID NO: 27904 - DNA, 623 bp, Homo sapiens; identical to SEQ ID NO: 22048
  misc_feature 1, 2, 3, 4, 618, 623: n = A,T,C or G

SEQ ID NO: 27905 - DNA, 720 bp, Homo sapiens; identical to SEQ ID NO: 22084

SEQ ID NO: 27906 - DNA, 1063 bp, Homo sapiens; identical to SEQ ID NO: 22049

SEQ ID NO: 27907 - DNA, 1086 bp, Homo sapiens; identical to SEQ ID NO: 22050
  misc_feature 1, 2, 3, 4, 5, 6, 7, 8, 9, 10, 11, 12, 13, 14, 15, 16, 17,1082, 1083, 1084, 1085, 1086: n = A,T,C or G

SEQ ID NO: 27908 - DNA, 970 bp, Homo sapiens; identical to SEQ ID NO: 22051
  misc_feature 116, 970: n = A,T,C or G

SEQ ID NO: 27909 - DNA, 455 bp, Homo sapiens; identical to SEQ ID NO: 22052

SEQ ID NO: 27910 - DNA, 7945 bp, Homo sapiens
  misc_feature 1, 7939, 7940, 7941, 7942, 7943, 7944, 7945: n = A,T,C or G
nacgcgtcggcccacgcgtccggcggctggagcggtggcggcggcagaggcggcggctccagcttcggctccggctcgggctcgggctccggctccggctccggctccggctccagctcgggtggcggtggcgggagcgggaccaggtggaggcggcggcggcagaggagtgggagcagcggccctagcggcttgcggggggacatgcggaccgacggcccctggataggcggaaggagtggaggccctggtgcccggcccttggtgctgagtatccagcaagagtgaccggggtgaagaagcaaagactcggttgattgtcctgggctgtggctggctgtggagctagagccctggatggcccctgagccagccccagggaggacgatggtgccccttgtgcctgcactggtgatgcttggtttggtggcaggcgcccatggtgacagcaaacctgtcttcattaaagtccctgaggaccagactgggctgtcaggaggggtagcctccttcgtgtgccaagctacaggagaacccaagccgcgcatcacatggatgaagaaggggaagaaagtcagctcccagcgcttcgaggtcattgagtttgatgatggggcagggtcagtgcttcggatccagccattgcgggtgcagcgagatgaagccatctatgagtgtacagctactaacagcctgggtgagatcaacactagtgccaagctctcagtgctcgaagaggaacagctgccccctgggttcccttccatcgacatggggcctcagctgaaggtggtggagaaggcacgcacagccaccatgctatgtgccgcaggcggaaatccagaccctgagatttcttggttcaaggacttccttcctgtagaccctgccacgagcaacggccgcatcaagcagctgcgttcaggtgccttgcagatagagagcagtgaggaatccgaccaaggcaagtacgagtgtgtggcgaccaactcggcaggcacacgttactcagcccctgcgaacctgtatgtgcgagtgcgccgcgtggctcctcgtttctccatccctcccagcagccaggaggtgatgccaggcggcagcgtgaacctgacatgcgtggcagtgggtgcacccatgccctacgtgaagtggatgatgggggccgaggagctcaccaaggaggatgagatgccagttggccgcaacgtcctggagctcagcaatgtcgtacgctctgccaactacacctgtgtggccatctcctcgctgggcatgatcgaggccacagcccaggtcacagtgaaagctcttccaaagcctccgattgatcttgtggtgacagagacaactgccaccagtgtcaccctcacctgggactctgggaactcggagcctgtaacctactatggcatccagtaccgcgcagcgggcacggagggcccctttcaggaggtggatggtgtggccaccacccgctacagcattggcggcctcagccctttctcggaatatgccttccgcgtgctggcggtgaacagcatcgggcgagggccgcccagcgaggcagtgcgggcacgcacgggagaacaggcgccctccagcccaccgcgccgcgtgcaggcacgcatgctgagcgccagcaccatgctggtgcagtgggagcctcccgaggagcccaacggcctggtgcggggataccgcgtctactatactccggactcccgccgccccccgaacgcctggcacaagcacaacaccgacgcggggctcctcacgaccgtgggcagcctgctgcctggcatcacctacagcctgcgcgtgcttgccttcaccgccgtgggcgatggccctcccagccccaccatccaggtcaagacgcagcagggagtgcctgcccagcccgcggacttccaggccgaggtggagtcggacaccaggatccagctctcgtggctgctgccccctcaggagcggatcatcatgtatgaactggtgtactgggcggcagaggacgaagaccaacagcacaaggtcaccttcgacccaacctcctcctacacactagaggacctgaagcctgacacactctaccgcttccagctggctgcacgctcggatatgggggtgggcgtcttcacccccaccattgaggcccgcacagcccagtccaccccctccgcccctccccagaaggtgatgtgtgtgagcatgggctccaccacggtccgggtaagttgggtcccgccgcctgccgacagccgcaacggcgttatcacccagtactccgtggcccacgaggcggtggacggcgaggaccgcgggcggcatgtggtggatggcatcagccgtgagcactccagctgggacctggtgggcctggagaagtggacggagtaccgggtgtgggtgcgggcacacacagacgtgggccccggccccgagagcagcccggtgctggtgcgcaccgatgaggacgtgcccagcgggcctccgcggaaggtggaggtggagccactgaactccactgctgtgcatgtctactggaagctgcctgtccccagcaagcagcatggccagatccgcggctaccaggtcacctacgtgcggctggagaatggcgagccccgtggactccccatcatccaagacgtcatgctagccgaggcccagtggcggccagaggagtccgaggactatgaaaccactatcagcggcctgaccccggagaccacctactccgttactgttgctgcctataccaccaagggggatggtgcccgcagcaagcccaaaattgtcactacaacaggtgcagtcccaggccggcccaccatgatgatcagcaccacggccatgaacactgcgctgctccagtggcacccacccaaggaactgcctggcgagctgctgggctaccggctgcagtactgccgggccgacgaggcgcggcccaacaccatagatttcggcaaggatgaccagcacttcacagtcaccggcctgcacaaggggaccacctacatcttccggcttgctgccaagaaccgggctggcttgggtgaggagttcgagaaggagatcaggacccccgaggacctgcccagcggcttcccccaaaacctgcatgtgacaggactgaccacgtctaccacagaactggcctgggacccgccagtgctggcggagaggaacgggcgcatcatcagctacaccgtggtgttccgagacatcaacagccaacaggagctgcagaacatcacgacagacacccgctttacccttactggcctcaagccagacaccacttacgacatcaaggtccgcgcatggaccagcaaaggctctggcccactcagccccagcatccagtcccggaccatgccggtggagcaagtgtttgccaagaacttccgggtggcggctgcaatgaagacgtctgtgctgctcagctgggaggttcccgactcctataagtcagctgtgccctttaagattctgtacaatgggcagagtgtggaggtggacgggcactcgatgcggaagctgatcgcagacctgcagcccaacacagagtactcgtttgtgctgatgaaccgtggcagcagcgcagggggcctgcagcacctggtgtccatccgcacagcccccgacctcctgcctcacaagccgctgcctgcctctgcctacatagaggacggccgcttcgatctctccatgccccatgtgcaagacccctcgcttgtcaggtggttctacattgttgtggtacccattgaccgtgtgggcgggagcatgctgacgccaaggtggagcacacccgaggaactggagctggacgagcttctagaagccatcgagcaaggcggagaggagcagcggcggcggcggcggcaggcagaacgtctgaagccatatgtggctgctcaactggatgtgctcccggagacctttaccttgggggacaagaagaactaccggggcttctacaaccggcccctgtctccggacttgagctaccagtgctttgtgcttgcctccttgaaggaacccatggaccagaagcgctatgcctccagcccctactcggatgagatcgtggtccaggtgacaccagcccagcagcaggaggagccggagatgctgtgggtgacgggtcccgtgctggcagtcatcctcatcatcctcattgtcatcgccatcctcttgttcaaaaggaaaaggacccactctccgtcctctaaggatgagcagtcgatcggactgaaggactccttgctggcccactcctctgaccctgtggagatgcggaggctcaactaccagaccccaggtatgcgagaccacccacccatccccatcaccgacctggcggacaacatcgagcgcctcaaagccaacgatggcctcaagttctcccaggagtatgagtccatcgaccctggacagcagttcacgtgggagaattcaaacctggaggtgaacaagcccaagaaccgctatgcgaatgtcatcgcctacgaccactctcgagtcatccttacctctatcgatggcgtccccgggagtgactacatcaatgccaactacatcgatggctaccgcaagcagaatgcctacatcgccacgcagggccccctgcccgagaccatgggcgatttctggagaatggtgtgggaacagcgcacggccactgtggtcatgatgacacggctggaggagaagtcccgggtaaaatgtgatcagtactggccagcccgtggcaccgagacctgtggccttattcaggtgaccctgttggacacagtggagctggccacatacactgtgcgcaccttcgcactccacaagagtggctccagtgagaagcgtgagctgcgtcagtttcagttcatggcctggccagaccatggagttcctgagtacccaactcccatcctggccttcctacgacgggtcaaggcctgcaaccccctagacgcagggcccatggtggtgcactgcagcgcgggcgtgggccgcaccggctgcttcatcgtgattgatgccatgttggagcggatgaagcacgagaagacggtggacatctatggccacgtgacctgcatgcgatcacagaggaactacatggtgcagacggaggaccagtacgtgttcatccatgaggcgctgctggaggctgccacgtgcggccacacagaggtgcctgcccgcaacctgtatgcccacatccagaagctgggccaagtgcctccaggggagagtgtgaccgccatggagctcgagttcaagttgctggccagctccaaggcccacacgtcccgcttcatcagcgccaacctgccctgcaacaagttcaagaaccggctggtgaacatcatgccctacgaattgacccgtgtgtgtctgcagcccatccgtggtgtggagggctctgactacatcaatgccagcttcctggatggttatagacagcagaaggcctacatagctacacaggggcctctggcagagagcaccgaggacttctggcgcatgctatgggagcacaattccaccatcatcgtcatgctgaccaagcttcgggagatgggcagggagaaatgccaccagtactggccagcagagcgctctgctcgctaccagtactttgttgttgacccgatggctgagtacaacatgccccagtatatcctgcgtgagttcaaggtcacggatgcccgggatgggcagtcaaggacaatccggcagttccagttcacagactggccagagcagggcgtgcccaagacaggcgagggattcattgacttcatcgggcaggtgcataagaccaaggagcagtttggacaggatgggcctatcacggtgcactgcagtgctggcgtgggccgcaccggggtgttcatcactctgagcatcgtcctggagcgcatgcgctatgagggcgtggtcgacatgtttcagaccgtgaagaccctgcgtacacagcgtcctgccatggtgcagacagaggaccagtatcagctgtgctaccgtgcggccctggagtacctcggcagctttgaccactatgcaacgtaactaccgctcccctctcctccgccacccccgccgtggggctccggaggggacccagctcctctgagccataccgaccatcgtccagccctcctacgcagatgctgtcactggcagagcacagcccacggggatcacagcgtttcaggaacgttgccacaccaatcagagagcctagaacatccctgggcaagtggatggcccagcaggcaggcactgtggcccttctgtccaccagacccacctggagcccgcttcaagctctctgttgcgctcccgcatttctcatgcttcttctcatggggtggggttggggcaaagcctcctttttaatacattaagtggggtagactgagggattttagcctcttccctctgatttttcctttcgcgaatccgtatctgcagaatgggccactgtaggggttggggtttattttgttttgtttttttttttcttgagttcactttggatccttattttgtatgacttctgctgaaggacagaacattgccttcctcgtgcagagctggggctgccagcctgagcggaggctcggccgtgggccgggaggcagtgctgatccggctgctcctccagcccttcagacgagatcctgtttcagctaaatgcagggaaactcaatgtttttttaagttttgttttccctttaaagcctttttttaggccacattgacagtggtgggcggggagaagatagggaacactcatccctggtcgtctatcccagtgtgtgtttaacattcacagcccagaaccacagatgtgtctgggagagcctggcaaggcattcctcatcaccatcgtgtttgcaaaggttaaaacaaaaacaaaaaaccacaaaaataaaaaacaaaaaaaacaaaaaacccaagaaaaaaaaaaagagtcagcccttggcttctgcttcaaaccctcaagaggggaagcaactccgtgtgcctggggttcccgagggagctgctggctgacctgggcccacagagcctggctttggtccccagcattgcagtatggtgtggtgtttgtaggctgtggggtctggctgtgtggccaaggtgaatagcacaggttagggtgtgtgccacaccccatgcacctcagggccaagcgggggcgtggctggcctttcaggtccaggccagtgggcctggtagcacatgtctgtcctcagagcaggggccagatgattttcctccctggtttgcagctgttttcaaagcccccgataatcgctcttttccactccaagatgccctcataaaccaatgtggcaagactactggacttctatcaatggtactctaatcagtccttattatcccagcttgctgaggggcagggagagcgcctcttcctctgggcagcgctatctagataggtaagtgggggcggggaagggtgcatagctgttttagctgagggacgtggtgccgacgtccccaaacctagctaggctaagtcaagatcaacattccagggttggtaatgttggatgatgaaacattcatttttaccttgtggatgctagtgctgtagagttcactgttgtacacagtctgttttctatttgttaagaaaaactacagcatcattgcataattcttgatggtaataaatttgaataatcagaatttcttacaaaaaaaaaaaaaaaaaaaaaaaaataaaaacaaaaagggaaaagaaaaaaaatatcccaggagggggccccaatattagacgataacccaggtttttgggtcaaagagggccccaaaaggggggccggattaaaagcagagacgggcgggtgtaaaaggcgtgcggggaaacggcccgggactgggaaagaacacnnnnnnn

SEQ ID NO: 27911 - DNA, 1321 bp, Homo sapiens; identical to SEQ ID NO: 22053
  misc_feature 1, 2, 1320, 1321: n = A,T,C or G

SEQ ID NO: 27912 - DNA, 2111 bp, Homo sapiens; identical to SEQ ID NO: 22054
  misc_feature 1, 2, 3, 4, 5, 6, 7, 8, 2111: n = A,T,C or G

SEQ ID NO: 27913 - DNA, 4646 bp, Homo sapiens; identical to SEQ ID NO: 22055
  misc_feature 1: n = A,T,C or G

SEQ ID NO: 27914 - DNA, 3224 bp, Homo sapiens
  misc_feature 1: n = A,T,C or G
nccgaacacaccgtacaattttcagccgcagtacattctttgttactacattacgtctaattgtataatcttccctcgagcttataatttcctagctgtaggtttcgcccattattccaccccaccaccaattaagggtctctgtccccaatattccccgtcacgacagttttccccaccttcatactgctttttatataccgcgctccccctccttctgttttaaataaattctgctctctccttatggggtcccccctgtctaaacaaaaaacgggtcggttttttccggcccccccgggttttttttttcccctctctttttttttttatagcagctttttttttttttttttttttttttttttttttactcaaagactttcttttattagtacatgggctgggattgatgggaagggacagatgtagttggcaaccatggttagcatcggatgcccatcccaatggccatgaatgtgccaaaggtgccgccactctgcatcatggttttcccaatgccgcccatcagctctcgaccccgcattccgatcctgagacaggaaaaggtgccgaagagcgccccggccgccatgcccacggcgcaacccatcacgaagcccattttgacacggtcgaagcagcttggctgggactgtccgtagggacccacggccaccggcatctcacctcgctcgcgggctgggtcgctcagctctacgtctctcacggaaaacgacggggagtgcgctcgcggcccgatgaatcgcttccggagcgccggcagcacttccgggagcctggggcccaggactgcagcggcttcggaaggtgggctctgccagcgggaccatgctgctccgagccgcttggaggcgggcggcagtggcggtgacagcggctccagggccgaagcccgcggcgcccactcgggggctgcgcctgcgcgttggagaccgtgctcctcagtctgcggttcccgcagatacagccgctgccccggaggtggggccagtgctgcgacctctctatatggatgtgcaagctacaactcctctggacccccgggtgcttgatgccatgctcccttacctaatcaactactatgggaacccacactcccggacacatgcttatggctgggagagtgaggcagccatggaacgtgctcgtcagcaagtagcatctctgattggagctgatcctcgtgagatcatttttactagtggtgctactgaatccaacaacatagcaattaagggggtggcccgattctacaggtcacggaaaaagcacttgatcaccacccagacagaacacaaatgtgtcttggactcctgccgttcactggaagctgagggctttcaggtcacctacctcccagtgcagaagagtgggatcattgacctaaaggaactagaggctgctatccagccagatactagcctggtgtcagtcatgactgtgaacaatgagattggagtgaagcagcctattgcagaaatagggcggatttgcagttccagaaaggtatatttccatactgatgcagcccaggctgttggaaaaatcccacttgatgtcaatgacatgaaaattgatctcatgagcattagtggtcacaaaatctacggtcccaaaggggttggtgccatctacatccgtcgccggccccgtgtgcgtgtggaggccctgcagagtggaggggggcaggagcggggtatgcggtctgggacagtgcccacacccttagtggtggggctgggggctgcgtgtgaggtggcacagcaagagatggagtatgaccacaagcgaatctcaaagttgtcagagcggctgatacagaatataatgaagagccttccagatgtggtgatgaatggggaccctaagcaccattatcccggctgtatcaacctctcctttgcatatgtggaaggggaaagtctgctgatggcactgaaggacgttgccttatcctcagggagtgcctgcacctctgcatccctggagccctcttatgtgcttagagcaattggcactgatgaggatttagcgcactcttctatcaggtttggaattggccgcttcactacagaggaggaagtggactacacagtggagaaatgcattcagcatgtgaagcgtcttcgagaaatgagccctctctgggagatggttcaggatggcattgacctcaagagcatcaagtggacccaacactagaagaatagggccctgactttgtgctggtctggcccctcctgcctcaccaacccgtgcacaaccagacaccttgttacacctagtggatgctctagattggtatagaccagttgacttcagcatcagtccacctctatgacagaaacacaagaaaactgtctttccctagcttcagttccttgggtgtggagcactccccatttcttctcgggtcttaaagtgtgtggacattttcatcccgaagccatagagacatttgctgtcatattgctgctgggcacatctgtgctcttggtgaggagagcaagaggaaccagaagaagtctctttggtcagggaccatgatgctctacatggacatttgagtcttcgtcttctgctgctgctcggctggaccagcttctttaacagcaagcataatccacttcaatgtaatattttctgtagctccaaaggctatctcttcatattgactgcagacagactgaatggacagtttcttagagggcttgtctcctttctacccttgtcctctttcctttcctttgacctaatggagctagaaatatgtctgtgactccaccagttattctaataatttgttttcttgaaaattgttaatttcaagactggagaaataaactcaccttctatttactctgtgactttatgagaggttgagggaaaagtggaagctgtacttgggaattgtggagaagaccgccactccatctgatttgcataaatgactcagtgggcttttgtatctcttcatttaagaattatttgaatgcctgccaggagccagatttgttctgggtattaggaatacactggttaacaggaccaaaaaagaccctgccctcactgagttttaaattttagtggagagatggaaaataattaaacaaataaacaatgttatagattgtgataagtgcaaaaaaaaaaaaaaaaaaagatctttaattaagcggccgcaagcttattccctttag

SEQ ID NO: 27915 - DNA, 1548 bp, Homo sapiens; identical to SEQ ID NO: 22056
  misc_feature 1, 2, 3, 4, 5, 6, 7, 8, 9, 10, 11, 12, 13, 14, 15, 16, 17,18, 19, 20, 1548: n = A,T,C or G

SEQ ID NO: 27916 - DNA, 780 bp, Homo sapiens; identical to SEQ ID NO: 22057
  misc_feature 1, 772, 773, 774, 775, 776, 777, 778, 779, 780: n = A,T,C or G

SEQ ID NO: 27917 - DNA, 1884 bp, Homo sapiens; identical to SEQ ID NO: 22058
  misc_feature 1, 1870, 1871, 1872, 1873, 1874, 1875, 1876, 1877, 1878,1879, 1880, 1881, 1882, 1883, 1884: n = A,T,C or G

SEQ ID NO: 27918 - DNA, 690 bp, Homo sapiens; identical to SEQ ID NO: 22059

SEQ ID NO: 27919 - DNA, 2129 bp, Homo sapiens; identical to SEQ ID NO: 22060

SEQ ID NO: 27920 - DNA, 1335 bp, Homo sapiens; identical to SEQ ID NO: 22061
  misc_feature 1, 2, 3, 4, 5, 1318, 1319, 1320, 1321, 1322, 1323, 1324,1325, 1326, 1327, 1328, 1329, 1330, 1331, 1332, 1333, 1334,1335: n = A,T,C or G

SEQ ID NO: 27921 - DNA, 634 bp, Homo sapiens; identical to SEQ ID NO: 21681
  misc_feature 1, 2, 3, 4, 20, 40, 617, 618, 619, 620, 621, 622, 623, 624,625, 626, 627, 628, 629, 630, 631, 632, 633, 634: n = A,T,C or G

SEQ ID NO: 27922 - DNA, 1335 bp, Homo sapiens; identical to SEQ ID NO: 22061
  misc_feature 1, 2, 3, 4, 5, 1318, 1319, 1320, 1321, 1322, 1323, 1324,1325, 1326, 1327, 1328, 1329, 1330, 1331, 1332, 1333, 1334,1335: n = A,T,C or G

SEQ ID NO: 27923 - DNA, 1367 bp, Homo sapiens; identical to SEQ ID NO: 22064
  misc_feature 1367: n = A,T,C or G

SEQ ID NO: 27924 - DNA, 2199 bp, Homo sapiens; identical to SEQ ID NO: 20954
  misc_feature 1, 2, 3, 4, 2198, 2199: n = A,T,C or G

SEQ ID NO: 27925 - DNA, 2491 bp, Homo sapiens; identical to SEQ ID NO: 23206
  misc_feature 1, 2, 3, 4, 5, 6: n = A,T,C or G

SEQ ID NO: 27926 - DNA, 1001 bp, Homo sapiens; identical to SEQ ID NO: 21314
  misc_feature 681, 682, 683, 684, 685, 686, 687, 688, 689, 690, 691, 692,693, 694, 695, 696, 697, 698, 699, 700, 701, 702, 703, 704,705, 706, 707, 708, 709, 710, 711, 712, 713, 714, 715, 716,717, 718: n = A,T,C or G

SEQ ID NO: 27927 - DNA, 1942 bp, Homo sapiens; identical to SEQ ID NO: 22067
  misc_feature 1937, 1938, 1939, 1940, 1941, 1942: n = A,T,C or G

SEQ ID NO: 27928 - DNA, 1765 bp, Homo sapiens
  misc_feature 1, 2, 3, 4, 5, 6, 7, 1765: n = A,T,C or G
nnnnnnngcccttcgtaaagatggccgcggaggcttttggagccaactgggagcgcagtacgcgttttctggagcatgggcagaggagacaggaacaagcgtagcatccgtgagcaccgattggctgaagcgagcaccccgggagctgactggctccgccattcgcgggaaggcgtttgtggtgccagagaaaagtagccagagcggcgcagtggcggccgcgttctgtggttttccgctattcccccagacccgcaccttctcggcctctttgcggagaatcgtgaccaagatgtggaacagtggattcgaaagctatggcagctcctcatacgggggagccggcggctacacgcagtccccggggggctttggatcgcccgcaccttctcaagccgaaaagaaatcaagagcccgagcccagcacattgtgccctgtactatatctcagctgctttctgccactttggttgatgaagtgttcagaattgggaatgttgagatttcacaggtcactattgtggggatcatcagacatgcagagaaggctccaaccaacattgtttacaaaatagatgacatgacagctgcacccatggacgttcgccagtgggttgacacagatgacaccagcagtgaaaacactgtggttcctccagaaacatatgtgaaagtggcaggccacctgagatcttttcagaacaaaaagagcctggtagcctttaagatcatgcccctggaggatatgaatgagttcaccacacatattctggaagtgatcaatgcacacatggtactaagcaaagccaacagccagccctcagcagggagagcacctatcagcaatccaggaatgagtgaagcagggaactttggtgggaatagcttcatgccagcaaatggcctcactgtggcccaaaaccaggtgttgaatttgattaaggcttgtccaagacctgaagggttgaactttcaggatctcaagaaccagctgaaacacatgtctgtatcctcaatcaagcaagctgtggattttctgagcaatgaggggcacatctattctactgtggatgatgaccattttaaatccacagatgcagaataactggatctaactgggtacctgagatattttacagctggacctagtttcacaatctgttgtctccagctctgcatatgtctggccagggggcttctaggaagtaggtttcatctatcaaatgtctcctctgacttccttttgaaacttactgctcttctgttttattttgttttgtttgaagctcagagggagatgggcaattgacagggatgcaatccagggtgggatttcttgaggaagttacaaataagcttgttacaacatcaagatagatggaattggaaggatgctaccaggagagtacttacatagtgctcaggagtttctcttcttaaaatgtttactgctgaaagatgagcaggaccagggcgttataggcagagccctagccgagaaacctgctggcctctgcctgttttcatttcccactttggttgtgtggcattactttcagaattgcactttcctgcttgtcatgactttttgacacacttgccatgacgtgtgtttctgtgaacatgaagttctgcggtagtgcctccaggggcagaggaaaagaagaagtgttactgcattttgtacaaaataaatacagtcatatgtttaataaaacagttctattgtagtaacaaaaaaaaaaaaaaaaacggacgcgtgggn

SEQ ID NO: 27929 - DNA, 474 bp, Homo sapiens; identical to SEQ ID NO: 22068
  misc_feature 473, 474: n = A,T,C or G

SEQ ID NO: 27930 - DNA, 1211 bp, Homo sapiens; identical to SEQ ID NO: 20419
  misc_feature 1207, 1208, 1209, 1210, 1211: n = A,T,C or G

SEQ ID NO: 27931 - DNA, 2258 bp, Homo sapiens; identical to SEQ ID NO: 22170

SEQ ID NO: 27932 - DNA, 966 bp, Homo sapiens; identical to SEQ ID NO: 22070
  misc_feature 966: n = A,T,C or G

SEQ ID NO: 27933 - DNA, 706 bp, Homo sapiens; identical to SEQ ID NO: 22071
  misc_feature 1, 2, 700, 701, 702, 703, 704, 705, 706: n = A,T,C or G

SEQ ID NO: 27934 - DNA, 439 bp, Homo sapiens; identical to SEQ ID NO: 22072
  misc_feature 439: n = A,T,C or G

SEQ ID NO: 27935 - DNA, 1884 bp, Homo sapiens; identical to SEQ ID NO: 22058
  misc_feature 1, 1870, 1871, 1872, 1873, 1874, 1875, 1876, 1877, 1878,1879, 1880, 1881, 1882, 1883, 1884: n = A,T,C or G

SEQ ID NO: 27936 - DNA, 1405 bp, Homo sapiens; identical to SEQ ID NO: 22074
  misc_feature 1396, 1397, 1398, 1399, 1400, 1401, 1402, 1403, 1404, 1405: n = A,T,C or G

SEQ ID NO: 27937 - DNA, 414 bp, Homo sapiens; identical to SEQ ID NO: 21407

SEQ ID NO: 27938 - DNA, 2815 bp, Homo sapiens; identical to SEQ ID NO: 22076
  misc_feature 1, 2, 3, 4, 5, 2813, 2814, 2815: n = A,T,C or G

SEQ ID NO: 27939 - DNA, 388 bp, Homo sapiens; identical to SEQ ID NO: 22077
  misc_feature 386, 387, 388: n = A,T,C or G

SEQ ID NO: 27940 - DNA, 3132 bp, Homo sapiens; identical to SEQ ID NO: 20928
  misc_feature 3132: n = A,T,C or G

SEQ ID NO: 27941 - DNA, 452 bp, Homo sapiens; identical to SEQ ID NO: 22027
  misc_feature 1, 441, 442, 443, 444, 445, 446, 447, 448, 449, 450, 451,452: n = A,T,C or G

SEQ ID NO: 27942 - DNA, 1432 bp, Homo sapiens; identical to SEQ ID NO: 22032

SEQ ID NO: 27943 - DNA, 459 bp, Homo sapiens; identical to SEQ ID NO: 21058
  misc_feature 1, 2: n = A,T,C or G

SEQ ID NO: 27944 - DNA, 745 bp, Homo sapiens; identical to SEQ ID NO: 20943
  misc_feature 1, 2, 3, 4, 5, 6, 7, 8, 9, 10, 11, 12, 741, 742, 743, 744,745: n = A,T,C or G

SEQ ID NO: 27945 - DNA, 420 bp, Homo sapiens; identical to SEQ ID NO: 21506

SEQ ID NO: 27946 - DNA, 720 bp, Homo sapiens; identical to SEQ ID NO: 22084

SEQ ID NO: 27947 - DNA, 607 bp, Homo sapiens; identical to SEQ ID NO: 22085
  misc_feature 1, 2, 3, 4: n = A,T,C or G

SEQ ID NO: 27948 - DNA, 2085 bp, Homo sapiens; identical to SEQ ID NO: 22086
  misc_feature 2081, 2082, 2083, 2084, 2085: n = A,T,C or G

SEQ ID NO: 27949 - DNA, 3132 bp, Homo sapiens; identical to SEQ ID NO: 20928
  misc_feature 3132: n = A,T,C or G

SEQ ID NO: 27950 - DNA, 1406 bp, Homo sapiens; identical to SEQ ID NO: 22088
  misc_feature 1, 2: n = A,T,C or G

SEQ ID NO: 27951 - DNA, 1481 bp, Homo sapiens; identical to SEQ ID NO: 21476
  misc_feature 1, 2, 3, 4: n = A,T,C or G

SEQ ID NO: 27952 - DNA, 352 bp, Homo sapiens; identical to SEQ ID NO: 22090
  misc_feature 1, 2, 3: n = A,T,C or G

SEQ ID NO: 27953 - DNA, 1603 bp, Homo sapiens; identical to SEQ ID NO: 22091
  misc_feature 1, 2, 1602, 1603: n = A,T,C or G

SEQ ID NO: 27954 - DNA, 800 bp, Homo sapiens; identical to SEQ ID NO: 22092
  misc_feature 1, 22, 40, 44, 74, 113, 795, 796, 797, 798, 799, 800: n = A,T,C or G

SEQ ID NO: 27955 - DNA, 315 bp, Homo sapiens; identical to SEQ ID NO: 22093

SEQ ID NO: 27956 - DNA, 1432 bp, Homo sapiens; identical to SEQ ID NO: 22032

SEQ ID NO: 27957 - DNA, 1380 bp, Homo sapiens; identical to SEQ ID NO: 22095

SEQ ID NO: 27958 - DNA, 604 bp, Homo sapiens; identical to SEQ ID NO: 22096
  misc_feature 1, 2, 3, 4, 5, 6, 7, 599, 600, 601, 602, 603, 604: n = A,T,C or G

SEQ ID NO: 27959 - DNA, 505 bp, Homo sapiens; identical to SEQ ID NO: 20929

SEQ ID NO: 27960 - DNA, 452 bp, Homo sapiens; identical to SEQ ID NO: 22027
  misc_feature 1, 441, 442, 443, 444, 445, 446, 447, 448, 449, 450, 451,452: n = A,T,C or G

SEQ ID NO: 27961 - DNA, 817 bp, Homo sapiens; identical to SEQ ID NO: 22099
  misc_feature 1, 2, 817: n = A,T,C or G

SEQ ID NO: 27962 - DNA, 745 bp, Homo sapiens; identical to SEQ ID NO: 20943
  misc_feature 1, 2, 3, 4, 5, 6, 7, 8, 9, 10, 11, 12, 741, 742, 743, 744,745: n = A,T,C or G

SEQ ID NO: 27963 - DNA, 745 bp, Homo sapiens; identical to SEQ ID NO: 20943
  misc_feature 1, 2, 3, 4, 5, 6, 7, 8, 9, 10, 11, 12, 741, 742, 743, 744,745: n = A,T,C or G

SEQ ID NO: 27964 - DNA, 612 bp, Homo sapiens; identical to SEQ ID NO: 22102
  misc_feature 1: n = A,T,C or G

SEQ ID NO: 27965 - DNA, 421 bp, Homo sapiens; identical to SEQ ID NO: 22103
  misc_feature 421: n = A,T,C or G

SEQ ID NO: 27966 - DNA, 1783 bp, Homo sapiens; identical to SEQ ID NO: 22104
  misc_feature 1180: n = A,T,C or G

SEQ ID NO: 27967 - DNA, 916 bp, Homo sapiens; identical to SEQ ID NO: 22106
  misc_feature 1, 2, 3, 4, 5, 6, 7, 8: n = A,T,C or G

SEQ ID NO: 27968 - DNA, 2425 bp, Homo sapiens; identical to SEQ ID NO: 22107
  misc_feature 2424, 2425: n = A,T,C or G

SEQ ID NO: 27969 - DNA, 336 bp, Homo sapiens; identical to SEQ ID NO: 22108

SEQ ID NO: 27970 - DNA, 672 bp, Homo sapiens; identical to SEQ ID NO: 22109
  misc_feature 1, 2, 3: n = A,T,C or G

SEQ ID NO: 27971 - DNA, 1380 bp, Homo sapiens; identical to SEQ ID NO: 20118
  misc_feature 1380: n = A,T,C or G

SEQ ID NO: 27972 - DNA, 343 bp, Homo sapiens; identical to SEQ ID NO: 22111

SEQ ID NO: 27973 - DNA, 348 bp, Homo sapiens; identical to SEQ ID NO: 22112

SEQ ID NO: 27974 - DNA, 439 bp, Homo sapiens; identical to SEQ ID NO: 22113
  misc_feature 438, 439: n = A,T,C or G

SEQ ID NO: 27975 - DNA, 489 bp, Homo sapiens; identical to SEQ ID NO: 22029
  misc_feature 1, 2, 3, 4, 488, 489: n = A,T,C or G

SEQ ID NO: 27976 - DNA, 817 bp, Homo sapiens; identical to SEQ ID NO: 22115
  misc_feature 1, 2, 3, 4, 48, 795, 796, 797, 798, 799, 800, 801, 802, 803,804, 805, 806, 807, 808, 809, 810, 811, 812, 813, 814, 815,816, 817: n = A,T,C or G

SEQ ID NO: 27977 - DNA, 1268 bp, Homo sapiens; identical to SEQ ID NO: 21760
  misc_feature 1, 2, 3, 4, 5, 6, 7, 8, 1266, 1267, 1268: n = A,T,C or G

SEQ ID NO: 27978 - DNA, 2258 bp, Homo sapiens; identical to SEQ ID NO: 22170

SEQ ID NO: 27979 - DNA, 3524 bp, Homo sapiens; identical to SEQ ID NO: 22117

SEQ ID NO: 27980 - DNA, 724 bp, Homo sapiens; identical to SEQ ID NO: 22118
  misc_feature 1, 719, 720, 721, 722, 723, 724: n = A,T,C or G

SEQ ID NO: 27981 - DNA, 1150 bp, Homo sapiens; identical to SEQ ID NO: 22119
  misc_feature 1147, 1148, 1149, 1150: n = A,T,C or G

SEQ ID NO: 27982 - DNA, 491 bp, Homo sapiens; identical to SEQ ID NO: 22120

SEQ ID NO: 27983 - DNA, 687 bp, Homo sapiens; identical to SEQ ID NO: 22121
  misc_feature 683, 684, 685, 686, 687: n = A,T,C or G

SEQ ID NO: 27984 - DNA, 502 bp, Homo sapiens; identical to SEQ ID NO: 22122
  misc_feature 502: n = A,T,C or G

SEQ ID NO: 27985 - DNA, 505 bp, Homo sapiens; identical to SEQ ID NO: 20929

SEQ ID NO: 27986 - DNA, 339 bp, Homo sapiens; identical to SEQ ID NO: 22124

SEQ ID NO: 27987 - DNA, 471 bp, Homo sapiens; identical to SEQ ID NO: 22125
  misc_feature 1: n = A,T,C or G

SEQ ID NO: 27988 - DNA, 2570 bp, Homo sapiens; identical to SEQ ID NO: 22126
  misc_feature 2569, 2570: n = A,T,C or G

SEQ ID NO: 27989 - DNA, 1042 bp, Homo sapiens; identical to SEQ ID NO: 22127
  misc_feature 1, 2, 3, 4, 1035, 1036, 1037, 1038, 1039, 1040, 1041, 1042: n = A,T,C or G

SEQ ID NO: 27990 - DNA, 1308 bp, Homo sapiens; identical to SEQ ID NO: 22128
  misc_feature 208, 209, 210, 211, 212, 213, 214, 215, 216, 217, 218, 219,220, 221, 222, 223, 224, 225, 226, 227, 228, 229, 230, 231: n = A,T,C or G

SEQ ID NO: 27991 - DNA, 604 bp, Homo sapiens; identical to SEQ ID NO: 22096
  misc_feature 1, 2, 3, 4, 5, 6, 7, 599, 600, 601, 602, 603, 604: n = A,T,C or G

SEQ ID NO: 27992 - DNA, 499 bp, Homo sapiens; identical to SEQ ID NO: 22130

SEQ ID NO: 27993 - DNA, 2486 bp, Homo sapiens; identical to SEQ ID NO: 22131
  misc_feature 581: n = A,T,C or G

SEQ ID NO: 27994 - DNA, 2115 bp, Homo sapiens; identical to SEQ ID NO: 22132
  misc_feature 1, 2112, 2113, 2114, 2115: n = A,T,C or G

SEQ ID NO: 27995 - DNA, 671 bp, Homo sapiens; identical to SEQ ID NO: 22133

SEQ ID NO: 27996 - DNA, 745 bp, Homo sapiens; identical to SEQ ID NO: 20943
  misc_feature 1, 2, 3, 4, 5, 6, 7, 8, 9, 10, 11, 12, 741, 742, 743, 744,745: n = A,T,C or G

SEQ ID NO: 27997 - DNA, 1245 bp, Homo sapiens; identical to SEQ ID NO: 22135

SEQ ID NO: 27998 - DNA, 4534 bp, Homo sapiens; identical to SEQ ID NO: 22136

SEQ ID NO: 27999 - DNA, 1159 bp, Homo sapiens; identical to SEQ ID NO: 22137
  misc_feature 1, 21, 44, 66, 85, 1158, 1159: n = A,T,C or G

SEQ ID NO: 28000 - DNA, 4378 bp, Homo sapiens; identical to SEQ ID NO: 22138
  misc_feature 1, 2, 3, 4369, 4370, 4371, 4372, 4373, 4374, 4375, 4376,4377, 4378: n = A,T,C or G

SEQ ID NO: 28001 - DNA, 953 bp, Homo sapiens; identical to SEQ ID NO: 22139
  misc_feature 1, 2, 3, 4, 952, 953: n = A,T,C or G

SEQ ID NO: 28002 - DNA, 3820 bp, Homo sapiens; identical to SEQ ID NO: 22140

SEQ ID NO: 28003 - DNA, 1294 bp, Homo sapiens; identical to SEQ ID NO: 22141
  misc_feature 1, 1293, 1294: n = A,T,C or G

SEQ ID NO: 28004 - DNA, 1262 bp, Homo sapiens; identical to SEQ ID NO: 22142
  misc_feature 1, 2, 1261, 1262: n = A,T,C or G

SEQ ID NO: 28005 - DNA, 772 bp, Homo sapiens; identical to SEQ ID NO: 22143
  misc_feature 1, 2, 3, 4, 5, 6, 7, 8, 9, 10, 11, 12, 13, 14, 15, 16, 17,18, 19, 20, 21, 22, 23: n = A,T,C or G

SEQ ID NO: 28006 - DNA, 745 bp, Homo sapiens; identical to SEQ ID NO: 20943
  misc_feature 1, 2, 3, 4, 5, 6, 7, 8, 9, 10, 11, 12, 741, 742, 743, 744,745: n = A,T,C or G

SEQ ID NO: 28007 - DNA, 407 bp, Homo sapiens; identical to SEQ ID NO: 22145
  misc_feature 407: n = A,T,C or G

SEQ ID NO: 28008 - DNA, 1966 bp, Homo sapiens; identical to SEQ ID NO: 22146
  misc_feature 1961, 1962, 1963, 1964, 1965, 1966: n = A,T,C or G

SEQ ID NO: 28009 - DNA, 571 bp, Homo sapiens; identical to SEQ ID NO: 22148
  misc_feature 1, 2, 3, 564, 571: n = A,T,C or G

SEQ ID NO: 28010 - DNA, 3551 bp, Homo sapiens; identical to SEQ ID NO: 22149
  misc_feature 3550, 3551: n = A,T,C or G

SEQ ID NO: 28011 - DNA, 3440 bp, Homo sapiens; identical to SEQ ID NO: 21306
  misc_feature 1, 2, 3438, 3439, 3440: n = A,T,C or G

SEQ ID NO: 28012 - DNA, 897 bp, Homo sapiens; identical to SEQ ID NO: 20923
  misc_feature 894, 895, 896, 897: n = A,T,C or G

SEQ ID NO: 28013 - DNA, 1721 bp, Homo sapiens; identical to SEQ ID NO: 22152
  misc_feature 1, 2, 3, 4, 5, 6, 7, 1721: n = A,T,C or G

SEQ ID NO: 28014 - DNA, 1268 bp, Homo sapiens; identical to SEQ ID NO: 21760
  misc_feature 1, 2, 3, 4, 5, 6, 7, 8, 1266, 1267, 1268: n = A,T,C or G

SEQ ID NO: 28015 - DNA, 897 bp, Homo sapiens; identical to SEQ ID NO: 20923
  misc_feature 894, 895, 896, 897: n = A,T,C or G

SEQ ID NO: 28016 - DNA, 429 bp, Homo sapiens; identical to SEQ ID NO: 22155

SEQ ID NO: 28017 - DNA, 866 bp, Homo sapiens; identical to SEQ ID NO: 22156
  misc_feature 1, 2, 3, 813, 845, 849, 866: n = A,T,C or G

SEQ ID NO: 28018 - DNA, 426 bp, Homo sapiens; identical to SEQ ID NO: 22157

SEQ ID NO: 28019 - DNA, 1063 bp, Homo sapiens; identical to SEQ ID NO: 22049

SEQ ID NO: 28020 - DNA, 397 bp, Homo sapiens; identical to SEQ ID NO: 22159

SEQ ID NO: 28021 - DNA, 2224 bp, Homo sapiens; identical to SEQ ID NO: 21832
  misc_feature 1, 2, 3, 4, 5, 6, 2220, 2221, 2222, 2223, 2224: n = A,T,C or G

SEQ ID NO: 28022 - DNA, 1752 bp, Homo sapiens; identical to SEQ ID NO: 22161

SEQ ID NO: 28023 - DNA, 1960 bp, Homo sapiens; identical to SEQ ID NO: 22162
  misc_feature 1, 2, 8, 1960: n = A,T,C or G

SEQ ID NO: 28024 - DNA, 3470 bp, Homo sapiens; identical to SEQ ID NO: 22163

SEQ ID NO: 28025 - DNA, 2216 bp, Homo sapiens; identical to SEQ ID NO: 22164
  misc_feature 1, 2, 3, 2215, 2216: n = A,T,C or G

SEQ ID NO: 28026 - DNA, 1242 bp, Homo sapiens; identical to SEQ ID NO: 22165
  misc_feature 1, 2, 3, 4, 5, 6, 7, 8, 1241, 1242: n = A,T,C or G

SEQ ID NO: 28027 - DNA, 2224 bp, Homo sapiens; identical to SEQ ID NO: 21832
  misc_feature 1, 2, 3, 4, 5, 6, 2220, 2221, 2222, 2223, 2224: n = A,T,C or G

SEQ ID NO: 28028 - DNA, 2216 bp, Homo sapiens; identical to SEQ ID NO: 22164
  misc_feature 1, 2, 3, 2215, 2216: n = A,T,C or G

SEQ ID NO: 28029 - DNA, 1268 bp, Homo sapiens; identical to SEQ ID NO: 21760
  misc_feature 1, 2, 3, 4, 5, 6, 7, 8, 1266, 1267, 1268: n = A,T,C or G

SEQ ID NO: 28030 - DNA, 9785 bp, Homo sapiens; identical to SEQ ID NO: 22169

SEQ ID NO: 28031 - DNA, 414 bp, Homo sapiens; identical to SEQ ID NO: 21407

SEQ ID NO: 28032 - DNA, 33 bp, Homo sapiens; identical to SEQ ID NO: 22172
  misc_feature 1: n = A,T,C or G

SEQ ID NO: 28033 - DNA, 3365 bp, Homo sapiens; identical to SEQ ID NO: 22173

SEQ ID NO: 28034 - DNA, 665 bp, Homo sapiens; identical to SEQ ID NO: 22174
  misc_feature 1, 2: n = A,T,C or G

SEQ ID NO: 28035 - DNA, 474 bp, Homo sapiens; identical to SEQ ID NO: 22175

SEQ ID NO: 28036 - DNA, 407 bp, Homo sapiens; identical to SEQ ID NO: 22145
  misc_feature 407: n = A,T,C or G

SEQ ID NO: 28037 - DNA, 1276 bp, Homo sapiens; identical to SEQ ID NO: 22177
  misc_feature 1273, 1274, 1275, 1276: n = A,T,C or G

SEQ ID NO: 28038 - DNA, 373 bp, Homo sapiens; identical to SEQ ID NO: 22178
  misc_feature 364, 365, 366, 367, 368, 369, 370, 371, 372, 373: n = A,T,C or G

SEQ ID NO: 28039 - DNA, 2423 bp, Homo sapiens; identical to SEQ ID NO: 22179
  misc_feature 1, 2402, 2403, 2404, 2405, 2406, 2407, 2408, 2409, 2410,2411, 2412, 2413, 2414, 2415, 2416, 2417, 2418, 2419, 2420,2421, 2422, 2423: n = A,T,C or G

SEQ ID NO: 28040 - DNA, 371 bp, Homo sapiens; identical to SEQ ID NO: 22180

SEQ ID NO: 28041 - DNA, 543 bp, Homo sapiens; identical to SEQ ID NO: 22181
  misc_feature 1, 538, 539, 540, 541, 542, 543: n = A,T,C or G

SEQ ID NO: 28042 - DNA, 2085 bp, Homo sapiens; identical to SEQ ID NO: 22086
  misc_feature 2081, 2082, 2083, 2084, 2085: n = A,T,C or G

SEQ ID NO: 28043 - DNA, 1598 bp, Homo sapiens; identical to SEQ ID NO: 22187
  misc_feature 1, 2, 3, 4, 5, 1597, 1598: n = A,T,C or G

SEQ ID NO: 28044 - DNA, 745 bp, Homo sapiens; identical to SEQ ID NO: 20943
  misc_feature 1, 2, 3, 4, 5, 6, 7, 8, 9, 10, 11, 12, 741, 742, 743, 744,745: n = A,T,C or G

SEQ ID NO: 28045 - DNA, 889 bp, Homo sapiens; identical to SEQ ID NO: 22189
  misc_feature 1, 2, 3, 4, 5, 6, 7, 8, 9, 10, 11, 12, 13, 14, 15, 16, 17: n = A,T,C or G

SEQ ID NO: 28046 - DNA, 301 bp, Homo sapiens; identical to SEQ ID NO: 20951
  misc_feature 301: n = A,T,C or G

SEQ ID NO: 28047 - DNA, 432 bp, Homo sapiens; identical to SEQ ID NO: 22192
  misc_feature 422, 423, 424, 425, 426, 427, 428, 429, 430, 431, 432: n = A,T,C or G

SEQ ID NO: 28048 - DNA, 1432 bp, Homo sapiens; identical to SEQ ID NO: 22032

SEQ ID NO: 28049 - DNA, 826 bp, Homo sapiens; identical to SEQ ID NO: 22194
  misc_feature 826: n = A,T,C or G

SEQ ID NO: 28050 - DNA, 4646 bp, Homo sapiens; identical to SEQ ID NO: 22055
  misc_feature 1: n = A,T,C or G

SEQ ID NO: 28051 - DNA, 720 bp, Homo sapiens; identical to SEQ ID NO: 22084

SEQ ID NO: 28052 - DNA, 2258 bp, Homo sapiens; identical to SEQ ID NO: 22170

SEQ ID NO: 28053 - DNA, 835 bp, Homo sapiens; identical to SEQ ID NO: 22197
  misc_feature 1, 2, 3, 4, 834, 835: n = A,T,C or G

SEQ ID NO: 28054 - DNA, 304 bp, Homo sapiens; identical to SEQ ID NO: 22198

SEQ ID NO: 28055 - DNA, 304 bp, Homo sapiens; identical to SEQ ID NO: 22198

SEQ ID NO: 28056 - DNA, 344 bp, Homo sapiens; identical to SEQ ID NO: 22201
  misc_feature 1, 341, 342, 343, 344: n = A,T,C or G

SEQ ID NO: 28057 - DNA, 4332 bp, Homo sapiens; identical to SEQ ID NO: 22202

SEQ ID NO: 28058 - DNA, 1632 bp, Homo sapiens; identical to SEQ ID NO: 22203
  misc_feature 1, 2, 3, 4, 5, 6, 1620, 1621, 1622, 1623, 1624, 1625, 1626,1627, 1628, 1629, 1630, 1631, 1632: n = A,T,C or G

SEQ ID NO: 28059 - DNA, 1415 bp, Homo sapiens; identical to SEQ ID NO: 23153
  misc_feature 1, 2, 3, 4, 5, 1409, 1410, 1411, 1412, 1413, 1414, 1415: n = A,T,C or G

SEQ ID NO: 28060 - DNA, 1632 bp, Homo sapiens; identical to SEQ ID NO: 22203
  misc_feature 1, 2, 3, 4, 5, 6, 1620, 1621, 1622, 1623, 1624, 1625, 1626,1627, 1628, 1629, 1630, 1631, 1632: n = A,T,C or G

SEQ ID NO: 28061 - DNA, 598 bp, Homo sapiens; identical to SEQ ID NO: 24431
  misc_feature 1, 594, 595, 596, 597, 598: n = A,T,C or G

SEQ ID NO: 28062 - DNA, 5414 bp, Homo sapiens
attcgcactcatcgtagtcatagcctttgcaggtgtaatagtaataatcgcggtcctgctcctcttcctccccttcttcttcatcctcatcatcctcatcctcatctgcattctgtgtagttttccagatctagcattcagtagcagaagcactttcactgacataatagtcttcctcttcatcttcctcttcctcttcctcttcatcttcctcttcctcttcttttgacacagatccaataatctttgtctgagggcagcacacatattcagtgccatggaactggtctaccccacatgggagcagcatgccgtagctatataaggtcattccctgagtcagacatgcctctttgactaccgtgtgccagtgctggtgattctcacacacctccatccgctctttgtggaaaaactggcacttttacggaacttagcagtacatcacttacaaattcaccctcgagacacttgaaaggtgtaacaaagcgactcttgcattgctttttgtccctccggcaccagttgtcaatactaacccgctggtttgcctccatcacatttgtgatctgtagctctggatacatctcctgacagtactgaagaacttcttcttttgtttcaaagcagctcttggtgcctgttggatcaggttcccatttcttcaatcacgtggagatgtgtcatcacctgggatttcatctgggccgccttttctgggtcaacagccaacacatgctggtaatgacggatggtatgtaagcgatctttgttctcagcacggacataacgccgtaaggcctggagaatgcgatgaggccgtggcgggtcagactgcaaggcagccaggtagttctccagagccatccgacggcggtcattcagcatagcttccactcgggccaggtgggtctccaccagctgctgcttctcactggctgcttccttctctaaagctttaaccatggcttggaagtgctgaatcagagtctgcctctctgctttggggaggttcttagcttgaagctctgcctcttcccattccttctttaccctgtccattcggttgcggtgccgaatctccagctgctccttagccttctggaagcgagcatgttcattatcatctgcagaggtctcgaaatacacatcaacatcattggttggcagaggagttggaggaactttgacatcatgagtaatttccttgtctgacatggtgccgtcgctgccgggttcagtaggattctcctcattgtagtcatctcctttgaaggtgtcatagtagtaatctcggtcctccaccacttcctccccttcttcctcatcctcatcatcctcatccacagctgcttctgtgaagtcttccagatctgcttcagtaggaaattcacttttataaacatcatagtcttcctcttcatcttcctcttcctcttcctcttcatcttcctcttcctcttcttttgacacagatccaataatctttgtctgagggcagcacacatattcagtgccatggaactggtctaccccacatgggagcagcatgccgtagctatataaggtcattccctgagtcagacatgcctctttgactaccgtgtgccagtgctggtgattctcacacacctccatccgctctttgtggaaaaactggcacttttctggaactagcaggacatcacttacaaattcacccacgagacacttgaaaggtgtaacaaagcgactcttgcattgctttttgtccctccggcaccagttgtcaatactaacccgctggtttgcctccatcacatttgtgatctgtagctctggatacatctcctgacagtactgaagaacttcttcttttgtttcaaagcagctcttgcagccaatgccggaacaggatttgctgttgctgagcctcaaatcgcaatgttttgtgggaagttaaatatgcatgtgaacattcagactgggaaatgggaacctgatccaacaggcaccaagagctgctttgaaacaaaagaagaagttcttcagtactgtcaggagatgtatccagagctacagatcacaaatgtgatggaggcaaaccagcgggttagtattgacaactggtgccggagggacaaaaagcaatgcaagagtcgctttgttacacctttcaagtgtctcgtgggtgaatttgtaagtgatgtcctgctagttccagaaaagtgccagtttttccacaaagagcggatggaggtgtgtgagaatcaccagcactggcacacggtagtcaaagaggcatgtctgactcagggaatgaccttatatagctacggcatgctgctcccatgtggggtagaccagttccatggcactgaatatgtgtgctgccctcagacaaagattattggatctgtgtcaaaagaagaggaagaggaagatgaagaggaagaggaagaggaagatgaagaggaagactatgatgtttataaaagtgaatttcctactgaagcagatctggaagacttcacagaagcagctgtggatgaggatgatgaggatgaggaagaaggggaggaagtggtggaggaccgagattactactatgacaccttcaaaggagatgactacaatgaggagaatcctactgaacccggcagcgacggcaccatgtcagacaaggaaattactcatgatgtcaaagctgtctgctcccaggaggcgatgacggggccctgccgggccgtgatgcctcgttggtacttcgacctctccaagggaaagtgcgtgcgctttatatatggtggctgcggcggcaacaggaacaattttgagtctgaggattattgtatggctgtgtgtaaagcgatgattcctccaactcctctgccaaccaatgatgttgatgtgtatttcgagacctctgcagatgataatgagcatgctcgcttccagaaggctaaggagcagctggagattcggcaccgcaaccgaatggacagggtaaagaaggaatgggaagaggcagagcttcaagctaagaacctccccaaagcagagaggcagactctgattcagcacttccaagccatggttaaagctttagagaaggaagcagccagtgagaagcagcagctggtggagacccacctggcccgagtggaagctatgctgaatgaccgccgtcggatggctctggagaactacctggctgccttgcagtctgacccgccacggcctcatcgcattctccaggccttacggcgttatgtccgtgctgagaacaaagatcgcttacataccatccgtcattaccagcatgtgttggctgttgacccagaaaaggcggcccagatgaaatcccaggtgatgacacatctccacgtgattgaagaaaggaggaaccaaagcctctctctgctctacaaagtaccttatgtagcccaagaaattcaagaggaaattgatgagctccttcaggagcagcgtgcagatatggaccagttcactgcctcaatctcagagacccctgtggacgtccgggtgagctctgaggagagtgaggagatcccaccgttccaccccttccaccccttcccagccctacctgagaacgaagacactcagccggagttgtaccacccaatgaaaaaaggatctggagtgggagagcaggatgggggactgatcggtgccgaagagaaagtgattaacagtaagaataaagtggatgaaaacatggtcattgacgagactctggatgttaaggaaatgattttcaatgccgagagagttggaggcctcgaggaagagcgggaatccgtgggcccactgcgggaggacttcagtctgagtagcagtgctctcattggcctgctggtcatcgcagtggccattgccacggtcatcgtcatcagcctggtgatgctgaggaagaggcagtatggcaccatcagccacgggatcgtggaggttgatccaatgctcaccccagaagagcgtcacctgaacaagatgcagaaccatggctatgagaaccccacctacaaatacctggagcagatgcagatttaggtggcagggagcgcggcagccctggtggagggatgcaggtgggccggaagatcccacgattccgatcgactgccaagcagcagccgctgccaggggctgcgtctgacatcctgacctcctggactgtaggactatataaagtactactgtagaactgcaatttccattcttttaaatgggtgaaaaatggtaatataacaatatatgatatataaaccttaaatgaaaaaaaatgatctattgcagatatttgatgtagttttcttttttaaattaatcagaaaccccacttccattgtattgtctgacacatgctctcaatatataataaatgggaaatgtcgattttcaataatagacttatatgcaggctgtcgttccggttatgttgtgtaagtcaactcttcagcctcattcactgtcctggcttttatttaaagaaaaaaaaaaggcagtattccctttttaaatgagctttcaggaagttgctgagaaatggggtggaatagggaactgtaatggccactgaagcacgtgagagaccctcgcaaaatgatgtgaaaggaccagtttcttgaagtccagtgtttccacggctggatacctgtgtgtctccataaaagtcctgtcaccaaggacgttaaaggcattttattccagcgtcttctagagagcttagtgtatacagatgagggtgtccgctgctgctttccttcggaatccagtgcttccacagagattagcctgtagcttatatttgacattcttcactgtctgttgtttacctaccgtagctttttaccgttcacttccccttccaactatgtccagatgtgcaggctcctcctctctggactttctccaaaggcactgaccctcggcctctactttgtcccctcacctccaccccctcctgtcaccggccttgtgacattcactcagagaagaccacaccaaggaggcggccgctggcccaggagagaacacggggaggtttgtttgtgtgaaaggaaagtagtccaggctgtccctgaaactgagtctgtggacactgtggaaagctttgaacaattgtgttttcgtcacaggagtctttgtaatgcttgtacagttgatgtcgatgctcactgcttctgctttttctttctttttattttaaaaaatctgaaggttctggtaacctgtggtgtatttttattttcctgtgactgtttttgttttgtttttttcctttttcctcccctttagccctattcatgtctctacccactatgcacagattaaacttcacctacaaactccttaatatgatctgtggagaatgtacacagtttaaacacatcaataaatactttaac

SEQ ID NO: 28063 - DNA, 426 bp, Homo sapiens; identical to SEQ ID NO: 22157

SEQ ID NO: 28064 - DNA, 953 bp, Homo sapiens; identical to SEQ ID NO: 22208
  misc_feature 944, 945, 946, 947, 948, 949, 950, 951, 952, 953: n = A,T,C or G

SEQ ID NO: 28065 - DNA, 3470 bp, Homo sapiens; identical to SEQ ID NO: 22163

SEQ ID NO: 28066 - DNA, 1131 bp, Homo sapiens
  misc_feature 1, 2, 1130, 1131: n = A,T,C or G
nnctgagggtcttgtggggccacggtcgctgatcaccaggtgttggcttggtcggttcttatttctcgcctggcaatggcgacgtacacctgcataacttgccgggtggcgttccgcgacgcggacatgcagcgggcccactataagacggactggcaccgctacaacctgcggcggaaggtggccagcatggccccagtgaccgccgagggcttccaggagcgagtgcgggcgcagcgggccgtcgcggaggaggagagcaagggctcggccacctactgcaccgtttgccggtaagaagtttggctctttcaacgcctatacaaaacaccacactcctacagatgcccgccggtgtcgctgtagaccgtctggagaaaaggccgcgcaggcagtgaatcggaaagtggagatgatgagatgaaaagaacttggagaaaggactgggcgtggacagtgtggacaaggatgccatgaacgcggcatccagcaggccatcaaggcccagccgtccatgtctcccaagaaggcgcccccagcgcctgcaaaggaggccaggaatgtcgtggccgtgggtactggtggccgtgggacccacgaccgagacccgagtgagaaaaccaccccggctccagtggttttgaacagcaggcgaagaaagttggcaaagcagcaggaggaggacagcgaggaggaggaagaggacctggatggagacgattgggaagatattgattctgatgaagaattggaatgtgaggatactgaagcaatggacgatgtggtggagcaggatgcagaggaggaagaggctgaggaaggcccaccccttggtgccatccctatcacggactgcttattttgttcccatcattccagctcgctgatgaagaatgtggctcacatgaccaaagaccacagtttctttattcctgatatagaatatctttcagatattaagggactgattaaatacttgggagagaaagttggtgttggcaagatttgcttgtggtgcaacgagaaagggaagtccttctactccacagaagctgtacctcggccgcgaccacgctaagccgaattccagcacatggcggccgttatagtggtccgagtcggaccaagcnn

SEQ ID NO: 28067 - DNA, 2986 bp, Homo sapiens; identical to SEQ ID NO: 22211
  misc_feature 2986: n = A,T,C or G

SEQ ID NO: 28068 - DNA, 1771 bp, Homo sapiens
  misc_feature 1, 2, 3, 4, 5, 6, 7: n = A,T,C or G
nnnnnnnccgagtcgagggggtaaaaaaggggggacagagagggggcgaaagggggccccatagggggaaatggggggcccccccgggggggggggcttttttttttttttttttttttttttttttttttttttttttttttttttttttcctttttacttcacagcaagatttattaatacatccaaaagaaagaaagaaaaatgattttgtcacactatatacagataatacatacagtgtttcatacacatattacatcagtttttacacaagaaaaatatacataaaaatgtaaacttttgtatacaaaaacccttaaacaaattaaacaaggaccagataacaaaaggagaccaattcattattatttcatcaaatttttaaaacagtaatacagtacattcattgagatatatatggaaaatgtgagccatctcttcttgtttaaagggaaattacaaaccaaaagtcaatcgcctcccaagacgtggtcctcccagcaatgccgcacccaatgccacaagtatgcctgtccaccagaactgggggctcttaccaaaacctgcccatctcctcatcttgctcctacagtctgtgcagaaacaagtggctcctaacttttgtgcatataattaaactcccagccactatgaacacaaatacagaggagagattgtcagtttgtaagttccctttaagcggcttttatatttttgtatttatttttaatgcatggcctgttaaacatacttgggtgccaaggtgaatgagaacactgaaaaagaagggctttgagaaccgctagtccttgctaccgtgcagtttctttgttagaagagattttaaaactgtccaacctgtctcatttgctggtttcaaataagctacctcacctttgatttcccactgcaacttggtttcaacttacacttcagtactctagttgttagtaccatacaattgccaagaggctttttgttaaaggctacttctgatatcaggttccagctaagctactcagtaaaatggctcaaaccccagcctctctattttagtcttcaggagtactcttacttcactgttttttgtaacatcttacaatttaggattgtccatctaccttcctctctctgcaagttcttgagatgtaatctgctgccaactcttcacaaaataaaataatatttaatcgttcttccttaatagtcttgcattcagtgtgtcaaattgatgtactaatgaaaaatacctaaactgtggggaataagaattaaatctatttcaagcacatgcaacttggaactcgcaaaaaaaaaaaaaaaaagaaagaaagaaagaaagaaaaaagagtttgggagggcccttaactaaaatgtgcttaagacagcttcatgagagagctgccttctttcaaatttgaattttgaacaaggcaaaataacaattaggtgatatatttccctgcagcatgggagtagttaacttcccccaggcaaaatgatctcaataatcattatttattaatgaaaggaggaggcaaattggtgaattaagttgatctaggagatggtggctgacatacactaacggaaatattaggattgctttataagtgaaataaacagtctggtctgtggaacatctccacttcagagagaggaaaaatgcacaaagctcctcaagtgaatctccagctctttcttactctcatgggacagatggcatttttaaaatgacagtctccctttcagttaagcggacgcgtgg

SEQ ID NO: 28069 - DNA, 1107 bp, Homo sapiens
  misc_feature 107, 121, 132, 148, 163, 165, 179, 184, 187, 206, 219, 228,254, 261, 262, 274, 275, 313: n = A,T,C or G
tgtctaagagaagaatcaaaatgcatcgcatgtatgcaatactgacatcagatcatgcagagattccgtgtcaactgtcaacaggcatctcaacagtctataagacncagatagattggcntgagcaagtcnagatagcagtaaaagnattcagaatctcacnanttacaagtgagtanttacnaanaactggctgctccattaanaagtaaaaggtcnaccatatcncctcatccatgaaatctagtacgaanaaccaannaaccacataaanntatttcttctgaggctactatatccatctctttctgcnaactaatgtaatacttgtaagatttccttaaaattattttttcacaattacaattatcctatttccacaatagtggcatttcaggttactcttcataactatgggggaggttatagttagatataatgataaccatgaaaacattcttcacagaaatttggttagcacatatggttatttctactgacagaaaccaaaagacaaaataaaaaaaatcccttcaaattggtactttgtttctccacctaaaggaagagaataaagactaaaataacagcaaaacatagaacagctttcgagaaacgcttaatttctatatacaggcatcagctcaatattttatgatttttctttcccattctaagggagtccttttctttcttacttttttttttttttttgagatggagtctcgctctgttgccaggctggagtgcagtggtgtgatcttggctcactgaaacctccatctcctgagttcaagtgattctcgtgcctcagcctcctgtgtagctgggattacaggctcctgccaccacacccagctaatttttatatttttagtagagacggggtttcaccatgttggccaggatggtctcgaactcctgacctcgtgatctgcctgccttggcctcccaaagtgctgagattacaggcgtaagtcactgcgcctggccagggagtccttttctaactgagcctatttttctcttaggtacaaatggaataagtgacaaactctaatttgtagaaacattttaggccatgtataagttcggacgcgtgggtcg

SEQ ID NO: 28070 - DNA, 2946 bp, Homo sapiens; identical to SEQ ID NO: 22213
  misc_feature 1, 2945, 2946: n = A,T,C or G

SEQ ID NO: 28071 - DNA, 2729 bp, Homo sapiens
tgcactgtgacaagctgcacaactccctcattggcaccaagggccgtctgatccgctccatcatggaggagtgcggcggggtccacattcactttcccgtggaaggttcaggaagcgacaccgttgttatcaggggcccttcctcggatgtggagaaggccaagaagcagctcctgcatctggcggaggagaagcaaaccaagagtttcactgttgacatccgcgccaagccagaataccacaaattcctcatcggcaaggggggcggcaaaattcgcaaggtgcgcgacagcactggagcacgtgtcatcttccctgcggctgaggacaaggaccaggacctgatcaccatcattggaaaggaggacgccgtccgagaggcacagaaggagctggaggccttgatccaaaacctggataatgtggtggaagactccatgctggtggaccccaagcaccaccgccacttcgtcatccgcagaggccaggtcttgcgggagattgctgaagagtatggcggggtgatggtcagcttcccacgctctggcacacagagcgacaaagtcaccctcaagggcgccaaggactgtgtggaggcagccaagaaacgcattcaggagatcattgaggacctggaagctcaggtgacattagaatgtgctataccccagaaattccatcgatctgtcatgggccccaaaggttccagaatccagcagattactcgggatttcagtgttcaaattaaattcccagacagagaggagaacgcagttcacagtacagagccagttgtccaggagaatggggacgaagctggggaggggagagaggctaaagattgtgaccccggctctccaaggaggtgtgacatcatcatcatctctggccggaaagaaaagtgtgaggctgccaaggaagctctggaggtatgtgtccgtgtgcccccctccaccccccgccaaggcccagtcagcaggcacctggggagacgcgtggcctggatgggatggacggttgcccaagcggcagtggcagtggaggtagccctcttgctcctaccgtgtgcgcacgggctgtgcttctcggctggacacagagtttggggaggccacttcccttcaccaaggctcggggttctatagcccctttctgggacagctgcatgggatccggcctctcaggcccacggtgggtgcgggggctgtggaaaggtctcagctgcagggggatgaatgtgacctccagttgcaacgtctccccccgcgtgagtggggttatcaggcctagctcaccttgtgtgcaagtcagtgtcgagtgccacctgcgtactggatgctgctctcagtgctgcggtgccacagcacacaaaaatagttctcacgttgccgtggagagacaagcagtcaacgcagatatatcctgtggcaagtgatggcattggttcctgtcaccattgaagtagaggtgccctttgaccttcaccgttacgttattgggcagaaaggaagtgggatccgcaagatgatggatgagtttgaggtgaacatacatgtcccggcacctgagctgcagtctgacatcatcgccatcacgggcctcgctgcaaatttggaccgggccaaggctggactgctggagcgtgtgaaggagctacaggccgagcaggaggaccgggctttaaggagttttaagctgagtgtcactgtagaccccaaataccatcccaagattatcgggagaaagggggcagtaattacccaaatccggttggagcatgacgtgaacatccagtttcctgataaggatgatgggaaccagccccaggaccaaattaccatcacagggtacgaaaagaacacagaagctgccagggatgctatactgagaattgtgggtgaacttgagcagatggtttctgaggacgtcccgctggaccaccgcgttcacgcccgcatcattggtgcccgcggcaaagccattcgcaaaatcatggacgaattcaaggtggacattcgcttcccacagagcggagccccagaccccaactgcgtcactgtgacggggctcccagagaatgtggaggaagccatcgaccacatcctcaatctggaggaggaatacctagctgacgtggtggacagtgaggcgctgcaggtatacatgaaacccccagcacacgaagaggccaaggcaccttccagaggctttgtggtgcgggacgcaccctggaccgccagcagcagtgagaaggctcctgacatgagcagctctgaggaatttcccagctttggggctcaggtggctcccaagaccctcccttggggccccaaacgataatgatcaaaaagaacagaaccctctccagcctgctgacccaaacccaaccacacaatggtttgtctcaatctgacccagcggctggaccctccgtaaattgttgacgctcttcccccttcccgaggtcccgcagggagcctagcgcctggctgtgtgtgcggccgctcctccaggcctggccgtgcccgctcaggacctgctccactgtttaacactaaaccaaggtcatgagcattcgtgctaagataacagactccagctcctggtccacccggcatgtcagtcagcactctggccttcatcacgagagctccgcagccgtggctaggattccacttcctgtgtcatgacctcaggaaataaacgtccttgactttataaaaaaaaaa

SEQ ID NO: 28072 - DNA, 1185 bp, Homo sapiens; identical to SEQ ID NO: 21532
  misc_feature 1, 2, 3, 4, 5, 6, 7, 8, 9, 10, 11, 12, 13, 14, 15, 16, 17,18, 19, 20, 21, 22: n = A,T,C or G

SEQ ID NO: 28073 - DNA, 1086 bp, Homo sapiens; identical to SEQ ID NO: 22050
  misc_feature 1, 2, 3, 4, 5, 6, 7, 8, 9, 10, 11, 12, 13, 14, 15, 16, 17,1082, 1083, 1084, 1085, 1086: n = A,T,C or G

SEQ ID NO: 28074 - DNA, 531 bp, Homo sapiens; identical to SEQ ID NO: 22217

SEQ ID NO: 28075 - DNA, 2929 bp, Homo sapiens; identical to SEQ ID NO: 21129

SEQ ID NO: 28076 - DNA, 505 bp, Homo sapiens; identical to SEQ ID NO: 22218
  misc_feature 504, 505: n = A,T,C or G

SEQ ID NO: 28077 - DNA, 2082 bp, Homo sapiens; identical to SEQ ID NO: 22219

SEQ ID NO: 28078 - DNA, 2181 bp, Homo sapiens
acccacgcgtccggttgcgggctccggggccgtcgaccatgccgctcgacctccacctccgctgggaagctgaggcgccgaacggctcccagagggtcccgggaagcgcatggtgagggtccccgggccggctgtgcagcggaatcgggcccttcccggactcgcgcccttcccggactcgccgctggcgagcgcgtggagggcccggcaggcctggcgcgccttgggccacgcgtgcgcgcctccgccgctggagctggatggctgatgcggctcgtggtccgagagccttgtcctgccgtgtgggccttgcggacctgggagctggcgggcgttgggaaccgggcttaagctactgaggcgtttgctgatttcgtccatccaggtgttcaggcgcttcgtggaggttggccgggtggcctatgtctcctttggacctcatgccggaaaattggtcgcgattgtagatgttattgatcagaacagggctttggtcgatggaccttgcactcaagtgaggagacaggccatgcctttcaagtgcatgcagctcactgatttcatcctcaagtttccgcacagtgcccaccagaagtatgtccgacaagcctggcagaaggcagacatcaatacaaaatgggcagccacacgatgggccaagaagattgaagccagagaaaggaaagccaagatgacagattttgatcgttttaaagttatgaaggcaaagaaaatgaggaacagaataatcaagaatgaagttaagaagcttcaaaaggcagctctcctgaaagcttctcccaaaaaagcacctggtactaagggtactgctgctgctgctgctgctgctgctgctgctgctgctgctgctgctaaagttccagcaaaaaagatcaccgccgcgagtaaaaaggctccagcccagaaggttcctgcccagaaagccacaggccagaaagcagcgcctgctccaaaagctcagaagggtcaaaaagctccagcccagaagcactgctccaaggcatctggccagaagctaagggaccaacagcaagcggctcgccggaacaaacagcaaatgtggcgcgccccgataaacaacggcgcgcgcgaagcatgccaagcacgggccaacgggcgaatgagattgcacaactcccactaccataactcaaccctccctctcatcgcccacccgcacgcacagcaacaccgccacattcagcacgctaacacagtaccgcaaacacagaccacagctacaccacacactaccaagcacaccaagacagcagcatcacaacatccaacgccgcctcgtacacgcacgtacacagccacactaccaacagacaccaagcagactcagtaacacacatcagcaaccagcaagcaacgacacaaccaagcaagcagcaagacccgacaagcacgacagaacaaacatacgaaaacacgaagcaaccaacaacacaacgcatagacgacgagccaccgcgagagcagcaagaacgaaagcaacaacaaagaacaagaagaagcaagaggcaggcaaagcaacaaggagagcgacaagaaacagacggcaaaccacagcacaacgagagacacgacacagacgcgacgacgaaacaagcacgcacaagtgacgaaacgcgacgcaaatagccagcgacaaccatgagaaaagaaacagcaaaaaacacagcacgaggcacgagcgagacacacaagaagaagagacgaggacggcaagacgacgagacagacgaaagaaatacgaacactgaccaggcaggcagacgagcacacaacaacaacactaacaccataacacgagacgagaagcacagagccgcagcgaggcgacgcgcgccgcgcaccgaaacacacccgcgacgcgccaggaagcaggaggaacaggacaaaggcacagaagcgagcaggcagaagcactaagaccgccgcagagagaccacgaacgcaaagcgcaaaacaaacacaataaacacaacacgaaatggtgcgccgcgcagacgctgaagcaaccacacacccgagcacgacacgcccgaaccacagcaccacaccagcgaacacaccaacccccgccgaccgcacacgacagcccacgcacacacaccacaccactaagacaccacgaccaccgcacacaaccaa

SEQ ID NO: 28079 - DNA, 2548 bp, Homo sapiens; identical to SEQ ID NO: 22221
  misc_feature 1, 2547, 2548: n = A,T,C or G

SEQ ID NO: 28080 - DNA, 2655 bp, Homo sapiens; identical to SEQ ID NO: 22222
  misc_feature 1, 2, 2650, 2651, 2652, 2653, 2654, 2655: n = A,T,C or G

SEQ ID NO: 28081 - DNA, 459 bp, Homo sapiens; identical to SEQ ID NO: 21058
  misc_feature 1, 2: n = A,T,C or G

SEQ ID NO: 28082 - DNA, 1556 bp, Homo sapiens; identical to SEQ ID NO: 22224
  misc_feature 1395, 1396, 1397, 1410, 1417, 1554, 1555, 1556: n = A,T,C or G

SEQ ID NO: 28083 - DNA, 2583 bp, Homo sapiens; identical to SEQ ID NO: 22225
  misc_feature 2567, 2568, 2569, 2570, 2571, 2572, 2573, 2574, 2575, 2576,2577, 2578, 2579, 2580, 2581, 2582, 2583: n = A,T,C or G

SEQ ID NO: 28084 - DNA, 980 bp, Homo sapiens; identical to SEQ ID NO: 22226
  misc_feature 980: n = A,T,C or G

SEQ ID NO: 28085 - DNA, 3132 bp, Homo sapiens; identical to SEQ ID NO: 20928
  misc_feature 3132: n = A,T,C or G

SEQ ID NO: 28086 - DNA, 1217 bp, Homo sapiens; identical to SEQ ID NO: 22228
  misc_feature 1, 2, 3, 4: n = A,T,C or G

SEQ ID NO: 28087 - DNA, 745 bp, Homo sapiens; identical to SEQ ID NO: 20943
  misc_feature 1, 2, 3, 4, 5, 6, 7, 8, 9, 10, 11, 12, 741, 742, 743, 744,745: n = A,T,C or G

SEQ ID NO: 28088 - DNA, 1868 bp, Homo sapiens; identical to SEQ ID NO: 22230
  misc_feature 1860, 1861, 1862, 1863, 1864, 1865, 1866, 1867, 1868: n = A,T,C or G

SEQ ID NO: 28089 - DNA, 5151 bp, Homo sapiens; identical to SEQ ID NO: 22231
  misc_feature 1, 2, 5151: n = A,T,C or G

SEQ ID NO: 28090 - DNA, 2822 bp, Homo sapiens; identical to SEQ ID NO: 22232
  misc_feature 1, 2777, 2778, 2779, 2780, 2781, 2782, 2783, 2784, 2785,2786, 2787, 2788, 2789, 2790, 2791, 2792, 2793, 2794, 2795,2796, 2797, 2798, 2799, 2800, 2801, 2802, 2803, 2804, 2805,2806, 2807, 2808, 2809, 2810, 2811, 2812, 2813, 2814: n = A,T,C or G
  misc_feature 2815, 2816, 2817, 2818, 2819, 2820, 2821, 2822: n = A,T,C or G

SEQ ID NO: 28091 - DNA, 391 bp, Homo sapiens; identical to SEQ ID NO: 22233
  misc_feature 388, 389, 390, 391: n = A,T,C or G

SEQ ID NO: 28092 - DNA, 1120 bp, Homo sapiens; identical to SEQ ID NO: 22234
  misc_feature 1, 1119, 1120: n = A,T,C or G

SEQ ID NO: 28093 - DNA, 518 bp, Homo sapiens
  misc_feature 1, 2: n = A,T,C or G
nncacccagctccttcagctgagcgtaccatccagcagtgttgtgaaaatattctgctgaatgctgcctgggtaaagcgagatggtgagagcatccaccagtacctccttcagcggaaggcctcaccacccacagtgtgaatccagaggtgccgccattggcggttctgctgcttcgccgcagggataaggtggagctaccgaacagctgattcatatgccaagaatttggagtcttctttcaaaccagtgggggttggacaatgaatgtagttaactggttcctgctcacactccagaattaaattctatactggaatatcctgttgcctggatcacgtcttcctgtttcttggtttattctcttattctggtgcaccacatcctccagtagtttcccaaccgcagccccagcgctcgaacccagctccgcctcttcccgggggcgtcccatcgtgccccgcgccgggctcctagggttgccgggcacctcccgcctcaattaattctagaagtact

SEQ ID NO: 28094 - DNA, 1120 bp, Homo sapiens; identical to SEQ ID NO: 22234
  misc_feature 1, 1119, 1120: n = A,T,C or G

SEQ ID NO: 28095 - DNA, 692 bp, Homo sapiens; identical to SEQ ID NO: 22238
  misc_feature 550, 551, 552, 553, 554, 555, 556, 557, 558, 559, 560, 561,562, 563, 564, 565, 566, 567, 568, 569, 570, 571, 572, 573,574, 575, 576, 577, 578, 579, 580, 581, 582, 583, 584, 585,586, 587, 588, 589, 590, 591, 592, 593, 594, 595, 596: n = A,T,C or G
  misc_feature 597, 691, 692: n = A,T,C or G

SEQ ID NO: 28096 - DNA, 946 bp, Homo sapiens; identical to SEQ ID NO: 22239
  misc_feature 1, 2, 3, 938, 939, 940, 941, 942, 943, 944, 945, 946: n = A,T,C or G

SEQ ID NO: 28097 - DNA, 1425 bp, Homo sapiens; identical to SEQ ID NO: 22240
  misc_feature 1, 1425: n = A,T,C or G

SEQ ID NO: 28098 - DNA, 440 bp, Homo sapiens; identical to SEQ ID NO: 22241
  misc_feature 439, 440: n = A,T,C or G

SEQ ID NO: 28099 - DNA, 2075 bp, Homo sapiens; identical to SEQ ID NO: 22242
  misc_feature 1, 2, 2070, 2071, 2072, 2073, 2074, 2075: n = A,T,C or G

SEQ ID NO: 28100 - DNA, 4345 bp, Homo sapiens; identical to SEQ ID NO: 21910
  misc_feature 1, 2, 3, 4, 5, 6, 7, 8, 9, 10, 11, 12, 13, 14, 15, 16, 17,18, 19, 20, 21, 22, 23, 24, 25, 26, 27, 28, 29, 30: n = A,T,C or G

SEQ ID NO: 28101 - DNA, 1458 bp, Homo sapiens; identical to SEQ ID NO: 22244
  misc_feature 1, 1458: n = A,T,C or G

SEQ ID NO: 28102 - DNA, 398 bp, Homo sapiens; identical to SEQ ID NO: 22245
  misc_feature 398: n = A,T,C or G

SEQ ID NO: 28103 - DNA, 3430 bp, Homo sapiens; identical to SEQ ID NO: 21135
  misc_feature 2331: n = A,T,C or G

SEQ ID NO: 28104 - DNA, 2929 bp, Homo sapiens; identical to SEQ ID NO: 21129

SEQ ID NO: 28105 - DNA, 2041 bp, Homo sapiens; identical to SEQ ID NO: 22247
  misc_feature 1, 2, 3, 2025, 2026, 2027, 2028, 2029, 2030, 2031, 2032,2033, 2034, 2035, 2036, 2037, 2038, 2039, 2040, 2041: n = A,T,C or G

SEQ ID NO: 28106 - DNA, 1120 bp, Homo sapiens; identical to SEQ ID NO: 22234
  misc_feature 1, 1119, 1120: n = A,T,C or G

SEQ ID NO: 28107 - DNA, 2352 bp, Homo sapiens; identical to SEQ ID NO: 22250
  misc_feature 1, 2, 3, 4, 5, 6, 7, 8, 2351, 2352: n = A,T,C or G

SEQ ID NO: 28108 - DNA, 362 bp, Homo sapiens; identical to SEQ ID NO: 21109
  misc_feature 362: n = A,T,C or G

SEQ ID NO: 28109 - DNA, 1160 bp, Homo sapiens; identical to SEQ ID NO: 22252
  misc_feature 1, 2, 1154, 1155, 1156, 1157, 1158, 1159, 1160: n = A,T,C or G

SEQ ID NO: 28110 - DNA, 952 bp, Homo sapiens; identical to SEQ ID NO: 22253

SEQ ID NO: 28111 - DNA, 3540 bp, Homo sapiens; identical to SEQ ID NO: 21108
  misc_feature 1, 2, 3, 4, 5, 6, 7, 8, 9, 10, 11, 12, 13, 14, 15, 16, 17,18, 67, 68, 69, 70, 72, 73, 3538, 3539, 3540: n = A,T,C or G

SEQ ID NO: 28112 - DNA, 4157 bp, Homo sapiens; identical to SEQ ID NO: 22255
  misc_feature 1, 2, 3, 4, 5, 4157: n = A,T,C or G

SEQ ID NO: 28113 - DNA, 3325 bp, Homo sapiens; identical to SEQ ID NO: 22256
  misc_feature 3319, 3320, 3321, 3322, 3323, 3324, 3325: n = A,T,C or G

SEQ ID NO: 28114 - DNA, 4467 bp, Homo sapiens; identical to SEQ ID NO: 22257
  misc_feature 1, 2, 3, 4, 20, 26, 4459, 4460, 4461, 4462, 4463, 4464, 4465,4466, 4467: n = A,T,C or G

SEQ ID NO: 28115 - DNA, 4040 bp, Homo sapiens; identical to SEQ ID NO: 22258
  misc_feature 4012, 4013, 4014, 4015, 4016, 4017, 4018, 4019, 4020, 4021,4022, 4023, 4024, 4025, 4026, 4027, 4028, 4029, 4030, 4031,4032, 4033, 4034, 4035, 4036, 4037, 4038, 4039, 4040: n = A,T,C or G

SEQ ID NO: 28116 - DNA, 3389 bp, Homo sapiens; identical to SEQ ID NO: 22259
  misc_feature 1, 2, 3, 4, 5, 3389: n = A,T,C or G

SEQ ID NO: 28117 - DNA, 2598 bp, Homo sapiens; identical to SEQ ID NO: 22260
  misc_feature 2595, 2596, 2597, 2598: n = A,T,C or G

SEQ ID NO: 28118 - DNA, 461 bp, Homo sapiens; identical to SEQ ID NO: 22262

SEQ ID NO: 28119 - DNA, 600 bp, Homo sapiens; identical to SEQ ID NO: 22263

SEQ ID NO: 28120 - DNA, 498 bp, Homo sapiens; identical to SEQ ID NO: 21110

SEQ ID NO: 28121 - DNA, 1120 bp, Homo sapiens; identical to SEQ ID NO: 22234
  misc_feature 1, 1119, 1120: n = A,T,C or G

SEQ ID NO: 28122 - DNA, 816 bp, Homo sapiens; identical to SEQ ID NO: 21390

SEQ ID NO: 28123 - DNA, 334 bp, Homo sapiens; identical to SEQ ID NO: 22267

SEQ ID NO: 28124 - DNA, 1120 bp, Homo sapiens; identical to SEQ ID NO: 22234
  misc_feature 1, 1119, 1120: n = A,T,C or G

SEQ ID NO: 28125 - DNA, 598 bp, Homo sapiens; identical to SEQ ID NO: 22269
  misc_feature 1: n = A,T,C or G

SEQ ID NO: 28126 - DNA, 2063 bp, Homo sapiens; identical to SEQ ID NO: 22272

SEQ ID NO: 28127 - DNA, 1120 bp, Homo sapiens; identical to SEQ ID NO: 22234
  misc_feature 1, 1119, 1120: n = A,T,C or G

SEQ ID NO: 28128 - DNA, 1120 bp, Homo sapiens; identical to SEQ ID NO: 22234
  misc_feature 1, 1119, 1120: n = A,T,C or G

SEQ ID NO: 28129 - DNA, 570 bp, Homo sapiens; identical to SEQ ID NO: 22275
  misc_feature 1, 2, 3, 459, 479, 480, 564, 570: n = A,T,C or G

SEQ ID NO: 28130 - DNA, 498 bp, Homo sapiens; identical to SEQ ID NO: 21110

SEQ ID NO: 28131 - DNA, 1120 bp, Homo sapiens; identical to SEQ ID NO: 22234
  misc_feature 1, 1119, 1120: n = A,T,C or G

SEQ ID NO: 28132 - DNA, 1120 bp, Homo sapiens; identical to SEQ ID NO: 22234
  misc_feature 1, 1119, 1120: n = A,T,C or G

SEQ ID NO: 28133 - DNA, 1120 bp, Homo sapiens; identical to SEQ ID NO: 22234
  misc_feature 1, 1119, 1120: n = A,T,C or G

SEQ ID NO: 28134 - DNA, 1120 bp, Homo sapiens; identical to SEQ ID NO: 22234
  misc_feature 1, 1119, 1120: n = A,T,C or G

SEQ ID NO: 28135 - DNA, 1120 bp, Homo sapiens; identical to SEQ ID NO: 22234
  misc_feature 1, 1119, 1120: n = A,T,C or G

SEQ ID NO: 28136 - DNA, 1120 bp, Homo sapiens; identical to SEQ ID NO: 22234
  misc_feature 1, 1119, 1120: n = A,T,C or G

SEQ ID NO: 28137 - DNA, 1188 bp, Homo sapiens; identical to SEQ ID NO: 22284

SEQ ID NO: 28138 - DNA, 1120 bp, Homo sapiens; identical to SEQ ID NO: 22234
  misc_feature 1, 1119, 1120: n = A,T,C or G

SEQ ID NO: 28139 - DNA, 2053 bp, Homo sapiens; identical to SEQ ID NO: 22286
  misc_feature 2052, 2053: n = A,T,C or G

SEQ ID NO: 28140 - DNA, 1214 bp, Homo sapiens; identical to SEQ ID NO: 20119

SEQ ID NO: 28141 - DNA, 2361 bp, Homo sapiens; identical to SEQ ID NO: 20124
  misc_feature 1, 2, 3, 2361: n = A,T,C or G

SEQ ID NO: 28142 - DNA, 939 bp, Homo sapiens; identical to SEQ ID NO: 22289
  misc_feature 927, 928, 929, 930, 931, 932, 933, 934, 935, 936, 937, 938,939: n = A,T,C or G

SEQ ID NO: 28143 - DNA, 651 bp, Homo sapiens; identical to SEQ ID NO: 22290

SEQ ID NO: 28144 - DNA, 976 bp, Homo sapiens; identical to SEQ ID NO: 22293
  misc_feature 1, 2, 3, 4, 5, 6, 7, 8, 9, 10, 11, 12, 963, 964, 965, 966,967, 968, 969, 970, 971, 972, 973, 974, 975, 976: n = A,T,C or G

SEQ ID NO: 28145 - DNA, 747 bp, Homo sapiens; identical to SEQ ID NO: 21614

SEQ ID NO: 28146 - DNA, 573 bp, Homo sapiens; identical to SEQ ID NO: 22295
  misc_feature 1, 2, 3, 4, 5, 6, 343, 344, 345, 346, 347, 348, 349, 350,351, 352, 353, 354, 355, 356, 357, 358, 359, 360, 361, 362,363, 364, 365, 366, 573: n = A,T,C or G

SEQ ID NO: 28147 - DNA, 1420 bp, Homo sapiens; identical to SEQ ID NO: 24230

SEQ ID NO: 28148 - DNA, 2538 bp, Homo sapiens; identical to SEQ ID NO: 20316
  misc_feature 2538: n = A,T,C or G

SEQ ID NO: 28149 - DNA, 1120 bp, Homo sapiens; identical to SEQ ID NO: 22234
  misc_feature 1, 1119, 1120: n = A,T,C or G

SEQ ID NO: 28150 - DNA, 3254 bp, Homo sapiens; identical to SEQ ID NO: 22299
  misc_feature 1: n = A,T,C or G

SEQ ID NO: 28151 - DNA, 1380 bp, Homo sapiens; identical to SEQ ID NO: 20118
  misc_feature 1380: n = A,T,C or G

SEQ ID NO: 28152 - DNA, 450 bp, Homo sapiens; identical to SEQ ID NO: 20659
  misc_feature 448, 449, 450: n = A,T,C or G

SEQ ID NO: 28153 - DNA, 2178 bp, Homo sapiens; identical to SEQ ID NO: 22304
  misc_feature 1, 2, 2177, 2178: n = A,T,C or G

SEQ ID NO: 28154 - DNA, 2593 bp, Homo sapiens; identical to SEQ ID NO: 22305
  misc_feature 1, 2582, 2583, 2585, 2586, 2587, 2588, 2589, 2590, 2591,2592, 2593: n = A,T,C or G

SEQ ID NO: 28155 - DNA, 1058 bp, Homo sapiens; identical to SEQ ID NO: 22306
  misc_feature 1, 1058: n = A,T,C or G

SEQ ID NO: 28156 - DNA, 510 bp, Homo sapiens; identical to SEQ ID NO: 22307
  misc_feature 1, 2, 503, 504, 505, 506, 507, 508, 509, 510: n = A,T,C or G

SEQ ID NO: 28157 - DNA, 1067 bp, Homo sapiens; identical to SEQ ID NO: 22309
  misc_feature 1, 2, 3, 4, 5, 6: n = A,T,C or G

SEQ ID NO: 28158 - DNA, 1120 bp, Homo sapiens; identical to SEQ ID NO: 22234
  misc_feature 1, 1119, 1120: n = A,T,C or G

SEQ ID NO: 28159 - DNA, 5656 bp, Homo sapiens; identical to SEQ ID NO: 22311

SEQ ID NO: 28160 - DNA, 1481 bp, Homo sapiens; identical to SEQ ID NO: 22312

SEQ ID NO: 28161 - DNA, 532 bp, Homo sapiens; identical to SEQ ID NO: 24796
  misc_feature 519, 520, 521, 522, 523, 524, 525, 526, 527, 528, 529, 530,531, 532: n = A,T,C or G

SEQ ID NO: 28162 - DNA, 1335 bp, Homo sapiens; identical to SEQ ID NO: 22315
  misc_feature 1, 2, 1335: n = A,T,C or G

SEQ ID NO: 28163 - DNA, 1120 bp, Homo sapiens; identical to SEQ ID NO: 22234
  misc_feature 1, 1119, 1120: n = A,T,C or G

SEQ ID NO: 28164 - DNA, 2970 bp, Homo sapiens; identical to SEQ ID NO: 22317
  misc_feature 1, 2, 3, 4, 5, 6, 7, 8, 2951, 2952, 2953, 2954, 2955, 2956,2957, 2958, 2959, 2960, 2961, 2962, 2963, 2964, 2965, 2966,2967, 2968, 2969, 2970: n = A,T,C or G

SEQ ID NO: 28165 - DNA, 299 bp, Homo sapiens; identical to SEQ ID NO: 22318

SEQ ID NO: 28166 - DNA, 476 bp, Homo sapiens; identical to SEQ ID NO: 22319

SEQ ID NO: 28167 - DNA, 979 bp, Homo sapiens; identical to SEQ ID NO: 22320
  misc_feature 707: n = A,T,C or G

SEQ ID NO: 28168 - DNA, 5253 bp, Homo sapiens; identical to SEQ ID NO: 22322
  misc_feature 1, 2, 3, 4, 5, 6, 7, 8, 5253: n = A,T,C or G

SEQ ID NO: 28169 - DNA, 1037 bp, Homo sapiens; identical to SEQ ID NO: 22323

SEQ ID NO: 28170 - DNA, 2397 bp, Homo sapiens; identical to SEQ ID NO: 22324
  misc_feature 1, 2, 3, 4, 2393, 2394, 2395, 2396, 2397: n = A,T,C or G

SEQ ID NO: 28171 - DNA, 1120 bp, Homo sapiens; identical to SEQ ID NO: 22234
  misc_feature 1, 1119, 1120: n = A,T,C or G

SEQ ID NO: 28172 - DNA, 373 bp, Homo sapiens; identical to SEQ ID NO: 22327

SEQ ID NO: 28173 - DNA, 1120 bp, Homo sapiens; identical to SEQ ID NO: 22234
  misc_feature 1, 1119, 1120: n = A,T,C or G

SEQ ID NO: 28174 - DNA, 1776 bp, Homo sapiens; identical to SEQ ID NO: 22330

SEQ ID NO: 28175 - DNA, 1120 bp, Homo sapiens; identical to SEQ ID NO: 22234
  misc_feature 1, 1119, 1120: n = A,T,C or G

SEQ ID NO: 28176 - DNA, 1201 bp, Homo sapiens; identical to SEQ ID NO: 21146
  misc_feature 959: n = A,T,C or G

SEQ ID NO: 28177 - DNA, 1120 bp, Homo sapiens; identical to SEQ ID NO: 22234
  misc_feature 1, 1119, 1120: n = A,T,C or G

SEQ ID NO: 28178 - DNA, 440 bp, Homo sapiens; identical to SEQ ID NO: 22241
  misc_feature 439, 440: n = A,T,C or G

SEQ ID NO: 28179 - DNA, 780 bp, Homo sapiens; identical to SEQ ID NO: 22057
  misc_feature 1, 772, 773, 774, 775, 776, 777, 778, 779, 780: n = A,T,C or G

SEQ ID NO: 28180 - DNA, 550 bp, Homo sapiens; identical to SEQ ID NO: 22336

SEQ ID NO: 28181 - DNA, 802 bp, Homo sapiens; identical to SEQ ID NO: 22338
  misc_feature 797, 798, 799, 800, 801, 802: n = A,T,C or G

SEQ ID NO: 28182 - DNA, 1120 bp, Homo sapiens; identical to SEQ ID NO: 22234
  misc_feature 1, 1119, 1120: n = A,T,C or G

SEQ ID NO: 28183 - DNA, 1120 bp, Homo sapiens; identical to SEQ ID NO: 22234
  misc_feature 1, 1119, 1120: n = A,T,C or G

SEQ ID NO: 28184 - DNA, 910 bp, Homo sapiens; identical to SEQ ID NO: 22341

SEQ ID NO: 28185 - DNA, 364 bp, Homo sapiens; identical to SEQ ID NO: 25813

SEQ ID NO: 28186 - DNA, 5253 bp, Homo sapiens; identical to SEQ ID NO: 22322
  misc_feature 1, 2, 3, 4, 5, 6, 7, 8, 5253: n = A,T,C or G

SEQ ID NO: 28187 - DNA, 1120 bp, Homo sapiens; identical to SEQ ID NO: 22234
  misc_feature 1, 1119, 1120: n = A,T,C or G

SEQ ID NO: 28188 - DNA, 3983 bp, Homo sapiens; identical to SEQ ID NO: 21101

SEQ ID NO: 28189 - DNA, 1120 bp, Homo sapiens; identical to SEQ ID NO: 22234
  misc_feature 1, 1119, 1120: n = A,T,C or G

SEQ ID NO: 28190 - DNA, 893 bp, Homo sapiens; identical to SEQ ID NO: 22347
  misc_feature 892, 893: n = A,T,C or G

SEQ ID NO: 28191 - DNA, 781 bp, Homo sapiens; identical to SEQ ID NO: 22348
  misc_feature 1, 2, 779, 780, 781: n = A,T,C or G

SEQ ID NO: 28192 - DNA, 2387 bp, Homo sapiens; identical to SEQ ID NO: 22349

SEQ ID NO: 28193 - DNA, 488 bp, Homo sapiens; identical to SEQ ID NO: 22350
  misc_feature 1, 2, 3, 486, 487, 488: n = A,T,C or G

SEQ ID NO: 28194 - DNA, 1120 bp, Homo sapiens; identical to SEQ ID NO: 22234
  misc_feature 1, 1119, 1120: n = A,T,C or G

SEQ ID NO: 28195 - DNA, 3830 bp, Homo sapiens; identical to SEQ ID NO: 22353
  misc_feature 1, 2, 3, 4, 5, 6, 7, 8, 9, 10, 11, 12, 13, 14, 15, 16, 17,18, 3828, 3829, 3830: n = A,T,C or G

SEQ ID NO: 28196 - DNA, 2538 bp, Homo sapiens; identical to SEQ ID NO: 20316
  misc_feature 2538: n = A,T,C or G

SEQ ID NO: 28197 - DNA, 1120 bp, Homo sapiens; identical to SEQ ID NO: 22234
  misc_feature 1, 1119, 1120: n = A,T,C or G

SEQ ID NO: 28198 - DNA, 975 bp, Homo sapiens; identical to SEQ ID NO: 22356
  misc_feature 975: n = A,T,C or G

SEQ ID NO: 28199 - DNA, 692 bp, Homo sapiens; identical to SEQ ID NO: 22357
  misc_feature 683, 684, 685, 686, 687, 688, 689, 690, 691, 692: n = A,T,C or G

SEQ ID NO: 28200 - DNA, 1120 bp, Homo sapiens; identical to SEQ ID NO: 22234
  misc_feature 1, 1119, 1120: n = A,T,C or G

SEQ ID NO: 28201 - DNA, 290 bp, Homo sapiens; identical to SEQ ID NO: 22359
  misc_feature 286, 287, 288, 289, 290: n = A,T,C or G

SEQ ID NO: 28202 - DNA, 1120 bp, Homo sapiens; identical to SEQ ID NO: 22234
  misc_feature 1, 1119, 1120: n = A,T,C or G

SEQ ID NO: 28203 - DNA, 1120 bp, Homo sapiens; identical to SEQ ID NO: 22234
  misc_feature 1, 1119, 1120: n = A,T,C or G

SEQ ID NO: 28204 - DNA, 3421 bp, Homo sapiens; identical to SEQ ID NO: 22882
  misc_feature 1, 2, 3, 4, 5, 3401, 3402, 3403, 3404, 3405, 3406, 3407,3408, 3409, 3410, 3411, 3412, 3413, 3414, 3415, 3416, 3417,3418, 3419, 3420, 3421: n = A,T,C or G

SEQ ID NO: 28205 - DNA, 1120 bp, Homo sapiens; identical to SEQ ID NO: 22234
  misc_feature 1, 1119, 1120: n = A,T,C or G

SEQ ID NO: 28206 - DNA, 3830 bp, Homo sapiens; identical to SEQ ID NO: 22353
  misc_feature 1, 2, 3, 4, 5, 6, 7, 8, 9, 10, 11, 12, 13, 14, 15, 16, 17,18, 3828, 3829, 3830: n = A,T,C or G

SEQ ID NO: 28207 - DNA, 975 bp, Homo sapiens; identical to SEQ ID NO: 22356
  misc_feature 975: n = A,T,C or G

SEQ ID NO: 28208 - DNA, 2593 bp, Homo sapiens; identical to SEQ ID NO: 22305
  misc_feature 1, 2582, 2583, 2585, 2586, 2587, 2588, 2589, 2590, 2591,2592, 2593: n = A,T,C or G

SEQ ID NO: 28209 - DNA, 1088 bp, Homo sapiens; identical to SEQ ID NO: 22369
  misc_feature 1, 2, 1081, 1083, 1084, 1085, 1086, 1087, 1088: n = A,T,C or G

SEQ ID NO: 28210 - DNA, 1231 bp, Homo sapiens; identical to SEQ ID NO: 21379

SEQ ID NO: 28211 - DNA, 2192 bp, Homo sapiens; identical to SEQ ID NO: 22371

SEQ ID NO: 28212 - DNA, 2361 bp, Homo sapiens; identical to SEQ ID NO: 20124
  misc_feature 1, 2, 3, 2361: n = A,T,C or G

SEQ ID NO: 28213 - DNA, 4305 bp, Homo sapiens; identical to SEQ ID NO: 22373
  misc_feature 1, 4303, 4304, 4305: n = A,T,C or G

SEQ ID NO: 28214 - DNA, 874 bp, Homo sapiens; identical to SEQ ID NO: 22375
  misc_feature 1, 2: n = A,T,C or G

SEQ ID NO: 28215 - DNA, 983 bp, Homo sapiens; identical to SEQ ID NO: 22376
  misc_feature 983: n = A,T,C or G

SEQ ID NO: 28216 - DNA, 886 bp, Homo sapiens; identical to SEQ ID NO: 21881
  misc_feature 1, 2, 3, 4, 5, 6, 886: n = A,T,C or G

SEQ ID NO: 28217 - DNA, 685 bp, Homo sapiens; identical to SEQ ID NO: 22378
  misc_feature 118, 119, 120, 121, 122, 123, 124, 125, 126, 127, 128, 129,130, 131, 132, 133, 134, 135, 136, 137, 138, 139, 140, 676,677, 678, 679, 680, 681, 682, 683, 684, 685: n = A,T,C or G

SEQ ID NO: 28218 - DNA, 1614 bp, Homo sapiens; identical to SEQ ID NO: 22379
  misc_feature 32, 71, 141, 937: n = A,T,C or G

SEQ ID NO: 28219 - DNA, 1189 bp, Homo sapiens; identical to SEQ ID NO: 22380
  misc_feature 1, 2, 1183, 1184, 1185, 1186, 1187, 1188, 1189: n = A,T,C or G

SEQ ID NO: 28220 - DNA, 1643 bp, Homo sapiens; identical to SEQ ID NO: 21150
  misc_feature 1, 2, 3, 4, 1615, 1616, 1617, 1618, 1619, 1620, 1621, 1622,1623, 1624, 1625, 1626, 1627, 1628, 1629, 1630, 1631, 1632,1633, 1634, 1635, 1636, 1637, 1638, 1639, 1640, 1641, 1642,1643: n = A,T,C or G

SEQ ID NO: 28221 - DNA, 2813 bp, Homo sapiens; identical to SEQ ID NO: 22385
  misc_feature 1, 2812, 2813: n = A,T,C or G

SEQ ID NO: 28222 - DNA, 886 bp, Homo sapiens; identical to SEQ ID NO: 21881
  misc_feature 1, 2, 3, 4, 5, 6, 886: n = A,T,C or G

SEQ ID NO: 28223 - DNA, 1120 bp, Homo sapiens; identical to SEQ ID NO: 22234
  misc_feature 1, 1119, 1120: n = A,T,C or G

SEQ ID NO: 28224 - DNA, 807 bp, Homo sapiens; identical to SEQ ID NO: 22388
  misc_feature 103, 104, 105, 106, 107, 108, 109, 110, 111, 112, 113, 114,115, 116, 117, 118, 119, 120, 121, 122, 123, 124, 125, 126,127, 128, 129, 130, 131, 132, 133, 134, 135, 136, 137, 138,139, 140, 141, 142, 143, 144, 145, 146, 147, 148, 149: n = A,T,C or G
  misc_feature 150, 151, 152, 153, 154, 155, 156, 157, 158, 159, 160, 161,162, 163, 164, 165, 166, 167, 168, 169, 170, 171, 172, 173,174, 175, 176, 177, 178, 179, 180, 181, 182, 183, 184, 185,186, 187, 188, 189, 190, 191, 192, 193, 194, 195, 196: n = A,T,C or G
  misc_feature 197, 198, 199, 200, 201, 202, 203, 204, 205, 206, 207, 208,209, 210, 211, 212, 213, 214, 215: n = A,T,C or G

SEQ ID NO: 28225 - DNA, 345 bp, Homo sapiens; identical to SEQ ID NO: 22389
  misc_feature 1, 2, 345: n = A,T,C or G

SEQ ID NO: 28226 - DNA, 1572 bp, Homo sapiens; identical to SEQ ID NO: 22390
  misc_feature 1569, 1570, 1571, 1572: n = A,T,C or G

SEQ ID NO: 28227 - DNA, 1337 bp, Homo sapiens; identical to SEQ ID NO: 22391
  misc_feature 1, 2, 3, 4, 1333, 1334, 1335, 1336, 1337: n = A,T,C or G

SEQ ID NO: 28228 - DNA, 1643 bp, Homo sapiens; identical to SEQ ID NO: 21150
  misc_feature 1, 2, 3, 4, 1615, 1616, 1617, 1618, 1619, 1620, 1621, 1622,1623, 1624, 1625, 1626, 1627, 1628, 1629, 1630, 1631, 1632,1633, 1634, 1635, 1636, 1637, 1638, 1639, 1640, 1641, 1642,1643: n = A,T,C or G

SEQ ID NO: 28229 - DNA, 508 bp, Homo sapiens; identical to SEQ ID NO: 21293
  misc_feature 502, 503, 504, 505, 506, 507, 508: n = A,T,C or G

SEQ ID NO: 28230 - DNA, 690 bp, Homo sapiens; identical to SEQ ID NO: 21104

SEQ ID NO: 28231 - DNA, 1643 bp, Homo sapiens; identical to SEQ ID NO: 21150
  misc_feature 1, 2, 3, 4, 1615, 1616, 1617, 1618, 1619, 1620, 1621, 1622,1623, 1624, 1625, 1626, 1627, 1628, 1629, 1630, 1631, 1632,1633, 1634, 1635, 1636, 1637, 1638, 1639, 1640, 1641, 1642,1643: n = A,T,C or G

SEQ ID NO: 28232 - DNA, 1120 bp, Homo sapiens; identical to SEQ ID NO: 22234
  misc_feature 1, 1119, 1120: n = A,T,C or G

SEQ ID NO: 28233 - DNA, 1643 bp, Homo sapiens; identical to SEQ ID NO: 21150
  misc_feature 1, 2, 3, 4, 1615, 1616, 1617, 1618, 1619, 1620, 1621, 1622,1623, 1624, 1625, 1626, 1627, 1628, 1629, 1630, 1631, 1632,1633, 1634, 1635, 1636, 1637, 1638, 1639, 1640, 1641, 1642,1643: n = A,T,C or G

SEQ ID NO: 28234 - DNA, 1643 bp, Homo sapiens; identical to SEQ ID NO: 21150
  misc_feature 1, 2, 3, 4, 1615, 1616, 1617, 1618, 1619, 1620, 1621, 1622,1623, 1624, 1625, 1626, 1627, 1628, 1629, 1630, 1631, 1632,1633, 1634, 1635, 1636, 1637, 1638, 1639, 1640, 1641, 1642,1643: n = A,T,C or G

SEQ ID NO: 28235 - DNA, 4060 bp, Homo sapiens; identical to SEQ ID NO: 22401
  misc_feature 4033, 4059, 4060: n = A,T,C or G

SEQ ID NO: 28236 - DNA, 1643 bp, Homo sapiens; identical to SEQ ID NO: 21150
  misc_feature 1, 2, 3, 4, 1615, 1616, 1617, 1618, 1619, 1620, 1621, 1622,1623, 1624, 1625, 1626, 1627, 1628, 1629, 1630, 1631, 1632,1633, 1634, 1635, 1636, 1637, 1638, 1639, 1640, 1641, 1642,1643: n = A,T,C or G

SEQ ID NO: 28237 - DNA, 4515 bp, Homo sapiens; identical to SEQ ID NO: 20660

SEQ ID NO: 28238 - DNA, 733 bp, Homo sapiens; identical to SEQ ID NO: 22404
  misc_feature 1, 2, 732, 733: n = A,T,C or G

SEQ ID NO: 28239 - DNA, 3265 bp, Homo sapiens; identical to SEQ ID NO: 20201

SEQ ID NO: 28240 - DNA, 1511 bp, Homo sapiens; identical to SEQ ID NO: 22407

SEQ ID NO: 28241 - DNA, 2171 bp, Homo sapiens; identical to SEQ ID NO: 22408
  misc_feature 1, 2, 3, 4, 5, 6, 7, 8, 9, 10, 11, 12, 13, 14, 2166, 2167,2168, 2169, 2170, 2171: n = A,T,C or G

SEQ ID NO: 28242 - DNA, 2229 bp, Homo sapiens; identical to SEQ ID NO: 22409

SEQ ID NO: 28243 - DNA, 1409 bp, Homo sapiens; identical to SEQ ID NO: 20290
  misc_feature 1, 2, 3, 4, 5, 6, 7, 1409: n = A,T,C or G

SEQ ID NO: 28244 - DNA, 674 bp, Homo sapiens; identical to SEQ ID NO: 22411
  misc_feature 674: n = A,T,C or G

SEQ ID NO: 28245 - DNA, 746 bp, Homo sapiens; identical to SEQ ID NO: 22412
  misc_feature 1, 2, 3, 4, 5, 6, 7, 8, 9, 10, 11, 12, 13, 14, 15, 16, 17,30: n = A,T,C or G

SEQ ID NO: 28246 - DNA, 529 bp, Homo sapiens; identical to SEQ ID NO: 20275

SEQ ID NO: 28247 - DNA, 1116 bp, Homo sapiens; identical to SEQ ID NO: 22413
  misc_feature 12, 1116: n = A,T,C or G

SEQ ID NO: 28248 - DNA, 2434 bp, Homo sapiens; identical to SEQ ID NO: 22414

SEQ ID NO: 28249 - DNA, 731 bp, Homo sapiens; identical to SEQ ID NO: 20529
  misc_feature 1, 2, 3, 4: n = A,T,C or G

SEQ ID NO: 28250 - DNA, 1957 bp, Homo sapiens; identical to SEQ ID NO: 22416
  misc_feature 1, 2, 3, 4, 5, 6, 7: n = A,T,C or G

SEQ ID NO: 28251 - DNA, 5538 bp, Homo sapiens; identical to SEQ ID NO: 22417
  misc_feature 5535, 5536, 5537, 5538: n = A,T,C or G

SEQ ID NO: 28252 - DNA, 380 bp, Homo sapiens; identical to SEQ ID NO: 20161
  misc_feature 1, 2: n = A,T,C or G

SEQ ID NO: 28253 - DNA, 344 bp, Homo sapiens; identical to SEQ ID NO: 22419
  misc_feature 79: n = A,T,C or G

SEQ ID NO: 28254 - DNA, 334 bp, Homo sapiens; identical to SEQ ID NO: 22420

SEQ ID NO: 28255 - DNA, 544 bp, Homo sapiens; identical to SEQ ID NO: 22421
  misc_feature 542, 543, 544: n = A,T,C or G

SEQ ID NO: 28256 - DNA, 798 bp, Homo sapiens; identical to SEQ ID NO: 22422

SEQ ID NO: 28257 - DNA, 7473 bp, Homo sapiens; identical to SEQ ID NO: 22423
  misc_feature 1, 2, 3, 7470, 7471, 7472, 7473: n = A,T,C or G

SEQ ID NO: 28258 - DNA, 560 bp, Homo sapiens; identical to SEQ ID NO: 22424
  misc_feature 557, 558, 559, 560: n = A,T,C or G

SEQ ID NO: 28259 - DNA, 836 bp, Homo sapiens; identical to SEQ ID NO: 22425
  misc_feature 1, 2, 3, 833, 834, 835, 836: n = A,T,C or G

SEQ ID NO: 28260 - DNA, 365 bp, Homo sapiens; identical to SEQ ID NO: 21784

SEQ ID NO: 28261 - DNA, 1042 bp, Homo sapiens; identical to SEQ ID NO: 22427
  misc_feature 1, 1042: n = A,T,C or G

SEQ ID NO: 28262 - DNA, 768 bp, Homo sapiens; identical to SEQ ID NO: 22428
  misc_feature 756, 757, 758, 759, 760, 761, 762, 763, 764, 765, 766, 767,768: n = A,T,C or G

SEQ ID NO: 28263 - DNA, 1811 bp, Homo sapiens; identical to SEQ ID NO: 22429
  misc_feature 1, 2, 3, 4, 5, 55, 56, 57, 58, 59, 60, 61, 62, 63, 64, 65,66, 67, 68, 69, 70, 71, 72, 73, 74, 75, 76, 77, 78, 79,80, 81, 90, 1811: n = A,T,C or G

SEQ ID NO: 28264 - DNA, 2358 bp, Homo sapiens; identical to SEQ ID NO: 22430
  misc_feature 1, 2, 3, 2358: n = A,T,C or G

SEQ ID NO: 28265 - DNA, 1082 bp, Homo sapiens; identical to SEQ ID NO: 22431
  misc_feature 1, 2, 3, 4, 1081, 1082: n = A,T,C or G

SEQ ID NO: 28266 - DNA, 1675 bp, Homo sapiens; identical to SEQ ID NO: 22432
  misc_feature 1, 2, 1675: n = A,T,C or G

SEQ ID NO: 28267 - DNA, 1015 bp, Homo sapiens; identical to SEQ ID NO: 22433
  misc_feature 1015: n = A,T,C or G

SEQ ID NO: 28268 - DNA, 727 bp, Homo sapiens; identical to SEQ ID NO: 21436
  misc_feature 1, 2, 3, 4, 5, 722, 723, 724, 725, 726, 727: n = A,T,C or G

SEQ ID NO: 28269 - DNA, 655 bp, Homo sapiens; identical to SEQ ID NO: 22435
  misc_feature 1: n = A,T,C or G

SEQ ID NO: 28270 - DNA, 866 bp, Homo sapiens; identical to SEQ ID NO: 22436
  misc_feature 1, 2, 3, 4, 5, 6, 7, 8, 9, 10, 11, 12, 13, 865, 866: n = A,T,C or G

SEQ ID NO: 28271 - DNA, 1811 bp, Homo sapiens; identical to SEQ ID NO: 22429
  misc_feature 1, 2, 3, 4, 5, 55, 56, 57, 58, 59, 60, 61, 62, 63, 64, 65,66, 67, 68, 69, 70, 71, 72, 73, 74, 75, 76, 77, 78, 79,80, 81, 90, 1811: n = A,T,C or G

SEQ ID NO: 28272 - DNA, 3636 bp, Homo sapiens; identical to SEQ ID NO: 22438
  misc_feature 3552, 3632: n = A,T,C or G

SEQ ID NO: 28273 - DNA, 960 bp, Homo sapiens; identical to SEQ ID NO: 22439
  misc_feature 1, 2, 3, 840, 843, 951, 952, 953, 954, 955, 956, 957, 958,959, 960: n = A,T,C or G

SEQ ID NO: 28274 - DNA, 1873 bp, Homo sapiens; identical to SEQ ID NO: 22440
  misc_feature 1, 2, 3, 4, 5, 6, 7, 8, 9, 10, 11, 32, 40, 1858, 1859, 1860,1861, 1862, 1863, 1864, 1865, 1866, 1867, 1868, 1869, 1870,1871, 1872, 1873: n = A,T,C or G

SEQ ID NO: 28275 - DNA, 4607 bp, Homo sapiens
  misc_feature 1, 2, 4606, 4607: n = A,T,C or G
nncgagctaagccggaggatgtgcagctgcggcggcggcgccggctacgaagaggacggggacaggcgccgtgcgaaccgagcccagccagccggaggacgcgggcagggcgggacgggagcccggactcgtctgccgccgccgtcgtcgccgtcgtgccggccccgcgtccccgcgcgcgagcgggaggagccgccgccacctcgcgcccgagccgccgctagcgcgcgccgggcatggtcccctcttaaaggcgcaggccgcggcggcgggggcgggcgtgcggaacaaagcgccggcgcggggcctgcgggcggctcgggggccgcgatgggcgcggcgggcccgcggcggcggcggcgctgcccgggccgggcctcgcggcgctagggcgggctggcctccgcgggcgggggcagcgggctgagggcgcgcggggcctgcggcggcggcggcggcggcggcggcggcccggcgggcggagcggcgcgggcatggccgcgcgcggccggcgcgcctggctcagcgtgctgctcgggctcgtcctgggcttcgtgctggcctcgcggctcgtcctgccccgggcttccgagctgaagcgagcgggcccacggcgccgcgccagccccgagggctgccggtccgggcaggcggcggcttcccaggccggcggggcgcgcggcgatgcgcgcggggcgcagctctggccgcccggctcggacccagatggcggcccgcgcgacaggaactttctcttcgtgggagtcatgaccgcccagaaatacctgcagactcgggccgtggccgcctacagaacatggtccaagacaattcctgggaaagttcagttcttctcaagtgagggttctgacacatctgtaccaattccagtagtgccactacggggtgtggacgactcctacccgccccagaagaagtccttcatgatgctcaagtacatgcacgaccactacttggacaagtatgaatggtttatgagagcagatgatgacgtgtacatcaaaggagaccgtctggagaacttcctgaggagtttgaacagcagcgagcccctctttcttgggcagacaggcctgggcaccacggaagaaatgggaaaactggccctggagcctggtgagaacttctgcatgggggggcctggcgtgatcatgagccgggaggtgcttcggagaatggtgccgcacattggcaagtgtctccgggagatgtacaccacccatgaggacgtggaggtgggaaggtgtgtccggaggtttgcaggggtgcagtgtgtctggtcttatgagatgcagcagcttttttatgagaattacgagcagaacaaaaaggggtacattagagatctccataacagtaaaattcaccaagctatcacattacaccccaacaaaaacccaccctaccagtacaggctccacagctacatgctgagccgcaagatatccgagctccgccatcgcacaatacagctgcaccgcgaaattgtcctgatgagcaaatacagcaacacagaaattcataaagaggacctccagctgggaatccctccctccttcatgaggtttcagccccgccagcgagaggagattctggaatgggagtttctgactggaaaatacttgtattcggcagttgacggccagccccctcgaagaggaatggactccgcccagagggaagccttggacgacattgtcatgcaggtcatggagatgatcaatgccaacgccaagaccagagggcgcatcattgacttcaaagagatccagtacggctaccgccgggtgaaccccatgtatggggctgagtacatcctggacctgctgcttctgtacaaaaagcacaaagggaagaaaatgacggtccctgtgaggaggcacgcgtatttacagcagactttcagcaaaatccagtttgtggagcatgaggagctggatgcacaagagttggccaagagaatcaatcaggaatctggatccttgtcctttctctcaaactccctgaagaagctcgtcccctttcagctccctgggtcgaagagtgagcacaaagaacccaaagataaaaagataaacatactgattcctttgtctgggcgtttcgacatgtttgtgagatttatgggaaactttgagaagacgtgtcttatccccaatcagaacgtcaagctcgtggttctgcttttcaattctgactccaaccctgacaaggccaaacaagttgaactgatgagagattaccgcattaagtaccctaaagccgacatgcagattttgcctgtgtctggagagttttcaagagccctggccctggaagtaggatcctcccagtttaacaatgaatctttgctcttcttctgcgacgtcgacctcgtgtttactacagaattccttcagcgatgtcgagcaaatacagttctgggccaacaaatatattttccaatcatcttcagccagtatgacccaaagattgtttatagtgggaaagttcccagtgacaaccattttgcctttactcagaaaactggcttctggagaaactatgggtttggcatcacgtgtatttataagggagatcttgtccgagtgggtggctttgatgtttccatccaaggctgggggctggaggatgtggaccttttcaacaaggttgtccaggcaggtttgaagacgtttaggagccaggaagtaggagtagtccacgtccaccatcctgtcttttgtgatcccaatcttgaccccaaacagtacaaaatgtgcttggggtccaaagcatcgacctatgggtccacacagcagctggctgagatgtggctggaaaaaaatgatccaagttacagtaaaagcagcaataataatggctcagtgaggacagcctaatgtccagctttgctggaaaagacgtttttaattatctaatttatttttcaaaaattttttgtatgatcagtttttgaagtccgtatacaaggatatattttacaagtggttttcttacataggactcctttaagattgagctttctgaacaagaaggtgatcagtgtttgcctttgaacacatcttcttgctgaacattatgtagcagacctgcttaactttgacttgaaatgtacctgatgaacaaaacttttttaaaaaaatgttttcttttgagaccctttgctccagtcctatggcagaaaacgtgaacattcctgcaaagtattattgtaacaaaacactgtaactctggtaaatgttctgttgtgattgttaacattccacagattctaccttttgtgttttgtttttttttttttacaattgttttaaagccatttcatgttccagttgtaagataaggaaatgtgataatagctgtttcatcattgtcttcaggagagctttccagagttgatcatttcccctcatggtactctgctcagcatggccacgtaggttttttgtttgttttgttttgttctttttttgagacggagtctcactctgttacccaggctggaatgcagtggcgcaatcttggctcactttaacctccacttccctggttcaagcaattcccctgcctttgcctcccgagtagctgggattacaggcacacaccaccacgcccagctagtttttttgtatttttagtagagacggggtttcaccatgcaagcccagctggccacgtaggttttaaagcaaggggcgtgaagaaggcacagtgaggtatgtggctgttctcgtggtagttcattcggcctaaatagacctggcattaaatttcaagaaggatttggcattttctcttcttgacccttctctttaaagggtaaaatattaatgtttagaatgacaaagatgaattattacaataaatctgatgtacacagactgaaacacacacacatacaccctaatcaaaacgttggggaaaaatgtatttggttttgttcctttcatcctgtctgtgttatgtgggtggagatggttttcattctttcattactgttttgttttatcctttgtatctgaaatacctttaatttatttaatatctgttgttcagagctctgccatttcttgagtacctgttagttagtattatttatgtgtatcgggagtgtgtttagtctgttttatttgcagtaaaccgatctccaaagatttccttttggaaacgctttttcccctccttaatttttatattccttactgttttactaaatattaagtgttctttgacaattttggtgctcatgtgttttggggacaaaagtgaaatgaatctgtcattataccagaaagttaaattctcagatcaaatgtgccttaataaatttgttttcatttagatttcaaacagtgatagacttgccattttaatacacgtcattggagggctgcgtatttgtaaatagcctgatgctcatttggaaaaataaaccagtgaacaatatttttctattgtacttttcagaaccattttgtctcattattcctgttttagctgaagaattgtattacatttggagagtaaaaaacttaaacacgaaaaaaaaaaaaaaaaaaaaaaaagtcatatgcggcctcgnn

SEQ ID NO: 28276 - DNA, 472 bp, Homo sapiens; identical to SEQ ID NO: 22441
  misc_feature 1, 2, 3, 4, 5, 6, 7, 8, 22, 51, 472: n = A,T,C or G

SEQ ID NO: 28277 - DNA, 1833 bp, Homo sapiens; identical to SEQ ID NO: 22442
  misc_feature 1, 137, 221, 243, 310, 1798, 1807, 1808, 1809, 1810, 1811,1812, 1813, 1814, 1815, 1816, 1817, 1818, 1819, 1820, 1821,1822, 1823, 1824, 1825, 1826, 1827, 1828, 1829, 1830, 1831,1832, 1833: n = A,T,C or G

SEQ ID NO: 28278 - DNA, 436 bp, Homo sapiens; identical to SEQ ID NO: 22443
  misc_feature 41: n = A,T,C or G

SEQ ID NO: 28279 - DNA, 432 bp, Homo sapiens; identical to SEQ ID NO: 22444

SEQ ID NO: 28280 - DNA, 1767 bp, Homo sapiens; identical to SEQ ID NO: 22445

SEQ ID NO: 28281 - DNA, 534 bp, Homo sapiens; identical to SEQ ID NO: 22446
  misc_feature 1, 2, 3, 4, 38, 532, 533, 534: n = A,T,C or G

SEQ ID NO: 28282 - DNA, 3047 bp, Homo sapiens; identical to SEQ ID NO: 22447
  misc_feature 3039, 3040, 3041, 3042, 3043, 3044, 3045, 3046, 3047: n = A,T,C or G

SEQ ID NO: 28283 - DNA, 344 bp, Homo sapiens; identical to SEQ ID NO: 22448
  misc_feature 1, 2: n = A,T,C or G

SEQ ID NO: 28284 - DNA, 407 bp, Homo sapiens; identical to SEQ ID NO: 21346
  misc_feature 407: n = A,T,C or G

SEQ ID NO: 28285 - DNA, 2491 bp, Homo sapiens; identical to SEQ ID NO: 20436

SEQ ID NO: 28286 - DNA, 1559 bp, Homo sapiens; identical to SEQ ID NO: 22451

SEQ ID NO: 28287 - DNA, 1497 bp, Homo sapiens; identical to SEQ ID NO: 22452
  misc_feature 1, 2, 3, 4, 5, 6, 7, 8, 9, 10, 11, 12, 1493, 1494, 1495,1496, 1497: n = A,T,C or G

SEQ ID NO: 28288 - DNA, 1618 bp, Homo sapiens; identical to SEQ ID NO: 22453

SEQ ID NO: 28289 - DNA, 1290 bp, Homo sapiens; identical to SEQ ID NO: 22454
  misc_feature 1289, 1290: n = A,T,C or G

SEQ ID NO: 28290 - DNA, 1600 bp, Homo sapiens; identical to SEQ ID NO: 22455
  misc_feature 1, 2, 3, 4, 1598, 1599, 1600: n = A,T,C or G

SEQ ID NO: 28291 - DNA, 1194 bp, Homo sapiens; identical to SEQ ID NO: 22456
  misc_feature 1193, 1194: n = A,T,C or G

SEQ ID NO: 28292 - DNA, 2991 bp, Homo sapiens; identical to SEQ ID NO: 22457
  misc_feature 1, 2, 3, 4, 5, 6: n = A,T,C or G

SEQ ID NO: 28293 - DNA, 607 bp, Homo sapiens; identical to SEQ ID NO: 21409
  misc_feature 1, 2, 3, 4, 5, 606, 607: n = A,T,C or G

SEQ ID NO: 28294 - DNA, 389 bp, Homo sapiens; identical to SEQ ID NO: 22459
  misc_feature 1, 2, 3, 4, 5, 6, 7, 8, 387, 388, 389: n = A,T,C or G

SEQ ID NO: 28295 - DNA, 760 bp, Homo sapiens; identical to SEQ ID NO: 22460
  misc_feature 1: n = A,T,C or G

SEQ ID NO: 28296 - DNA, 3291 bp, Homo sapiens; identical to SEQ ID NO: 22461
  misc_feature 3271, 3272, 3273, 3274, 3275, 3276, 3277, 3278, 3279, 3280,3281, 3282, 3283, 3284, 3285, 3286, 3287, 3288, 3289, 3290,3291: n = A,T,C or G

SEQ ID NO: 28297 - DNA, 1086 bp, Homo sapiens; identical to SEQ ID NO: 22462
  misc_feature 1, 2, 3, 4, 5, 6, 7, 8, 9, 10, 11, 12, 13, 14, 15, 16, 17,1083, 1084, 1085, 1086: n = A,T,C or G

SEQ ID NO: 28298 - DNA, 3595 bp, Homo sapiens; identical to SEQ ID NO: 22463
  misc_feature 1, 2, 3, 4, 5, 6, 7, 8, 9, 10, 11, 3592, 3593, 3594, 3595: n = A,T,C or G

SEQ ID NO: 28299 - DNA, 681 bp, Homo sapiens; identical to SEQ ID NO: 20120
  misc_feature 1, 2, 12: n = A,T,C or G

SEQ ID NO: 28300 - DNA, 442 bp, Homo sapiens; identical to SEQ ID NO: 22465
  misc_feature 1, 436, 437, 438, 439, 440, 441, 442: n = A,T,C or G

SEQ ID NO: 28301 - DNA, 3073 bp, Homo sapiens; identical to SEQ ID NO: 20293
  misc_feature 1, 2, 3, 3070, 3071, 3072, 3073: n = A,T,C or G

SEQ ID NO: 28302 - DNA, 368 bp, Homo sapiens; identical to SEQ ID NO: 22467
  misc_feature 1: n = A,T,C or G

SEQ ID NO: 28303 - DNA, 1072 bp, Homo sapiens; identical to SEQ ID NO: 22468
  misc_feature 1071, 1072: n = A,T,C or G

SEQ ID NO: 28304 - DNA, 610 bp, Homo sapiens; identical to SEQ ID NO: 20783

SEQ ID NO: 28305 - DNA, 393 bp, Homo sapiens
  misc_feature 1, 2, 3, 4, 5, 6, 7, 8, 390, 391, 392, 393: n = A,T,C or G
nnnnnnnnataggaagacttgaaaagggttgtaggtcagaggaaaaaaaaatcagaagggagaaaggatttaataatctttattggcaggaggttcatatttctaacttaaatctatagcccaaatcatttcctcttgctttgtttttaaagatcaagaacttcaatttcccatcctttacatggtgaaggccttcatatatttggggtatgttattaaatcacacctcagccttcagttctggccgaaaataccaatcaatcagtctttttttgtgaattttactttccaaacttttaataatctccatgactttttctttgtgctcctctccatgtattacagagtcttacttagaaaaatccacaagatgatccaacctttattaannnn

SEQ ID NO: 28306 - DNA, 620 bp, Homo sapiens; identical to SEQ ID NO: 22471
  misc_feature 1: n = A,T,C or G

SEQ ID NO: 28307 - DNA, 518 bp, Homo sapiens
  misc_feature 514, 515, 516, 517, 518: n = A,T,C or G
acagatacatagctgattaggcagatggtttaaaggaggactgcagggtagagaagcaagcacagtgggcgcctctttaggaagtgacacttacagcctgcatgtgcagtatggctgtgaaggggcagatatcatagcacacctaactcaacaggatcttacttgaactgctgtgagttggtcaagtcagggcacttctgctcttcaggctcctctaggtcacacctttgaccaccctacatctgtttcctctttcaggctccagtagtagtcttaaaagtgaagtttatctaaggataagcacatgcctatcttgctcactgctgtgtccccactttttagcacagcgcctgctgcttgacaggtactcaaatatctgctggactttaattacttattaattaaggctcttattttccagtcatgggacaaatccttggggtttgactcctaaaactcttttaagggtacccaatggggaacgtgggtttgttaactgtccagagggttgtgnnnnn

SEQ ID NO: 28308 - DNA, 1001 bp, Homo sapiens; identical to SEQ ID NO: 21314
  misc_feature 681, 682, 683, 684, 685, 686, 687, 688, 689, 690, 691, 692,693, 694, 695, 696, 697, 698, 699, 700, 701, 702, 703, 704,705, 706, 707, 708, 709, 710, 711, 712, 713, 714, 715, 716,717, 718: n = A,T,C or G

SEQ ID NO: 28309 - DNA, 1648 bp, Homo sapiens; identical to SEQ ID NO: 22474
  misc_feature 1, 1636, 1637, 1638, 1639, 1640, 1641, 1642, 1643, 1644,1645, 1646, 1647, 1648: n = A,T,C or G

SEQ ID NO: 28310 - DNA, 705 bp, Homo sapiens; identical to SEQ ID NO: 22475
  misc_feature 1, 2, 3, 4, 5, 6, 7, 8, 9, 10, 11, 12, 13, 14, 15, 16, 17: n = A,T,C or G

SEQ ID NO: 28311 - DNA, 936 bp, Homo sapiens; identical to SEQ ID NO: 22476
  misc_feature 1, 2, 933, 934, 935, 936: n = A,T,C or G

SEQ ID NO: 28312 - DNA, 466 bp, Homo sapiens; identical to SEQ ID NO: 22477
  misc_feature 1, 2: n = A,T,C or G

SEQ ID NO: 28313 - DNA, 670 bp, Homo sapiens; identical to SEQ ID NO: 21478
  misc_feature 623, 625, 670: n = A,T,C or G

SEQ ID NO: 28314 - DNA, 2069 bp, Homo sapiens; identical to SEQ ID NO: 22479
  misc_feature 1: n = A,T,C or G

SEQ ID NO: 28315 - DNA, 2582 bp, Homo sapiens; identical to SEQ ID NO: 22480
  misc_feature 1, 2, 3, 4, 5, 6, 7, 8, 9, 10, 11, 12, 13, 14, 15, 16, 17,18, 19, 20, 21, 22, 23, 24, 26, 27, 28, 29, 30, 31, 32,33, 34, 35, 36, 37, 38, 39, 40, 41, 42, 43, 44, 45, 46,47, 48, 49, 50, 51, 52, 53, 54, 56, 57, 58, 60, 61, 62,63: n = A,T,C or G
  misc_feature 64, 65, 66, 67, 68, 69, 70, 71, 72, 73, 74, 75, 76, 77, 78,79, 80, 81, 82, 83, 84, 85, 86, 87, 88, 89, 90, 91, 92,93, 94, 95, 96, 97, 98, 99, 100, 101, 102, 109, 2546, 2562,2577, 2578, 2579, 2580, 2581, 2582: n = A,T,C or G

SEQ ID NO: 28316 - DNA, 1023 bp, Homo sapiens; identical to SEQ ID NO: 22481
  misc_feature 880: n = A,T,C or G

SEQ ID NO: 28317 - DNA, 353 bp, Homo sapiens; identical to SEQ ID NO: 22483

SEQ ID NO: 28318 - DNA, 414 bp, Homo sapiens; identical to SEQ ID NO: 22484
  misc_feature 1: n = A,T,C or G

SEQ ID NO: 28319 - DNA, 408 bp, Homo sapiens; identical to SEQ ID NO: 21570
  misc_feature 1: n = A,T,C or G

SEQ ID NO: 28320 - DNA, 7639 bp, Homo sapiens; identical to SEQ ID NO: 22486
  misc_feature 1, 7612, 7613, 7614, 7615, 7616, 7617, 7618, 7619, 7620,7621, 7622, 7623, 7624, 7625, 7626, 7627, 7628, 7629, 7630,7631, 7632, 7633, 7634, 7635, 7636, 7637, 7638, 7639: n = A,T,C or G

SEQ ID NO: 28321 - DNA, 1147 bp, Homo sapiens; identical to SEQ ID NO: 22487
  misc_feature 1, 2: n = A,T,C or G

SEQ ID NO: 28322 - DNA, 350 bp, Homo sapiens; identical to SEQ ID NO: 22488

SEQ ID NO: 28323 - DNA, 2019 bp, Homo sapiens; identical to SEQ ID NO: 22489
  misc_feature 2005, 2006, 2007, 2008, 2009, 2010, 2011, 2012, 2013, 2014,2015, 2016, 2017, 2018, 2019: n = A,T,C or G

SEQ ID NO: 28324 - DNA, 3075 bp, Homo sapiens; identical to SEQ ID NO: 22490
  misc_feature 1, 2, 3074, 3075: n = A,T,C or G

SEQ ID NO: 28325 - DNA, 2375 bp, Homo sapiens; identical to SEQ ID NO: 22491
  misc_feature 2358, 2360, 2361, 2362, 2363, 2364, 2365, 2366, 2367, 2368,2369, 2370, 2371, 2372, 2373, 2374, 2375: n = A,T,C or G

SEQ ID NO: 28326 - DNA, 369 bp, Homo sapiens; identical to SEQ ID NO: 21651
  misc_feature 1, 2, 3, 4, 5, 6, 7, 8: n = A,T,C or G

SEQ ID NO: 28327 - DNA, 2060 bp, Homo sapiens; identical to SEQ ID NO: 22493
  misc_feature 2045, 2046, 2047, 2048, 2049, 2050, 2051, 2052, 2053, 2054,2055, 2056, 2057, 2058, 2059, 2060: n = A,T,C or G

SEQ ID NO: 28328 - DNA, 5301 bp, Homo sapiens; identical to SEQ ID NO: 21447
  misc_feature 1, 2, 3, 4, 5, 5179, 5180, 5181, 5182, 5183, 5184, 5185,5186, 5187, 5188, 5189, 5190, 5191, 5192, 5193, 5194, 5195,5196, 5197, 5198, 5199, 5200, 5201, 5202, 5203, 5204, 5205,5206, 5207, 5208, 5209, 5210, 5211, 5212, 5213, 5214: n = A,T,C or G
  misc_feature 5295, 5296, 5297, 5298, 5299, 5300, 5301: n = A,T,C or G

SEQ ID NO: 28329 - DNA, 798 bp, Homo sapiens; identical to SEQ ID NO: 22495
  misc_feature 788, 789, 790, 791, 792, 793, 794, 795, 796, 797, 798: n = A,T,C or G

SEQ ID NO: 28330 - DNA, 564 bp, Homo sapiens; identical to SEQ ID NO: 22496
  misc_feature 564: n = A,T,C or G

SEQ ID NO: 28331 - DNA, 2473 bp, Homo sapiens
  misc_feature 1, 2, 3, 4, 5, 6, 7, 8, 9, 10, 11, 2459, 2460, 2461, 2462,2463, 2464, 2465, 2466, 2467, 2468, 2469, 2470, 2471, 2472,2473: n = A,T,C or G
nnnnnnnnnnncgatggaataaaagaagatggagagacttcagcgcctgggactcgggtgggcgaggcggaaggtgtcctcgcagcacggcttttctccgcgccgcggttggttagcgagtgccctctgggtgctaggcgttgggcggatggtaggatcgcggtagcatacggatccgagtcctgcggagcggcggcggaccacctccaggggctaagtgatggatcttgtactccgtgttgcagattactatttttttacaccatacgtgtatccagccacatggccagaagatgacatcttccgacaagctattagtcttctgattgtaacaaatgttggtgcttacatcctttatttcttctgtgcaacactgagctattattttgtcttcgatcatgcattaatgaaacatccacaatttttaaagaatcaagtccgtcgagagattaagtttactgtccaggcattgccatggataagtattcttactgttgcactgttcttgctggagataagaggttacagcaaattacatgatgacctaggagagtttccatatggattgtttgaacttgtcgttagtataatatctttcctctttttcactgacatgttcatctactggattcacagaggccttcatcatagactggtatataagcgcctacataaacctcaccatatttggaagattcctactccatttgcaagtcatgcttttcaccctattgatggctttcttcagagtctaccttaccatatatacccttttatctttccattacacaaggtggtttatttaagtctgtacatcttggttaatatctggacaatttccattcatgacggtgattttcgtgtcccccaaatcttacagccatttattaatggctcagctcatcatacagaccaccatatgttctttgactataattatggacaatatttcactttgtgggataggattggcggctcattcaaaaatccttcatcctttgaggggaagggaccgctcagttatgtgaaggagatgacagagggaaagcgcagcagccattcaggaaatggctgtaagaatgaaaaattattcaatggagagtttacaaagactgaatagattattgcccagttattcttaagtaaggacaaagaaggaaatatcatcgtatttcttttttttaataaggaaaaaataatctccatacagtcaagatacatagtaaatggtatcatttggaaatcagcatcgtgggcactgctgaggaatgatcctagtggtaggtcagaagaagatgctgtgaacaccaggactttaatcttatgcttaaaatgccagatgttgttcgggggacaacttgtatctttctagcagcagatctgtagtttgtatagcctcaacaacaattttaaataagatggagaataaattattgaggggactaggctatatgcatttgccttcatccacccatgtttattaagaatcattgtgcttaataataccaagactaagcaccataaccaagaaatactaatgtaaagattgtttcttgtttcaggaatggttaattcttcaacgttggtatgataatgataacttgttttgacttgaataaagtactacatcagtgtggaaaaaaattctgatacattagcagctatgtaaatgacctaattgatagcaggtgtaataagactatcgtcttcctacacataggaggctcattctctggacacactatcacctattacattttactgattaacaaataaattggaatttaaaaatatcgatatcaccatgatttaatccagatctgggattatgtagctaaacattgtgatgattattatttaaaaccattatttaataagagtaaaaatatgtgaatctggatatatttaaaaaaagaaatttgatgcccagataatatattaggcactactgattttttagttaaattgatgcactacacttttgatgtttgaagttacaaacctgtaatttttttgtaaaggaaataattgccaaatacctaggcccattgctgacgattagttctaaaatcttattcctcctcttctcccctcacttttccctacttcctctgcaaaaagatttaacaaatacattcataaggaaatgtgtgttgtaacaaatatattgcaaaaacatagtttgtaaaggcattctataagctatttatgtaaaatcaataaaagttgatcataattaaactgtatcagtttagtactagaaaaaattttggggctgctgaagagttttaaccatgtttggcgcgccgaaggaatggaagtgagtgtctagaaatggtacatgtgtgtgtttacaaaaagcggggcgggttaaaacaagtgttggcttggataagagaagaaaacgggggaaaaggggagaaagtgaagggatcaaatacgagaaaaacgatataagnnnnnnnnnnnnnnn

SEQ ID NO: 28332 - DNA, 1929 bp, Homo sapiens; identical to SEQ ID NO: 22498
  misc_feature 1, 2, 3, 1928, 1929: n = A,T,C or G

SEQ ID NO: 28333 - DNA, 2841 bp, Homo sapiens; identical to SEQ ID NO: 21617

SEQ ID NO: 28334 - DNA, 1435 bp, Homo sapiens; identical to SEQ ID NO: 22566
  misc_feature 1, 2, 3, 1432, 1433, 1434, 1435: n = A,T,C or G

SEQ ID NO: 28335 - DNA, 665 bp, Homo sapiens; identical to SEQ ID NO: 22500
  misc_feature 1: n = A,T,C or G

SEQ ID NO: 28336 - DNA, 1886 bp, Homo sapiens; identical to SEQ ID NO: 22501
  misc_feature 1, 2, 3, 4, 1885, 1886: n = A,T,C or G

SEQ ID NO: 28337 - DNA, 1308 bp, Homo sapiens; identical to SEQ ID NO: 22128
  misc_feature 208, 209, 210, 211, 212, 213, 214, 215, 216, 217, 218, 219,220, 221, 222, 223, 224, 225, 226, 227, 228, 229, 230, 231: n = A,T,C or G

SEQ ID NO: 28338 - DNA, 1600 bp, Homo sapiens; identical to SEQ ID NO: 22503
  misc_feature 1, 1598, 1599, 1600: n = A,T,C or G

SEQ ID NO: 28339 - DNA, 504 bp, Homo sapiens; identical to SEQ ID NO: 22504
  misc_feature 1, 2, 3, 4, 5, 503, 504: n = A,T,C or G

SEQ ID NO: 28340 - DNA, 2256 bp, Homo sapiens; identical to SEQ ID NO: 22505

SEQ ID NO: 28341 - DNA, 1954 bp, Homo sapiens
  misc_feature 1932, 1952, 1953, 1954: n = A,T,C or G
accatgggtggttagtagaccctcagattgatgacattgtaaaagctgttggtaactgcagctacaaccaactagtggagaagatcatctcttgtaaacagtcagacaatagtgagctggttagtgaaggctttgtagctgagcagtttctaaataacacagccactcaactgacataccatggattatgtgaactaacttcaacggttcaggaaggagaactttgtgtgttctttcggaataatcattttagcaccatgaccaaatacaagggtcaactgtatttgttggtaacggaccaggggtttcttactgaagagaaagttgtttgggaaagcctacacaacgtagatggtgatggaaatttctgtgactcagaatttcatcttcgacctccttcagatcctgaaactgtatacaaaggacaacaagatcagatagatcaggattatcttatggcattatctctacaacaagaacagcagagccaagagatcaattgggaacaaatcccggaaggaatcagtgatttggaactagcaaagaaactccaagaggaagaggacagacgggcttctcaatactatcaggaacaggaacaagcagcagctgctgctgctgctgcttctacacaggctcagcagggccagccagcacaagcctctccatcaagtggaagacaatctgggaatagtgaacgtaaacggaaggaaccacgagaaaaagataaagaaaaagaaaaggaaaaaaatagctgtgttattttgtaacaagtgttggcttctgttggaaccacctatatgtcttgagaaacaaaaccacaggaggaaaggaagaaaaaccgatcaataccgtctgtgcctgatttcctaatggattttgttcgttttttcaggggaacggttgttacttagttacaatcagactttttcaagtcacacaatacactctttatgagctggagtttcatgttacaagttggaaatgctgtgtgttgtcattcatgaaaaatactgcacttgtagccagattagcaaatcacagcaaattttgtgtcatagtgacattcataactcatatcagttagtaagctattatatcttctgttctaacaatgaatggaggtaattgatttagtctgattccttcctgaaatctaaatattagcacaatagtttctgaaattttacaatgttaaattatgatctaattcatgagaaaccacgggtttaacatagggattcaaaaaaacaaaaacaaaagaataggaataaataacccttaattgtatattggactagttcagcccttaaacagctttacctttatttaggaatgtacattttaggtattatcttgatcatggagcttagatttaatttagatagcaaaaataaagatttgtatttcttttccaatagcaaaaagttacataacactaatacttataacctatcaatatcagatattaatgactttgtagtgttgtaaaattttgaggaattttggagtctttatcataggtaacctggaccacagttactatttattgacaatgtgattgagtgtatggaggaaagcacagtggatgctaggctttgtaaatatggggatgtagaaaagcagatagttcagtgtctacctttttctagaactaccttgaaccttaaattttaagtcatgttcattgctagaaaattaaatgtacttattaaaaccaatgaaaaagcacatttctgaaatgaagttagagataatctctgtgtcttataaaaagacattaataaaaatctgaaaggggccgggcgccattggctcacgcctgttatccccaacattttcggggaagcccaaggtggggcggatcatcctaaggccaggaattccaaaaacagccctggggcctccagaaaccctgtctctctaaaaatnccaaaaatcagcctgggcannn

SEQ ID NO: 28342 - DNA, 1245 bp, Homo sapiens; identical to SEQ ID NO: 22507
  misc_feature 1, 2, 1216, 1224, 1238, 1239, 1240, 1241, 1242, 1243, 1244,1245: n = A,T,C or G

SEQ ID NO: 28343 - DNA, 388 bp, Homo sapiens; identical to SEQ ID NO: 22508

SEQ ID NO: 28344 - DNA, 1537 bp, Homo sapiens; identical to SEQ ID NO: 22509
  misc_feature 1, 1527, 1528, 1529, 1530, 1531, 1532, 1533, 1534, 1535,1536, 1537: n = A,T,C or G

SEQ ID NO: 28345 - DNA, 910 bp, Homo sapiens; identical to SEQ ID NO: 22510
  misc_feature 1, 2, 3, 4, 908, 909, 910: n = A,T,C or G

SEQ ID NO: 28346 - DNA, 1522 bp, Homo sapiens; identical to SEQ ID NO: 22511
  misc_feature 1, 1512, 1513, 1514, 1515, 1516, 1517, 1518, 1519, 1520,1521, 1522: n = A,T,C or G

SEQ ID NO: 28347 - DNA, 1575 bp, Homo sapiens; identical to SEQ ID NO: 22512

SEQ ID NO: 28348 - DNA, 1317 bp, Homo sapiens; identical to SEQ ID NO: 22513

SEQ ID NO: 28349 - DNA, 1760 bp, Homo sapiens; identical to SEQ ID NO: 22514
  misc_feature 1, 2, 3, 4, 1759, 1760: n = A,T,C or G

SEQ ID NO: 28350 - DNA, 853 bp, Homo sapiens; identical to SEQ ID NO: 22515
  misc_feature 838, 839, 840, 841, 842, 843, 844, 845, 846, 847, 848, 849,850, 851, 852, 853: n = A,T,C or G

SEQ ID NO: 28351 - DNA, 2925 bp, Homo sapiens; identical to SEQ ID NO: 22516

SEQ ID NO: 28352 - DNA, 1297 bp, Homo sapiens; identical to SEQ ID NO: 22517

SEQ ID NO: 28353 - DNA, 504 bp, Homo sapiens; identical to SEQ ID NO: 22504
  misc_feature 1, 2, 3, 4, 5, 503, 504: n = A,T,C or G

SEQ ID NO: 28354 - DNA, 2427 bp, Homo sapiens; identical to SEQ ID NO: 22519
  misc_feature 1, 2, 3, 2415, 2416, 2417, 2418, 2419, 2420, 2421, 2422,2423, 2424, 2425, 2426, 2427: n = A,T,C or G

SEQ ID NO: 28355 - DNA, 402 bp, Homo sapiens; identical to SEQ ID NO: 20098
  misc_feature 1, 2, 3, 4, 401, 402: n = A,T,C or G

SEQ ID NO: 28356 - DNA, 990 bp, Homo sapiens; identical to SEQ ID NO: 22521
  misc_feature 1, 2: n = A,T,C or G

SEQ ID NO: 28357 - DNA, 2586 bp, Homo sapiens; identical to SEQ ID NO: 22522
  misc_feature 1, 2332, 2348, 2372, 2375, 2383, 2387, 2399, 2412, 2425,2429, 2438, 2454, 2459, 2469, 2495, 2514, 2524, 2538, 2545,2552, 2562, 2566, 2572, 2573, 2574, 2575, 2576, 2577, 2578,2579, 2580, 2581, 2582, 2583, 2584, 2585, 2586: n = A,T,C or G

SEQ ID NO: 28358 - DNA, 438 bp, Homo sapiens; identical to SEQ ID NO: 22523
  misc_feature 1, 2, 3, 4: n = A,T,C or G

SEQ ID NO: 28359 - DNA, 569 bp, Homo sapiens; identical to SEQ ID NO: 20236
  misc_feature 567, 568, 569: n = A,T,C or G

SEQ ID NO: 28360 - DNA, 555 bp, Homo sapiens; identical to SEQ ID NO: 22525
  misc_feature 491, 553, 554, 555: n = A,T,C or G

SEQ ID NO: 28361 - DNA, 803 bp, Homo sapiens; identical to SEQ ID NO: 22526
  misc_feature 1, 2, 3, 803: n = A,T,C or G

SEQ ID NO: 28362 - DNA, 741 bp, Homo sapiens; identical to SEQ ID NO: 21831

SEQ ID NO: 28363 - DNA, 583 bp, Homo sapiens; identical to SEQ ID NO: 22528
  misc_feature 1, 2, 48, 49, 52, 53, 54, 55, 56, 58, 59, 60: n = A,T,C or G

SEQ ID NO: 28364 - DNA, 1656 bp, Homo sapiens; identical to SEQ ID NO: 22529
  misc_feature 1656: n = A,T,C or G

SEQ ID NO: 28365 - DNA, 2076 bp, Homo sapiens; identical to SEQ ID NO: 22530
  misc_feature 1, 2, 3, 4, 5, 6, 7, 8, 9, 10, 11, 12, 13, 14, 2074, 2075,2076: n = A,T,C or G

SEQ ID NO: 28366 - DNA, 2991 bp, Homo sapiens; identical to SEQ ID NO: 22457
  misc_feature 1, 2, 3, 4, 5, 6: n = A,T,C or G

SEQ ID NO: 28367 - DNA, 275 bp, Homo sapiens; identical to SEQ ID NO: 22532
  misc_feature 1, 2, 3, 4, 5, 6, 7: n = A,T,C or G

SEQ ID NO: 28368 - DNA, 1770 bp, Homo sapiens
tatagggagtcgacccacgcgtccgctgaccttcagcgcctcggctccagcgccatggcgccctccaggaagttcttcgttgggggaaactggaagatgaacgggcggaagcagagtctgggggagctcatcggcactctgaacgcggccaaggtgccggccgacaccgaggtggtttgtgctccccctactgcctatatcgacttcgcccggcagaagctagatcccaagattgctgtggctgcgcagaactgctacaaagtgactaatggggcttttactggggagatcagccctggcatgatcaaagactgcggagccacgtgggtggtcctggggcactcagagagaaggcatgtctttggggagtcagatgaggttagtagccaagagagaagataagggatgtctttttccaagaaggatgtctcaccaagtctgtttctcaacagctgattgggcagaaagtggcccatgctctggcagagggactcggagtaatcgcctgcattggggagaagctagatgaaagggaagctggcatcactgagaaggttgttttcgagcagacaaaggtcatcgcagataacgtgaaggactggagcaaggtcgtcctggcctatgagcctgtgtgggccattggtactggcaagactgcaacaccccaacaggcccaggaagtacacgagaagctccgaggatggctgaagtccaacgtctctgatgcggtggctcagagcacccgtatcatttatggaggctctgtgactggggcaacctgcaaggagctggccagccagcctgatgtggatggcttccttgtgggtggtgcttccctcaagcccgaattcgtggacatcatcaatgccaaacaatgagccccatccatcttccctacccttcctgccaagccagggactaagcagcccagaagcccagtaactgccctttccctgcatatgcttctgatggtgtcatctgctccttcctgtggcctcatccaaactgtatcttcctttactgtttatatcttcaccctgtaatggttgggaccaggccaatcccttctccacttactataatggttggaactaaacgtcaccaaggtggcttctccttggctgagagatggaaggcgtggtgggatttgctcctgggttccctagggccctagtgagggcagaagagaaaccatcctctcccttcttacaccgtgaggccaagatcccctcagaaggcaggagtgctgccctctcccatggtgcccgtgcctctgtgctgtgtatgtgaaccacccatgtgagggaataaacctggcactaggaacaacaaaaaaaaaacagagagacacaaaccaaagcaaacacacccaggaggccaaaacgcgggcgcgcgaaaaagggaccagaagcagacacaggggcaacggagtatctagcgacaacttcgtcacaaagtgcgcaaaccggaggccccaaatagagagccaaaacagaaacacaggccagtagacaagaccagaggacacaaaaacgaagaaggagagagggacagagagcacgacgaaagccgaagacggaacagaagcagactcacagaagcgaggaaggaaagagcaagacgaacgccggaggcagccgcaaacggacagaaaaacagaccagaagaggggccacaaggagagagagagaacaacacaacaacagaagaagaacgaacaaacgaagacaaaagaagacgaagcaaggagaaaaccgacgcgcagccgga

SEQ ID NO: 28369 - DNA, 1161 bp, Homo sapiens; identical to SEQ ID NO: 22534
  misc_feature 1153, 1154, 1155, 1156, 1157, 1158, 1159, 1160, 1161: n = A,T,C or G

SEQ ID NO: 28370 - DNA, 1203 bp, Homo sapiens; identical to SEQ ID NO: 21765
  misc_feature 1, 7, 9, 11, 1199, 1200, 1201, 1202, 1203: n = A,T,C or G

SEQ ID NO: 28371 - DNA, 562 bp, Homo sapiens; identical to SEQ ID NO: 21327
  misc_feature 1, 2, 3, 4, 5, 6, 7, 8, 9, 10, 11, 12, 13, 14, 15, 16, 17,18, 19, 20, 21, 22, 23, 24, 25, 26, 27, 28, 29, 30, 31,32, 33, 34: n = A,T,C or G

SEQ ID NO: 28372 - DNA, 585 bp, Homo sapiens; identical to SEQ ID NO: 22537
  misc_feature 1, 582, 583, 584, 585: n = A,T,C or G

SEQ ID NO: 28373 - DNA, 687 bp, Homo sapiens; identical to SEQ ID NO: 22538
  misc_feature 684, 685, 686, 687: n = A,T,C or G

SEQ ID NO: 28374 - DNA, 718 bp, Homo sapiens; identical to SEQ ID NO: 22539
  misc_feature 713, 714, 715, 716, 717, 718: n = A,T,C or G

SEQ ID NO: 28375 - DNA, 562 bp, Homo sapiens; identical to SEQ ID NO: 21327
  misc_feature 1, 2, 3, 4, 5, 6, 7, 8, 9, 10, 11, 12, 13, 14, 15, 16, 17,18, 19, 20, 21, 22, 23, 24, 25, 26, 27, 28, 29, 30, 31,32, 33, 34: n = A,T,C or G

SEQ ID NO: 28376 - DNA, 1090 bp, Homo sapiens; identical to SEQ ID NO: 22541
  misc_feature 1: n = A,T,C or G

SEQ ID NO: 28377 - DNA, 508 bp, Homo sapiens; identical to SEQ ID NO: 22542
  misc_feature 1, 2, 493, 494, 495, 496, 497, 498, 499, 500, 501, 502, 503,504, 505, 506, 507, 508: n = A,T,C or G

SEQ ID NO: 28378 - DNA, 6800 bp, Homo sapiens
  misc_feature 1: n = A,T,C or G
natgtaacacataacataaaaaatatattaatccactgttaccagtaaggagtctggtgaataacagttaagttttggggagtaaaaactgtttcaatttttgactgtgttgggggttggtgctcctaatccctgtgttgttaaagggtcgactatattgtatttttgaaaattgctagagagtggacgtaaagtgttctcactaaacaaattataactatgtgaggtagtgcatatattaagtagctagatttggtcattccacaatgtatatgtacttcaaaacatcatgttgtacatgagaaacacagttttatctgttagtcagttttaaaaataaaaaatattccaactagaaactctgttgtagtttttgaaattacaacttggaggctttgaggaactgattagaagtctcctttctgtttcaggctttcatatccaaaccatagatctttagaagtaacatctgttaattaattattaataaatagtttgagtctttattaattcatggataacttgaccattttctctctccttttgcttagataatcccagatcatggccgggcacagtagctcacgcctgtattcccagcagtttgggaggccgaggcaggcagatcacttgaactcaggagtttgagaccagcttgggcaacatggcaaaaccctgtctctattaaaaatacaaaaattagctgggcatggtagtgcatgcctgtagtcccagctacctgggaggctgaggtgggaggatcgcttgagcctgggaggttgaggcttctgtgcgcgatgattgctccagtgatcacgccattgcactccagcctgggtgacagagtgagaccctgtctccaaaaaaaaaaaaaattaagcaagtagcagttacaagaccaaaagttattttcctttttttttttctctataaaattgcccatttggaccaaatctagttataacttatttcagtgtcattaagaaagttgatgaataagtcatattactcagatgttagtagctatgcatttattaatagttttatttataagtatttagtttcactctgttgcagactattttatgctaaaattagctaaagccaaattactatttcttaaaacatattttttactttttttttttttttaaatattattaggtacttcttgcaagggatatgcattagcacatactcaagaaggggaagaaaagaagcaaacttctggtacatcaaataccagaggatcaagacgaaaacctgcaatgacaactcctacaaggaggtctacacgtaacacaagagctgaaacagccagtcagtctcagagatccccaatatcagacaattctgggtgtgatgccccaggtaacagtaatccatctttaagtgttccctcttcagctgagtcagaaaagcaaacaagacaggctccaaaacggaagtctgtaagaagaggaagaaaaccacctttactgaaaaagaaacttcggagctctgtagctgcccctgaaaaatcatcttccaatgattcagtagatgaagaaacagcagaatctgacacatcacctgtgttagaaaaagagcaccaaccagatgtagacagtagtaacatttgtactgtgcagactcatgtagaaaaccagtctgctaattgcttgaaaagttgcaatgagcaaatagaagaaagtgagaagcatactgcaaattatgatacagaggaaagagtaggatcttcatcttctgagtcttgtgctcaagatcttcctgtgctagttggtgaggaaggggaagttaaaaaactcgagaatacaggtatagaggctaatgttttgtgtttggaaagtgagatttctgaaaatattcttgaaaaaggaggtgatccattggaaaagcaagaccagatatctggactttcacaatcagaggtaaagacagatgtatgtacagttcatcttccaaatgattttcctacatgtttaacatctgaaagcaaagtgtaccaacctgtatcttgtcccctaagtgacttatctgagaatgtagagtcagtggttaatgaagaaaaaataacagagagttccctagtagaaattactgaacataaagattttacactaaaaacagaggagcttatagagagccccaagttagaatcttctgagggtgaaattatacagacagtggacagacaatctgttaagagcccagaggttcaattgcttgggcatgttgaaactgaagatgtagaaataattgcaacatgtgatacttttgggaatgaagatttcaataatattcaagactctgaaaataacttactaaaaaataatcttctgaacaccaaattggaaaaatctttagaagaaaagaatgaatcgctgaccgaacatcctagatctacagagttgcctaaaacacacattgaacagattcagaagcattttagtgaggacaacaatgaaatgatacctatggagtgtgattcattttgcagtgaccaaaatgaatctgaagttgaaccatctgtaaatgctgatcttaaacaaatgaatgaaaattctgtgacacactgttctgaaaataatatgccgtcttctgatcttgcggatgaaaaggttgaaactgtttctcaaccatctgaaagcccaaaagataccatagataaaaccaaaaagcctcgtactcgaagatctagatttcattctccatctacaacttggtcacccaacaaagacactccacaagaaaagaagcggccccagtctccatctcccagaagagaaactgggaaagaaagcaggaagtctcaatcaccatctcctaagaatgagtcagccagaggccggaaaaaatcccgttctcagtccccaaaaaaggatattgcaagagaaaggaggcaatctcagtctcggtctccaaaaagggatactactagggaaagcagaagatctgaatcactgtccccaagaagagaaacttctagagagaacaaaagatctcagccaagagtgaaagattcttccccaggagaaaaatccaggtcccagagcagagaacgagaaagtgatagagatgggcagaggagagagagagaaaggagaaccagaaagtggtctaggtccagatctcattctaggtccccctcaagatgtagaacaaaaagtaagagttcatcatttggtagaattgacagagatagttactctccccggtggaagggaagatgggcaaatgatggttggagatgtccacgaggaaatgatcggtacagaaagaatgacccagagaaacagaatgaaaatacaagaaaagaaaaaaatgacatccatctagatgctgatgatccaaattctgctgacaaacatagaaatgactgtcccaattggataacagaaaaaataaactctgggcctgatccaagaaccagaaatccagaaaagttgaaagagtctcattgggaagaaaatagaaatgaaaattcaggaaattcttggaataaaaactttggttctggttgggtatctaaccgtggtagaggcagaggcaaccgtggcagaggcacttacagaagtagttttgcctataaagatcagaatgaaaatcggtggcaaaatcgaaaacccctctcagggaattcaaacagttcagggagtgaatctttcaagtttgtggaacagcaatcctataagcgaaaaagtgaacaggagttctcatttgatacaccagcagatagatctggatggacatctgcatccagctgggccgtgagaaagactttgccagcagatgtacaaaactactactcacgacgaggcagaaattcttcaggtccacagtctggatggatgaaacaagaggaggaaacatctggacaggattctagcctaaaagaccaaacaaaccagcaagttgatggttctcagctacctataaatatgatgcaaccgcaaatgaatgtaatgcagcaacaaatgaatgcacaacaccagcctatgaatatcttcccatatccagtgggtgttcatgctcctttgatgaacatccaacgcaatccatttaacattcatcctcagctacccttgcatctccacacaggagtgcccctcatgcaggtagccactcctaccagtgtatctcagggactaccaccaccaccaccccctcccccaccatcccaacaagtcaactacattgcttcacaaccagatggaaagcaattgcagggtattcctagttcttctcatgtaagtaataacatgagtacaccagttttgcctgctccgacagcagccccaggaaatacgggaatggttcagggaccaagttctggtaatacttcgtcatcaagtcacagcaaagcctctaatgctgctgtaaaattggcagaaagcaaagtaagtgttgcagtggaagccagcgcagatagctcgaagacagacaagaaattgcaaattcaagaaaaagcagcacaagaggtaaaattggccatcaagccattttaccaaaataaagatatcaccaaggaagaatataaagaaattgtacggaaagcagtagataaagtttgtcatagtaagagtggagaagtaaattctactaaagtggcaaatctggttaaagcctatgtagacaaatacaaatattcacggaaggggagccaaaagaaaactctggaagaacctgtgtctactgaaaaaaacataggctgaaatggggaacgctgtcaaggacattatcaggatatctgcaaagtgcaatttcaacatgtaccattaactgaaaatcatacataactgtgattgaaatttggttttgataaaattatttttttaacataggatatgatgttttgttctaaataaatataggtctgcactgcaacttctgtatccttccttcccctccaccctcccccacaaaattcaagggaaagtaaagggtttaaaggaatgtgcatctttactaggactgtgttatagtgtggatactggaaaatgtatagctttttgattagggcaatggagtgcataaattagaaacttctaagtgcactggttttcaaagagatatatataatgcatttattctgtcaggttaaaatataaagtatgatctttatgattttttccctctaattatagaaagttaaataatgtattaccatgaaaaatgtttctaatattaaatagaacatatcagttgcaaagttcctaatgtgtatttttaaagcacatatctgaataaattgcctagatagaaaaaaaattatcacgagtaaaatttagtgttcaaaacattgagacactcttcacctattgtatgaccaaataaaggttatgctgcttgtttttcttttgtgcctttgtttacccctaattgagataagcagtttgacttactagattacaactttggcagttcaaagtctttgttgaagactttgaggaaaaagatttggaaaaattgttgactttcggccgggcatgatggctcacgcctgtaatcccagcactttgggaggccgaggtggcggatcacctgaggtcaggagttcgagaccagcctggccaacatggtgaaatcccgtctctactaaaaatacaaaaattagccaggcgtggtggtgggcgcctgtaatcccagctatgcgagaggctgaggcaggagaatcagttgaacccgggaggcggggattgcagtgagccgagaccatgccattgcactccagcctgggcaacaggagcaaatctccgtctcaaaaaaaaagaaaaaaaaaagtgttgactttgtagaaattatgttctttcatagtatcttcttctacccgttgcagacgataaattatttgtgccaattcgagaattgctgttaggctgttatcctcccttccttggggctaagaattacaagactcatggcactggcgtaaagttgttgtttatctaatcactgatgaaatattttcacacttgaaaatccccaaatgctttacaatgaatgaagtgttaatttggtgaccaggtggtagccattagccatgttgcaaaattctagacagtaaaacctgtgttttagaaacagaggggaaatttaaataatggagtcctggttagcctttcagggattagggatttgggttttttttttttttctctttttaatactagaatatctcagtttttataaaaggtaagtttaaaatgtttattgtgccattattttaactggcatcttgaaagaacagtaggttttctccatgataaactgattccagtaagaattttcagtacataccaagtacctggaaagttcttcagataagttaatagatccaaggagatacatgcctcagtgagataaactgacctttttactagctaaactatttagccagagcaatactctgtagaactgtgcttttctaaagtaaagattatctgtttctcaattttatgtgcataatacttttcctggtgctagctttgataggcaaaatattttgaaatgttggtcccataatgattgtgctagttcataagctttgttgttatgagtgtaatcataaaaatatttccaagcagtttttgacctttattctacatttctgggcatttgtaatatggtattctactggtatatatttttaaagtttgcgtttagattatggtaaagaaatttcaagcatatttcttctaataaagtattaagacagtgtttcagaatatcaaggcacacctccttagttgttttagattagaactctagaaacaattttgtgaacattgaaagtattt

SEQ ID NO: 28379 - DNA, 497 bp, Homo sapiens; identical to SEQ ID NO: 20145
  misc_feature 493, 494, 495, 496, 497: n = A,T,C or G

SEQ ID NO: 28380 - DNA, 2435 bp, Homo sapiens; identical to SEQ ID NO: 22543
  misc_feature 2433, 2434, 2435: n = A,T,C or G

SEQ ID NO: 28381 - DNA, 1103 bp, Homo sapiens; identical to SEQ ID NO: 22544
  misc_feature 1102, 1103: n = A,T,C or G

SEQ ID NO: 28382 - DNA, 1262 bp, Homo sapiens; identical to SEQ ID NO: 21868
  misc_feature 1, 2, 1261, 1262: n = A,T,C or G

SEQ ID NO: 28383 - DNA, 976 bp, Homo sapiens; identical to SEQ ID NO: 22546
  misc_feature 1, 2, 975, 976: n = A,T,C or G

SEQ ID NO: 28384 - DNA, 1029 bp, Homo sapiens; identical to SEQ ID NO: 22547
  misc_feature 1026, 1027, 1028, 1029: n = A,T,C or G

SEQ ID NO: 28385 - DNA, 1600 bp, Homo sapiens; identical to SEQ ID NO: 22455
  misc_feature 1, 2, 3, 4, 1598, 1599, 1600: n = A,T,C or G

SEQ ID NO: 28386 - DNA, 2078 bp, Homo sapiens; identical to SEQ ID NO: 22549
  misc_feature 1, 13, 2078: n = A,T,C or G

SEQ ID NO: 28387 - DNA, 450 bp, Homo sapiens; identical to SEQ ID NO: 20659
  misc_feature 448, 449, 450: n = A,T,C or G

SEQ ID NO: 28388 - DNA, 450 bp, Homo sapiens; identical to SEQ ID NO: 20659
  misc_feature 448, 449, 450: n = A,T,C or G

SEQ ID NO: 28389 - DNA, 1448 bp, Homo sapiens; identical to SEQ ID NO: 22551
  misc_feature 1444, 1445, 1446, 1447, 1448: n = A,T,C or G

SEQ ID NO: 28390 - DNA, 978 bp, Homo sapiens; identical to SEQ ID NO: 22552
  misc_feature 1, 2, 3, 4, 5, 6, 7, 8, 9, 10, 11, 953, 954, 955, 956, 957,958, 959, 960, 961, 962, 963, 964, 965, 966, 967, 968, 969,970, 971, 972, 973, 974, 975, 976, 977, 978: n = A,T,C or G

SEQ ID NO: 28391 - DNA, 448 bp, Homo sapiens; identical to SEQ ID NO: 22553
  misc_feature 1, 2, 3, 4, 5, 6, 7, 447, 448: n = A,T,C or G

SEQ ID NO: 28392 - DNA, 612 bp, Homo sapiens; identical to SEQ ID NO: 22554
  misc_feature 584, 585, 586, 587, 588, 589, 590, 591, 592, 593, 594, 595,596, 597, 598, 599, 600, 601, 602, 603, 604, 605, 606, 607,608, 609, 610, 611, 612: n = A,T,C or G

SEQ ID NO: 28393 - DNA, 358 bp, Homo sapiens; identical to SEQ ID NO: 22555

SEQ ID NO: 28394 - DNA, 966 bp, Homo sapiens; identical to SEQ ID NO: 22556

SEQ ID NO: 28395 - DNA, 669 bp, Homo sapiens; identical to SEQ ID NO: 22846
  misc_feature 1, 2, 3, 4, 5, 6, 7, 8, 9, 10, 11, 12, 13: n = A,T,C or G

SEQ ID NO: 28396 - DNA, 2075 bp, Homo sapiens; identical to SEQ ID NO: 22242
  misc_feature 1, 2, 2070, 2071, 2072, 2073, 2074, 2075: n = A,T,C or G

SEQ ID NO: 28397 - DNA, 423 bp, Homo sapiens; identical to SEQ ID NO: 22558
  misc_feature 422, 423: n = A,T,C or G

SEQ ID NO: 28398 - DNA, 790 bp, Homo sapiens; identical to SEQ ID NO: 22559
  misc_feature 1, 2, 3, 4: n = A,T,C or G

SEQ ID NO: 28399 - DNA, 2558 bp, Homo sapiens
ctaatcactgtcaatttatagacccctgactttctggaaataaaatgtgtaattaccttttactctgatcataatctcccacctgtctaagaggttatttattccttatttagagggcctctattgccatgtgcctggaattattatatgctcatcactttatgaagaataaaatttgtctttcctgccttaaagttacattcgttcttccgctcaaatcctgatctggtccattaaagagtgttcgcagacaaagtttctgaaagattagagaagaatcccccccaagattgccccaacactgaactacagacaaacactattttatttaaataaggagacagctttctaaaagtatacattctctaataaaaatagtttattattttgaatgatttaatggttttctacacaatttacatcacaacatgtaaattttagcagtaacatctgattctaacagcacatcatgctattcctttcatagagccttcagagattcaatgctaaacaaatttccttagttggcatcaaggcactgatcactttagaggcttttaagaaattatttaaagatgcaaatgcctctgagtgaagtgtactatcccatcactgaagcccacaggaacaagtcctacaattttaaaaaggctcgatggaaaaatttctcaatcctgaaatcccctagggaaggggtcaggagaaagtgccatggttgatatttaagaactccacagctcttaaaaataagcacttatccctaacatgcaatactgcagatgcaagttaaacttatctgttaacagctgcctgctgttttctgctcccagatgaaatgaagcaactcttctgataacgaagagatacctgtctgaggcaaacgaaacattggcacacagcacagcctcctcaatccacttgatcccaactcatctctcatttatttcggcttcttttattccaggattaatgtagtgtaacattttcatttcttttcgcttttattctgcttttgtaaaagcagtattttgagatggacattgcctcttcattgtatttctcatcaattcattatttttgtggttatagcttgacaagcaattaactttaaaatggtagattccgtaactttaaattggtagctttcatttgcttaaaatttttttggcatatgcagataatgttctcatcagtagtaagaatctcagggttatgcttattccccaatggaggtatgacatataatcttttctgcctttacttatcaattcaccaaggagctgttttctctgcatctaggccatcatactgccaggctggttatgactcagaagatgttatctgaaaaaagtctatagaaaaaaaaaaaagtttcccctccctcatcaacaaaagcccaccctctaagagacattcaagctgaactatcacaattcttaatcagttacaatttacaaacagataagtttaaaataaacaatttacaaaatttttgaagcataccttaacatcttgttttgcagttaaacaatggaaaagtatttctcctacactaaaaaaaaacttgcttacacacaactgaaaatagaatcttacttgataatacaaaagctaccatcagaagaaatcccttcaggatcattaagccacttcctttgctctgcagtttctatagtagttttaaattattattaaatcacctgaaaaaaattccaaaagagaaccacacactaccatatccaaacaacttttgcatttcccataattgtagttaatgtcagcccagtaggccagaccaacccccagttcaatactttccttccccaaaagctctatactttgaaggaaaacagatacagtatcaaattatgacactttccttgcccaaattaatgcactggtacacccagtggctcatatttaacttcccccagcttcccaattcaaactggggggaaaaaaactaaatcattgggagttacttgccaacttggaagttgatatttctttactttttccattctaagactttaagttctctggcatgagtttatctgcaatcataaactaaacaattacctaaacccaccccaccaatcccaaccgtaacaggccactgccaactaattgccaatatttgcccctcccctttaataaaacttttaagaagtcacattattggaaaacttaacttcaacatttggcctactcaagctcttctgaagttctcctgagatgactgaatatgaaccaaagctgcactgtgctgtacttttcagcttcaactgggaatactcttccaaggataaaagcagctccagtccctgaaggtgttcgtgccaacagcacagcggtacactccttctctaacccagtttgtcaatagtactatagcatctgtggaaaatcttagaaaaaaacattttctcccccaccctctctcttccctgttaagaccatcccaaaatgcttcaagtaaaaaataacaagtttaaggggttaagcacttttaaagtctgattaagggggtggggggacaaacgagtaactaccagcca

SEQ ID NO: 28400 - DNA, 480 bp, Homo sapiens; identical to SEQ ID NO: 22560

SEQ ID NO: 28401 - DNA, 841 bp, Homo sapiens; identical to SEQ ID NO: 22562

SEQ ID NO: 28402 - DNA, 419 bp, Homo sapiens; identical to SEQ ID NO: 22563
  misc_feature 419: n = A,T,C or G

SEQ ID NO: 28403 - DNA, 675 bp, Homo sapiens; identical to SEQ ID NO: 20117
  misc_feature 645, 672, 673, 674, 675: n = A,T,C or G

SEQ ID NO: 28404 - DNA, 696 bp, Homo sapiens; identical to SEQ ID NO: 22565
  misc_feature 1, 2, 694, 695, 696: n = A,T,C or G

SEQ ID NO: 28405 - DNA, 1435 bp, Homo sapiens; identical to SEQ ID NO: 22566
  misc_feature 1, 2, 3, 1432, 1433, 1434, 1435: n = A,T,C or G

SEQ ID NO: 28406 - DNA, 424 bp, Homo sapiens; identical to SEQ ID NO: 22567
  misc_feature 422, 423, 424: n = A,T,C or G

SEQ ID NO: 28407 - DNA, 1015 bp, Homo sapiens; identical to SEQ ID NO: 20270
  misc_feature 1, 2, 3, 4, 5, 6, 7, 8, 9, 10, 11, 12, 13, 14, 15, 16, 17,18, 19, 20, 21, 22, 23, 24, 25, 26, 27, 28, 29, 30, 1012,1013, 1014, 1015: n = A,T,C or G

SEQ ID NO: 28408 - DNA, 392 bp, Homo sapiens; identical to SEQ ID NO: 22568
  misc_feature 392: n = A,T,C or G

SEQ ID NO: 28409 - DNA, 611 bp, Homo sapiens; identical to SEQ ID NO: 22569
  misc_feature 1, 2, 606, 607, 608, 609, 610, 611: n = A,T,C or G

SEQ ID NO: 28410 - DNA, 392 bp, Homo sapiens; identical to SEQ ID NO: 22568
  misc_feature 392: n = A,T,C or G

SEQ ID NO: 28411 - DNA, 571 bp, Homo sapiens; identical to SEQ ID NO: 20123
  misc_feature 1, 2, 3, 4, 5, 6, 7, 8, 9, 10, 11, 567, 568, 569, 570, 571: n = A,T,C or G

SEQ ID NO: 28412 - DNA, 2408 bp, Homo sapiens; identical to SEQ ID NO: 22571
  misc_feature 1, 2, 3, 61, 2405, 2406, 2407, 2408: n = A,T,C or G

SEQ ID NO: 28413 - DNA, 384 bp, Homo sapiens; identical to SEQ ID NO: 22572
  misc_feature 1, 2, 3, 381, 382, 383, 384: n = A,T,C or G

SEQ ID NO: 28414 - DNA, 392 bp, Homo sapiens; identical to SEQ ID NO: 22568
  misc_feature 392: n = A,T,C or G

SEQ ID NO: 28415 - DNA, 488 bp, Homo sapiens; identical to SEQ ID NO: 22574
  misc_feature 486, 487, 488: n = A,T,C or G

SEQ ID NO: 28416 - DNA, 853 bp, Homo sapiens; identical to SEQ ID NO: 22576
  misc_feature 1, 850, 851, 852, 853: n = A,T,C or G

SEQ ID NO: 28417 - DNA, 1329 bp, Homo sapiens; identical to SEQ ID NO: 22577

SEQ ID NO: 28418 - DNA, 1636 bp, Homo sapiens; identical to SEQ ID NO: 22578

SEQ ID NO: 28419 - DNA, 681 bp, Homo sapiens; identical to SEQ ID NO: 20120
  misc_feature 1, 2, 12: n = A,T,C or G

SEQ ID NO: 28420 - DNA, 676 bp, Homo sapiens; identical to SEQ ID NO: 21408
  misc_feature 1, 2, 31, 671, 672, 673, 674, 675, 676: n = A,T,C or G

SEQ ID NO: 28421 - DNA, 579 bp, Homo sapiens; identical to SEQ ID NO: 22581
  misc_feature 578, 579: n = A,T,C or G

SEQ ID NO: 28422 - DNA, 2170 bp, Homo sapiens; identical to SEQ ID NO: 22582
  misc_feature 1, 2, 2090, 2166, 2167, 2168, 2169, 2170: n = A,T,C or G

SEQ ID NO: 28423 - DNA, 1248 bp, Homo sapiens
  misc_feature 1, 1231, 1232, 1233, 1234, 1235, 1236, 1237, 1238, 1239,1240, 1241, 1242, 1243, 1244, 1245, 1246, 1247, 1248: n = A,T,C or G
nctgggagcctgggccgggagccgggtgagggcgccgagaggctcggtgggcgcgggcggcgagatatgccacacttctgcctgctgttggcaaccctcctggactaggctgctcttgttaatcacatggatgttatataagagttcggaccgcccagcacacaaggtcagcatgctgctcctctgtcacgctctcgctatagctgttgtccagatcgttatcttctcagaaagctgggcatttgccaagaacatcaacttctataatgtgaggcctcctctcgaccctacaccatttccaaatagcttcaagtgctttacttgtgaaaacgcaggggataattataactgcaatcgatgggcagaagacaaatggtgtccacaaaatacacagtactgtttgacagttcatcacttcaccagccacggaagaagcacatccatcaccaaaaagtgtgcctccagaagtgaatgtcattttgtcggttgccaccacagccgagattctgaacatacggagtgtaggtcttgctgtgaaggaatgatctgcaatgtagaattacccaccaatcacactaatgcagtgtttgccgtaatgcacgctcagagaacatctggcagcagtgcccccacactctacctaccagtgcttgcctgggtctttgtgcttccattgctgtgatgccaccattcctaggagaggcagagaccagcctctaaagcacaagccaaaaactgtgtgaacggtgaactttggagtgaagatcaatcttgcacttggtgaagagtgcacattggacctcaaggcgaaagccagtggtttgcttggataaaatgttcccgcatgaggccacaggactgaggatgggaatttggcagggcctgagaagatggtctgacttccaggcttcctggtcaaagagagctacgtttgggcagttctgcagagaggatcctggcaactagtcccacctgactaggcctttagctgaaaggatttcttgacctccttgactgcctcagaggctgccaggtcaaaccctcttgtttatgtgattagctcagagcatctctatgaaatctaacccttcccctcatgagaaagcagttttccccaccaacagcatagtcaatgagaaaggcaactgtacgaagaaaacttccagtggaactaatatgaaatctatttgcaaattatggggggaaataaagcttttaaattatacaatgnnnnnnnnnnnnnnnnnn

SEQ ID NO: 28424 - DNA, 937 bp, Homo sapiens; identical to SEQ ID NO: 22583

SEQ ID NO: 28425 - DNA, 1767 bp, Homo sapiens; identical to SEQ ID NO: 22584
  misc_feature 1, 1767: n = A,T,C or G

SEQ ID NO: 28426 - DNA, 2051 bp, Homo sapiens; identical to SEQ ID NO: 22585
  misc_feature 2049, 2050, 2051: n = A,T,C or G

SEQ ID NO: 28427 - DNA, 2412 bp, Homo sapiens; identical to SEQ ID NO: 22586
  misc_feature 1, 2, 3, 4, 5, 6, 2397, 2398, 2399, 2400, 2401, 2402, 2403,2404, 2405, 2406, 2407, 2408, 2409, 2410, 2411, 2412: n = A,T,C or G

SEQ ID NO: 28428 - DNA, 566 bp, Homo sapiens; identical to SEQ ID NO: 22587
  misc_feature 1, 220, 221, 222, 223, 224, 225, 226, 227, 228, 229, 230,231, 232, 233, 234, 235, 236, 237, 238, 239, 240, 241, 242,243, 244, 245, 246, 247, 248, 249, 250, 251, 252, 253, 254,255, 256, 257, 258, 259, 260, 261, 262, 263, 264, 265: n = A,T,C or G
  misc_feature 266, 267, 268, 269, 270, 271, 272, 273, 274, 275, 276, 277,278, 279, 280, 281, 282, 283, 284, 285, 286, 287, 288, 289,290, 291, 292, 293, 294, 295, 296, 297, 298, 299, 300, 301,302, 303, 304, 305, 306, 307, 308, 309, 310, 311, 312: n = A,T,C or G
  misc_feature 313, 314, 315, 316, 317, 318, 319, 320, 321, 322, 323, 324,325, 326, 327, 328, 329, 330, 331, 332, 562, 563, 564, 565,566: n = A,T,C or G

SEQ ID NO: 28429 - DNA, 2242 bp, Homo sapiens; identical to SEQ ID NO: 22588
  misc_feature 1, 2, 3, 4, 5, 6, 7, 8, 9, 10, 11, 12, 13, 14, 15, 16, 17,18, 19, 2242: n = A,T,C or G

SEQ ID NO: 28430 - DNA, 1980 bp, Homo sapiens; identical to SEQ ID NO: 22589

SEQ ID NO: 28431 - DNA, 1252 bp, Homo sapiens; identical to SEQ ID NO: 22590
  misc_feature 1252: n = A,T,C or G

SEQ ID NO: 28432 - DNA, 2694 bp, Homo sapiens; identical to SEQ ID NO: 22591
  misc_feature 1, 2: n = A,T,C or G

SEQ ID NO: 28433 - DNA, 726 bp, Homo sapiens; identical to SEQ ID NO: 22592

SEQ ID NO: 28434 - DNA, 897 bp, Homo sapiens; identical to SEQ ID NO: 22593
  misc_feature 1, 2, 3, 4: n = A,T,C or G

SEQ ID NO: 28435 - DNA, 2318 bp, Homo sapiens
  misc_feature 1, 25, 27, 31, 33, 2318: n = A,T,C or G
ngctctggttagggctctcgtggangntcgntntgaagccttcgactcatcgcacgggccgcgcgccattgtgttgacacttacatatattttgcttgaagtgagtgattttcaaactttttgtatttggtgggctgtccatcttgtaatggtgggagtaaatgtttccatagatgataaggcagttcttggctgaattcagcttgtgtttcttttggagggtgggcaaatcagagggcagagattatttagttgcattataggtattcttctataccacttgccctttgaaaccctcaacttgaggtaatgtgcagtctggggttttaattagtattaataatcttgtggatttacagaaatctataatgcacagagttgagttttaaccaatgatcgtattcatagaaaatatttcgaaccaccacattcttcatggtcattttagttagtacatagtcattgagtggccagccacacctgacacaatctcccagcatccaagattggagattcctggtctgtgtagagtatatggttttgcacgaaatctttctagtcttgtgattgcttcagtttaatttgtcacataaaaccacaagtatttaatattaatgtatcagtggtttggtgtttttgttcccagtactgggctttgcgccgggaaaaatctgaatactggagctacagagttaactctaaaagtgcttttattggtttctagaaactggaagaagagaaaggcaaaaaggaaaaagaaagacaggaaattgagaaagaacggagagaaagagagagggagcgtgaaagggaacgagaaaggcgagaacgggaacgagaaagggaaagagaacgtgaacgagaaaaggagaaagaacgggagcgggaacgagaacgggatagggaccgtgaccggacaaaagagagagaccgagatcgggatcgagagagagatcgtgaccgggatagagaaaggagctcagatcgtaataaggatcgcagtcgatcaagagaaaaaagcagagatcgtgaaagggaacgagagcgggaaagagagagagagagagaacgagagcgagaacgagaacgggagcgagagagagagcgagagagggaacgggagcgagaaagagaaaaagacaaaaaacgggaccgagaagaagatgaagaagatgcatacgaacgaagaaaacttgaaagaaaactccgagagaaagaagctgcttatcaagagcgccttaagaattgggaaatcagagaacgaaagaaaacccgggaatatgagaaagaagctgaaagagaagaagaaagaagaagagaaatggccaaagaagctaaacgactaaaagaattcttagaagactatgatgatgatagagatgaccccaaatattacagaggaagtgctcttcagaaaaggttgcgtgatagagaaaaggaaatggaagcagatgaacgagataggaagagagagaaggaggagcttgaggaaatcaggcagcgccttctggcagaagggcatccagatccagatgcagagctccagaggatggaacaagaggctgagaggcgcaggcagccacaaataaagcaagagccagaatcagaagaggaggaagaagaaaagcaagaaaaagaagaaaaacgagaagaacccatggaagaggaagaggagccagagcaaaagccttgtctgaaacctactctgaggcccatcagctctgctccatctgtttcctctgccagtggcaatgcaacacctaacactcctggggatgagtctccctgtggtattattattcctcatgaaaactcaccagatcaacagcaacctgaggagcataggccaaaaataggactaagtcttaaactgggtgcttccaatagtcctggtcagcctaattctgtgaagagaaagaaactacctgtagatagtgtctttaacaaatttgaggatgaagacagtgatgacgtaccccgaaaaaggaaactggttcccttggattatgggaagatgcgtaaatgcaccaagggccggttacctgcgacaccggagaccgctaagaggcccactggaaaatgcctacgcaaactgagacactcgctatcccggatggcaccatggggggacaacacggagaaacgcgcaaagacccggcgcaacaaacaccgaaaacacgagacagaaacaaaagaagacgggatacaacagaagggcacaacccgcaaaaaaagaagacgcacgccgctagcacacccaacccgagcacacaaccacaacgcgcacaggcagacaaacagacacgacgcgaagtgan

SEQ ID NO: 28436 - DNA, 1030 bp, Homo sapiens; identical to SEQ ID NO: 22594
  misc_feature 1, 2, 3, 4, 5, 6, 1023, 1024, 1025, 1026, 1027, 1028, 1029,1030: n = A,T,C or G

SEQ ID NO: 28437 - DNA, 976 bp, Homo sapiens; identical to SEQ ID NO: 22595
  misc_feature 1: n = A,T,C or G

SEQ ID NO: 28438 - DNA, 3261 bp, Homo sapiens; identical to SEQ ID NO: 21399
  misc_feature 1, 2, 3, 4, 3260, 3261: n = A,T,C or G

SEQ ID NO: 28439 - DNA, 1175 bp, Homo sapiens; identical to SEQ ID NO: 22597
  misc_feature 1175: n = A,T,C or G

SEQ ID NO: 28440 - DNA, 2026 bp, Homo sapiens; identical to SEQ ID NO: 22598
  misc_feature 1, 2023, 2024, 2025, 2026: n = A,T,C or G

SEQ ID NO: 28441 - DNA, 2720 bp, Homo sapiens; identical to SEQ ID NO: 22599
  misc_feature 2719, 2720: n = A,T,C or G

SEQ ID NO: 28442 - DNA, 769 bp, Homo sapiens; identical to SEQ ID NO: 22600

SEQ ID NO: 28443 - DNA, 1020 bp, Homo sapiens; identical to SEQ ID NO: 20647
  misc_feature 1, 2, 3, 14, 20, 35, 42, 48, 81, 1019, 1020: n = A,T,C or G

SEQ ID NO: 28444 - DNA, 3645 bp, Homo sapiens; identical to SEQ ID NO: 22602
  misc_feature 1, 3569, 3596, 3611, 3627, 3634, 3639, 3645: n = A,T,C or G

SEQ ID NO: 28445 - DNA, 466 bp, Homo sapiens; identical to SEQ ID NO: 22603
  misc_feature 461, 462, 463, 464, 465, 466: n = A,T,C or G

SEQ ID NO: 28446 - DNA, 481 bp, Homo sapiens; identical to SEQ ID NO: 22604
  misc_feature 42, 480, 481: n = A,T,C or G

SEQ ID NO: 28447 - DNA, 1591 bp, Homo sapiens; identical to SEQ ID NO: 22605
  misc_feature 1, 2, 3, 4, 5, 6, 7, 8, 9, 10, 11, 12, 13, 14, 1589, 1590,1591: n = A,T,C or G

SEQ ID NO: 28448 - DNA, 617 bp, Homo sapiens; identical to SEQ ID NO: 22606
  misc_feature 595, 596, 597, 598, 599, 600, 601, 602, 603, 604, 605, 606,607, 608, 609, 610, 611, 612, 613, 614, 615, 616, 617: n = A,T,C or G

SEQ ID NO: 28449 - DNA, 1198 bp, Homo sapiens; identical to SEQ ID NO: 24850
  misc_feature 1, 1197, 1198: n = A,T,C or G

SEQ ID NO: 28450 - DNA, 2065 bp, Homo sapiens; identical to SEQ ID NO: 22607
  misc_feature 2064, 2065: n = A,T,C or G

SEQ ID NO: 28451 - DNA, 2053 bp, Homo sapiens; identical to SEQ ID NO: 22286
  misc_feature 2052, 2053: n = A,T,C or G

SEQ ID NO: 28452 - DNA, 862 bp, Homo sapiens; identical to SEQ ID NO: 21330

SEQ ID NO: 28453 - DNA, 578 bp, Homo sapiens; identical to SEQ ID NO: 21835
  misc_feature 1, 2: n = A,T,C or G

SEQ ID NO: 28454 - DNA, 1536 bp, Homo sapiens; identical to SEQ ID NO: 22612
  misc_feature 1511, 1512, 1513, 1514, 1515, 1516, 1517, 1518, 1519, 1520,1521, 1522, 1523, 1524, 1525, 1526, 1527, 1528, 1529, 1530,1531, 1532, 1533, 1534, 1535, 1536: n = A,T,C or G

SEQ ID NO: 28455 - DNA, 1294 bp, Homo sapiens; identical to SEQ ID NO: 22613

SEQ ID NO: 28456 - DNA, 731 bp, Homo sapiens; identical to SEQ ID NO: 20529
  misc_feature 1, 2, 3, 4: n = A,T,C or G

SEQ ID NO: 28457 - DNA, 424 bp, Homo sapiens; identical to SEQ ID NO: 22615
  misc_feature 420, 421, 422, 423, 424: n = A,T,C or G

SEQ ID NO: 28458 - DNA, 2551 bp, Homo sapiens; identical to SEQ ID NO: 22616

SEQ ID NO: 28459 - DNA, 2012 bp, Homo sapiens; identical to SEQ ID NO: 20122

SEQ ID NO: 28460 - DNA, 1014 bp, Homo sapiens; identical to SEQ ID NO: 25878

SEQ ID NO: 28461 - DNA, 2029 bp, Homo sapiens; identical to SEQ ID NO: 22618
  misc_feature 1, 2, 3, 4, 5, 2029: n = A,T,C or G

SEQ ID NO: 28462 - DNA, 1207 bp, Homo sapiens; identical to SEQ ID NO: 22619
  misc_feature 1, 1202, 1203, 1204, 1205, 1206, 1207: n = A,T,C or G

SEQ ID NO: 28463 - DNA, 3031 bp, Homo sapiens; identical to SEQ ID NO: 22620
  misc_feature 1, 2, 3, 4, 3031: n = A,T,C or G

SEQ ID NO: 28464 - DNA, 2577 bp, Homo sapiens; identical to SEQ ID NO: 22621
  misc_feature 2575, 2576, 2577: n = A,T,C or G

SEQ ID NO: 28465 - DNA, 863 bp, Homo sapiens; identical to SEQ ID NO: 22622
  misc_feature 351, 863: n = A,T,C or G

SEQ ID NO: 28466 - DNA, 1370 bp, Homo sapiens; identical to SEQ ID NO: 22623
  misc_feature 1, 2, 1363, 1364, 1365, 1366, 1367, 1368, 1369, 1370: n = A,T,C or G

SEQ ID NO: 28467 - DNA, 404 bp, Homo sapiens; identical to SEQ ID NO: 22624
  misc_feature 404: n = A,T,C or G

SEQ ID NO: 28468 - DNA, 430 bp, Homo sapiens; identical to SEQ ID NO: 22625
  misc_feature 1: n = A,T,C or G

SEQ ID NO: 28469 - DNA, 1378 bp, Homo sapiens; identical to SEQ ID NO: 22626
  misc_feature 1, 2, 3, 4, 5: n = A,T,C or G

SEQ ID NO: 28470 - DNA, 2925 bp, Homo sapiens; identical to SEQ ID NO: 22627

SEQ ID NO: 28471 - DNA, 485 bp, Homo sapiens; identical to SEQ ID NO: 22628
  misc_feature 474, 475, 476, 477, 478, 479, 480, 481, 482, 483, 484, 485: n = A,T,C or G

SEQ ID NO: 28472 - DNA, 599 bp, Homo sapiens; identical to SEQ ID NO: 22629
  misc_feature 1, 2, 599: n = A,T,C or G

SEQ ID NO: 28473 - DNA, 604 bp, Homo sapiens; identical to SEQ ID NO: 22630
  misc_feature 1, 2: n = A,T,C or G

SEQ ID NO: 28474 - DNA, 548 bp, Homo sapiens; identical to SEQ ID NO: 22631
  misc_feature 1, 2, 3, 4, 548: n = A,T,C or G

SEQ ID NO: 28475 - DNA, 1664 bp, Homo sapiens
  misc_feature 1, 2, 10, 1654, 1655, 1656, 1657, 1658, 1659, 1660, 1661,1662, 1663, 1664: n = A,T,C or G
nnactgaatnccaatcgcacgggacgtgcaccatcgtgttggttaccgcggggggtgacgctgtggcagagaaggcccggaggggctctgcgttctgtagtggcgctgcttgggcccgtggcggattgtaagctgctggttttgcggctgggaagagcggcgagagggttcggcatttttcgtcgggatccccgcaaggatgagtgctgccagagagtctcacccgcatggggtgaagcgttcagcctccccagacgacgatctgggatctagcaattgggaggcagcagacttgggtaatgaagagagaaaacaaaagttcttgagacttatgggtgcaggaaagaaagaacatactggtcgtcttgttataggagatcacaaatcaacatctcacttccgaaccggggaagaagacaagaaaattaatgaagaactggagtctcaatatcagcaaagtatggacagtaaattatcaggaagatatcggcgacattgtggacttggcttcagtgaggtagaagaccatgatggagaaggtgatgtggctggagatgatgatgatgacgatgatgattcacctgatcctgaaagtccagatgattctgaaagcgattcagagtcagagaaagaagaatctgctgaagaactccaagctgctgagcaccctgatgaagtggaggatcccaaaaacaaaaaagatgcaaaaagcaattataaaatgatgtttgttaaatccagtggttcataactcccaaacgcttagtctttgtattaaaagtaagccttattgttacaatgcacagtggaggactgcttatagagcacagacctttgtattataatttttaaaaaggcccttttaaataattacaaagagtgtttgctttcaaatgccatgggttacacttttatgggcatgactataaccatttttgtaaagagtaagagttgtataaaataagaaataaatacagtactcaacttcctttcatattagcatcatcaaccctctaattcaccttatgggggaaatgcttctttttgtttgtgatagctattttatcatttccttcatatttttctcttataaaaatgtatttgatactgtgatatgttcacgaaaagtattctttaattattctttgttatagtagagctgttcattatggatatttctgctgccagtcacaatctaaattaattttggcaaaagattgggtacttagtttcctgttactgagttagctctactcttttggaccaaagcaacatgagagcaagtacttttcacacttgttaagatggagttataactgtcatacatttggaatattatgatcccaagtagtctttttataatttggattgtatcgtatgttagatttttgataaaatttggccaatttttacagaagaaattctctgatcatttagttctatctatttagaaatatgtaaaactggatttttttttaagtaatatgtgaccaaagttaattttgtcccaaaggtctaaataaagagcagtttcccataaaaaaaaaaaaaaaaaaaaaaaaatttgtggggcggcgccggaaattaaaacatcttgggggggccgagaaagaaaggaaggttaaaagacgcagaggggggttcacaaaacgcnnnnnnnnnnn

SEQ ID NO: 28476 - DNA, 2755 bp, Homo sapiens; identical to SEQ ID NO: 22633
  misc_feature 2753, 2754, 2755: n = A,T,C or G

SEQ ID NO: 28477 - DNA, 417 bp, Homo sapiens; identical to SEQ ID NO: 21875

SEQ ID NO: 28478 - DNA, 736 bp, Homo sapiens; identical to SEQ ID NO: 22635

SEQ ID NO: 28479 - DNA, 3424 bp, Homo sapiens; identical to SEQ ID NO: 22636
  misc_feature 1: n = A,T,C or G

SEQ ID NO: 28480 - DNA, 2452 bp, Homo sapiens; identical to SEQ ID NO: 22637

SEQ ID NO: 28481 - DNA, 367 bp, Homo sapiens; identical to SEQ ID NO: 22638
  misc_feature 367: n = A,T,C or G

SEQ ID NO: 28482 - DNA, 601 bp, Homo sapiens; identical to SEQ ID NO: 20150
  misc_feature 601: n = A,T,C or G

SEQ ID NO: 28483 - DNA, 932 bp, Homo sapiens; identical to SEQ ID NO: 22639
  misc_feature 1, 2, 930, 931, 932: n = A,T,C or G

SEQ ID NO: 28484 - DNA, 1011 bp, Homo sapiens; identical to SEQ ID NO: 22640
  misc_feature 1011: n = A,T,C or G

SEQ ID NO: 28485 - DNA, 3432 bp, Homo sapiens; identical to SEQ ID NO: 21750
  misc_feature 1, 4, 3412, 3413, 3414, 3415, 3416, 3417, 3418, 3419, 3420,3421, 3422, 3423, 3424, 3425, 3426, 3427, 3428, 3429, 3430,3431, 3432: n = A,T,C or G

SEQ ID NO: 28486 - DNA, 499 bp, Homo sapiens; identical to SEQ ID NO: 22642
  misc_feature 1, 496, 497, 498, 499: n = A,T,C or G

SEQ ID NO: 28487 - DNA, 2187 bp, Homo sapiens; identical to SEQ ID NO: 21516

SEQ ID NO: 28488 - DNA, 1641 bp, Homo sapiens; identical to SEQ ID NO: 20385
  misc_feature 1, 2, 1626, 1627, 1628, 1629, 1630, 1631, 1632, 1633, 1634,1635, 1636, 1637, 1638, 1639, 1640, 1641: n = A,T,C or G

SEQ ID NO: 28489 - DNA, 1162 bp, Homo sapiens; identical to SEQ ID NO: 22644
  misc_feature 1, 2, 3, 4, 1155, 1156, 1157, 1158, 1159, 1160, 1161, 1162: n = A,T,C or G

SEQ ID NO: 28490 - DNA, 399 bp, Homo sapiens; identical to SEQ ID NO: 22645
  misc_feature 1, 2, 3, 4, 5, 6, 7, 8, 9, 10, 11, 12, 13: n = A,T,C or G

SEQ ID NO: 28491 - DNA, 749 bp, Homo sapiens; identical to SEQ ID NO: 22646
  misc_feature 1, 749: n = A,T,C or G

SEQ ID NO: 28492 - DNA, 3054 bp, Homo sapiens; identical to SEQ ID NO: 21514
  misc_feature 1, 2, 3, 4, 5, 3054: n = A,T,C or G

SEQ ID NO: 28493 - DNA, 550 bp, Homo sapiens; identical to SEQ ID NO: 22648
  misc_feature 1, 2, 3, 4, 5, 6, 7, 8, 9, 10, 11, 12, 13, 14, 15, 16, 17,18, 19, 20, 21, 22, 23, 24, 25, 26, 27, 28, 29, 30, 547,548, 549, 550: n = A,T,C or G

SEQ ID NO: 28494 - DNA, 1013 bp, Homo sapiens; identical to SEQ ID NO: 22649
  misc_feature 174: n = A,T,C or G

SEQ ID NO: 28495 - DNA, 810 bp, Homo sapiens; identical to SEQ ID NO: 22650

SEQ ID NO: 28496 - DNA, 2029 bp, Homo sapiens; identical to SEQ ID NO: 22618
  misc_feature 1, 2, 3, 4, 5, 2029: n = A,T,C or G

SEQ ID NO: 28497 - DNA, 917 bp, Homo sapiens; identical to SEQ ID NO: 22652
  misc_feature 1, 46, 268, 908, 909, 910, 911, 912, 913, 914, 915, 916, 917: n = A,T,C or G

SEQ ID NO: 28498 - DNA, 678 bp, Homo sapiens; identical to SEQ ID NO: 22653
  misc_feature 1, 2, 3, 4, 5, 6, 7: n = A,T,C or G

SEQ ID NO: 28499 - DNA, 2850 bp, Homo sapiens; identical to SEQ ID NO: 22654
  misc_feature 1, 18, 2849, 2850: n = A,T,C or G

SEQ ID NO: 28500 - DNA, 444 bp, Homo sapiens; identical to SEQ ID NO: 22655
  misc_feature 1, 2: n = A,T,C or G

SEQ ID NO: 28501 - DNA, 1828 bp, Homo sapiens; identical to SEQ ID NO: 22656
  misc_feature 1, 2, 3, 4, 5, 6, 7, 8, 9, 1825, 1826, 1827, 1828: n = A,T,C or G

SEQ ID NO: 28502 - DNA, 1746 bp, Homo sapiens; identical to SEQ ID NO: 22657
  misc_feature 1741, 1744, 1745, 1746: n = A,T,C or G

SEQ ID NO: 28503 - DNA, 4008 bp, Homo sapiens; identical to SEQ ID NO: 22658
  misc_feature 4001, 4002, 4003, 4004, 4005, 4006, 4007, 4008: n = A,T,C or G

SEQ ID NO: 28504 - DNA, 450 bp, Homo sapiens; identical to SEQ ID NO: 20659
  misc_feature 448, 449, 450: n = A,T,C or G

SEQ ID NO: 28505 - DNA, 290 bp, Homo sapiens; identical to SEQ ID NO: 22659

SEQ ID NO: 28506 - DNA, 1002 bp, Homo sapiens; identical to SEQ ID NO: 22660
  misc_feature 1, 2, 983, 984, 985, 986, 987, 988, 989, 990, 991, 992, 993,994, 995, 996, 997, 998, 999, 1000, 1001, 1002: n = A,T,C or G

SEQ ID NO: 28507 - DNA, 634 bp, Homo sapiens; identical to SEQ ID NO: 21681
  misc_feature 1, 2, 3, 4, 20, 40, 617, 618, 619, 620, 621, 622, 623, 624,625, 626, 627, 628, 629, 630, 631, 632, 633, 634: n = A,T,C or G

SEQ ID NO: 28508 - DNA, 6073 bp, Homo sapiens; identical to SEQ ID NO: 22662
  misc_feature 6067, 6068, 6069, 6070, 6071, 6072, 6073: n = A,T,C or G

SEQ ID NO: 28509 - DNA, 1409 bp, Homo sapiens; identical to SEQ ID NO: 20290
  misc_feature 1, 2, 3, 4, 5, 6, 7, 1409: n = A,T,C or G

SEQ ID NO: 28510 - DNA, 3118 bp, Homo sapiens; identical to SEQ ID NO: 22664

SEQ ID NO: 28511 - DNA, 1559 bp, Homo sapiens; identical to SEQ ID NO: 22665
  misc_feature 1, 2, 1452, 1453, 1454, 1455, 1456, 1457, 1551, 1552, 1553,1554, 1555, 1556, 1557, 1558, 1559: n = A,T,C or G

SEQ ID NO: 28512 - DNA, 398 bp, Homo sapiens; identical to SEQ ID NO: 22666
  misc_feature 1, 2, 3, 4, 398: n = A,T,C or G

SEQ ID NO: 28513 - DNA, 1818 bp, Homo sapiens; identical to SEQ ID NO: 22667
  misc_feature 1, 2, 3, 7, 15, 17, 21, 24, 37, 42, 46, 75, 77, 79, 1818: n = A,T,C or G

SEQ ID NO: 28514 - DNA, 1013 bp, Homo sapiens; identical to SEQ ID NO: 22649
  misc_feature 174: n = A,T,C or G

SEQ ID NO: 28515 - DNA, 1335 bp, Homo sapiens; identical to SEQ ID NO: 22669

SEQ ID NO: 28516 - DNA, 2150 bp, Homo sapiens; identical to SEQ ID NO: 22670
  misc_feature 2148, 2149, 2150: n = A,T,C or G

SEQ ID NO: 28517 - DNA, 933 bp, Homo sapiens; identical to SEQ ID NO: 22671
  misc_feature 1, 2, 932, 933: n = A,T,C or G

SEQ ID NO: 28518 - DNA, 1189 bp, Homo sapiens; identical to SEQ ID NO: 20185
  misc_feature 1179, 1180, 1181, 1182, 1183, 1184, 1185, 1186, 1187, 1188,1189: n = A,T,C or G

SEQ ID NO: 28519 - DNA, 1377 bp, Homo sapiens; identical to SEQ ID NO: 22673

SEQ ID NO: 28520 - DNA, 1147 bp, Homo sapiens; identical to SEQ ID NO: 22487
  misc_feature 1, 2: n = A,T,C or G

SEQ ID NO: 28521 - DNA, 371 bp, Homo sapiens; identical to SEQ ID NO: 22676

SEQ ID NO: 28522 - DNA, 1000 bp, Homo sapiens; identical to SEQ ID NO: 22677
  misc_feature 993, 994, 995, 996, 997, 998, 999, 1000: n = A,T,C or G

SEQ ID NO: 28523 - DNA, 1529 bp, Homo sapiens; identical to SEQ ID NO: 20365
  misc_feature 1, 1485, 1495, 1500, 1527, 1528, 1529: n = A,T,C or G

SEQ ID NO: 28524 - DNA, 1041 bp, Homo sapiens; identical to SEQ ID NO: 22679
  misc_feature 1, 2, 3, 1029, 1030, 1031, 1032, 1033, 1034, 1035, 1036,1037, 1038, 1039, 1040, 1041: n = A,T,C or G

SEQ ID NO: 28525 - DNA, 1201 bp, Homo sapiens; identical to SEQ ID NO: 22680
  misc_feature 1, 2, 1198, 1199, 1200, 1201: n = A,T,C or G

SEQ ID NO: 28526 - DNA, 419 bp, Homo sapiens; identical to SEQ ID NO: 22681
  misc_feature 414, 415, 416, 417, 418, 419: n = A,T,C or G

SEQ ID NO: 28527 - DNA, 2341 bp, Homo sapiens; identical to SEQ ID NO: 22682
  misc_feature 1, 2, 3, 10: n = A,T,C or G

SEQ ID NO: 28528 - DNA, 953 bp, Homo sapiens; identical to SEQ ID NO: 22683
  misc_feature 1, 2, 3, 4, 5, 6, 7, 8, 9, 10, 11, 12: n = A,T,C or G

SEQ ID NO: 28529 - DNA, 1101 bp, Homo sapiens; identical to SEQ ID NO: 22684
  misc_feature 1, 2, 1097, 1098, 1099, 1100, 1101: n = A,T,C or G

SEQ ID NO: 28530 - DNA, 3645 bp, Homo sapiens; identical to SEQ ID NO: 22685

SEQ ID NO: 28531 - DNA, 376 bp, Homo sapiens; identical to SEQ ID NO: 22686

SEQ ID NO: 28532 - DNA, 437 bp, Homo sapiens; identical to SEQ ID NO: 22687
  misc_feature 1, 2, 3, 4, 424, 434, 437: n = A,T,C or G

SEQ ID NO: 28533 - DNA, 354 bp, Homo sapiens; identical to SEQ ID NO: 21786

SEQ ID NO: 28534 - DNA, 349 bp, Homo sapiens; identical to SEQ ID NO: 22689

SEQ ID NO: 28535 - DNA, 369 bp, Homo sapiens; identical to SEQ ID NO: 20630
  misc_feature 364, 365, 366, 367, 368, 369: n = A,T,C or G

SEQ ID NO: 28536 - DNA, 287 bp, Homo sapiens; identical to SEQ ID NO: 22691
  misc_feature 1, 2, 3, 4, 287: n = A,T,C or G

SEQ ID NO: 28537 - DNA, 988 bp, Homo sapiens; identical to SEQ ID NO: 22692
  misc_feature 960, 961, 962, 963, 964, 965, 966, 967, 968, 969, 970, 971,972, 973, 974, 975, 976, 977, 978, 979, 980, 981, 982, 983,984, 985, 986, 987, 988: n = A,T,C or G

SEQ ID NO: 28538 - DNA, 390 bp, Homo sapiens; identical to SEQ ID NO: 20737
  misc_feature 387, 388, 389, 390: n = A,T,C or G

SEQ ID NO: 28539 - DNA, 596 bp, Homo sapiens; identical to SEQ ID NO: 22694
  misc_feature 595, 596: n = A,T,C or G

SEQ ID NO: 28540 - DNA, 622 bp, Homo sapiens; identical to SEQ ID NO: 22695
  misc_feature 611, 612, 613, 614, 615, 616, 617, 618, 619, 620, 621, 622: n = A,T,C or G

SEQ ID NO: 28541 - DNA, 2062 bp, Homo sapiens; identical to SEQ ID NO: 22696

SEQ ID NO: 28542 - DNA, 1077 bp, Homo sapiens; identical to SEQ ID NO: 22697
  misc_feature 1, 2, 3, 4, 5, 6, 1067, 1068, 1069, 1070, 1071, 1072, 1073,1074, 1075, 1076, 1077: n = A,T,C or G

SEQ ID NO: 28543 - DNA, 400 bp, Homo sapiens; identical to SEQ ID NO: 22698
  misc_feature 400: n = A,T,C or G

SEQ ID NO: 28544 - DNA, 619 bp, Homo sapiens; identical to SEQ ID NO: 20381

SEQ ID NO: 28545 - DNA, 573 bp, Homo sapiens; identical to SEQ ID NO: 20133

SEQ ID NO: 28546 - DNA, 396 bp, Homo sapiens; identical to SEQ ID NO: 20826

SEQ ID NO: 28547 - DNA, 1038 bp, Homo sapiens; identical to SEQ ID NO: 22702

SEQ ID NO: 28548 - DNA, 386 bp, Homo sapiens; identical to SEQ ID NO: 21664

SEQ ID NO: 28549 - DNA, 531 bp, Homo sapiens; identical to SEQ ID NO: 22704

SEQ ID NO: 28550 - DNA, 1211 bp, Homo sapiens; identical to SEQ ID NO: 20419
  misc_feature 1207, 1208, 1209, 1210, 1211: n = A,T,C or G

SEQ ID NO: 28551 - DNA, 930 bp, Homo sapiens; identical to SEQ ID NO: 22706
  misc_feature 1, 2, 3, 4, 5, 6: n = A,T,C or G

SEQ ID NO: 28552 - DNA, 1380 bp, Homo sapiens; identical to SEQ ID NO: 20118
  misc_feature 1380: n = A,T,C or G

SEQ ID NO: 28553 - DNA, 1811 bp, Homo sapiens; identical to SEQ ID NO: 22429
  misc_feature 1, 2, 3, 4, 5, 55, 56, 57, 58, 59, 60, 61, 62, 63, 64, 65,66, 67, 68, 69, 70, 71, 72, 73, 74, 75, 76, 77, 78, 79,80, 81, 90, 1811: n = A,T,C or G

SEQ ID NO: 28554 - DNA, 1052 bp, Homo sapiens; identical to SEQ ID NO: 22709
  misc_feature 1, 2, 3, 4, 1050, 1051, 1052: n = A,T,C or G

SEQ ID NO: 28555 - DNA, 418 bp, Homo sapiens; identical to SEQ ID NO: 22710
  misc_feature 1, 2, 413, 414, 415, 416, 417, 418: n = A,T,C or G

SEQ ID NO: 28556 - DNA, 4339 bp, Homo sapiens; identical to SEQ ID NO: 22711
  misc_feature 1, 2, 3, 4, 4325, 4326, 4327, 4328, 4329, 4330, 4331, 4332,4333, 4334, 4335, 4336, 4337, 4338, 4339: n = A,T,C or G

SEQ ID NO: 28557 - DNA, 1294 bp, Homo sapiens; identical to SEQ ID NO: 22613

SEQ ID NO: 28558 - DNA, 1211 bp, Homo sapiens; identical to SEQ ID NO: 20419
  misc_feature 1207, 1208, 1209, 1210, 1211: n = A,T,C or G

SEQ ID NO: 28559 - DNA, 817 bp, Homo sapiens; identical to SEQ ID NO: 22714
  misc_feature 1, 2, 3, 814, 815, 816, 817: n = A,T,C or G

SEQ ID NO: 28560 - DNA, 963 bp, Homo sapiens; identical to SEQ ID NO: 22715
  misc_feature 1, 2: n = A,T,C or G

SEQ ID NO: 28561 - DNA, 2685 bp, Homo sapiens; identical to SEQ ID NO: 22716
  misc_feature 2576, 2680, 2681, 2682, 2683, 2684, 2685: n = A,T,C or G

SEQ ID NO: 28562 - DNA, 3807 bp, Homo sapiens; identical to SEQ ID NO: 21505
  misc_feature 1, 3805, 3806, 3807: n = A,T,C or G

SEQ ID NO: 28563 - DNA, 2367 bp, Homo sapiens; identical to SEQ ID NO: 22718
  misc_feature 1, 8, 9, 2339, 2340, 2341, 2342, 2343, 2344, 2345, 2346,2347, 2348, 2349, 2350, 2351, 2352, 2353, 2354, 2355, 2356,2357, 2358, 2359, 2360, 2361, 2362, 2363, 2364, 2365, 2366,2367: n = A,T,C or G

SEQ ID NO: 28564 - DNA, 8543 bp, Homo sapiens; identical to SEQ ID NO: 22719
  misc_feature 8542, 8543: n = A,T,C or G

SEQ ID NO: 28565 - DNA, 492 bp, Homo sapiens; identical to SEQ ID NO: 22720
  misc_feature 491, 492: n = A,T,C or G

SEQ ID NO: 28566 - DNA, 620 bp, Homo sapiens; identical to SEQ ID NO: 22721

SEQ ID NO: 28567 - DNA, 359 bp, Homo sapiens; identical to SEQ ID NO: 22722
  misc_feature 1, 353, 357, 358, 359: n = A,T,C or G

SEQ ID NO: 28568 - DNA, 1133 bp, Homo sapiens
  misc_feature 1, 2, 3, 4, 1129, 1130, 1131, 1132, 1133: n = A,T,C or G
nnnnaaaatagagcaggtaaaagtgattgggaaacctaggcatcattgagaaggtgacatttgggcaaaatgtcacttgaagagtgagaaggagtgagccacgtatttatatctaggggaagagcatttggggcagagagaaaaccagtacaaagactctgaagcagaagcatcagacctagtatgttcaaggatcttaagaagaccagtgtagcgggagtggagtgaccagtggagagaagagtagtagataaggtcagccaggaaattgaggaggatatttaaaaggaaaaggttatttctggttattgtgttgagcatatgccatcagtagaaaccagaagaacagttaaaaagctatggcagtaagaaaggtgagaggtggtggtggcttagacaaggatgggagcagtggaggtggtttaaaaaaaaaaaaagtgatgggattctagatatatatttgaaggtgcagccagtaggactttataagtcttagtgcctgaccatttaaaaattgtgatgtttgtggccctttttcttaatacataatttaagatgacagtaggtcatcgtacttatcacgtcttttccattctcatgtttctgtacacaaggagctggcatcttctgaagaatcttatctaaactttttgggctttttttttttttagagaaaatcattagtcccattcttcttttgaatgctacttttccttctctaaaaactgaccatgaattatattctcattcatcaatttcttatttctttgtcagaaaagcagttagcattttttattattatgcaagtattcaacattcattgtaaaaaaaaaaaaaaaaaccaaacaggcggaacttaaaaaaaaaaaagtatacagactttttcatctatatcaggattgtctcttgcttttattttagtttctttggcaacagatgaggcaatagaacatgctaagagcttggactgaaattgacaagtttttgaatctctctaaatctcagttttctcccttgaaaacgggcatgtttaatagaacctacttcataggtttagtatgaagatttaatgagatcatgcagagaaagtacgtagcacttactagcacattgattggcacctgagaannnnn

SEQ ID NO: 28569 - DNA, 356 bp, Homo sapiens; identical to SEQ ID NO: 22724

SEQ ID NO: 28570 - DNA, 1138 bp, Homo sapiens; identical to SEQ ID NO: 22723

SEQ ID NO: 28571 - DNA, 356 bp, Homo sapiens; identical to SEQ ID NO: 22724

SEQ ID NO: 28572 - DNA, 913 bp, Homo sapiens; identical to SEQ ID NO: 22725
  misc_feature 1, 2, 3, 4, 13, 16, 17, 18, 31, 37, 45, 51, 53, 59, 61, 64,66, 67, 73, 75, 80, 88, 91, 98, 100, 108, 111, 119, 121,124, 751, 752, 789, 790, 792, 794, 798, 803, 808, 814, 819,825, 827, 831, 838, 841, 846, 852, 854, 855, 856, 857: n = A,T,C or G
  misc_feature 858, 860, 862, 867, 868, 870, 874, 877, 882, 885, 886, 887,888, 896, 897, 898, 899, 900, 901, 902, 903, 904, 905, 906,907, 908, 909, 910, 911, 912, 913: n = A,T,C or G

SEQ ID NO: 28573 - DNA, 865 bp, Homo sapiens; identical to SEQ ID NO: 20524

SEQ ID NO: 28574 - DNA, 4444 bp, Homo sapiens; identical to SEQ ID NO: 22727

SEQ ID NO: 28575 - DNA, 303 bp, Homo sapiens; identical to SEQ ID NO: 22728
  misc_feature 1, 2, 3, 4, 5, 6: n = A,T,C or G

SEQ ID NO: 28576 - DNA, 2768 bp, Homo sapiens; identical to SEQ ID NO: 22729
  misc_feature 2763, 2764, 2765, 2766, 2767, 2768: n = A,T,C or G

SEQ ID NO: 28577 - DNA, 584 bp, Homo sapiens; identical to SEQ ID NO: 20677
  misc_feature 581, 582, 583, 584: n = A,T,C or G

SEQ ID NO: 28578 - DNA, 2812 bp, Homo sapiens; identical to SEQ ID NO: 22730

SEQ ID NO: 28579 - DNA, 3983 bp, Homo sapiens; identical to SEQ ID NO: 21101

SEQ ID NO: 28580 - DNA, 1611 bp, Homo sapiens; identical to SEQ ID NO: 22732
  misc_feature 1, 7, 9, 13, 14, 24, 28, 1593, 1594, 1595, 1596, 1597, 1598,1599, 1600, 1601, 1602, 1603, 1604, 1605, 1606, 1607, 1608,1609, 1610, 1611: n = A,T,C or G

SEQ ID NO: 28581 - DNA, 3901 bp, Homo sapiens; identical to SEQ ID NO: 22733
  misc_feature 1, 2, 3900, 3901: n = A,T,C or G

SEQ ID NO: 28582 - DNA, 1598 bp, Homo sapiens; identical to SEQ ID NO: 22734
  misc_feature 1, 2, 3, 4, 5, 6, 7, 8, 9, 10, 91, 92, 93, 94, 1589, 1590,1591, 1592, 1593, 1594, 1595, 1596, 1597, 1598: n = A,T,C or G

SEQ ID NO: 28583 - DNA, 868 bp, Homo sapiens; identical to SEQ ID NO: 22735
  misc_feature 1, 853, 854, 855, 856, 857, 858, 859, 860, 861, 862, 863,864, 865, 866, 867, 868: n = A,T,C or G

SEQ ID NO: 28584 - DNA, 4333 bp, Homo sapiens; identical to SEQ ID NO: 21849
  misc_feature 4152, 4164, 4225, 4244, 4257, 4266, 4278, 4324, 4333: n = A,T,C or G

SEQ ID NO: 28585 - DNA, 2012 bp, Homo sapiens; identical to SEQ ID NO: 20122

SEQ ID NO: 28586 - DNA, 367 bp, Homo sapiens; identical to SEQ ID NO: 22638
  misc_feature 367: n = A,T,C or G

SEQ ID NO: 28587 - DNA, 4215 bp, Homo sapiens; identical to SEQ ID NO: 22739
  misc_feature 1, 4204, 4205, 4206, 4207, 4208, 4209, 4210, 4211, 4212,4213, 4214, 4215: n = A,T,C or G

SEQ ID NO: 28588 - DNA, 512 bp, Homo sapiens; identical to SEQ ID NO: 22740
  misc_feature 497, 498, 499, 500, 501, 502, 503, 504, 505, 506, 507, 508,509, 510, 511, 512: n = A,T,C or G

SEQ ID NO: 28589 - DNA, 1695 bp, Homo sapiens; identical to SEQ ID NO: 22741
  misc_feature 1, 2, 1604, 1641, 1689, 1690, 1691, 1692, 1693, 1694, 1695: n = A,T,C or G

SEQ ID NO: 28590 - DNA, 353 bp, Homo sapiens; identical to SEQ ID NO: 22483

SEQ ID NO: 28591 - DNA, 866 bp, Homo sapiens; identical to SEQ ID NO: 22743
  misc_feature 135, 136, 137, 138, 139, 140, 141, 142, 143, 144, 145, 146,147, 827, 849, 863, 864, 865, 866: n = A,T,C or G

SEQ ID NO: 28592 - DNA, 740 bp, Homo sapiens; identical to SEQ ID NO: 21299
  misc_feature 1: n = A,T,C or G

SEQ ID NO: 28593 - DNA, 461 bp, Homo sapiens; identical to SEQ ID NO: 21774
  misc_feature 461: n = A,T,C or G

SEQ ID NO: 28594 - DNA, 3645 bp, Homo sapiens; identical to SEQ ID NO: 22602
  misc_feature 1, 3569, 3596, 3611, 3627, 3634, 3639, 3645: n = A,T,C or G

SEQ ID NO: 28595 - DNA, 951 bp, Homo sapiens; identical to SEQ ID NO: 22746
  misc_feature 1, 946, 947, 948, 949, 950, 951: n = A,T,C or G

SEQ ID NO: 28596 - DNA, 436 bp, Homo sapiens; identical to SEQ ID NO: 22747
  misc_feature 1, 426, 428, 429, 430, 431, 432, 433, 434, 435, 436: n = A,T,C or G

SEQ ID NO: 28597 - DNA, 362 bp, Homo sapiens; identical to SEQ ID NO: 20639
  misc_feature 362: n = A,T,C or G

SEQ ID NO: 28598 - DNA, 375 bp, Homo sapiens; identical to SEQ ID NO: 22749

SEQ ID NO: 28599 - DNA, 1327 bp, Homo sapiens; identical to SEQ ID NO: 22750

SEQ ID NO: 28600 - DNA, 867 bp, Homo sapiens; identical to SEQ ID NO: 22751
  misc_feature 1, 2, 3, 4, 5: n = A,T,C or G

SEQ ID NO: 28601 - DNA, 529 bp, Homo sapiens; identical to SEQ ID NO: 22752

SEQ ID NO: 28602 - DNA, 786 bp, Homo sapiens; identical to SEQ ID NO: 20840
  misc_feature 783, 784, 785, 786: n = A,T,C or G

SEQ ID NO: 28603 - DNA, 291 bp, Homo sapiens; identical to SEQ ID NO: 22753
  misc_feature 1, 2, 3, 4, 5: n = A,T,C or G

SEQ ID NO: 28604 - DNA, 2676 bp, Homo sapiens; identical to SEQ ID NO: 22754

SEQ ID NO: 28605 - DNA, 1527 bp, Homo sapiens; identical to SEQ ID NO: 22755
  misc_feature 1, 2, 3, 1526, 1527: n = A,T,C or G

SEQ ID NO: 28606 - DNA, 2600 bp, Homo sapiens; identical to SEQ ID NO: 22756
  misc_feature 1, 2, 2600: n = A,T,C or G

SEQ ID NO: 28607 - DNA, 614 bp, Homo sapiens; identical to SEQ ID NO: 20822

SEQ ID NO: 28608 - DNA, 1380 bp, Homo sapiens; identical to SEQ ID NO: 20118
  misc_feature 1380: n = A,T,C or G

SEQ ID NO: 28609 - DNA, 367 bp, Homo sapiens; identical to SEQ ID NO: 22759
  misc_feature 363, 364, 365, 366, 367: n = A,T,C or G

SEQ ID NO: 28610 - DNA, 560 bp, Homo sapiens; identical to SEQ ID NO: 22760
  misc_feature 555, 556, 557, 558, 559, 560: n = A,T,C or G

SEQ ID NO: 28611 - DNA, 638 bp, Homo sapiens; identical to SEQ ID NO: 20363

SEQ ID NO: 28612 - DNA, 7984 bp, Homo sapiens; identical to SEQ ID NO: 22761

SEQ ID NO: 28613 - DNA, 1289 bp, Homo sapiens; identical to SEQ ID NO: 22762
  misc_feature 1, 1282, 1283, 1284, 1285, 1286, 1287, 1288, 1289: n = A,T,C or G

SEQ ID NO: 28614 - DNA, 815 bp, Homo sapiens; identical to SEQ ID NO: 22810
  misc_feature 1, 2, 3, 4: n = A,T,C or G

SEQ ID NO: 28615 - DNA, 469 bp, Homo sapiens; identical to SEQ ID NO: 22764
  misc_feature 1, 2, 3, 4, 5, 6, 7, 8, 9, 10, 11, 12, 13, 14, 15, 16, 17,18, 19, 20, 21, 22, 23, 24, 25, 469: n = A,T,C or G

SEQ ID NO: 28616 - DNA, 2012 bp, Homo sapiens; identical to SEQ ID NO: 20122

SEQ ID NO: 28617 - DNA, 3611 bp, Homo sapiens; identical to SEQ ID NO: 22766
  misc_feature 1, 3611: n = A,T,C or G

SEQ ID NO: 28618 - DNA, 3504 bp, Homo sapiens; identical to SEQ ID NO: 22767
  misc_feature 73, 74, 75, 76, 77, 78, 79, 80, 81, 82, 83, 84, 85, 3493,3494, 3495, 3496, 3497, 3498, 3499, 3500, 3501, 3502, 3503,3504: n = A,T,C or G

SEQ ID NO: 28619 - DNA, 985 bp, Homo sapiens; identical to SEQ ID NO: 21932
  misc_feature 1, 2, 3, 4, 5, 6, 7, 8, 9, 10, 11, 12, 13, 14, 983, 984, 985: n = A,T,C or G

SEQ ID NO: 28620 - DNA, 1185 bp, Homo sapiens; identical to SEQ ID NO: 21532
  misc_feature 1, 2, 3, 4, 5, 6, 7, 8, 9, 10, 11, 12, 13, 14, 15, 16, 17,18, 19, 20, 21, 22: n = A,T,C or G

SEQ ID NO: 28621 - DNA, 544 bp, Homo sapiens; identical to SEQ ID NO: 22770
  misc_feature 543, 544: n = A,T,C or G

SEQ ID NO: 28622 - DNA, 2016 bp, Homo sapiens; identical to SEQ ID NO: 22771
  misc_feature 1, 2, 3, 4, 5, 6, 7, 8, 2016: n = A,T,C or G

SEQ ID NO: 28623 - DNA, 780 bp, Homo sapiens; identical to SEQ ID NO: 20175
  misc_feature 1, 2, 3, 4, 5, 6, 7, 8, 9, 775, 776, 777, 778, 779, 780: n = A,T,C or G

SEQ ID NO: 28624 - DNA, 1214 bp, Homo sapiens; identical to SEQ ID NO: 20119

SEQ ID NO: 28625 - DNA, 1189 bp, Homo sapiens; identical to SEQ ID NO: 20185
  misc_feature 1179, 1180, 1181, 1182, 1183, 1184, 1185, 1186, 1187, 1188,1189: n = A,T,C or G

SEQ ID NO: 28626 - DNA, 4038 bp, Homo sapiens; identical to SEQ ID NO: 21526
  misc_feature 4023, 4024, 4025, 4026, 4027, 4028, 4029, 4030, 4031, 4032,4033, 4034, 4035, 4036, 4037, 4038: n = A,T,C or G

SEQ ID NO: 28627 - DNA, 1039 bp, Homo sapiens; identical to SEQ ID NO: 22775

SEQ ID NO: 28628 - DNA, 3711 bp, Homo sapiens; identical to SEQ ID NO: 22776
  misc_feature 3686, 3687, 3688, 3689, 3690, 3691, 3692, 3693, 3694, 3695,3696, 3697, 3698, 3699, 3700, 3701, 3702, 3703, 3704, 3705,3706, 3707, 3708, 3709, 3710, 3711: n = A,T,C or G

SEQ ID NO: 28629 - DNA, 1989 bp, Homo sapiens; identical to SEQ ID NO: 22777
  misc_feature 1788, 1811, 1830, 1849, 1858, 1989: n = A,T,C or G

SEQ ID NO: 28630 - DNA, 903 bp, Homo sapiens; identical to SEQ ID NO: 20618
  misc_feature 1, 2, 3, 4, 5, 6, 7, 8, 9, 10, 11, 12, 13, 14, 15, 899, 900,901, 902, 903: n = A,T,C or G

SEQ ID NO: 28631 - DNA, 1020 bp, Homo sapiens; identical to SEQ ID NO: 20647
  misc_feature 1, 2, 3, 14, 20, 35, 42, 48, 81, 1019, 1020: n = A,T,C or G

SEQ ID NO: 28632 - DNA, 1026 bp, Homo sapiens; identical to SEQ ID NO: 21285
  misc_feature 1, 2, 1025, 1026: n = A,T,C or G

SEQ ID NO: 28633 - DNA, 2028 bp, Homo sapiens; identical to SEQ ID NO: 22781
  misc_feature 1895, 1896: n = A,T,C or G

SEQ ID NO: 28634 - DNA, 3983 bp, Homo sapiens; identical to SEQ ID NO: 21101

SEQ ID NO: 28635 - DNA, 1090 bp, Homo sapiens; identical to SEQ ID NO: 22541
  misc_feature 1: n = A,T,C or G

SEQ ID NO: 28636 - DNA, 539 bp, Homo sapiens; identical to SEQ ID NO: 22784

SEQ ID NO: 28637 - DNA, 3983 bp, Homo sapiens; identical to SEQ ID NO: 21101

SEQ ID NO: 28638 - DNA, 577 bp, Homo sapiens; identical to SEQ ID NO: 22785
  misc_feature 577: n = A,T,C or G

SEQ ID NO: 28639 - DNA, 757 bp, Homo sapiens; identical to SEQ ID NO: 20428
  misc_feature 1, 2, 3, 4, 5: n = A,T,C or G

SEQ ID NO: 28640 - DNA, 548 bp, Homo sapiens; identical to SEQ ID NO: 22787
  misc_feature 548: n = A,T,C or G

SEQ ID NO: 28641 - DNA, 2273 bp, Homo sapiens; identical to SEQ ID NO: 22788
  misc_feature 1, 2, 3, 4, 2269, 2270, 2271, 2272, 2273: n = A,T,C or G

SEQ ID NO: 28642 - DNA, 394 bp, Homo sapiens; identical to SEQ ID NO: 20433

SEQ ID NO: 28643 - DNA, 658 bp, Homo sapiens; identical to SEQ ID NO: 21891

SEQ ID NO: 28644 - DNA, 643 bp, Homo sapiens; identical to SEQ ID NO: 20678
  misc_feature 1, 2, 640, 641, 642, 643: n = A,T,C or G

SEQ ID NO: 28645 - DNA, 3730 bp, Homo sapiens; identical to SEQ ID NO: 22792
  misc_feature 386: n = A,T,C or G

SEQ ID NO: 28646 - DNA, 500 bp, Homo sapiens; identical to SEQ ID NO: 22793
  misc_feature 1, 2, 3, 4, 5, 6, 7, 8, 9, 10, 11, 497, 498, 499, 500: n = A,T,C or G

SEQ ID NO: 28647 - DNA, 1463 bp, Homo sapiens; identical to SEQ ID NO: 22794
  misc_feature 1, 1463: n = A,T,C or G

SEQ ID NO: 28648 - DNA, 502 bp, Homo sapiens; identical to SEQ ID NO: 22795
  misc_feature 1, 499, 500, 501, 502: n = A,T,C or G

SEQ ID NO: 28649 - DNA, 1329 bp, Homo sapiens; identical to SEQ ID NO: 22577

SEQ ID NO: 28650 - DNA, 1866 bp, Homo sapiens; identical to SEQ ID NO: 21250
  misc_feature 1, 2, 168, 1861, 1862, 1863, 1864, 1865, 1866: n = A,T,C or G

SEQ ID NO: 28651 - DNA, 1993 bp, Homo sapiens; identical to SEQ ID NO: 22798

SEQ ID NO: 28652 - DNA, 596 bp, Homo sapiens; identical to SEQ ID NO: 21754

SEQ ID NO: 28653 - DNA, 2071 bp, Homo sapiens; identical to SEQ ID NO: 21824

SEQ ID NO: 28654 - DNA, 627 bp, Homo sapiens; identical to SEQ ID NO: 22801
  misc_feature 612, 613, 614, 615, 616, 617, 618, 619, 620, 621, 622, 623,624, 625, 626, 627: n = A,T,C or G

SEQ ID NO: 28655 - DNA, 963 bp, Homo sapiens
  misc_feature 962, 963: n = A,T,C or G
acgcggggaggcgcttgccagtgcaatctgggcgatcgcttcctggtcctcgcctcctccgctgtctccctggagttcttgcaagtcggccaggatgtctcagtgtagacccttgtctgagaccgagctatgtggggcgacctctggctcctcccgcctgcctctgccaatccgggcactgggacagaggctgagttgagaaagctgcagaggaggttaggcaccttaagaccaagccatcggatgaggagatgctgttcatctatggccactacaaacaagcaactgtgggcgacataaatacagaacggcccgggatgttggacttcacgggcaaggccaagtgggatgcctggaatgagctgaaagggacttccaaggaagatgccatgaaagcttacatcaacaaagtagaagagctaaagaaaaaatacgggatatgagagactggatttggttactgtgccatgtgtttatcctaaactgagacaatgccttgtttttttctaataccgtggatggtgggaattcgggaaaataaccagttaaaccagctactcaaggctgctcaccatacggtctaacagattaggggctaaaacgattactgactttccttgagtagtttttatctgaaatcaattaacagtgtattgttactttaaaaaaaaaaaaaaaaaaaaattttggggggctggccacgaaaaggttctaaccatcggctgggggcgcggcccggtagggaagtaactggccataggggtcccaggagccggggcaggatgggggggtctcacaaaaaaacgcggggaaccggcgttgacaaacagaagggctgggcatggctcacaggcccacctaatccccgcgggggataaaacaacaaacacaacaacaaacggaacacacacaacacaagacaggaaaaagaagcaaaagaacggacacgtgcacagtaacann

SEQ ID NO: 28656 - DNA, 1187 bp, Homo sapiens
  misc_feature 1, 2, 3, 4, 5, 6, 7, 8, 9, 10, 11, 12, 13, 14, 15, 16, 17,18, 19, 20, 27, 31, 32, 45, 50, 57, 74, 81, 89, 1187: n = A,T,C or G
nnnnnnnnnnnnnnnnnnnnccccccnggtnnttttttccccggnttttntttttancctggttggcccttaantttcccnggttttcngggccagggtccccttggaaggtcttttgggggggtttaacaaatttttagcctaaaacctcctctataacaaacatgcacacaatggaagtgatgtcgtaagtgagtgatggggcaggaaggacctagggctctgtctcgactataaaatcaccttgccccaaacaaatttaaattataacttaggaggttcatggactttcatccattctggaaacaaagagaaaaaccaaatcaaataccagaatctgttttctcactgggcaaatagcaacaggatccacagttttaccacaattgtttccctgtctccatgtggtatctacataattcttttcccaaaggaggaaatcaaataacaggccaatctgagtaattaaactcccctcccaacactacccaacctctgtgaataaaagctttccaaactttgtgatcacatttgaaattggttcacttattattgagagaaaaccacaaaaagtctcaatttcatcacatcctcaaaccaatcttttaatttttaaatgcagaagaagaaacaaaacgaaacaaaaagatcattctgcaaagagacctctcaactcttcatcagccagtggcataactcagaaactgatttaactaatttattatttgagaaaaggggattgaaaaacaattggggggtataatcttctgattcacaattcccagccacattcttttctatttattctctctctctctcttttttttttttttttttaagagccggagtcttgctctgtcaccaggctggagtgcagtggtgtgatctcagctcactgcaacttccgtctcctgggttcaagaattttcctgcctcagcctcccaagtacctgggactacaggcacgccccaccatgcccagctcatttttgtatttttagtagagacagggtttcaccatgttggccaggatgatcttgatctcttgacctcatgatccgcccgtcttggcctcccaaagtgctgggatcacaggcgtgagccaccacacctggccctctatttattctctttaaagagagagaaaactatgagaggccaaaattatttaattaatctttgcggan

SEQ ID NO: 28657 - DNA, 1163 bp, Homo sapiens; identical to SEQ ID NO: 22803
  misc_feature 1: n = A,T,C or G

SEQ ID NO: 28658 - DNA, 1900 bp, Homo sapiens; identical to SEQ ID NO: 22804
  misc_feature 1897, 1898, 1899, 1900: n = A,T,C or G

SEQ ID NO: 28659 - DNA, 889 bp, Homo sapiens; identical to SEQ ID NO: 22805

SEQ ID NO: 28660 - DNA, 860 bp, Homo sapiens; identical to SEQ ID NO: 22806
  misc_feature 1: n = A,T,C or G

SEQ ID NO: 28661 - DNA, 1880 bp, Homo sapiens; identical to SEQ ID NO: 22807

SEQ ID NO: 28662 - DNA, 3983 bp, Homo sapiens; identical to SEQ ID NO: 21101

SEQ ID NO: 28663 - DNA, 623 bp, Homo sapiens; identical to SEQ ID NO: 22809
  misc_feature 596, 597, 598, 599, 600, 601, 602, 603, 604, 605, 606, 607,608, 609, 610, 611, 612, 613, 614, 615, 616, 617, 618, 619,620, 621, 622, 623: n = A,T,C or G

SEQ ID NO: 28664 - DNA, 815 bp, Homo sapiens; identical to SEQ ID NO: 22810
  misc_feature 1, 2, 3, 4: n = A,T,C or G

SEQ ID NO: 28665 - DNA, 644 bp, Homo sapiens; identical to SEQ ID NO: 22811
  misc_feature 1, 27: n = A,T,C or G

SEQ ID NO: 28666 - DNA, 2452 bp, Homo sapiens; identical to SEQ ID NO: 22637

SEQ ID NO: 28667 - DNA, 1159 bp, Homo sapiens; identical to SEQ ID NO: 22812
  misc_feature 1015, 1154, 1155, 1156, 1157, 1158, 1159: n = A,T,C or G

SEQ ID NO: 28668 - DNA, 1167 bp, Homo sapiens; identical to SEQ ID NO: 22813
  misc_feature 1, 2, 3, 4, 5, 6, 7, 8, 9, 10, 11, 12, 13, 14, 15, 16, 17,18, 19, 20, 21, 22, 1167: n = A,T,C or G

SEQ ID NO: 28669 - DNA, 3855 bp, Homo sapiens; identical to SEQ ID NO: 20695
  misc_feature 1, 2, 3854, 3855: n = A,T,C or G

SEQ ID NO: 28670 - DNA, 1013 bp, Homo sapiens; identical to SEQ ID NO: 22649
  misc_feature 174: n = A,T,C or G

SEQ ID NO: 28671 - DNA, 985 bp, Homo sapiens; identical to SEQ ID NO: 21932
  misc_feature 1, 2, 3, 4, 5, 6, 7, 8, 9, 10, 11, 12, 13, 14, 983, 984, 985: n = A,T,C or G

SEQ ID NO: 28672 - DNA, 569 bp, Homo sapiens; identical to SEQ ID NO: 22817
  misc_feature 1, 551, 552, 553, 554, 555, 556, 557, 558, 559, 560, 561,562, 563, 564, 565, 566, 567, 568, 569: n = A,T,C or G

SEQ ID NO: 28673 - DNA, 453 bp, Homo sapiens; identical to SEQ ID NO: 22818
  misc_feature 445, 446, 447, 448, 449, 450, 451, 452, 453: n = A,T,C or G

SEQ ID NO: 28674 - DNA, 1662 bp, Homo sapiens; identical to SEQ ID NO: 22819

SEQ ID NO: 28675 - DNA, 5145 bp, Homo sapiens; identical to SEQ ID NO: 20824
  misc_feature 1, 5144, 5145: n = A,T,C or G

SEQ ID NO: 28676 - DNA, 437 bp, Homo sapiens; identical to SEQ ID NO: 22821

SEQ ID NO: 28677 - DNA, 2556 bp, Homo sapiens; identical to SEQ ID NO: 22822

SEQ ID NO: 28678 - DNA, 1132 bp, Homo sapiens; identical to SEQ ID NO: 22823
  misc_feature 1, 2, 1120, 1121, 1122, 1123, 1124, 1125, 1126, 1127, 1128,1129, 1130, 1131, 1132: n = A,T,C or G

SEQ ID NO: 28679 - DNA, 877 bp, Homo sapiens; identical to SEQ ID NO: 22824

SEQ ID NO: 28680 - DNA, 504 bp, Homo sapiens; identical to SEQ ID NO: 22504
  misc_feature 1, 2, 3, 4, 5, 503, 504: n = A,T,C or G

SEQ ID NO: 28681 - DNA, 552 bp, Homo sapiens; identical to SEQ ID NO: 22826
  misc_feature 548, 549, 550, 551, 552: n = A,T,C or G

SEQ ID NO: 28682 - DNA, 479 bp, Homo sapiens; identical to SEQ ID NO: 22827
  misc_feature 477, 478, 479: n = A,T,C or G

SEQ ID NO: 28683 - DNA, 1746 bp, Homo sapiens; identical to SEQ ID NO: 22657
  misc_feature 1741, 1744, 1745, 1746: n = A,T,C or G

SEQ ID NO: 28684 - DNA, 455 bp, Homo sapiens; identical to SEQ ID NO: 22019
  misc_feature 1, 454, 455: n = A,T,C or G

SEQ ID NO: 28685 - DNA, 624 bp, Homo sapiens; identical to SEQ ID NO: 22830
  misc_feature 1: n = A,T,C or G

SEQ ID NO: 28686 - DNA, 4237 bp, Homo sapiens; identical to SEQ ID NO: 22831

SEQ ID NO: 28687 - DNA, 3983 bp, Homo sapiens; identical to SEQ ID NO: 21101

SEQ ID NO: 28688 - DNA, 2200 bp, Homo sapiens; identical to SEQ ID NO: 22833

SEQ ID NO: 28689 - DNA, 928 bp, Homo sapiens; identical to SEQ ID NO: 22834
  misc_feature 928: n = A,T,C or G

SEQ ID NO: 28690 - DNA, 207 bp, Homo sapiens; identical to SEQ ID NO: 20333
  misc_feature 1, 2, 205, 206, 207: n = A,T,C or G

SEQ ID NO: 28691 - DNA, 1698 bp, Homo sapiens; identical to SEQ ID NO: 22837
  misc_feature 1, 2: n = A,T,C or G

SEQ ID NO: 28692 - DNA, 853 bp, Homo sapiens; identical to SEQ ID NO: 22576
  misc_feature 1, 850, 851, 852, 853: n = A,T,C or G

SEQ ID NO: 28693 - DNA, 531 bp, Homo sapiens; identical to SEQ ID NO: 22839

SEQ ID NO: 28694 - DNA, 531 bp, Homo sapiens; identical to SEQ ID NO: 22840

SEQ ID NO: 28695 - DNA, 1189 bp, Homo sapiens; identical to SEQ ID NO: 20185
  misc_feature 1179, 1180, 1181, 1182, 1183, 1184, 1185, 1186, 1187, 1188,1189: n = A,T,C or G

SEQ ID NO: 28696 - DNA, 384 bp, Homo sapiens; identical to SEQ ID NO: 22842

SEQ ID NO: 28697 - DNA, 652 bp, Homo sapiens; identical to SEQ ID NO: 22843
  misc_feature 1, 651, 652: n = A,T,C or G

SEQ ID NO: 28698 - DNA, 381 bp, Homo sapiens; identical to SEQ ID NO: 22844

SEQ ID NO: 28699 - DNA, 889 bp, Homo sapiens; identical to SEQ ID NO: 22805

SEQ ID NO: 28700 - DNA, 669 bp, Homo sapiens; identical to SEQ ID NO: 22846
  misc_feature 1, 2, 3, 4, 5, 6, 7, 8, 9, 10, 11, 12, 13: n = A,T,C or G

SEQ ID NO: 28701 - DNA, 1512 bp, Homo sapiens; identical to SEQ ID NO: 22847
  misc_feature 1492, 1493, 1494, 1495, 1496, 1497, 1498, 1499, 1500, 1501,1502, 1503, 1504, 1505, 1506, 1507, 1508, 1509, 1510, 1511,1512: n = A,T,C or G

SEQ ID NO: 28702 - DNA, 892 bp, Homo sapiens; identical to SEQ ID NO: 21529
  misc_feature 892: n = A,T,C or G

SEQ ID NO: 28703 - DNA, 4219 bp, Homo sapiens; identical to SEQ ID NO: 21865
  misc_feature 1, 2, 4211, 4212, 4213, 4214, 4215, 4216, 4217, 4218, 4219: n = A,T,C or G

SEQ ID NO: 28704 - DNA, 886 bp, Homo sapiens; identical to SEQ ID NO: 21881
  misc_feature 1, 2, 3, 4, 5, 6, 886: n = A,T,C or G

SEQ ID NO: 28705 - DNA, 629 bp, Homo sapiens; identical to SEQ ID NO: 20404
  misc_feature 618, 619, 620, 621, 622, 623, 624, 625, 626, 627, 628, 629: n = A,T,C or G

SEQ ID NO: 28706 - DNA, 3983 bp, Homo sapiens; identical to SEQ ID NO: 21101

SEQ ID NO: 28707 - DNA, 2538 bp, Homo sapiens; identical to SEQ ID NO: 20316
  misc_feature 2538: n = A,T,C or G

SEQ ID NO: 28708 - DNA, 381 bp, Homo sapiens; identical to SEQ ID NO: 22854

SEQ ID NO: 28709 - DNA, 561 bp, Homo sapiens; identical to SEQ ID NO: 22855
  misc_feature 1, 2, 3, 4, 5, 6, 7, 8, 9, 10, 561: n = A,T,C or G

SEQ ID NO: 28710 - DNA, 1329 bp, Homo sapiens; identical to SEQ ID NO: 22577

SEQ ID NO: 28711 - DNA, 1033 bp, Homo sapiens; identical to SEQ ID NO: 22857

SEQ ID NO: 28712 - DNA, 815 bp, Homo sapiens; identical to SEQ ID NO: 22858
  misc_feature 1, 2, 3, 4, 5, 6, 7, 8, 9, 10, 811, 812, 813, 814, 815: n = A,T,C or G

SEQ ID NO: 28713 - DNA, 2274 bp, Homo sapiens; identical to SEQ ID NO: 22859
  misc_feature 1, 2, 2248, 2249, 2250, 2251, 2252, 2253, 2254, 2255, 2256,2257, 2258, 2259, 2260, 2261, 2262, 2263, 2264, 2265, 2266,2267, 2268, 2269, 2270, 2271, 2272, 2273, 2274: n = A,T,C or G

SEQ ID NO: 28714 - DNA, 1001 bp, Homo sapiens; identical to SEQ ID NO: 21314
  misc_feature 681, 682, 683, 684, 685, 686, 687, 688, 689, 690, 691, 692,693, 694, 695, 696, 697, 698, 699, 700, 701, 702, 703, 704,705, 706, 707, 708, 709, 710, 711, 712, 713, 714, 715, 716,717, 718: n = A,T,C or G

SEQ ID NO: 28715 - DNA, 587 bp, Homo sapiens; identical to SEQ ID NO: 22860
  misc_feature 541, 578, 579, 580, 581, 582, 583, 584, 585, 586, 587: n = A,T,C or G

SEQ ID NO: 28716 - DNA, 2142 bp, Homo sapiens; identical to SEQ ID NO: 22861
  misc_feature 1, 2140, 2141, 2142: n = A,T,C or G

SEQ ID NO: 28717 - DNA, 2296 bp, Homo sapiens; identical to SEQ ID NO: 22862
  misc_feature 1, 2, 14, 2295, 2296: n = A,T,C or G

SEQ ID NO: 28718 - DNA, 654 bp, Homo sapiens; identical to SEQ ID NO: 22863
  misc_feature 1, 2, 3, 4, 650, 651, 652, 653, 654: n = A,T,C or G

SEQ ID NO: 28719 - DNA, 1001 bp, Homo sapiens; identical to SEQ ID NO: 21314
  misc_feature 681, 682, 683, 684, 685, 686, 687, 688, 689, 690, 691, 692,693, 694, 695, 696, 697, 698, 699, 700, 701, 702, 703, 704,705, 706, 707, 708, 709, 710, 711, 712, 713, 714, 715, 716,717, 718: n = A,T,C or G

SEQ ID NO: 28720 - DNA, 1117 bp, Homo sapiens; identical to SEQ ID NO: 21513
  misc_feature 1: n = A,T,C or G

SEQ ID NO: 28721 - DNA, 2884 bp, Homo sapiens; identical to SEQ ID NO: 22866
  misc_feature 1, 2, 3, 4, 5, 6, 7, 9, 2879, 2880, 2881, 2882, 2883, 2884: n = A,T,C or G

SEQ ID NO: 28722 - DNA, 862 bp, Homo sapiens; identical to SEQ ID NO: 21330

SEQ ID NO: 28723 - DNA, 3983 bp, Homo sapiens; identical to SEQ ID NO: 21101

SEQ ID NO: 28724 - DNA, 701 bp, Homo sapiens; identical to SEQ ID NO: 22869

SEQ ID NO: 28725 - DNA, 2187 bp, Homo sapiens; identical to SEQ ID NO: 21516

SEQ ID NO: 28726 - DNA, 2071 bp, Homo sapiens; identical to SEQ ID NO: 21824

SEQ ID NO: 28727 - DNA, 1147 bp, Homo sapiens; identical to SEQ ID NO: 22487
  misc_feature 1, 2: n = A,T,C or G

SEQ ID NO: 28728 - DNA, 604 bp, Homo sapiens; identical to SEQ ID NO: 20360
  misc_feature 596, 604: n = A,T,C or G

SEQ ID NO: 28729 - DNA, 865 bp, Homo sapiens; identical to SEQ ID NO: 20524

SEQ ID NO: 28730 - DNA, 414 bp, Homo sapiens; identical to SEQ ID NO: 22874
  misc_feature 1, 2, 3, 4, 5, 6, 7, 8, 9, 10, 11, 12, 13, 14, 15, 16, 17,18, 19, 20, 21, 22, 23, 24, 25, 26, 27, 409, 410, 411, 412,413, 414: n = A,T,C or G

SEQ ID NO: 28731 - DNA, 2367 bp, Homo sapiens; identical to SEQ ID NO: 22718
  misc_feature 1, 8, 9, 2339, 2340, 2341, 2342, 2343, 2344, 2345, 2346,2347, 2348, 2349, 2350, 2351, 2352, 2353, 2354, 2355, 2356,2357, 2358, 2359, 2360, 2361, 2362, 2363, 2364, 2365, 2366,2367: n = A,T,C or G

SEQ ID NO: 28732 - DNA, 353 bp, Homo sapiens; identical to SEQ ID NO: 22876
  misc_feature 350, 351, 352, 353: n = A,T,C or G

SEQ ID NO: 28733 - DNA, 283 bp, Homo sapiens; identical to SEQ ID NO: 22877
  misc_feature 1, 2, 3, 4, 5, 6: n = A,T,C or G

SEQ ID NO: 28734 - DNA, 2843 bp, Homo sapiens; identical to SEQ ID NO: 20339
  misc_feature 1, 2, 3, 4, 2815, 2816, 2817, 2818, 2819, 2820, 2821, 2822,2823, 2824, 2825, 2826, 2827, 2828, 2829, 2830, 2831, 2832,2833, 2834, 2835, 2836, 2837, 2838, 2839, 2840, 2841, 2842,2843: n = A,T,C or G

SEQ ID NO: 28735 - DNA, 995 bp, Homo sapiens; identical to SEQ ID NO: 22879
  misc_feature 1, 2, 3, 4, 5, 6, 7, 8, 9, 10, 11, 12, 13, 14, 15, 16, 17,995: n = A,T,C or G

SEQ ID NO: 28736 - DNA, 558 bp, Homo sapiens; identical to SEQ ID NO: 21631
  misc_feature 1, 2, 3, 4, 5, 6, 7, 558: n = A,T,C or G

SEQ ID NO: 28737 - DNA, 886 bp, Homo sapiens; identical to SEQ ID NO: 21943
  misc_feature 1, 2: n = A,T,C or G

SEQ ID NO: 28738 - DNA, 981 bp, Homo sapiens; identical to SEQ ID NO: 21549
  misc_feature 1, 906, 981: n = A,T,C or G

SEQ ID NO: 28739 - DNA, 1973 bp, Homo sapiens
  misc_feature 1, 2, 3, 4, 5, 1960, 1961, 1962, 1963, 1964, 1965, 1966,1967, 1968, 1969, 1970, 1971, 1972, 1973: n = A,T,C or G
nnnnngatggggcgacccagcgtcccgcgggtgctgccgtgcggtacttgtcatggagctggcactgcggcgctctcccgtcccgcggtggttgctgctgctgccgctgctgctgggcctgaacgcaggagctgtcattgactggcccacagaggagggcaaggaagtatgggattatgtgacggtccgcaaggatgcctacatgttctggtggctctattatgccaccaactcctgcaagaacttctcagaactgcccctggtcatgtggcttcagggcggtccaggcggttctagcactggatttggaaactttgaggaaattgggccccttgacagtgatctcaaaccacggaaaaccacctggctccaggctgccagtctcctatttgtggataatcccgtgggcactgggttcagttatgtgaatggtagtggtgcctatgccaaggacctggctatggtggcttcagacatgatggttctcctgaagaccttcttcagttgccacaaagaattccagacagttccattctacattttctcagagtcctatggaggaaaaatggcagctggcattggtctagagctttataaggccattcagcgagggaccatcaagtgcaactttgcgggggttgccttgggtgattcctggatctcccctgttgattcggtgctctcctggggaccttacctgtacagcatgtctcttctcgaagacaaaggtctggcagaggtgtctaaggttgcagagcaagtactgaatgccgtaaataaggggctctacagagaggccacagagctgtgggggaaagcagaaatgatcattgaacagaacacagatggggtgaacttctataacatcttaactaaaagcactcccacgtctacaatggagtcgagtctagaattcacacagagccacctagtttgtctttgtcagcgccacgtgagacacctacaacgagatgccttaagccagctcatgaatggccccatcagaaagaagctcaaaattattcctgaggatcaatcctggggaggccaggctaccaacgtctttgtgaacatggaggaggacttcatgaagccagtcattagcattgtggacgagttgctggaggcagggatcaacgtgacggtgtataatggacagctggatctcatcgtagataccatgggtcaggaggcctgggtgcggaaactgaagtggccagaactgcctaaattcagtcagctgaagtggaaggccctgtacagtgaccctaaatctttggaaacatctgcttttgtcaagtcctacaagaaccttgctttctactggattctgaaagctggtcatatggttccttctgaccaaggggacatggctctgaagatgatgagactggtgactcagcaagaataggatggatggggctggagatgagctggtttggccttggggcacagagctgagctgaggccgctgaagctgtaggaagcgccattcttccctgtatctaactggggctgtgatcaagaaggttctgaccagcttctgcagaggataaaatcattgtctctggaggcaatttggaaattatttctgcttcttaaaaaaacctaagattttttaaaaaattgatttgttttgatcaaaataaaggatgataatagatattattttttcttatgacagaagcaaatgatgtgatttatagaaaaactgggaaatacaggtacccaaagagtaaatcaacatctgtatacccccttcccaggggtaagcactgttaccaatttagcatatgtccttgcagaatttttttttctatatatacatatatattttttaccaaaatgaatcattactctatgttgttttactatttgtttgacatatcagtatatctgaaacaccttttcatgtcaataaatgttcttctctaacatttttaaaaaaaaaaaaaaaaannnnnnnnnnnnnn

SEQ ID NO: 28740 - DNA, 404 bp, Homo sapiens; identical to SEQ ID NO: 20663
  misc_feature 404: n = A,T,C or G

SEQ ID NO: 28741 - DNA, 466 bp, Homo sapiens; identical to SEQ ID NO: 20303
  misc_feature 1, 2, 3, 466: n = A,T,C or G

SEQ ID NO: 28742 - DNA, 3421 bp, Homo sapiens; identical to SEQ ID NO: 22882
  misc_feature 1, 2, 3, 4, 5, 3401, 3402, 3403, 3404, 3405, 3406, 3407,3408, 3409, 3410, 3411, 3412, 3413, 3414, 3415, 3416, 3417,3418, 3419, 3420, 3421: n = A,T,C or G

SEQ ID NO: 28743 - DNA, 1180 bp, Homo sapiens; identical to SEQ ID NO: 22883
  misc_feature 1, 2, 1178, 1179, 1180: n = A,T,C or G

SEQ ID NO: 28744 - DNA, 430 bp, Homo sapiens; identical to SEQ ID NO: 22884
  misc_feature 1: n = A,T,C or G

SEQ ID NO: 28745 - DNA, 300 bp, Homo sapiens; identical to SEQ ID NO: 22885

SEQ ID NO: 28746 - DNA, 3228 bp, Homo sapiens; identical to SEQ ID NO: 22886
  misc_feature 1, 2, 3216, 3217, 3218, 3219, 3220, 3221, 3222, 3223, 3224,3225, 3226, 3227, 3228: n = A,T,C or G

SEQ ID NO: 28747 - DNA, 779 bp, Homo sapiens; identical to SEQ ID NO: 20149
  misc_feature 1: n = A,T,C or G

SEQ ID NO: 28748 - DNA, 1189 bp, Homo sapiens; identical to SEQ ID NO: 20185
  misc_feature 1179, 1180, 1181, 1182, 1183, 1184, 1185, 1186, 1187, 1188,1189: n = A,T,C or G

SEQ ID NO: 28749 - DNA, 2538 bp, Homo sapiens; identical to SEQ ID NO: 20316
  misc_feature 2538: n = A,T,C or G

SEQ ID NO: 28750 - DNA, 515 bp, Homo sapiens; identical to SEQ ID NO: 20177

SEQ ID NO: 28751 - DNA, 389 bp, Homo sapiens; identical to SEQ ID NO: 20696

SEQ ID NO: 28752 - DNA, 701 bp, Homo sapiens; identical to SEQ ID NO: 22893
  misc_feature 1, 2, 3, 4, 5, 6, 7, 8, 699, 700, 701: n = A,T,C or G

SEQ ID NO: 28753 - DNA, 686 bp, Homo sapiens; identical to SEQ ID NO: 20656
  misc_feature 1, 2, 3: n = A,T,C or G

SEQ ID NO: 28754 - DNA, 1902 bp, Homo sapiens; identical to SEQ ID NO: 22895
  misc_feature 1, 2, 3, 4, 5, 6, 7, 1899, 1900, 1901, 1902: n = A,T,C or G

SEQ ID NO: 28755 - DNA, 2015 bp, Homo sapiens; identical to SEQ ID NO: 22896
  misc_feature 1, 2, 3, 4, 5, 6, 7, 8, 9, 10, 12: n = A,T,C or G

SEQ ID NO: 28756 - DNA, 613 bp, Homo sapiens; identical to SEQ ID NO: 20105

SEQ ID NO: 28757 - DNA, 2451 bp, Homo sapiens; identical to SEQ ID NO: 22898

SEQ ID NO: 28758 - DNA, 1380 bp, Homo sapiens; identical to SEQ ID NO: 20118
  misc_feature 1380: n = A,T,C or G

SEQ ID NO: 28759 - DNA, 585 bp, Homo sapiens; identical to SEQ ID NO: 22537
  misc_feature 1, 582, 583, 584, 585: n = A,T,C or G

SEQ ID NO: 28760 - DNA, 388 bp, Homo sapiens; identical to SEQ ID NO: 22901
  misc_feature 252, 253, 259, 388: n = A,T,C or G

SEQ ID NO: 28761 - DNA, 843 bp, Homo sapiens; identical to SEQ ID NO: 22902
  misc_feature 1, 2, 3, 4, 5, 6, 7, 8, 9, 10, 11, 12, 843: n = A,T,C or G

SEQ ID NO: 28762 - DNA, 493 bp, Homo sapiens; identical to SEQ ID NO: 22903
  misc_feature 490, 491, 492, 493: n = A,T,C or G

SEQ ID NO: 28763 - DNA, 953 bp, Homo sapiens; identical to SEQ ID NO: 22904
  misc_feature 936: n = A,T,C or G

SEQ ID NO: 28764 - DNA, 488 bp, Homo sapiens; identical to SEQ ID NO: 22905
  misc_feature 1, 2, 3, 4, 5, 6, 22, 436, 485, 486, 487, 488: n = A,T,C or G

SEQ ID NO: 28765 - DNA, 1147 bp, Homo sapiens; identical to SEQ ID NO: 22487
  misc_feature 1, 2: n = A,T,C or G

SEQ ID NO: 28766 - DNA, 493 bp, Homo sapiens; identical to SEQ ID NO: 22903
  misc_feature 490, 491, 492, 493: n = A,T,C or G

SEQ ID NO: 28767 - DNA, 455 bp, Homo sapiens; identical to SEQ ID NO: 22908
  misc_feature 454, 455: n = A,T,C or G

SEQ ID NO: 28768 - DNA, 642 bp, Homo sapiens; identical to SEQ ID NO: 21674
  misc_feature 1, 2: n = A,T,C or G

SEQ ID NO: 28769 - DNA, 485 bp, Homo sapiens; identical to SEQ ID NO: 22910
  misc_feature 1: n = A,T,C or G

SEQ ID NO: 28770 - DNA, 670 bp, Homo sapiens; identical to SEQ ID NO: 21478
  misc_feature 623, 625, 670: n = A,T,C or G

SEQ ID NO: 28771 - DNA, 7984 bp, Homo sapiens; identical to SEQ ID NO: 22761

SEQ ID NO: 28772 - DNA, 1026 bp, Homo sapiens; identical to SEQ ID NO: 22912
  misc_feature 1, 77, 1025, 1026: n = A,T,C or G

SEQ ID NO: 28773 - DNA, 1146 bp, Homo sapiens; identical to SEQ ID NO: 22913
  misc_feature 1, 1146: n = A,T,C or G

SEQ ID NO: 28774 - DNA, 2475 bp, Homo sapiens; identical to SEQ ID NO: 21595

SEQ ID NO: 28775 - DNA, 2841 bp, Homo sapiens; identical to SEQ ID NO: 21617

SEQ ID NO: 28776 - DNA, 686 bp, Homo sapiens; identical to SEQ ID NO: 22916
  misc_feature 1, 2, 3, 4, 5, 6, 7, 8, 686: n = A,T,C or G

SEQ ID NO: 28777 - DNA, 558 bp, Homo sapiens; identical to SEQ ID NO: 22917
  misc_feature 1, 2, 3, 4, 5, 6, 7, 8: n = A,T,C or G

SEQ ID NO: 28778 - DNA, 2786 bp, Homo sapiens; identical to SEQ ID NO: 21609
  misc_feature 1, 2, 2777, 2778, 2779, 2780, 2781, 2782, 2783, 2784, 2785,2786: n = A,T,C or G

SEQ ID NO: 28779 - DNA, 892 bp, Homo sapiens; identical to SEQ ID NO: 22919
  misc_feature 1, 2, 3, 23, 882, 883, 884, 885, 886, 887, 888, 889, 890,891, 892: n = A,T,C or G

SEQ ID NO: 28780 - DNA, 1785 bp, Homo sapiens; identical to SEQ ID NO: 22920
  misc_feature 1783, 1784, 1785: n = A,T,C or G

SEQ ID NO: 28781 - DNA, 374 bp, Homo sapiens; identical to SEQ ID NO: 21925

SEQ ID NO: 28782 - DNA, 908 bp, Homo sapiens; identical to SEQ ID NO: 22922
  misc_feature 824, 888, 898, 908: n = A,T,C or G

SEQ ID NO: 28783 - DNA, 1001 bp, Homo sapiens; identical to SEQ ID NO: 21314
  misc_feature 681, 682, 683, 684, 685, 686, 687, 688, 689, 690, 691, 692,693, 694, 695, 696, 697, 698, 699, 700, 701, 702, 703, 704,705, 706, 707, 708, 709, 710, 711, 712, 713, 714, 715, 716,717, 718: n = A,T,C or G

SEQ ID NO: 28784 - DNA, 405 bp, Homo sapiens; identical to SEQ ID NO: 22924

SEQ ID NO: 28785 - DNA, 1710 bp, Homo sapiens; identical to SEQ ID NO: 22925
  misc_feature 1, 2, 3, 4, 1706, 1707, 1708, 1709, 1710: n = A,T,C or G

SEQ ID NO: 28786 - DNA, 1001 bp, Homo sapiens; identical to SEQ ID NO: 21314
  misc_feature 681, 682, 683, 684, 685, 686, 687, 688, 689, 690, 691, 692,693, 694, 695, 696, 697, 698, 699, 700, 701, 702, 703, 704,705, 706, 707, 708, 709, 710, 711, 712, 713, 714, 715, 716,717, 718: n = A,T,C or G

SEQ ID NO: 28787 - DNA, 1001 bp, Homo sapiens; identical to SEQ ID NO: 21314
  misc_feature 681, 682, 683, 684, 685, 686, 687, 688, 689, 690, 691, 692,693, 694, 695, 696, 697, 698, 699, 700, 701, 702, 703, 704,705, 706, 707, 708, 709, 710, 711, 712, 713, 714, 715, 716,717, 718: n = A,T,C or G

SEQ ID NO: 28788 - DNA, 619 bp, Homo sapiens; identical to SEQ ID NO: 20381

SEQ ID NO: 28789 - DNA, 508 bp, Homo sapiens; identical to SEQ ID NO: 21293
  misc_feature 502, 503, 504, 505, 506, 507, 508: n = A,T,C or G

SEQ ID NO: 28790 - DNA, 941 bp, Homo sapiens; identical to SEQ ID NO: 22931

SEQ ID NO: 28791 - DNA, 224 bp, Homo sapiens; identical to SEQ ID NO: 22932

SEQ ID NO: 28792 - DNA, 910 bp, Homo sapiens; identical to SEQ ID NO: 22341

SEQ ID NO: 28793 - DNA, 3130 bp, Homo sapiens; identical to SEQ ID NO: 22934
  misc_feature 1, 67, 73, 3130: n = A,T,C or G

SEQ ID NO: 28794 - DNA, 504 bp, Homo sapiens; identical to SEQ ID NO: 22504
  misc_feature 1, 2, 3, 4, 5, 503, 504: n = A,T,C or G

SEQ ID NO: 28795 - DNA, 1002 bp, Homo sapiens; identical to SEQ ID NO: 22660
  misc_feature 1, 2, 983, 984, 985, 986, 987, 988, 989, 990, 991, 992, 993,994, 995, 996, 997, 998, 999, 1000, 1001, 1002: n = A,T,C or G

SEQ ID NO: 28796 - DNA, 1162 bp, Homo sapiens; identical to SEQ ID NO: 22644
  misc_feature 1, 2, 3, 4, 1155, 1156, 1157, 1158, 1159, 1160, 1161, 1162: n = A,T,C or G

SEQ ID NO: 28797 - DNA, 2063 bp, Homo sapiens; identical to SEQ ID NO: 22272

SEQ ID NO: 28798 - DNA, 3986 bp, Homo sapiens; identical to SEQ ID NO: 22937

SEQ ID NO: 28799 - DNA, 608 bp, Homo sapiens; identical to SEQ ID NO: 22938

SEQ ID NO: 28800 - DNA, 3855 bp, Homo sapiens; identical to SEQ ID NO: 22939
  misc_feature 3844, 3845, 3846, 3847, 3848, 3849, 3850, 3851, 3852, 3853,3854, 3855: n = A,T,C or G

SEQ ID NO: 28801 - DNA, 1754 bp, Homo sapiens; identical to SEQ ID NO: 22940
  misc_feature 1, 2, 3, 10, 1752, 1753, 1754: n = A,T,C or G

SEQ ID NO: 28802 - DNA, 670 bp, Homo sapiens; identical to SEQ ID NO: 21478
  misc_feature 623, 625, 670: n = A,T,C or G

SEQ ID NO: 28803 - DNA, 492 bp, Homo sapiens; identical to SEQ ID NO: 20509
  misc_feature 488, 489, 490, 491, 492: n = A,T,C or G

SEQ ID NO: 28804 - DNA, 3432 bp, Homo sapiens; identical to SEQ ID NO: 21750
  misc_feature 1, 4, 3412, 3413, 3414, 3415, 3416, 3417, 3418, 3419, 3420,3421, 3422, 3423, 3424, 3425, 3426, 3427, 3428, 3429, 3430,3431, 3432: n = A,T,C or G

SEQ ID NO: 28805 - DNA, 1471 bp, Homo sapiens; identical to SEQ ID NO: 22944
  misc_feature 1, 2, 3, 4, 1465, 1466, 1467, 1468, 1469, 1471: n = A,T,C or G

SEQ ID NO: 28806 - DNA, 830 bp, Homo sapiens; identical to SEQ ID NO: 20532

SEQ ID NO: 28807 - DNA, 965 bp, Homo sapiens; identical to SEQ ID NO: 20600
  misc_feature 964, 965: n = A,T,C or G

SEQ ID NO: 28808 - DNA, 440 bp, Homo sapiens; identical to SEQ ID NO: 21743

SEQ ID NO: 28809 - DNA, 3453 bp, Homo sapiens; identical to SEQ ID NO: 21862

SEQ ID NO: 28810 - DNA, 3918 bp, Homo sapiens; identical to SEQ ID NO: 22949
  misc_feature 3915, 3916, 3917, 3918: n = A,T,C or G

SEQ ID NO: 28811 - DNA, 1392 bp, Homo sapiens; identical to SEQ ID NO: 22950
  misc_feature 1, 2, 3, 1391, 1392: n = A,T,C or G

SEQ ID NO: 28812 - DNA, 171 bp, Homo sapiens; identical to SEQ ID NO: 22951
  misc_feature 156, 157, 158, 159, 160, 161, 162, 163, 164, 165, 166, 167,168, 169, 170, 171: n = A,T,C or G

SEQ ID NO: 28813 - DNA, 3189 bp, Homo sapiens; identical to SEQ ID NO: 22952
  misc_feature 3188, 3189: n = A,T,C or G

SEQ ID NO: 28814 - DNA, 2587 bp, Homo sapiens; identical to SEQ ID NO: 22953
  misc_feature 1, 2, 2587: n = A,T,C or G

SEQ ID NO: 28815 - DNA, 1245 bp, Homo sapiens; identical to SEQ ID NO: 22954
  misc_feature 1, 2, 3, 4, 5, 6, 7, 8, 9, 10, 11, 12, 13, 14, 15, 16, 17,18, 19, 20, 21, 22, 23, 24, 25, 26, 27, 28, 1245: n = A,T,C or G

SEQ ID NO: 28816 - DNA, 412 bp, Homo sapiens; identical to SEQ ID NO: 22955
  misc_feature 1, 2, 3, 4, 407, 408, 409, 410, 411, 412: n = A,T,C or G

SEQ ID NO: 28817 - DNA, 1189 bp, Homo sapiens; identical to SEQ ID NO: 20185
  misc_feature 1179, 1180, 1181, 1182, 1183, 1184, 1185, 1186, 1187, 1188,1189: n = A,T,C or G

SEQ ID NO: 28818 - DNA, 3540 bp, Homo sapiens; identical to SEQ ID NO: 22956

SEQ ID NO: 28819 - DNA, 498 bp, Homo sapiens; identical to SEQ ID NO: 21110

SEQ ID NO: 28820 - DNA, 568 bp, Homo sapiens; identical to SEQ ID NO: 22958
  misc_feature 560, 561, 562, 563, 564, 565, 566, 567, 568: n = A,T,C or G

SEQ ID NO: 28821 - DNA, 786 bp, Homo sapiens; identical to SEQ ID NO: 20840
  misc_feature 783, 784, 785, 786: n = A,T,C or G

SEQ ID NO: 28822 - DNA, 2924 bp, Homo sapiens; identical to SEQ ID NO: 22959
  misc_feature 1, 57, 2923, 2924: n = A,T,C or G

SEQ ID NO: 28823 - DNA, 414 bp, Homo sapiens; identical to SEQ ID NO: 21407

SEQ ID NO: 28824 - DNA, 429 bp, Homo sapiens; identical to SEQ ID NO: 20100
  misc_feature 424, 425, 426, 427, 428, 429: n = A,T,C or G

SEQ ID NO: 28825 - DNA, 549 bp, Homo sapiens; identical to SEQ ID NO: 21395
  misc_feature 1, 549: n = A,T,C or G

SEQ ID NO: 28826 - DNA, 1549 bp, Homo sapiens
  misc_feature 1, 2, 3, 4, 5, 6, 15, 20, 1534, 1535, 1536, 1537, 1538, 1539,1540, 1541, 1542, 1543, 1544, 1545, 1546, 1547, 1548, 1549: n = A,T,C or G
nnnnnnaatttaatntaaanacccgtttggacaccaggaagggttccaaagacggcagctctagggtcctccacggacgacttgctcaggtttcctacttacacatgactctgagcgccagggcagaacagggagtggaccacactgctgtcacattgcccgaaggttttcctacagcatcagactctgccacgaagcaaagcattttccacaaacttctctccatagagatatctggggtagctaagatctactgcaggaggaagaaacgtgctgcagatgaagacaaactcctgacaaggccgaagtcccattcttcccaggccaacacttgcacaaacacctggtggcgtgaattcccacagtatttcacctgccagacggcactgtctccacaccctggaatgagttctttcctgagcaggaggggctccaggccttttcgaatacaataccgacaactccagaaatgcaggtgatttactgccctggaggagaggttcctatcctctcctctgggaagaaattcaaacaaatatgagaactggaattagctctctagcatgctgggggggtcacgtcagtgaccttttttcctttttgggtcagaagagtgttttaattactcaaagttgtcaaaatggtggcaatacctcagtagctcagcaggaagaagactaggtaattttgtggccgtacaagtctgcctaagagacagaagtgagttttataatctacttggccattcctcccagcagagaagcagcaggtagatatggcatgcactgtgcctgctgctgctgctcttgtggcgaacactcagatgtggaaccatagagggaccttgaggagctgggacatgattctttagagaagagaagagacagggagcacagcatgagaatggccagtcaacccatttcaaattcttttattaaagtgccccccgaggggccttgcacaaagatgatggggagagcagaactgctgctccttgacagaactctgatccttacactttgtttggagtgggcttggggacagtcacaagccatgaaacatgaatccaaaatggtccccagatgagccatggtgaaccaacagatgcaagcaacttcttaaactgctctattaaacactgctttatatgtgtccccatgatacagaaaagtgggatggggccagccattccagaaatgaaaatccagactctcacagagaacccttgagccacacaggaagaccactgaagacaacagaggaactactggtccacagaaacactcagtttcatgaaaacacactgattcggttagaaaatgcaacttgggaacaaacattacacaacaaagaccctctgtcatgcagggcactggcccggatgctgcctgggctgtgtgggctggaggaggtggggacaacccagcctgggtgggacttggacacagaacttccttagcagggtgttggaaagtcccaggcctgttctgtggaaggggaataaaaaacagattcaaggaatgtcaaacacacnnnnnnnnnnnnnnnn

SEQ ID NO: 28827 - DNA, 1180 bp, Homo sapiens; identical to SEQ ID NO: 22963
  misc_feature 1, 2, 3, 4, 5, 6, 7, 8, 1179, 1180: n = A,T,C or G

SEQ ID NO: 28828 - DNA, 867 bp, Homo sapiens; identical to SEQ ID NO: 22964
  misc_feature 1, 2, 3, 4, 5, 6, 851, 852, 853, 854, 855, 856, 857, 858,859, 860, 861, 862, 863, 864, 865, 866, 867: n = A,T,C or G

SEQ ID NO: 28829 - DNA, 4406 bp, Homo sapiens; identical to SEQ ID NO: 22965
  misc_feature 4392, 4393, 4394, 4395, 4396, 4397, 4398, 4399, 4400, 4401,4402, 4403, 4404, 4405, 4406: n = A,T,C or G

SEQ ID NO: 28830 - DNA, 408 bp, Homo sapiens; identical to SEQ ID NO: 22966
  misc_feature 402, 403, 404, 405, 406, 407, 408: n = A,T,C or G

SEQ ID NO: 28831 - DNA, 1517 bp, Homo sapiens
  misc_feature 1, 2, 1517: n = A,T,C or G
nnggtaccgcgctcggatccactataacggccgccatgtgctggaattcgcggccgcggccatcccactaacaggagccagggttaggattcaaaccccatccaactggtcccagagctggagcttcttgcactgccctacactacctaccatctccatcctctgggcacctttttataagaaccaaaacattacagagcattgctttgtcaactcagctgggaacatttcccagtgcaactcacatttttcactgctctgtgcctgtccgtataagctcaatgagtattgatttaggggctttggagaactttgaatgctaccccccaagtaaccattgttggcaacctggtacctctacttttagccatttctccttctctataaatagtgcagaagtaacccacttggtaacaggcatccttgccaagcctccaccactaggtcagtgtaagaattaaagaaagaggaaagaaacacaaaaagtggcttgatggttaagacaggtttattttagagaaaacacacctgagaggggctgctggctgagttaggttagaggcactcttttctacagactaagagtttttaaggattcagggtgggagagtttcttagaggcttggactgcttctgtgtctctttgttgtgcttatctgggagggagttgtgtgtctgtttccatacatcttcctgcagctgcaggcatacccccaggtctgcttttagcttccctatcttagtgcacctgaagggaaagaatgtgcttattaaggcccactgttatactggggcccaatgtatgagggtgaagtttggcaattacccaagagactttccccccacctccctctgtgcctgagctgtctcatctatgttttactgtctgctctttctgtctgcttgttgttagaagagaagtgattttcttgaaatgcatgaggctggaaagggagctggcacttaaagtggcggtgtttgtccgagaggatggtgctcctgctctgtcacagtgggcatggggattcaggccactgccaccgaatttcaaggagcccaagcacaagagcccaaaactaaattgtgacgggttaccagacaaaaacgctcacatggcaggtataatcggaacttccataacctgacatatttaccggggtcacacagacacagaaaaaaccgggaaaaaagaataccccccggagaacaatactaaagaagcactgcgagatacagcccacagcacgcgaaacgaacagcgactaagaagagatgacacacaacaagacatcagaagacgcacgagagaaacaagaacacgagaaggggagagaacgcaaaaacagcaagacactaaagaacagaatggagaaagagaaaaccagggggtgaaacacaggcacccaaagaacacgggggagctcacccggacacgcagacgaggccgaacatgcgccaacggacacacaagacatgagagaaagaagcaacgaggagaacacgaaacacacgacgan

SEQ ID NO: 28832 - DNA, 856 bp, Homo sapiens; identical to SEQ ID NO: 20855
  misc_feature 779, 810, 856: n = A,T,C or G

SEQ ID NO: 28833 - DNA, 377 bp, Homo sapiens; identical to SEQ ID NO: 22969
  misc_feature 1, 374, 375, 376, 377: n = A,T,C or G

SEQ ID NO: 28834 - DNA, 768 bp, Homo sapiens; identical to SEQ ID NO: 22428
  misc_feature 756, 757, 758, 759, 760, 761, 762, 763, 764, 765, 766, 767,768: n = A,T,C or G

SEQ ID NO: 28835 - DNA, 504 bp, Homo sapiens; identical to SEQ ID NO: 22504
  misc_feature 1, 2, 3, 4, 5, 503, 504: n = A,T,C or G

SEQ ID NO: 28836 - DNA, 1929 bp, Homo sapiens; identical to SEQ ID NO: 22972
  misc_feature 1, 2, 3, 4, 5, 6, 7, 8, 9, 10, 11, 12, 13: n = A,T,C or G

SEQ ID NO: 28837 - DNA, 556 bp, Homo sapiens; identical to SEQ ID NO: 22973
  misc_feature 1, 2, 3, 11, 20, 54, 65, 553, 554, 555, 556: n = A,T,C or G

SEQ ID NO: 28838 - DNA, 1549 bp, Homo sapiens; identical to SEQ ID NO: 22974
  misc_feature 1542, 1543, 1544, 1545, 1546, 1547, 1548, 1549: n = A,T,C or G

SEQ ID NO: 28839 - DNA, 14455 bp, Homo sapiens
ccttagttgctggctttgaccttttatgttgctgagttttacacatctattttctcaactgccatatcctagggggcttggagtacccataatacagtgagcccaccttcctggtccccagacatttcagaaggtcgggaaatttttaaacccaggcagcttcctggcagtgccatttggagcatcaaagtgggccgtgggtctggatttccaggaaagcggagacctcgaggtgcaggactgtcggggcgaggtggccgaggcaggtcaaagctgaaaagtggaatcggagctgttgtattacctggggtgtctactgcagatatttcatcaaataaggatgatgaagaaaactctatgcacaatacagttgtgttgttttctagcagtgacaagttcactttgaatcaggatatgtgtgtagtttgtggcagttttggccaaggagcagaaggaagattacttgcctgttctcagtgtggtcagtgttaccatccatactgtgtcagtattaagatcactaaagtggttcttagcaaaggttggaggtgtcttgagtgcactgtgtgtgaggcctgtgggaaggcaactgacccaggaagactcctgctgtgtgatgactgtgacataagttatcacacctactgcctagaccctccattgcagacagttcccaaaggaggctggaagtgcaaatggtgtgtttggtgcagacactgtggagcaacatctgcaggtctaagatgtgaatggcagaacaattacacacagtgcgctccttgtgcaagcttatcttcctgtccagtctgctatcgaaactatagagaagaagatcttattctgcaatgtagacaatgtgatagatggatgcatgcagtttgtcagaacttaaatactgaggaagaagtggaaaatgtagcagacattggttttgattgtagcatgtgcagaccctatatgcctgcgtctaatgtgccttcctcagactgctgtgaatcttcacttgtagcacaaattgtcacaaaagtaaaagagctagacccacccaagacttatacccaggatggtgtgtgtttgactgaatcagggatgactcagttacagagcctcacagttacagttccaagaagaaaacggtcaaaaccaaaattgaaattgaagattataaatcagaatagcgtggccgtccttcagacccctccagacatccaatcagagcattcaagggatggtgaaatggatgatagtcgagaaggagaacttatggattgtgatggaaaatcagaatctagtcctgagcgggaagctgtggatgatgaaactaagggagtggaaggaacagatggtgtcaaaaagagaaaaaggaaaccatacagaccaggtattggtggatttatggtgcggcaaagaagtcgaactgggcaagggaaaaccaaaagatctgtgatcagaaaagattcctcaggctctatttccgagcagttaccttgcagagatgatggctggagtgagcagttaccagatactttagttgatgaatctgtttctgttactgaaagcactgaaaaaataaagaagagataccgaaaaaggaaaaataagcttgaagaaactttccctgcctatttacaagaagctttctttggaaaagatcttctagatacaagtagacaaagcaagataagtttagataatctgtcagaagatggagctcagcttttatataaaacaaacatgaacacaggtttcttggatccttccttagatccactacttagttcatcctcggctccaacaaaatctggaactcacggtcctgctgatgacccattagctgatatttctgaagttttaaacacagatgatgacattcttggaataatttcagatgatctagcaaaatcagttgatcattcagatattggtcctgtcactgatgatccttcctctttgcctcagccaaatgtcaatcagagttcacgaccattaagtgaagaacagctagatgggatcctcagtcctgaactagacaaaatggtcacagatggagcaattcttgggaaaattatataaaattccagagcttggcggaaaagatgttgaagacttatttacagctgtacttagtcctgcgaacactcagccaactccattgccacagcctcccccaccaacacagctgttgccaatacacaatcaggatgctttttcacggatgcctctcatgaatggccttattggatccagtcctcatctcccacataattctttgccacctggaagcggactgggaactttctctgcaattgcacaatcctcttatcctgatgccagggataaaaattcagcctttaatccaatggcaagtgatcctaacaactcttggacatcatcagctcccactgtggaaggagaaaatgacacaatgtcgaatgcccagagaagcacgcttaagtgggagaaagaggaggctctgggtgaaatggcaactgttgccccagttctctacaccaatattaatttccccaacttaaaggaagaattccctgattggactactagagtgaagcaaattgccaaattgtggagaaaagcaagctcacaagagcaccatatgtgcaaaagccagagataacagagctgctttacgcattaataaagtacagatgtcaaatgattccatgaaaaggcagcaacagcaagatagcattgatcccagctctcgtattgattcggagctttttaaagatcctttaaagcaaagagaatcagaacatgaacaggaatggaaatttagacagcaaatgcgttagtaaaagtaagcagcaagctaaaattgaagccacacagaaacttgaacaggtgaaaaatgagcagcagcagcagcaacaacagcaatttggttctcagcatcttctggtgcaatctggttcagatacaccaagtagtgggatacagagtcccttgacacctcagcctggcaatggaaatatgtctcctgcacagtcattccataaagaactgtttacaaaacagccacccagtacccctacgtctacatcttcagatgatgtgtttgtaaagccacaagctccacctcctcctccagccccatcccggattcccatccaggatagtctttctcaggctcagacttctcagccaccctcaccgcaagtgttttcacctgggtcctctaactcacgaccaccatctccaatggatccatatgcaaaaatggttggtacccctcgaccacctcctgtgggccatagtttttccagaagaaattctgctgcaccagtggaaaactgtacacctttatcatcggtatctaggccccttcaaatgaatgagacaacagcaaataggccatcccctgtcagagatttatgttcttcttccacgacaaataatgacccctatgcaaaacctccagacacacctaggcctgtgatgacagatcaatttcccaaatccttgggcctatcccggtctcctgtagtttcagaacaaactgcaaaaggccctatagcagctggaaccagtgatcactttactaaaccatctcctagggcagatgtgtttcaaagacaaaggatacctgactcatatgcacgacccttgttgacacctgcacctcttgatagtggtcctggaccttttaagactccaatgcaacctcctccatcctctcaggatccttatggatcagtgtcacaggcatcaaggcgattgtctgttgacccttatgaaaggcctgctttgacaccaagacctatagataatttttctcataatcagtcaaatgatccatatagtcagcctccccttaccccacatccagcagtgaatgaatcttttgcccatccttcaagggctttttcccagcctggaaccatatcaaggccaacatctcaggacccatactcccaacccccaggaactccacgacctgttgtagattcttattcccaatcttcaggaacagctaggtccaatacagacccttactctcaacctcctggaactccccggcctactactgttgacccatatagtcagcagccccaaaccccaagaccatctacacaaactgacttgtttgttacacctgtaacaaatcagaggcattctgatccatatgctcatcctcctggaacaccaagacctggaatttctgtcccttactctcagccaccagcaacaccaaggccaaggatttcagagggttttactaggtcctcaatgacaagaccagtcctcatgccaaatcaggatcctttcctgcaagcagcacaaaaccgaggaccagctttacctggcccgttggtaaggccacctgatacatgttcccagacacctaggccccctggacctggtctttcagacacatttagccgtgtttccccatctgctgcccgtgatccctatgatcagtctccaatgactccaagatctcagtctgactcttttggaacaagtcaaactgcccatgatgttgctgatcagccaaggcctggatcagaggggagcttctgtgcatcttcaaactctccaatgcactcccaaggccagcagttctctggtgtctcccaacttcctggacctgtgccaacttcaggagtaactgatacacagaatactgtaaatatggcccaagtagatacagagaaattgagacagcggcagaagttacgtgaaatcattctccagcagcaacagcagaagaagattgcaggtcgacaggagaaggggtcacaggactcacccgcagtgcctcatccagggcctcttcaacactgacaaccagagaatgttaaccaggctttcaccagacccccacctccctatcctgggaacattaggtctcctgttgcccctcctttaggacctagatatgctgttttcccaaaagatcagcgtggaccctatcctcctgatgttgctagtatggggatgagacctcatggatttagatttggatttccaggaggtagtcatggtaccatgccgagtcaagagcgcttccttgtgcctcctcagcaaatacagggatctggagtttctccacagctaagaagatcagtatctgtagatatgcctaggcctttaaataactcacaaatgaataatccagttggacttcctcagcatttttcaccacagagcttgccagttcagcagcacaacatactgggccaagcatatattgaactgagacatagggctcctgacggaaggcaacggctgcctttcagtgctccacctggcagcgttgtagaggcatcttctaatctgagacatggaaacttcattccccggccagactttccgggccctagacacacagaccccatgcgacgacctccccagggtctacctaatcagctacctgtgcacccagatttgggaacaagtgccaccatctcaacaagagcaaggtcattctgtccattcatcttctatggtcatgaggactctgaaccatccactaggtggtgaattttcagaagctcctttgtcaacatctgtaccgtctgaaacaacgtctgataatttacagataaccacccaaccttctgatggtctagaggaaaaacttgattctgatgacccttctgtgaaggaactggatgttaaagaccttgagggggttgaagtcaaagacttagatgatgaagatcttgaaaacttaaatttagatacagaggatggcaaggtagttgaattggatactttagataatttggaaactaatgatcccaacctggatgacctcttaaggtcaggagagtttgatatcattgcatatacagatccagaacttgacatgggagataagaaaagcatgtttaatgaggaactagaccttccaattgatgataagttagataatcagtgtgtatctgttgaaccaaaaaaaaaggaacaagaaaacaaaactctggttctctctgataaacattcaccacagaaaaaatccactgttaccaatgaggtaaaaacggaagtactgtctccaaattctaaggtggaatccaaatgtgaaactgaaaaaaatgatgagaataaagataatgttgacactccttgctcacaggcttctgctcactcagacctaaatgatggagaaaagacttctttgcatccttgtgatccagatctatttgagaaaagaaccaatcgagaaactgctggccccagtgcaaatgtcattcaggcatccactcaactacctgctcaagatgtaataaactcttgtggcataactggatcaactccagttctctcaagtttacttgctaatgagaaatctgataattcagacattaggccatcggggtctccaccaccaccaactctgccggcctccccatccaatcatgtgtcaagtttgcctcctttcatagcaccgcctggccgtgttttggataatgccatgaattctaatgtgacagtagtctctagggtaaaccatgttttttctcagggtgtgcaggtaaacccagggctcattccaggtcaatcaacagttaaccacagtctggggacaggaaaacctgcaactcaaactgggcctcaaacaagtcagtctggtaccagtagcatgtctggaccccaacagctaatgattcctcaaacattagcacagcagaatagagagaggccccttcttctagaagaacagcctctacttctacaggatcttttggatcaagaaaggcaagaacagcagcagcaaagacagatgcaagccatgattcgtcagcgatcagaaccgttcttccctaatattgattttgatgcaattacagatcctataatgaaagccaaaatggtggcccttaaaggtataaataaagtgatggcacaaaacaatctgggcatgccaccaatggtgatgagcaggttcccttttatgggccaggtggtaactggaacacagaacagtgaaggacagaaccttggaccacaggccattcctcaggatggcagtataacacatcagatttctaggcctaatcctccaaattttggtccaggctttgtcaatgattcacagcgtaagcagtatgaagagtggctccaggagacccaacagctgcttcaaatgcagcagaagtatcttgaagaacaaattggtgctcacagaaaatctaagaaggccctttcagctaaacaacgtactgccaagaaagctgggcgtgaatttccagaggaagatgcagaacaactcaagcatgttactgaacagcaaagcatggttcagaaacagctagaacagattcgtaaacaacagaaagaacatgctgaattgattgaagattatcggatcaaacagcagcagcaatgtgcaatggccccacctaccatgatgcccagtgtccagccccagccacccctaattccaggtgccactccacccaccatgagccaacccacctttcccatggtgccacagcagcttcagcaccagcagcacacaacagttatttctggccatactagccctgttagaatgcccagtttacctggatggcaacccaacagtgctcctgcccacctgcccctcaatcctcctagaattcagcccccaattgcccagttaccaataaaaacttgtacaccagccccagggacagtctcaaatgcaaatccacagagtggaccaccacctcgggtagaatttgatgacaacaatccctttagtgaaagttttcaagaacgggaacgtaaggaacgtttacgagaacagcaagagagacaacgggtccaactcatgcaggaggtagatagacaaagagctttgcagcagaggatggaaatggagcagcatggtatggtgggctctgagataagtagtagtaggacatctgtgtcccagattcccttctacagttccgacttaccttgtgattttatgcaacctctaggaccccttcagcagtctccacaacaccaacagcaaatggggcaggttttacagcagcagaatatacaacaaggatcaattaattcaccctccacccaaactttcatgcagactaatgagcgaaggcaggtaggccctccttcatttgttcctgattcaccatcaatccctgttggaagcccaaatttttcttctgtgaagcagggacatggaaatctttctgggaccagcttccagcagtccccagtgaggccttcttttacacctgctttaccagcagcacctccagtagctaatagcagtctcccatgtggccaagattctactataacccatggacacagttatccgggatcaacccaatcgctcattcagttgtattctgatataatcccagaggaaaaagggaaaaagaaaagaacaagaaagaagaaaagagatgatgatgcagaatccaccaaggctccatcaactccccattcagatataactgccccaccgactccaggcatctcagaaactacctctactcctgcagtgagcacacccagtgagcttcctcaacaagccgaccaagagtcggtggaaccagtcggcccatccactcccaatatggcagcaggccagctatgtacagaattagagaacaaactgcccaatagtgatttctcacaagcaactccaaatcaacagacgtatgcaaattcagaagtagacaagctctccatggaaacccctgccaaaacagaagagataaaactggaaaaggctgagacagagtcctgcccaggccaagaggagcctaaattggaggaacagaatggtagtaaggtagaaggaaacgctgtagcctgtcctgtctcctcagcacagagtcctccccattctgctggggcccctgctgccaaaggagactcagggaatgaacttctgaaacacttgttgaaaaataaaaagtcatcttctcttttgaatcaaaaacctgagggcagtatttgttcagaagatgactgtacaaaggataataaactagttgagaagcagaacccagctgaaggactgcaaactttgggggctcaaatgcaaggtggttttggatgtggcaaccagttgccaaaaacagatggaggaagtgaaaccaagaaacagcgaagcaaacggactcagaagacgggtgagaaagcagcacctcgctcaaagaaaaggaaaaaggacgaagaggagaaacaagctatgtactctagcactgacacgtttacccacttgaaacagctctctctgctccctctaatggaaccaatcattggagtgaactttgcgcactttcttccttatggcagtggccaatttaatagtgggaatcgacttctaggaacttttggcagtgctaccctggaaggggtttcggactactattctcagttgatctacaagcagaataatttaagtaatcctccaacaccccctgcctctcttcctcctacaccacctcctatggcttgtcagaagatggccaatggttttgcaacaactgaagaacttgctggaaaagccggagtgttagtgagccatgaagttaccaaaactctaggacctaaaccatttcagctgcccttcagaccccaggacgacttgttggcccgagctcttgctcagggccccaagacagttgatgtgccagcctccctcccaacaccacctcataacaatcaggaagaattaaggatacaggatcactgtggtgatcgagatactcctgacagttttgttccctcatcctctcctgagagtgtggttggggtagaagtgagcaggtatccagatctgtcattggtcaaggaggagcctccagaaccggtgccgtcccccatcattccaattcttcctagcactgctgggaaaagttcagaatcaagaaggaatgacatcaaaactgagccaggcactttatattttgcgtcaccttttggtccttccccaaatggtcccagatcaggtcttatatctgtagcaattactctgcatcctacagctgctgagaacattagcagtgttgtggctgcattttccgaccttcttcacgtccgaatccctaacagctatgaggttagcagtgctccagatgtcccatccatgggtttggtcagtagccacagaatcaacccgggtttggagtatcgacagcatttacttctccgtgggcctccgccaggatctgcaaaccctcccagattagtgagctcttaccggctgaagcagcctaatgtaccatttcctccaacaagcaatggtctttctggatataaggattctagtcatggtattgcagaaagcgcagcactcagaccacagtggtgttgtcattgtaaagtggttattcttggaagtggtgtgcggaaatctttcaaagatctgacccttttgaacaaggattcccgagaaagcaccaagagggtagagaaggacattgtcttctgtagtaataactgctttattctttattcatcaactgcacaagcgaaaaactcagaaaacaaggaatccattccttcattgccacaatcacctatgagagaaacgccttccaaagcatttcatcagtacagcaacaacatctccactttggatgtgcactgtctcccccagctcccagagaaagcttctccccctgcctcaccacccatcgccttccctcctgcttttgaagcagcccaagtcgaggccaagccagatgagctgaaggtgacagtcaagctgaagcctcggctaagagctgtccatggtgggtttgaagattgcaggccgctcaataaaaaatggagaggaatgaaatggaagaagtggagcattcatattgtaatccctaaggggacatttaaaccaccttgtgaggatgaaatagatgaatttctaaagaaattgggcacttcccttaaacctgatcctgtgcccaaagactatcggaaatgttgcttttgtcatgaagaaggtggtggattgacagatggaccagcaaggctactcaaccttgacttggatctgtgggtccacttgaactgcgctctgtggtccacggaggtctatgagactcaggctggtgccttaataaatgtggagctagctctgaggagaggcctacaaatgaaatgtgtcttctgtcacaagacgggtgccactagtggatgccacagatttcgatgcaccaacatttatcacttcacttgcgccattaaagcacaatgcatgttttttaaggacaaaactatgctttgccccatgcacaaaccaaagggaattcatgagcaagaattaagttactttgcagtcttcaggagggtctatgttcagcgtgatgaggtgcgacagattgctagcatcgtgcaacgaggagaacgggaccatacctttcgcgtgggtagcctcatcttccacacaattggtcagctgcttccacagcagatgcaagcattccattctcctaaagcactcttccctgtgggctatgaagccagccggctgtactggagcactcgctatgccaataggcgctgccgctacctgtgctccattgaggagaaggatgggcgcccagtgtttgtcatcaggattgtggaacaaggccatgaagacctggttctaagtgacatctcacctaaaggtgtctgggataagattttggagcctgtggcatgtgtgagaaaaaagtctgaaatgctccagcttttcccagcgtatttaaaaggagaggatctgtttggcctgaccgtctctgcagtggcacgcatagcggaatcacttcctggggttgaggcatgtgaaaattataccttccgatacggccgaaatcctctcatggaacttcctcttgccgttaaccccacaggttgtgcccgttctgaacctaaaatgagtgcccatgtcaagaggtttgtgttaaggcctcacaccttaaacagcaccagcacctcaaagtcatttcagagcacagtcactggagaactgaacgcaccttatagtaaacagtttgttcactccaagtcatcgcagtaccggaagatgaaaactgaatggaaatccaatgtgtatctggcacggtctcggattcaggggctgggcctgtatgctgctcgagacattgagaaacacaccatggtcattgagtacatcgggactatcattcgaaacgaagtagccaacaggaaagagaagctttatgagtctcagaaccgtggtgtgtacatgttccgcatggataacgaccatgtgattgacgcgacgctcacaggagggcccgcaaggtatatcaaccattcgtgtgcacctaattgtgtggctgaagtggtgacttttgagagaggacacaaaattatcatcagctccagtcggagaatccagaaaggagaagagctctgctatgactataagtttgactttgaagatgaccagcacaagattccgtgtcactgtggagctgtgaactgccggaagtggatgaactgaaatgcattccttgctagctcagcgggcggcttgtccctaggaagaggcgattcaacacaccattggaattttgcagacagaaagagatttttgttttctgttttatgactttttgaaaaagcttctgggagttctgatttcctcagtcctttaggttaaagcagcgccaggaggaagctgacagaagcagcgttcctgaagtggccgaggttaaacggaatcacagaatggtccagcacttttgcttttttttcttttccttttcttttttttttgtttgttttttgttttgtttttcccttgtgggtgggtttcattgttttggttttctagtctcactaaggagaaacttttactggggcaaagagccgatggctgccctgccccgggcaggggccttcctatgaatgtaagactgaaatcaccagcgagggggacagagagtgctggccacggccttattaaaaaggggcaggccctctaacttcaaaatgtttttaaataaagtagacaccactgaacaaggaatgtactgaaatgacttccttagggatagagctaagggataataacttgcactaaatacatttaaatacttgattccatgagtcagtttattgtagtttttgatttctgtaaaataagagaaacttttgtatttattattgaataagtgaatgaagctatttttaaataaagttagaagaaagccaagctgctgctgttacctgcagaactaacaaaccctgttactttgtacagatatgtaaatattttgagaaaaaatacagtataaaaatagttattgaccaaatgctaccaggctctgcagcagctcgggggcttataaaatgttcatagggatgttacaatataattttgtgttataaaatatgccattataattatgtaataaccaaaatttcaacctagagtgttgggggttttttggaaaccgcagtctattagtactcaatggttttatacaccttacttctgacagagcggggcgtatgctacgactacaacttttatagctgttttggtaatttaaactaattttttcatattatattgttgcatccctacttcttcagtcaggtttttttgtgcttacaatttgtgataactgtgaataactgcttaaaaatacacccaaatggaggctgaattttttcttcagcaaaagtagttttgattagaactttgtttcagccacagagaatcatgtaaacgtaataggatcatgtagcagaaacttaaatctaaccctttagccttctatttaacacaaaaatttgaaaaaaaaaaaaaaaaaaaggagatgtgattatgcttacagctgcaggactctggcaatagggtttttggaagatgtaattttaaaatgtgtttgtatgaactgtttgtttacatttctttaataaaaaaaacactgttttgtgtttgcttgtagaaacttaatcagcattttgaaccaggttagctttttattttgtacttaaaattctggtactgacacttcacaggctaagtataaaatgaagttttgtgtgcacaattcaagtggactgtaaactgttggtatattcagtgatgcagttctgaacttgtatatggcatgatgtatttttatcttacagaataaatcaattgtatatatttttctcttgataaatagctgtatgaaatttgtttcctgaatatttttcttctcttgtacaatatcctgacatcctaccagtatttgtcctaccgggtttttgttgttttctgttctgtataatagtatctaatgttggcaaaaattgaattttttgaagtatacagagtgttatgggttttggaatttgtggacacagatttagaagatcaccatttacaaataaaatattttacatctataaaaaaaaccactaccctaaaaaaaaaactcgagggggggccccggaccaaattcgccctttgtggagtcgattacaattaactgggccgcgtttaaaacgtcttgactgggaa

SEQ ID NO: 28840 - DNA, 3849 bp, Homo sapiens; identical to SEQ ID NO: 22976
  misc_feature 3827, 3828, 3829, 3830, 3831, 3832, 3833, 3834, 3835, 3836,3837, 3838, 3839, 3840, 3841, 3842, 3843, 3844, 3845, 3846,3847, 3848, 3849: n = A,T,C or G

SEQ ID NO: 28841 - DNA, 5175 bp, Homo sapiens; identical to SEQ ID NO: 22977
  misc_feature 1, 2, 5151, 5152, 5153, 5154, 5155, 5156, 5157, 5158, 5159,5160, 5161, 5162, 5163, 5164, 5165, 5166, 5167, 5168, 5169,5170, 5171, 5172, 5173, 5174, 5175: n = A,T,C or G

SEQ ID NO: 28842 - DNA, 843 bp, Homo sapiens; identical to SEQ ID NO: 22902
  misc_feature 1, 2, 3, 4, 5, 6, 7, 8, 9, 10, 11, 12, 843: n = A,T,C or G

SEQ ID NO: 28843 - DNA, 1002 bp, Homo sapiens; identical to SEQ ID NO: 22979
  misc_feature 1, 1002: n = A,T,C or G

SEQ ID NO: 28844 - DNA, 2065 bp, Homo sapiens; identical to SEQ ID NO: 22607
  misc_feature 2064, 2065: n = A,T,C or G

SEQ ID NO: 28845 - DNA, 369 bp, Homo sapiens; identical to SEQ ID NO: 21651
  misc_feature 1, 2, 3, 4, 5, 6, 7, 8: n = A,T,C or G

SEQ ID NO: 28846 - DNA, 2071 bp, Homo sapiens; identical to SEQ ID NO: 21824

SEQ ID NO: 28847 - DNA, 841 bp, Homo sapiens; identical to SEQ ID NO: 22983
  misc_feature 203, 204, 205, 206, 207, 208, 209, 210, 211, 212, 213, 214,215, 216, 217, 218, 219, 220, 221, 222, 223, 224, 225, 226,227, 228, 229, 230, 231, 232, 233, 234, 235, 236, 237: n = A,T,C or G

SEQ ID NO: 28848 - DNA, 618 bp, Homo sapiens; identical to SEQ ID NO: 22984

SEQ ID NO: 28849 - DNA, 4587 bp, Homo sapiens; identical to SEQ ID NO: 22985
  misc_feature 1, 2, 3, 4, 5, 4567, 4568, 4569, 4570, 4571, 4572, 4573,4574, 4575, 4576, 4577, 4578, 4579, 4580, 4581, 4582, 4583,4584, 4585, 4586, 4587: n = A,T,C or G

SEQ ID NO: 28850 - DNA, 1251 bp, Homo sapiens; identical to SEQ ID NO: 22986
  misc_feature 1, 2, 1225, 1226, 1227, 1228, 1229, 1230, 1231, 1232, 1233,1234, 1235, 1236, 1237, 1238, 1239, 1240, 1241, 1242, 1243,1244, 1245, 1246, 1247, 1248, 1249, 1250, 1251: n = A,T,C or G

SEQ ID NO: 28851 - DNA, 1342 bp, Homo sapiens; identical to SEQ ID NO: 25576
  misc_feature 1, 1265, 1330, 1340, 1341, 1342: n = A,T,C or G

SEQ ID NO: 28852 - DNA, 1262 bp, Homo sapiens; identical to SEQ ID NO: 21868
  misc_feature 1, 2, 1261, 1262: n = A,T,C or G

SEQ ID NO: 28853 - DNA, 816 bp, Homo sapiens; identical to SEQ ID NO: 21390

SEQ ID NO: 28854 - DNA, 594 bp, Homo sapiens; identical to SEQ ID NO: 20919
  misc_feature 1, 593, 594: n = A,T,C or G

SEQ ID NO: 28855 - DNA, 741 bp, Homo sapiens; identical to SEQ ID NO: 21831

SEQ ID NO: 28856 - DNA, 3553 bp, Homo sapiens
  misc_feature 1, 2, 3, 3469, 3470, 3547, 3548, 3549, 3550, 3551, 3552,3553: n = A,T,C or G
nnncttgcggccgcgggccaggttctatctcctcatccagggcttgcgggcgaggcctgttttaagtctccagtaaccgagcggaggcccggcaggcgcgacccgggctgcgtacgtcagagctgcctccgaagtggtaaaatgtgctgcgagaagtggagccgcgtggcggaaatgtttctcttcactgaggagcgggaggattgtaagatactgtgcctttgctccagggcatttgtggaggatcgaaaattgtacaatttgggattaaaaggctattacatcagagacagtggcaacaattcaggagaccaggcgacagaagaagaggaaggtggttattcctgtggtactgcagaatcacatgacagcaaaggcataggcctggatgaaagtgaacttgattctgaggctgaactcatgagaagtatgggattgccacttcaatttggtaggataactgcacataaggattttgaggtatctatgaatactagaaataaagttaaaataaaaaagaaaaaacatcaagagaaatacttagatgaaattgtgcaagaatctcggagaaaagagtatgaagaagacgacattttggcttcagatgatccatcttcaattgaacagtatgagaacaccagaacatatgaacttcaaagcataaaagatactgtgacagaaaatcctccagttgaaaacacattatctccaaagctagaaattacagagaaatgggaaaagtattggaatgaatatggaggaggactattgtggcaaagttggcaagaaaaacatccgggtcaagcactatcttctgaaccttggaactttcctgatacaaaggaagaatgggagcaacattatagtcaactttattggtattatttggaacaatttcagtattgggaagctcagggttggacttttgatgcctcgcaaagctgtgatacagatacttacacatttaaaacagaagctgatgacaagaacgatgaaaaatgcatgaaagttgacttagtatcttttccatcttcacctattatggttgataatgatagctctggtacaagtgataaggatcatagtgaaatacttgatggaattagtaacataaaactgaattcagaggaagtaacacagagccaattagattcctgtacaagtcatgatggtcatcaacagctaagtgaagttagtagcaaaagagagtgccctgcttccggccaaagtgaaccacgtaatggaggaaccaatgaggaaagcaactcatcggggaatacaaacacagacccaccagctgaggattcacagaagtcttcaggagcaaacacaagcaaagacagaccacatgccagtggtactgatggagatgaaagtgaggaagacccacctgagcataagccaagcaaactgaagaggagccatgaactggacattgatgaaaacccagcttcagactttgatgacagtggttcccttctaggattcaagtatggctcaggacaaaaatatggtggaatcccaaatttcagtcatcggcaggtcaggtatttagagaagaatgtgaagcttaagtctaagtacctagacatgcgcagacaaataaagatgaaaaacaaacacatcttctttaccaaagagtcagaaaaaccatttttcaagaaaagcaaaattctgagtaaggtagaaaaattcctcacatgggttaataaaccaatggatgaagaagcatcacaggaatcatcttctcatgacaatgtgcacgacgcttccacaagtagtgattcagaggaacaagacatgtctgttaaaaaaggtgatgacctactggagactaataatccagaacctgaaaagtgtcagagcgtatcttcagctggtgaacttgaaacagaaaactatgaaagagacagcttgctagcaactgttccagatgagcaggattgtgttactcaagaagtgccagactcccgccaggcagaaactgaagctgaagtgaaaaagaagaagaacaagaagaagaacaaaaaggtgaatggtctgcctcctgaaatagctgctgttcctgagctggcaaaatactgggcccagaggtacaggctcttctcccgttttgatgatgggattaagttggacagagagggctggttttcagttacacccgagaagattgctgaacacattgctggccgtgttagtcagtccttcaagtgtgacgttgtagtagacgcattctgtggagttggaggaaataccattcagtttgccttaacaggaatgagagtgattgccattgatatcgatcctgttaagattgcccttgctcgcaataatgcagaagtttatgggatagcagataagatagagttcatctgtggagatttcttgctgctggcttcttttttaaaggctgatgttgtgttcctcagcccaccttggggagggccagactatgccactgcagagacctttgacattagaacaatgatgtctcctgatggctttgaaattttcagactttctaagaagatcactaataatattgtttattttcttccaagaaatgctgatattgaccaggtggcatccttagctgggcctggagggcaagtggaaatagaacagaacttccttaacaacaaattgaagacaatcactgcatattttggtgacctaattcgaagaccagcctctgaaacctaactatgcagcagtgcgaggacaaaagatcatggagtggtcaaaatattcagatgagacatttggcatgtcttcctttattcactgatattttctacccatggtcttatatcaccgtatgaaatggaaacttacaggacttaaatatcagtgaaatattttgagatctttgaataattcctttagaggaattatacaaaattaatatatatgagtcctttgtaatttatttttttttgagacaggatctcacttttaccgcccaggctggagtgcagtgccatgatcacagctcactgcaggttcagccttctgagttcaagcaatccttctgtctcagtctcctcagtagctggggctttaggtgggcactgccacaccgtactaatttttgtattttttgtagagacgaggtcccaccatgttgcccaggctggtgtcaaactcctgggctcagtcagtccccccatctcaccctccccaagtgctggaattacaggcgtgagctactgtgcccagccttacggacatccttttgaattatctttttcactcatagaatatgaatacatttatttagactttttctagaactttcctgttttcatgtctttgcttcatctggaattggcttaacacccttttataaagtttgtgtttgtaaaatttccattgtgacatcaatacgcaatatattttgtaatataggagtttctatttttttattaaaatggcaatgaaagcaagagaaaaaaaaaaaaaaaaaaannaaaaattttttttctttcgccccccccgggggggacccccctttttttttccttttaaggggggtaaatgccccccnnnnnnn

SEQ ID NO: 28857 - DNA, 2827 bp, Homo sapiens; identical to SEQ ID NO: 22992
  misc_feature 2822, 2823, 2824, 2825, 2826, 2827: n = A,T,C or G

SEQ ID NO: 28858 - DNA, 1112 bp, Homo sapiens; identical to SEQ ID NO: 22993
  misc_feature 1, 2, 10, 1111, 1112: n = A,T,C or G

SEQ ID NO: 28859 - DNA, 714 bp, Homo sapiens; identical to SEQ ID NO: 22994
  misc_feature 713, 714: n = A,T,C or G

SEQ ID NO: 28860 - DNA, 666 bp, Homo sapiens; identical to SEQ ID NO: 21473

SEQ ID NO: 28861 - DNA, 1577 bp, Homo sapiens; identical to SEQ ID NO: 22996
  misc_feature 1, 2, 1560, 1561, 1562, 1563, 1564, 1565, 1566, 1567, 1568,1569, 1570, 1571, 1572, 1573, 1574, 1575, 1576, 1577: n = A,T,C or G

SEQ ID NO: 28862 - DNA, 2569 bp, Homo sapiens; identical to SEQ ID NO: 21300
  misc_feature 2557, 2558, 2559, 2560, 2561, 2562, 2563, 2564, 2565, 2566,2567, 2568, 2569: n = A,T,C or G

SEQ ID NO: 28863 - DNA, 551 bp, Homo sapiens; identical to SEQ ID NO: 22998
  misc_feature 1, 23, 539, 551: n = A,T,C or G

SEQ ID NO: 28864 - DNA, 1465 bp, Homo sapiens; identical to SEQ ID NO: 22999
  misc_feature 1, 2, 3, 4, 5, 6, 7, 8, 9, 10, 11, 12, 13, 14, 15, 16, 17,1464, 1465: n = A,T,C or G

SEQ ID NO: 28865 - DNA, 707 bp, Homo sapiens; identical to SEQ ID NO: 20542

SEQ ID NO: 28866 - DNA, 1219 bp, Homo sapiens; identical to SEQ ID NO: 23001
  misc_feature 1219: n = A,T,C or G

SEQ ID NO: 28867 - DNA, 2884 bp, Homo sapiens; identical to SEQ ID NO: 22866
  misc_feature 1, 2, 3, 4, 5, 6, 7, 9, 2879, 2880, 2881, 2882, 2883, 2884: n = A,T,C or G

SEQ ID NO: 28868 - DNA, 436 bp, Homo sapiens; identical to SEQ ID NO: 23003
  misc_feature 1, 2, 3, 4, 5, 6, 7, 8, 9, 10, 11: n = A,T,C or G

SEQ ID NO: 28869 - DNA, 3266 bp, Homo sapiens; identical to SEQ ID NO: 23004
  misc_feature 1, 2, 3266: n = A,T,C or G

SEQ ID NO: 28870 - DNA, 506 bp, Homo sapiens; identical to SEQ ID NO: 23005
  misc_feature 175, 506: n = A,T,C or G

SEQ ID NO: 28871 - DNA, 552 bp, Homo sapiens; identical to SEQ ID NO: 23006
  misc_feature 552: n = A,T,C or G

SEQ ID NO: 28872 - DNA, 552 bp, Homo sapiens; identical to SEQ ID NO: 23006
  misc_feature 552: n = A,T,C or G

SEQ ID NO: 28873 - DNA, 162 bp, Homo sapiens; identical to SEQ ID NO: 23008

SEQ ID NO: 28874 - DNA, 607 bp, Homo sapiens; identical to SEQ ID NO: 22085
  misc_feature 1, 2, 3, 4: n = A,T,C or G

SEQ ID NO: 28875 - DNA, 692 bp, Homo sapiens; identical to SEQ ID NO: 23010
  misc_feature 1, 2, 3, 4, 5, 6, 7, 8, 9, 692: n = A,T,C or G

SEQ ID NO: 28876 - DNA, 1511 bp, Homo sapiens; identical to SEQ ID NO: 23011
  misc_feature 1, 2, 3, 1510, 1511: n = A,T,C or G

SEQ ID NO: 28877 - DNA, 1197 bp, Homo sapiens; identical to SEQ ID NO: 23012
  misc_feature 1121, 1133, 1149, 1160, 1191: n = A,T,C or G

SEQ ID NO: 28878 - DNA, 1516 bp, Homo sapiens; identical to SEQ ID NO: 23013
  misc_feature 1, 2, 3, 4, 5, 6, 7, 8, 9, 10, 1504, 1505, 1506, 1507, 1508,1509, 1510, 1511, 1512, 1513, 1514, 1515, 1516: n = A,T,C or G

SEQ ID NO: 28879 - DNA, 7984 bp, Homo sapiens; identical to SEQ ID NO: 22761

SEQ ID NO: 28880 - DNA, 431 bp, Homo sapiens; identical to SEQ ID NO: 23015

SEQ ID NO: 28881 - DNA, 907 bp, Homo sapiens; identical to SEQ ID NO: 23016

SEQ ID NO: 28882 - DNA, 1613 bp, Homo sapiens; identical to SEQ ID NO: 23017

SEQ ID NO: 28883 - DNA, 1360 bp, Homo sapiens; identical to SEQ ID NO: 23018
  misc_feature 1, 2, 3, 4, 5, 6, 7, 8, 9, 10, 11, 12, 13, 14, 15, 16, 17,18, 19, 20, 21, 22, 23, 24, 25, 26, 27, 28, 29, 30: n = A,T,C or G

SEQ ID NO: 28884 - DNA, 854 bp, Homo sapiens; identical to SEQ ID NO: 23019
  misc_feature 854: n = A,T,C or G

SEQ ID NO: 28885 - DNA, 328 bp, Homo sapiens; identical to SEQ ID NO: 23020

SEQ ID NO: 28886 - DNA, 577 bp, Homo sapiens; identical to SEQ ID NO: 23021
  misc_feature 577: n = A,T,C or G

SEQ ID NO: 28887 - DNA, 3996 bp, Homo sapiens; identical to SEQ ID NO: 23022

SEQ ID NO: 28888 - DNA, 2127 bp, Homo sapiens; identical to SEQ ID NO: 23023
  misc_feature 1, 2, 3, 4, 5, 2070, 2071, 2072, 2073, 2074, 2075, 2076,2077, 2078, 2079, 2080, 2081, 2082, 2083, 2084, 2085, 2123,2124, 2125, 2126, 2127: n = A,T,C or G

SEQ ID NO: 28889 - DNA, 1986 bp, Homo sapiens; identical to SEQ ID NO: 23024
  misc_feature 1, 1986: n = A,T,C or G

SEQ ID NO: 28890 - DNA, 3020 bp, Homo sapiens; identical to SEQ ID NO: 23025
  misc_feature 3000, 3001, 3002, 3003, 3004, 3005, 3006, 3007, 3008, 3009,3010, 3011, 3012, 3013, 3014, 3015, 3016, 3017, 3018, 3019,3020: n = A,T,C or G

SEQ ID NO: 28891 - DNA, 337 bp, Homo sapiens; identical to SEQ ID NO: 23026

SEQ ID NO: 28892 - DNA, 4172 bp, Homo sapiens; identical to SEQ ID NO: 23027
  misc_feature 4156: n = A,T,C or G

SEQ ID NO: 28893 - DNA, 2435 bp, Homo sapiens; identical to SEQ ID NO: 23028
  misc_feature 1, 2, 2432, 2433, 2434, 2435: n = A,T,C or G

SEQ ID NO: 28894 - DNA, 312 bp, Homo sapiens; identical to SEQ ID NO: 23029
  misc_feature 310, 311, 312: n = A,T,C or G

SEQ ID NO: 28895 - DNA, 658 bp, Homo sapiens; identical to SEQ ID NO: 23030
  misc_feature 649, 650, 651, 652, 653, 654, 655, 656, 657, 658: n = A,T,C or G

SEQ ID NO: 28896 - DNA, 853 bp, Homo sapiens; identical to SEQ ID NO: 22576
  misc_feature 1, 850, 851, 852, 853: n = A,T,C or G

SEQ ID NO: 28897 - DNA, 1276 bp, Homo sapiens; identical to SEQ ID NO: 22177
  misc_feature 1273, 1274, 1275, 1276: n = A,T,C or G

SEQ ID NO: 28898 - DNA, 1425 bp, Homo sapiens; identical to SEQ ID NO: 23033
  misc_feature 1, 2, 1425: n = A,T,C or G

SEQ ID NO: 28899 - DNA, 1942 bp, Homo sapiens; identical to SEQ ID NO: 22067
  misc_feature 1937, 1938, 1939, 1940, 1941, 1942: n = A,T,C or G

SEQ ID NO: 28900 - DNA, 1860 bp, Homo sapiens
agtctcgagctctcgctggccttcgggtgtacgtgctccgggatcttcagcacccgcggccgccatcgccgtcgcttggcttcttctggactcatctgcgccacttgtccgcttcacactccgccgccatcatggtgaagctcgcgaaggcaggtaaaaatcaaggtgaccccaagaaaatggctcctcctccaaaggaggtagaagaagatagtgaagatgaggaaatgtcagaagatgaagaagatgatagcagtggagaagaggtcgtcatacctcagaagaaaggcaagaaggctgctgcaacctcagcaaagaaggtggtcgtttccccaacaaaaaaggttgcagttgccacaccagccaaggaagcagctgtcactccaggcaaaaaggcagcagcaacacctgccaagaagacagttacaccagccaaagcagttaccacacctggcaagaagggagccataccaggcaaagcattggtagcaactcctggtaagaagggtgctgccatcccagccaagggggcaaagaatggcaagaatgccaagaaggaagacagtgatgaagaggaggatgattgacagtgaggacggctgacggcggactggcgaggagaggatgaggatgatgaggaggaggaagaagaggaggaggaagagcctgtcaaagaagcacctggaaaacgaaagaaggaaatggccaaacagaaagcagctcctgaagccaagaaacagaaagtggaaggcacagaaccgactacggctttcaatctctttgttggaaacctaaactttaacaaatctgctcctgaattaaaaactggtatcagcgatgtttttgctaaaaatgatcttgctgttgtggatgtcagaattggtatgactaggaaatttggttatgtggattttgaatctgctgaagacctggagaaagcgttggaactcactggtttgaaagtctttggcaatgaaattaaactagagaaaccaaaaggaaaagacagtaagaaaggtatgtaaggctttatgagattatgcaatgaactcaggagctagactgctagggaaaatgctttgtaacccatttcccttggtttcctcttatttttttaaatcatttttttcctttggtttcctcttaatgtgggaattaaatgagctacagtgtttacaagagtacttggcactgcttgtcagtgttatagtgtaaattcctgagttaggcaagcaagagcacttttatacagaacaagaattattagatgcacctaaattaacgtaaagggatctttcttcactgaaactagattaggtccctaattactccctatatacagttgtaatgttttgaattggtacattcactttttttgttatgcgcgtctactctaggttgaactccagtgtacctaacagagagtttgacatcagctgtgacaacatggagggaccacttgtgtgttgacactgctatatctccatatttagcaccgagccttgtacattataggatctcaaattatttgttgaatagagctatgtgtgtttttcccctctttttgttgttgccccccacctttggtttttcaggccacagagctcatttttgtttttttaatctagagcgagatgcgagaacacttttggctaaaaatctcccttacaaagtcactcaggatgaattgaaagaagtgtttgaagatgctgcggagatcagattagtcagcaaggatgggaaaagtaaagggattgcttatattgaatttaagacagaagctgatgcagagaaaacctttgaagaaaagcagggaacagagatcgatgggcgatctatttccctgtactatactggaga

SEQ ID NO: 28901 - DNA, 2929 bp, Homo sapiens; identical to SEQ ID NO: 21129

SEQ ID NO: 28902 - DNA, 1632 bp, Homo sapiens; identical to SEQ ID NO: 22203
  misc_feature 1, 2, 3, 4, 5, 6, 1620, 1621, 1622, 1623, 1624, 1625, 1626,1627, 1628, 1629, 1630, 1631, 1632: n = A,T,C or G

SEQ ID NO: 28903 - DNA, 1134 bp, Homo sapiens
agggagtcgacccacgcgtccggctctgaaaagccatctttgcattgttcctcatccgcctccttgctcgccgcagccgcctccgccgcgcgcctcctccgccgccgcggactccggcagctttatcgccagagtccctgaactctcgctttctttttaatcccctgcatcggatcaccggcgtgccccaccatgtcagacgcagccgtagacaccagctccgaaatcaccaccaaggacttaaaggagaagaaggaagttgtggaagaggcagaaaatggaagagacgcccctgctaacgggaatgctaatgaggaaaatggggagcaggaggctgacaatgaggtagacgaagaagaggaagaaggtggggaggaagaggaggaggaagaagaaggtgatggtgaggaagaggatggagatgaagatgaggaagctgagtcagctacgggcaagcgggcagctgaagatgatgaggatgacgatgtcgataccaagaagcagaagaccgacgaggatgactagacagcaaaaaaggaaaagttaaactaaaaaaaaaaaggccgccgtgacctattcaccctccacttcccgtctcagaatctaaacgtggtcaccttcgagtagagaggcccgcccgcccaccgtgggcagtgccacccgcagatgacacgcgctctccaccacccaacccaaaccatgagaatttgcaacaggggaggaaaaaagaaccaaaacttccaaggccctgctttttttcttaaaagtactttaaaaaggaaattcgtttgtatcttccatctacattttatattttgtacatatggttagggtcagccattttaatgatctcggatgaccaaacagccttcggagcgtccctctgtcctacttctgacttacttgtggtgtgaccatgtccactataatcccaaggagcaagaaaacctggttaaaaagcaaaattgacaagggaaaacaatcttattcgagcattcagtacctctttgggtatggcctaggtgactaaaggcaggtgttggatgaagggtttaaagggccagatgaaggcgtttcaccctgtggcacgcaggacgaatacggcacgcaggcatcggccaactggcacataac

SEQ ID NO: 28904 - DNA, 1406 bp, Homo sapiens; identical to SEQ ID NO: 22088
  misc_feature 1, 2: n = A,T,C or G

SEQ ID NO: 28905 - DNA, 930 bp, Homo sapiens; identical to SEQ ID NO: 23040
  misc_feature 912, 913, 914, 915, 916, 917, 918, 919, 920, 921, 922, 923,924, 925, 926, 927, 928, 929, 930: n = A,T,C or G

SEQ ID NO: 28906 - DNA, 482 bp, Homo sapiens; identical to SEQ ID NO: 23041
  misc_feature 1, 2: n = A,T,C or G

SEQ ID NO: 28907 - DNA, 1828 bp, Homo sapiens; identical to SEQ ID NO: 23042
  misc_feature 1, 159, 160, 161, 162, 163, 164, 165, 166, 167, 168, 169,170, 171, 172, 173, 174, 175, 176, 177, 178, 179, 180, 181,1814, 1815, 1816, 1817, 1818, 1819, 1820, 1821, 1822, 1823,1824, 1825, 1826, 1827, 1828: n = A,T,C or G

SEQ ID NO: 28908 - DNA, 425 bp, Homo sapiens; identical to SEQ ID NO: 23043

SEQ ID NO: 28909 - DNA, 1613 bp, Homo sapiens; identical to SEQ ID NO: 23017

SEQ ID NO: 28910 - DNA, 397 bp, Homo sapiens; identical to SEQ ID NO: 23045
  misc_feature 397: n = A,T,C or G

SEQ ID NO: 28911 - DNA, 1308 bp, Homo sapiens; identical to SEQ ID NO: 22128
  misc_feature 208, 209, 210, 211, 212, 213, 214, 215, 216, 217, 218, 219,220, 221, 222, 223, 224, 225, 226, 227, 228, 229, 230, 231: n = A,T,C or G

SEQ ID NO: 28912 - DNA, 886 bp, Homo sapiens; identical to SEQ ID NO: 23046
  misc_feature 1, 2, 885, 886: n = A,T,C or G

SEQ ID NO: 28913 - DNA, 2548 bp, Homo sapiens; identical to SEQ ID NO: 22221
  misc_feature 1, 2547, 2548: n = A,T,C or G

SEQ ID NO: 28914 - DNA, 1496 bp, Homo sapiens; identical to SEQ ID NO: 23049

SEQ ID NO: 28915 - DNA, 1546 bp, Homo sapiens; identical to SEQ ID NO: 23050

SEQ ID NO: 28916 - DNA, 2946 bp, Homo sapiens; identical to SEQ ID NO: 22213
  misc_feature 1, 2945, 2946: n = A,T,C or G

SEQ ID NO: 28917 - DNA, 1386 bp, Homo sapiens; identical to SEQ ID NO: 23052
  misc_feature 1: n = A,T,C or G

SEQ ID NO: 28918 - DNA, 2576 bp, Homo sapiens; identical to SEQ ID NO: 23053
  misc_feature 1, 2, 3, 4, 94: n = A,T,C or G

SEQ ID NO: 28919 - DNA, 745 bp, Homo sapiens; identical to SEQ ID NO: 20943
  misc_feature 1, 2, 3, 4, 5, 6, 7, 8, 9, 10, 11, 12, 741, 742, 743, 744,745: n = A,T,C or G

SEQ ID NO: 28920 - DNA, 628 bp, Homo sapiens; identical to SEQ ID NO: 23055
  misc_feature 1, 2, 3, 362, 621, 625, 626, 627, 628: n = A,T,C or G

SEQ ID NO: 28921 - DNA, 1859 bp, Homo sapiens; identical to SEQ ID NO: 23056
  misc_feature 1, 2, 3, 4, 5, 6, 7, 8, 9, 10, 11, 1859: n = A,T,C or G

SEQ ID NO: 28922 - DNA, 1010 bp, Homo sapiens; identical to SEQ ID NO: 23057
  misc_feature 1, 2, 3, 4, 5, 1009, 1010: n = A,T,C or G

SEQ ID NO: 28923 - DNA, 976 bp, Homo sapiens; identical to SEQ ID NO: 23058
  misc_feature 974, 975, 976: n = A,T,C or G

SEQ ID NO: 28924 - DNA, 3474 bp, Homo sapiens; identical to SEQ ID NO: 23059
  misc_feature 1, 2, 3, 4, 5, 3472, 3473, 3474: n = A,T,C or G

SEQ ID NO: 28925 - DNA, 1051 bp, Homo sapiens; identical to SEQ ID NO: 23060
  misc_feature 1051: n = A,T,C or G

SEQ ID NO: 28926 - DNA, 2029 bp, Homo sapiens; identical to SEQ ID NO: 22618
  misc_feature 1, 2, 3, 4, 5, 2029: n = A,T,C or G

SEQ ID NO: 28927 - DNA, 689 bp, Homo sapiens; identical to SEQ ID NO: 23062
  misc_feature 1, 2, 3, 688, 689: n = A,T,C or G

SEQ ID NO: 28928 - DNA, 415 bp, Homo sapiens; identical to SEQ ID NO: 23063

SEQ ID NO: 28929 - DNA, 4341 bp, Homo sapiens; identical to SEQ ID NO: 23064

SEQ ID NO: 28930 - DNA, 2424 bp, Homo sapiens; identical to SEQ ID NO: 23065
  misc_feature 1, 2, 3, 4, 5, 6, 7: n = A,T,C or G

SEQ ID NO: 28931 - DNA, 2087 bp, Homo sapiens; identical to SEQ ID NO: 23066

SEQ ID NO: 28932 - DNA, 1395 bp, Homo sapiens; identical to SEQ ID NO: 23067
  misc_feature 1, 2, 3: n = A,T,C or G

SEQ ID NO: 28933 - DNA, 3191 bp, Homo sapiens; identical to SEQ ID NO: 23068

SEQ ID NO: 28934 - DNA, 745 bp, Homo sapiens; identical to SEQ ID NO: 20943
  misc_feature 1, 2, 3, 4, 5, 6, 7, 8, 9, 10, 11, 12, 741, 742, 743, 744,745: n = A,T,C or G

SEQ ID NO: 28935 - DNA, 655 bp, Homo sapiens; identical to SEQ ID NO: 23069
  misc_feature 650, 651, 652, 653, 654, 655: n = A,T,C or G

SEQ ID NO: 28936 - DNA, 1440 bp, Homo sapiens; identical to SEQ ID NO: 23070
  misc_feature 1, 1440: n = A,T,C or G

SEQ ID NO: 28937 - DNA, 1299 bp, Homo sapiens; identical to SEQ ID NO: 23071

SEQ ID NO: 28938 - DNA, 1145 bp, Homo sapiens; identical to SEQ ID NO: 23072
  misc_feature 1, 2, 23, 1140, 1141, 1142, 1143, 1144, 1145: n = A,T,C or G

SEQ ID NO: 28939 - DNA, 1406 bp, Homo sapiens; identical to SEQ ID NO: 23073
  misc_feature 1, 2, 3, 1379, 1380, 1381, 1382, 1383, 1384, 1385, 1386,1387, 1388, 1389, 1390, 1391, 1392, 1393, 1394, 1395, 1396,1397, 1398, 1399, 1400, 1401, 1402, 1403, 1404, 1405, 1406: n = A,T,C or G

SEQ ID NO: 28940 - DNA, 809 bp, Homo sapiens; identical to SEQ ID NO: 23074
  misc_feature 779, 780, 781, 782, 783, 784, 785, 786, 787, 788, 789, 790,791, 792, 793, 794, 795, 796, 797, 798, 799, 800, 801, 802,803, 804, 805, 806, 807, 808, 809: n = A,T,C or G

SEQ ID NO: 28941 - DNA, 1047 bp, Homo sapiens; identical to SEQ ID NO: 23075
  misc_feature 1045, 1046, 1047: n = A,T,C or G

SEQ ID NO: 28942 - DNA, 1834 bp, Homo sapiens; identical to SEQ ID NO: 23076

SEQ ID NO: 28943 - DNA, 997 bp, Homo sapiens; identical to SEQ ID NO: 23077

SEQ ID NO: 28944 - DNA, 1308 bp, Homo sapiens; identical to SEQ ID NO: 23078
  misc_feature 1, 2, 3, 4, 1292, 1293, 1294, 1295, 1296, 1297, 1298, 1299,1300, 1301, 1302, 1303, 1304, 1305, 1306, 1307, 1308: n = A,T,C or G

SEQ ID NO: 28945 - DNA, 549 bp, Homo sapiens; identical to SEQ ID NO: 23079
  misc_feature 498, 529, 530, 531, 532, 533, 534, 535, 536, 537, 538, 539,540, 541, 542, 543, 544, 545, 546, 547, 548, 549: n = A,T,C or G

SEQ ID NO: 28946 - DNA, 734 bp, Homo sapiens; identical to SEQ ID NO: 23080
  misc_feature 680, 687, 727, 728, 729, 730, 731, 732, 733, 734: n = A,T,C or G

SEQ ID NO: 28947 - DNA, 543 bp, Homo sapiens; identical to SEQ ID NO: 23081
  misc_feature 543: n = A,T,C or G

SEQ ID NO: 28948 - DNA, 689 bp, Homo sapiens; identical to SEQ ID NO: 23082

SEQ ID NO: 28949 - DNA, 3528 bp, Homo sapiens; identical to SEQ ID NO: 23083

SEQ ID NO: 28950 - DNA, 3574 bp, Homo sapiens
cgaccacgcgtccggaacgtgtggcggcggcggagatcgcgtctctttcgctccggtgtccgcgctgctgctcctgtgagcgcccggcgagtccgtcccgtccaccgtccgcagctggtagccagcctgcccctcgcctcgactccctttcaccaacaccgacacccacattgacacctccagtccggccagccgctccactcgttgcctttgcatctccacacatggcgtcctccgcgcagagcggcggctcctccgggggacccgcggtccccaccgtgcagcggggcatcatcaagatggtcctctcagggtgcgccatcattgtccgaggtcagcctcgtggtgggcctcctcctgagcggcagatcaacctcagcaacattcgtgctggaaatcttgctcgccgggcagccgccacacaacctgatgcaaaggatacccctgatgagccctgggcatttccagctcgagagttccttcgaaagaagctgattgggaaggaagtctgtttcacgatagaaaacaagactccccaggggcgagagtatggcatgatctaccttggaaaagataccaatggggaaaacattgcagaatcactggttgcagagggcttagccacccggagagaaggcatgagagctaataatcctgagcagaaccggctttcagaatgtgaagaacaagcaaaggcagccaagaaagggatgtggagtgaggggaacggttcacatactatccgggatctcaagtataccattgaaaacccaaggcactttgtggactcacaccaccagaagcctgttaatgctatcatcgagcatgtgcgggacggcagtgtggtcagggccctgctcctcccagattactacctggttacagtcatgctgtcaggcatcaagtgcccaacttttcgacgggaagcagatggcagtgaaactccagagccttttgctgcagaagccaaatttttcactgagtcgcgactgcttcagagagatgttcagatcattctggagagctgccacaaccagaacattctgggtaccatccttcatccaaatggcaacatcacagagctcctcctgaaggaaggtttcgcacgctgtgtggactggtcgattgcagtttacacccggggcgcagaaaagctgagggcggcagagaggtttgccaaagagcgcaggctgagaatatggagagactatgtggctcccacagctaatttggaccaaaaggacaagcagtttgttgccaaggtgatgcaggttctgaatgctgatgccattgttgtgaagctgaactcaggcgattacaagacgattcacctgtccagcatccgaccaccgaggctggagggggagaacacccaggataagaacaagaaactgcgtcccctgtatgacattccttacatgtttgaggcccgggaatttcttcgaaaaaagcttattgggaagaaggtcaatgtgacggtggactacattagaccagccagcccagccacagagacagtgcctgccttttcagagcgtacctgtgccactgtcaccattggaggaataaacattgctgaggctcttgtcagcaaaggtctagccacagtgatcagataccggcaggatgatgaccagagatcatcacactacgatgaactgcttgctgcagaggccagagctattaagaatggcaaaggattgcatagcaagaaggaagtgcctatccaccgtgttgcagatatatctggggatacccaaaaagcaaagcagttcctgccttttcttcagcgggcaggtcgttctgaagctgtggtggaatacgtcttcagtggttctcgtctcaaactctatttgccaaaggaaacttgccttatcaccttcttgcttgcaggcattgaatgccccagaggagcccgaaacctcccaggcttggtgcaggaaggagagcccttcagcgaggaagctacacttttcaccaaggaactggtgctgcagcgagaggtggaggtggaggtggagagcatggacaaggccggcaactttatcggctggctgcacatcgacggtgccaacctgtccgtcctgctggtggagcacgcgctctccaaggtccacttcaccgccgaacgcagctcctactacaagtccctgctgtctgccgaggaggccgcaaagcagaagaaagagaaggtctgggcccactatgaggagcagcccgtggaggaggtgatgccagtgctggaggagaaggagcgatctgctagctacaagcccgtgtttgtgaccgagatcactgatgacctgcacttctacgtgcaggatgtggagaccggcacccagttggagaagctgatggagaacatgcgcaatgacattgccagtcacccccctgtagagggctcctatgccccccgcaggggagagttctgcattgccaaatttgtagatggagaatggtaccgtgcccgagtagagaaagtcgagtctcctgccaaaatacatgtcttctacattgactacggcaacagagaggtcctgccatccacccgcctgggtaccctatcacctgccttcagcactcgggtgctgccagctcaagccacggagtatgccttcgccttcatccaggtgccccaagatgatgatgcccgcacggacgccgtggacagcgtagttcgggatatccagaacactcagtgcctgctcaacgtggaacacctgagtgccggctgcccccatgtcaccctgcagtttgcagattccaagggcgatgtggggctgggcttggtgaaggaagggctggtcatggtggaggtgcgcaaggagaaacagttccagaaagtgatcacagaatacctgaatgcccaagagtcagccaagagcgccaggctgaacctgtggcgctatggagactttcgagctgatgatgcagacgaatttggctacagccgctaaggaggggatcgggtttggcccccagccccgctcacgccagtccctcttcctctgccgggagggtgttttcaactccaaaccccagagaggggttgtagattgggtccagctttgcttcagtgtgtggaaatgtctcgtggggtggcatcggggctgcggggtggggacccccaaggctttctggggcagacccttgtcctctgggatgatgggcactgctatccacagtctctgccagttggttttatttggaggtttgtgggctttttttaaaaaaaaaaaagtcctcaaatcaggaagaaacatcaaagactatgtcctagtggagggagtaatcctaacacccaggctggccgccagctggcacctgcctctatcccagactgccctcgtcccagctctctgtccaactgttgattatgtgatttttctgatacgtccattctcaaatgccagtgtgttcacatcttcgctctggccagcccattctgtatttaaagcttttgaggcccaataaaatagtacgtgctgtctgcagcccttattgaaaaaaaaaaaaaaaaaaaaaaaaaaaaaaaaaaaaaaaaaaaaaaaaaaaaaaaaaaaaaaaaaaaaaa

SEQ ID NO: 28951 - DNA, 534 bp, Homo sapiens
  misc_feature 529, 530, 531, 532, 533, 534: n = A,T,C or G
ccacgcgtccggtgggatcttttgtgatataactctaattgcatggctaattaaaaagagaatatatgtgatattttaacagagacgtgattggcagcagatggctgattaaggaggaactagaagaaatgttagtggaaaaactgtcagatctagattatatgcagttcattcggctgctagaaaagttattgacatcgcagtgtggtgctgctgaggaagaatttgtgcagaggtttcgaagaagtgtaactcttgaatcaaaaaaacagctgattgaacctgtacagtatgatgagcaaggaatggcctttagcaaaagcgaaggtaaaagaaagactgcaaaagcagaagcaattgtttataaacatggaagtggaagaataaaagtaaatggaattgattaccagctttacttcccgatcacacaggacagagaacagctgatgttccctttccactttgttgaccggctgggaaagcacgacgtgacctgcacagtctagggggggggaggtcagcgcaggcnnnnnn

SEQ ID NO: 28952 - DNA, 702 bp, Homo sapiens; identical to SEQ ID NO: 23085
  misc_feature 501, 530, 566, 647, 660, 702: n = A,T,C or G

SEQ ID NO: 28953 - DNA, 1322 bp, Homo sapiens; identical to SEQ ID NO: 23086
  misc_feature 1322: n = A,T,C or G

SEQ ID NO: 28954 - DNA, 872 bp, Homo sapiens; identical to SEQ ID NO: 23087
  misc_feature 1, 2, 3, 866, 867, 868, 869, 870, 871, 872: n = A,T,C or G

SEQ ID NO: 28955 - DNA, 2512 bp, Homo sapiens; identical to SEQ ID NO: 23088

SEQ ID NO: 28956 - DNA, 4592 bp, Homo sapiens; identical to SEQ ID NO: 23089
  misc_feature 1, 2, 3, 4, 4581, 4582, 4583, 4584, 4585, 4586, 4587, 4588,4589, 4590, 4591, 4592: n = A,T,C or G

SEQ ID NO: 28957 - DNA, 383 bp, Homo sapiens; identical to SEQ ID NO: 23090
  misc_feature 1, 2, 3, 4, 5, 6, 7, 8, 9, 10, 11, 12, 13, 14: n = A,T,C or G

SEQ ID NO: 28958 - DNA, 1159 bp, Homo sapiens; identical to SEQ ID NO: 22137
  misc_feature 1, 21, 44, 66, 85, 1158, 1159: n = A,T,C or G

SEQ ID NO: 28959 - DNA, 1107 bp, Homo sapiens; identical to SEQ ID NO: 23092
  misc_feature 1, 2, 1096, 1097, 1098, 1099, 1100, 1101, 1102, 1103, 1104,1105, 1106, 1107: n = A,T,C or G

SEQ ID NO: 28960 - DNA, 936 bp, Homo sapiens; identical to SEQ ID NO: 22476
  misc_feature 1, 2, 933, 934, 935, 936: n = A,T,C or G

SEQ ID NO: 28961 - DNA, 4444 bp, Homo sapiens; identical to SEQ ID NO: 22727

SEQ ID NO: 28962 - DNA, 3244 bp, Homo sapiens; identical to SEQ ID NO: 23095
  misc_feature 1, 2988, 3242, 3243, 3244: n = A,T,C or G

SEQ ID NO: 28963 - DNA, 1137 bp, Homo sapiens; identical to SEQ ID NO: 23096

SEQ ID NO: 28964 - DNA, 2543 bp, Homo sapiens; identical to SEQ ID NO: 23097
  misc_feature 1, 2, 2542, 2543: n = A,T,C or G

SEQ ID NO: 28965 - DNA, 438 bp, Homo sapiens; identical to SEQ ID NO: 23098
  misc_feature 1, 2: n = A,T,C or G

SEQ ID NO: 28966 - DNA, 3748 bp, Homo sapiens; identical to SEQ ID NO: 23099
  misc_feature 1, 2, 3740, 3741, 3742, 3743, 3744, 3745, 3746, 3747, 3748: n = A,T,C or G

SEQ ID NO: 28967 - DNA, 3166 bp, Homo sapiens; identical to SEQ ID NO: 23100
  misc_feature 1, 3150, 3151, 3152, 3153, 3154, 3155, 3156, 3157, 3158,3159, 3160, 3161, 3162, 3163, 3164, 3165, 3166: n = A,T,C or G

SEQ ID NO: 28968 - DNA, 2208 bp, Homo sapiens
  misc_feature 2196, 2197, 2198, 2199, 2200, 2201, 2202, 2203, 2204, 2205,2206, 2207, 2208: n = A,T,C or G
ggagctggttgcctcgcctccctgattctcaagcggacatcatttccaccgttgagtttaattactctggagaccttcttgcaacagggacaagggcggcagagttgttatttttcagcgtgaacaagaggtactggcccagccccgccgtcctgccctgccgtgaagtgtgagcagctttctcagcacttcctgcagagaagtctggcaggggtgtgaattctctcttcccttcagggagagaataaaagccgccctcattctaggggagaatataatgtttacagcacgcttttcaaagtcatggaaccgggggttttgactattgtgaaaagtctaggaaattggagggaaaaaattgattaaaattaggtggttgccacaacagaatgctgctcattttctactgtctacaaatgataaaactataaaattatggaaaataagtgaacgggaaggtggaggcctgggtgtaaatcggccgaggcggaagacttcgagacccatttaggatcacggcgctacggatgacctgagaattaatttatggcacttagaaatcacagatagaagctttaacatcgtggacatcaagcctgctaacatggaggagctgaccgaagtcatcactgcagccgagttccacccgcaccagtgcaacgtgttcgtctacagcagtagcaaagggaccatccgcctgtgtgacatgcgctcctcggccctgtgcgacagacactccaagttttttgaagagcctgaagatcccagcagtaggtccttcttctcagaaataatttcatccatatccgatgtaaaattcagtcatagtgggcggtacatgatgaccagagactacctgtcggtgaaggtgtgggacctcaacatggagagcaggccggtggagacccaccaggtccacgagtacctgcgcagcaagctctgctctctctatgagaacgactgcatctttgacaagtttgagtgttgctggaacggttcggatagcgccatcatgaccgggtcctataacaacttcttcaggatgtttgatagagacacgcggagggatgtgaccctggaggcctcgagagagagcagcaaaccgcgcgccagcctcaaaccccggaaggtgtgtacggggggtaagcggaggaaagacgagatcagtgtggacagtctggacttcaacaagaagatcctgcacacagcctggcaccccgtggacaatgtcattgccgtggctgccaccaataacttgtacatattccaggacaaaatcaactagagacgcgaacgtgaggaccaagtcttgtcttgcatagttaagccggacatttttctgtcagagaaaaggcatcattgtccgctccattaagaacagtgacgcacctgctacttcccttcacagacacaggagaaagccgcctccgctggaggcccggtgtggttccgcctcggcgaggcgcgagacaggcgctgctgctcacgtggagacgctctcgaagcagagttgacggacactgctcccaaaaggtcattactcagaataaatgtatttatttcagtccgagccttcctttccaatttatagaccaaaaaattaacatccaagagaaaagttattgtcagataccgctctttctccaactttccctctttctctgccatcacacttgggccttcactgcagcgtggtgtggccaccgtccgtgtcctctcggccttcctccgagtccaggtggactctgtggatgtgtggatgtggcccgagcaggctcaggcggccccactcacccacagcatccgccgccaccccttcgggtgtgagcgctcaataaaaacaacacactataaagtgtttttaaacaaaaaataatcaattatattcgggcctttggccaatcccctatagggggggttaaaaatagtgcgcggtttatacaagcgccttggaaacccgtggtccacctaaaactttggtgaaaacctctttcgcgggggaaaataaagaacccaccgaggctttccaaatggccccttgggccggaatataggttatttttaaaatcggaatttttgtaaagttattttcacctcgcggtgggaaatcttatcacccccccttagggtcctctctctcataggctttataggtctctctacatgcttctttccggcgtccaggcctctctacannnnnnnnnnnnn

SEQ ID NO: 28969 - DNA, 459 bp, Homo sapiens; identical to SEQ ID NO: 21058
  misc_feature 1, 2: n = A,T,C or G

SEQ ID NO: 28970 - DNA, 740 bp, Homo sapiens
cgtccgtgcgtttgtggccgtccggcctccctgacatgcagatttccacccagaagacagagaaggagccagtggtcatggaatgggctggggtcaaagactgggtgcctgggagctgaggcagccaccgtttcagcctggccagccctctggaccccgaggttggaccctactgtgacacacctaccatgcggacactcttcaacctcctctggcttgccctggcctgcagccctgttcacactaccctgtcaaagtcagatgccaaaaaagccgcctcaaagacgctgctggagaagagtcagttttcagataagccggtgcaagaccggggtttggtggtgacggacctcaaagctgagagtgtggttcttgagcatcgcagctactgctcggcaaaggcccgggacagacactttgctggggatgtactgggctatgtcactccatggaacagccatggctacgatgtcaccaaggtctttgggagcaagttcacacagatctcacccgtctggctgcagctgaagagacgtggccgtgagatgtttgaggtcacgggcctccacgacgtggaccaagggtggatgcgagctgtcaggaagcatgccaagggcctgcacatagtgcctcggctcctgtttgaggactggactacttctacgacctgctctaggtgggcattgcggcctccgcggtggacgtgttcttttctaagccatggagtgagtgagcaggtg

SEQ ID NO: 28971 - DNA, 1603 bp, Homo sapiens; identical to SEQ ID NO: 22091
  misc_feature 1, 2, 1602, 1603: n = A,T,C or G

SEQ ID NO: 28972 - DNA, 770 bp, Homo sapiens; identical to SEQ ID NO: 23104

SEQ ID NO: 28973 - DNA, 5231 bp, Homo sapiens; identical to SEQ ID NO: 23105
  misc_feature 1, 2, 5231: n = A,T,C or G

SEQ ID NO: 28974 - DNA, 388 bp, Homo sapiens; identical to SEQ ID NO: 23106

SEQ ID NO: 28975 - DNA, 968 bp, Homo sapiens; identical to SEQ ID NO: 20935

SEQ ID NO: 28976 - DNA, 459 bp, Homo sapiens; identical to SEQ ID NO: 21058
  misc_feature 1, 2: n = A,T,C or G

SEQ ID NO: 28977 - DNA, 2140 bp, Homo sapiens; identical to SEQ ID NO: 23108
  misc_feature 2140: n = A,T,C or G

SEQ ID NO: 28978 - DNA, 730 bp, Homo sapiens; identical to SEQ ID NO: 23109
  misc_feature 1, 725, 726, 727, 728, 729, 730: n = A,T,C or G

SEQ ID NO: 28979 - DNA, 1960 bp, Homo sapiens; identical to SEQ ID NO: 22162
  misc_feature 1, 2, 8, 1960: n = A,T,C or G

SEQ ID NO: 28980 - DNA, 2619 bp, Homo sapiens; identical to SEQ ID NO: 23110
  misc_feature 1, 2, 2604, 2605, 2606, 2607, 2608, 2609, 2610, 2611, 2612,2613, 2614, 2615, 2616, 2617, 2618, 2619: n = A,T,C or G

SEQ ID NO: 28981 - DNA, 4859 bp, Homo sapiens; identical to SEQ ID NO: 23111
  misc_feature 1, 2, 3, 4, 5, 6, 7, 8, 9, 10, 11, 12, 13, 14, 15, 16, 17,18, 19, 20, 21, 22, 23, 24, 25, 26, 27, 28, 29, 30, 31,4859: n = A,T,C or G

SEQ ID NO: 28982 - DNA, 1189 bp, Homo sapiens; identical to SEQ ID NO: 23112
  misc_feature 1187, 1188, 1189: n = A,T,C or G

SEQ ID NO: 28983 - DNA, 937 bp, Homo sapiens; identical to SEQ ID NO: 23113
  misc_feature 1, 2, 3, 4, 5, 6, 7, 8, 9, 937: n = A,T,C or G

SEQ ID NO: 28984 - DNA, 2178 bp, Homo sapiens; identical to SEQ ID NO: 22304
  misc_feature 1, 2, 2177, 2178: n = A,T,C or G

SEQ ID NO: 28985 - DNA, 2658 bp, Homo sapiens; identical to SEQ ID NO: 23115
  misc_feature 2479, 2480, 2481, 2482, 2483, 2484, 2485, 2486, 2487, 2488,2489, 2490, 2491, 2492, 2493, 2494, 2495, 2496, 2652, 2653,2654, 2655, 2656, 2657, 2658: n = A,T,C or G

SEQ ID NO: 28986 - DNA, 1189 bp, Homo sapiens; identical to SEQ ID NO: 20185
  misc_feature 1179, 1180, 1181, 1182, 1183, 1184, 1185, 1186, 1187, 1188,1189: n = A,T,C or G

SEQ ID NO: 28987 - DNA, 1979 bp, Homo sapiens; identical to SEQ ID NO: 20196
  misc_feature 1978, 1979: n = A,T,C or G

SEQ ID NO: 28988 - DNA, 3198 bp, Homo sapiens; identical to SEQ ID NO: 23118
  misc_feature 1, 2, 3170, 3171, 3172, 3173, 3174, 3175, 3176, 3177, 3178,3179, 3180, 3181, 3182, 3183, 3184, 3185, 3186, 3187, 3188,3189, 3190, 3191, 3192, 3193, 3194, 3195, 3196, 3197, 3198: n = A,T,C or G

SEQ ID NO: 28989 - DNA, 841 bp, Homo sapiens; identical to SEQ ID NO: 23119

SEQ ID NO: 28990 - DNA, 3519 bp, Homo sapiens; identical to SEQ ID NO: 23120
  misc_feature 1, 2, 3516, 3517, 3518, 3519: n = A,T,C or G

SEQ ID NO: 28991 - DNA, 2956 bp, Homo sapiens; identical to SEQ ID NO: 23121
  misc_feature 1: n = A,T,C or G

SEQ ID NO: 28992 - DNA, 891 bp, Homo sapiens; identical to SEQ ID NO: 23122
  misc_feature 889, 890, 891: n = A,T,C or G

SEQ ID NO: 28993 - DNA, 628 bp, Homo sapiens; identical to SEQ ID NO: 23055
  misc_feature 1, 2, 3, 362, 621, 625, 626, 627, 628: n = A,T,C or G

SEQ ID NO: 28994 - DNA, 831 bp, Homo sapiens; identical to SEQ ID NO: 23124
  misc_feature 1: n = A,T,C or G

SEQ ID NO: 28995 - DNA, 916 bp, Homo sapiens; identical to SEQ ID NO: 23125
  misc_feature 910, 911, 912, 913, 914, 915, 916: n = A,T,C or G

SEQ ID NO: 28996 - DNA, 531 bp, Homo sapiens; identical to SEQ ID NO: 23126
  misc_feature 1: n = A,T,C or G

SEQ ID NO: 28997 - DNA, 681 bp, Homo sapiens; identical to SEQ ID NO: 20120
  misc_feature 1, 2, 12: n = A,T,C or G

SEQ ID NO: 28998 - DNA, 966 bp, Homo sapiens; identical to SEQ ID NO: 22070
  misc_feature 966: n = A,T,C or G

SEQ ID NO: 28999 - DNA, 582 bp, Homo sapiens; identical to SEQ ID NO: 23129

SEQ ID NO: 29000 - DNA, 391 bp, Homo sapiens; identical to SEQ ID NO: 22233
  misc_feature 388, 389, 390, 391: n = A,T,C or G

SEQ ID NO: 29001 - DNA, 1432 bp, Homo sapiens; identical to SEQ ID NO: 22032

SEQ ID NO: 29002 - DNA, 564 bp, Homo sapiens; identical to SEQ ID NO: 22496
  misc_feature 564: n = A,T,C or G

SEQ ID NO: 29003 - DNA, 1082 bp, Homo sapiens; identical to SEQ ID NO: 23133
  misc_feature 1, 2, 3, 1081, 1082: n = A,T,C or G

SEQ ID NO: 29004 - DNA, 745 bp, Homo sapiens; identical to SEQ ID NO: 20943
  misc_feature 1, 2, 3, 4, 5, 6, 7, 8, 9, 10, 11, 12, 741, 742, 743, 744,745: n = A,T,C or G

SEQ ID NO: 29005 - DNA, 940 bp, Homo sapiens; identical to SEQ ID NO: 23135
  misc_feature 1, 939, 940: n = A,T,C or G

SEQ ID NO: 29006 - DNA, 10676 bp, Homo sapiens; identical to SEQ ID NO: 23136
  misc_feature 1, 2, 3, 4, 17, 30, 41, 10669, 10670, 10671, 10672, 10673,10674, 10675, 10676: n = A,T,C or G

SEQ ID NO: 29007 - DNA, 1094 bp, Homo sapiens; identical to SEQ ID NO: 23137
  misc_feature 1, 2, 3, 1093, 1094: n = A,T,C or G

SEQ ID NO: 29008 - DNA, 1384 bp, Homo sapiens; identical to SEQ ID NO: 23138
  misc_feature 1, 1381, 1382, 1383, 1384: n = A,T,C or G

SEQ ID NO: 29009 - DNA, 1299 bp, Homo sapiens; identical to SEQ ID NO: 23139
  misc_feature 1, 2, 1299: n = A,T,C or G

SEQ ID NO: 29010 - DNA, 2140 bp, Homo sapiens; identical to SEQ ID NO: 23140

SEQ ID NO: 29011 - DNA, 800 bp, Homo sapiens; identical to SEQ ID NO: 23141
  misc_feature 1, 2, 3, 793, 794, 795, 796, 797, 798, 799, 800: n = A,T,C or G

SEQ ID NO: 29012 - DNA, 421 bp, Homo sapiens; identical to SEQ ID NO: 23142

SEQ ID NO: 29013 - DNA, 2069 bp, Homo sapiens; identical to SEQ ID NO: 23143
  misc_feature 2055, 2056, 2057, 2058, 2059, 2060, 2061, 2062, 2063, 2064,2065, 2066, 2067, 2068, 2069: n = A,T,C or G

SEQ ID NO: 29014 - DNA, 419 bp, Homo sapiens; identical to SEQ ID NO: 23144

SEQ ID NO: 29015 - DNA, 313 bp, Homo sapiens; identical to SEQ ID NO: 23145
  misc_feature 1, 2, 3, 4, 5, 6: n = A,T,C or G

SEQ ID NO: 29016 - DNA, 543 bp, Homo sapiens; identical to SEQ ID NO: 23081
  misc_feature 543: n = A,T,C or G

SEQ ID NO: 29017 - DNA, 562 bp, Homo sapiens; identical to SEQ ID NO: 23147
  misc_feature 1, 2, 3, 406, 407, 408, 409, 410, 411, 412, 413, 414, 415,416, 417, 418, 419, 420, 421, 422, 423, 424, 425, 426, 427,428, 429, 430, 431, 432, 433, 434, 435, 436, 437, 438, 439,440, 441, 442, 443, 444, 445: n = A,T,C or G

SEQ ID NO: 29018 - DNA, 1051 bp, Homo sapiens; identical to SEQ ID NO: 23148
  misc_feature 1043, 1044, 1045, 1046, 1047, 1048, 1049, 1050, 1051: n = A,T,C or G

SEQ ID NO: 29019 - DNA, 337 bp, Homo sapiens; identical to SEQ ID NO: 23150
  misc_feature 234, 235, 236, 237, 238, 239, 240, 241, 242, 243, 244, 245,246, 247, 248, 249, 250, 251, 252, 253, 254, 255, 256, 257,258, 259, 260, 261, 262, 263, 264, 265, 266, 267, 268, 269,270, 271: n = A,T,C or G

SEQ ID NO: 29020 - DNA, 995 bp, Homo sapiens; identical to SEQ ID NO: 23151
  misc_feature 1, 2, 975, 976, 977, 978, 979, 980, 981, 982, 983, 984, 985,986, 987, 988, 989, 990, 991, 992, 993, 994, 995: n = A,T,C or G

SEQ ID NO: 29021 - DNA, 1539 bp, Homo sapiens; identical to SEQ ID NO: 23152
  misc_feature 1, 2, 1533, 1534, 1535, 1536, 1537, 1538, 1539: n = A,T,C or G

SEQ ID NO: 29022 - DNA, 1415 bp, Homo sapiens; identical to SEQ ID NO: 23153
  misc_feature 1, 2, 3, 4, 5, 1409, 1410, 1411, 1412, 1413, 1414, 1415: n = A,T,C or G

SEQ ID NO: 29023 - DNA, 1252 bp, Homo sapiens; identical to SEQ ID NO: 23154
  misc_feature 1: n = A,T,C or G

SEQ ID NO: 29024 - DNA, 2813 bp, Homo sapiens; identical to SEQ ID NO: 22385
  misc_feature 1, 2812, 2813: n = A,T,C or G

SEQ ID NO: 29025 - DNA, 435 bp, Homo sapiens; identical to SEQ ID NO: 23156
  misc_feature 430, 431, 432, 433, 434, 435: n = A,T,C or G

SEQ ID NO: 29026 - DNA, 898 bp, Homo sapiens; identical to SEQ ID NO: 23157
  misc_feature 1, 894, 895, 896, 897, 898: n = A,T,C or G

SEQ ID NO: 29027 - DNA, 5529 bp, Homo sapiens; identical to SEQ ID NO: 23158
  misc_feature 1, 2, 3, 4, 5, 6, 7, 8, 9, 10, 11, 12, 13, 14, 15, 16, 17,18, 19, 20, 5527, 5528, 5529: n = A,T,C or G

SEQ ID NO: 29028 - DNA, 1190 bp, Homo sapiens; identical to SEQ ID NO: 23159
  misc_feature 1, 2, 3, 4, 5, 6, 7, 8, 9, 10, 11, 12, 13, 1187, 1188, 1189,1190: n = A,T,C or G

SEQ ID NO: 29029 - DNA, 3382 bp, Homo sapiens; identical to SEQ ID NO: 23160
  misc_feature 1, 2, 3380, 3381, 3382: n = A,T,C or G

SEQ ID NO: 29030 - DNA, 1918 bp, Homo sapiens; identical to SEQ ID NO: 23161
  misc_feature 1, 2, 1918: n = A,T,C or G

SEQ ID NO: 29031 - DNA, 452 bp, Homo sapiens; identical to SEQ ID NO: 22027
  misc_feature 1, 441, 442, 443, 444, 445, 446, 447, 448, 449, 450, 451,452: n = A,T,C or G

SEQ ID NO: 29032 - DNA, 2301 bp, Homo sapiens; identical to SEQ ID NO: 23163
  misc_feature 1, 2299, 2300, 2301: n = A,T,C or G

SEQ ID NO: 29033 - DNA, 389 bp, Homo sapiens; identical to SEQ ID NO: 23164
  misc_feature 1, 2, 3, 4, 388, 389: n = A,T,C or G

SEQ ID NO: 29034 - DNA, 2325 bp, Homo sapiens; identical to SEQ ID NO: 23165
  misc_feature 1, 2315, 2324, 2325: n = A,T,C or G

SEQ ID NO: 29035 - DNA, 2378 bp, Homo sapiens; identical to SEQ ID NO: 23166
  misc_feature 2215, 2282, 2339, 2361, 2363, 2364, 2365, 2366, 2367, 2368,2369, 2370, 2371, 2372, 2373, 2374, 2375, 2376, 2377, 2378: n = A,T,C or G

SEQ ID NO: 29036 - DNA, 721 bp, Homo sapiens; identical to SEQ ID NO: 23167
  misc_feature 719, 720, 721: n = A,T,C or G

SEQ ID NO: 29037 - DNA, 3238 bp, Homo sapiens; identical to SEQ ID NO: 23168
  misc_feature 1, 3232, 3233, 3234, 3235, 3236, 3237, 3238: n = A,T,C or G

SEQ ID NO: 29038 - DNA, 2298 bp, Homo sapiens; identical to SEQ ID NO: 23169
  misc_feature 1, 2, 3, 2277, 2278, 2279, 2280, 2281, 2282, 2283, 2284,2285, 2286, 2287, 2288, 2289, 2290, 2291, 2292, 2293, 2294,2295, 2296, 2297, 2298: n = A,T,C or G

SEQ ID NO: 29039 - DNA, 2306 bp, Homo sapiens; identical to SEQ ID NO: 23170
  misc_feature 2302, 2303, 2304, 2305, 2306: n = A,T,C or G

SEQ ID NO: 29040 - DNA, 604 bp, Homo sapiens; identical to SEQ ID NO: 23172
  misc_feature 1, 2, 3, 50, 562, 602, 603, 604: n = A,T,C or G

SEQ ID NO: 29041 - DNA, 2224 bp, Homo sapiens; identical to SEQ ID NO: 21832
  misc_feature 1, 2, 3, 4, 5, 6, 2220, 2221, 2222, 2223, 2224: n = A,T,C or G

SEQ ID NO: 29042 - DNA, 1849 bp, Homo sapiens; identical to SEQ ID NO: 23174
  misc_feature 1, 2, 3, 4, 5, 6, 7, 8: n = A,T,C or G

SEQ ID NO: 29043 - DNA, 1405 bp, Homo sapiens; identical to SEQ ID NO: 22074
  misc_feature 1396, 1397, 1398, 1399, 1400, 1401, 1402, 1403, 1404, 1405: n = A,T,C or G

SEQ ID NO: 29044 - DNA, 3765 bp, Homo sapiens; identical to SEQ ID NO: 23177
  misc_feature 1, 2, 3, 3765: n = A,T,C or G

SEQ ID NO: 29045 - DNA, 1616 bp, Homo sapiens; identical to SEQ ID NO: 23178

SEQ ID NO: 29046 - DNA, 1996 bp, Homo sapiens; identical to SEQ ID NO: 23179
  misc_feature 1, 2, 3, 1987, 1988, 1989, 1990, 1991, 1992, 1993, 1994,1995, 1996: n = A,T,C or G

SEQ ID NO: 29047 - DNA, 1719 bp, Homo sapiens; identical to SEQ ID NO: 23180
  misc_feature 1703, 1704, 1705, 1706, 1707, 1708, 1709, 1710, 1711, 1712,1713, 1714, 1715, 1716, 1717, 1718, 1719: n = A,T,C or G

SEQ ID NO: 29048 - DNA, 2140 bp, Homo sapiens; identical to SEQ ID NO: 23140

SEQ ID NO: 29049 - DNA, 2676 bp, Homo sapiens; identical to SEQ ID NO: 22754

SEQ ID NO: 29050 - DNA, 3634 bp, Homo sapiens; identical to SEQ ID NO: 23184
  misc_feature 3630, 3631, 3632, 3633, 3634: n = A,T,C or G

SEQ ID NO: 29051 - DNA, 681 bp, Homo sapiens; identical to SEQ ID NO: 20120
  misc_feature 1, 2, 12: n = A,T,C or G

SEQ ID NO: 29052 - DNA, 652 bp, Homo sapiens; identical to SEQ ID NO: 23186
  misc_feature 1, 2, 3, 4, 177, 651, 652: n = A,T,C or G

SEQ ID NO: 29053 - DNA, 1120 bp, Homo sapiens; identical to SEQ ID NO: 23187
  misc_feature 1, 2, 1120: n = A,T,C or G

SEQ ID NO: 29054 - DNA, 3638 bp, Homo sapiens; identical to SEQ ID NO: 23188
  misc_feature 1, 2, 3, 4, 5, 6, 7, 8, 3628, 3629, 3630, 3631, 3632, 3633,3634, 3635, 3636, 3637, 3638: n = A,T,C or G

SEQ ID NO: 29055 - DNA, 888 bp, Homo sapiens; identical to SEQ ID NO: 23189
  misc_feature 887, 888: n = A,T,C or G

SEQ ID NO: 29056 - DNA, 2254 bp, Homo sapiens; identical to SEQ ID NO: 23190
  misc_feature 1, 2, 2252, 2253, 2254: n = A,T,C or G

SEQ ID NO: 29057 - DNA, 5526 bp, Homo sapiens; identical to SEQ ID NO: 23191
  misc_feature 1, 402, 5520, 5521, 5522, 5523, 5524, 5525, 5526: n = A,T,C or G

SEQ ID NO: 29058 - DNA, 1670 bp, Homo sapiens; identical to SEQ ID NO: 23192
  misc_feature 1667, 1668, 1669, 1670: n = A,T,C or G

SEQ ID NO: 29059 - DNA, 1369 bp, Homo sapiens; identical to SEQ ID NO: 23193
  misc_feature 1, 2, 3, 4, 5, 6, 7, 8, 9, 1327, 1368, 1369: n = A,T,C or G

SEQ ID NO: 29060 - DNA, 7677 bp, Homo sapiens; identical to SEQ ID NO: 23194
  misc_feature 1, 2, 3, 7675, 7676, 7677: n = A,T,C or G

SEQ ID NO: 29061 - DNA, 3325 bp, Homo sapiens; identical to SEQ ID NO: 22256
  misc_feature 3319, 3320, 3321, 3322, 3323, 3324, 3325: n = A,T,C or G

SEQ ID NO: 29062 - DNA, 335 bp, Homo sapiens; identical to SEQ ID NO: 23195

SEQ ID NO: 29063 - DNA, 398 bp, Homo sapiens; identical to SEQ ID NO: 23196
  misc_feature 71, 72, 73, 74, 75, 76, 77, 78, 79, 80, 81, 82, 83, 84, 85,86, 87, 88, 89, 90, 91, 92, 93, 115, 116, 117, 118, 119,120, 121, 122, 123, 124, 125, 126, 127, 128, 129, 130, 131,132, 133, 134, 135, 136, 137, 138, 139, 140, 141, 142: n = A,T,C or G
  misc_feature 143: n = A,T,C or G

SEQ ID NO: 29064 - DNA, 459 bp, Homo sapiens; identical to SEQ ID NO: 21058
  misc_feature 1, 2: n = A,T,C or G

SEQ ID NO: 29065 - DNA, 739 bp, Homo sapiens; identical to SEQ ID NO: 23197
  misc_feature 568, 733, 734, 735, 736, 737, 738, 739: n = A,T,C or G

SEQ ID NO: 29066 - DNA, 745 bp, Homo sapiens; identical to SEQ ID NO: 20943
  misc_feature 1, 2, 3, 4, 5, 6, 7, 8, 9, 10, 11, 12, 741, 742, 743, 744,745: n = A,T,C or G

SEQ ID NO: 29067 - DNA, 3228 bp, Homo sapiens; identical to SEQ ID NO: 22886
  misc_feature 1, 2, 3216, 3217, 3218, 3219, 3220, 3221, 3222, 3223, 3224,3225, 3226, 3227, 3228: n = A,T,C or G

SEQ ID NO: 29068 - DNA, 1363 bp, Homo sapiens; identical to SEQ ID NO: 23199
  misc_feature 1, 2: n = A,T,C or G

SEQ ID NO: 29069 - DNA, 1451 bp, Homo sapiens; identical to SEQ ID NO: 23200
  misc_feature 1396, 1397, 1398, 1399, 1400, 1401, 1450, 1451: n = A,T,C or G

SEQ ID NO: 29070 - DNA, 312 bp, Homo sapiens; identical to SEQ ID NO: 23201

SEQ ID NO: 29071 - DNA, 897 bp, Homo sapiens; identical to SEQ ID NO: 20923
  misc_feature 894, 895, 896, 897: n = A,T,C or G

SEQ ID NO: 29072 - DNA, 368 bp, Homo sapiens; identical to SEQ ID NO: 21014
  misc_feature 364, 365, 366, 367, 368: n = A,T,C or G

SEQ ID NO: 29073 - DNA, 3250 bp, Homo sapiens; identical to SEQ ID NO: 23204
  misc_feature 3053: n = A,T,C or G

SEQ ID NO: 29074 - DNA, 968 bp, Homo sapiens; identical to SEQ ID NO: 20935

SEQ ID NO: 29075 - DNA, 2491 bp, Homo sapiens; identical to SEQ ID NO: 23206
  misc_feature 1, 2, 3, 4, 5, 6: n = A,T,C or G

SEQ ID NO: 29076 - DNA, 873 bp, Homo sapiens; identical to SEQ ID NO: 23207

SEQ ID NO: 29077 - DNA, 458 bp, Homo sapiens; identical to SEQ ID NO: 21391
  misc_feature 1, 2, 432, 434, 435, 436, 437, 438, 439, 440, 441, 442, 443,444, 445, 446, 447, 448, 449, 450, 451, 452, 453, 454, 455,456, 457, 458: n = A,T,C or G

SEQ ID NO: 29078 - DNA, 1832 bp, Homo sapiens; identical to SEQ ID NO: 23209

SEQ ID NO: 29079 - DNA, 1109 bp, Homo sapiens; identical to SEQ ID NO: 23210
  misc_feature 1, 2, 1108, 1109: n = A,T,C or G

SEQ ID NO: 29080 - DNA, 745 bp, Homo sapiens; identical to SEQ ID NO: 20943
  misc_feature 1, 2, 3, 4, 5, 6, 7, 8, 9, 10, 11, 12, 741, 742, 743, 744,745: n = A,T,C or G

SEQ ID NO: 29081 - DNA, 1674 bp, Homo sapiens; identical to SEQ ID NO: 23211
  misc_feature 1, 2, 3, 4, 1672, 1673, 1674: n = A,T,C or G

SEQ ID NO: 29082 - DNA, 770 bp, Homo sapiens
gcccccttccaacggccttttagtattattggcggtcgctttccccggctggatcagtgtcatcatgctcacgcagcatccctcccgggccaccctctcctgcctcagcctccgaacagctgggtacaggtacgccccagcccgcacaggttttcactaggttgcctgggctctttccttctttgtctgtgtttgtttgttggttggttggttggtttttgtttgtttgtttcgagacggggctccggctctgccgccgggggctgcagtgcaatggcgcgatctcacctcactgcggccttctgggctcaagcgatcctcccactgtgcccggcctgaagacagcctttagagaaagaagcagggggagttcttccgaggacagacaagatttctggagtttggaaagggtgagagactgggtcagcgaaaggaacattccggtctttatgttgggatgcaacgtatagatacagggatgagacccaaaagagccggcagaggtttgtcatcgtgctcgcaaggcaactgccggtggctgatcccgtaaaggatacacatacctagagcggagcctaaagatgcatccagcatgacgggtggagccacgatgcttggactcgagctctgctcctgtgcgttccgtgatcatggcttatactacctgcacctcagtttttcccgggcaaaaaggaagcttgctgccgctgcgttggcacctgccttaaagtgccagctactcagcgggctgaagaggaagaagttcctac

SEQ ID NO: 29083 - DNA, 6670 bp, Homo sapiens; identical to SEQ ID NO: 23212

SEQ ID NO: 29084 - DNA, 779 bp, Homo sapiens; identical to SEQ ID NO: 23213
  misc_feature 1, 2, 3, 777, 778, 779: n = A,T,C or G

SEQ ID NO: 29085 - DNA, 326 bp, Homo sapiens; identical to SEQ ID NO: 23214
  misc_feature 1, 2, 322, 323, 324, 325, 326: n = A,T,C or G

SEQ ID NO: 29086 - DNA, 1069 bp, Homo sapiens; identical to SEQ ID NO: 23215
  misc_feature 1: n = A,T,C or G

SEQ ID NO: 29087 - DNA, 987 bp, Homo sapiens; identical to SEQ ID NO: 23216
  misc_feature 1, 2, 3, 986, 987: n = A,T,C or G

SEQ ID NO: 29088 - DNA, 770 bp, Homo sapiens; identical to SEQ ID NO: 29082

SEQ ID NO: 29089 - DNA, 3545 bp, Homo sapiens; identical to SEQ ID NO: 23217
  misc_feature 3543, 3544, 3545: n = A,T,C or G

SEQ ID NO: 29090 - DNA, 1558 bp, Homo sapiens; identical to SEQ ID NO: 23218
  misc_feature 1, 1551, 1552, 1553, 1554, 1555, 1556, 1557, 1558: n = A,T,C or G

SEQ ID NO: 29091 - DNA, 1133 bp, Homo sapiens; identical to SEQ ID NO: 23219
  misc_feature 1, 1132, 1133: n = A,T,C or G

SEQ ID NO: 29092 - DNA, 1433 bp, Homo sapiens; identical to SEQ ID NO: 23220
  misc_feature 1, 2, 3, 4, 5, 6, 7, 8, 9, 10, 11, 12, 13, 14, 1418, 1419,1420, 1421, 1422, 1423, 1424, 1425, 1426, 1427, 1428, 1429,1430, 1431, 1432, 1433: n = A,T,C or G

SEQ ID NO: 29093 - DNA, 1883 bp, Homo sapiens; identical to SEQ ID NO: 23221

SEQ ID NO: 29094 - DNA, 2859 bp, Homo sapiens; identical to SEQ ID NO: 23222
  misc_feature 1, 2, 3, 4, 5, 2836, 2843, 2859: n = A,T,C or G

SEQ ID NO: 29095 - DNA, 2828 bp, Homo sapiens; identical to SEQ ID NO: 23223
  misc_feature 1, 2, 3, 2827, 2828: n = A,T,C or G

SEQ ID NO: 29096 - DNA, 338 bp, Homo sapiens; identical to SEQ ID NO: 23224

SEQ ID NO: 29097 - DNA, 2105 bp, Homo sapiens; identical to SEQ ID NO: 23225
  misc_feature 1, 2, 3: n = A,T,C or G

SEQ ID NO: 29098 - DNA, 1177 bp, Homo sapiens; identical to SEQ ID NO: 23226
  misc_feature 971, 1176, 1177: n = A,T,C or G

SEQ ID NO: 29099 - DNA, 630 bp, Homo sapiens; identical to SEQ ID NO: 23227
  misc_feature 630: n = A,T,C or G

SEQ ID NO: 29100 - DNA, 1632 bp, Homo sapiens; identical to SEQ ID NO: 23228

SEQ ID NO: 29101 - DNA, 2216 bp, Homo sapiens; identical to SEQ ID NO: 22164
  misc_feature 1, 2, 3, 2215, 2216: n = A,T,C or G

SEQ ID NO: 29102 - DNA, 3470 bp, Homo sapiens; identical to SEQ ID NO: 22163

SEQ ID NO: 29103 - DNA, 1813 bp, Homo sapiens
  misc_feature 1802, 1803, 1804, 1805, 1806, 1807, 1808, 1809, 1810, 1811,1812, 1813: n = A,T,C or G
cgacccacgcgtccggtggcggcggtggcggctgcggcaacagcggggccgatgtgtagttggtgactgcctctccagatgctgaggtgcctgtatcattggcacaggccagtgctgaaccgtaggtggagtaggctgtgccttctgaagcagtatctattcacaatgaagttgcagtctcccgaattccagtcacttttcacagaaggactgaagagtctgacagaattatttgtcaaagagaatcacgaattaagaatagcaggaggagcagtgagggatttattaaatggagtaaagcctcaggatatagattttgccaccactgctacccctactcaaatgaaggagatgtttcagtcggctgggattcggatgataaacaacagaggagaaaagcacggaacaattactgccaggcttcatgaagaaaattttgagattactacactacggattgatgtcaccactgatggaagacatgctgaggtagaatttacaactgactggcagaaagatgcggaacgcagagatctcactataaattctatgtttttaggttttgatggcactttatttgactactttaatggttatgaagatttaaaaaataagaaagttagatttgttggacatgctaaacagagaatacaagaggattatcttagaattttaagatacttcaggttttatgggagaattgtagacaaacctggtgaccatgatcctgagactttggaagcaattgcagaaaatgcaaaaggcttggctggaatatcaggagaaaggatttgggtggaactgaaaaaaattcttgttggtaaccatgtaaatcatttgattcaccttatctatgatcttgatgtggctccttatataggtttacctgctaatgcaagtttagaagaatttgacaaagtcagtaaaaatgttgatggtttttcaccaaagccagtgactcttttggcctcattattcaaagtacaagatgatgtcacaaaattggatttgaggttgaagatcgcgaaagaggagaaaaaccttggcttatttatagttaaaaataggaaagatttaattaaagcaacagatagttcagacccattgaaaccctatcaagacttcattatagattctagggaacctgatgcaactactcgtgtatgtgaactactgaagtaccaaggagagcactgtctcctaaaggaaatgcagcagtggtccattcctccatttcctgtaagtggccatgacatcagaaaagtgggcatttcttcaggaaaagaaattggggctctattacaacagttgcgagaacagtggaaaaaaagtggttaccaaatggaaaaagatgaacttctgagttacataaagaagacctaaaactgatggctactaaaaagcagagcatttctggtaagactaaattttctcccctccctcttaatgaggttttagagactacaccagaataaaagacagtttaggggacctctgtagaacaacaagggtcttattttgtgaattatatatttcaagaactaaacagagatccacctttctggatctgatttatatcactgaaatgtacagttcttttggaatagtttcacctgagaaaacatagttggctattatctatcttaaccggttcaggcttttaaaaaaaactgtttttgcaaagggtagtactaggatttgaaaaagtggtactgctctgaagaaaaacgttattgtgtggggcacttggattacgggttacctaacaagggggtcgagggggcgttttgaatccagaaacnnnnnnnnnnnn

SEQ ID NO: 29104 - DNA, 1693 bp, Homo sapiens; identical to SEQ ID NO: 23231
  misc_feature 1552, 1690, 1691, 1692, 1693: n = A,T,C or G

SEQ ID NO: 29105 - DNA, 1739 bp, Homo sapiens; identical to SEQ ID NO: 23232
  misc_feature 1, 2, 1733, 1734, 1735, 1736, 1737, 1738, 1739: n = A,T,C or G

SEQ ID NO: 29106 - DNA, 947 bp, Homo sapiens; identical to SEQ ID NO: 23233
  misc_feature 1, 4, 8, 947: n = A,T,C or G

SEQ ID NO: 29107 - DNA, 3708 bp, Homo sapiens; identical to SEQ ID NO: 23234
  misc_feature 1, 2, 3701, 3702, 3703, 3704, 3705, 3706, 3707, 3708: n = A,T,C or G

SEQ ID NO: 29108 - DNA, 6247 bp, Homo sapiens; identical to SEQ ID NO: 23235

SEQ ID NO: 29109 - DNA, 432 bp, Homo sapiens; identical to SEQ ID NO: 23236
  misc_feature 1, 2, 3, 429, 430, 431, 432: n = A,T,C or G

SEQ ID NO: 29110 - DNA, 9186 bp, Homo sapiens; identical to SEQ ID NO: 23237
  misc_feature 1, 2, 9186: n = A,T,C or G

SEQ ID NO: 29111 - DNA, 1292 bp, Homo sapiens
  misc_feature 1, 2, 1288, 1289, 1290, 1291, 1292: n = A,T,C or G
nngcagagcaccaatatggccttttggaaggtgacaaagaagactgtctacactggcaccgggcacccgctcaagtcagacattgccaacatctgggactggatgttgacagaagactttcaaatttaatatggtccaagtgtcttcctactcaaggtaaacattatctccaaaattacatttatgattctaatatttggcattgtgtctgtatctaatttaaacagatgttaatggacgtctggccgaaactattatacttttataagatgagctgaatcctcttactttaaaaactggtctttttatttaccctctgtggtagaagagtcaccagcaggttccaaattgatgtgtatgataggaaaaaaaccttaattttaaatataatatagagccttaaactatgccactgggtggcagaggctgtataaaacgcacttgttttcatgcaggagcggggcaagtaaggttgagcctgactgtaaacctagaactgcggaaggactgggacttttgtacaaatttcacatttattttacagcaatcatgctgcatttgtgttagtgttctttataataaaaaacaaagcagcctcctggctggctgtgttacaagtgactcttccttagacagctagaaagatgctgactttgtcaaacttgcatttatatgaaaaccttctgtctctaatatcacagaataaactttctttagatgctgttctttataaaatgtcaaattcttaaactgtcaaatggaaaaagtcactattccctttgttcatggaggactcacccccttaaggacagcggcaaagtatgaagctaaatatctgatggccaaccaggcctcaaaccacccagaggctcagcatctgctgtacctggaacttcaagataaccatgaaatgtaaacgttggcaatccattccagctcttctgctgtactacttgttttatgtgtttatttttgaggcaagatcatgctctgtcagtcacccaggctggaataccgtgacacgatcgtggtcgctacagctccatgtcccaggctcgagcagtctcccacctcagctcctgagtagccggaacaaagaaccaaggctctcttttgaaaaggactgttttctccagcacaggggggaggaaattcccatttctcaagagtcattgaacggtacgggccataaagccggtaaaagtaaaaaagggtcttttaaaattaagttttttctggaaaaacaaccggctcttgggggaaggaaaggacgctccgccttaggaannnnn

SEQ ID NO: 29112 - DNA, 539 bp, Homo sapiens
  misc_feature 1, 2, 3, 4, 35, 539: n = A,T,C or G
nnnnaccgcggccccccctcgaaagtacttctagnaattaattaacgcggggacggcggggagctcctgtgctgtgacgcgtgcatctcctcctaccacattcattgtctaaaccctcccctgcctgacattcccaatggtgaatggctgtgtccccgatgcacatgccccgtgctgaagggtcgagtgcagaagatcctacattggcggtggggggagccacctgtagcagtgccagcccctcaacaggcagatggaaatccagatgtcccacccccccgtcctcttcaaggcagatcagagcgagagttctttgtcaagtgggtaggactatcctactggcactgctcctgggccaaggagcttcagctggaaatcttacatttggttatgtatcgaaactaccagcggaagaatgacatggatgagcccccacccctggactatggctccggcgaggatgatgggaagagcgacaagcgtatagtgaaagacccgcactatgctgagatggaggagaagtactatcgttttggcan

SEQ ID NO: 29113 - DNA, 326 bp, Homo sapiens; identical to SEQ ID NO: 23214
  misc_feature 1, 2, 322, 323, 324, 325, 326: n = A,T,C or G

SEQ ID NO: 29114 - DNA, 378 bp, Homo sapiens; identical to SEQ ID NO: 23241
  misc_feature 1, 80, 81: n = A,T,C or G

SEQ ID NO: 29115 - DNA, 410 bp, Homo sapiens; identical to SEQ ID NO: 23242
  misc_feature 407, 408, 409, 410: n = A,T,C or G

SEQ ID NO: 29116 - DNA, 443 bp, Homo sapiens; identical to SEQ ID NO: 23243
  misc_feature 440, 441, 442, 443: n = A,T,C or G

SEQ ID NO: 29117 - DNA, 1673 bp, Homo sapiens; identical to SEQ ID NO: 23244
  misc_feature 1, 2, 3, 4, 5, 6, 1645, 1646, 1647, 1648, 1649, 1650, 1651,1652, 1653, 1654, 1655, 1656, 1657, 1658, 1659, 1660, 1661,1662, 1663, 1664, 1665, 1666, 1667, 1668, 1669, 1670, 1671,1672, 1673: n = A,T,C or G

SEQ ID NO: 29118 - DNA, 548 bp, Homo sapiens; identical to SEQ ID NO: 23245
  misc_feature 545, 546, 547, 548: n = A,T,C or G

SEQ ID NO: 29119 - DNA, 378 bp, Homo sapiens; identical to SEQ ID NO: 23246
  misc_feature 1: n = A,T,C or G

SEQ ID NO: 29120 - DNA, 550 bp, Homo sapiens; identical to SEQ ID NO: 23247

SEQ ID NO: 29121 - DNA, 689 bp, Homo sapiens; identical to SEQ ID NO: 23248
  misc_feature 1: n = A,T,C or G

SEQ ID NO: 29122 - DNA, 3255 bp, Homo sapiens
gcgtccggtactattcccttagtacagctttaatagctgtactattcccttctttttcaactccagcctttcgattaccaggcattggtattagatactgtgatgtgtgcagttacttcttgcagtccttcccttgaccttgtggccttgaagttcctggcactcccagttccagattagaagtctgagacccacaggtatgcagactgcccagtgccacacagttaggctgtggcaggcaagggccagccaaagacccttaggtctagagcttctctcctactgatttttgcctaatgcttaggtcagcacacatttatggagcttctgctgtatactaggacttatagagctcctgctgcaaacctagtcactggggagaggtaggaaaagaagattgtcagtgtctttggtaatatcagtatacttagaaaggggaaactggcttggagatgagagaggagggatagttgggagccaagcatatcttggggtatagactggggagctcagtgtgtttttagaagaggtgaatggatggccctctttgctgaggacttggtgaatgtttggagcagggtaagctagcagtagctgggtctttattcagcacttatttgctgtgcatcttgtgcatgggcctctgaaaataaggaactggatatagtcccaggccctgcatttgggggatcaggtccaggagggaactggagacaggaactgagtttctatcaagggggatgtccttgaggcctgcatgtaggggggagtccagcaatgccaccctgcacccagggaagtggggttttgctgaccttgttaactactgttagctcctggtttctcatccacccactttactcctttccagatctcaggatggacccaagctctgccggacatggtggtgtcccacctttttgggaaggaagaaatgcagagtaacgtggaagtggtccacacctaccgccagcacattgtgaatgacatgaaccccggcaacctgcacctgttcatcaatgcctacaacagccggcgcgacctggagattgagcgaccaatgccgggaacccacacagtcaccctgcagtgccctgctctgttggtggttggggacagctcgcctgcagtggatgccgtggtggagtgcaactcaaaattggacccaacaaagaccactctcctcaagatggcggactgtggcggcctcccgcagatctcccagccggccaagctcgctgaggccttcaagtacttcgtgcagggcatgggatacatgccctcggctagcatgacccgcctgatgcggtccggcacagcctctggttccagcgtcacttctctggatggcacccgcagccgctcccacaccagcgagggcacccgaagccgctcccacaccagcgagggcacccgcagccgctcgcacaccagcgagggggcccacctggacatcacccccaactcgggtgctgctgggaacagcgccgggcccaagtccatggaggtctcctgctaggcggcctgcccagctgccgcccccggactctgatctctgtagtggccccctcctccccggccccttttcgccccctgcctgccatactgcgcctaactcggtattaatccaaagcttattttgtaagagtgagctctggtggagacaaatgaggtctattacgtgggtgccctctccaaaggcggggtggcggtggaccaaaggaaggaagcaaggcatctccgcatcgcatcgctcttccattaaccagtggccggttgccactctcctcccctccctcagagacaccaaactgcaaaaacaagacgcgtagcagcgacacacttcacaaagccaagcctaggtccgcctgagcatcctggttcaaacgggtgcctggtcagaaggccagccggccacttcccgtttcctctttaactgaggagaagctgatccagtttccggaaacaaaatccttttctcatttggggaggggggtaatagtgacatgcaggcacctcttttaagcaggcaaaacaggaagggggaaaaggtgggattcatgtcgaggctagaggcatttggaacaacaaatctacgtagttaacttgaagaaaccgatttttaaagttggtgcatctagaaagctttgaatgcagaagcaaacaagcttgatttttctagcatcctcttaatgtgcagcaaaagcaggcgacaaaatctcctggctttacagacaaaaatatttcagcaaacgttgggcatcatggtttttgaaggctttagttctgctttctgcctctcctccacagccccaacctcccacccctgatacatgagccagtgattattcttgttcagggagaagatcatttagatttgttttgcattccttagaatggagggcaacattccacagctgccctggctgtgatgagtgtccttgcaggggccggagtaggagcactggggtgggggcggaattggggttactcgatgtaagggattccttgttgttgtgttgagatccagtgcagttgtgatttctgtggatcccagcttggttccaggaattttgtgtgattggcttaaatccagttttcaatcttcgacagctgggctggaacgtgaactcagtagctgaacctgtctgacccggtcacgttcttggatcctcagaactctttgctcttgtcggggtgggggtgggaactcacgtggggagcggtggctgaaaaaatgtaaggattctggaatacatattccatgggactttctttccttttcctggcttctttttttcctgctccctaacctttcgccgaatgggggcagcaccactgacgtttctgggcggcagtgcggctgccaggttcctgtactaatggcttgttacttttcaattaggtcaccggggatttcccatagggaaggttggcgcaagggacttgaacatgggcaaggtcacccattggcaccgggaatacggaacccccgacaaatggacgcaggagaaaaagtcacgacacaccggggagaggaaacaaaacaaacgctgcaccgacgacacacactgtacaggcaccaccggcggcagcatagaaacacaggggtagcagacaacaagaacaggcatgacaaataggccaacataccaagagagcaagacagaactacacacacacacacagttgttgagaacaaaaagccgcgagttcagacagaccaactgacacactcaactagaagagcagcta

SEQ ID NO: 29123 - DNA, 1866 bp, Homo sapiens; identical to SEQ ID NO: 23492

SEQ ID NO: 29124 - DNA, 2019 bp, Homo sapiens; identical to SEQ ID NO: 22489
  misc_feature 2005, 2006, 2007, 2008, 2009, 2010, 2011, 2012, 2013, 2014,2015, 2016, 2017, 2018, 2019: n = A,T,C or G

SEQ ID NO: 29125 - DNA, 686 bp, Homo sapiens; identical to SEQ ID NO: 23251

SEQ ID NO: 29126 - DNA, 4237 bp, Homo sapiens; identical to SEQ ID NO: 23252
  misc_feature 4225: n = A,T,C or G

SEQ ID NO: 29127 - DNA, 1391 bp, Homo sapiens; identical to SEQ ID NO: 23253
  misc_feature 1, 1391: n = A,T,C or G

SEQ ID NO: 29128 - DNA, 3855 bp, Homo sapiens; identical to SEQ ID NO: 20695
  misc_feature 1, 2, 3854, 3855: n = A,T,C or G

SEQ ID NO: 29129 - DNA, 1510 bp, Homo sapiens; identical to SEQ ID NO: 23254

SEQ ID NO: 29130 - DNA, 1321 bp, Homo sapiens; identical to SEQ ID NO: 22053
  misc_feature 1, 2, 1320, 1321: n = A,T,C or G

SEQ ID NO: 29131 - DNA, 2929 bp, Homo sapiens; identical to SEQ ID NO: 21129

SEQ ID NO: 29132 - DNA, 217 bp, Homo sapiens; identical to SEQ ID NO: 23259
  misc_feature 217: n = A,T,C or G

SEQ ID NO: 29133 - DNA, 1013 bp, Homo sapiens; identical to SEQ ID NO: 23260

SEQ ID NO: 29134 - DNA, 1325 bp, Homo sapiens
  misc_feature 1311, 1312, 1313, 1314, 1315, 1316, 1317, 1318, 1319, 1320,1321, 1322, 1323, 1324, 1325: n = A,T,C or G
cacgcgtagccctggacctggcccattcttcatgtccccttcccaagcctccaagcccacatgggcacttgccaagatcagagctccaggggcctccagggacggggttttcagtcctttgggaccatgatccacagagagaaattgatcctacttgagacacaggaagcaacacatgtaatgcaacagccaaacacccagtgatcatctaatgcaacagccaaacagacaagtgattatctaaggcaacagccaaacacccagcgatcatctaatgcaacagccaaacacccagcgatcatctaatgcaacagccaaacacccagcgatcatctaatgcaacagccaaacacccagcgatcatctaatgcaacagccaaacgcccagtgatcatctaatgcaacagccagtcagtgatcacgggaagggccaggtcctatttcaggggctccacccaaagtccccacccacaccaattgaaggacaggacttcaattatcctcatttgcaaaatgaggaaacagaggaactgagagcaaagtgacttgtcccacgcagccgttagaggtagagttggaggtccaccttgaggtgaccaagctgcaaagtctggccactgaacaccagacctaggcaaagatttcccaacccagtttcatctttctgcatgaaatacacacagacgttttttctcttctctacttttatttttatttaattttaaatgctggttgagagccacttcttaacctggggtctgtggacaaaaatcagaaatcaaaattcagagaatccatgaactgggatggggggggaaattacctcttttttttttattgcccttgactgaaaatttcatgtttccttcgggtatgaatgtgacctcacatgcaacacccatgaaatgaccacatcaaatactgttgtcacagacaccttgaaatttacagccgtcaccacttcaaaattatggtgatcagacttgccattcaacgtgttgataatccaagcccaggcacagaacacatttaagaaaacattttgggccgggcacagtggctcacgcctgtaatcccagtacgcggatctccacttttctatataactcctttctcctcttctgtttcatgtcctgcaaattctgtatttttattacactttggaaaaaaaaagaaatgataaacttaatgatgattcttataattaagaaataattttcgtagataaagaagggtatgttgctagctatcaccctaagagatgaagaagagaagaatgtttctaatgaacttcccatttagaaacatcannnnnnnnnnnnnnn

SEQ ID NO: 29135 - DNA, 308 bp, Homo sapiens; identical to SEQ ID NO: 23262
  misc_feature 1, 2, 3, 4: n = A,T,C or G

SEQ ID NO: 29136 - DNA, 948 bp, Homo sapiens; identical to SEQ ID NO: 23263
  misc_feature 934, 943, 944, 945, 946, 947, 948: n = A,T,C or G

SEQ ID NO: 29137 - DNA, 3483 bp, Homo sapiens; identical to SEQ ID NO: 21739

SEQ ID NO: 29138 - DNA, 976 bp, Homo sapiens; identical to SEQ ID NO: 23058
  misc_feature 974, 975, 976: n = A,T,C or G

SEQ ID NO: 29139 - DNA, 1807 bp, Homo sapiens; identical to SEQ ID NO: 23265
  misc_feature 1, 1719, 1720, 1721, 1722, 1723, 1724, 1725, 1726, 1727,1728, 1729, 1730, 1731, 1732, 1733, 1734, 1735, 1736, 1737,1738, 1739, 1740, 1741, 1742, 1743, 1744, 1745, 1746, 1747,1748: n = A,T,C or G

SEQ ID NO: 29140 - DNA, 5208 bp, Homo sapiens; identical to SEQ ID NO: 23266
  misc_feature 5207, 5208: n = A,T,C or G

SEQ ID NO: 29141 - DNA, 483 bp, Homo sapiens
  misc_feature 1, 2, 3, 4, 5, 460, 461, 462, 463, 464, 465, 466, 467, 468,469, 470, 471, 472, 473, 474, 475, 476, 477, 478, 479, 480,481, 482, 483: n = A,T,C or G
nnnnncagaaaagcttcctagcttatctccctgcttcatatctctcccttctttaccttcatttcatcctgttggctgctgccaccaaatctgtctagaatcctgctttacaggatcatgtaaatgctcaaagatgtaatgtagttctttgttcctgctttctctttcagtattaaactctcctttgatattatgtggcttttatttcagtgccatacatgttattgttttcaacctagaaacctttatccctgcttatctgaaacttcccaacttccctgttctttaagacttttttttttttttttttgagacagagtctcgctctgtcgcccaggctggagggcagtggcacgatctcagctcactgcaagctccaactcccgggttcacgccattctcctgcctcagccttccaagtagctgggactacaggtgcccgccaccgtgcccggctaannnnnnnnnnnnnnnnnnnnnnnn

SEQ ID NO: 29142 - DNA, 3309 bp, Homo sapiens; identical to SEQ ID NO: 23267
  misc_feature 3309: n = A,T,C or G

SEQ ID NO: 29143 - DNA, 1852 bp, Homo sapiens; identical to SEQ ID NO: 23268
  misc_feature 1, 2, 3, 4, 5, 6, 7, 8, 9, 1841, 1842, 1843, 1844, 1845,1846, 1847, 1848, 1849, 1850, 1851, 1852: n = A,T,C or G

SEQ ID NO: 29144 - DNA, 3519 bp, Homo sapiens; identical to SEQ ID NO: 23120
  misc_feature 1, 2, 3516, 3517, 3518, 3519: n = A,T,C or G

SEQ ID NO: 29145 - DNA, 7113 bp, Homo sapiens; identical to SEQ ID NO: 23270
  misc_feature 1, 2, 7103, 7104, 7105, 7106, 7107, 7108, 7109, 7110, 7111,7112, 7113: n = A,T,C or G

SEQ ID NO: 29146 - DNA, 7113 bp, Homo sapiens; identical to SEQ ID NO: 23270
  misc_feature 1, 2, 7103, 7104, 7105, 7106, 7107, 7108, 7109, 7110, 7111,7112, 7113: n = A,T,C or G

SEQ ID NO: 29147 - DNA, 1244 bp, Homo sapiens; identical to SEQ ID NO: 23272
  misc_feature 1: n = A,T,C or G

SEQ ID NO: 29148 - DNA, 2499 bp, Homo sapiens
  misc_feature 1, 2, 3, 4, 5, 6, 2497, 2498, 2499: n = A,T,C or G
nnnnnnacggctaggtacgaggcctgggtgttatctgctaagtgagatgggaaccactggatgggtttgaacagaggagtgccttgattgatttatattttgcaagggtcattctagctgccatattgtgaaaaactttagtggacaagggcagaaggaagagggaagacctgttaggaagctactgcaaggttccaggcttgggcctgggccacagcaacagcagtggtcaaatatctagatttattttgaaaagagccaataggatttgctgagagtttgaatgtggagtgtaagagaaggaagagttaatgatgacattaaggtttttggcctgaatagcaggaaagatggagttaccagttactgaaatagggaaggatgggctgggtaagtaaggaatttggtgcaaagcaggctgtctgtggttggaatgggaggttctggctgcaaatcaaagtggagagttctctcaggtcaggtctgcagcagagctcgagacagggatctgaatgcacttggtttattgttgggggtgctctcagaaggaacctgtgaaagcctttatcagtcatttattggctgtgagaagttctctgggagtgtgggtacatttgaaggcaagtgacttcagttgagggcaagtctctggaaaagaggctgtaggcatctggcagctaccatgcatggtagtgtgttgggggtgggggtcctgggcactggctgtgtgaagggatctggcagggcaccacagcgccccctactgaaccatcagcatgtcagtggcatttaaagccatgcagctggaggggccactgagattgtctctgagtattactgagaagcaacagaaaagagccatggatggagcccttgggctctctgggaaatgggaaatcagccaaaggactgagaaggagttaccttaaggtcagagaaaaccaagagagtgtggtgttctggaagctgagctttctttattcaacctcattcccttctccaaataagccacttgtgtagttgggcccctccagggttgaaggcaagaggagaaaggcacagcgtttgggaaacaagacttttcctgcaatagcctgggaaggaataaaaggatagagtgtttgggtttttgtgtaatggtggttaattggggtggaacactcacacgttgtgctttttctgggcttcccttatcccccagaacactctaccaacctcggggaactcgggcacatccttctgtttctccttcagctctatcctgctttcctcatcccttctgacaccacgtcctcactcacctgcacaagaatccctgcatcaggttctcctttgagggtacccacccaggacagtcccctaccacttctgtcttgggctgaagttgcccacgtccacaaaatctgtactcccagcgggggtgtttggcccgaggagtcagtgttattactggtggatgcaccgtgtccacagcagcccccaatcccagcgatgcgtcagatcttacgtggcttcctgctgggggagatggccttcacccacgggatgccgggttctcctttctttcctcaccccaacctttactccaccagagaaacttccttttgaactcagtggggaagagggtgatgagacaggactagaaagtagtgggggacccagcgagtggacgccctgctccgggattcctgagtctgtaaatagtgtgcccagcagctgtgaactccccttatagcctcaggctgcagtgtccttcccagctgtgtgagaaaatgaaagccgacgtccacagggacccaggcagggttgggtgttgtgactcactccacctctgtgccctgcagaggtactgttgggtccttgtcttgtgagcctggggtgagctctctgtacatgttgttgttccacgtatgggttgacttggcatgctggggggtcctcgttcactctctgaagttggcctcctttcactggggattgaaaagcacctccacccctaccctagtgatgtcccctgaggacccgggtgatagtacagtcaatattgtcagtactttgctttgattgaaggctgtagagctgagttaccaaaatttctatttcaaaggaaaccaaaccttaaaaaaaaaaacaaaaactgggctgggtcttccaaacctaccatgaaaccctggtgtgcaggctgcactcaatgacctcaacccaacaccgccctgagtgtgcttcttggaagagcctagaagattcctggatggagaccccattggttcagcctcaagtctggcccgtcttcgaaaaaacaaacacatttgtaagctttgtgggagcttccaggcctgctctaagatgccttgcttgtcctttgacccatcagcatggaccacagtggttgctgtttggttctgcaggctggtggggaggccgcccatcgtggtggggcatctgtccagccccattgccactcagggcatccaaacaggaggcacccgctgggaannn

SEQ ID NO: 29149 - DNA, 1813 bp, Homo sapiens; identical to SEQ ID NO: 23273
  misc_feature 1, 2, 1696, 1738, 1760, 1809, 1810, 1811, 1812, 1813: n = A,T,C or G

SEQ ID NO: 29150 - DNA, 1138 bp, Homo sapiens; identical to SEQ ID NO: 23274
  misc_feature 1, 1129, 1130, 1131, 1132, 1133, 1134, 1135, 1136, 1137,1138: n = A,T,C or G

SEQ ID NO: 29151 - DNA, 3474 bp, Homo sapiens; identical to SEQ ID NO: 23059
  misc_feature 1, 2, 3, 4, 5, 3472, 3473, 3474: n = A,T,C or G

SEQ ID NO: 29152 - DNA, 1310 bp, Homo sapiens; identical to SEQ ID NO: 23276
  misc_feature 1, 2, 3, 4, 5, 6, 7, 8, 9, 10, 11, 1308, 1309, 1310: n = A,T,C or G

SEQ ID NO: 29153 - DNA, 1260 bp, Homo sapiens; identical to SEQ ID NO: 23277
  misc_feature 1, 2, 44, 1256, 1257, 1258, 1259, 1260: n = A,T,C or G

SEQ ID NO: 29154 - DNA, 1439 bp, Homo sapiens; identical to SEQ ID NO: 23278
  misc_feature 1, 1435, 1436, 1437, 1438, 1439: n = A,T,C or G

SEQ ID NO: 29155 - DNA, 3228 bp, Homo sapiens; identical to SEQ ID NO: 22886
  misc_feature 1, 2, 3216, 3217, 3218, 3219, 3220, 3221, 3222, 3223, 3224,3225, 3226, 3227, 3228: n = A,T,C or G

SEQ ID NO: 29156 - DNA, 993 bp, Homo sapiens; identical to SEQ ID NO: 23280
  misc_feature 992, 993: n = A,T,C or G

SEQ ID NO: 29157 - DNA, 1866 bp, Homo sapiens; identical to SEQ ID NO: 23281
  misc_feature 1862, 1863, 1864, 1865, 1866: n = A,T,C or G

SEQ ID NO: 29158 - DNA, 1047 bp, Homo sapiens; identical to SEQ ID NO: 23075
  misc_feature 1045, 1046, 1047: n = A,T,C or G

SEQ ID NO: 29159 - DNA, 590 bp, Homo sapiens; identical to SEQ ID NO: 23283

SEQ ID NO: 29160 - DNA, 942 bp, Homo sapiens; identical to SEQ ID NO: 23284
  misc_feature 1, 916, 917, 918, 919, 920, 921, 922, 923, 924, 925, 926,927, 928, 929, 930, 931, 932, 933, 934, 935, 936, 937, 938,939, 940, 941, 942: n = A,T,C or G

SEQ ID NO: 29161 - DNA, 2647 bp, Homo sapiens; identical to SEQ ID NO: 23285
  misc_feature 1, 2640, 2641, 2642, 2643, 2644, 2645, 2646, 2647: n = A,T,C or G

SEQ ID NO: 29162 - DNA, 930 bp, Homo sapiens; identical to SEQ ID NO: 23286
  misc_feature 1, 2, 926, 927, 928, 929, 930: n = A,T,C or G

SEQ ID NO: 29163 - DNA, 1240 bp, Homo sapiens; identical to SEQ ID NO: 23287
  misc_feature 1240: n = A,T,C or G

SEQ ID NO: 29164 - DNA, 346 bp, Homo sapiens; identical to SEQ ID NO: 23288

SEQ ID NO: 29165 - DNA, 835 bp, Homo sapiens; identical to SEQ ID NO: 23289
  misc_feature 1, 831, 832, 833, 834, 835: n = A,T,C or G

SEQ ID NO: 29166 - DNA, 351 bp, Homo sapiens; identical to SEQ ID NO: 23290

SEQ ID NO: 29167 - DNA, 2233 bp, Homo sapiens; identical to SEQ ID NO: 23291
  misc_feature 2233: n = A,T,C or G

SEQ ID NO: 29168 - DNA, 646 bp, Homo sapiens; identical to SEQ ID NO: 23292
  misc_feature 1, 2, 3, 4, 5, 6, 7, 645, 646: n = A,T,C or G

SEQ ID NO: 29169 - DNA, 152 bp, Homo sapiens; identical to SEQ ID NO: 23293

SEQ ID NO: 29170 - DNA, 3470 bp, Homo sapiens; identical to SEQ ID NO: 22163

SEQ ID NO: 29171 - DNA, 739 bp, Homo sapiens; identical to SEQ ID NO: 23296

SEQ ID NO: 29172 - DNA, 689 bp, Homo sapiens; identical to SEQ ID NO: 23062
  misc_feature 1, 2, 3, 688, 689: n = A,T,C or G

SEQ ID NO: 29173 - DNA, 616 bp, Homo sapiens; identical to SEQ ID NO: 20971
  misc_feature 1, 605, 606, 607, 608, 609, 610, 611, 612, 613, 614, 615,616: n = A,T,C or G

SEQ ID NO: 29174 - DNA, 2548 bp, Homo sapiens; identical to SEQ ID NO: 22221
  misc_feature 1, 2547, 2548: n = A,T,C or G

SEQ ID NO: 29175 - DNA, 337 bp, Homo sapiens; identical to SEQ ID NO: 23299

SEQ ID NO: 29176 - DNA, 452 bp, Homo sapiens; identical to SEQ ID NO: 22027
  misc_feature 1, 441, 442, 443, 444, 445, 446, 447, 448, 449, 450, 451,452: n = A,T,C or G

SEQ ID NO: 29177 - DNA, 420 bp, Homo sapiens; identical to SEQ ID NO: 22040

SEQ ID NO: 29178 - DNA, 4034 bp, Homo sapiens; identical to SEQ ID NO: 23303
  misc_feature 1, 2, 3, 4, 5, 6, 7, 8, 9, 10, 11, 12, 13, 14, 15, 16, 17,18, 19, 20: n = A,T,C or G

SEQ ID NO: 29179 - DNA, 1185 bp, Homo sapiens; identical to SEQ ID NO: 21532
  misc_feature 1, 2, 3, 4, 5, 6, 7, 8, 9, 10, 11, 12, 13, 14, 15, 16, 17,18, 19, 20, 21, 22: n = A,T,C or G

SEQ ID NO: 29180 - DNA, 2984 bp, Homo sapiens; identical to SEQ ID NO: 23305
  misc_feature 1, 2, 71, 2983, 2984: n = A,T,C or G

SEQ ID NO: 29181 - DNA, 2411 bp, Homo sapiens
ataggagtcaccacgcgtccgggcggcacagggccgaggcgtagtgtgggtgactcctccgttccttgggtcccgtcgtctgtgatactgcagtgcagccatggcagaaccgcagcccccgtccggcggcctcacggacgaggccgccctcagttgctgctccgacgcggaccccagtaccaaggattttctattgcagcagaccatgctacgagtgaaggatcctaagaagtcactggatttttatactagagttcttggaatgacgctaatccaaaaatgtgattttcccattatgaagttttcactctacttcttggcttatgaggataaaaatgacatccctaaagaaaaagatgaaaaaatagcctgggcgctctccagaaaagctacacttgagctgacacacaattggggcactgaagatgatgcgacccagagttaccacaatggcaattcagaccctcgaggattcggtcatattggaattgctgttcctgatgtatacagtgcttgtaaaaggtttgaagaactgggagtcaaatttgtgaagaaacctgatgatggtaaaatgaaaggcctggcatttattcaagatcctgatggctactggattgaaattttgaatcctaacaaaatggcaaccttaatgtagtgctgtgagaattctcctttgagatttcagaagaaaggaaacaatgtgattcaagatatttacataccagaagcatctaggactgatggatcactgtcccgattcaaattattcttcagtccatttccccttcctatttcagctgttccttttcacctaactgttcagtcattctggttttcaagcagtgctttatctcatgtccttgaatatagttgtgtaactttattttttaggtaataattagaacagttcccttcagaggctgcatttgccttcttctgccacctaaatattacttcccttcaaatctgcctttgaatcatcatttttaaaaaaaaattaacatgtttttgttgtagttatcttctggggtttcaattcctcagaaacaacttttttcacaacggaaaggaaagaacactagtgttctttcagtaaagtacaaagtgtttattttacaaaagagtaggtactcttgagagcaattcaaatcatgctgacaaggatactgatagaaaaagtgatttcttcttattataaagtacatttaaagttcaaggactaaccttatttatttgggaaaggggaggaggaaggaaatgatatggtacccagacactgggctaggctgcaactttatctcatttaatactcccagctgtcatgtgagaaagaaagcaggctaggcatgtgaaatcactttcatggattattaatggatttaagagggcatcaatcagctcaactcaagatttcataatcatttttagtatttagattgtgcctcaaagttgtagtacctcacaatacctccactggtttcctgttgtaaaaaccttcagtgagtttgaccattgtgctcttggctcttgggctggagtaccgtggtgagggagtaaacactagaagtctttagtacaaaactgctctagggacacctggtgattcctacacaagtgatgtttatatttctcataaagagtcttccctatcccaaggtcttcatgatgccagtagccatatatgataaattatgttcagtgataacttagttatcagaaatcagctcagtggtcttccccgccatgattcacatttgatgagtttttaaaaatcaaagtgattttgaaaatctctaatggctcagaaaataaaaacatccagtttgtggatgactatatttagatttctctagactctagtggaagacctttggaaaggccatgccaaccgtgcttgtactgctagaagcactttatgtttcctttttgggtgaaatggatttatgtgagtgctttaaacaaatagcaatacttatagactgaaataaaatgaaacttcaaataagaaaaaaaaaaaaaaaaaaaaacaaaaaaaaaaaaaaaaccaaaacaaaaaaaaaaaaacaacaaacaaaaaaaacaaaaaaaaaaaaacaaaagaagaagaaagaagaaaaaaaaaaaaaaaagacacacaaccaacacacacacagaacaaaccagcaaaagagggggcgggcgagaacgacacaacacacccccgggggaagccaaccaacgcacgacaaccaccaagctgaagagcaagcggagagaacagaaaaaagaggagaaacaaaacacacacgacaccgagcgcgaaatcacaaaacagcagcagacagagaaacgaacaagcgcgtacataagcgagaagaaaaccctcggaggggcaggaaagagggcaccgcaaaagagaagaagacgcgaga

SEQ ID NO: 29182 - DNA, 3820 bp, Homo sapiens; identical to SEQ ID NO: 22140

SEQ ID NO: 29183 - DNA, 3483 bp, Homo sapiens; identical to SEQ ID NO: 21739

SEQ ID NO: 29184 - DNA, 457 bp, Homo sapiens
  misc_feature 456, 457: n = A,T,C or G
acgcggggctcccttcttccgagcctctcctctggccgccgcgcgggagagaggccgagatggcagatgagattgccaaggctcaggtcgctcggcctggtggcgacacgatctttgggaagatcatccgcaaggaaataccagccaaaatcatttttgaggatgaaccggggccttgctttccatgacatttcccctcaagcaccaacacattttctggtgatacccaagaaacatatatcccagatttctgtggcagaagatgatgatgaaagtcttcttggacacttaatgattgttggcaagaaatgtgctgctgatctgggcctgaataagggttatcgaatggtggtgaatgaaggttcagatggtggacagtctgtctatcacgttcatctccatgttcttggaggtcggcaaatgcattggcctcctggttaagcacgttttggggann

SEQ ID NO: 29185 - DNA, 894 bp, Homo sapiens; identical to SEQ ID NO: 23308

SEQ ID NO: 29186 - DNA, 1301 bp, Homo sapiens
  misc_feature 1296, 1297, 1298, 1299, 1300, 1301: n = A,T,C or G
agctccaccgcggtggccggccgcccgggcaggtacaaccagtgcgagaagaagaacgccctggcccaatatcaggagatggagaagaaagtcagcctactcaaggacaatagctctctggaatttgactcccctcaggtgctggaggaacatcccagttcacaaagcccccatctcttcctctggagccagagcctgcggtggaatcaagtccaactgaaacatcagaacaaataagagagaaataagaatagaatgaatgaccccaaaatagggttttcttgggcgaggatgtgctggattaggaaaggtgacatgacacaggcagagcagagtggcacccaccacagaatacagtgtgtgttattacgaggagccagcagttgagcctaaggtccttctacctacctggtattggcatttgaggtcggaaaccctctactgccccataagccaggaaaagtgaaaagagaacacagttcctttaagaactggcagcaaggcttgaggccttatgtatgtagctgagtcagcaaggtacatgatgctgtctgctttcaaaaggacttttctctcctagctgactgactccttccttagttcaaggaacagctgagacagacctctgctgagtagctctgtgatgacaaagccttggtttaactgaggtgatcctcaggttgtgaggtttattagtccccaaggcaaacacaaatattagattaataatccaactttaatagtatacatttaaaagaaaaaaaacaaaagccctggaagttgaggccaagcctgctgagtattgcagctgcatttgcccaaagggaatccagaacaagtccctccctgtattttgttcttgagaggggtcagtctagaagctagatcctatcaggatgaggagcagcagcccagggcttgtctggatcagcaccaacgattttaaagaaaaaaggaagagtttcttagatgagtaattgttattgaagatagtcagtgataaccactgaccagatgctatcaatacactatgtgtcctttttagaataaagattacatatcatcattcctttggggaaaattgttattcaggtataaaaacaagagatcataataaaaacctaaaagaacctatgaaaaaaaaaaaaaaaaaaagttggaccttggcccctgggggacccccattgcccctatagggggagcttttacccccccccctgggccggtggttacacaagctggaaaaaaaaaaaattcttctttgtgaagggccttctttttgttttaaaccagaannnnnn

SEQ ID NO: 29187 - DNA, 1761 bp, Homo sapiens; identical to SEQ ID NO: 23255
  misc_feature 1746, 1747, 1748, 1749, 1750, 1751, 1752, 1753, 1754, 1755,1756, 1757, 1758, 1759, 1760, 1761: n = A,T,C or G

SEQ ID NO: 29188 - DNA, 3113 bp, Homo sapiens; identical to SEQ ID NO: 23309
  misc_feature 1, 3111, 3112, 3113: n = A,T,C or G

SEQ ID NO: 29189 - DNA, 729 bp, Homo sapiens; identical to SEQ ID NO: 23310
  misc_feature 729: n = A,T,C or G

SEQ ID NO: 29190 - DNA, 902 bp, Homo sapiens
cgagcggccgccccgggcaggtctcggagcgggcggcggcgttggcggcttgtgcagcaatggccaagatcaaggctcgagatcctcgcgggaagaagaaggaggagctgctgaaacagctggacgacctgaaggtggagctgtcccagctgcgcgtcgccaaagtgacaggcggtgcggcctccaagctctctaagatccgagtcgtccggaaatccattgcccgtgttctcacagttattaaccagactcagaaagaaaacctcaggaaattctacaaggggcaagaagtaccagggcccctggacctgcggctaagaagacactgtgccaatgcgcggggggttcaaaccaagcaccgaggaggaaccttgaatgaaccaagaaagcaggccagcgaaaaggaggggttggtaccccgctgcggaaggtaccgcggttcagggccctggagggggcgcttggtcaaataaaggcacagctgttgaaacacaaaaaaaaatatctaaaaacaccaatttgttgggggcgcgtggggcacaagaaaacgtttctaaacccattttgcggtgtggggcgcgggcggcccagataggtaagtgacaacacgggcccatgtgggtgcacagaggagcaaccgggaccagacacatggcgcgggtgacttccccaccaataaaaaaacgcccggggcgcacgcggaggtctggaacacaccagaaggtgtccggagccctaggggccctaccacgggtccggggacgataacggcgcacggggaggaaaacagagagcacgcaaacacgatcagcagacagacacagacaagagagacaaagtcgacagcgacacactaacagcagagcaccgaaccccgacaacaacgagacaagcgagtcaga

SEQ ID NO: 29191 - DNA, 331 bp, Homo sapiens; identical to SEQ ID NO: 23312
  misc_feature 331: n = A,T,C or G

SEQ ID NO: 29192 - DNA, 570 bp, Homo sapiens; identical to SEQ ID NO: 23313
  misc_feature 1, 2, 3, 531, 534, 570: n = A,T,C or G

SEQ ID NO: 29193 - DNA, 4231 bp, Homo sapiens; identical to SEQ ID NO: 23314

SEQ ID NO: 29194 - DNA, 2318 bp, Homo sapiens; identical to SEQ ID NO: 23315
  misc_feature 1, 2, 3, 4, 5, 2317, 2318: n = A,T,C or G

SEQ ID NO: 29195 - DNA, 4444 bp, Homo sapiens; identical to SEQ ID NO: 22727

SEQ ID NO: 29196 - DNA, 2438 bp, Homo sapiens; identical to SEQ ID NO: 24567
  misc_feature 1, 2, 3, 4, 5, 6, 7, 2411, 2412, 2413, 2414, 2415, 2416,2417, 2418, 2419, 2420, 2421, 2422, 2423, 2424, 2425, 2426,2427, 2428, 2429, 2430, 2431, 2432, 2433, 2434, 2435, 2436,2437, 2438: n = A,T,C or G

SEQ ID NO: 29197 - DNA, 1517 bp, Homo sapiens
  misc_feature 1, 2, 3, 1513, 1514, 1515, 1516, 1517: n = A,T,C or G
nnngtcaaatagggatctacatcatccaagttggttggcatccctggcctgggggacagcggttggattgcagccctgtctacactggataatcattccctggccatatcagtcatcatgatggtggtggctggcttcttcaccctctgtgccgtgctctcagtcttcctcctgcagcgggtgcactccctctaccgacggacaggggccagcttccagcaggcccaggaggagttttcccagggcatcttcagcagcagaaccttccacagagctgcttcatctgctgcccaaggagccttccaggggaattagtcctcctctcttctctccccctcagcctttctctcgcctgccttctgagctgcactttccgtgggtgccttatgtggtggtggttgtgcccagcacagacctggcagggttcttgccgtggctcttcctcctccctcagcgaccagctctccctggaacgggagggacagggaattttttccccctctatgtacaaaaaaaaacaaagctctctttccttctctggtgatggtttggtaggattcttttgtctctggaagcagtgggactgaagttctcttcgtcctgtgcacacacagacacccccacacagttgggatcacaggctgacctgggcccatcccagctggagctttctgccagggtcctgggccttgactcccccaccctgcaggcctggcctgaatctggcttcttagacacagcccagtccttcctgcctgggctgggaataagcctctcacaggttctggtggacagatctgttccccaggtcactccagtggtctccaggcttccagagaaggctggttgcctcaagctcttctctgcctcataaacggatccagagaaggctggttgccttaagctcttccctgcctcgtgttcctgagaaacggattaatagccctttatccccctgcaccctcctgcaggggatggcactttgagccctctggagccctccccttgctgagccttactctcttcagactttctgaatgtacaatgccgttggttgggatttggggactggaagggaccaaggacactgaccccaagctgtcctgcctagcgtccagcgtcttctaggagggtggggtctgcctgtcctggtgtggttggtttggccctgtttgctgtgactacccccccccctccccgaaccgagggacggctgcctttgtctctgcctcagatgccacctgccccgcccatgctccccatcagcagcatccagactttcaggaagggcaggacagcagtccaaaccgcatcctcagagactgtaaggcactctggaggcgccaataccggggcggtgcacccgggggtggcgtgctggcagtggaggccctaaaaaaaccgccaggcgggggggggggggcccaaaaccgctgcggaaggcccagaatgagggggaacccgtcctacaattctggtggaccaaacgcgggtcggcgccgccacgcgacannnnn

SEQ ID NO: 29198 - DNA, 1722 bp, Homo sapiens; identical to SEQ ID NO: 23317
  misc_feature 1, 1706, 1707, 1708, 1709, 1710, 1711, 1712, 1713, 1714,1715, 1716, 1717, 1718, 1719, 1720, 1721, 1722: n = A,T,C or G

SEQ ID NO: 29199 - DNA, 1506 bp, Homo sapiens; identical to SEQ ID NO: 23318
  misc_feature 1467, 1476, 1497: n = A,T,C or G

SEQ ID NO: 29200 - DNA, 3053 bp, Homo sapiens; identical to SEQ ID NO: 23319

SEQ ID NO: 29201 - DNA, 2473 bp, Homo sapiens; identical to SEQ ID NO: 23320
  misc_feature 1, 2, 3, 2472, 2473: n = A,T,C or G

SEQ ID NO: 29202 - DNA, 2051 bp, Homo sapiens; identical to SEQ ID NO: 22585
  misc_feature 2049, 2050, 2051: n = A,T,C or G

SEQ ID NO: 29203 - DNA, 331 bp, Homo sapiens; identical to SEQ ID NO: 23322

SEQ ID NO: 29204 - DNA, 1309 bp, Homo sapiens; identical to SEQ ID NO: 23323
  misc_feature 1, 1308, 1309: n = A,T,C or G

SEQ ID NO: 29205 - DNA, 369 bp, Homo sapiens; identical to SEQ ID NO: 21651
  misc_feature 1, 2, 3, 4, 5, 6, 7, 8: n = A,T,C or G

SEQ ID NO: 29206 - DNA, 2540 bp, Homo sapiens; identical to SEQ ID NO: 23325
  misc_feature 1, 2, 2540: n = A,T,C or G

SEQ ID NO: 29207 - DNA, 1311 bp, Homo sapiens; identical to SEQ ID NO: 23326

SEQ ID NO: 29208 - DNA, 2781 bp, Homo sapiens; identical to SEQ ID NO: 23327
  misc_feature 1, 2, 3, 4, 2779, 2780, 2781: n = A,T,C or G

SEQ ID NO: 29209 - DNA, 2054 bp, Homo sapiens; identical to SEQ ID NO: 23328
  misc_feature 1, 2049, 2050, 2051, 2052, 2053, 2054: n = A,T,C or G

SEQ ID NO: 29210 - DNA, 4052 bp, Homo sapiens
  misc_feature 1, 2, 3, 4050, 4051, 4052: n = A,T,C or G
nnngaggcgtgggaggaagcgcggctgctgtcgcccagcgccgccccgtcgtcgtctgccttcgcttcacggcgccgagccgcggtccgagcagaactggggctcccttgcatcttccagttacaaattcagtgccttctgcagtttccccagagctcctcaagaataacggaagggagaatatgacagatacctagcatctagcaaaataatggcagctgcttaccttgaccccaacttgaatcacacaccaaattcgagtactaagactcacctgggtactggtatggaacgttctcctggtgcaatggagcgagtattaaaggtctttcattattttgaaagcaatagtgagccaaccacctgggccagtattatcaggcatggagatgctactgatgtcaggggcatcattcagaagatagtggacagtcacaaagtaaagcatgtggcctgctatggattccgcctcagtcacctgcggtcagaggaggttcactggcttcacgtggatatgggcgtctccagtgtgagggagaagtatgagcttgctcacccaccagaggagtggaaatatgaattgagaattcgttatttgccaaaaggatttctaaaccagtttactgaagataagccaactttgaatttcttctatcaacaggtgaagagcgattatatgttagagatagctgatcaagtggaccaggaaattgctttgaagttgggttgtctagaaatacggcgatcatactgggagatgcggggcaatgcactagaaaagaagtctaactatgaagtattagaaaaagatgttggtttaaagcgattttttcctaagagtttactggattctgtcaaggccaaaacactaagaaaactgatccaacaaacatttagacaatttgccaaccttaatagagaagaaagtattctgaaattctttgagatcctgtctccagtctacagatttgataaggaatgcttcaagtgtgctcttggttcaagctggattatttcagtggaactggcaatcggcccagaagaaggaatcagttacctaacggacaagggctgcaatcccacacatcttgctgacttcactcaagtgcaaaccattcagtattcaaacagtgaagacaaggacagaaaaggaatgctacaactaaaaatagcaggtgcacccgagcctctgacagtgacggcaccatccctaaccattgcggagaatatggctgacctaatagatgggtactgccggctggtgaatggaacctcgcagtcatttatcatcagacctcagaaagaaggtgaacgggctttgccatcaataccaaagttggccaacagcgaaaagcaaggcatgcggacacacgccgtctctgtgtcagaaacagatgattatgctgagattatagatgaagaagatacttacaccatgccctcaaccagggattatgagattcaaagagaaagaatagaacttggacgatgtattggagaaggccaatttggagatgtacatcaaggcatttatatgagtccagagaatccagctttggcggttgcaattaaaacatgtaaaaactgtacttcggacagcgtgagagagaaatttcttcaagaagccttaacaatgcgtcagtttgccatcctggaattggtgcagatatataagtgatcctaatgttgatgcctgcccagaccccaggaatgcagagttaacaatgcgtcagtttgaccatcctcatattgtgaagctgattggagtcatcacagagaatcctgtctggataatcatggagctgtgcacacttggagagctgaggtcatttttgcaagtaaggaaatacagtttggatctagcatctttgatcctgtatgcctatcagcttagtacagctcttgcatatctagagagcaaaagatttgtacacagggacattgctgctcggaatgttctggtgtcctcaaatgattgtgtaaaattaggagactttggattatcccgatatatggaagatagtacttactacaaagcttccaaaggaaaattgcctattaaatggatggctccagagtcaatcaattttcgacgttttacctcagctagtgacgtatggatgtttggtgtgtgtatgtgggagatactgatgcatggtgtgaagccttttcaaggagtgaagaacaatgatgtaatcggtcgaattgaaaatggggaaagattaccaatgcctccaaattgtcctcctaccctctacagccttatgacgaaatgctgggcctatgaccccagcaggcggcccaggtttactgaacttaaagctcagctcagcacaatcctggaggaagagaaggctcagcaagaagagcgcatgaggatggagtccagaagacaggccacagtgtcctgggactccggagggtctgatgaagcaccgcccaagcccagcagaccgggttatcccagtccgaggtccagcgaaggattttatcccagcccacagcacatggtacaaaccaatcattaccaggtttctggctaccctggttcacatggaatcacagccatggctggcagcatctatccaggtcaggcatctcttttggaccaaacagattcatggaatcatagacctcaggagatagcaatgtggcagcccaatgtggaggactctacagtattggacctgcgagggattgggcaagtgttgccaacccatctgatggaagagcgtctaatccgacagcaacaggaaatggaagaagatcagcgctggctggaaaaagaggaaagatttctgattggaaaccaacatatatatcagcctgtgggtaaaccagatcctgcagctccaccaaagaaaccgcctcgccctggagctcccggtcatctgggaagccttgccagcctcagcagccctgctgacagctacaacgagggtgtcaagcttcagccccaggaaatcagcccccctcctactgccaacctggaccggtcgaatgataaggtgtacgagaatgtgacgggcctggtgaaagctgtcatcgagatgtccagtaaaatccagccagccccaccagaggagtatgtccctatggtgaaggaagtcggcttggccctgaggacattattggccactgtggatgagaccattcccctcctaccagccagcacccaccgagagattgagatggcacagaagctattgaactctgacctgggtgagctcatcaacaagatgaaactggcccagcagtatgtcatgaccagcctccagcaagagtacaaaaagcaaatgctgactgctgctcacgccctggctgtggatgccaaaaacttactcgatgtcattgaccaagcaagactgaaaatgcttgggcagacgagaccacactgagcctcccctaggagcacgtcttgctaccctcttttgaagatgttctctagccttccaccagcagcgaggaattaaccctgtgtcctcagtcgccagcacttacagctccaacttttttgaatgaccatctggttgaaaaatctttctcatataagtttaaccacactttgatttgggttcattttttgttttgtttttttcaatcatgatattcagaaaaatccaggatccaaaatgtggcgtttttctaagaatgaaaattatatgtaagcttttaagcatcatgaagaacaatttatgttcacattaagatacgttctaaagggggatggccaaggggtgacatcttaattcctaaactaccttagctgcatagtggaagaggagagcatgaagcaaagaattccaggaaaccaagaggctgagaattcttttgtctaccatagaattattatccagactggaatttgtttgttagaacacccttcagtgcaatatgctatcccctttacaaagaataagcatttgggactacgttcaaaaaaaccctgggccgcgtaatagggagagaacgggggaaagacaacacccttcaaagccgtgaatctaacgagccagaacctgtaaaagccgcgtcgcggccaatccacannn

SEQ ID NO: 29211 - DNA, 4345 bp, Homo sapiens; identical to SEQ ID NO: 23329

SEQ ID NO: 29212 - DNA, 382 bp, Homo sapiens; identical to SEQ ID NO: 23330

SEQ ID NO: 29213 - DNA, 1916 bp, Homo sapiens; identical to SEQ ID NO: 23331
  misc_feature 1914, 1915, 1916: n = A,T,C or G

SEQ ID NO: 29214 - DNA, 3221 bp, Homo sapiens; identical to SEQ ID NO: 23332

SEQ ID NO: 29215 - DNA, 3983 bp, Homo sapiens; identical to SEQ ID NO: 21101

SEQ ID NO: 29216 - DNA, 1020 bp, Homo sapiens; identical to SEQ ID NO: 23333
  misc_feature 1017, 1018, 1019, 1020: n = A,T,C or G

SEQ ID NO: 29217 - DNA, 1463 bp, Homo sapiens; identical to SEQ ID NO: 23334
  misc_feature 1, 2, 3, 4, 5, 6, 7, 8, 9, 1401, 1455, 1456, 1457, 1458,1459, 1460, 1461, 1462, 1463: n = A,T,C or G

SEQ ID NO: 29218 - DNA, 1388 bp, Homo sapiens; identical to SEQ ID NO: 23335
  misc_feature 1, 2, 3, 4, 5, 6, 7, 8, 9, 10, 11, 12, 13, 14, 15, 16, 17,18, 19, 20, 21, 22, 1388: n = A,T,C or G

SEQ ID NO: 29219 - DNA, 1329 bp, Homo sapiens; identical to SEQ ID NO: 23462

SEQ ID NO: 29220 - DNA, 2487 bp, Homo sapiens; identical to SEQ ID NO: 23337
  misc_feature 1: n = A,T,C or G

SEQ ID NO: 29221 - DNA, 2241 bp, Homo sapiens; identical to SEQ ID NO: 23338
  misc_feature 1, 2240, 2241: n = A,T,C or G

SEQ ID NO: 29222 - DNA, 1384 bp, Homo sapiens; identical to SEQ ID NO: 21939

SEQ ID NO: 29223 - DNA, 1499 bp, Homo sapiens; identical to SEQ ID NO: 23340

SEQ ID NO: 29224 - DNA, 1189 bp, Homo sapiens; identical to SEQ ID NO: 22380
  misc_feature 1, 2, 1183, 1184, 1185, 1186, 1187, 1188, 1189: n = A,T,C or G

SEQ ID NO: 29225 - DNA, 1002 bp, Homo sapiens; identical to SEQ ID NO: 22660
  misc_feature 1, 2, 983, 984, 985, 986, 987, 988, 989, 990, 991, 992, 993,994, 995, 996, 997, 998, 999, 1000, 1001, 1002: n = A,T,C or G

SEQ ID NO: 29226 - DNA, 1195 bp, Homo sapiens; identical to SEQ ID NO: 23343
  misc_feature 1187, 1188, 1189, 1190, 1191, 1192, 1193, 1194, 1195: n = A,T,C or G

SEQ ID NO: 29227 - DNA, 1621 bp, Homo sapiens; identical to SEQ ID NO: 22561

SEQ ID NO: 29228 - DNA, 2961 bp, Homo sapiens; identical to SEQ ID NO: 23345
  misc_feature 1, 2, 2960, 2961: n = A,T,C or G

SEQ ID NO: 29229 - DNA, 2597 bp, Homo sapiens; identical to SEQ ID NO: 23346
  misc_feature 1, 2597: n = A,T,C or G

SEQ ID NO: 29230 - DNA, 1170 bp, Homo sapiens
  misc_feature 842: n = A,T,C or G
acgcgggggggcagaaggaggctttaaagcgcctaccctgcctgcaggtgagcagtggtgtgtgagagccaggcgtccctctgcctgcccactcagtggcaacacccgggagctgttttgtcctttgtggagcctcagcagttccctctttcagaactcactgccaagagccctgaacaggagccaccatgcagtgcttcagcttcattaagaccatgatgatcctcttcaatttgctcatctttctgtgtggtgcagccctgttggcagtgggcatctgggtgtcaatcgatggggcatcctttctgaagatcttcgggccactgtcgtccagtgccatgcagtttgtcaacgtgggctacttcctcatcgcagccggcgttgtggtctttgctcttggtttcctgggctgctatggtgctaagactgagagcaagtgtgccctcgtgacgttcttcttcatcctcctcctcatcttcattgctgaggttgcagctgctgtggtcgccttggtgtacaccaccaatggctgaggcacttcctgacgttgctggtagtgcctgccatcaagaaagattatggttcccaggaagacttcactcaagtgtggaaccaccaccatgaaagggctcaagtgctgtggcttcaccaactatacggatttgaggactcaccctacttcaagagaaagtgccttccccatgtgtgcaggaccggctcaagcatgaactgcagcaagctgccccaagagggtgcccatctgtatcaccaccgcgggcgaagggcggcctaccttgtctatcctttcgcgggcccgacatgcgcctcggagtgcagtcttnagcagactgcaggcacgagcgagaacaagggctgaaacaccaaaccagagacaagcacacccggacaccaaagacagacaaaacgaacgcaacacacacagacaaagagaaaaagaacgcaaccggaacagaaggacgagccagcgcgagcccaaggggacagccagcaggcgaggagcggacgcgaccagaaggaacgcagagaagacagacagagaggaaagcgaagcggagcgcgcgggaaggaagaaagggggggaaggaggcgagaaacgacagcgcgggtgacaggaagagcacgggacgcgagccgaggccgcgacgcaca

SEQ ID NO: 29231 - DNA, 3918 bp, Homo sapiens; identical to SEQ ID NO: 22949
  misc_feature 3915, 3916, 3917, 3918: n = A,T,C or G

SEQ ID NO: 29232 - DNA, 1189 bp, Homo sapiens; identical to SEQ ID NO: 22380
  misc_feature 1, 2, 1183, 1184, 1185, 1186, 1187, 1188, 1189: n = A,T,C or G

SEQ ID NO: 29233 - DNA, 526 bp, Homo sapiens; identical to SEQ ID NO: 23349
  misc_feature 1, 2, 3, 4, 525, 526: n = A,T,C or G

SEQ ID NO: 29234 - DNA, 871 bp, Homo sapiens; identical to SEQ ID NO: 23350

SEQ ID NO: 29235 - DNA, 370 bp, Homo sapiens; identical to SEQ ID NO: 23351
  misc_feature 1, 370: n = A,T,C or G

SEQ ID NO: 29236 - DNA, 2071 bp, Homo sapiens; identical to SEQ ID NO: 21824

SEQ ID NO: 29237 - DNA, 1318 bp, Homo sapiens; identical to SEQ ID NO: 23353
  misc_feature 1314, 1315, 1316, 1317, 1318: n = A,T,C or G

SEQ ID NO: 29238 - DNA, 834 bp, Homo sapiens; identical to SEQ ID NO: 23354
  misc_feature 1, 2, 3, 757, 762, 772, 787, 801, 809, 815, 824, 833, 834: n = A,T,C or G

SEQ ID NO: 29239 - DNA, 1160 bp, Homo sapiens; identical to SEQ ID NO: 22252
  misc_feature 1, 2, 1154, 1155, 1156, 1157, 1158, 1159, 1160: n = A,T,C or G

SEQ ID NO: 29240 - DNA, 1101 bp, Homo sapiens; identical to SEQ ID NO: 23356

SEQ ID NO: 29241 - DNA, 781 bp, Homo sapiens; identical to SEQ ID NO: 22348
  misc_feature 1, 2, 779, 780, 781: n = A,T,C or G

SEQ ID NO: 29242 - DNA, 3983 bp, Homo sapiens; identical to SEQ ID NO: 21101

SEQ ID NO: 29243 - DNA, 663 bp, Homo sapiens; identical to SEQ ID NO: 23359
  misc_feature 1, 2, 3, 4, 7, 13, 55: n = A,T,C or G

SEQ ID NO: 29244 - DNA, 1073 bp, Homo sapiens; identical to SEQ ID NO: 23360
  misc_feature 1, 2, 1051, 1052, 1053, 1054, 1055, 1056, 1057, 1058, 1059,1060, 1061, 1062, 1063, 1064, 1065, 1066, 1067, 1068, 1069,1070, 1071, 1072, 1073: n = A,T,C or G

SEQ ID NO: 29245 - DNA, 657 bp, Homo sapiens; identical to SEQ ID NO: 23361
  misc_feature 657: n = A,T,C or G

SEQ ID NO: 29246 - DNA, 461 bp, Homo sapiens; identical to SEQ ID NO: 22262

SEQ ID NO: 29247 - DNA, 1103 bp, Homo sapiens; identical to SEQ ID NO: 23363
  misc_feature 955, 992, 1001, 1054, 1063, 1071, 1098, 1100, 1101, 1102,1103: n = A,T,C or G

SEQ ID NO: 29248 - DNA, 443 bp, Homo sapiens; identical to SEQ ID NO: 23364

SEQ ID NO: 29249 - DNA, 944 bp, Homo sapiens; identical to SEQ ID NO: 23365
  misc_feature 940, 941, 942, 943, 944: n = A,T,C or G

SEQ ID NO: 29250 - DNA, 343 bp, Homo sapiens; identical to SEQ ID NO: 23366

SEQ ID NO: 29251 - DNA, 4204 bp, Homo sapiens; identical to SEQ ID NO: 23367
  misc_feature 1, 4042, 4197, 4198, 4199, 4200, 4201, 4202, 4203, 4204: n = A,T,C or G

SEQ ID NO: 29252 - DNA, 2361 bp, Homo sapiens
  misc_feature 1, 2, 3, 4, 5, 6, 7, 8, 9, 10, 11, 12, 13, 14: n = A,T,C or G
nnnnnnnnnnnnnnaaactccccgggccacgagtttattttccagggaagcggaaagggaattttttttgggccgggccccggggtccccacccttttaaaaacccttttttggtttggcccacccccccctggaagccggggaaaaaaaggctttttttgggaaatttgggggggaatggctttttttgtacccctattaagggcccataaccaagtttcccccccccatggccttcctttttttttcccggttccgggggggggggggggggttttttttttaaatagtcccaaggccgctttttttttttttttttttttttggaatgattaaagatgtctttataaagtttttttcaagacttcattctaaatacacagaataaaaaatggtgtcagctcacttgtaagacaccaaccagattttccttatactgtctcaaaatttaaagatcaatttccccagagggtgtgcaatgcatcataaaatggcccttttttgaggatgggagaggaagggttgggcaggatggaatattaaattgtaacatgataaacatgcaagactgttatccaatctagataatttatatacattttgatgacttaggaaaacaaagcaatcatttgtgacaagcctaaaaagcttgacatatttaacatacttaggaactttttttgtgcggtgggaattctctaattgtatcatgtgggccttttgaaagtaacaaacagaaggccagtctgttgcaagtttgctgctgaacatcacattccaccctaagaaaacacaaggtggattgcatcgagggtggataccttaccttagcacagaaggaaaaagtatgtcagtgcaaagtatggactaaactgctttcaggaaaaaagttgtaaaaattgatacaggttggaaaagggaattttccttcccggcttggagtcctcccaatttaaggcagaacccatccactccaatttctgcagtttaaaactttctctacttatttagttttctcctctgagttcaaccgctgctggattcgtttggcataactttgtgccatggagttaatgatagataggatgaagtaacacaccatgacaacgaccaacttttcaaacatccaggacaaccagttttctccctgtggtgtgcccatttcgcttttgtggtgaagcttctgccgttgagcctccaggtactcctgaaatggcttctgcagagatggacctatgccggggacagcaccaatgaaagccaccatttgctccactatgtgcttgctgaatgttattataacaaaaattttctggatatgcatttttattattgcttttccaattagggttgcaccaaagaaggtccaaaaaggtaccagaaagtgtccacacgttattccagccagatcaaataaaggatttggaattgaagcacaggccaaaattccaaaaaatccaactttctgtactagtttttgaactgccagtttggcccgggaggcaaagtcttgtgcagactctgcatgttccagcatctcttcaaattcctgatactcttcatcatctggttcagcacctgagaggcgagctgctctggccatgaaatatggaggcagctctccgattgctgtaccgataccccacatgcaggcttcaatcctaacttttgagatgatactccacaaagaaatggttccttcagtgccctcttcatctggacaaataatctgatcaggatagggtggttcgggaaaattaactgaattgcattcataagcagctaatgtaactgaggctatatgtggacccagataaagcagaaaggtgtgcagccctgttccaagcccaacagaagacaaaattcctaagcctatccagtaggcatacaaaagaaactgtttctctatacgttgcacatactgttgatgcactccttcaacataatacgtagctataagcacagcaagcagcagtaaaaaagacaccacaatgctttgacgatgccataattttgaggtccattccttcaagattacaaggatttccagagaaaaatactgcaaggtaatgagcggctgtctccacaggacaatattctgcctttcttcccgctccctcctcttcttttcattcactgaagaggggtctgtgaaatttccattatgatgttccttgttcattgctacacgtctctggtcacaattttttccattctctgccatttcatagatcagtaactcttgaggagccgctccgaccccggctgctccggatctcaggatcctggaagctgctccttacggactctcacacccgccgctgggctccagacaaccggaacccgctcacgtccccgcgt

SEQ ID NO: 29253 - DNA, 3418 bp, Homo sapiens; identical to SEQ ID NO: 23369
  misc_feature 1, 2, 3, 4, 5, 6, 7: n = A,T,C or G

SEQ ID NO: 29254 - DNA, 2560 bp, Homo sapiens; identical to SEQ ID NO: 23370
  misc_feature 1, 2, 3, 4, 5, 6, 7, 2539, 2540, 2541, 2542, 2543, 2544,2545, 2546, 2547, 2548, 2549, 2550, 2551, 2552, 2553, 2554,2555, 2556, 2557, 2558, 2559, 2560: n = A,T,C or G

SEQ ID NO: 29255 - DNA, 1039 bp, Homo sapiens
  misc_feature 832: n = A,T,C or G
tatagggagtcgacccacgcgtccggcgaggcggccgagctggttggtggcggcggtcgtgcggacgcaaacatgcagatctttgtgaagaccctcactggcaaaaccatcacccttgaggtcgagcccagtgacaccattgagaatgtcaaagccaaaattcaagacaaggagggtatcccacctgaccagcagcgtctgatatttgccggcaaatatcagacgctgctggtcagctggaggatggccgcactctctcagactacaacatccagaaagagtccaccctgcacctggtgttgcgcctgcgaggtggcattattgagccttctctccgccagcttgcccagaaatacaactgcgacaagatgatctgccgcaagtgctatgctcgccttcaccctcgtgctgtcaactgccgcaagaagaagtgtggtcacaccaacaacctgcgtcccaagaagaaggtcaaataaggtggttctttccttgaagggcagcctcctgcccaggccccgtggccctggagcctcaataaagtgtccctttcattgactggagcagcaaaaaaaaaaaaaaaaaaaaaaaaaaaaaaaaaaaaagggggggggcggaaaaattttccccggggggggcccaaatttacgggacacccgttttttttgaacagaggcgggcccaaggagggcgctaaaataggccagagcggggccgcggctaacaccagcgccctgaggaacacctggacctggggatttgggagaagagccctcctgcggggggggctatgtgggaccaccccaagagagattaacggccaaggaatatcccntacagtgtaggtgtaccccaccggcttctcgccgagcagttgtgcagggattgattaagattacgagggcacgaatacataagtgcatctacgaatagcgatctatcatgatacggcaacagtcaccatgccacagcagctggtaaagctcaaccaagtaacactcaagagctactcacaaccacaaccagtaagtgataggatatc

SEQ ID NO: 29256 - DNA, 507 bp, Homo sapiens; identical to SEQ ID NO: 23372

SEQ ID NO: 29257 - DNA, 3205 bp, Homo sapiens
  misc_feature 1, 3205: n = A,T,C or G
ncgtccgatatggggcgggaccctgttctggcatcatggcacgcacactctcagtagactctttcactcctctctctcttcctctctcacacgttctccaacccaaggaggccagacagagggacgtggtcactctctgaaaagttcaacttgagagacaaaatgcagtggacctccctcctgctgctggcagggctcttctccctctcccaggcccagtatgaagatgaccctcattggtggttccactacctccgcagccagcagtccacctactacgatccctatgacccttacccgtatgagacctacgagccttacccctatggggtggatgaagggccagcctacacctacggctctccatcccctccagatccccgcgactgcccccaggaatgcgactgcccacccaacttccccacggccatgtactgtgacaatcgcaacctcaagtacctgcccttcgttccctcccgcatgaagtatgtgtacttccagaacaaccagatcacctccatccaggaaggcgtctttgacaatgccacagggctgctctggattgctctccacggcaaccagatcaccagtgataaggtgggcaggaaggtcttctccaagctgaggcacctggagaggctgtacctggaccacaacaacctgacccggatgcccggtcccctgcctcgatccctgagagagctccatctcgaccacaaccagatctcacgggtccccaacaatgctctggaggggctggagaacctcacggccttgtacctccaacacaatgagatccaggaagtgggcagttccatgaggggcctccggtcactgatcttgctggacctgagttataaccaccttcggaaggtgcctgatgggctgccctcagctcttgagcagctgtacatggagcacaacaatgtctacaccgtccccgatagctacttccggggggcgcccaagctgctgtatgtgcggctgtcccacaacagtctaaccaacaatggcctggcctccaacaccttcaattccagcagcctccttgagctagacctctcctacaaccagctgcagaagatccccccagtcaacaccaacctggagaacctctacctccaaggcaataggatcaatgagttctccatcagcagcttctgcaccgtggtggacgtcgtgaacttctccaagctgcaggtgctgcgcctggacgggaacgagatcaagcgcagcgccatgcctgccgacgcgcccctctgcctgcgccttgccagcctcatcgagatctgagcagccctggcaccgggtactgggcggagagcccccgtggcatttggcttgatggtttggtttggcttttgctggaaggtccaggatggaccatgtgacagaagtccacgggcaccctctgtagtcttctttcctgtaggtggggttagggggggcgatcagggacaggcagccttctgctgaggacataggcagaagctcactcttttccagggacagaagtggtggtagatggaaggatccctggatgttccaaccccataaatctcacggctcttaagttcttcccaatgatctgaggtcatggaacttcaaaagtggcatgggcaatagtatataaccatacttttctaacaatccctggctgtctgtgagcagcacttgacagctctccctctgtgctgggctggtcgtgcagttactctgggctcccatttgttgcttctcaaaatatacctcttgcccagctgcctcttctgaaatccacttcacccactccactttcctccacagatgcctcttctgtgccttaagcagagtcaggagaccccaaggcatgtgagcatctgcccagcaacctgtggagacaacccacactgtgtctgagggtgaaaggacaccaggagtcacttctatacctccctaacctcacccctggaaagccaccagattggaggtcaccagcatgatgataatattcatgacctgatgtgggaggagacagccaacctcaggcttagatcaatgtatagggctatattttggcagctgggtagctctttgaaggtggataagacttcagaagaggaaaggccagactttgcttaccatcagcatctgcaatgggccaaacacacctcaaattggctgagttgagaaagcagccccagtagttccattcttgcccagcactttctgcattccaaacagcatcctacctgggtttttatccacaaaggtagcggccacatggtttttaaagtatgagaaacacagtttgtcctctccttttatccaagcaggaagattctatatcctgatggtagagacagactccaggcagccctggacttgctagcccaaagaaggaggatgtggttaatctgtttcacctggtttgtcctaaggccatagttaaaaagtaccagctctggctggggtccgtgaagcccaggccaggcagccaaatcttgcctgtgctgggcatacaaccctctgctttcacatctctgagctatatcctcattagtgaaggtggcttttgctttatagtttggctggggagcacttaattcttcccatttcaaaaggtaatgttgcctggggcttaacccacctgccctttgggcaaggttgggacaaagccatctgggcagtcaggggcaaggactgttggaggagagttagcccaagtataggctctgcccagatgccatcacatccctgatactgtgtatgctttgaagcaccttccctgagaagggaagaggggatctttggactacgttcttggctccagacctggaatccacaaaagccaaaccagctcatttcaacaaaggagctccgatgtgaggggcaaggctgccccctgccccagggctcttcagaaagcatctgcatgtgaacaccatcatgcctttataaaggatccttattacaggaaaagcatgagtggtggctaacctgaccaataaagttattttatgattgcaaaaaaaaaaaaaaaaaaaggaactcgagactagttctcctcgtgccgaattcggcacgaggtctcgagtttttttttttttttttttagaaaggctggcatctgcttctggtgagggcctcacgaagcttacaatcatggcagaaggtgactcgtgccgaattcgatatcaagcttatcgataccgtcgacctcgan

SEQ ID NO: 29258 - DNA, 6304 bp, Homo sapiens; identical to SEQ ID NO: 23374
  misc_feature 1, 6302, 6303, 6304: n = A,T,C or G

SEQ ID NO: 29259 - DNA, 1958 bp, Homo sapiens
cgcggccgcgtcgacacggctgcgagaagacgacagaagggtacggctgcgagaagacgacagaagggtacggctgcgagaagacgacagaagggtacggctgcgagaagacgacagaagggtacggctgcgagaagacgacatgagggggttacagagcggagagagtgaggaggctgcgtctggctcccgctctcacagccattgcagtacattgagctccatagagacagcgccggggcaagtgagagccggacgggcactgggcgactctgtgcctcgctgaggaaaaataactaaacatgggcaaaggagatcctaagaagccgagaggcaaaatgtcatcatatgcattttttgtgcaaacttgtcgggaggagcataagaagaagcacccagatgcttcagtcaacttctcagagttttctaagaagtgctcagagaggtggaagaccatgtctgctaaagagaaaggaaaatttgaagatatggcaaaagcggacaaggcccgttatgaaagagaaatgaaaacctatatccctcccaaaggggagacaaaaaagaagttcaaggatcccaatgcacccaagaggcctccttcggccttcttcctcttctgctctgagtatcgcccaaaaatcaaaggagaacatcctggcctgtccattggtgatgttgcgaagaaactgggagagatgtggaataacactgctgcagatgacaagcagccttatgaaaagaaggctgcgaagctgaaggaaaaatacgaaaaggatattgctgcatatcgagctaaaggaaagcctgatgcagcaaaaaagggagttgtcaaggctgaaaaaagcaagaaaaagaaggaagaggaggaagatgaggaagatgaagaggatgaggaggaggaggaagatgaagatgaagaagatgaagatgaagaagaagatgatgatgatgatgaataagttggttctagcgcagttttttttttcttgtctataaagcatttaacccccctgtacacaactcactccttttaaagaaaaaaattgaaatgtaaggctgtgtaagatttgtttttaaactgtacagtgtctttttttgtatagttaacacactaccgaatgtgtctttagatagccctgtcctggtggtattttcaatagccactaaccttgcctggtacagtatgggggttgtaaattggcatggaaatttaaagcaggttcttgttggtgcacagcacaaattagttatatatggggatggtagttttttcatcttcagttgtctctgatgcagcttatacgaaataattgttgttctgttaactgaataccactctgtaattgcaaaaaaaaaaaagttgcagctgttttgttgacattctgaatgcttctaagtaaatacaattttttttatatatagtattggtggctcctttccaataggctctgaaattttcctcttctggaggggaagcatagtctttggctttggggccattttggaattcacattgaatttaattacagggttttatccttccatatagtgagctaataaaaagctttgggtctacacacccgggttatcataggggggtaaagtaacgtggacgatagtttccacccataatggaacattccaaaatctggatcagttaagaaatttcacatagcccatttacttttacaaaccggaagagtaatcaatctactcaaagctgggattattagaatcaaccatttggaaggtctgtcctgtggggactactaagaacaggttgtcctaccctttacatgaggactctattcttaaactcccattacctgtatgcgggtatatttgcagtccccccttaaagaagactggagagtgtgtcccaaaaggggtgggttaaatacagatggctattaacttttcgtggaataagctcgcggaagactagacaggggcataga

SEQ ID NO: 29260 - DNA, 884 bp, Homo sapiens; identical to SEQ ID NO: 23376
  misc_feature 1, 2, 3, 4, 5, 6, 7, 8, 9: n = A,T,C or G

SEQ ID NO: 29261 - DNA, 413 bp, Homo sapiens
  misc_feature 1, 2: n = A,T,C or G
nnactagttttagagcggccggctcgtcgttctatttttagtagagacggggtttctccacgttggccacgctggtctcgaactcctgaccacaaatgatccaccttcctgggcctcccaaagtgctggaaacgacaggcctgagccgccgggatttcagcctttaaaagcgcgggccctgccacctttcgctgcggcccttacgctcagaatgacgtgtcctctctgccataggttgactccttgagtcccctaggccattgcactgtagcctgggcagcaagagccaaactccgtccccccacctccccgcgcacataataactaactaactaactaactaactaaaatctctacacgtcactcataagtgtgtgttcccgtgaggagtgatttctaagaaatggcactgt

SEQ ID NO: 29262 - DNA, 1160 bp, Homo sapiens; identical to SEQ ID NO: 22252
  misc_feature 1, 2, 1154, 1155, 1156, 1157, 1158, 1159, 1160: n = A,T,C or G

SEQ ID NO: 29263 - DNA, 1154 bp, Homo sapiens; identical to SEQ ID NO: 23378
  misc_feature 1148, 1152, 1153, 1154: n = A,T,C or G

SEQ ID NO: 29264 - DNA, 615 bp, Homo sapiens; identical to SEQ ID NO: 23379
  misc_feature 602, 611, 612, 613, 614, 615: n = A,T,C or G

SEQ ID NO: 29265 - DNA, 3259 bp, Homo sapiens; identical to SEQ ID NO: 23380
  misc_feature 1, 3257, 3258, 3259: n = A,T,C or G

SEQ ID NO: 29266 - DNA, 1138 bp, Homo sapiens; identical to SEQ ID NO: 23381
  misc_feature 1, 2, 3, 4, 5, 6: n = A,T,C or G

SEQ ID NO: 29267 - DNA, 2042 bp, Homo sapiens; identical to SEQ ID NO: 23382
  misc_feature 2032, 2033, 2034, 2035, 2036, 2037, 2038, 2039, 2040, 2041,2042: n = A,T,C or G

SEQ ID NO: 29268 - DNA, 1734 bp, Homo sapiens; identical to SEQ ID NO: 23383
  misc_feature 1, 2, 3, 1729, 1730, 1731, 1732, 1733, 1734: n = A,T,C or G

SEQ ID NO: 29269 - DNA, 1249 bp, Homo sapiens; identical to SEQ ID NO: 23384
  misc_feature 1243, 1244, 1245, 1246, 1247, 1248, 1249: n = A,T,C or G

SEQ ID NO: 29270 - DNA, 2360 bp, Homo sapiens; identical to SEQ ID NO: 21878

SEQ ID NO: 29271 - DNA, 2471 bp, Homo sapiens; identical to SEQ ID NO: 23386
  misc_feature 1, 1183, 1184, 1185, 1186, 1187, 1188, 1189, 1190, 1191,1192, 1193, 1194, 1195, 1196, 1197, 1198, 1199, 1200, 1201,1202, 1203, 1204, 1205, 2469, 2470, 2471: n = A,T,C or G

SEQ ID NO: 29272 - DNA, 2147 bp, Homo sapiens
caccacgcgtccggatttctctcctcttgagatcctctggaccttctccatctacctggagtccgtggctatccttccgcagctgtttatgatcagcaagactggggaggccgagaccatcaccacccactacctgttcttcctgggcctctatcatgctttgtaactggatctggcgcttctactttgagggcttctttgacctcattgctgtggtggccggcgtagtccagaccatcctatactgtgacttcttctacttgtacattacaaaagtactcaagggaaagaagctcagtttgccagcataagtgccaaagaccatcaccagcatctgtccttcagggtgctcggacagaattcttaccacagcaaaggcataagatgcttgatacggaaaatcagaaacttaactcttttgttgcagatagtcatcagtggctctgtaaaaacgcagaggaaaagagccagaaggtttctgtttaatgcatcttgccttatctttttttattactgtgtacaaagatttttttacacaaagaaacttaatgctgtattaataaattcagtgtgtagcttcaattgggatagttccaaaagtgaagattttgtgaggaataagtgcaaattttttttttattttaaaaaattctttgaaactcttaagtctttgtgtctgcaatgaaattgtactccttgacagttgatagattatatattcttccatccctcaaacttgcattccactatatttattttttggcaaaagatgagctgtatttgtttgaaatctgagacactatgttcaattggatgtatctgttcaaatttattcccacgtgacgtggaagtccttcgttggatgtcacaacactacatttaaggttggtaaggatgacttggaggtccatggttttcattaccaacattttaagattctgaatgtcgatggagtctcactgaagagtcaccaaaggtgcctgccctcctcccctgctgggaagtgtcagttggagactgtcccaagggtgctgaagaatccagtggcaggggttctggctgctttccatctgagtgtgggatgggaggggtgttcatgatcatttggatatagcaatctactctgagaaatggaacacaaggagttacctatcactttcacttataattccaaaagatgactacaaccatgtccatgctcagattcaaacagttttccatatcacttttgggtggtaagatgatttacagttttttttttaattggcagcaccactaaccattccttacattcttttttgtatgtgtggttttctttttatttaacccgcagccgacatcgtagtttcttgttttgttttgttttacagagctgttgcatgacttatgttaccatcctaaaaaacactatattaaacatggaataaattgtctttttatgaattaggctttttgaacatcctgtgttgggatttttttgtttttcaattggcaacaaaagctctgtagggctgcagacatttaaagttcacataatcatctgtaagacattatgtattttgtggaaatactagaattttttttcctgattttgccattatatggatttgctattttttgattaatgcaaaagtatatgactttgttttttatgtgatacaccataaatattaaagtgttgaatactaacagtgctgactacaagaagggatgtagtattttgggctttctggcattacaacgtcttctggaggaagggagcaggatgggtttcatttgtatctagtgtgtgtcttaacatctttctaaatcggcagtgtaactcattagtttaacttcctgtctgtctccctcattttactcttccctccttgtcttatgttttggcttttgtgtatcagagcatctttctttgcagcatcctagtcttgcttcagtttctgtggtctcttttcatcctgcttgaagattcggagtgtgggaaggaggctagggaagtctgggtgcagtagggtgaggcagacctcttgctgcccagcccaggggtggggtgggggcgcacacctgtcttttgtggcatgcaaatctggatacacctggggcgcatcctctgggagagcacaacggcatgggaaaagtcttgggaa

SEQ ID NO: 29273 - DNA, 1557 bp, Homo sapiens; identical to SEQ ID NO: 23387

SEQ ID NO: 29274 - DNA, 1643 bp, Homo sapiens; identical to SEQ ID NO: 21150
  misc_feature 1, 2, 3, 4, 1615, 1616, 1617, 1618, 1619, 1620, 1621, 1622,1623, 1624, 1625, 1626, 1627, 1628, 1629, 1630, 1631, 1632,1633, 1634, 1635, 1636, 1637, 1638, 1639, 1640, 1641, 1642,1643: n = A,T,C or G

SEQ ID NO: 29275 - DNA, 1866 bp, Homo sapiens; identical to SEQ ID NO: 25534
  misc_feature 1, 2, 3, 1855, 1856, 1857, 1858, 1859, 1860, 1861, 1862,1863, 1864, 1865, 1866: n = A,T,C or G

SEQ ID NO: 29276 - DNA, 301 bp, Homo sapiens; identical to SEQ ID NO: 23389
  misc_feature 1, 2, 3, 4, 196, 211, 267, 300, 301: n = A,T,C or G

SEQ ID NO: 29277 - DNA, 799 bp, Homo sapiens; identical to SEQ ID NO: 23390
  misc_feature 1, 2, 3, 4, 5, 756, 799: n = A,T,C or G

SEQ ID NO: 29278 - DNA, 1715 bp, Homo sapiens; identical to SEQ ID NO: 23391
  misc_feature 1, 2, 1715: n = A,T,C or G

SEQ ID NO: 29279 - DNA, 687 bp, Homo sapiens; identical to SEQ ID NO: 23392
  misc_feature 1, 681, 682, 683, 684, 685, 686, 687: n = A,T,C or G

SEQ ID NO: 29280 - DNA, 2883 bp, Homo sapiens; identical to SEQ ID NO: 23393
  misc_feature 2883: n = A,T,C or G

SEQ ID NO: 29281 - DNA, 1674 bp, Homo sapiens; identical to SEQ ID NO: 23394
  misc_feature 1, 2, 3, 4, 5, 7, 9, 10, 15, 20, 22, 23, 24, 1646, 1647,1648, 1649, 1650, 1651, 1652, 1653, 1654, 1655, 1656, 1657,1658, 1659, 1660, 1661, 1662, 1663, 1664, 1665, 1666, 1667,1668, 1669, 1670, 1671, 1672, 1673, 1674: n = A,T,C or G

SEQ ID NO: 29282 - DNA, 2361 bp, Homo sapiens; identical to SEQ ID NO: 20124
  misc_feature 1, 2, 3, 2361: n = A,T,C or G

SEQ ID NO: 29283 - DNA, 4611 bp, Homo sapiens; identical to SEQ ID NO: 23396
  misc_feature 4610, 4611: n = A,T,C or G

SEQ ID NO: 29284 - DNA, 1456 bp, Homo sapiens; identical to SEQ ID NO: 23397

SEQ ID NO: 29285 - DNA, 2019 bp, Homo sapiens; identical to SEQ ID NO: 22489
  misc_feature 2005, 2006, 2007, 2008, 2009, 2010, 2011, 2012, 2013, 2014,2015, 2016, 2017, 2018, 2019: n = A,T,C or G

SEQ ID NO: 29286 - DNA, 3996 bp, Homo sapiens; identical to SEQ ID NO: 23022

SEQ ID NO: 29287 - DNA, 2174 bp, Homo sapiens; identical to SEQ ID NO: 23400

SEQ ID NO: 29288 - DNA, 4444 bp, Homo sapiens; identical to SEQ ID NO: 22727

SEQ ID NO: 29289 - DNA, 3181 bp, Homo sapiens; identical to SEQ ID NO: 23403
  misc_feature 1, 2, 3, 4, 96, 97, 98, 99, 100, 101, 102, 103, 104, 105,106, 107, 108, 109, 110, 111, 112, 113, 114, 115, 116, 117,118, 119, 120, 121, 122, 123, 124, 125, 126, 127, 128, 129,130, 131, 132, 133, 134, 135, 136, 137, 138, 139, 140: n = A,T,C or G
  misc_feature 141, 142, 143, 144, 145, 146, 147, 3181: n = A,T,C or G

SEQ ID NO: 29290 - DNA, 4489 bp, Homo sapiens; identical to SEQ ID NO: 23404
  misc_feature 1, 4489: n = A,T,C or G

SEQ ID NO: 29291 - DNA, 898 bp, Homo sapiens; identical to SEQ ID NO: 23405
  misc_feature 1, 2, 3, 4, 897, 898: n = A,T,C or G

SEQ ID NO: 29292 - DNA, 1024 bp, Homo sapiens; identical to SEQ ID NO: 23406
  misc_feature 1, 1024: n = A,T,C or G

SEQ ID NO: 29293 - DNA, 482 bp, Homo sapiens; identical to SEQ ID NO: 23041
  misc_feature 1, 2: n = A,T,C or G

SEQ ID NO: 29294 - DNA, 2019 bp, Homo sapiens; identical to SEQ ID NO: 22489
  misc_feature 2005, 2006, 2007, 2008, 2009, 2010, 2011, 2012, 2013, 2014,2015, 2016, 2017, 2018, 2019: n = A,T,C or G

SEQ ID NO: 29295 - DNA, 465 bp, Homo sapiens; identical to SEQ ID NO: 23409

SEQ ID NO: 29296 - DNA, 2001 bp, Homo sapiens; identical to SEQ ID NO: 23410
  misc_feature 1, 2, 3, 2000, 2001: n = A,T,C or G

SEQ ID NO: 29297 - DNA, 1179 bp, Homo sapiens; identical to SEQ ID NO: 23411
  misc_feature 1, 2, 3, 1178, 1179: n = A,T,C or G

SEQ ID NO: 29298 - DNA, 408 bp, Homo sapiens; identical to SEQ ID NO: 21570
  misc_feature 1: n = A,T,C or G

SEQ ID NO: 29299 - DNA, 4276 bp, Homo sapiens; identical to SEQ ID NO: 23413
  misc_feature 1, 2, 3, 4, 5, 4276: n = A,T,C or G

SEQ ID NO: 29300 - DNA, 751 bp, Homo sapiens; identical to SEQ ID NO: 23414

SEQ ID NO: 29301 - DNA, 700 bp, Homo sapiens; identical to SEQ ID NO: 23415
  misc_feature 1, 2, 700: n = A,T,C or G

SEQ ID NO: 29302 - DNA, 391 bp, Homo sapiens; identical to SEQ ID NO: 23416
  misc_feature 385, 386, 387, 388, 389, 390, 391: n = A,T,C or G

SEQ ID NO: 29303 - DNA, 1054 bp, Homo sapiens; identical to SEQ ID NO: 23417
  misc_feature 1, 2, 3, 1049, 1050, 1051, 1052, 1053, 1054: n = A,T,C or G

SEQ ID NO: 29304 - DNA, 2018 bp, Homo sapiens; identical to SEQ ID NO: 23418
  misc_feature 1, 2, 2018: n = A,T,C or G

SEQ ID NO: 29305 - DNA, 1096 bp, Homo sapiens; identical to SEQ ID NO: 23419
  misc_feature 1, 15, 1096: n = A,T,C or G

SEQ ID NO: 29306 - DNA, 638 bp, Homo sapiens; identical to SEQ ID NO: 23420
  misc_feature 1, 2, 638: n = A,T,C or G

SEQ ID NO: 29307 - DNA, 455 bp, Homo sapiens; identical to SEQ ID NO: 23421
  misc_feature 1, 2, 3, 4, 5, 6, 7, 8, 9, 10, 11, 12, 13, 14: n = A,T,C or G

SEQ ID NO: 29308 - DNA, 1746 bp, Homo sapiens; identical to SEQ ID NO: 23422

SEQ ID NO: 29309 - DNA, 3266 bp, Homo sapiens; identical to SEQ ID NO: 23004
  misc_feature 1, 2, 3266: n = A,T,C or G

SEQ ID NO: 29310 - DNA, 2451 bp, Homo sapiens; identical to SEQ ID NO: 22898

SEQ ID NO: 29311 - DNA, 4584 bp, Homo sapiens; identical to SEQ ID NO: 23425
  misc_feature 1, 2, 3, 4, 5, 6, 7, 8, 9, 10, 106, 4580, 4581, 4582, 4583,4584: n = A,T,C or G

SEQ ID NO: 29312 - DNA, 403 bp, Homo sapiens; identical to SEQ ID NO: 23426

SEQ ID NO: 29313 - DNA, 897 bp, Homo sapiens; identical to SEQ ID NO: 23427
  misc_feature 897: n = A,T,C or G

SEQ ID NO: 29314 - DNA, 2071 bp, Homo sapiens; identical to SEQ ID NO: 21824

SEQ ID NO: 29315 - DNA, 1120 bp, Homo sapiens; identical to SEQ ID NO: 22234
  misc_feature 1, 1119, 1120: n = A,T,C or G

SEQ ID NO: 29316 - DNA, 3621 bp, Homo sapiens
gcgtccgcgcgctcgggctccgtcagtttcctcggcagcggtaggcgagagcacgcggaggagcgtgcgcgggggccccgggagacggcggcggtggcggcgcgggcagagcaaggacgcggcggatcccactcgcacagcagcgcactcggtgccccgcgcagggtcgcgatgctgcccggtttggcactgctcctgctggccgcctggacggctcgggcgctggaggtacccactgatggtaatgctggcctgctggctgaaccccagattgccatgttctgtggcagactgaacatgcacatgaatgtccagaatgggaagtgggattcagatccatcagggaccaaaacctgcattgataccaaggaaggcatcctgcagtattgccaagaagtctaccctgaactgcagatcaccaatgtggtagaagccaaccaaccagtgaccatccagaactggtgcaagcggggccgcaagcagtgcaagacccatccccactttgtgattccctaccgctgcttagttggtgagtttgtaagtgatgcccttctcgttcctgacaagtgcaaattcttacaccaggagaggatggatgtttgcgaaactcatcttcactggcacaccgtcgccaaagagacatgcagtgagaagagtaccaacttgcatgactacggcatgttgctgccctgcggaattgacaagttccgaggggtagagtttgtgtgttgcccactggctgaagaaagtgacaatgtggattctgctgatgcggaggaggatgactcggatgtctggtggggcggagcagacacagactatgcagatgggagtgaagacaaagtagtagaagtagcagaggaggaagaagtggctgaggtggaagaagaagaagccgatgatgacgaggacgatgaggatggtgatgaggtagaggaagaggctgaggaaccctacgaagaagccacagagagaaccaccagcattgccaccaccaccaccaccaccacagagtctgtggaagaggtggttcgagaggtgtgctctgaacaagccgagacggggccgtgccgagcaatgatctcccgctggtactttgatgtgactgaagggaagtgtgccccattcttttacggcggatgtggcggcaaccggaacaactttgacacagaagagtactgcatggccgtgtgtggcagcgccatgtcccaaagtttactcaagactacccaggaacctcttgcccgagatcctgttaaacttcctacaacagcagccagtacccctgatgccgttgacaagtatctcgagacacctggggatgagaatgaacatgcccatttccagaaagccaaagagaggcttgaggccaagcaccgagagagaatgtcccaggtcatgagagaatgggaagaggcagaacgtcaagcaaagaacttgcctaaagctgataagaaggcagttatccagcatttccaggagaaagtggaatctttggaacaggaagcagccaacgagagacagcagctggtggagacacacatggccagagtggaagccatgctcaatgaccgccgccgcctggccctggagaactacatcaccgctctgcaggctgttcctcctcggcctcgtcacgtgttcaatatgctaaagaagtatgtccgcgcagaacagaaggacagacagcacaccctaaagcatttcgagcatgtgcgcatggtggatcccaagaaagccgctcagatccggtcccaggttatgacacacctccgtgtgatttatgagcgcatgaatcagtctctctccctgctctacaacgtgcctgcagtggccgaggagattcaggatgaagttgatgagctgcttcagaaagagcaaaactattcagatgacgtcttggccaacatgattagtgaaccaaggatcagttacggaaacgatgctctcatgccatctttgaccgaaacgaaaaccaccgtggagctccttcccgtgaatggagagttcagcctggacgatctccagccgtggcattcttttggggctgactctgtgccagccaacacagaaaacgaagttgagcctgttgatgcccgccctgctgccgaccgaggactgaccactcgaccaggttctgggttgacaaatatcaagacggaggagatctctgaagtgaagatggatgcagaattccgacatgactcaggatatgaagttcatcatcaaaaattggtgttctttgcagaagatgtgggttcaaacaaaggtgcaatcattggactcatggtgggcggtgttgtcatagcgacagtgatcgtcatcaccttggtgatgctgaagaagaaacagtacacatccattcatcatggtgtggtggaggttgacgccgctgtcaccccagaggagcgccacctgtccaagatgcagcagaacggctacgaaaatccaacctacaagttctttgagcagatgcagaactagacccccgccacagcagcctctgaagttggacagcaaaaccattgcttcactacccatcggtgtccatttatagaataatgtgggaagaaacaaacccgttttatgatttactcattatcgccttttgacagctgtgctgtaacacaagtagatgcctgaacttgaattaatccacacatcagtaatgtattctatctctctttacattttggtctctatactacattattaatgggttttgtgtactgtaaagaatttagctgtatcaaactagtgcatgaatagattctctcctgattatttatcacatagccccttagccagttgtatattattcttgtggtttgtgacccaattaagtcctactttacatatgctttaagaatcgatgggggatgcttcatgtgaacgtgggagttcagctgcttctcttgcctaagtattcctttcctgatcactatgcattttaaagttaaacatttttaagtatttcagatgctttagagagattttttttccatgactgcattttactgtacagattgctgcttctgctatatttgtgatataggaattaagaggatacacacgtttgtttcttcgtgcctgttttatgtgcacacattaggcattgagacttcaagcttttctttttttgtccacgtatctttgggtctttgataaagaaaagaatccctgttcattgtaagcacttttacggggcgggtggggaggggtgctctgctggtcttcaattaccaagaattctccaaaacaattttctgcaggatgattgtacagaatcattgcttatgacatgatcgctttctacactgtattacataaataaattaaataaaataaccccgggcaagacttttctttgaaggatgactacagacattaaataatcgaagtaattttgggtggggagaagaggcagattcaattttctttaaccagtctgaagtttcatttatgatacaaaagaagatgaaaatggaagtggcaatataaggggatgaggaaggcatgcctggacaaacccttcttttaagatgtgtcttcaatttgtataaaatggtgttttcatgtaaataaatacattcttggaggagcaaaaaaaaaaaaaaaaaa

SEQ ID NO: 29317 - DNA, 392 bp, Homo sapiens; identical to SEQ ID NO: 23431
  misc_feature 1, 2, 3, 4, 5, 6, 7: n = A,T,C or G

SEQ ID NO: 29318 - DNA, 2186 bp, Homo sapiens; identical to SEQ ID NO: 23432
  misc_feature 1, 2, 3, 4, 5, 6, 7, 8, 9, 10, 11, 12, 13, 14, 2181, 2182,2183, 2184, 2185, 2186: n = A,T,C or G

SEQ ID NO: 29319 - DNA, 6860 bp, Homo sapiens; identical to SEQ ID NO: 23433

SEQ ID NO: 29320 - DNA, 724 bp, Homo sapiens; identical to SEQ ID NO: 23434
  misc_feature 721, 722, 723, 724: n = A,T,C or G

SEQ ID NO: 29321 - DNA, 11657 bp, Homo sapiens; identical to SEQ ID NO: 23435
  misc_feature 1, 2, 3, 4, 11656, 11657: n = A,T,C or G

SEQ ID NO: 29322 - DNA, 766 bp, Homo sapiens; identical to SEQ ID NO: 23436
  misc_feature 1, 2, 3, 4, 5, 6, 7, 8, 9, 10, 11, 12, 13, 14, 15, 16, 17,18, 19, 20, 21, 22, 23, 24, 25, 765, 766: n = A,T,C or G

SEQ ID NO: 29323 - DNA, 1811 bp, Homo sapiens; identical to SEQ ID NO: 22429
  misc_feature 1, 2, 3, 4, 5, 55, 56, 57, 58, 59, 60, 61, 62, 63, 64, 65,66, 67, 68, 69, 70, 71, 72, 73, 74, 75, 76, 77, 78, 79,80, 81, 90, 1811: n = A,T,C or G

SEQ ID NO: 29324 - DNA, 766 bp, Homo sapiens; identical to SEQ ID NO: 23438

SEQ ID NO: 29325 - DNA, 886 bp, Homo sapiens; identical to SEQ ID NO: 21881
  misc_feature 1, 2, 3, 4, 5, 6, 886: n = A,T,C or G

SEQ ID NO: 29326 - DNA, 3405 bp, Homo sapiens; identical to SEQ ID NO: 23440
  misc_feature 1, 3322, 3405: n = A,T,C or G

SEQ ID NO: 29327 - DNA, 676 bp, Homo sapiens; identical to SEQ ID NO: 23441
  misc_feature 676: n = A,T,C or G

SEQ ID NO: 29328 - DNA, 367 bp, Homo sapiens; identical to SEQ ID NO: 23442

SEQ ID NO: 29329 - DNA, 1692 bp, Homo sapiens
  misc_feature 1686, 1687, 1688, 1689, 1690, 1691, 1692: n = A,T,C or G
tatagggagtcgacccacgcgtccggctggctagccgccatcttgcttctttttctcgctcgctcgctccccctcggaaagctgcgaaagtgctttggcggtttgtccatccgcagcttcggcttttccagtctggtggcccttccggccacccctttaaccccagctttccctcccccttctttcgatcagagatcggcggagaccctcgaagtgcgcaaacttgacactcaccctgaccggactggggttttaaggggtgtggcaggaggttttggactcgatgagtttccaccgaaatgtcggagaagtcaggccagagcacaaaagcaaaggatgggaaaaagtatgcaacactcagtttatttaatacttacaaggggaaatcattagaaacacagaaaaccacagttgcagctcgacatggattacagagtcttggaaaagtcggtatttcacggcgtatgcctccacctgctaacctcccaagtcttaaagcagaaaacaaaggcaatgatcctaatgtaaacattgtacctaaagatggcacagggtgggcatcaaaacaagagcaacatgaagaagaaaaaacaccagaagtgccaccagcacagccaaaacctggggttgcagctcccccagaagtagcacctgctcccaaatcatgggccagtaacaagcaaggtgggcaaggagatggaatccaagtgaatagtcagtttcagcaagaatttcccagcctgcaggcagctggggatcaggaaaaaaaagaaaaggaaacaaatgatgacaactatggacctggacccagtttacgtccaccaaatgttgcttgttggagagatggtggtaaggctgctggctcaccttcgtcatctgatcaagatgaaaagctccctggccaggatgaaagcacagctggaacatcagagcaaaatgatatcctcaaagtggtggaaaagaggatagcttgtggtcctccacaggctaaactgaatggacagcaggctgctctcgcttcccagtatagagctatgatgcctccttatatgttccaacagtatccgaggatgacatatcctcctctacatggtcccatgagattcccaccttctttatctgaaacaaacaaaggccttcgaggaagaggcccacctccttcatgggcctctgagcctgaacgcccatccattcttagtgcatcagaactgaaggagcttgataaatttgataacctagatgctgaagctgatgaaggttgggcaggtgctcagatggaagtagattatacagagcaactgaatttcagtgatgatgatgaacaaggaagtaacagtcctaaagagaataacagtgaggatcaaggttcaaaagcctctgaaaacaacgaaaacaaaaaagaaacagatgaagtttccaacactaaatcatcttcccaaatacctgcccaaccatcaggtagcaaaagttcccctatgggaaaggaccttcattttataggaccggggacctcttctcattggcccccccccaaggggtgcgcagttccccccaaatagggggaccgggagaaagggcctcccccaaggagaggtggaggaatatggcgcgagaacacaacaaattgtgaaacggccgtgcgaaagagaagaacacctgggtgaagagaggttgcacacacccacnnnnnnn

SEQ ID NO: 29330 - DNA, 7955 bp, Homo sapiens; identical to SEQ ID NO: 23443
  misc_feature 1, 2, 3, 4, 5, 7338, 7341, 7342, 7954, 7955: n = A,T,C or G

SEQ ID NO: 29331 - DNA, 965 bp, Homo sapiens; identical to SEQ ID NO: 23444

SEQ ID NO: 29332 - DNA, 3228 bp, Homo sapiens; identical to SEQ ID NO: 22886
  misc_feature 1, 2, 3216, 3217, 3218, 3219, 3220, 3221, 3222, 3223, 3224,3225, 3226, 3227, 3228: n = A,T,C or G

SEQ ID NO: 29333 - DNA, 564 bp, Homo sapiens; identical to SEQ ID NO: 22496
  misc_feature 564: n = A,T,C or G

SEQ ID NO: 29334 - DNA, 886 bp, Homo sapiens; identical to SEQ ID NO: 23447
  misc_feature 1, 2, 3, 4, 5, 6, 7, 8, 9, 10, 11, 12, 13, 14, 15: n = A,T,C or G

SEQ ID NO: 29335 - DNA, 4859 bp, Homo sapiens; identical to SEQ ID NO: 23111
  misc_feature 1, 2, 3, 4, 5, 6, 7, 8, 9, 10, 11, 12, 13, 14, 15, 16, 17,18, 19, 20, 21, 22, 23, 24, 25, 26, 27, 28, 29, 30, 31,4859: n = A,T,C or G

SEQ ID NO: 29336 - DNA, 1073 bp, Homo sapiens; identical to SEQ ID NO: 23360
  misc_feature 1, 2, 1051, 1052, 1053, 1054, 1055, 1056, 1057, 1058, 1059,1060, 1061, 1062, 1063, 1064, 1065, 1066, 1067, 1068, 1069,1070, 1071, 1072, 1073: n = A,T,C or G

SEQ ID NO: 29337 - DNA, 675 bp, Homo sapiens; identical to SEQ ID NO: 23450
  misc_feature 604, 622, 628, 659, 670, 671, 672, 673, 674, 675: n = A,T,C or G

SEQ ID NO: 29338 - DNA, 2678 bp, Homo sapiens; identical to SEQ ID NO: 23451
  misc_feature 1, 2, 3, 4, 5: n = A,T,C or G

SEQ ID NO: 29339 - DNA, 1505 bp, Homo sapiens; identical to SEQ ID NO: 23452
  misc_feature 1504, 1505: n = A,T,C or G

SEQ ID NO: 29340 - DNA, 2053 bp, Homo sapiens; identical to SEQ ID NO: 22286
  misc_feature 2052, 2053: n = A,T,C or G

SEQ ID NO: 29341 - DNA, 1352 bp, Homo sapiens; identical to SEQ ID NO: 23454
  misc_feature 1, 2, 3, 4, 1347, 1348, 1349, 1350, 1351, 1352: n = A,T,C or G

SEQ ID NO: 29342 - DNA, 1927 bp, Homo sapiens; identical to SEQ ID NO: 23455

SEQ ID NO: 29343 - DNA, 1883 bp, Homo sapiens; identical to SEQ ID NO: 23102

SEQ ID NO: 29344 - DNA, 1007 bp, Homo sapiens; identical to SEQ ID NO: 23457
  misc_feature 1, 2, 3, 999, 1000, 1001, 1002, 1003, 1004, 1005, 1006, 1007: n = A,T,C or G

SEQ ID NO: 29345 - DNA, 372 bp, Homo sapiens; identical to SEQ ID NO: 23458

SEQ ID NO: 29346 - DNA, 3316 bp, Homo sapiens; identical to SEQ ID NO: 23459
  misc_feature 1, 2, 3, 4, 5, 225, 226, 227, 228, 229, 230, 231, 232, 233,234, 235, 236, 237, 238, 239, 240, 241, 242, 243, 244, 245,246, 247, 248, 249, 250, 251, 252, 253, 254, 255, 256, 257,258, 259, 260, 261, 262, 263, 264, 265, 266, 267, 268: n = A,T,C or G
  misc_feature 269, 270, 271, 272, 273, 274, 275, 276, 277, 278, 279, 280,281, 282, 283, 284, 285, 286, 287, 288, 289, 290, 291, 292,293, 294, 295, 296, 297, 298, 299, 300, 301, 302, 303, 304,305, 306, 307, 308, 309, 310, 311, 312, 313, 314, 315: n = A,T,C or G
  misc_feature 316, 317, 318, 319, 320, 321, 322, 323, 324, 325, 326, 327,328, 329, 330, 331, 332, 333, 334, 335, 336, 451, 476: n = A,T,C or G

SEQ ID NO: 29347 - DNA, 1677 bp, Homo sapiens; identical to SEQ ID NO: 23460
  misc_feature 1676, 1677: n = A,T,C or G

SEQ ID NO: 29348 - DNA, 1040 bp, Homo sapiens; identical to SEQ ID NO: 23461
  misc_feature 1, 2, 1038, 1039, 1040: n = A,T,C or G

SEQ ID NO: 29349 - DNA, 1866 bp, Homo sapiens; identical to SEQ ID NO: 23492

SEQ ID NO: 29350 - DNA, 573 bp, Homo sapiens; identical to SEQ ID NO: 23463
  misc_feature 1, 2, 3, 4, 573: n = A,T,C or G

SEQ ID NO: 29351 - DNA, 272 bp, Homo sapiens; identical to SEQ ID NO: 23464
  misc_feature 270, 271, 272: n = A,T,C or G

SEQ ID NO: 29352 - DNA, 2361 bp, Homo sapiens; identical to SEQ ID NO: 20124
  misc_feature 1, 2, 3, 2361: n = A,T,C or G

SEQ ID NO: 29353 - DNA, 4816 bp, Homo sapiens; identical to SEQ ID NO: 23466
  misc_feature 226, 227, 228, 229, 230, 231, 232, 233, 234, 235, 236, 237,238, 239, 240, 241, 242, 243, 244, 245, 246, 247, 248, 249,250, 251, 252, 253, 254, 255, 256, 257, 258, 4807, 4808,4809, 4810, 4811, 4812, 4813, 4814, 4815, 4816: n = A,T,C or G

SEQ ID NO: 29354 - DNA, 1805 bp, Homo sapiens; identical to SEQ ID NO: 23467
  misc_feature 1, 2, 3, 4, 5, 6, 1804, 1805: n = A,T,C or G

SEQ ID NO: 29355 - DNA, 3228 bp, Homo sapiens; identical to SEQ ID NO: 22886
  misc_feature 1, 2, 3216, 3217, 3218, 3219, 3220, 3221, 3222, 3223, 3224,3225, 3226, 3227, 3228: n = A,T,C or G

SEQ ID NO: 29356 - DNA, 417 bp, Homo sapiens; identical to SEQ ID NO: 23469
  misc_feature 416, 417: n = A,T,C or G

SEQ ID NO: 29357 - DNA, 3983 bp, Homo sapiens; identical to SEQ ID NO: 21101

SEQ ID NO: 29358 - DNA, 719 bp, Homo sapiens; identical to SEQ ID NO: 23471
  misc_feature 718, 719: n = A,T,C or G

SEQ ID NO: 29359 - DNA, 594 bp, Homo sapiens; identical to SEQ ID NO: 23472

SEQ ID NO: 29360 - DNA, 1811 bp, Homo sapiens; identical to SEQ ID NO: 22429
  misc_feature 1, 2, 3, 4, 5, 55, 56, 57, 58, 59, 60, 61, 62, 63, 64, 65,66, 67, 68, 69, 70, 71, 72, 73, 74, 75, 76, 77, 78, 79,80, 81, 90, 1811: n = A,T,C or G

SEQ ID NO: 29361 - DNA, 1424 bp, Homo sapiens; identical to SEQ ID NO: 23474

SEQ ID NO: 29362 - DNA, 1632 bp, Homo sapiens; identical to SEQ ID NO: 23228

SEQ ID NO: 29363 - DNA, 3168 bp, Homo sapiens; identical to SEQ ID NO: 23476

SEQ ID NO: 29364 - DNA, 734 bp, Homo sapiens
  misc_feature 1, 2, 3, 4, 5, 6, 7, 8, 9, 10, 11, 12, 13, 14, 15, 16, 17,18, 19, 20, 21, 22, 23, 24, 25, 26, 27, 28, 29, 30, 31,32, 33, 34, 35, 36, 37, 38, 39, 40, 723, 724, 725, 726,727, 728, 729, 730, 731, 732, 733, 734: n = A,T,C or G
nnnnnnnnnnnnnnnnnnnnnnnnnnnnnnnnnnnnnnnntgttttttttttttttttttttttttttttttttttttttttttttttcaggcacagtggcagattttctttaatagatatatttcaaacagatacaacaaattaaaaaatctaattcacggcaggtaaacatgggtgctcaaaaagttccacatagacatttacacttgggccatcagtatttccctcacattcccttttgttaagtcccatcttcgcagtggcagtacaggagaaatctccaccgtcaccgcacaatccaccaggcgcattaccacctgaagtgaaggtctcatctcgaaggtgcgctcagccataaaaagaaaacatattacagaaaggaaaaataagtgtgctcttcccacccgcaaagcggtctcaccttcagttctagctttctttactccaaagtcttctgagtcttccaagcatctctttcgatttgttcccacactaatatgattaggaaatacattctgatgacccccatttaagatgccattgttatagaaatggttcagatgacaattctggaggttcaagagaaactgggcacactcttggaaaccctgggtttgtgcaatgtctgctgctgtcaggccactggcatttctcaggctgtacaacacaaaaacactgaattacaccccacccgcgttaattaattctagaagactttcgannnnnnnnnnnn

SEQ ID NO: 29365 - DNA, 2050 bp, Homo sapiens; identical to SEQ ID NO: 23478
  misc_feature 1883, 1884, 1885, 1886, 1887, 1888, 1889, 1902, 1903, 1904,1905, 1906, 1907, 1908, 1909, 1910, 1911, 1912, 1913, 1914,1915, 1916, 1917, 1918, 1919, 1920, 1921, 1922, 1923, 1924,1926, 2041, 2042, 2043, 2044, 2045, 2046, 2047, 2048: n = A,T,C or G
  misc_feature 2049, 2050: n = A,T,C or G

SEQ ID NO: 29366 - DNA, 2408 bp, Homo sapiens; identical to SEQ ID NO: 23479
  misc_feature 1, 2404, 2405, 2406, 2407, 2408: n = A,T,C or G

SEQ ID NO: 29367 - DNA, 2005 bp, Homo sapiens; identical to SEQ ID NO: 23480

SEQ ID NO: 29368 - DNA, 410 bp, Homo sapiens; identical to SEQ ID NO: 23481
  misc_feature 160: n = A,T,C or G

SEQ ID NO: 29369 - DNA, 1254 bp, Homo sapiens; identical to SEQ ID NO: 23482
  misc_feature 1, 2, 1254: n = A,T,C or G

SEQ ID NO: 29370 - DNA, 719 bp, Homo sapiens; identical to SEQ ID NO: 23483

SEQ ID NO: 29371 - DNA, 350 bp, Homo sapiens; identical to SEQ ID NO: 23484

SEQ ID NO: 29372 - DNA, 695 bp, Homo sapiens; identical to SEQ ID NO: 23485
  misc_feature 691, 692, 693, 694, 695: n = A,T,C or G

SEQ ID NO: 29373 - DNA, 2522 bp, Homo sapiens; identical to SEQ ID NO: 21114
  misc_feature 1, 2: n = A,T,C or G

SEQ ID NO: 29374 - DNA, 1643 bp, Homo sapiens; identical to SEQ ID NO: 21150
  misc_feature 1, 2, 3, 4, 1615, 1616, 1617, 1618, 1619, 1620, 1621, 1622,1623, 1624, 1625, 1626, 1627, 1628, 1629, 1630, 1631, 1632,1633, 1634, 1635, 1636, 1637, 1638, 1639, 1640, 1641, 1642,1643: n = A,T,C or G

SEQ ID NO: 29375 - DNA, 623 bp, Homo sapiens; identical to SEQ ID NO: 23490
  misc_feature 1, 2, 3, 4, 5, 6, 7, 8, 9, 10, 11, 12, 13, 14, 458, 459,460, 461, 462, 463, 464, 465, 466, 467, 468, 469, 470, 471,472, 473, 474, 475, 476, 477, 478, 479, 480: n = A,T,C or G

SEQ ID NO: 29376 - DNA, 435 bp, Homo sapiens; identical to SEQ ID NO: 23491
  misc_feature 263, 264, 265, 266, 267, 268, 269, 270, 271, 272, 273, 274,275, 276, 277, 278, 279, 280, 281, 282, 283, 284, 285, 286,287, 288, 289, 290, 291, 292, 293, 294, 434, 435: n = A,T,C or G

SEQ ID NO: 29377 - DNA, 2929 bp, Homo sapiens; identical to SEQ ID NO: 21129

SEQ ID NO: 29378 - DNA, 1632 bp, Homo sapiens; identical to SEQ ID NO: 22203
  misc_feature 1, 2, 3, 4, 5, 6, 1620, 1621, 1622, 1623, 1624, 1625, 1626,1627, 1628, 1629, 1630, 1631, 1632: n = A,T,C or G

SEQ ID NO: 29379 - DNA, 1109 bp, Homo sapiens; identical to SEQ ID NO: 23210
  misc_feature 1, 2, 1108, 1109: n = A,T,C or G

SEQ ID NO: 29380 - DNA, 1037 bp, Homo sapiens; identical to SEQ ID NO: 22323

SEQ ID NO: 29381 - DNA, 1234 bp, Homo sapiens; identical to SEQ ID NO: 23496
  misc_feature 180: n = A,T,C or G

SEQ ID NO: 29382 - DNA, 1044 bp, Homo sapiens; identical to SEQ ID NO: 23497
  misc_feature 1, 2, 3, 4, 5, 6, 7, 8, 9, 10, 11, 12, 13, 14, 15, 16, 28,1044: n = A,T,C or G

SEQ ID NO: 29383 - DNA, 906 bp, Homo sapiens; identical to SEQ ID NO: 23498
  misc_feature 1, 2, 903, 904, 905, 906: n = A,T,C or G

SEQ ID NO: 29384 - DNA, 904 bp, Homo sapiens; identical to SEQ ID NO: 23499
  misc_feature 904: n = A,T,C or G

SEQ ID NO: 29385 - DNA, 361 bp, Homo sapiens; identical to SEQ ID NO: 23500
  misc_feature 1: n = A,T,C or G

SEQ ID NO: 29386 - DNA, 816 bp, Homo sapiens; identical to SEQ ID NO: 21390

SEQ ID NO: 29387 - DNA, 1304 bp, Homo sapiens; identical to SEQ ID NO: 23501
  misc_feature 1, 2, 3, 4, 5, 6, 7, 8, 9, 10, 11, 251, 308, 594, 595, 596,597, 598, 599, 600, 601, 602, 603, 604, 605, 606, 607, 608,609, 610, 611, 612, 613, 614, 615, 616, 1299, 1300, 1301,1302, 1303, 1304: n = A,T,C or G

SEQ ID NO: 29388 - DNA, 1615 bp, Homo sapiens; identical to SEQ ID NO: 23502
  misc_feature 1, 1615: n = A,T,C or G

SEQ ID NO: 29389 - DNA, 647 bp, Homo sapiens; identical to SEQ ID NO: 23503
  misc_feature 1, 2, 3, 4: n = A,T,C or G

SEQ ID NO: 29390 - DNA, 1652 bp, Homo sapiens; identical to SEQ ID NO: 23504
  misc_feature 1, 1627, 1628, 1629, 1630, 1631, 1632, 1633, 1634, 1635,1636, 1637, 1638, 1639, 1640, 1641, 1642, 1643, 1644, 1645,1646, 1647, 1648, 1649, 1650, 1651, 1652: n = A,T,C or G

SEQ ID NO: 29391 - DNA, 374 bp, Homo sapiens; identical to SEQ ID NO: 21132
  misc_feature 1: n = A,T,C or G

SEQ ID NO: 29392 - DNA, 698 bp, Homo sapiens; identical to SEQ ID NO: 23507
  misc_feature 1, 2, 13, 678, 679, 680, 681, 682, 683, 684, 685, 686, 687,688, 689, 690, 691, 692, 693, 694, 695, 696, 697, 698: n = A,T,C or G

SEQ ID NO: 29393 - DNA, 1404 bp, Homo sapiens; identical to SEQ ID NO: 23508
  misc_feature 1, 2, 3, 4, 5: n = A,T,C or G

SEQ ID NO: 29394 - DNA, 341 bp, Homo sapiens; identical to SEQ ID NO: 23509
  misc_feature 341: n = A,T,C or G

SEQ ID NO: 29395 - DNA, 1692 bp, Homo sapiens; identical to SEQ ID NO: 23510
  misc_feature 1, 2, 3, 4, 1690, 1691, 1692: n = A,T,C or G

SEQ ID NO: 29396 - DNA, 2041 bp, Homo sapiens; identical to SEQ ID NO: 22247
  misc_feature 1, 2, 3, 2025, 2026, 2027, 2028, 2029, 2030, 2031, 2032,2033, 2034, 2035, 2036, 2037, 2038, 2039, 2040, 2041: n = A,T,C or G

SEQ ID NO: 29397 - DNA, 3069 bp, Homo sapiens; identical to SEQ ID NO: 23512
  misc_feature 1, 3067, 3068, 3069: n = A,T,C or G

SEQ ID NO: 29398 - DNA, 958 bp, Homo sapiens; identical to SEQ ID NO: 23513

SEQ ID NO: 29399 - DNA, 1242 bp, Homo sapiens; identical to SEQ ID NO: 23514
  misc_feature 1, 417, 1234, 1235, 1236, 1237, 1238, 1239, 1240, 1241, 1242: n = A,T,C or G

SEQ ID NO: 29400 - DNA, 1015 bp, Homo sapiens; identical to SEQ ID NO: 23515
  misc_feature 1, 1014, 1015: n = A,T,C or G

SEQ ID NO: 29401 - DNA, 695 bp, Homo sapiens; identical to SEQ ID NO: 23516

SEQ ID NO: 29402 - DNA, 355 bp, Homo sapiens; identical to SEQ ID NO: 23517

SEQ ID NO: 29403 - DNA, 1780 bp, Homo sapiens; identical to SEQ ID NO: 23518
  misc_feature 1, 1771, 1772, 1773, 1774, 1775, 1776, 1777, 1778, 1779,1780: n = A,T,C or G

SEQ ID NO: 29404 - DNA, 4386 bp, Homo sapiens; identical to SEQ ID NO: 23519

SEQ ID NO: 29405 - DNA, 1696 bp, Homo sapiens; identical to SEQ ID NO: 23520
  misc_feature 1, 1694, 1695, 1696: n = A,T,C or G

SEQ ID NO: 29406 - DNA, 1782 bp, Homo sapiens; identical to SEQ ID NO: 21380
  misc_feature 1766, 1767, 1768, 1769, 1770, 1771, 1772, 1773, 1774, 1775,1776, 1777, 1778, 1779, 1780, 1781, 1782: n = A,T,C or G

SEQ ID NO: 29407 - DNA, 1113 bp, Homo sapiens; identical to SEQ ID NO: 23522
  misc_feature 1, 2, 1112, 1113: n = A,T,C or G

SEQ ID NO: 29408 - DNA, 1113 bp, Homo sapiens; identical to SEQ ID NO: 23522
  misc_feature 1, 2, 1112, 1113: n = A,T,C or G

SEQ ID NO: 29409 - DNA, 1113 bp, Homo sapiens; identical to SEQ ID NO: 23522
  misc_feature 1, 2, 1112, 1113: n = A,T,C or G

SEQ ID NO: 29410 - DNA, 1113 bp, Homo sapiens; identical to SEQ ID NO: 23522
  misc_feature 1, 2, 1112, 1113: n = A,T,C or G

SEQ ID NO: 29411 - DNA, 2608 bp, Homo sapiens; identical to SEQ ID NO: 21241
  misc_feature 1, 2, 3, 4, 5, 6, 7, 8, 9, 10, 11, 12, 13, 14, 15, 16, 17,18, 19, 20, 21, 22, 2607, 2608: n = A,T,C or G

SEQ ID NO: 29412 - DNA, 1113 bp, Homo sapiens; identical to SEQ ID NO: 23522
  misc_feature 1, 2, 1112, 1113: n = A,T,C or G

SEQ ID NO: 29413 - DNA, 1113 bp, Homo sapiens; identical to SEQ ID NO: 23522
  misc_feature 1, 2, 1112, 1113: n = A,T,C or G

SEQ ID NO: 29414 - DNA, 1113 bp, Homo sapiens; identical to SEQ ID NO: 23522
  misc_feature 1, 2, 1112, 1113: n = A,T,C or G

SEQ ID NO: 29415 - DNA, 869 bp, Homo sapiens; identical to SEQ ID NO: 21180
  misc_feature 1, 2, 3, 820, 821, 822, 846, 867, 868, 869: n = A,T,C or G

SEQ ID NO: 29416 - DNA, 545 bp, Homo sapiens; identical to SEQ ID NO: 21184
  misc_feature 1, 2, 37, 542, 543, 544, 545: n = A,T,C or G

SEQ ID NO: 29417 - DNA, 535 bp, Homo sapiens; identical to SEQ ID NO: 23532
  misc_feature 535: n = A,T,C or G

SEQ ID NO: 29418 - DNA, 565 bp, Homo sapiens; identical to SEQ ID NO: 21169
  misc_feature 563, 564, 565: n = A,T,C or G

SEQ ID NO: 29419 - DNA, 650 bp, Homo sapiens; identical to SEQ ID NO: 21165

SEQ ID NO: 29420 - DNA, 450 bp, Homo sapiens; identical to SEQ ID NO: 23535
  misc_feature 1, 446, 447, 448, 449, 450: n = A,T,C or G

SEQ ID NO: 29421 - DNA, 450 bp, Homo sapiens; identical to SEQ ID NO: 23535
  misc_feature 1, 446, 447, 448, 449, 450: n = A,T,C or G

SEQ ID NO: 29422 - DNA, 434 bp, Homo sapiens; identical to SEQ ID NO: 21248

SEQ ID NO: 29423 - DNA, 956 bp, Homo sapiens; identical to SEQ ID NO: 23538
  misc_feature 951, 952, 953, 954, 955, 956: n = A,T,C or G

SEQ ID NO: 29424 - DNA, 584 bp, Homo sapiens; identical to SEQ ID NO: 23539
  misc_feature 575, 576, 577, 578, 579, 580, 581, 582, 583, 584: n = A,T,C or G

SEQ ID NO: 29425 - DNA, 569 bp, Homo sapiens; identical to SEQ ID NO: 21176
  misc_feature 563, 564, 565, 566, 567, 568, 569: n = A,T,C or G

SEQ ID NO: 29426 - DNA, 869 bp, Homo sapiens; identical to SEQ ID NO: 21180
  misc_feature 1, 2, 3, 820, 821, 822, 846, 867, 868, 869: n = A,T,C or G

SEQ ID NO: 29427 - DNA, 869 bp, Homo sapiens; identical to SEQ ID NO: 21180
  misc_feature 1, 2, 3, 820, 821, 822, 846, 867, 868, 869: n = A,T,C or G

SEQ ID NO: 29428 - DNA, 650 bp, Homo sapiens; identical to SEQ ID NO: 21165

SEQ ID NO: 29429 - DNA, 575 bp, Homo sapiens; identical to SEQ ID NO: 21190
  misc_feature 1, 2, 575: n = A,T,C or G

SEQ ID NO: 29430 - DNA, 535 bp, Homo sapiens; identical to SEQ ID NO: 23532
  misc_feature 535: n = A,T,C or G

SEQ ID NO: 29431 - DNA, 557 bp, Homo sapiens; identical to SEQ ID NO: 21209
  misc_feature 556, 557: n = A,T,C or G

SEQ ID NO: 29432 - DNA, 434 bp, Homo sapiens; identical to SEQ ID NO: 21248

SEQ ID NO: 29433 - DNA, 587 bp, Homo sapiens; identical to SEQ ID NO: 21164
  misc_feature 1, 581, 582, 583, 584, 585, 586, 587: n = A,T,C or G

SEQ ID NO: 29434 - DNA, 434 bp, Homo sapiens; identical to SEQ ID NO: 21248

SEQ ID NO: 29435 - DNA, 869 bp, Homo sapiens; identical to SEQ ID NO: 21180
  misc_feature 1, 2, 3, 820, 821, 822, 846, 867, 868, 869: n = A,T,C or G

SEQ ID NO: 29436 - DNA, 434 bp, Homo sapiens; identical to SEQ ID NO: 21248

SEQ ID NO: 29437 - DNA, 434 bp, Homo sapiens; identical to SEQ ID NO: 21248

SEQ ID NO: 29438 - DNA, 545 bp, Homo sapiens; identical to SEQ ID NO: 21184
  misc_feature 1, 2, 37, 542, 543, 544, 545: n = A,T,C or G

SEQ ID NO: 29439 - DNA, 545 bp, Homo sapiens; identical to SEQ ID NO: 21184
  misc_feature 1, 2, 37, 542, 543, 544, 545: n = A,T,C or G

SEQ ID NO: 29440 - DNA, 561 bp, Homo sapiens; identical to SEQ ID NO: 23556
  misc_feature 561: n = A,T,C or G

SEQ ID NO: 29441 - DNA, 587 bp, Homo sapiens; identical to SEQ ID NO: 21164
  misc_feature 1, 581, 582, 583, 584, 585, 586, 587: n = A,T,C or G

SEQ ID NO: 29442 - DNA, 499 bp, Homo sapiens; identical to SEQ ID NO: 21187
  misc_feature 1, 2, 3, 8, 12, 13, 15, 24, 25, 28, 31, 497, 498, 499: n = A,T,C or G

SEQ ID NO: 29443 - DNA, 650 bp, Homo sapiens; identical to SEQ ID NO: 21165

SEQ ID NO: 29444 - DNA, 1798 bp, Homo sapiens; identical to SEQ ID NO: 23560
  misc_feature 1, 2, 3, 4, 5, 6, 7, 8, 9, 10, 11, 12, 1796, 1797, 1798: n = A,T,C or G

SEQ ID NO: 29445 - DNA, 1007 bp, Homo sapiens; identical to SEQ ID NO: 23561
  misc_feature 1, 2, 3, 4, 1005, 1006, 1007: n = A,T,C or G

SEQ ID NO: 29446 - DNA, 869 bp, Homo sapiens; identical to SEQ ID NO: 21180
  misc_feature 1, 2, 3, 820, 821, 822, 846, 867, 868, 869: n = A,T,C or G

SEQ ID NO: 29447 - DNA, 434 bp, Homo sapiens; identical to SEQ ID NO: 21248

SEQ ID NO: 29448 - DNA, 1359 bp, Homo sapiens; identical to SEQ ID NO: 23564
  misc_feature 1, 2, 3, 4, 5, 6, 7, 8, 9, 10, 11, 12, 13, 14, 15, 16, 17,18, 19, 20, 21, 22, 23, 194, 1359: n = A,T,C or G

SEQ ID NO: 29449 - DNA, 313 bp, Homo sapiens; identical to SEQ ID NO: 21174
  misc_feature 1, 311, 312, 313: n = A,T,C or G

SEQ ID NO: 29450 - DNA, 650 bp, Homo sapiens; identical to SEQ ID NO: 21165

SEQ ID NO: 29451 - DNA, 557 bp, Homo sapiens; identical to SEQ ID NO: 21209
  misc_feature 556, 557: n = A,T,C or G

SEQ ID NO: 29452 - DNA, 530 bp, Homo sapiens; identical to SEQ ID NO: 23577
  misc_feature 525, 526, 527, 528, 529, 530: n = A,T,C or G

SEQ ID NO: 29453 - DNA, 869 bp, Homo sapiens; identical to SEQ ID NO: 21180
  misc_feature 1, 2, 3, 820, 821, 822, 846, 867, 868, 869: n = A,T,C or G

SEQ ID NO: 29454 - DNA, 869 bp, Homo sapiens; identical to SEQ ID NO: 21180
  misc_feature 1, 2, 3, 820, 821, 822, 846, 867, 868, 869: n = A,T,C or G

SEQ ID NO: 29455 - DNA, 557 bp, Homo sapiens; identical to SEQ ID NO: 21209
  misc_feature 556, 557: n = A,T,C or G

SEQ ID NO: 29456 - DNA, 587 bp, Homo sapiens; identical to SEQ ID NO: 21164
  misc_feature 1, 581, 582, 583, 584, 585, 586, 587: n = A,T,C or G

SEQ ID NO: 29457 - DNA, 587 bp, Homo sapiens; identical to SEQ ID NO: 21164
  misc_feature 1, 581, 582, 583, 584, 585, 586, 587: n = A,T,C or G

SEQ ID NO: 29458 - DNA, 1732 bp, Homo sapiens
  misc_feature 606: n = A,T,C or G
cgacccacgcgtccgggcggctgaggcgcgtgctctcgcgtggtcgctgggtctgcgtcttcccgagccagtgtgctgagctctccggcgtcgcctctgtcgcccgcgcctggcctaccgcggcactcccggctgcacgctctgcttggcctcgccatgccggtggacctcagcaagtggtccgggcccttgagcctgcaagaagtggacgagcagccgcagcacccgctgcatgtcacctacgccggggcggcggtggacgagctgggcaaagtgctgacgcccacccaggttaagaatagacccaccagcatttcgtgggatggtcttgattcagggaagctctacaccttggtcctgacagacccggatgctcccagcaggaaggatcccaaatacagagaatggcatcatttcctggtggtcaacatgaagggcaatgacatcagcagtggcacagtcctctccgattatgtgggctcggggcctcccaagggcacaggcctccaccgctatgtctggctggtttacgagcaggacaggccgctaaagtgtgacgagcccatccagatcggttgctgaggatgggctcgtcacatgtacgangcaaccgatctggagaccaccgtggcaaattcaaggtggcgtccttccgtaaaaagtatgagctcagggccccggtggctggcacgtgttaccaggccgagtgggatgactatgtgcccaaactgtacgagcagctgtctgggaagtagggggttagcttggggacctgaactgtcctggaggccccaagccatgttccccagttcagtgttgcatgtataatagatttctcctcttcctgccccccttggcatgggtgagacctgaccagtcagatggtagttgagggtgacttttcctgctgcctggcctttataattttactcactcactctgatttatgttttgatcaaatttgaacttcattttggggggtattttggtactgtgatggggtcatcaaattattaatctgaaaatagcaacccagaatgtaaaaaagaaaaaactggggggaaaaagaccaggtctacagtgatagagcaaagcatcaaagaatctttaaggaaggtttaaaaaaaaaaaaaaaaaaaaagattggttgcctctgcctttgtgatcctgagtccagaatggtacacaatgtgattttatggtgatgtcactcacctagacaaccagaggctggcattgaggctaacctccaacacagtgcatctcagatgcctcagtaggcatcagtatgtcactctggtccctttaaagagcaatcctggaagaagcaggagggagggtggctttgctgttgttgggacatggcaatctagaccggcagcagcgctcgctgacagcttgggaggaaacctgagatctgtgttttttaaattgatcgttcttcatgggggtaagaaaagctggtctggagttgctgaatgttgcattaattgtgctgtttgcttgtagttgaataaaaatagaaacctgaatgaaaaaaaaaaaaaaaaaaaaaactcgagggggggcccggtacccaattcgccctatagtgagtcgtattacaattcactggccgtcgttttacaacgtcgtgactgggaaaaccctggggttacccaacttaatcgccttgcagaacattacccctttcgccagctggcgtaatagcggagggccgcaccgttggccc

SEQ ID NO: 29459 - DNA, 575 bp, Homo sapiens; identical to SEQ ID NO: 21190
  misc_feature 1, 2, 575: n = A,T,C or G

SEQ ID NO: 29460 - DNA, 313 bp, Homo sapiens; identical to SEQ ID NO: 21174
  misc_feature 1, 311, 312, 313: n = A,T,C or G

SEQ ID NO: 29461 - DNA, 311 bp, Homo sapiens; identical to SEQ ID NO: 23575
  misc_feature 1, 2: n = A,T,C or G

SEQ ID NO: 29462 - DNA, 545 bp, Homo sapiens; identical to SEQ ID NO: 21184
  misc_feature 1, 2, 37, 542, 543, 544, 545: n = A,T,C or G

SEQ ID NO: 29463 - DNA, 530 bp, Homo sapiens; identical to SEQ ID NO: 23577
  misc_feature 525, 526, 527, 528, 529, 530: n = A,T,C or G

SEQ ID NO: 29464 - DNA, 869 bp, Homo sapiens; identical to SEQ ID NO: 21180
  misc_feature 1, 2, 3, 820, 821, 822, 846, 867, 868, 869: n = A,T,C or G

SEQ ID NO: 29465 - DNA, 869 bp, Homo sapiens; identical to SEQ ID NO: 21180
  misc_feature 1, 2, 3, 820, 821, 822, 846, 867, 868, 869: n = A,T,C or G

SEQ ID NO: 29466 - DNA, 545 bp, Homo sapiens; identical to SEQ ID NO: 21184
  misc_feature 1, 2, 37, 542, 543, 544, 545: n = A,T,C or G

SEQ ID NO: 29467 - DNA, 869 bp, Homo sapiens; identical to SEQ ID NO: 21180
  misc_feature 1, 2, 3, 820, 821, 822, 846, 867, 868, 869: n = A,T,C or G

SEQ ID NO: 29468 - DNA, 869 bp, Homo sapiens; identical to SEQ ID NO: 21180
  misc_feature 1, 2, 3, 820, 821, 822, 846, 867, 868, 869: n = A,T,C or G

SEQ ID NO: 29469 - DNA, 545 bp, Homo sapiens; identical to SEQ ID NO: 21184
  misc_feature 1, 2, 37, 542, 543, 544, 545: n = A,T,C or G

SEQ ID NO: 29470 - DNA, 569 bp, Homo sapiens; identical to SEQ ID NO: 21176
  misc_feature 563, 564, 565, 566, 567, 568, 569: n = A,T,C or G

SEQ ID NO: 29471 - DNA, 869 bp, Homo sapiens; identical to SEQ ID NO: 21180
  misc_feature 1, 2, 3, 820, 821, 822, 846, 867, 868, 869: n = A,T,C or G

SEQ ID NO: 29472 - DNA, 530 bp, Homo sapiens; identical to SEQ ID NO: 23577
  misc_feature 525, 526, 527, 528, 529, 530: n = A,T,C or G

SEQ ID NO: 29473 - DNA, 869 bp, Homo sapiens; identical to SEQ ID NO: 21180
  misc_feature 1, 2, 3, 820, 821, 822, 846, 867, 868, 869: n = A,T,C or G

SEQ ID NO: 29474 - DNA, 869 bp, Homo sapiens; identical to SEQ ID NO: 21180
  misc_feature 1, 2, 3, 820, 821, 822, 846, 867, 868, 869: n = A,T,C or G

SEQ ID NO: 29475 - DNA, 869 bp, Homo sapiens; identical to SEQ ID NO: 21180
  misc_feature 1, 2, 3, 820, 821, 822, 846, 867, 868, 869: n = A,T,C or G

SEQ ID NO: 29476 - DNA, 587 bp, Homo sapiens; identical to SEQ ID NO: 21164
  misc_feature 1, 581, 582, 583, 584, 585, 586, 587: n = A,T,C or G

SEQ ID NO: 29477 - DNA, 869 bp, Homo sapiens; identical to SEQ ID NO: 21180
  misc_feature 1, 2, 3, 820, 821, 822, 846, 867, 868, 869: n = A,T,C or G

SEQ ID NO: 29478 - DNA, 530 bp, Homo sapiens; identical to SEQ ID NO: 23577
  misc_feature 525, 526, 527, 528, 529, 530: n = A,T,C or G

SEQ ID NO: 29479 - DNA, 557 bp, Homo sapiens; identical to SEQ ID NO: 21209
  misc_feature 556, 557: n = A,T,C or G

SEQ ID NO: 29480 - DNA, 869 bp, Homo sapiens; identical to SEQ ID NO: 21180
  misc_feature 1, 2, 3, 820, 821, 822, 846, 867, 868, 869: n = A,T,C or G

SEQ ID NO: 29481 - DNA, 545 bp, Homo sapiens; identical to SEQ ID NO: 21184
  misc_feature 1, 2, 37, 542, 543, 544, 545: n = A,T,C or G

SEQ ID NO: 29482 - DNA, 575 bp, Homo sapiens; identical to SEQ ID NO: 21190
  misc_feature 1, 2, 575: n = A,T,C or G

SEQ ID NO: 29483 - DNA, 313 bp, Homo sapiens; identical to SEQ ID NO: 21174
  misc_feature 1, 311, 312, 313: n = A,T,C or G

SEQ ID NO: 29484 - DNA, 662 bp, Homo sapiens; identical to SEQ ID NO: 23598
  misc_feature 584, 655, 656, 657, 658, 659, 660, 661, 662: n = A,T,C or G

SEQ ID NO: 29485 - DNA, 557 bp, Homo sapiens; identical to SEQ ID NO: 21209
  misc_feature 556, 557: n = A,T,C or G

SEQ ID NO: 29486 - DNA, 292 bp, Homo sapiens; identical to SEQ ID NO: 23600
  misc_feature 1, 2, 3, 4, 5, 6, 7, 8, 9, 10, 11, 12: n = A,T,C or G

SEQ ID NO: 29487 - DNA, 492 bp, Homo sapiens; identical to SEQ ID NO: 21256
  misc_feature 492: n = A,T,C or G

SEQ ID NO: 29488 - DNA, 650 bp, Homo sapiens; identical to SEQ ID NO: 21165

SEQ ID NO: 29489 - DNA, 762 bp, Homo sapiens; identical to SEQ ID NO: 23603
  misc_feature 1, 762: n = A,T,C or G

SEQ ID NO: 29490 - DNA, 869 bp, Homo sapiens; identical to SEQ ID NO: 21180
  misc_feature 1, 2, 3, 820, 821, 822, 846, 867, 868, 869: n = A,T,C or G

SEQ ID NO: 29491 - DNA, 1047 bp, Homo sapiens; identical to SEQ ID NO: 23605

SEQ ID NO: 29492 - DNA, 650 bp, Homo sapiens; identical to SEQ ID NO: 21165

SEQ ID NO: 29493 - DNA, 650 bp, Homo sapiens; identical to SEQ ID NO: 21165

SEQ ID NO: 29494 - DNA, 1709 bp, Homo sapiens; identical to SEQ ID NO: 23608
  misc_feature 1, 761, 1708, 1709: n = A,T,C or G

SEQ ID NO: 29495 - DNA, 563 bp, Homo sapiens; identical to SEQ ID NO: 23609
  misc_feature 1, 2, 563: n = A,T,C or G

SEQ ID NO: 29496 - DNA, 561 bp, Homo sapiens; identical to SEQ ID NO: 23556
  misc_feature 561: n = A,T,C or G

SEQ ID NO: 29497 - DNA, 390 bp, Homo sapiens; identical to SEQ ID NO: 21211

SEQ ID NO: 29498 - DNA, 2477 bp, Homo sapiens; identical to SEQ ID NO: 23612
  misc_feature 1, 2477: n = A,T,C or G

SEQ ID NO: 29499 - DNA, 760 bp, Homo sapiens
cacgcgtccggcgccatgtccggccgcgaaggtggcaagaagaagccactgaaacagcccaagaagcaggccaaggagatggacgaggtgagggcgggcgcggaggcactggcgggtgcgggggcgctgggagacaggcctgagttgaacacgctctgcctctccccaggaagataaggctttcaagcagaaacaaaaagaggagcagaagaaactcgaggagctaaaagcgaaggccgcggggaaggggcccttggccacaggtggaattaagaaatctggcaaaaagtaagctgttccttgtgcctgaggagatggtgaccctttatttcatctgtatttaaacctctctattccctgccataacatcttttgccacgtatagctggaattaagtgttgtcttggagctgttgtacatttaagaataaacttttgtaaaaaaaaaaaaaaaaaaaaaaaaaaaaaaaaaaaaaaaaaaaaaaaaaaaaaaaaaaaaaaaaaaaaaaaaaaaaaaaaaaaaaaaaaaaaaaaaaaaaaaaaaaaaaaaaaaaaaaaaaaaaaaaaaaaaaaaaaaaaaaaaaaaaaaaaaacccccccccccccccgggggggccccccatcccccccaaagggggggtttatccccccccccccggggcggtttttaaaaaaggggggagggggaaaaccccggggtgccccaaataaaaggcgggggaaaaaaatccctttttaaaggggggggaaaaaaaaaaaga

SEQ ID NO: 29500 - DNA, 385 bp, Homo sapiens; identical to SEQ ID NO: 23614

SEQ ID NO: 29501 - DNA, 2849 bp, Homo sapiens; identical to SEQ ID NO: 23615
  misc_feature 1, 2664: n = A,T,C or G

SEQ ID NO: 29502 - DNA, 1004 bp, Homo sapiens
  misc_feature 1, 2, 991, 992, 993, 994, 995, 996, 997, 998, 999, 1000,1001, 1002, 1003, 1004: n = A,T,C or G
nnatcaacgcggcgtgccgcaatggctcggggaggaattaacgcgggggtcagaaggctgggcagccatggcgtcctatttcgatgaacacgactgcgagccgtcggaccctgagcaggagacgcgaaccaacatgctgctggagctcgcaaggtcacttttcaataggatggactttgaagacttggggttggtagtagattgggaccaccacctgcctccaccagctgccaagactgtggttgagaacctccccaggacagtcatcagaggctctcaggctgagctcaagtgccccgtgtgtcttttggaatttgaggaggaggagactgccattgagatgccttgccatcaccttttccattccagctgcattctgccctggctaagcaagacaaattcctgtcccttgtgccgctatgagctgcccactgatgacgacacttatgaggagcacagacgagataaggctcgaaaacagcagcagcaacaccgactggagaacctccatggagccatgtacacgtgaggaggttggggctgagtgctggccctctgcgtcttccttattaaccttgaatcctcattaaaggtttctttacccacaaaaaagctatattaatcacagacctggccaggggctctgcatcctccatcaggtctctacttctgttggggaaggtgatcctaaatcgagaaagcacaggctgcggtttcctcccctgtggccatctggactcatggagtggtaaaagaactggattactggcatagccagggttgcggctatgtgttcatggttggaaggcacatgtgtcgggtctggtcccccagtcattaccttaagtgataactaaggtggtgcaggggcctgtttgtatggccagcgttgggaggccgccaggtgtacacgggcggagttggacctctgccacgggaaccggtctgctaaaacacttcgggtggggcctgtatcccattggggggcggnnnnnnnnnnnnnn

SEQ ID NO: 29503 - DNA, 650 bp, Homo sapiens; identical to SEQ ID NO: 21165

SEQ ID NO: 29504 - DNA, 869 bp, Homo sapiens; identical to SEQ ID NO: 21180
  misc_feature 1, 2, 3, 820, 821, 822, 846, 867, 868, 869: n = A,T,C or G

SEQ ID NO: 29505 - DNA, 527 bp, Homo sapiens; identical to SEQ ID NO: 21254
  misc_feature 1, 2, 3, 521, 522, 523, 524, 525, 526, 527: n = A,T,C or G

SEQ ID NO: 29506 - DNA, 313 bp, Homo sapiens; identical to SEQ ID NO: 21174
  misc_feature 1, 311, 312, 313: n = A,T,C or G

SEQ ID NO: 29507 - DNA, 2277 bp, Homo sapiens
cgcgtccgcctgacgtcagcgtcgcgcgcagcgcagtgacgaaatcggctggtttatattggcgcggcccagacggcagaggtctctgcggcgcggtcctcggagacacgcggcggtgtcctgtgttggccatggccgactacctgattagtgggggcacgtcctacgtgccagacgacggactcacagcacagcagctcttcaactgcggagacggcctcacctacaatgactttctcattctccctgggtacatcgacttcactgcagaccaggtggacctgacttctgctctgaccaagaaaatcactcttaagaccccactggtttcctctcccatggacacagtcacagaggctgggatggccatagcaatggcgcttacaggcggtattggcttcatccaccacaactgtacacctgaattccaggccaatgaagttcggaaagtgaagaaatatgaacagggattcatcacagaccctgtggtcctcagccccaaggatcgcgtgcgggatgtttttgaggccaaggcccggcatggtttctgcggtatcccaatcacagacacaggccggatggggagccgcttggtgggcatcatctcctccagggacattgattttctcaaagaggaggaacatgactgtttcttggaagagataatgacaaagagggaagacttggtggtagcccctgcaggcatcacactgaaggaggcaaatgaaattctgcagcgcagcaagaagggaaagttgcccattgtaaatgaagatgatgagcttgtggccatcattgcccggacagacctgaagaagaatcgggactacccactagcctccaaagatgccaagaaacagctgctgtgtggggcagccattggcactcatgaggatgacaagtataggctggacttgctcgcccaggctggtgtggatgtagtggttttggactcttcccagggaaattccatcttccagatcaatatgatcaagtacatcaaagacaaataccctaatctccaagtcattggaggcaatgtggtcactgctgcccaggccgagaacctcattgatgcaggtgtggatgccctgcgggtgggcatgggaagtggctccatctgcattacgcaggaagtgctggcctgtgggcggccccaagcaacagcagtgtacaaggtgtcagagtatgcacggcgctttggtgttccggtcattgctgatggaggaatccaaaatgtgggtcatattgcgaaagccttggcccttggggcctccacagtcatgatgggctctctcctggctgccaccactgaggcccctggtgaatacttcttttccgatgggatccggctaaagaaatatcgcggtatgggttctctcgatgccatggacaagcacctcagcagccagaacagatatttcagtgaagctgacaaaatcaaagtggcccagggagtgtctggtgctgtgcaggacaaagggtcaatccacaaatttgtcccttacctgattgctggcatccaacactcatgccaggacattggtgccaagagcttgacccaagtccgagccatgatgtactctggggagcttaagtttgagaagagaacgtcctcagcccaggtggaaggtggcgtccatagcctccattcgtatgagaagcggcttttctgaaaagggatccagcacacctcctcggtttttttttcaataaaagtttagaaagaaaaaaaaaaaaaaaaaaaaaaaaaaaaaaaaaaaaaaaaaaaaaaaaaaaaaaaaaaaaaaccaccccaccccacttctcctccccccaccccccccggggagtttgggggggggcccaaccaagaagggccgccgcgaggaggggggcggagggaggggcgaccaacagaaagagctgtgagggaggccccccaacggaggaagtgtggggacacgagagaggaagaagagagcaccgcgagagggattcacccgaaataccaaaaaacggcgggggaaaaaagggaggaggaggagacgaggggagacccaagagcgggagtgtgtgtaacaacacccggacgcaccaccccgcgggagggagactacctatgaacaacacacccgggagggaagggcgggtggcggggaccacaccgaaaaaagacagcgacccgagaaaaaaaaaaacgggtaacacccacgagtggcgaaatttgtgggccacaaggggagaacaacggaatacaaaagaagagaacagcccgcgccaaacacaaaagggaca

SEQ ID NO: 29508 - DNA, 943 bp, Homo sapiens
gagtcgacccacgcgtccggcaacgtccgacagaacgaggggacgtaacggaggcaggttggagccgctgccgtcgccatgacccgcggtaaccagcgtgagctcgcccgccagaagaatatgaaaaagcagagcgactcggttaagggaaagcgccgagatgacgggctttctgctgccgcccgcaagcagagtgccccatcatctctacccccagggactcggagatcatgcagcagaagcagaaaaaggcaaacgagaagaaggaggaacccaagtagctttgtggcttcgtgtccaaccctcttgcccttcgcctgtgtgcctggagccagtcccaccacgctcgcgtttcctcctgtagtgctcacaggtcccagcaccgatggcattccctttgccctgagtctgcagcgggtcccttttgtgcttccttcccctcaggtagcctctctccccctgggccactcccgggggtgagggggttaccccttcccagtgttttttattcctgtggggctcaccccaaagtattaaaagtagctttgtaattcaaaaaaaaaaaaaaaaaactcgagggggggcccggtacccaattcgccctatagtgagtcgtattacaattcactggccgtcgttttacaacgtcgtgactgggaaaaccctggcgttacccaacttaatcgccttgcagcacatccccctttcgccagctggcgtaatagcgaagaggcccgcaccgatcggcctttccaacagttgcgcagcctgaatggcgaatggaacatggtagcgtaatattttgtaaaattcgggtaaattttgtaaccagttatttttaaccaatggcccgaatcggcaaattcctattaataaggaaagacgagatagggtggggtgttcagttggacaagagccctattatagacgtggctcaagctaa

SEQ ID NO: 29509 - DNA, 575 bp, Homo sapiens; identical to SEQ ID NO: 21190
  misc_feature 1, 2, 575: n = A,T,C or G

SEQ ID NO: 29510 - DNA, 618 bp, Homo sapiens; identical to SEQ ID NO: 21167
  misc_feature 1, 2, 3, 4, 5, 6, 7, 8, 9, 10, 11, 12, 13, 14, 15, 16, 17,18, 19, 614, 615, 616, 617, 618: n = A,T,C or G

SEQ ID NO: 29511 - DNA, 4742 bp, Homo sapiens; identical to SEQ ID NO: 21009
  misc_feature 1, 4740, 4741, 4742: n = A,T,C or G

SEQ ID NO: 29512 - DNA, 2653 bp, Homo sapiens; identical to SEQ ID NO: 23624
  misc_feature 1, 2, 2642, 2643, 2644, 2645, 2646, 2647, 2648, 2649, 2650,2651, 2652, 2653: n = A,T,C or G

SEQ ID NO: 29513 - DNA, 570 bp, Homo sapiens; identical to SEQ ID NO: 23625
  misc_feature 150, 151, 152, 153, 154, 155, 156, 157, 158, 159, 160, 161,162, 163, 164, 165, 166, 167, 168, 169, 170, 171, 172, 173,569, 570: n = A,T,C or G

SEQ ID NO: 29514 - DNA, 535 bp, Homo sapiens; identical to SEQ ID NO: 23626
  misc_feature 531, 532, 533, 534, 535: n = A,T,C or G

SEQ ID NO: 29515 - DNA, 673 bp, Homo sapiens
ctgggtactcgtggcccccctcgagagtacttctagaattaattaacgcgggggcagaaaagggggcggcggactcggcttgttgtgttgctgcctgagtgccggagacggtcctgctgctgccgcagtcctgccagctgtccgacgatgtcgtcccacctagtcgagccgccgccgcccctgcacaacaacaacaacaactgcgaggaaaatgagcagtctctgcccccgccggccggcctcaacagttcctgggtggagctacccatgaacagcagcaatggcaatgataatggcaatgggaaaaatggggggctggaacacgtaccatcctcatcctccatccacaatggagacatggagaagattcttttggatgcacaacatgaatcaggacagagtagttccagaggcagttctcactgtgacagcccttcgccacaagaagatgggcagatcatgtttgatgtggaaatgcacaccagcagggaccatagctctcagtcagaagaagaagttgtagaaggagagaaggaagtcgaggctttgaagaaaagtgcggactgggtatcagactggtccagtagacccgaaaacattccacccaaggagtccacttcagacaccctaaagttctgtgtcttaagcatgaggaaaagtgggccatgaagaa

SEQ ID NO: 29516 - DNA, 557 bp, Homo sapiens; identical to SEQ ID NO: 21245
  misc_feature 1, 2, 3, 4, 5, 6: n = A,T,C or G

SEQ ID NO: 29517 - DNA, 440 bp, Homo sapiens; identical to SEQ ID NO: 23628
  misc_feature 436, 437, 438, 439, 440: n = A,T,C or G

SEQ ID NO: 29518 - DNA, 545 bp, Homo sapiens; identical to SEQ ID NO: 21184
  misc_feature 1, 2, 37, 542, 543, 544, 545: n = A,T,C or G

SEQ ID NO: 29519 - DNA, 545 bp, Homo sapiens; identical to SEQ ID NO: 21184
  misc_feature 1, 2, 37, 542, 543, 544, 545: n = A,T,C or G

SEQ ID NO: 29520 - DNA, 1389 bp, Homo sapiens; identical to SEQ ID NO: 23631

SEQ ID NO: 29521 - DNA, 650 bp, Homo sapiens; identical to SEQ ID NO: 21165

SEQ ID NO: 29522 - DNA, 1044 bp, Homo sapiens; identical to SEQ ID NO: 23633

SEQ ID NO: 29523 - DNA, 313 bp, Homo sapiens; identical to SEQ ID NO: 21174
  misc_feature 1, 311, 312, 313: n = A,T,C or G

SEQ ID NO: 29524 - DNA, 650 bp, Homo sapiens; identical to SEQ ID NO: 21165

SEQ ID NO: 29525 - DNA, 496 bp, Homo sapiens
  misc_feature 496: n = A,T,C or G
aggcagagttttgctctgtcgcccaggctggagtgcagcggtatgattatggctcactgcagcctcgacctcctggccccaggcgatcctcccacctcagtcccctaagtagctgggaccataggtatgtgccaccacacccggctaatttcattttttgtagagatgaggtcttactatgttgactaggctggtctcgaactcctgggctcaagcaggccttgtgcctcggcctccccaactgttgggattatgggcgtgagccactgtgcccggtctgctcgctgaatttctaatgagcttgaattacaggaagtaaaaataaattttccacttacagaccactaaccagtttagagcaaatctgtaaggagtgtatagattatgccacacgagcgcatgaagctaccacatgtttaaagacaagtatacctcttgtgaacagcagtgttcagctaggaggcataaacatgaactgaagaaaccaagacatcan

SEQ ID NO: 29526 - DNA, 545 bp, Homo sapiens; identical to SEQ ID NO: 21184
  misc_feature 1, 2, 37, 542, 543, 544, 545: n = A,T,C or G

SEQ ID NO: 29527 - DNA, 673 bp, Homo sapiens; identical to SEQ ID NO: 29515

SEQ ID NO: 29528 - DNA, 962 bp, Homo sapiens
  misc_feature 1, 2, 962: n = A,T,C or G
nnggctgggagtggaacgtcggctggttgtgtggggctgtttttccccccgccggcgggcgctgagcacccaccttgggtcccccgtcccgcgtttggtggccccctcgcccggtttcgggcagttgcagttcgtaccaggcccccccacaggttaaattttggcggggccgccaatgtccgctttttttttttttttttttagtgtttgtagcgccactttactgccaatagctgacattgccctgggttaggggagaataaataaaatctgtggcatcagacaggtattaccgaggcgaagagtggactgggctttcgtgggcacttaccctgggaagggggtatgaggtggctggagaagtgttcatggagagtgtctctctcctgcccccaaggccacggaatcttctattccttctttgtacccaaagggcaaagtggaggccagggtctctttgctaaggagctaagtaggggaaagaggcagggggagctcccagcaggaccaaagggagaccaaggtttggaccccagaacagagcaggaacccagagtcctgtgcagtcacaggatgacgcagggaggacggctgttggtgatcttttctagggtttctccattactggctcttcggatggcctcaatgagatctttctcatagggaaagcccccattctccagcttggagaacaccagctgtccatttatctctatctcaaaggcacctgtgcccccgaggcgcgactcgatctcgatgcccggatactgctccttcacagcactggccagctccaggtaggtcgcctcgaagccgcagggttcacagtactccaccacgatgcggaccccactgcccggctcgacctcctcgggagggggcgctacggacgtctgccccggctccccgctcatcgcggccggctccgctcgggccccgggacgcgtcggtcgactccgtan

SEQ ID NO: 29529 - DNA, 440 bp, Homo sapiens; identical to SEQ ID NO: 23628
  misc_feature 436, 437, 438, 439, 440: n = A,T,C or G

SEQ ID NO: 29530 - DNA, 650 bp, Homo sapiens; identical to SEQ ID NO: 21165

SEQ ID NO: 29531 - DNA, 313 bp, Homo sapiens; identical to SEQ ID NO: 21174
  misc_feature 1, 311, 312, 313: n = A,T,C or G

SEQ ID NO: 29532 - DNA, 650 bp, Homo sapiens; identical to SEQ ID NO: 21165

SEQ ID NO: 29533 - DNA, 2407 bp, Homo sapiens; identical to SEQ ID NO: 21308
  misc_feature 1, 2383, 2384, 2385, 2386, 2387, 2388, 2389, 2390, 2391,2392, 2393, 2394, 2395, 2396, 2397, 2398, 2399, 2400, 2401,2402, 2403, 2404, 2405, 2406, 2407: n = A,T,C or G

SEQ ID NO: 29534 - DNA, 1044 bp, Homo sapiens; identical to SEQ ID NO: 23633

SEQ ID NO: 29535 - DNA, 1072 bp, Homo sapiens; identical to SEQ ID NO: 23644
  misc_feature 403, 414, 425, 460, 513, 1061, 1062, 1063, 1064, 1065, 1066,1067, 1068, 1069, 1070, 1071, 1072: n = A,T,C or G

SEQ ID NO: 29536 - DNA, 650 bp, Homo sapiens; identical to SEQ ID NO: 21165

SEQ ID NO: 29537 - DNA, 545 bp, Homo sapiens; identical to SEQ ID NO: 21184
  misc_feature 1, 2, 37, 542, 543, 544, 545: n = A,T,C or G

SEQ ID NO: 29538 - DNA, 544 bp, Homo sapiens; identical to SEQ ID NO: 23647
  misc_feature 1, 2, 3, 4, 5, 6, 7, 8: n = A,T,C or G

SEQ ID NO: 29539 - DNA, 539 bp, Homo sapiens; identical to SEQ ID NO: 23648
  misc_feature 1, 2, 3, 4, 129, 130, 131, 132, 133, 134, 135, 136, 137,138, 139, 140, 141, 142, 143, 144, 145, 146, 147, 148, 149,150, 151, 152, 153, 154, 155, 156, 157, 158, 159, 160: n = A,T,C or G

SEQ ID NO: 29540 - DNA, 2505 bp, Homo sapiens; identical to SEQ ID NO: 21198
  misc_feature 1, 2, 3, 4, 5, 2505: n = A,T,C or G

SEQ ID NO: 29541 - DNA, 544 bp, Homo sapiens; identical to SEQ ID NO: 23647
  misc_feature 1, 2, 3, 4, 5, 6, 7, 8: n = A,T,C or G

SEQ ID NO: 29542 - DNA, 313 bp, Homo sapiens; identical to SEQ ID NO: 21174
  misc_feature 1, 311, 312, 313: n = A,T,C or G

SEQ ID NO: 29543 - DNA, 650 bp, Homo sapiens; identical to SEQ ID NO: 21165

SEQ ID NO: 29544 - DNA, 587 bp, Homo sapiens; identical to SEQ ID NO: 21164
  misc_feature 1, 581, 582, 583, 584, 585, 586, 587: n = A,T,C or G

SEQ ID NO: 29545 - DNA, 1113 bp, Homo sapiens; identical to SEQ ID NO: 23522
  misc_feature 1, 2, 1112, 1113: n = A,T,C or G

SEQ ID NO: 29546 - DNA, 771 bp, Homo sapiens; identical to SEQ ID NO: 21166
  misc_feature 1, 2, 3, 754, 770, 771: n = A,T,C or G

SEQ ID NO: 29547 - DNA, 869 bp, Homo sapiens; identical to SEQ ID NO: 21180
  misc_feature 1, 2, 3, 820, 821, 822, 846, 867, 868, 869: n = A,T,C or G

SEQ ID NO: 29548 - DNA, 569 bp, Homo sapiens; identical to SEQ ID NO: 21176
  misc_feature 563, 564, 565, 566, 567, 568, 569: n = A,T,C or G

SEQ ID NO: 29549 - DNA, 650 bp, Homo sapiens; identical to SEQ ID NO: 21165

SEQ ID NO: 29550 - DNA, 313 bp, Homo sapiens; identical to SEQ ID NO: 21174
  misc_feature 1, 311, 312, 313: n = A,T,C or G

SEQ ID NO: 29551 - DNA, 869 bp, Homo sapiens; identical to SEQ ID NO: 21180
  misc_feature 1, 2, 3, 820, 821, 822, 846, 867, 868, 869: n = A,T,C or G

SEQ ID NO: 29552 - DNA, 520 bp, Homo sapiens
gaaggtgaccggggaccgagcatttcagatctgctcggtagacctggtgcaccaccaccatgttggctgcaaggttggtgtgtctccggacactaccttctagggttttccacccagctttcaccaaggcctcccctgttgtgaagaattccatcacgaagaatcaatggctgttaacacctagcagggaatatgccaccaaaacaagaattgggatccggcgtgggagaactggccaagaactcaaagaggcagcattggaaccatcgatggaaaaaatatttaaaattgatcagatgggaagatggtttgttgctggaggggctgctgttggtcttggagcattgtgctactatggcttgggactgtctaatgagattggagctattgaaaaggctgtaatttggcctcagtgctggcaactggaggcaacagaaagaaatgaagtgactcagcttctggcttctctgctacatcaaatatcttgtttaatggggcagatatgcattaaatagtttgt

SEQ ID NO: 29553 - DNA, 563 bp, Homo sapiens; identical to SEQ ID NO: 23609
  misc_feature 1, 2, 563: n = A,T,C or G

SEQ ID NO: 29554 - DNA, 468 bp, Homo sapiens
  misc_feature 454, 455, 456, 457, 458, 459, 460, 461, 462, 463, 464, 465,466, 467, 468: n = A,T,C or G
tcgagagtacttctagaattaattaacgcgggggcagctgctgggatgccaggaggggaaccgcctgaggaaagtgctgagagaaaagagagggagggatacagaccgggcccagatgagtttgcgctgaatctgaagtcggtaggtccctggacatttctattatggaagccaagaagaacctcccctccaccctctgaagccagtgtggatcgggtttctggcacttgcagtgtctgcacggtctcctctccttccttctccattgccctttctcacccgcctgggcccgccaccctgaactaccgggacacatgctgttcctgcctccaggcgtgcacttcttcctgcagcctcctcccctactaactccttcttgaacttgatagctccattgtcactttcgagtcttccctaaaccactcccttcccaaataaaactgtttcatgtaannnnnnnnnnnnnnn

SEQ ID NO: 29555 - DNA, 329 bp, Homo sapiens; identical to SEQ ID NO: 23662
  misc_feature 329: n = A,T,C or G

SEQ ID NO: 29556 - DNA, 869 bp, Homo sapiens; identical to SEQ ID NO: 21180
  misc_feature 1, 2, 3, 820, 821, 822, 846, 867, 868, 869: n = A,T,C or G

SEQ ID NO: 29557 - DNA, 2822 bp, Homo sapiens; identical to SEQ ID NO: 22232
  misc_feature 1, 2777, 2778, 2779, 2780, 2781, 2782, 2783, 2784, 2785,2786, 2787, 2788, 2789, 2790, 2791, 2792, 2793, 2794, 2795,2796, 2797, 2798, 2799, 2800, 2801, 2802, 2803, 2804, 2805,2806, 2807, 2808, 2809, 2810, 2811, 2812, 2813, 2814: n = A,T,C or G
  misc_feature 2815, 2816, 2817, 2818, 2819, 2820, 2821, 2822: n = A,T,C or G

SEQ ID NO: 29558 - DNA, 440 bp, Homo sapiens; identical to SEQ ID NO: 23628
  misc_feature 436, 437, 438, 439, 440: n = A,T,C or G

SEQ ID NO: 29559 - DNA, 557 bp, Homo sapiens; identical to SEQ ID NO: 21209
  misc_feature 556, 557: n = A,T,C or G

SEQ ID NO: 29560 - DNA, 545 bp, Homo sapiens; identical to SEQ ID NO: 21184
  misc_feature 1, 2, 37, 542, 543, 544, 545: n = A,T,C or G

SEQ ID NO: 29561 - DNA, 1866 bp, Homo sapiens; identical to SEQ ID NO: 21250
  misc_feature 1, 2, 168, 1861, 1862, 1863, 1864, 1865, 1866: n = A,T,C or G

SEQ ID NO: 29562 - DNA, 650 bp, Homo sapiens; identical to SEQ ID NO: 21165

SEQ ID NO: 29563 - DNA, 313 bp, Homo sapiens; identical to SEQ ID NO: 21174
  misc_feature 1, 311, 312, 313: n = A,T,C or G

SEQ ID NO: 29564 - DNA, 499 bp, Homo sapiens; identical to SEQ ID NO: 21187
  misc_feature 1, 2, 3, 8, 12, 13, 15, 24, 25, 28, 31, 497, 498, 499: n = A,T,C or G

SEQ ID NO: 29565 - DNA, 3645 bp, Homo sapiens; identical to SEQ ID NO: 22685

SEQ ID NO: 29566 - DNA, 530 bp, Homo sapiens
aattttactccccactgccctccccacacacagagtggacaagcttagtctttttcttcctgtttctcttagtcctgtttcctaggggttgcccccgcgttaattaaggcggggggatttgggtttttctgttccggtgttgtgtctgttgccggcaatggacaccccatatttgctgctggcccaaggaacgtcattaatttttctttccaaattaagtattatgtgctagtcagtgtatagtaaagcccttctcttttttattactaaaaagctggcattagatttgcattataaatacctctctaggaactttaaactccttttcctttttcaacaggtattgcccttaaatcttatcttttggccttgaaagtttatagctattgtttttcagttgttcgttgttttgttttgtttccctttagttctgtaggacccgcccattaaaatttttgctttgattctagcaatgggtatggatctgtataaaaaataaaataatgaaagccccctaaaaataggatgcc

SEQ ID NO: 29567 - DNA, 430 bp, Homo sapiens; identical to SEQ ID NO: 23674
  misc_feature 428, 429, 430: n = A,T,C or G

SEQ ID NO: 29568 - DNA, 869 bp, Homo sapiens; identical to SEQ ID NO: 21180
  misc_feature 1, 2, 3, 820, 821, 822, 846, 867, 868, 869: n = A,T,C or G

SEQ ID NO: 29569 - DNA, 1371 bp, Homo sapiens
tatagggagtcgacccacgcgtccggtgcaaagcgctgtcgggggccgccctagctgccgtcgccgccgccggggctctatggtctctccctagagctttgccgttggaggcggctgctgcggtcttgtgagtttgaccagcgtcgagcggcagcaacatggaggaattcgactccgaagacttctctacgtcggaggaggacgaggactacgtgccgtcgggtggagagtatagtgaagatgatgtaaatgaattagtgaaggaagatgaagtggatggtgaagagcagacacagaaaacccaagggaaaaaaagaaaggcccagagcattccagccaggaagagaagacaaggtggcctctcattagaagaagaggaagaggaggatgccaattcagaatctgagggaagcagtagtgaggaggaagatgacgctgcagagcaggaaaaaggcattggatcagaggatgccaggaaaaagaaggaggacgaactctgggccagcttcctcaatgatgtgggaccaaaatcaaaagtgcccccaagtacacaagttaagaaaggagaggagactgaagagacaagttcaagtaaattgttggtaaaagcagaagagctagagaaacctaaagaaacagaaaaagttaaaatcaccaaggtgtttgattttgctggtgaagaagtaagggtaactaaggaagtggatgctacatctaaagaggccaaatccttcttcaagcagaatgagaaagaaaaaccacaggctaatgttccttcagctctgccatcactccctgccgggtcagggttaaaaagatcaagtggcatgagcagccttttggggaaaattggtgccaagaagcagaaaatgagcacccttgagaagtccaaactggactgggagagcttcaaggaggaagaggggattggtgaagaactggccatccataatcgagggaaagaggggtacattgaacggaaagccttcctcgaccgagtggatcacaggcagtttgaaattgagcgagatctcaggctgagcaaaatgaaaccttgatgttacgggctaaatcaagagcagcttaatcctgtttacaatgtgagctttttgtgcgtctgtgaaatgttttacagtgtttctcatcatctgtttcccagcaaggtcttttttttttctacattgaagttctgtctatgtatcttaatcacaaatggtttcattcactttacttttaaaaatttgtccttaaatgaataaataaaataaaagttggtcctgtgagaggataatgaagatgaagcaaaaattaaagcactcttaaaagcttgacctgcccgggcggccgttcgaaagccgaattccagcacac

SEQ ID NO: 29570 - DNA, 650 bp, Homo sapiens; identical to SEQ ID NO: 21165

SEQ ID NO: 29571 - DNA, 450 bp, Homo sapiens; identical to SEQ ID NO: 23535
  misc_feature 1, 446, 447, 448, 449, 450: n = A,T,C or G

SEQ ID NO: 29572 - DNA, 612 bp, Homo sapiens
  misc_feature 612: n = A,T,C or G
ttttttttttttttttgctgacggagttttgctctgtcacccaggctggagtgcaatggcatgatcttggctcactgcaacctccacgtcccgggtacaagcgattctcctgcctcagcctcccaagtagctgggactacaggtgtgtgcaaccacatccaggtaattttgtatttttagtagagatgggatttcaccatgttggccaggctggtcttgaactcctgaccttgtgatctgcctgccttggcctccaaagtgctgggattataggcatgagccaccgcgcccagctagaaaatacatttttgaagcaataataaagatgtgaaccaaatttagtgttctcaacatgtcaagccttaccgacaatgcaaagcaatagaaactcaaagcaatagaaactgctggtgagatataacctggttcaacccggtggaaatactttggcattaaacatgccaaactaaagttaaatacgcacataatctacattctggcaattccaccactaggcatttaccttagaaaaattctcaaacatatgcgccaaaagatatgtaaaagaatgcttatggcagcactatccttcacaggaaaaatccaggaacn

SEQ ID NO: 29573 - DNA, 1183 bp, Homo sapiens; identical to SEQ ID NO: 23678
  misc_feature 1001, 1002, 1182, 1183: n = A,T,C or G

SEQ ID NO: 29574 - DNA, 650 bp, Homo sapiens; identical to SEQ ID NO: 21165

SEQ ID NO: 29575 - DNA, 533 bp, Homo sapiens; identical to SEQ ID NO: 27022
  misc_feature 531, 532, 533: n = A,T,C or G

SEQ ID NO: 29576 - DNA, 488 bp, Homo sapiens; identical to SEQ ID NO: 21185
  misc_feature 1, 2, 3, 4, 5, 6: n = A,T,C or G

SEQ ID NO: 29577 - DNA, 507 bp, Homo sapiens; identical to SEQ ID NO: 23680
  misc_feature 1, 503, 504, 505, 506, 507: n = A,T,C or G

SEQ ID NO: 29578 - DNA, 4705 bp, Homo sapiens
  misc_feature 1, 4703, 4704, 4705: n = A,T,C or G
natcgactcctaaacaccgcatctttctttgtctacccattccacccttctcctccgcctcttacccctgacttccacgggcgctggcctggaacttcgcccttttttaaacaaccgttaattgccataacatacaaccgtttactcaactctcgcgtaatcaaatgaacccatccgggataaaaccatatttcttaataatttatgtatagcccaacttttagaacatagaatattatcaatttggcttcccaaactacaaagtcctgtttataattttttctagccaaggaacagagtagattcaacagcatattaaagtaatttagttaaccctgagtaattactaacttgcataattttgaatggatgtatataacacactttcatctgcacttagatacttatactatcacactacctttttgtatttatccacctcaattttcaacttcattaatcttcagaagaaagaggaataaagaataggaaagtaataacagaatcattacgaggaaattactagcactgcctaaacattcagaagtctgtgacacagtttaggtctagggttgtctcaaaaacctaacaaaaggaggatcccgaattgaataatctgagcaccttgtcaactgaggttgatattaaattatttttcctgcattctttgtttcctttcacactaattaaatattgtgtacaagcttataaaattcaataatttgtattaaaatacaaaatccaataacaaccaggagttcttcggaagaaaaaaaaaatcacaaaacaaccccaacagtggtgaagaactatattaaagatggcttttcctaagacagagggagaacaaaagcaaatagcactctccctccgccaaggctagagcaggaggttcaaggaaatgggcaggaagagaacagaacactcaagctggacgattagtgaaggaaactgtggcctgagactgatgatcagcatatcttatgcctaaacaccaccactaagactacctggctaagctgccatggtgtgttagagatgatgagttacttttcttgccccttttacaacagggaaatctaaggacaacaaaataaacaaaaggctgagaaagctgagcatgtgaagtcagtcatgctccgctgcttttcaaaaactctgggccaagaacagaaccagagaggccagagcagttcatgtatttctctcttccatctgaccatctctcatcttcctcacccactcacacggttccgagcaggaggcttaccaggtcaccaggggcaggaaaatttctagcttcaaccaagccatggactgccactgctctttggggattctaggaaaataatcatctaatgaaatgtcagtatttgtgattctatgagaacaattctcaaaacatcaaaaagacatttgtgacttggtaaaataaaaatcaaagaaaaattaaggtatttttagaatctgtaaaatttccttataataggagggaaagtagcagaactattttaagtaaggacatgcttcccttcagtctgtaatgaaagactgttgttgtcatcatgccattgccatgataaaatactactagaaaaggatagcttttaaaataaagtgtagacgcaaatggtagagaaagccttcttgtacttgaaggaaggaaagaaagtattctgtccctgttactcctggacaaaagtacaccaaggcaacctataacctctctgtgctgtctctcatgacttttaatgacacggaagtctgatattcactgaacagtcattatacagtgcttggaaagtaacatatatttaatattcaaatttaatattcattcttcttatcctcaggtaaaaaaatagcagaaaccaaataatgacttgaagtggcattaacacaaagcaaacctgatacctatgatacctaaagacagtgcaggacaagagcttcaacagcttttataaaactgccagagattgtgctaattcttttacatctaaagaactgtatagaagagtaaaaaaattaaattacatttatataagaaactatcttcgaaaaagttatttgaacttgtatatacaaagtccaacagtattaagaaaaaaatttatttaattatcatttatataagtccaaaaatgatataatatattatttgaggggaaaaggcttccacgaaatagaaatacagtagactaaataaactagattgaatataaaatagtttctttgaaaacatccataaaaagtaaagaccaaatggcacaaagttaaaaaagtaatgcttaaggcaaaccaaataagtaaccttaattgaagtaagagacatactaacccacaagcaataaagtaaccccctctcaaaaatttctgtattaaaatgtgtagagaatatgagtggaagcagaaacaatggctgttgtcagagcttattcttggaagtactgaacagtattatacaaaaataatttgaatacttctgatttaaaatatacttgaatcatttgccccttagctgtcatatagcaatgaaaaaataaaatgtattaccccaatgttcatagtataaatctgggaaatgccaaaagttatgtttaaaattgacaaaggtatgattttccagattacatgtgtacgtgatggccaaaaaggaaaataatcaattccattattttggcccatattactgaaaacatgcacagaaatgtggaacatctcccgacaagtaggtgtcttatagtgactgttgagcaggctgctcagcaccagccctgagatcgtgtgcacatacaaaagtagtcaaagactgacagaaaagagatgaagccaaagcaaatcatgcttttataaacattcaaccaacatgttctttaataatctcttctttaaagaacaaaataatcaagtacatggcattaagttaaatgtctctgcacatgaatttccaccttataaatctggtatattaaattgtgctgtaaatagatttgtatattttcttttttgagtactatgataggtgaaatggtatgactataaaaaggatttgtttctttttgtctcctggaatgacatgatgcctttctagagaaagaaaaattgcaggctacaggaaaatgataaaaactactggattcatttagactattcgatttaggaaggtacaaccacttctttaacatcaagctaaaagtgggggaaagtctcagtctcccaggtaggtctcctctcacactgtcctgggtggcaggcgctgtttatacatgcccgctatcgctctggctgcactgtagatcatctgccgacgggacatcccagtaaatgccatgtgccaatcagtccggctgacattcagtaaactcttttccaggacttcacccactgtcaccaaaaggcctgaccacctcagattatagtcctggggagttagactttgagcctgctgtacaaattccaaaggcactggtgtggcttgtgtaaatgtttctagatgaatgccatggacaggatcttcaaccaccaaacaaccaatgtcaaaccatttgtcaggcagcaattctgcaatgaagttttctactgacacagctgtctgtttttcatggatcaccccagttcgacgcaagctatctatccgttcctgagcaccttttaatccagctgcatagcccactggttgtggggcaatattggactgtccagcttcccctacaaccacagctaagccaaagacctcctggaaggcatctcggacagcagcaacttttacttctttatttgaggtcactacaatatccagttcacctccagatttgatatagggagccatgccagggtccagcgttgtaatcatgctttctactgaatgttttgtcttatcaagcacagacttcaccataggattcccagccacacccttaataaaaccccagattccaccagcagatgcttcatcctgacctctagtaattctagggtcttcttgctcctctgggaaagtaatggctgatgtggttccagttccctgtgccagagatgtcaaactggcttgctgagtaataggagttggcaaaagacctgttcctgaaggtgcagaaaatgatggcatcaggggtgtctggggagctctcccagcatgtccccttgtaatgtcataagttgaaccaacagaaaatcctgatataggaggacccgaagggggtgcaggtaaaagagtgtttggggcagaagttgaaggtgggaagtgagatacaggaggattaccgaaggcagcacgcagttgatggagaaacaggaggtggcatagaagtcacaagtggtgggaccagaaggaactgcaggaggaggcacaaaaggtaatggtgctgaaggcctcacaggaggaaggggcggctgaggagtagagtatgcgagtggtgggaaggactccatggaggatacatttggagaagaaaaagaactggttgccgctaatggaacaggggtagaagacatagcagtagcagccagccctgcaggatttggtggaggagtcccaggtggtgttgtctctacgccactctcttccatcatttttcttcaattatggtatactggggaccgggaaagtgcctgcgtggtcgctgaagagtgtggtatgatagggaggtcgggacgtagaactacagcttggagaagacaacgaaggcgcacctggaagnnn

SEQ ID NO: 29579 - DNA, 662 bp, Homo sapiens; identical to SEQ ID NO: 23598
  misc_feature 584, 655, 656, 657, 658, 659, 660, 661, 662: n = A,T,C or G

SEQ ID NO: 29580 - DNA, 489 bp, Homo sapiens; identical to SEQ ID NO: 23682
  misc_feature 1, 2, 3, 4, 5, 6: n = A,T,C or G

SEQ ID NO: 29581 - DNA, 569 bp, Homo sapiens; identical to SEQ ID NO: 21176
  misc_feature 563, 564, 565, 566, 567, 568, 569: n = A,T,C or G

SEQ ID NO: 29582 - DNA, 545 bp, Homo sapiens; identical to SEQ ID NO: 21184
  misc_feature 1, 2, 37, 542, 543, 544, 545: n = A,T,C or G

SEQ ID NO: 29583 - DNA, 506 bp, Homo sapiens
  misc_feature 502, 503, 504, 505, 506: n = A,T,C or G
agaaggagtctcgctctgtggtccaggctggagtgcagtggtgcaatctcagctcaatgcaagctccgcctcctgggttcacaccattctcttgtctcagcctcccgagtagctgagattacaggcacctgccaccacgcccggctaattttttgtatttttagtagagatggggtttcaccgtgttagtcaagatgatctcgatcttctgacctcgtgatccacccgcctcagcctcccaaagtgctgggattacaggcgtgagccaccgcacccggcctttcctgtcatttttaatggatatatggggaggttatcaggtagcctgcctctcagattcttccttccctgttctgttttagaacctttcagtactgttataaaacatatattctagtatctgagctccaatgaatccccatttttcatccctcagatacatctacttctttagcaaaagtccttttaaaaattatccttcgcccgtcatctactttgaccnnnnn

SEQ ID NO: 29584 - DNA, 552 bp, Homo sapiens; identical to SEQ ID NO: 23685
  misc_feature 543, 544, 545, 546, 547, 548, 549, 550, 551, 552: n = A,T,C or G

SEQ ID NO: 29585 - DNA, 557 bp, Homo sapiens; identical to SEQ ID NO: 21245
  misc_feature 1, 2, 3, 4, 5, 6: n = A,T,C or G

SEQ ID NO: 29586 - DNA, 587 bp, Homo sapiens; identical to SEQ ID NO: 23688
  misc_feature 583, 584, 585, 586, 587: n = A,T,C or G

SEQ ID NO: 29587 - DNA, 569 bp, Homo sapiens; identical to SEQ ID NO: 21176
  misc_feature 563, 564, 565, 566, 567, 568, 569: n = A,T,C or G

SEQ ID NO: 29588 - DNA, 569 bp, Homo sapiens; identical to SEQ ID NO: 21176
  misc_feature 563, 564, 565, 566, 567, 568, 569: n = A,T,C or G

SEQ ID NO: 29589 - DNA, 869 bp, Homo sapiens; identical to SEQ ID NO: 21180
  misc_feature 1, 2, 3, 820, 821, 822, 846, 867, 868, 869: n = A,T,C or G

SEQ ID NO: 29590 - DNA, 1007 bp, Homo sapiens; identical to SEQ ID NO: 23561
  misc_feature 1, 2, 3, 4, 1005, 1006, 1007: n = A,T,C or G

SEQ ID NO: 29591 - DNA, 3016 bp, Homo sapiens
  misc_feature 590, 591, 592, 593, 594, 595, 596, 597, 598, 599, 600, 601,602, 603, 604, 605, 606, 607, 608, 609, 610, 611, 612, 613,614, 615, 616, 617, 618, 619, 620, 621, 622, 623, 624, 625,626: n = A,T,C or G
tttttttttggggttttaccagttttatttctagactttcatgtttgtctttttgtcttctgctggaaacatgccggttacatgttggtgctgggaagcgccgcggtgcaaccagaaatgcacagacccagccgcccgccgcccagaccctcagacttgcgcgtcacaggacagactccgctgtgccccgtgcacttgccaccagcctttggcctctcgatacacacctcctcccgcctgtcctccctcacacgtcagcctccacactcttgccacctcccttcaacacttcctaaataaaaattacaagaattacatagccaagatgtgcaaattgtctattttgtcactaagttttttaaaggaaggggcaggggataagaattcatcggaaccgaacttaggttgagtaccctaattttccttgcacccatgcctgtccaatcagatgactctgggaaacgccaaacaggctgaatcaatgtctttgtgtggtttttttcttccagattgtttttttctcacctataaaaggatctatctttaaaaataaactgtattaaatctgtaacatcaaaggcagaaggttnnnnnnnnnnnnnnnnnnnnnnnnnnnnnnnnnnnnnctaaatcaaggggagattgcatttataaatcatactggccttatgaacatcctctgcaataaatatactttttagccttaactataaatcatatattttagtgtttaaaaaccttccggtgtgaaacatctaagataacccttaaaaaccacctgttctctaggtaaacctctgaggtccatactttcaaacaccagttggcaccaaaggattcctaaacttcaacttctttaaagaaaaggaaaggaacttatcattctcacattgccaggatgataagttcctttccttttctttaaagaagttgaagtttaggaatcctttggtgccaactggtgtttgaaagtagggacctcagaggtttacctagagaacaggtggtttttaagggttatcttagatgtttcacaccggaaggtttttaaacactaaaatatataatttatagttaaggctaaaaagtatatttattgcagaggatgttcataaggccagtatgatttataaatgcaatctccccttgatttaaacacacagatacacacacacacacacacacacacacaaaccttctgcctttgatgttacagatttaatacagtttatttttaaagatagatccttttataggtgagaaaaaaacaatctggaagaaaaaaaccacacaaagacattgattcagcctgtttggcgtttcccagagtcatctgattggacaggcatgggtgcaaggaaaattagggtactcaacctaagttcggttccgatgaattcttatcccctgccccttcctttaaaaaacttagtgacaaaatagacaatttgcacatcttggctatgtaattcttgtaatttttatttaggaagtgttgaagggaggtggcaagagtgtggaggctgacgtgtgagggaggacaggcgggaggaggtgtgaggaggaggctcccgaggggaaggggcggtgcccacaccggggacaggccgcagctccattttcttattgcgctgctaccgttgacttccaggcacggtttggaaatattcacatcgcttctgtgtatctctttcacattgtttgctgctattggaggatcagttttttgttttacaatgtcatatactgccatgtactagttttagttttctcttagaacattgtattacagatgccttttttgtagttttttttttttttttatgtgatcaattttgacttaatgtgattactgctctattccaaaaaggttgctgtttcacaatacctcatgcttcacttagccatggtggacccagcgggcaggttctgcctgctttggcgggcagacacgcgggcgcgatcccacacaggctggcgggggccggccccgaggccgcgtgcgtgagaaccgcgccggtgtccccagagaccaggctgtgtccctcttctcttccctgcgcctgtgatgctgggcacttcatctgatcgggggcgtagcatcatagtagtttttacagctgtgttattctttgcgtgtagctatggaagttgcataattattattattattattataacaagtgtgtcttacgtgccaccacggcgttgtacctgtaggactctcattcgggatgattggaatagcttctggaatttgttcaagttttgggtatgtttaatctgttatgtactagtgttctgtttgttattgttttgttaattacaccataatgctaatttaaagagactccaaatctcaatgaagccagctcacagtgctgtgtgccccggtcacctagcaagctgccgaaccaaaagaatttgcaccccgctgcgggcccacgtggttggggccctgccctggcagggtcatcctgtgctcggaggccatctcgggcacaggcccaccccgccccacccctccagaacacggctcacgcttacctcaaccatcctggctgcggcgtctgtctgaaccacgcgggggccttgagggacgctttgtctgtcgtgatggggcaagggcacaagtcctggatgttgtgtgtatcgagaggccaaaggctggtggcaagtgcacggggcacagcggagtctgtcctgtgacgcgcaagtctgagggtctgggcggcgggcggctgggtctgtgcatttctggttgcaccgcggcgcttcccagcaccaacatgtaaccggcatgtttccagcagaagacaaaaagacaaacatgaaagtctagaaataaaactggtaaaaccccaaaaaaaaaaaaaaaaaaaaaactcgagggggggcccggtacccaattcgccctatagtgagtcgttttacaattcactggccgtcgttttacaacgtcgtgactgggaaaaaccctgccgttccccaacttaaatcgccttggcagcaacaa

SEQ ID NO: 29592 - DNA, 1866 bp, Homo sapiens; identical to SEQ ID NO: 21250
  misc_feature 1, 2, 168, 1861, 1862, 1863, 1864, 1865, 1866: n = A,T,C or G

SEQ ID NO: 29593 - DNA, 869 bp, Homo sapiens; identical to SEQ ID NO: 21180
  misc_feature 1, 2, 3, 820, 821, 822, 846, 867, 868, 869: n = A,T,C or G

SEQ ID NO: 29594 - DNA, 2496 bp, Homo sapiens
  misc_feature 57, 73: n = A,T,C or G
atcctgttatacagttcgcctgcacaaaaatataggggctattatattgaaagcatncttagtaaaaaaacancaattcaagaataaatgacatcctcaacttgaaagttgtgaagttaggtaagtcaaatggacatttatgttgccatttgtgttttgccattctcctaaatattttctttgtattacatatctacataatgtaatattgaataaaagttaacatatggcatatgcaataaaacagacgagatatggcacaagttctctgaataatctctttaaataaaccaccctgtctttaaaaatattagtaattttttcctcacatggaagatttcaaacaggatcctggaatccaaaaatgcagaactaccttatgttaataagtatacagtcatatttgttttcctatctggaacaaaatctaaaagaaagcaacccaatatattgtaccagaggaggatgataaatggaagaggaaaatgatttcatgaaacactagttcacgattctttcacaaaagaaaagttaaatcttatatcacaagtaagtctaaaatgaaatatttgcgggaactctaacagaaaattttatctatattatttactatgaaaaatggataagttttcaaaaattagcatgtatgtgtacaattcaagtcacccttaactaaccaaaaagtgtttaaaaagcagtgcagttgtgtcctactggatagttgtaagcatctctttaggcacttcactggttcattgacataatacaaattaaagctataaacacataatgtgctctctgaagatagtctaatcaagcaacgtaaaccaatgcaaaaatgtgactttttggccgcttattcctcccctatgacttaataacgtttttaaaccagttgtccaaggagatttttctggggaagggaatgctttggcattatgaaaggaacattgttcaatcccagaaaggtaaaactgaaaaaagcctgtgcaataaagaaatttgaaaaaaatttctttatggctctgtttaaaaggacacttttgcagtgatatgacagggggaaagtttagttgagtattttttgaacatattgcactctgtttttgtagttcaatcacattaatgcatagaaacacaatttttacctttgaaaaataaactgtctaacctattataagaacaaaagtcatggaaaataatttctaaaagcctaacaggaaaaataggcatattaaccttcctttgcttaacgaaatatagaaaaaaactatgagaaaggaaaaatgtgcaaagaaaatttttggtcagtcttgtgtgggtacaggtttatatgtgccaactaaatgaactgtaagcagcactgtgagcactgattatttaaggtgactgaggattactgtcagtgataggattgtgttataattccacttatatacatctgatatggaaaactgaaacttccattttagaagagaaagaaaatagctgaatttggcatttcagtagcatgctatagaattcatcatgattaatttcacattaaattatgggcaatagctgtatcacatttcatgttatcgccaatagcagtaaaacaacaataaatgaacaaacaaacaaataaaaaacagtgcctgacaaataatctcctggggacacaaatatgtgtccagtgagcagcttggttcaacagcgcatgcttttcctccaccagatttaggacacaacattaaagttttagaatggccagagaggtcactctttgctgaattccaatatctgaaaaacaattgcttgagcagattgtaagcacttgtccttattcttaaaaaaaaaggggcggggtggggggagaaaaaatacacatacacacaacccaaaggcgctgaagttaagcattaatacgccagattcatgatttatgatcagtatccaaaactccaactacaaacaatgcaaagtagtgctcctcagtattatttttgcaattgttagtaatgttaagcatcaaggaaaataaaacacatcattgcacattacagccgcaaaaaacaaaaaaaaaaaaaaaaacggctaaactttgacactagagaactgaataatttttgatgctatatcacaaatagcttcaatgtttatcttatgtgaaaggtctttacacatgtatgacattttccttgggtgatacttcaggtcaaatgccgagttatggcacgaagagcataaagaagttcagcttggcattccgtgcttccattaaaagtagattgacatgaactttttctgagtgtttgaactgccgccagtaactatcatacatgcgttttgtagttctctcaggatagcaggtcactgtcttaatgtaaaccttcaggcttctttcaagtaattgattaacttctccgataatcatagtcatcatacctgattccaaacatacagtgaacatagttaaataaagctctgcgcagcatggttgtgtcaacatcctca

SEQ ID NO: 29595 - DNA, 650 bp, Homo sapiens; identical to SEQ ID NO: 21165

SEQ ID NO: 29596 - DNA, 569 bp, Homo sapiens; identical to SEQ ID NO: 21176
  misc_feature 563, 564, 565, 566, 567, 568, 569: n = A,T,C or G

SEQ ID NO: 29597 - DNA, 1346 bp, Homo sapiens; identical to SEQ ID NO: 23696
  misc_feature 40: n = A,T,C or G

SEQ ID NO: 29598 - DNA, 650 bp, Homo sapiens; identical to SEQ ID NO: 21165

SEQ ID NO: 29599 - DNA, 499 bp, Homo sapiens; identical to SEQ ID NO: 21187
  misc_feature 1, 2, 3, 8, 12, 13, 15, 24, 25, 28, 31, 497, 498, 499: n = A,T,C or G

SEQ ID NO: 29600 - DNA, 520 bp, Homo sapiens; identical to SEQ ID NO: 21188
  misc_feature 1, 2, 3, 519, 520: n = A,T,C or G

SEQ ID NO: 29601 - DNA, 1215 bp, Homo sapiens; identical to SEQ ID NO: 23699
  misc_feature 1213, 1214, 1215: n = A,T,C or G

SEQ ID NO: 29602 - DNA, 650 bp, Homo sapiens; identical to SEQ ID NO: 21165

SEQ ID NO: 29603 - DNA, 835 bp, Homo sapiens; identical to SEQ ID NO: 23701
  misc_feature 1, 2, 3, 4, 5, 6, 7, 8, 9, 10, 11, 12, 13, 834, 835: n = A,T,C or G

SEQ ID NO: 29604 - DNA, 535 bp, Homo sapiens; identical to SEQ ID NO: 23532
  misc_feature 535: n = A,T,C or G

SEQ ID NO: 29605 - DNA, 650 bp, Homo sapiens; identical to SEQ ID NO: 21165

SEQ ID NO: 29606 - DNA, 2216 bp, Homo sapiens; identical to SEQ ID NO: 23705
  misc_feature 2212, 2213, 2214, 2215, 2216: n = A,T,C or G

SEQ ID NO: 29607 - DNA, 1214 bp, Homo sapiens; identical to SEQ ID NO: 20119

SEQ ID NO: 29608 - DNA, 920 bp, Homo sapiens; identical to SEQ ID NO: 20829
  misc_feature 1, 2, 3, 4, 5, 6, 7, 8, 9, 10, 915, 916, 917, 918, 919, 920: n = A,T,C or G

SEQ ID NO: 29609 - DNA, 971 bp, Homo sapiens; identical to SEQ ID NO: 23708
  misc_feature 1, 2, 3, 4: n = A,T,C or G

SEQ ID NO: 29610 - DNA, 444 bp, Homo sapiens; identical to SEQ ID NO: 20254
  misc_feature 1, 2, 3, 268, 322, 419, 443, 444: n = A,T,C or G

SEQ ID NO: 29611 - DNA, 1214 bp, Homo sapiens; identical to SEQ ID NO: 20119

SEQ ID NO: 29612 - DNA, 527 bp, Homo sapiens; identical to SEQ ID NO: 23711
  misc_feature 1, 526, 527: n = A,T,C or G

SEQ ID NO: 29613 - DNA, 1214 bp, Homo sapiens; identical to SEQ ID NO: 20119

SEQ ID NO: 29614 - DNA, 1639 bp, Homo sapiens
  misc_feature 1634, 1635, 1636, 1637, 1638, 1639: n = A,T,C or G
gacccacgcgtccgcgctggagcgcggcgtaggtggctgccgagtcttttcctgtttagggtcttatcctggcattgagggcgccggactggcgcttttggccggcttggcattgggtgggcggcttcttgggacccacatgagccagtggcatcatccccgcagtggctggggccggagacgcgacttttcaggacgctcctcagccaagaagaagggcggaaaccacatccccgaaaggtggaaagactatctcccagttggacagcggatgcctgggactcgtttcattgctttcaaagttcctttgcaaaagagttttgaaaagaaacttgctccagaagaatgcttttcccctttggatctttttaacaaaatccgagaacaaaatgaagaacttggactgattattgatttaacatatactcaacgctattataaaccagaggatttgccagaaactgttccttacttaaaaatttttacagttggacatcaagtgcctgatgatgagactatttttaaattcaaacacgctgttaatgggtttttgaaagaaaataaagataatgataaacttattggtgtccactgtacccatggtttaaacaggactggctacctcatttgcagatatttgattgatgtagaaggcgtgaggccagatgatgcaattgaattattcaataggtgccggggacattgcttagaaagacaaaactacattgaagaccttcagaatggtcctatcagaaagaattggaattccagtgtacccaggtcaagtgattttgaagactcagcacatctcatgcaaccagtccacaataagcctgttaaacaaggacctaggtataatctacatcagatccagggtcactcagctcctcgacatttccacacccagacccaaagtttgcaacaatcagtcagaaaattttcagagaatccacatgtttaccagagacaccatctccctcctcctggtccccctggagaggactattcacacaggaggtattcttggaatgtgaagcccaatgccagtcgggcagcccaggatagaagaaggtggtatccttataattactccagactctcctatccagcctgttgggaatggacccagtgatacaaacctgtcctggaattctacctggagaccagagctggcctgaaaattactggtgtgacttttaattagttcaggtctaatcaggtttctttattgttcccttatgtattcaagcttaaggaaaaattgcattgctgtttacctctttgctgataaatttgcagtaattacagcattgcaggaaaaacaatctgttattccagtcttaaatttttctaaaagaagacaatattttagaactgaagcattgagaacttcccttgcaaattatttttaaaattctatcttgtttttctatgtatttctttctgactagacttgtgatatgcgtgtgtttatgtacagaaatttttagtgtttttgttatgttctgttattgacccaaaggccatctttattttctataactgttcaaaatttatattaaaatctacttaggagataatttctttagaacctagttactacctgaagatctttaattaagcggccacaagcnnnnnn

SEQ ID NO: 29615 - DNA, 2963 bp, Homo sapiens; identical to SEQ ID NO: 23713
  misc_feature 1, 2, 3, 4, 2865, 2866, 2867, 2869, 2870, 2872, 2873, 2878,2888, 2891, 2894, 2904, 2906, 2907, 2908, 2912, 2913, 2915,2917, 2922, 2924, 2928, 2936, 2938, 2940, 2942, 2944, 2947,2951, 2953, 2956, 2958, 2959, 2960, 2961, 2962, 2963: n = A,T,C or G

SEQ ID NO: 29616 - DNA, 769 bp, Homo sapiens; identical to SEQ ID NO: 23714
  misc_feature 1, 2, 52, 63, 94, 769: n = A,T,C or G

SEQ ID NO: 29617 - DNA, 1214 bp, Homo sapiens; identical to SEQ ID NO: 20119

SEQ ID NO: 29618 - DNA, 793 bp, Homo sapiens; identical to SEQ ID NO: 23716
  misc_feature 1, 2, 3: n = A,T,C or G

SEQ ID NO: 29619 - DNA, 1253 bp, Homo sapiens; identical to SEQ ID NO: 23717

SEQ ID NO: 29620 - DNA, 435 bp, Homo sapiens; identical to SEQ ID NO: 23718

SEQ ID NO: 29621 - DNA, 743 bp, Homo sapiens; identical to SEQ ID NO: 23719
  misc_feature 1, 740, 741, 742, 743: n = A,T,C or G

SEQ ID NO: 29622 - DNA, 1973 bp, Homo sapiens; identical to SEQ ID NO: 23720
  misc_feature 1, 2, 3, 4, 5, 6, 7, 8, 9, 10, 11, 12, 13, 14, 15, 16, 17,18, 19, 20, 21, 22, 23, 1973: n = A,T,C or G

SEQ ID NO: 29623 - DNA, 6430 bp, Homo sapiens; identical to SEQ ID NO: 23721
  misc_feature 6430: n = A,T,C or G

SEQ ID NO: 29624 - DNA, 698 bp, Homo sapiens; identical to SEQ ID NO: 23722
  misc_feature 1, 2, 3, 4, 5, 6, 7, 8, 9, 10, 11, 12, 13, 14, 15, 16, 17,18, 19, 20, 21, 22, 23, 24, 25, 694, 695, 696, 697, 698: n = A,T,C or G

SEQ ID NO: 29625 - DNA, 920 bp, Homo sapiens; identical to SEQ ID NO: 20829
  misc_feature 1, 2, 3, 4, 5, 6, 7, 8, 9, 10, 915, 916, 917, 918, 919, 920: n = A,T,C or G

SEQ ID NO: 29626 - DNA, 1214 bp, Homo sapiens; identical to SEQ ID NO: 20119

SEQ ID NO: 29627 - DNA, 744 bp, Homo sapiens; identical to SEQ ID NO: 23725
  misc_feature 1, 742, 743, 744: n = A,T,C or G

SEQ ID NO: 29628 - DNA, 920 bp, Homo sapiens; identical to SEQ ID NO: 21122
  misc_feature 917, 918, 919, 920: n = A,T,C or G

SEQ ID NO: 29629 - DNA, 1200 bp, Homo sapiens; identical to SEQ ID NO: 23727
  misc_feature 1, 2, 3: n = A,T,C or G

SEQ ID NO: 29630 - DNA, 920 bp, Homo sapiens; identical to SEQ ID NO: 20829
  misc_feature 1, 2, 3, 4, 5, 6, 7, 8, 9, 10, 915, 916, 917, 918, 919, 920: n = A,T,C or G

SEQ ID NO: 29631 - DNA, 579 bp, Homo sapiens; identical to SEQ ID NO: 20440
  misc_feature 1, 2, 578, 579: n = A,T,C or G

SEQ ID NO: 29632 - DNA, 3499 bp, Homo sapiens; identical to SEQ ID NO: 23730
  misc_feature 3490, 3491, 3492, 3493, 3494, 3495, 3496, 3497, 3498, 3499: n = A,T,C or G

SEQ ID NO: 29633 - DNA, 2225 bp, Homo sapiens
  misc_feature 1, 2, 3, 4, 5, 6, 7, 8, 2219, 2220, 2221, 2222, 2223, 2224,2225: n = A,T,C or G
nnnnnnnncaaccatctatatccctgttcccccctgtgcgccgccgtctattatccgcccccctcctcccaagcctctccccttttgaggttcccgcacataatcccccgccccccccttttatgtggggcccaaaaagtgcttagacattcccaaagtttaaaaaaatttaataccttaagccagttaacagtaacaaaattgccgtgtacctgaccccagataccatctgtggtgacaccattagataattattaaagaccacatattgggaccttacccttaagaccatacagcccgatgacactatcaccccagtaaacatgctgcccaagaataccaattagatgaacattatcactgatttgcaacagctcttatgaagaataatttggcattatgtatcaagtgcccatactctttgacaaagtaactgtctttctgataatctatcttaagtaatacaaaaatggggggaggggaataaaaatacaaaatattagaaacactatcgtcaaaatgaaagggcatggctgagtatggtacaaccgttcaacagaatattgtcattaaaaacatttatggaggctatattatatagtcaataacagaaaatgcttgaaaggttagaagtacatcatcaaattatgttttatatagctgtaaaataaacccaaatcatcttcaatgaacacatactattatggtaaaaaaaagtctacaatttctaactttcaccttaggcagctttttattttgcatcctttttttcaactttgtcttctattagctgtgcaagaaatacatgtctgctaaagttacacgatcttcgcacaacagcaacctacacattagtctacaaaggggaacaaacccaaattcctcagaagtctgagtccactgttgccttctttctggccatctggcagttacaatatagcacagaatgactatgcaagttaaatattcatcttagacatggacatttgctttgggactcctaaagtggagtcaaatttgatctctacagaaactctacaatgtagcagagcactgtgcgtacttattgactcccggacaagccgaaaccccgaatttgtcatttctatcagtttttatataaattgttcttacctacttattgatgcttacaatttggcaattataaggggcaaaattggagcaagtgttttgggtaaataactccttacaatatattaaaaatacttacaaacaattcttagaatcaaacacttacgtaaatacttttttaaaaaaataggtccaaaagactcagcccagatcggctttgaagttatatcaagatttaagtctacttcatgccaatgagctactcctcaacaggggctggttttgccatttgaggaatgacagccactatgttgtgtacacaagagagctggatggcatcgacagaatctttatcgtggttctgaattttggagaatcaacactgttaaatctacataatatgatttcgggccttcccgctaaaataagaataaggttaagtaccaattctgccgacaaaggcagtaaagttgatacaagtggcatttttctggacaagggagagggactcatctttgaacacaacacgaagaatctccttcatcgccaaacagctttcagagatagatgctttgtttccaatcgagcatgctattccagtgtactgaacatactgtatacctcgtgttaggcacctttatgaagagatgaagacactggcatttcagtgggattgtaagcatttgtaatagcttcatgtacagcatgctgcttggtgaacaatcattaattcttcgatatttctgtagcttggatgtaactgctttaagaaaggttctcaaatgttttgaaaaaaataaaatgtttaaaagtaaattatggcttataggagcttataactttattcagatagcatcaatcagggatgaccagaacacattaggaccccagattattcaaaaactttaacgaattttaaggggaagaattttatcttttcccttaaaatgcagtcatagaaattagaggatgactcactgccacagtgtctaaaagcatttgctagcaaagaggcaggacactaatttgtaaactgctcaactgttctgactggaagggaggcctggagctctgctatcaccaatccttcccttccctctactccacatccttctaaggagcatgannnnnnn

SEQ ID NO: 29634 - DNA, 1490 bp, Homo sapiens; identical to SEQ ID NO: 21073

SEQ ID NO: 29635 - DNA, 944 bp, Homo sapiens; identical to SEQ ID NO: 23732
  misc_feature 932, 933, 934, 935, 936, 937, 938, 939, 940, 941, 942, 943,944: n = A,T,C or G

SEQ ID NO: 29636 - DNA, 555 bp, Homo sapiens; identical to SEQ ID NO: 23733
  misc_feature 1, 2, 3, 554, 555: n = A,T,C or G

SEQ ID NO: 29637 - DNA, 1490 bp, Homo sapiens; identical to SEQ ID NO: 21073

SEQ ID NO: 29638 - DNA, 1220 bp, Homo sapiens; identical to SEQ ID NO: 23735
  misc_feature 1219, 1220: n = A,T,C or G

SEQ ID NO: 29639 - DNA, 1380 bp, Homo sapiens; identical to SEQ ID NO: 20118
  misc_feature 1380: n = A,T,C or G

SEQ ID NO: 29640 - DNA, 833 bp, Homo sapiens; identical to SEQ ID NO: 23737
  misc_feature 1, 2, 3, 4, 5, 6, 7, 8, 9, 10, 11, 12, 13, 14, 15: n = A,T,C or G

SEQ ID NO: 29641 - DNA, 1090 bp, Homo sapiens; identical to SEQ ID NO: 23738
  misc_feature 1090: n = A,T,C or G

SEQ ID NO: 29642 - DNA, 5301 bp, Homo sapiens; identical to SEQ ID NO: 21447
  misc_feature 1, 2, 3, 4, 5, 5179, 5180, 5181, 5182, 5183, 5184, 5185,5186, 5187, 5188, 5189, 5190, 5191, 5192, 5193, 5194, 5195,5196, 5197, 5198, 5199, 5200, 5201, 5202, 5203, 5204, 5205,5206, 5207, 5208, 5209, 5210, 5211, 5212, 5213, 5214: n = A,T,C or G
  misc_feature 5295, 5296, 5297, 5298, 5299, 5300, 5301: n = A,T,C or G

SEQ ID NO: 29643 - DNA, 4409 bp, Homo sapiens; identical to SEQ ID NO: 21026
  misc_feature 1, 2, 4400, 4401, 4402, 4403, 4404, 4405, 4406, 4407, 4408,4409: n = A,T,C or G

SEQ ID NO: 29644 - DNA, 516 bp, Homo sapiens; identical to SEQ ID NO: 23741

SEQ ID NO: 29645 - DNA, 3106 bp, Homo sapiens; identical to SEQ ID NO: 23742
  misc_feature 3100, 3101, 3102, 3103, 3104, 3105, 3106: n = A,T,C or G

SEQ ID NO: 29646 - DNA, 940 bp, Homo sapiens; identical to SEQ ID NO: 23743
  misc_feature 939, 940: n = A,T,C or G

SEQ ID NO: 29647 - DNA, 2669 bp, Homo sapiens; identical to SEQ ID NO: 23744
  misc_feature 1, 2659, 2660, 2661, 2662, 2663, 2664, 2665, 2666, 2667,2668, 2669: n = A,T,C or G

SEQ ID NO: 29648 - DNA, 1803 bp, Homo sapiens; identical to SEQ ID NO: 23745
  misc_feature 1802, 1803: n = A,T,C or G

SEQ ID NO: 29649 - DNA, 1490 bp, Homo sapiens; identical to SEQ ID NO: 21073

SEQ ID NO: 29650 - DNA, 1715 bp, Homo sapiens; identical to SEQ ID NO: 23747

SEQ ID NO: 29651 - DNA, 6030 bp, Homo sapiens; identical to SEQ ID NO: 23748
  misc_feature 1, 2, 3, 4, 6029, 6030: n = A,T,C or G

SEQ ID NO: 29652 - DNA, 386 bp, Homo sapiens; identical to SEQ ID NO: 23749
  misc_feature 385, 386: n = A,T,C or G

SEQ ID NO: 29653 - DNA, 555 bp, Homo sapiens; identical to SEQ ID NO: 23733
  misc_feature 1, 2, 3, 554, 555: n = A,T,C or G

SEQ ID NO: 29654 - DNA, 2330 bp, Homo sapiens; identical to SEQ ID NO: 23751
  misc_feature 1, 2, 3, 4, 5, 6, 7, 8, 9, 2326, 2327, 2328, 2329, 2330: n = A,T,C or G

SEQ ID NO: 29655 - DNA, 4345 bp, Homo sapiens; identical to SEQ ID NO: 21910
  misc_feature 1, 2, 3, 4, 5, 6, 7, 8, 9, 10, 11, 12, 13, 14, 15, 16, 17,18, 19, 20, 21, 22, 23, 24, 25, 26, 27, 28, 29, 30: n = A,T,C or G

SEQ ID NO: 29656 - DNA, 691 bp, Homo sapiens; identical to SEQ ID NO: 22001
  misc_feature 688, 689, 690, 691: n = A,T,C or G

SEQ ID NO: 29657 - DNA, 4083 bp, Homo sapiens; identical to SEQ ID NO: 23754
  misc_feature 1, 4074, 4075, 4076, 4077, 4078, 4079, 4080, 4081, 4082,4083: n = A,T,C or G

SEQ ID NO: 29658 - DNA, 507 bp, Homo sapiens; identical to SEQ ID NO: 23755
  misc_feature 507: n = A,T,C or G

SEQ ID NO: 29659 - DNA, 1490 bp, Homo sapiens; identical to SEQ ID NO: 21073

SEQ ID NO: 29660 - DNA, 844 bp, Homo sapiens; identical to SEQ ID NO: 20549

SEQ ID NO: 29661 - DNA, 920 bp, Homo sapiens; identical to SEQ ID NO: 20829
  misc_feature 1, 2, 3, 4, 5, 6, 7, 8, 9, 10, 915, 916, 917, 918, 919, 920: n = A,T,C or G

SEQ ID NO: 29662 - DNA, 316 bp, Homo sapiens; identical to SEQ ID NO: 23759

SEQ ID NO: 29663 - DNA, 1214 bp, Homo sapiens; identical to SEQ ID NO: 20119

SEQ ID NO: 29664 - DNA, 920 bp, Homo sapiens; identical to SEQ ID NO: 20829
  misc_feature 1, 2, 3, 4, 5, 6, 7, 8, 9, 10, 915, 916, 917, 918, 919, 920: n = A,T,C or G

SEQ ID NO: 29665 - DNA, 1490 bp, Homo sapiens; identical to SEQ ID NO: 21073

SEQ ID NO: 29666 - DNA, 1490 bp, Homo sapiens; identical to SEQ ID NO: 21073

SEQ ID NO: 29667 - DNA, 533 bp, Homo sapiens; identical to SEQ ID NO: 23764

SEQ ID NO: 29668 - DNA, 1214 bp, Homo sapiens; identical to SEQ ID NO: 20119

SEQ ID NO: 29669 - DNA, 930 bp, Homo sapiens; identical to SEQ ID NO: 23765
  misc_feature 1, 2, 3: n = A,T,C or G

SEQ ID NO: 29670 - DNA, 330 bp, Homo sapiens; identical to SEQ ID NO: 23766
  misc_feature 1, 322, 323, 324, 325, 326, 327, 328, 329, 330: n = A,T,C or G

SEQ ID NO: 29671 - DNA, 2231 bp, Homo sapiens; identical to SEQ ID NO: 23767
  misc_feature 58, 2191, 2220, 2221, 2222, 2223, 2224, 2225, 2226, 2227,2228, 2229, 2230, 2231: n = A,T,C or G

SEQ ID NO: 29672 - DNA, 3560 bp, Homo sapiens; identical to SEQ ID NO: 23768
  misc_feature 1, 2, 3, 3529, 3543, 3551, 3552, 3553, 3554, 3555, 3556,3557, 3558, 3559, 3560: n = A,T,C or G

SEQ ID NO: 29673 - DNA, 478 bp, Homo sapiens; identical to SEQ ID NO: 23769
  misc_feature 475, 476, 477, 478: n = A,T,C or G

SEQ ID NO: 29674 - DNA, 623 bp, Homo sapiens; identical to SEQ ID NO: 23770
  misc_feature 623: n = A,T,C or G

SEQ ID NO: 29675 - DNA, 798 bp, Homo sapiens; identical to SEQ ID NO: 23771
  misc_feature 1, 24, 52, 81, 796, 797, 798: n = A,T,C or G

SEQ ID NO: 29676 - DNA, 3190 bp, Homo sapiens; identical to SEQ ID NO: 23772
  misc_feature 1, 2, 3183, 3184, 3185, 3186, 3187, 3188, 3189, 3190: n = A,T,C or G

SEQ ID NO: 29677 - DNA, 3981 bp, Homo sapiens; identical to SEQ ID NO: 23773
  misc_feature 1, 2, 3, 4, 5, 6, 7, 3655, 3656, 3686, 3687, 3975, 3976,3977, 3978, 3979, 3980, 3981: n = A,T,C or G

SEQ ID NO: 29678 - DNA, 1490 bp, Homo sapiens; identical to SEQ ID NO: 21073

SEQ ID NO: 29679 - DNA, 694 bp, Homo sapiens; identical to SEQ ID NO: 23775
  misc_feature 1, 2, 3, 4, 5, 6, 7, 8, 9, 10, 11, 12, 13, 14, 15, 16, 17,18, 19, 20, 21, 22, 23, 24, 25, 693, 694: n = A,T,C or G

SEQ ID NO: 29680 - DNA, 891 bp, Homo sapiens; identical to SEQ ID NO: 20416

SEQ ID NO: 29681 - DNA, 1690 bp, Homo sapiens; identical to SEQ ID NO: 23777
  misc_feature 1, 2, 3, 4, 5, 6: n = A,T,C or G

SEQ ID NO: 29682 - DNA, 509 bp, Homo sapiens; identical to SEQ ID NO: 23778
  misc_feature 508, 509: n = A,T,C or G

SEQ ID NO: 29683 - DNA, 534 bp, Homo sapiens; identical to SEQ ID NO: 23779
  misc_feature 533, 534: n = A,T,C or G

SEQ ID NO: 29684 - DNA, 1946 bp, Homo sapiens; identical to SEQ ID NO: 23780
  misc_feature 1, 2, 3, 4, 5, 6, 7, 8, 9, 10, 11, 12, 13, 1132, 1133, 1134,1135, 1136, 1137, 1138, 1139, 1140, 1141, 1142, 1143, 1144,1922, 1923, 1924, 1925, 1926, 1927, 1928, 1929, 1930, 1931,1932, 1933, 1934, 1935, 1936, 1937, 1938, 1939, 1940: n = A,T,C or G
  misc_feature 1941, 1942, 1943, 1944, 1945, 1946: n = A,T,C or G

SEQ ID NO: 29685 - DNA, 622 bp, Homo sapiens; identical to SEQ ID NO: 23781
  misc_feature 622: n = A,T,C or G

SEQ ID NO: 29686 - DNA, 1231 bp, Homo sapiens; identical to SEQ ID NO: 23782
  misc_feature 1, 2, 3, 9, 12, 15, 23, 27, 32, 35, 52, 1227, 1228, 1229,1230, 1231: n = A,T,C or G

SEQ ID NO: 29687 - DNA, 957 bp, Homo sapiens; identical to SEQ ID NO: 23783
  misc_feature 951, 952, 953, 954, 955, 956, 957: n = A,T,C or G

SEQ ID NO: 29688 - DNA, 515 bp, Homo sapiens; identical to SEQ ID NO: 23784
  misc_feature 514, 515: n = A,T,C or G

SEQ ID NO: 29689 - DNA, 420 bp, Homo sapiens; identical to SEQ ID NO: 23785
  misc_feature 1, 2: n = A,T,C or G

SEQ ID NO: 29690 - DNA, 435 bp, Homo sapiens; identical to SEQ ID NO: 23786
  misc_feature 1, 2, 3: n = A,T,C or G

SEQ ID NO: 29691 - DNA, 984 bp, Homo sapiens; identical to SEQ ID NO: 23787

SEQ ID NO: 29692 - DNA, 1490 bp, Homo sapiens; identical to SEQ ID NO: 21073

SEQ ID NO: 29693 - DNA, 1490 bp, Homo sapiens; identical to SEQ ID NO: 21073

SEQ ID NO: 29694 - DNA, 1641 bp, Homo sapiens; identical to SEQ ID NO: 20385
  misc_feature 1, 2, 1626, 1627, 1628, 1629, 1630, 1631, 1632, 1633, 1634,1635, 1636, 1637, 1638, 1639, 1640, 1641: n = A,T,C or G

SEQ ID NO: 29695 - DNA, 384 bp, Homo sapiens; identical to SEQ ID NO: 23791
  misc_feature 1, 2, 3: n = A,T,C or G

SEQ ID NO: 29696 - DNA, 1490 bp, Homo sapiens; identical to SEQ ID NO: 21073

SEQ ID NO: 29697 - DNA, 1001 bp, Homo sapiens; identical to SEQ ID NO: 21314
  misc_feature 681, 682, 683, 684, 685, 686, 687, 688, 689, 690, 691, 692,693, 694, 695, 696, 697, 698, 699, 700, 701, 702, 703, 704,705, 706, 707, 708, 709, 710, 711, 712, 713, 714, 715, 716,717, 718: n = A,T,C or G

SEQ ID NO: 29698 - DNA, 793 bp, Homo sapiens; identical to SEQ ID NO: 23716
  misc_feature 1, 2, 3: n = A,T,C or G

SEQ ID NO: 29699 - DNA, 1715 bp, Homo sapiens; identical to SEQ ID NO: 23747

SEQ ID NO: 29700 - DNA, 1490 bp, Homo sapiens; identical to SEQ ID NO: 21073

SEQ ID NO: 29701 - DNA, 568 bp, Homo sapiens; identical to SEQ ID NO: 23797
  misc_feature 565, 566, 567, 568: n = A,T,C or G

SEQ ID NO: 29702 - DNA, 920 bp, Homo sapiens; identical to SEQ ID NO: 20829
  misc_feature 1, 2, 3, 4, 5, 6, 7, 8, 9, 10, 915, 916, 917, 918, 919, 920: n = A,T,C or G

SEQ ID NO: 29703 - DNA, 920 bp, Homo sapiens; identical to SEQ ID NO: 20829
  misc_feature 1, 2, 3, 4, 5, 6, 7, 8, 9, 10, 915, 916, 917, 918, 919, 920: n = A,T,C or G

SEQ ID NO: 29704 - DNA, 5221 bp, Homo sapiens; identical to SEQ ID NO: 20940
  misc_feature 5193, 5194, 5195, 5196, 5197, 5198, 5199, 5200, 5201, 5202,5203, 5204, 5205, 5206, 5207, 5208, 5209, 5210, 5211, 5212,5213, 5214, 5215, 5216, 5217, 5218, 5219, 5220, 5221: n = A,T,C or G

SEQ ID NO: 29705 - DNA, 525 bp, Homo sapiens; identical to SEQ ID NO: 23801
  misc_feature 525: n = A,T,C or G

SEQ ID NO: 29706 - DNA, 920 bp, Homo sapiens; identical to SEQ ID NO: 20829
  misc_feature 1, 2, 3, 4, 5, 6, 7, 8, 9, 10, 915, 916, 917, 918, 919, 920: n = A,T,C or G

SEQ ID NO: 29707 - DNA, 3228 bp, Homo sapiens; identical to SEQ ID NO: 22886
  misc_feature 1, 2, 3216, 3217, 3218, 3219, 3220, 3221, 3222, 3223, 3224,3225, 3226, 3227, 3228: n = A,T,C or G

SEQ ID NO: 29708 - DNA, 1022 bp, Homo sapiens; identical to SEQ ID NO: 23803

SEQ ID NO: 29709 - DNA, 920 bp, Homo sapiens; identical to SEQ ID NO: 20829
  misc_feature 1, 2, 3, 4, 5, 6, 7, 8, 9, 10, 915, 916, 917, 918, 919, 920: n = A,T,C or G

SEQ ID NO: 29710 - DNA, 606 bp, Homo sapiens; identical to SEQ ID NO: 23805
  misc_feature 1, 2, 3, 4, 5, 6, 7, 8, 9, 10, 11, 12, 605, 606: n = A,T,C or G

SEQ ID NO: 29711 - DNA, 2020 bp, Homo sapiens; identical to SEQ ID NO: 23806
  misc_feature 1, 2, 2020: n = A,T,C or G

SEQ ID NO: 29712 - DNA, 4090 bp, Homo sapiens; identical to SEQ ID NO: 23807
  misc_feature 1, 4070, 4071, 4072, 4073, 4074, 4075, 4076, 4077, 4078,4079, 4080, 4081, 4082, 4083, 4084, 4085, 4086, 4087, 4088,4089, 4090: n = A,T,C or G

SEQ ID NO: 29713 - DNA, 1490 bp, Homo sapiens; identical to SEQ ID NO: 21073

SEQ ID NO: 29714 - DNA, 1091 bp, Homo sapiens; identical to SEQ ID NO: 23809
  misc_feature 1, 1091: n = A,T,C or G

SEQ ID NO: 29715 - DNA, 1715 bp, Homo sapiens; identical to SEQ ID NO: 23747

SEQ ID NO: 29716 - DNA, 993 bp, Homo sapiens; identical to SEQ ID NO: 23811
  misc_feature 1, 2, 3, 990, 991, 992, 993: n = A,T,C or G

SEQ ID NO: 29717 - DNA, 2505 bp, Homo sapiens; identical to SEQ ID NO: 21198
  misc_feature 1, 2, 3, 4, 5, 2505: n = A,T,C or G

SEQ ID NO: 29718 - DNA, 4104 bp, Homo sapiens; identical to SEQ ID NO: 23813
  misc_feature 3813, 3814, 3815, 3816, 3817, 3818, 3819, 3820, 3821, 3822,3823, 3824, 3825, 3826, 3827, 3828, 3829, 3830, 3831, 3832,3833, 3834, 3835, 3836, 3837, 3838, 3839, 3840, 3841, 3842,3843, 3844, 3845, 3846, 3847, 3848, 3849, 3850, 3851: n = A,T,C or G
  misc_feature 3852, 3853, 3854, 3855, 3857, 3858, 3913, 3914, 3915, 3916,3917, 3918, 3919, 3920, 3921, 3922, 3923, 3924, 3925, 3926,3927, 3928, 3929, 3930, 3931, 3932, 3933, 3934, 3935, 4064,4065, 4066, 4067, 4068, 4069, 4070, 4071, 4072, 4073: n = A,T,C or G
  misc_feature 4074, 4075, 4076, 4077, 4078, 4079, 4080, 4081, 4082, 4083,4084, 4085, 4086, 4087, 4088, 4089, 4090, 4091, 4092, 4093,4094, 4095, 4096, 4097, 4098, 4099, 4100, 4101, 4102, 4103,4104: n = A,T,C or G

SEQ ID NO: 29719 - DNA, 770 bp, Homo sapiens; identical to SEQ ID NO: 20288
  misc_feature 765, 766, 767, 768, 769, 770: n = A,T,C or G

SEQ ID NO: 29720 - DNA, 393 bp, Homo sapiens; identical to SEQ ID NO: 23815
  misc_feature 392, 393: n = A,T,C or G

SEQ ID NO: 29721 - DNA, 1214 bp, Homo sapiens; identical to SEQ ID NO: 20119

SEQ ID NO: 29722 - DNA, 1380 bp, Homo sapiens; identical to SEQ ID NO: 20118
  misc_feature 1380: n = A,T,C or G

SEQ ID NO: 29723 - DNA, 1490 bp, Homo sapiens; identical to SEQ ID NO: 21073

SEQ ID NO: 29724 - DNA, 2091 bp, Homo sapiens; identical to SEQ ID NO: 23825
  misc_feature 1, 2088, 2089, 2090, 2091: n = A,T,C or G

SEQ ID NO: 29725 - DNA, 1545 bp, Homo sapiens; identical to SEQ ID NO: 23819
  misc_feature 1, 2, 3, 4, 5, 6, 7, 8, 9, 1541, 1542, 1543, 1544, 1545: n = A,T,C or G

SEQ ID NO: 29726 - DNA, 906 bp, Homo sapiens; identical to SEQ ID NO: 23820
  misc_feature 1, 2, 3, 905, 906: n = A,T,C or G

SEQ ID NO: 29727 - DNA, 800 bp, Homo sapiens; identical to SEQ ID NO: 23821
  misc_feature 1, 796, 797, 798, 799, 800: n = A,T,C or G

SEQ ID NO: 29728 - DNA, 616 bp, Homo sapiens; identical to SEQ ID NO: 23822
  misc_feature 1, 2, 3, 4, 5, 6, 7, 8, 9, 10, 11, 12, 13, 14, 15, 612, 613,614, 615, 616: n = A,T,C or G

SEQ ID NO: 29729 - DNA, 555 bp, Homo sapiens; identical to SEQ ID NO: 23733
  misc_feature 1, 2, 3, 554, 555: n = A,T,C or G

SEQ ID NO: 29730 - DNA, 831 bp, Homo sapiens; identical to SEQ ID NO: 23824
  misc_feature 1, 736, 804, 816, 817, 818, 819, 820, 821, 822, 823, 824,825, 826, 827, 828, 829, 830, 831: n = A,T,C or G

SEQ ID NO: 29731 - DNA, 1214 bp, Homo sapiens; identical to SEQ ID NO: 20119

SEQ ID NO: 29732 - DNA, 579 bp, Homo sapiens; identical to SEQ ID NO: 23827
  misc_feature 1, 2: n = A,T,C or G

SEQ ID NO: 29733 - DNA, 1982 bp, Homo sapiens; identical to SEQ ID NO: 23828
  misc_feature 1860: n = A,T,C or G

SEQ ID NO: 29734 - DNA, 920 bp, Homo sapiens; identical to SEQ ID NO: 20829
  misc_feature 1, 2, 3, 4, 5, 6, 7, 8, 9, 10, 915, 916, 917, 918, 919, 920: n = A,T,C or G

SEQ ID NO: 29735 - DNA, 741 bp, Homo sapiens; identical to SEQ ID NO: 20131

SEQ ID NO: 29736 - DNA, 1490 bp, Homo sapiens; identical to SEQ ID NO: 21073

SEQ ID NO: 29737 - DNA, 1490 bp, Homo sapiens; identical to SEQ ID NO: 21073

SEQ ID NO: 29738 - DNA, 1715 bp, Homo sapiens; identical to SEQ ID NO: 23747

SEQ ID NO: 29739 - DNA, 572 bp, Homo sapiens
  misc_feature 1, 2, 3, 4, 5, 6, 7, 8, 9, 10, 11, 12, 509, 510: n = A,T,C or G
nnnnnnnnnnnncgaaagtcttctagaattaattaacgcgggggagcacccatcctaactgatgatgttagcctgcaggtgttcatggaccatttgaagaagctggctgtctccagtgcctgttaagctgaggatacaaccaggaaatgcaacggtgtcagattgtgttcaaaatgtctagaaaggcttgataacattcctgttacttttctagcagattttaacaaataatcaaggacattttatatgtaactctttagattataatttatttgtattcctgtctttgtcctttttcttgcactataaaattataaggtcataaatgttttggtacttgtagatgtttatgtgctttttgtatcctaacttttagaatctaaataaaatcagaggtaatgtattttggcagcttgtttaggtgagaatcttaatgatcataaaggaaataaatctagatgcagaaagtactggctaaaatattgctaatacaaatgtgatttcctgannaaaaaaaaaaaaaaaaaaaaaaaaaaaaaaaaaaaaaaaaaaaaaaaggaaaaaaaaaaaaa

SEQ ID NO: 29740 - DNA, 1490 bp, Homo sapiens; identical to SEQ ID NO: 21073

SEQ ID NO: 29741 - DNA, 1490 bp, Homo sapiens; identical to SEQ ID NO: 21073

SEQ ID NO: 29742 - DNA, 1979 bp, Homo sapiens; identical to SEQ ID NO: 23836
  misc_feature 1, 1978, 1979: n = A,T,C or G

SEQ ID NO: 29743 - DNA, 523 bp, Homo sapiens; identical to SEQ ID NO: 23837
  misc_feature 522, 523: n = A,T,C or G

SEQ ID NO: 29744 - DNA, 353 bp, Homo sapiens; identical to SEQ ID NO: 23838
  misc_feature 352, 353: n = A,T,C or G

SEQ ID NO: 29745 - DNA, 920 bp, Homo sapiens; identical to SEQ ID NO: 20829
  misc_feature 1, 2, 3, 4, 5, 6, 7, 8, 9, 10, 915, 916, 917, 918, 919, 920: n = A,T,C or G

SEQ ID NO: 29746 - DNA, 3560 bp, Homo sapiens; identical to SEQ ID NO: 23768
  misc_feature 1, 2, 3, 3529, 3543, 3551, 3552, 3553, 3554, 3555, 3556,3557, 3558, 3559, 3560: n = A,T,C or G

SEQ ID NO: 29747 - DNA, 533 bp, Homo sapiens; identical to SEQ ID NO: 23841
  misc_feature 1, 2, 3, 4, 5, 6, 7, 8, 9, 529, 530, 531, 532, 533: n = A,T,C or G

SEQ ID NO: 29748 - DNA, 555 bp, Homo sapiens; identical to SEQ ID NO: 23733
  misc_feature 1, 2, 3, 554, 555: n = A,T,C or G

SEQ ID NO: 29749 - DNA, 1431 bp, Homo sapiens; identical to SEQ ID NO: 23843
  misc_feature 1, 2, 3, 4, 5, 6, 7, 8, 9, 10, 11, 12, 13, 1431: n = A,T,C or G

SEQ ID NO: 29750 - DNA, 1799 bp, Homo sapiens; identical to SEQ ID NO: 23844
  misc_feature 1, 2, 3, 4, 5, 6, 1777, 1778, 1779, 1780, 1781, 1782, 1783,1784, 1785, 1786, 1787, 1788, 1789, 1790, 1791, 1792, 1793,1794, 1795, 1796, 1797, 1798, 1799: n = A,T,C or G

SEQ ID NO: 29751 - DNA, 1038 bp, Homo sapiens; identical to SEQ ID NO: 23845
  misc_feature 1027, 1038: n = A,T,C or G

SEQ ID NO: 29752 - DNA, 812 bp, Homo sapiens; identical to SEQ ID NO: 23846

SEQ ID NO: 29753 - DNA, 800 bp, Homo sapiens; identical to SEQ ID NO: 23821
  misc_feature 1, 796, 797, 798, 799, 800: n = A,T,C or G

SEQ ID NO: 29754 - DNA, 2208 bp, Homo sapiens; identical to SEQ ID NO: 23848
  misc_feature 1, 2206, 2207, 2208: n = A,T,C or G

SEQ ID NO: 29755 - DNA, 573 bp, Homo sapiens; identical to SEQ ID NO: 23849
  misc_feature 561, 571, 572, 573: n = A,T,C or G

SEQ ID NO: 29756 - DNA, 906 bp, Homo sapiens; identical to SEQ ID NO: 23820
  misc_feature 1, 2, 3, 905, 906: n = A,T,C or G

SEQ ID NO: 29757 - DNA, 1545 bp, Homo sapiens; identical to SEQ ID NO: 23819
  misc_feature 1, 2, 3, 4, 5, 6, 7, 8, 9, 1541, 1542, 1543, 1544, 1545: n = A,T,C or G

SEQ ID NO: 29758 - DNA, 920 bp, Homo sapiens; identical to SEQ ID NO: 20829
  misc_feature 1, 2, 3, 4, 5, 6, 7, 8, 9, 10, 915, 916, 917, 918, 919, 920: n = A,T,C or G

SEQ ID NO: 29759 - DNA, 691 bp, Homo sapiens; identical to SEQ ID NO: 23853
  misc_feature 1, 2, 3: n = A,T,C or G

SEQ ID NO: 29760 - DNA, 660 bp, Homo sapiens; identical to SEQ ID NO: 20482
  misc_feature 657, 658, 659, 660: n = A,T,C or G

SEQ ID NO: 29761 - DNA, 747 bp, Homo sapiens; identical to SEQ ID NO: 23855
  misc_feature 1, 2, 689, 726, 735, 736, 737, 738, 739, 740, 741, 742, 743,744, 745, 746, 747: n = A,T,C or G

SEQ ID NO: 29762 - DNA, 1159 bp, Homo sapiens; identical to SEQ ID NO: 24457

SEQ ID NO: 29763 - DNA, 1407 bp, Homo sapiens; identical to SEQ ID NO: 23856
  misc_feature 1380, 1381, 1382, 1383, 1384, 1385, 1386, 1387, 1388, 1389,1390, 1391, 1392, 1393, 1394, 1395, 1396, 1397, 1398, 1399,1400, 1401, 1402, 1403, 1404, 1405, 1406, 1407: n = A,T,C or G

SEQ ID NO: 29764 - DNA, 438 bp, Homo sapiens
  misc_feature 1, 2, 3: n = A,T,C or G
nnnactatgatctgttgctaagaaatcttataaataaaagttatttaatgtttgatcattatctctggtgtgactaaaacaagtatgataaatcaggaacaagaatccccaaaggtcaagctaaataaacattaaaatattctatagttatttgcaaatgatggcattatattatatttgatttttgatatggaagtatcctctgaccaggtgtggcagttcacgccgcctgtaatcccagcactttgggaggccgaagcgggaggattgctcaagcccagggggtcaaggctgcagtgaaccatcattgcaccactgcactccagcctgggagacagaatcagaccctgtctcaaaaaagaaaaaaaaagtatcctctaattataatctctgataaataacatacgtgcatttgtaatatgcaatgtcattgttagt

SEQ ID NO: 29765 - DNA, 2843 bp, Homo sapiens; identical to SEQ ID NO: 20339
  misc_feature 1, 2, 3, 4, 2815, 2816, 2817, 2818, 2819, 2820, 2821, 2822,2823, 2824, 2825, 2826, 2827, 2828, 2829, 2830, 2831, 2832,2833, 2834, 2835, 2836, 2837, 2838, 2839, 2840, 2841, 2842,2843: n = A,T,C or G

SEQ ID NO: 29766 - DNA, 276 bp, Homo sapiens; identical to SEQ ID NO: 23858
  misc_feature 275, 276: n = A,T,C or G

SEQ ID NO: 29767 - DNA, 920 bp, Homo sapiens; identical to SEQ ID NO: 20829
  misc_feature 1, 2, 3, 4, 5, 6, 7, 8, 9, 10, 915, 916, 917, 918, 919, 920: n = A,T,C or G

SEQ ID NO: 29768 - DNA, 844 bp, Homo sapiens; identical to SEQ ID NO: 23860
  misc_feature 1, 2, 3, 4, 5, 843, 844: n = A,T,C or G

SEQ ID NO: 29769 - DNA, 573 bp, Homo sapiens; identical to SEQ ID NO: 23861
  misc_feature 1, 2, 3: n = A,T,C or G

SEQ ID NO: 29770 - DNA, 1982 bp, Homo sapiens; identical to SEQ ID NO: 23828
  misc_feature 1860: n = A,T,C or G

SEQ ID NO: 29771 - DNA, 1344 bp, Homo sapiens; identical to SEQ ID NO: 21726
  misc_feature 1: n = A,T,C or G

SEQ ID NO: 29772 - DNA, 2061 bp, Homo sapiens; identical to SEQ ID NO: 21065
  misc_feature 1, 2054, 2055, 2056, 2057, 2058, 2059, 2060, 2061: n = A,T,C or G

SEQ ID NO: 29773 - DNA, 1617 bp, Homo sapiens; identical to SEQ ID NO: 23865
  misc_feature 1, 1604, 1605, 1606, 1607, 1608, 1609, 1610, 1611, 1612,1613, 1614, 1615, 1616, 1617: n = A,T,C or G

SEQ ID NO: 29774 - DNA, 2824 bp, Homo sapiens; identical to SEQ ID NO: 23866
  misc_feature 1, 2799, 2800, 2801, 2802, 2803, 2804, 2805, 2806, 2807,2808, 2809, 2810, 2811, 2812, 2813, 2814, 2815, 2816, 2817,2818, 2819, 2820, 2821, 2822, 2823, 2824: n = A,T,C or G

SEQ ID NO: 29775 - DNA, 2544 bp, Homo sapiens; identical to SEQ ID NO: 23867
  misc_feature 1, 1081, 2544: n = A,T,C or G

SEQ ID NO: 29776 - DNA, 340 bp, Homo sapiens; identical to SEQ ID NO: 23868
  misc_feature 340: n = A,T,C or G

SEQ ID NO: 29777 - DNA, 340 bp, Homo sapiens; identical to SEQ ID NO: 23869

SEQ ID NO: 29778 - DNA, 524 bp, Homo sapiens; identical to SEQ ID NO: 23870
  misc_feature 518, 519, 520, 521, 522, 523, 524: n = A,T,C or G

SEQ ID NO: 29779 - DNA, 1021 bp, Homo sapiens; identical to SEQ ID NO: 24896

SEQ ID NO: 29780 - DNA, 694 bp, Homo sapiens; identical to SEQ ID NO: 23775
  misc_feature 1, 2, 3, 4, 5, 6, 7, 8, 9, 10, 11, 12, 13, 14, 15, 16, 17,18, 19, 20, 21, 22, 23, 24, 25, 693, 694: n = A,T,C or G

SEQ ID NO: 29781 - DNA, 4399 bp, Homo sapiens; identical to SEQ ID NO: 20975

SEQ ID NO: 29782 - DNA, 579 bp, Homo sapiens; identical to SEQ ID NO: 20440
  misc_feature 1, 2, 578, 579: n = A,T,C or G

SEQ ID NO: 29783 - DNA, 3772 bp, Homo sapiens; identical to SEQ ID NO: 23873
  misc_feature 3769, 3770, 3771, 3772: n = A,T,C or G

SEQ ID NO: 29784 - DNA, 4699 bp, Homo sapiens; identical to SEQ ID NO: 23874
  misc_feature 1, 2, 3, 4698, 4699: n = A,T,C or G

SEQ ID NO: 29785 - DNA, 1490 bp, Homo sapiens; identical to SEQ ID NO: 21073

SEQ ID NO: 29786 - DNA, 1262 bp, Homo sapiens; identical to SEQ ID NO: 23876
  misc_feature 1, 2, 90, 111, 1254, 1255, 1256, 1257, 1258, 1259, 1260,1261, 1262: n = A,T,C or G

SEQ ID NO: 29787 - DNA, 831 bp, Homo sapiens; identical to SEQ ID NO: 23877
  misc_feature 831: n = A,T,C or G

SEQ ID NO: 29788 - DNA, 340 bp, Homo sapiens; identical to SEQ ID NO: 23868
  misc_feature 340: n = A,T,C or G

SEQ ID NO: 29789 - DNA, 920 bp, Homo sapiens; identical to SEQ ID NO: 20829
  misc_feature 1, 2, 3, 4, 5, 6, 7, 8, 9, 10, 915, 916, 917, 918, 919, 920: n = A,T,C or G

SEQ ID NO: 29790 - DNA, 963 bp, Homo sapiens; identical to SEQ ID NO: 22715
  misc_feature 1, 2: n = A,T,C or G

SEQ ID NO: 29791 - DNA, 1084 bp, Homo sapiens; identical to SEQ ID NO: 23881
  misc_feature 1, 2, 3, 1083, 1084: n = A,T,C or G

SEQ ID NO: 29792 - DNA, 1490 bp, Homo sapiens; identical to SEQ ID NO: 21073

SEQ ID NO: 29793 - DNA, 833 bp, Homo sapiens; identical to SEQ ID NO: 23737
  misc_feature 1, 2, 3, 4, 5, 6, 7, 8, 9, 10, 11, 12, 13, 14, 15: n = A,T,C or G

SEQ ID NO: 29794 - DNA, 1214 bp, Homo sapiens; identical to SEQ ID NO: 20119

SEQ ID NO: 29795 - DNA, 1859 bp, Homo sapiens; identical to SEQ ID NO: 21466
  misc_feature 1859: n = A,T,C or G

SEQ ID NO: 29796 - DNA, 395 bp, Homo sapiens; identical to SEQ ID NO: 24122
  misc_feature 246, 247, 248, 249, 250, 251, 252, 253, 254, 255, 256, 257,258, 259, 260, 261, 262, 263, 264, 265, 266, 267, 268, 269,270, 271, 272, 273, 274, 275, 276, 277, 278, 279, 280, 281,282, 283, 284, 285, 286, 287, 288, 289, 290, 291, 292: n = A,T,C or G
  misc_feature 293, 294, 295, 296, 297, 298, 299, 300, 301, 302, 303, 304,305, 306, 307, 308, 309, 310, 311, 312, 313, 314, 315, 341,381, 382, 383, 384, 385, 386, 387, 388, 389, 390, 391, 392,393, 394, 395: n = A,T,C or G

SEQ ID NO: 29797 - DNA, 1380 bp, Homo sapiens; identical to SEQ ID NO: 20118
  misc_feature 1380: n = A,T,C or G

SEQ ID NO: 29798 - DNA, 920 bp, Homo sapiens; identical to SEQ ID NO: 20829
  misc_feature 1, 2, 3, 4, 5, 6, 7, 8, 9, 10, 915, 916, 917, 918, 919, 920: n = A,T,C or G

SEQ ID NO: 29799 - DNA, 920 bp, Homo sapiens; identical to SEQ ID NO: 20829
  misc_feature 1, 2, 3, 4, 5, 6, 7, 8, 9, 10, 915, 916, 917, 918, 919, 920: n = A,T,C or G

SEQ ID NO: 29800 - DNA, 800 bp, Homo sapiens; identical to SEQ ID NO: 23821
  misc_feature 1, 796, 797, 798, 799, 800: n = A,T,C or G

SEQ ID NO: 29801 - DNA, 1384 bp, Homo sapiens; identical to SEQ ID NO: 23891
  misc_feature 1: n = A,T,C or G

SEQ ID NO: 29802 - DNA, 579 bp, Homo sapiens; identical to SEQ ID NO: 20440
  misc_feature 1, 2, 578, 579: n = A,T,C or G

SEQ ID NO: 29803 - DNA, 1380 bp, Homo sapiens; identical to SEQ ID NO: 20118
  misc_feature 1380: n = A,T,C or G

SEQ ID NO: 29804 - DNA, 1762 bp, Homo sapiens; identical to SEQ ID NO: 23894
  misc_feature 1750, 1751, 1752, 1753, 1754, 1755, 1756, 1757, 1758, 1759,1760, 1761, 1762: n = A,T,C or G

SEQ ID NO: 29805 - DNA, 1262 bp, Homo sapiens; identical to SEQ ID NO: 23895

SEQ ID NO: 29806 - DNA, 916 bp, Homo sapiens; identical to SEQ ID NO: 23896
  misc_feature 915, 916: n = A,T,C or G

SEQ ID NO: 29807 - DNA, 923 bp, Homo sapiens; identical to SEQ ID NO: 23897
  misc_feature 1, 2, 3, 38: n = A,T,C or G

SEQ ID NO: 29808 - DNA, 1490 bp, Homo sapiens; identical to SEQ ID NO: 21073

SEQ ID NO: 29809 - DNA, 738 bp, Homo sapiens; identical to SEQ ID NO: 23899
  misc_feature 1: n = A,T,C or G

SEQ ID NO: 29810 - DNA, 340 bp, Homo sapiens; identical to SEQ ID NO: 23869

SEQ ID NO: 29811 - DNA, 3844 bp, Homo sapiens; identical to SEQ ID NO: 23901
  misc_feature 1, 3843, 3844: n = A,T,C or G

SEQ ID NO: 29812 - DNA, 1490 bp, Homo sapiens; identical to SEQ ID NO: 21073

SEQ ID NO: 29813 - DNA, 920 bp, Homo sapiens; identical to SEQ ID NO: 20829
  misc_feature 1, 2, 3, 4, 5, 6, 7, 8, 9, 10, 915, 916, 917, 918, 919, 920: n = A,T,C or G

SEQ ID NO: 29814 - DNA, 4444 bp, Homo sapiens; identical to SEQ ID NO: 22727

SEQ ID NO: 29815 - DNA, 435 bp, Homo sapiens; identical to SEQ ID NO: 23786
  misc_feature 1, 2, 3: n = A,T,C or G

SEQ ID NO: 29816 - DNA, 923 bp, Homo sapiens; identical to SEQ ID NO: 23897
  misc_feature 1, 2, 3, 38: n = A,T,C or G

SEQ ID NO: 29817 - DNA, 870 bp, Homo sapiens; identical to SEQ ID NO: 23906
  misc_feature 866, 867, 868, 869, 870: n = A,T,C or G

SEQ ID NO: 29818 - DNA, 1490 bp, Homo sapiens; identical to SEQ ID NO: 21073

SEQ ID NO: 29819 - DNA, 2297 bp, Homo sapiens; identical to SEQ ID NO: 23908
  misc_feature 2291, 2292, 2293, 2294, 2295, 2296, 2297: n = A,T,C or G

SEQ ID NO: 29820 - DNA, 718 bp, Homo sapiens; identical to SEQ ID NO: 23909
  misc_feature 1: n = A,T,C or G

SEQ ID NO: 29821 - DNA, 393 bp, Homo sapiens; identical to SEQ ID NO: 23815
  misc_feature 392, 393: n = A,T,C or G

SEQ ID NO: 29822 - DNA, 3509 bp, Homo sapiens; identical to SEQ ID NO: 25275
  misc_feature 3507, 3508, 3509: n = A,T,C or G

SEQ ID NO: 29823 - DNA, 973 bp, Homo sapiens; identical to SEQ ID NO: 23911
  misc_feature 1, 948, 961, 962, 963, 964, 965, 966, 967, 968, 969, 970,971, 972, 973: n = A,T,C or G

SEQ ID NO: 29824 - DNA, 1271 bp, Homo sapiens; identical to SEQ ID NO: 23912
  misc_feature 1249, 1250, 1251, 1252, 1253, 1254, 1255, 1256, 1257, 1258,1259, 1260, 1261, 1262, 1263, 1264, 1265, 1266, 1267, 1268,1269, 1270, 1271: n = A,T,C or G

SEQ ID NO: 29825 - DNA, 1347 bp, Homo sapiens; identical to SEQ ID NO: 23913
  misc_feature 1, 2, 3, 4, 5: n = A,T,C or G

SEQ ID NO: 29826 - DNA, 1545 bp, Homo sapiens; identical to SEQ ID NO: 23819
  misc_feature 1, 2, 3, 4, 5, 6, 7, 8, 9, 1541, 1542, 1543, 1544, 1545: n = A,T,C or G

SEQ ID NO: 29827 - DNA, 1715 bp, Homo sapiens; identical to SEQ ID NO: 23747

SEQ ID NO: 29828 - DNA, 2270 bp, Homo sapiens; identical to SEQ ID NO: 23917
  misc_feature 1, 2268, 2269, 2270: n = A,T,C or G

SEQ ID NO: 29829 - DNA, 2735 bp, Homo sapiens; identical to SEQ ID NO: 23918
  misc_feature 2553, 2696, 2734, 2735: n = A,T,C or G

SEQ ID NO: 29830 - DNA, 1490 bp, Homo sapiens; identical to SEQ ID NO: 21073

SEQ ID NO: 29831 - DNA, 2538 bp, Homo sapiens; identical to SEQ ID NO: 20316
  misc_feature 2538: n = A,T,C or G

SEQ ID NO: 29832 - DNA, 873 bp, Homo sapiens; identical to SEQ ID NO: 23920

SEQ ID NO: 29833 - DNA, 892 bp, Homo sapiens; identical to SEQ ID NO: 23921
  misc_feature 1: n = A,T,C or G

SEQ ID NO: 29834 - DNA, 1490 bp, Homo sapiens; identical to SEQ ID NO: 21073

SEQ ID NO: 29835 - DNA, 444 bp, Homo sapiens; identical to SEQ ID NO: 23923
  misc_feature 1, 2, 3, 4, 5, 444: n = A,T,C or G

SEQ ID NO: 29836 - DNA, 920 bp, Homo sapiens; identical to SEQ ID NO: 20829
  misc_feature 1, 2, 3, 4, 5, 6, 7, 8, 9, 10, 915, 916, 917, 918, 919, 920: n = A,T,C or G

SEQ ID NO: 29837 - DNA, 444 bp, Homo sapiens; identical to SEQ ID NO: 23923
  misc_feature 1, 2, 3, 4, 5, 444: n = A,T,C or G

SEQ ID NO: 29838 - DNA, 1282 bp, Homo sapiens; identical to SEQ ID NO: 23926
  misc_feature 1282: n = A,T,C or G

SEQ ID NO: 29839 - DNA, 1490 bp, Homo sapiens; identical to SEQ ID NO: 21073

SEQ ID NO: 29840 - DNA, 402 bp, Homo sapiens; identical to SEQ ID NO: 23928

SEQ ID NO: 29841 - DNA, 2668 bp, Homo sapiens; identical to SEQ ID NO: 23929
  misc_feature 1, 2, 3, 4, 5, 6: n = A,T,C or G

SEQ ID NO: 29842 - DNA, 3049 bp, Homo sapiens; identical to SEQ ID NO: 23930
  misc_feature 3049: n = A,T,C or G

SEQ ID NO: 29843 - DNA, 1490 bp, Homo sapiens; identical to SEQ ID NO: 21073

SEQ ID NO: 29844 - DNA, 2301 bp, Homo sapiens; identical to SEQ ID NO: 23163
  misc_feature 1, 2299, 2300, 2301: n = A,T,C or G

SEQ ID NO: 29845 - DNA, 412 bp, Homo sapiens; identical to SEQ ID NO: 23933
  misc_feature 412: n = A,T,C or G

SEQ ID NO: 29846 - DNA, 1651 bp, Homo sapiens; identical to SEQ ID NO: 21898
  misc_feature 1, 2: n = A,T,C or G

SEQ ID NO: 29847 - DNA, 1200 bp, Homo sapiens; identical to SEQ ID NO: 23727
  misc_feature 1, 2, 3: n = A,T,C or G

SEQ ID NO: 29848 - DNA, 800 bp, Homo sapiens; identical to SEQ ID NO: 23821
  misc_feature 1, 796, 797, 798, 799, 800: n = A,T,C or G

SEQ ID NO: 29849 - DNA, 1490 bp, Homo sapiens; identical to SEQ ID NO: 21073

SEQ ID NO: 29850 - DNA, 1490 bp, Homo sapiens; identical to SEQ ID NO: 21073

SEQ ID NO: 29851 - DNA, 1253 bp, Homo sapiens; identical to SEQ ID NO: 23717

SEQ ID NO: 29852 - DNA, 577 bp, Homo sapiens; identical to SEQ ID NO: 23940
  misc_feature 1, 2, 3, 79: n = A,T,C or G

SEQ ID NO: 29853 - DNA, 1650 bp, Homo sapiens; identical to SEQ ID NO: 23941
  misc_feature 1, 2, 3, 4, 5: n = A,T,C or G

SEQ ID NO: 29854 - DNA, 6135 bp, Homo sapiens; identical to SEQ ID NO: 23942
  misc_feature 1, 6115, 6116, 6117, 6118, 6119, 6120, 6121, 6122, 6123,6124, 6125, 6126, 6127, 6128, 6129, 6130, 6131, 6132, 6133,6134, 6135: n = A,T,C or G

SEQ ID NO: 29855 - DNA, 1804 bp, Homo sapiens; identical to SEQ ID NO: 23943
  misc_feature 1, 2, 3, 4, 5, 6, 7, 8, 9, 10, 12, 1802, 1803, 1804: n = A,T,C or G

SEQ ID NO: 29856 - DNA, 1895 bp, Homo sapiens; identical to SEQ ID NO: 23944
  misc_feature 1, 7, 1894, 1895: n = A,T,C or G

SEQ ID NO: 29857 - DNA, 618 bp, Homo sapiens; identical to SEQ ID NO: 23945
  misc_feature 1, 2, 3, 615, 616, 617, 618: n = A,T,C or G

SEQ ID NO: 29858 - DNA, 2887 bp, Homo sapiens; identical to SEQ ID NO: 23946
  misc_feature 2877, 2878, 2879, 2880, 2881, 2882, 2883, 2884, 2885, 2886,2887: n = A,T,C or G

SEQ ID NO: 29859 - DNA, 800 bp, Homo sapiens; identical to SEQ ID NO: 23821
  misc_feature 1, 796, 797, 798, 799, 800: n = A,T,C or G

SEQ ID NO: 29860 - DNA, 399 bp, Homo sapiens; identical to SEQ ID NO: 23948
  misc_feature 398, 399: n = A,T,C or G

SEQ ID NO: 29861 - DNA, 959 bp, Homo sapiens
  misc_feature 1, 2, 3: n = A,T,C or G
nnngagcttgttagtgtgcgtgcgtctgtcgtgctttgtggtgtgctccctttccgtcctgttgtggctctgtgtctctcggtttctttcccacggggggtatcagctctggcccgttgaagcgtgcccgaccccttggtgtgcaagcctcggtccgccgggtttttgggggaaccagcccaatacgtgccgggtgtccctggactcgctatggccaggtacttcctcctggcccggggccaaccgatgtgggtctaagaagcgttttctgaggcccagccgcccaaacagttttttatgttgtttgtttttttttttttttcggaaggtctattttaataggaaaatgttttttagttggaacgttttggaaataagataacgcaatgtcttctatagttactcatttacactgaaacgtgatgggtaacttttagggcgtttgcttccagtcactttcccctgactccttgatgtgataattccttccataagatacaaccattctcccaagtgatgcgatgacgagtatgtgcgtgactctggagggaaagggtctacatctgtctctgcttgtgcctcggatgggttttacagtagacgtaccaccgaccccgcctcttcaccaggtaacagtccttgcagcgcttcttaaggacagtcttgtttttgaaccccagcgcaggcagcagatggggcaggaggccgggtgagagaagtgagcgcactgctgccccgggttccacagccacgggggctgcacctcgaatggatccaaatagaaatgtggagagggctcgaggcttcaccgtgtgacgactgagatagagcagagggttcaccattttccttataaaaagatttgccatgttgtggtgaatccggccgcacgctctcacccggcgccgacccctgcgtctgcccgctgactcgcggacgccggacgcgtgggtcgactc

SEQ ID NO: 29862 - DNA, 1001 bp, Homo sapiens; identical to SEQ ID NO: 21314
  misc_feature 681, 682, 683, 684, 685, 686, 687, 688, 689, 690, 691, 692,693, 694, 695, 696, 697, 698, 699, 700, 701, 702, 703, 704,705, 706, 707, 708, 709, 710, 711, 712, 713, 714, 715, 716,717, 718: n = A,T,C or G

SEQ ID NO: 29863 - DNA, 760 bp, Homo sapiens; identical to SEQ ID NO: 23949
  misc_feature 757, 758, 759, 760: n = A,T,C or G

SEQ ID NO: 29864 - DNA, 478 bp, Homo sapiens; identical to SEQ ID NO: 23769
  misc_feature 475, 476, 477, 478: n = A,T,C or G

SEQ ID NO: 29865 - DNA, 800 bp, Homo sapiens; identical to SEQ ID NO: 23821
  misc_feature 1, 796, 797, 798, 799, 800: n = A,T,C or G

SEQ ID NO: 29866 - DNA, 1380 bp, Homo sapiens; identical to SEQ ID NO: 20118
  misc_feature 1380: n = A,T,C or G

SEQ ID NO: 29867 - DNA, 538 bp, Homo sapiens; identical to SEQ ID NO: 23953
  misc_feature 1, 2, 3, 4, 5, 6, 7, 8, 9, 10, 11, 12, 13, 14, 15, 16, 17,18, 19, 20, 21, 22, 23, 24, 25, 26, 538: n = A,T,C or G

SEQ ID NO: 29868 - DNA, 555 bp, Homo sapiens; identical to SEQ ID NO: 23954
  misc_feature 1, 2, 3: n = A,T,C or G

SEQ ID NO: 29869 - DNA, 487 bp, Homo sapiens; identical to SEQ ID NO: 23955
  misc_feature 487: n = A,T,C or G

SEQ ID NO: 29870 - DNA, 1214 bp, Homo sapiens; identical to SEQ ID NO: 20119

SEQ ID NO: 29871 - DNA, 1001 bp, Homo sapiens; identical to SEQ ID NO: 21314
  misc_feature 681, 682, 683, 684, 685, 686, 687, 688, 689, 690, 691, 692,693, 694, 695, 696, 697, 698, 699, 700, 701, 702, 703, 704,705, 706, 707, 708, 709, 710, 711, 712, 713, 714, 715, 716,717, 718: n = A,T,C or G

SEQ ID NO: 29872 - DNA, 919 bp, Homo sapiens; identical to SEQ ID NO: 23958
  misc_feature 1: n = A,T,C or G

SEQ ID NO: 29873 - DNA, 1641 bp, Homo sapiens; identical to SEQ ID NO: 20385
  misc_feature 1, 2, 1626, 1627, 1628, 1629, 1630, 1631, 1632, 1633, 1634,1635, 1636, 1637, 1638, 1639, 1640, 1641: n = A,T,C or G

SEQ ID NO: 29874 - DNA, 2551 bp, Homo sapiens; identical to SEQ ID NO: 22616

SEQ ID NO: 29875 - DNA, 876 bp, Homo sapiens; identical to SEQ ID NO: 23961
  misc_feature 876: n = A,T,C or G

SEQ ID NO: 29876 - DNA, 450 bp, Homo sapiens; identical to SEQ ID NO: 23962
  misc_feature 1, 2, 447, 448, 449, 450: n = A,T,C or G

SEQ ID NO: 29877 - DNA, 1385 bp, Homo sapiens; identical to SEQ ID NO: 23963
  misc_feature 1, 2, 1308, 1317, 1325, 1327, 1330, 1354, 1357, 1358, 1359,1360, 1361, 1362, 1363, 1364, 1365, 1366, 1367, 1368, 1369,1370, 1371, 1372, 1373, 1374, 1375, 1376, 1377, 1378, 1379,1380, 1381, 1382, 1383, 1384, 1385: n = A,T,C or G

SEQ ID NO: 29878 - DNA, 2843 bp, Homo sapiens; identical to SEQ ID NO: 20339
  misc_feature 1, 2, 3, 4, 2815, 2816, 2817, 2818, 2819, 2820, 2821, 2822,2823, 2824, 2825, 2826, 2827, 2828, 2829, 2830, 2831, 2832,2833, 2834, 2835, 2836, 2837, 2838, 2839, 2840, 2841, 2842,2843: n = A,T,C or G

SEQ ID NO: 29879 - DNA, 1641 bp, Homo sapiens; identical to SEQ ID NO: 20385
  misc_feature 1, 2, 1626, 1627, 1628, 1629, 1630, 1631, 1632, 1633, 1634,1635, 1636, 1637, 1638, 1639, 1640, 1641: n = A,T,C or G

SEQ ID NO: 29880 - DNA, 4699 bp, Homo sapiens; identical to SEQ ID NO: 23874
  misc_feature 1, 2, 3, 4698, 4699: n = A,T,C or G

SEQ ID NO: 29881 - DNA, 1641 bp, Homo sapiens; identical to SEQ ID NO: 20385
  misc_feature 1, 2, 1626, 1627, 1628, 1629, 1630, 1631, 1632, 1633, 1634,1635, 1636, 1637, 1638, 1639, 1640, 1641: n = A,T,C or G

SEQ ID NO: 29882 - DNA, 1214 bp, Homo sapiens; identical to SEQ ID NO: 20119

SEQ ID NO: 29883 - DNA, 2205 bp, Homo sapiens; identical to SEQ ID NO: 23969
  misc_feature 1, 2, 3, 2199, 2200, 2201, 2202, 2203, 2204, 2205: n = A,T,C or G

SEQ ID NO: 29884 - DNA, 559 bp, Homo sapiens; identical to SEQ ID NO: 23970

SEQ ID NO: 29885 - DNA, 1432 bp, Homo sapiens
atcgaccccgcgtctgggctctgagaacaagagcttgaggggaagactgttaaccccatccacgccaccagaattagctctttcccttttggtttgcaagcactgcctgtaaagccctcgcatgagaggccagcctgctagggaaatccaggaatctgcaacaaaaacgatgacagtctgaaatactctctggtgccaacctccaaattctcgtctgtcacttcagacccccactagttgacagagcagcagaatttcaactccagtagacttgaatatgcctctgggcaaagaagcagagctaacgaggaaagggatttaaagagtttttcttgggtgtttgtcaaacttttattccctgtctgtgtgcagaggggattcaacttcaatttttctgcagtggctctgggtccagccccttacttaaagatctggaaagcatgaagactgggctttttttcctatgtctcttgggaactgcagctgcaatcccgacaaatgcaagattattatctgatcattccaaaccaactgctgaaacggtagcacccgacaacactgcaatccccagtttaagggctgaagatgaagaaaatgaaaaagaaacagcagtatccacagaagacgattcccaccataaggctgaaaaatcatcagtactaaagtcaaaagaggaaagccatgaacagtcagcagaacagggcaagagttctagccaagagctgggattgaaggatcaagaggacagtgatggtgacttaagtgtgaatttggagtatgcaccaactgaaggtacattggacataaaagaagatatgagtgagcctcaggagaaaaaactctcagagaacactgattttttggctcctggtgtttagttccttcacagattctaaccaagaacaagaagataactccaatgcagaaatggaagaggaaaatgcatcgaacgtcaataagcacattcaagaaactgaatggcagagtcaagagggtaaaactggcctagaagctatcagcaaccacaaagagacagaagaaaagactgtttctgaggctctgctcatggaacctactgatgatggtaataccacgcccagaaatcatggagttgatgatgatggcgatgatgatggcgatgatggcggcactgatggccccaggcacagtgcaagtgatgactacttcatcccaagccaggcctttctggaggccgagagagctcaatccattgcctatcacctcaaaattgaggagcaaagagagaggaaaaccaagaacaacctagaaattattcacatcatcagttgaacaggagcagtaaacatagccaaggcctaagggatcaaggaaaccaagagcaggatccaaatatttccaatggagaagaggaagaagaaaaagagccaggtgaagttggtacccacaatga

SEQ ID NO: 29886 - DNA, 362 bp, Homo sapiens; identical to SEQ ID NO: 23973
  misc_feature 356, 357, 358, 359, 360, 361, 362: n = A,T,C or G

SEQ ID NO: 29887 - DNA, 1641 bp, Homo sapiens; identical to SEQ ID NO: 20385
  misc_feature 1, 2, 1626, 1627, 1628, 1629, 1630, 1631, 1632, 1633, 1634,1635, 1636, 1637, 1638, 1639, 1640, 1641: n = A,T,C or G

SEQ ID NO: 29888 - DNA, 1715 bp, Homo sapiens; identical to SEQ ID NO: 23747

SEQ ID NO: 29889 - DNA, 4992 bp, Homo sapiens; identical to SEQ ID NO: 23977

SEQ ID NO: 29890 - DNA, 2636 bp, Homo sapiens; identical to SEQ ID NO: 23978
  misc_feature 1, 2, 3, 4, 5, 6, 2636: n = A,T,C or G

SEQ ID NO: 29891 - DNA, 340 bp, Homo sapiens; identical to SEQ ID NO: 23869

SEQ ID NO: 29892 - DNA, 1022 bp, Homo sapiens; identical to SEQ ID NO: 23803

SEQ ID NO: 29893 - DNA, 772 bp, Homo sapiens; identical to SEQ ID NO: 23981
  misc_feature 772: n = A,T,C or G

SEQ ID NO: 29894 - DNA, 1380 bp, Homo sapiens; identical to SEQ ID NO: 20118
  misc_feature 1380: n = A,T,C or G

SEQ ID NO: 29895 - DNA, 590 bp, Homo sapiens; identical to SEQ ID NO: 23983
  misc_feature 584: n = A,T,C or G

SEQ ID NO: 29896 - DNA, 1231 bp, Homo sapiens; identical to SEQ ID NO: 23782
  misc_feature 1, 2, 3, 9, 12, 15, 23, 27, 32, 35, 52, 1227, 1228, 1229,1230, 1231: n = A,T,C or G

SEQ ID NO: 29897 - DNA, 2551 bp, Homo sapiens; identical to SEQ ID NO: 22616

SEQ ID NO: 29898 - DNA, 1490 bp, Homo sapiens; identical to SEQ ID NO: 21073

SEQ ID NO: 29899 - DNA, 3881 bp, Homo sapiens; identical to SEQ ID NO: 23987
  misc_feature 1, 2, 3, 3863, 3864, 3865, 3866, 3867, 3868, 3869, 3870,3871, 3872, 3873, 3874, 3875, 3876, 3877, 3878, 3879, 3880,3881: n = A,T,C or G

SEQ ID NO: 29900 - DNA, 1214 bp, Homo sapiens; identical to SEQ ID NO: 20119

SEQ ID NO: 29901 - DNA, 920 bp, Homo sapiens; identical to SEQ ID NO: 20829
  misc_feature 1, 2, 3, 4, 5, 6, 7, 8, 9, 10, 915, 916, 917, 918, 919, 920: n = A,T,C or G

SEQ ID NO: 29902 - DNA, 6123 bp, Homo sapiens
  misc_feature 346, 347: n = A,T,C or G
acaaggcaaatttaagtaggctcatggcttttccagttgggttggaaagttcctctccgatgactgttatattctcaaagaaatatgaggagaggggcagggcatggtggctcacatccgtaatcctagcaaatcatgagtgcctacagccaacgccttcttcgctcactggccaactggaaacttcagtccccccatgcctcccgcctctcacccaggggccaataggaatgatcagaggttcgcaacttagtgtcatcaagcatagtaattgcaattggctattggagctgtcgatcgtggagtatgcggggccgtccagcttgcctatataagacgaggacannacgccgccgcctgtgtcatccgccattttgtgagaagcaaggtggcctccacgtttcctgagcgtcttcttcgcttttgcctcgaccgccccttgaccacagacatgtctcgggatcggttccggagtcgtggcggtggcggtggtggcttccacaggcgtggaggaggcggcggccgcggcggcctccagcgacttccgttctccgccgcccggcatgggcctcaatcagaatcgcggccccatgggtcctggcccgggccagagcggccctaagcctccgatcccgccaccgcctccacaccaacagcagcaacagccaccaccgcagcagccaccgccgcagcagccgccaccgcatcagccgccgccgcatccacagccgcatcagcagcagcagccgccgccaccgccgcaggactcttccaagcccgtcgttgctcagggacccggccccgctcccggagtaggcagcgcaccaccagcctccagctcggccccgcccgccactccaccaacctcgggggccccgccagggtccgggccaggcccgactccgaccccgccgcctgcagtcacctcggcccctcccggggcgccgccacccaccccgccaagcagcggggtccctaccacacctcctcaggccggaggcccgccgcctccgcccgcggcagtcccgggcccgggtccagggcctaagcagggcccaggtccgggtggtcccaaaggcggcaaaatgcctggcgggccgaagccaggtggcggcccgggcctaagtacgcctggcggccaccccaagccgccgcatcgaggcggcggggagccccgcgggggccgccagcaccacccgccctaccaccagcagcatcaccaggggcccccgcccggcgggcccggcggccgcagcgaggagaagatctcggactcggaggggtttaaagccaatttgtctctcttgaggaggcctggagagaaaacttacacacagcgatgtcggttgtttgttgggaatctacctgctgatatcacggaggatgaattcaaaagactatttgctaaatatggagaaccaggagaagtttttatcaacaaaggcaaaggattcggatttattaagcttgaatctagagctttggctgaaattgccaaagccgaactggatgatacacccatgagaggtagacagcttcgagttcgctttgccacacatgctgctgccctttctgttcgtaatctttcaccttatgtttccaatgaactgttggaagaagcctttagccaatttggtcctattgaaagggctgttgtaatagtggatgatcgtggaagatctacagggaaaggcattgttgaatttgcttctaagccagcagcaagaaaggcatttgaacgatgcagtgaaggtgttttcttactgacgacaactcctcgtccagtcattgtggaaccacttgaacaactagatgatgaagatggtcttcctgaaaaacttgcccagaagaatccaatgtatcaaaaggagagagaaacccctcctcgttttgcccagcatggcacgtttgagtacgaatattctcagcgatggaagtctttggatgaaatggaaaaacagcaaagggaacaagttgaaaaaaacatgaaagatgcaaaagacaaattggaaagtgaaatggaagatgcctatcatgaacatcaggcaaatcttttgcgccaagatctgatgagacgacaggaagaattaagacgcatggaagaacttcacaatcaagaaatgcagaaacgtaaagaaatgcaattgaggcaagaggaggaacgacgtagaagagaggaagagatgatgattcgtcaacgtgagatggaagaacaaatgaggcgccaaagagaggaaagttacagccgaatgggctacatggatccacgggaaagagacatgcgaatgggtggcggaggagcaatgaacatgggagatccctatggttcaggaggccagaaatttccacctctaggaggtggtggtggcataggttatgaagctaatcctggcgttccaccagcaaccatgagtggttccatgatgggaagtgacatgcgtactgagcgctttgggcagggaggtgcggggcctgtgggtggacagggtcctagaggaatggggcctggaactccagcaggatatggtagagggagagaagagtacgaaggcccaaacaaaaaaccccgattttagatgtgatatttaggctttcattccagtttgttttgtttttttgtttagataccaatcttttaaattcttgcattttagtaagaaagctatctttttatggatgttagcagtttattgacctaatatttgtaaatggtctgtttgggcaggtaaaattatgtaatgcagtgtttggaacaggagaattttttttttcctttttatttctttattttttcttttttactgtataatgtccctcaagtttatggcagtgtaccttgtgccactgaatttccaaagtgtaccaatttttttttttttttactgtgcttcaaataaatagaaaaatagttataatattgatcttcaactttgccattcatgcttctatgcatattaggctacgtattccacattgaaagcatgagagtgtctaggcctttgaatggcatatgccatttctgggaaatgcatctggaggctaagtattgctttctacaaataattgccccctttgttttaaaaagaagaaatgcatattgaagtagtttgatgatttgtttggcatataggaagcacgctggtgctaagtattttttaaatggttatgtaagcaaagctgaactgtaaatcttcaggaatatgtattaagattgtggaatgggtgtaagacaattggtagggggtgaaagtgggtttgattaaatggatcttttatggccctatgatctatcctttacttgaaagcttttgaaaagtggaaaggtcattttgttgcatttccccatttcttgtttttaaaagaccaacaaatctcaagccctataaatggcttgtattgaacttttacatttgaattaaagatgttaaacatgaagtcttttcatgtattcaagtgatttataaagatggggtgtagtctaaaaaacaaaacttgaaagtaagaaggtttagtaactgggccgggcgcggtggctcacgcctgtaatcccagcactttgggaggctgaggtgggcaaatcatgagatcaggagttcaagaccagcctggccaacatggtgaaaccccgtctctactaaaaatacaaaaaattagctgggcgtggtggcaggcgcctgtaatcccagctactcgggaggctgagccaggagaattgcttgaacctggagatggaggttgcagtgagctgagactgccactgcactccagcctggacaacagagcgagactctgtctcaaaaaaaaaaaaaggtttagtactgaagtaggtttagttatatatacatttgtactctgtaacttttacatctccttgtgctacttctgttgggcaaaatctataggactataaaaatctattggttctcttctaagagctagtggtgattgttaacaaatagggttgcagataatcattcttattgtaaatttaacttgttttcacatagtttcgttttcatgtagcactaaatctggagaaagttgctcatgctacacagtacaaatatcccttcctcccaccataaaggcttggaatgtttccatggtgttgtcagttaattgtcaacttcattgaacccccttccattagaacaagagactttgactattaaagtagattgtttattgttgcctgttagtataatgggagcctgatttcccagtgtaaatatgttagaggaacagcttcctaacagtaggtaaagtaattgaatggtttggctttgttctgagttacgttccattcaaatctgtacattgtagaattcttactatggaatgtgtcttcctccttttcacctcttttcttggtgctaattggcaaaagaaaaattctaagtcaaacctttattaacatgctgaagtttagtattgtgccctgtgtacaaaaggagacctattgttggaacaatctgagcactttctgcataggaaacaggataatgctgaaagtaaacactagtgtataaaagcatctcaccaaatactggttgtatgactgacaggtacatggtgtgctaagggagagaatctcattagaaagtaatgctcattatatcattcaccagcacactcggaaatatgagtagttttaccatgattatatcagtgaggaagttttgtccccaaacaggttattaattggtgatacataagagattttctgtacggaaacaagggtcttgattagaaaggaatccattacagtttggttgaattatatagtagggactctactaaagacaagaaaataaggggtgttccatgggacacccacagagggtgaaccttgaatgtgtgtgggtgggggctggtcgggaaatgggaaaatctgcctataaaattaatgtttcagtttatttttcagattacatgcctttctttataagggatgctggcacagaccccctaaaataagcttttggtagtactgtacctttgaagagtggtgaaggatgctaatggataatctcctgaaagttgtggcttttgatacccttactgtggactgtagagttgctaaacgttgtttagcaaataatgttgcttagtttcaaatgacatttgactttcatcactaaaacagcaatgtactcagggttgtaagcttactcaaatagactttcaataagtcttcaatgtatatatgatagtttttagcctaatgtgaatttaaataatcttaatagtttcctaaaagtcgatctgaaacttggggtgggaaaggggaggtagcaatttttgaagtattttagccattttttttcatttaaagaaaccacttgtccccatttcctcttctccactttctcataattttgttttaagaggaacactggttgttttttatacttctcctaatctttaaaaactgcatattgttaagaccccagtgtatttaataggtattttataagcatagcccattggctcatgttagtgaaaccataatcctctttgcttagaacattaaactcataagaagtactacaaaccccaccactctttatagatgtattgtaccactaatataaacagctaaaaaatggggaaattgtaatgttacgcctgtgcaatttttaagtggcatattatggcagattaaaatttagatacttggcttttcttgggcaagccactaagttgtggcggaatgttttctggtgttcttggactgcaattatgcactattaaagtagtggcctgctacataactgcatttagccagcatttctgcagtgcgtaactgtgaggaacgtagtaccgcaaatggcaatggacattaggacccggatgtagtattcctgcttgctccaagattctcattgccgactgcatacaggtaagaatgattgatgttggctgatattggagtgctcattcacatgaagtggatagatacttctcaagacatcacacagcgtgagtcaatcaaggagggaagccacaagcagactgacaacgtttctagcaggatcaggtgagctgtgtccagaaaaccaacgagaaggagtggaaggaggaatgaacgtttcattctcgttaataaaggcattatcctaa

SEQ ID NO: 29903 - DNA, 439 bp, Homo sapiens; identical to SEQ ID NO: 23991
  misc_feature 1, 439: n = A,T,C or G

SEQ ID NO: 29904 - DNA, 1231 bp, Homo sapiens; identical to SEQ ID NO: 23782
  misc_feature 1, 2, 3, 9, 12, 15, 23, 27, 32, 35, 52, 1227, 1228, 1229,1230, 1231: n = A,T,C or G

SEQ ID NO: 29905 - DNA, 2506 bp, Homo sapiens; identical to SEQ ID NO: 20323
  misc_feature 2503, 2504, 2505, 2506: n = A,T,C or G

SEQ ID NO: 29906 - DNA, 4219 bp, Homo sapiens; identical to SEQ ID NO: 23995
  misc_feature 1, 158, 4217, 4218, 4219: n = A,T,C or G

SEQ ID NO: 29907 - DNA, 606 bp, Homo sapiens; identical to SEQ ID NO: 23805
  misc_feature 1, 2, 3, 4, 5, 6, 7, 8, 9, 10, 11, 12, 605, 606: n = A,T,C or G

SEQ ID NO: 29908 - DNA, 2915 bp, Homo sapiens; identical to SEQ ID NO: 23997
  misc_feature 1, 2, 2908, 2909, 2910, 2911, 2912, 2913, 2914, 2915: n = A,T,C or G

SEQ ID NO: 29909 - DNA, 406 bp, Homo sapiens; identical to SEQ ID NO: 23998

SEQ ID NO: 29910 - DNA, 1545 bp, Homo sapiens; identical to SEQ ID NO: 23819
  misc_feature 1, 2, 3, 4, 5, 6, 7, 8, 9, 1541, 1542, 1543, 1544, 1545: n = A,T,C or G

SEQ ID NO: 29911 - DNA, 217 bp, Homo sapiens; identical to SEQ ID NO: 24000
  misc_feature 1, 2, 3, 4, 210, 211, 212, 213, 214, 215, 216, 217: n = A,T,C or G

SEQ ID NO: 29912 - DNA, 439 bp, Homo sapiens; identical to SEQ ID NO: 23991
  misc_feature 1, 439: n = A,T,C or G

SEQ ID NO: 29913 - DNA, 1214 bp, Homo sapiens; identical to SEQ ID NO: 20119

SEQ ID NO: 29914 - DNA, 204 bp, Homo sapiens; identical to SEQ ID NO: 24003
  misc_feature 204: n = A,T,C or G

SEQ ID NO: 29915 - DNA, 351 bp, Homo sapiens; identical to SEQ ID NO: 23993

SEQ ID NO: 29916 - DNA, 457 bp, Homo sapiens; identical to SEQ ID NO: 24005

SEQ ID NO: 29917 - DNA, 340 bp, Homo sapiens; identical to SEQ ID NO: 24006
  misc_feature 1, 2: n = A,T,C or G

SEQ ID NO: 29918 - DNA, 920 bp, Homo sapiens; identical to SEQ ID NO: 20829
  misc_feature 1, 2, 3, 4, 5, 6, 7, 8, 9, 10, 915, 916, 917, 918, 919, 920: n = A,T,C or G

SEQ ID NO: 29919 - DNA, 813 bp, Homo sapiens; identical to SEQ ID NO: 24008

SEQ ID NO: 29920 - DNA, 1641 bp, Homo sapiens; identical to SEQ ID NO: 20385
  misc_feature 1, 2, 1626, 1627, 1628, 1629, 1630, 1631, 1632, 1633, 1634,1635, 1636, 1637, 1638, 1639, 1640, 1641: n = A,T,C or G

SEQ ID NO: 29921 - DNA, 2915 bp, Homo sapiens; identical to SEQ ID NO: 23997
  misc_feature 1, 2, 2908, 2909, 2910, 2911, 2912, 2913, 2914, 2915: n = A,T,C or G

SEQ ID NO: 29922 - DNA, 688 bp, Homo sapiens; identical to SEQ ID NO: 24011
  misc_feature 1, 2, 3, 4, 5, 6, 7, 60: n = A,T,C or G

SEQ ID NO: 29923 - DNA, 1214 bp, Homo sapiens; identical to SEQ ID NO: 20119

SEQ ID NO: 29924 - DNA, 1641 bp, Homo sapiens; identical to SEQ ID NO: 20385
  misc_feature 1, 2, 1626, 1627, 1628, 1629, 1630, 1631, 1632, 1633, 1634,1635, 1636, 1637, 1638, 1639, 1640, 1641: n = A,T,C or G

SEQ ID NO: 29925 - DNA, 1432 bp, Homo sapiens; identical to SEQ ID NO: 29885

SEQ ID NO: 29926 - DNA, 439 bp, Homo sapiens; identical to SEQ ID NO: 23991
  misc_feature 1, 439: n = A,T,C or G

SEQ ID NO: 29927 - DNA, 1729 bp, Homo sapiens; identical to SEQ ID NO: 24015
  misc_feature 1, 2, 3, 4, 5, 6, 7, 8, 9, 10, 11, 12, 13, 14, 15, 16, 17: n = A,T,C or G

SEQ ID NO: 29928 - DNA, 1878 bp, Homo sapiens; identical to SEQ ID NO: 24016
  misc_feature 1, 2, 3, 4, 5, 6, 7, 8, 160, 161, 1878: n = A,T,C or G

SEQ ID NO: 29929 - DNA, 450 bp, Homo sapiens; identical to SEQ ID NO: 23962
  misc_feature 1, 2, 447, 448, 449, 450: n = A,T,C or G

SEQ ID NO: 29930 - DNA, 3860 bp, Homo sapiens
  misc_feature 3774, 3775, 3776, 3777, 3778, 3779, 3780, 3781, 3782, 3783,3784, 3785, 3786, 3787, 3788, 3789, 3790, 3791, 3792, 3793,3794, 3795, 3796: n = A,T,C or G
cgcgtccggcccatttcctcctccgagccggactggagggagacaaagcagcgcccgtctgcttcgggcctctggaatttagcgctcgcccagctagccgcagaaatgactgctgtccatgcaggcaacataaacttcaagtgggatcctaaaagtctagagatcaggactctggcagttgagagactgttggagcctcttgttacacaggttacaacccttgtaaacaccaatagtaaagggccctctaataagaagagaggtcgttctaagaaggcccatgttttggctgcatctgttgaacaagcaactgagaatttcttggagaagggggataaaattgcgaaggagagccagtttctcaaggaggagcttgtggctgctgtagaagatgttcgaaaacaaggtgatttgatgaaggctgctgcaggagagttcgcagatgatccctgctcttctgtgaagcgaggcaacatggttcgggcagctcgagctttgctctctgctgttacccggttgctgattttggctgacatggcagatgtctacaaattacttgttcagctgaaagttgtggaagatggtatcttgaagttgaggaatgctggcaatgaacaagacttaggaatccagtataaagccctaaaacctgaagtggataagctgaacattatggcagccaaaagacaacaggaattgaaagatgttggccatcgtgatcagatggctgcagcctagaggaatcctgcagaagaacgttccgatcctctatactgcatcccagggcatgccctacagcaccctgatgtcgcagcctataagggccaacagggacctgatatacaagcagttgcagcaggcggtcacagcatttccaatgcagcccaggccactgcctcagacgatgcctcacagcaccagggtggaggaggaggagaactggcatatgcactcaataactttgacaaacaaatcattgtggaccccttgagcttcagcgaggagcgctttaggccttccctggaggagcgtctggaaagcatcattagtggggctgccttgatggccgactcgtcctgcacgcgtgatgaccgtcgtgagcgaattgtggcagagtgtaatgctgtccgccaggccctgcaggacctgctttcggagtacatgggcaatgctggacgtaaagaaagaagtgatgcactcaattctgcaatagataaaatgaccaagaagaccagggacttgcgtagacagctccgcaaagctgtcatggaccacgtttcagattctttcctggaaaccaatgttccacttttggtattgattgaagctgcaaagaatggaaatgagaaagaagttaaggagtatgcccaagttttccgtgaacatgccaacaaattgattgaggttgccaacttggcctgttccatctcaaataatgaagaaggtgtaaagcttgttcgaatgtctgcaagccagttagaagccctctgtcctcaggttattaatgctgcactggctttagcagcaaaaccacagagtaaactggcccaagagaacatggatctttttaaagaacaatgggaaaaacaagtccgtgttctcacagatgctgtcgatgacattacttccattgatgacttcttggctgtctcagagaatcacattttggaagatgtgaacaaatgtgtcattgctctccaagagaaggatgtggatggcctggaccgcacagctggtgcaattcgaggccgggcagcccgggtcattcacgtagtcacctcagagatggacaactatgagccaggagtctacacagagaaggttctggaagccactaagctgctctccaacacagtcatgccacgttttactgagcaagtagaagcagccgtggaagccctcagctcggaccctgcccagcccatggatgagaatgagtttatcgatgcttcccgcctggtatatgatggcatccgggacatcaggaaagcagtgctgatgataaggacccctgaggagttggatgactctgactttgagacagaagattttgatgtcagaagcaggacgagcgtccagacagaagacgatcagctgatagctggccagagtgcccgggcgatcatggctcagcttccccaggagcaaaaagcgaagattgcggaacaggtggccagcttccaggaagaaaagagcaagctggatgctgaagtgtccaaatgggacgacagtggcaatgacatcattgtgctggccaagcagatgtgcatgattatgatggagatgacagactttacccgaggtaaaggaccactcaaaaatacatcggatgtcatcagtgctgccaagaaaattgctgaggcaggatccaggatggacaagcttggccgcaccattgcagaccattgccccgactcggcttgcaagcaggacctgctggcctacctgcaacgcatcgccctctactgccaccagctgaacatctgcagcaaggtcaaggccgaggtgcagaatctcggcggggagcttgttgtctctggggtggacagcgccatgtccctgatccaggcagccaagaacttgatgaatgctgtggtgcagacagtgaaggcatcctacgtcgcctctaccaaataccaaaagtcacagggtatggcttccctcaaccttcctgctgtgtcatggaagatgaaggcaccagagaaaaagccattggtgaagagagagaaacaggatgagacacagaccaagattaaacgggcatctcagaagaagcacgtgaacccggtgcaggccctcagcgagttcaaagctatggacagcatctaagtctgcccaggccggccgcccccacccctcggggctcctgaatatcagtcactgttcgtcactcaaatgaatttgctaaatacaacactgatactagattccacagggaaatgggcagactgaaccagtccaggtggtgaattttccaagaacatagtttaagttgattaaaaatgctttttagaatgcaggagcctacttctagctgtattttttgtatgcttaaataaaaataaaaattcataaccaaagagaatcccacattagcttgtttgttagtaatgctctgaccaagccgagatgcccattctcttagtgatggcggcgttagggtttgagagaagggaatttggctcaacttcagttgagagggtgcagtccagacagcttgactgcttttaaatgaccaaagatgacctgtggtaagcaacctgggcatcttaggaagcagtccctggagaaggcatgttcccagaaaggtctctggagggacaaactcactcagtaaaacataatgtatcatgaagaaaactgattctctatgacatgaaatgaaaattttaatgcattgttataattactaatgtacgctgctgcaggacattaataaagttgcttttttaggctacagtgtctcgatgccataatcagaacacactttttttcctctttctcccagcttcaaatgcaaattcatcattgggctcacttctaataactgcagtgtttcccgccttgggcttgcggcagaaaaacctgacaacatagtgtttgctaaggcagtaatttagactttaccttatttgtgattactgtagtgattgattgattactattaactacaaggtataatttactatcaccttatttaaattttatgaattaatttgaatgttttttacactaactaacttttcccaataaagtccactatgaaaccacggnnnnnnnnnnnnnnnnnnnnnnnttttttcttcccggggggggccccccggggggggaccccccttttttttcccttttaggggggg

SEQ ID NO: 29931 - DNA, 384 bp, Homo sapiens; identical to SEQ ID NO: 24018

SEQ ID NO: 29932 - DNA, 3032 bp, Homo sapiens; identical to SEQ ID NO: 24019
  misc_feature 1, 2, 3, 4, 5, 6: n = A,T,C or G

SEQ ID NO: 29933 - DNA, 2158 bp, Homo sapiens; identical to SEQ ID NO: 24020
  misc_feature 1, 2140, 2141, 2142, 2143, 2144, 2145, 2146, 2147, 2148,2149, 2150, 2151, 2152, 2153, 2154, 2155, 2156, 2157, 2158: n = A,T,C or G

SEQ ID NO: 29934 - DNA, 1804 bp, Homo sapiens; identical to SEQ ID NO: 23943
  misc_feature 1, 2, 3, 4, 5, 6, 7, 8, 9, 10, 12, 1802, 1803, 1804: n = A,T,C or G

SEQ ID NO: 29935 - DNA, 636 bp, Homo sapiens; identical to SEQ ID NO: 24022
  misc_feature 1, 2, 3, 4, 5, 6, 7, 8, 9, 10, 11, 12, 13, 14, 15: n = A,T,C or G

SEQ ID NO: 29936 - DNA, 1022 bp, Homo sapiens; identical to SEQ ID NO: 23803

SEQ ID NO: 29937 - DNA, 1641 bp, Homo sapiens; identical to SEQ ID NO: 20385
  misc_feature 1, 2, 1626, 1627, 1628, 1629, 1630, 1631, 1632, 1633, 1634,1635, 1636, 1637, 1638, 1639, 1640, 1641: n = A,T,C or G

SEQ ID NO: 29938 - DNA, 2487 bp, Homo sapiens; identical to SEQ ID NO: 24026
  misc_feature 1, 2, 3, 4, 5, 6, 7, 8, 9, 2487: n = A,T,C or G

SEQ ID NO: 29939 - DNA, 1474 bp, Homo sapiens; identical to SEQ ID NO: 24027
  misc_feature 58, 59, 60, 61, 62, 63, 64, 65, 66, 67, 68, 69, 70, 71, 72,73, 74, 75, 76, 77, 78, 79, 80, 81, 82, 83, 84, 85, 86,87, 1458, 1460, 1461, 1462, 1463, 1464, 1465, 1466, 1467,1468, 1469, 1470, 1471, 1472, 1473, 1474: n = A,T,C or G

SEQ ID NO: 29940 - DNA, 1504 bp, Homo sapiens; identical to SEQ ID NO: 24028
  misc_feature 1502, 1503, 1504: n = A,T,C or G

SEQ ID NO: 29941 - DNA, 488 bp, Homo sapiens; identical to SEQ ID NO: 24029
  misc_feature 488: n = A,T,C or G

SEQ ID NO: 29942 - DNA, 681 bp, Homo sapiens; identical to SEQ ID NO: 20120
  misc_feature 1, 2, 12: n = A,T,C or G

SEQ ID NO: 29943 - DNA, 604 bp, Homo sapiens; identical to SEQ ID NO: 24031

SEQ ID NO: 29944 - DNA, 480 bp, Homo sapiens; identical to SEQ ID NO: 24033
  misc_feature 425, 479, 480: n = A,T,C or G

SEQ ID NO: 29945 - DNA, 1641 bp, Homo sapiens; identical to SEQ ID NO: 20385
  misc_feature 1, 2, 1626, 1627, 1628, 1629, 1630, 1631, 1632, 1633, 1634,1635, 1636, 1637, 1638, 1639, 1640, 1641: n = A,T,C or G

SEQ ID NO: 29946 - DNA, 1200 bp, Homo sapiens; identical to SEQ ID NO: 24035
  misc_feature 1195, 1196, 1197, 1198, 1199, 1200: n = A,T,C or G

SEQ ID NO: 29947 - DNA, 534 bp, Homo sapiens; identical to SEQ ID NO: 24036
  misc_feature 1, 2, 3, 4, 532, 533, 534: n = A,T,C or G

SEQ ID NO: 29948 - DNA, 1641 bp, Homo sapiens; identical to SEQ ID NO: 20385
  misc_feature 1, 2, 1626, 1627, 1628, 1629, 1630, 1631, 1632, 1633, 1634,1635, 1636, 1637, 1638, 1639, 1640, 1641: n = A,T,C or G

SEQ ID NO: 29949 - DNA, 4399 bp, Homo sapiens; identical to SEQ ID NO: 20975

SEQ ID NO: 29950 - DNA, 4596 bp, Homo sapiens; identical to SEQ ID NO: 24040

SEQ ID NO: 29951 - DNA, 1214 bp, Homo sapiens; identical to SEQ ID NO: 20119

SEQ ID NO: 29952 - DNA, 1490 bp, Homo sapiens; identical to SEQ ID NO: 21073

SEQ ID NO: 29953 - DNA, 2019 bp, Homo sapiens; identical to SEQ ID NO: 22489
  misc_feature 2005, 2006, 2007, 2008, 2009, 2010, 2011, 2012, 2013, 2014,2015, 2016, 2017, 2018, 2019: n = A,T,C or G

SEQ ID NO: 29954 - DNA, 940 bp, Homo sapiens; identical to SEQ ID NO: 23971
  misc_feature 1, 2, 3, 938, 939, 940: n = A,T,C or G

SEQ ID NO: 29955 - DNA, 4596 bp, Homo sapiens; identical to SEQ ID NO: 24040

SEQ ID NO: 29956 - DNA, 920 bp, Homo sapiens; identical to SEQ ID NO: 20829
  misc_feature 1, 2, 3, 4, 5, 6, 7, 8, 9, 10, 915, 916, 917, 918, 919, 920: n = A,T,C or G

SEQ ID NO: 29957 - DNA, 384 bp, Homo sapiens; identical to SEQ ID NO: 24018

SEQ ID NO: 29958 - DNA, 1074 bp, Homo sapiens; identical to SEQ ID NO: 20298
  misc_feature 1, 2, 3, 4, 5, 1073, 1074: n = A,T,C or G

SEQ ID NO: 29959 - DNA, 1490 bp, Homo sapiens; identical to SEQ ID NO: 21073

SEQ ID NO: 29960 - DNA, 1246 bp, Homo sapiens; identical to SEQ ID NO: 24050
  misc_feature 1, 2, 1236, 1239, 1240, 1241, 1242, 1243, 1244, 1245, 1246: n = A,T,C or G

SEQ ID NO: 29961 - DNA, 363 bp, Homo sapiens; identical to SEQ ID NO: 24051
  misc_feature 1, 2, 3, 359, 360, 361, 362, 363: n = A,T,C or G

SEQ ID NO: 29962 - DNA, 2608 bp, Homo sapiens; identical to SEQ ID NO: 21241
  misc_feature 1, 2, 3, 4, 5, 6, 7, 8, 9, 10, 11, 12, 13, 14, 15, 16, 17,18, 19, 20, 21, 22, 2607, 2608: n = A,T,C or G

SEQ ID NO: 29963 - DNA, 920 bp, Homo sapiens; identical to SEQ ID NO: 20829
  misc_feature 1, 2, 3, 4, 5, 6, 7, 8, 9, 10, 915, 916, 917, 918, 919, 920: n = A,T,C or G

SEQ ID NO: 29964 - DNA, 534 bp, Homo sapiens; identical to SEQ ID NO: 24036
  misc_feature 1, 2, 3, 4, 532, 533, 534: n = A,T,C or G

SEQ ID NO: 29965 - DNA, 1641 bp, Homo sapiens; identical to SEQ ID NO: 20385
  misc_feature 1, 2, 1626, 1627, 1628, 1629, 1630, 1631, 1632, 1633, 1634,1635, 1636, 1637, 1638, 1639, 1640, 1641: n = A,T,C or G

SEQ ID NO: 29966 - DNA, 516 bp, Homo sapiens; identical to SEQ ID NO: 24056
  misc_feature 1, 2, 3, 4, 5, 6, 7, 8, 9, 10, 11, 12, 13, 14, 15, 16, 17,18, 19, 20, 21, 22, 23, 24, 25, 26, 27: n = A,T,C or G

SEQ ID NO: 29967 - DNA, 1641 bp, Homo sapiens; identical to SEQ ID NO: 20385
  misc_feature 1, 2, 1626, 1627, 1628, 1629, 1630, 1631, 1632, 1633, 1634,1635, 1636, 1637, 1638, 1639, 1640, 1641: n = A,T,C or G

SEQ ID NO: 29968 - DNA, 920 bp, Homo sapiens; identical to SEQ ID NO: 20829
  misc_feature 1, 2, 3, 4, 5, 6, 7, 8, 9, 10, 915, 916, 917, 918, 919, 920: n = A,T,C or G

SEQ ID NO: 29969 - DNA, 607 bp, Homo sapiens; identical to SEQ ID NO: 24059
  misc_feature 1, 2, 3: n = A,T,C or G

SEQ ID NO: 29970 - DNA, 1490 bp, Homo sapiens; identical to SEQ ID NO: 21073

SEQ ID NO: 29971 - DNA, 1022 bp, Homo sapiens; identical to SEQ ID NO: 23803

SEQ ID NO: 29972 - DNA, 1022 bp, Homo sapiens; identical to SEQ ID NO: 23803

SEQ ID NO: 29973 - DNA, 1545 bp, Homo sapiens; identical to SEQ ID NO: 23819
  misc_feature 1, 2, 3, 4, 5, 6, 7, 8, 9, 1541, 1542, 1543, 1544, 1545: n = A,T,C or G

SEQ ID NO: 29974 - DNA, 791 bp, Homo sapiens; identical to SEQ ID NO: 24064
  misc_feature 1: n = A,T,C or G

SEQ ID NO: 29975 - DNA, 712 bp, Homo sapiens; identical to SEQ ID NO: 24065
  misc_feature 1, 2, 3, 4, 5, 6, 7, 705, 706, 707, 708, 709, 710, 711, 712: n = A,T,C or G

SEQ ID NO: 29976 - DNA, 573 bp, Homo sapiens; identical to SEQ ID NO: 24066
  misc_feature 573: n = A,T,C or G

SEQ ID NO: 29977 - DNA, 1641 bp, Homo sapiens; identical to SEQ ID NO: 20385
  misc_feature 1, 2, 1626, 1627, 1628, 1629, 1630, 1631, 1632, 1633, 1634,1635, 1636, 1637, 1638, 1639, 1640, 1641: n = A,T,C or G

SEQ ID NO: 29978 - DNA, 1612 bp, Homo sapiens; identical to SEQ ID NO: 24068
  misc_feature 1, 2, 3, 4, 5, 6, 7, 8, 9, 10, 11, 12, 1612: n = A,T,C or G

SEQ ID NO: 29979 - DNA, 1105 bp, Homo sapiens; identical to SEQ ID NO: 24069
  misc_feature 1, 1105: n = A,T,C or G

SEQ ID NO: 29980 - DNA, 388 bp, Homo sapiens; identical to SEQ ID NO: 24071

SEQ ID NO: 29981 - DNA, 251 bp, Homo sapiens; identical to SEQ ID NO: 24072
  misc_feature 251: n = A,T,C or G

SEQ ID NO: 29982 - DNA, 649 bp, Homo sapiens; identical to SEQ ID NO: 24073
  misc_feature 1, 2, 3, 4, 5, 6, 7: n = A,T,C or G

SEQ ID NO: 29983 - DNA, 222 bp, Homo sapiens; identical to SEQ ID NO: 24074

SEQ ID NO: 29984 - DNA, 880 bp, Homo sapiens; identical to SEQ ID NO: 24075
  misc_feature 876, 877, 878, 879, 880: n = A,T,C or G

SEQ ID NO: 29985 - DNA, 1147 bp, Homo sapiens; identical to SEQ ID NO: 22487
  misc_feature 1, 2: n = A,T,C or G

SEQ ID NO: 29986 - DNA, 1946 bp, Homo sapiens; identical to SEQ ID NO: 23780
  misc_feature 1, 2, 3, 4, 5, 6, 7, 8, 9, 10, 11, 12, 13, 1132, 1133, 1134,1135, 1136, 1137, 1138, 1139, 1140, 1141, 1142, 1143, 1144,1922, 1923, 1924, 1925, 1926, 1927, 1928, 1929, 1930, 1931,1932, 1933, 1934, 1935, 1936, 1937, 1938, 1939, 1940: n = A,T,C or G
  misc_feature 1941, 1942, 1943, 1944, 1945, 1946: n = A,T,C or G

SEQ ID NO: 29987 - DNA, 281 bp, Homo sapiens; identical to SEQ ID NO: 24077

SEQ ID NO: 29988 - DNA, 1641 bp, Homo sapiens; identical to SEQ ID NO: 20385
  misc_feature 1, 2, 1626, 1627, 1628, 1629, 1630, 1631, 1632, 1633, 1634,1635, 1636, 1637, 1638, 1639, 1640, 1641: n = A,T,C or G

SEQ ID NO: 29989 - DNA, 1715 bp, Homo sapiens; identical to SEQ ID NO: 23747

SEQ ID NO: 29990 - DNA, 1641 bp, Homo sapiens; identical to SEQ ID NO: 20385
  misc_feature 1, 2, 1626, 1627, 1628, 1629, 1630, 1631, 1632, 1633, 1634,1635, 1636, 1637, 1638, 1639, 1640, 1641: n = A,T,C or G

SEQ ID NO: 29991 - DNA, 435 bp, Homo sapiens; identical to SEQ ID NO: 23718

SEQ ID NO: 29992 - DNA, 2831 bp, Homo sapiens; identical to SEQ ID NO: 24082
  misc_feature 1, 2827, 2828, 2829, 2830, 2831: n = A,T,C or G

SEQ ID NO: 29993 - DNA, 770 bp, Homo sapiens; identical to SEQ ID NO: 20288
  misc_feature 765, 766, 767, 768, 769, 770: n = A,T,C or G

SEQ ID NO: 29994 - DNA, 1641 bp, Homo sapiens; identical to SEQ ID NO: 20385
  misc_feature 1, 2, 1626, 1627, 1628, 1629, 1630, 1631, 1632, 1633, 1634,1635, 1636, 1637, 1638, 1639, 1640, 1641: n = A,T,C or G

SEQ ID NO: 29995 - DNA, 1490 bp, Homo sapiens; identical to SEQ ID NO: 21073

SEQ ID NO: 29996 - DNA, 651 bp, Homo sapiens; identical to SEQ ID NO: 24086
  misc_feature 644, 645, 646, 647, 648, 649, 650, 651: n = A,T,C or G

SEQ ID NO: 29997 - DNA, 810 bp, Homo sapiens; identical to SEQ ID NO: 24087
  misc_feature 1, 2, 3, 4, 5, 807, 808, 809, 810: n = A,T,C or G

SEQ ID NO: 29998 - DNA, 1214 bp, Homo sapiens; identical to SEQ ID NO: 20119

SEQ ID NO: 29999 - DNA, 810 bp, Homo sapiens; identical to SEQ ID NO: 24087
  misc_feature 1, 2, 3, 4, 5, 807, 808, 809, 810: n = A,T,C or G

SEQ ID NO: 30000 - DNA, 1641 bp, Homo sapiens; identical to SEQ ID NO: 20385
  misc_feature 1, 2, 1626, 1627, 1628, 1629, 1630, 1631, 1632, 1633, 1634,1635, 1636, 1637, 1638, 1639, 1640, 1641: n = A,T,C or G

SEQ ID NO: 30001 - DNA, 3881 bp, Homo sapiens; identical to SEQ ID NO: 23987
  misc_feature 1, 2, 3, 3863, 3864, 3865, 3866, 3867, 3868, 3869, 3870,3871, 3872, 3873, 3874, 3875, 3876, 3877, 3878, 3879, 3880,3881: n = A,T,C or G

SEQ ID NO: 30002 - DNA, 1731 bp, Homo sapiens; identical to SEQ ID NO: 24092
  misc_feature 1, 1722, 1723, 1724, 1725, 1726, 1727, 1728, 1729, 1730,1731: n = A,T,C or G

SEQ ID NO: 30003 - DNA, 929 bp, Homo sapiens; identical to SEQ ID NO: 20094
  misc_feature 1, 2, 3, 4, 5, 6, 7, 8, 9, 10, 11, 12, 13, 14, 15, 16, 17,18, 19, 20, 926, 927, 928, 929: n = A,T,C or G

SEQ ID NO: 30004 - DNA, 388 bp, Homo sapiens; identical to SEQ ID NO: 24071

SEQ ID NO: 30005 - DNA, 648 bp, Homo sapiens; identical to SEQ ID NO: 24095
  misc_feature 1, 2, 648: n = A,T,C or G

SEQ ID NO: 30006 - DNA, 800 bp, Homo sapiens; identical to SEQ ID NO: 23821
  misc_feature 1, 796, 797, 798, 799, 800: n = A,T,C or G

SEQ ID NO: 30007 - DNA, 1022 bp, Homo sapiens; identical to SEQ ID NO: 23803

SEQ ID NO: 30008 - DNA, 474 bp, Homo sapiens; identical to SEQ ID NO: 24098
  misc_feature 471, 472, 473, 474: n = A,T,C or G

SEQ ID NO: 30009 - DNA, 1641 bp, Homo sapiens; identical to SEQ ID NO: 20385
  misc_feature 1, 2, 1626, 1627, 1628, 1629, 1630, 1631, 1632, 1633, 1634,1635, 1636, 1637, 1638, 1639, 1640, 1641: n = A,T,C or G

SEQ ID NO: 30010 - DNA, 683 bp, Homo sapiens; identical to SEQ ID NO: 24102
  misc_feature 666, 667, 668, 669, 670, 671, 672, 673, 674, 675, 676, 677,678, 679, 680, 681, 682, 683: n = A,T,C or G

SEQ ID NO: 30011 - DNA, 1309 bp, Homo sapiens; identical to SEQ ID NO: 23323
  misc_feature 1, 1308, 1309: n = A,T,C or G

SEQ ID NO: 30012 - DNA, 480 bp, Homo sapiens; identical to SEQ ID NO: 24033
  misc_feature 425, 479, 480: n = A,T,C or G

SEQ ID NO: 30013 - DNA, 6135 bp, Homo sapiens; identical to SEQ ID NO: 23942
  misc_feature 1, 6115, 6116, 6117, 6118, 6119, 6120, 6121, 6122, 6123,6124, 6125, 6126, 6127, 6128, 6129, 6130, 6131, 6132, 6133,6134, 6135: n = A,T,C or G

SEQ ID NO: 30014 - DNA, 385 bp, Homo sapiens; identical to SEQ ID NO: 20268

SEQ ID NO: 30015 - DNA, 651 bp, Homo sapiens; identical to SEQ ID NO: 24086
  misc_feature 644, 645, 646, 647, 648, 649, 650, 651: n = A,T,C or G

SEQ ID NO: 30016 - DNA, 764 bp, Homo sapiens; identical to SEQ ID NO: 24108
  misc_feature 1, 24, 613, 758, 759, 760, 761, 762, 763, 764: n = A,T,C or G

SEQ ID NO: 30017 - DNA, 1641 bp, Homo sapiens; identical to SEQ ID NO: 20385
  misc_feature 1, 2, 1626, 1627, 1628, 1629, 1630, 1631, 1632, 1633, 1634,1635, 1636, 1637, 1638, 1639, 1640, 1641: n = A,T,C or G

SEQ ID NO: 30018 - DNA, 435 bp, Homo sapiens; identical to SEQ ID NO: 23786
  misc_feature 1, 2, 3: n = A,T,C or G

SEQ ID NO: 30019 - DNA, 2033 bp, Homo sapiens; identical to SEQ ID NO: 24112

SEQ ID NO: 30020 - DNA, 2049 bp, Homo sapiens; identical to SEQ ID NO: 24114

SEQ ID NO: 30021 - DNA, 433 bp, Homo sapiens; identical to SEQ ID NO: 24115
  misc_feature 1, 432, 433: n = A,T,C or G

SEQ ID NO: 30022 - DNA, 532 bp, Homo sapiens; identical to SEQ ID NO: 20375
  misc_feature 1, 520, 521, 522, 523, 524, 525, 526, 527, 528, 529, 530,531, 532: n = A,T,C or G

SEQ ID NO: 30023 - DNA, 506 bp, Homo sapiens; identical to SEQ ID NO: 20423
  misc_feature 506: n = A,T,C or G

SEQ ID NO: 30024 - DNA, 2246 bp, Homo sapiens; identical to SEQ ID NO: 24119
  misc_feature 1, 2, 3, 2246: n = A,T,C or G

SEQ ID NO: 30025 - DNA, 694 bp, Homo sapiens; identical to SEQ ID NO: 23775
  misc_feature 1, 2, 3, 4, 5, 6, 7, 8, 9, 10, 11, 12, 13, 14, 15, 16, 17,18, 19, 20, 21, 22, 23, 24, 25, 693, 694: n = A,T,C or G

SEQ ID NO: 30026 - DNA, 1490 bp, Homo sapiens; identical to SEQ ID NO: 21073

SEQ ID NO: 30027 - DNA, 955 bp, Homo sapiens; identical to SEQ ID NO: 25741

SEQ ID NO: 30028 - DNA, 622 bp, Homo sapiens; identical to SEQ ID NO: 25742
  misc_feature 1, 618, 619, 620, 621, 622: n = A,T,C or G

SEQ ID NO: 30029 - DNA, 276 bp, Homo sapiens; identical to SEQ ID NO: 20777

SEQ ID NO: 30030 - DNA, 1026 bp, Homo sapiens; identical to SEQ ID NO: 20190
  misc_feature 1, 2, 3, 4, 5, 6, 7, 8, 9, 10, 11, 12, 13, 28, 1012, 1013,1014, 1015, 1016, 1017, 1018, 1019, 1020, 1021, 1022, 1023,1024, 1025, 1026: n = A,T,C or G

SEQ ID NO: 30031 - DNA, 1214 bp, Homo sapiens; identical to SEQ ID NO: 20119

SEQ ID NO: 30032 - DNA, 3918 bp, Homo sapiens; identical to SEQ ID NO: 22949
  misc_feature 3915, 3916, 3917, 3918: n = A,T,C or G

SEQ ID NO: 30033 - DNA, 1490 bp, Homo sapiens; identical to SEQ ID NO: 21073

SEQ ID NO: 30034 - DNA, 1803 bp, Homo sapiens; identical to SEQ ID NO: 23745
  misc_feature 1802, 1803: n = A,T,C or G

SEQ ID NO: 30035 - DNA, 1214 bp, Homo sapiens; identical to SEQ ID NO: 20119

SEQ ID NO: 30036 - DNA, 1128 bp, Homo sapiens; identical to SEQ ID NO: 25750
  misc_feature 1114, 1115, 1116, 1117, 1118, 1119, 1120, 1121, 1122, 1123,1124, 1125, 1126, 1127, 1128: n = A,T,C or G

SEQ ID NO: 30037 - DNA, 1139 bp, Homo sapiens; identical to SEQ ID NO: 25751
  misc_feature 1, 2, 3, 4, 5, 1136, 1137, 1138, 1139: n = A,T,C or G

SEQ ID NO: 30038 - DNA, 1643 bp, Homo sapiens; identical to SEQ ID NO: 21150
  misc_feature 1, 2, 3, 4, 1615, 1616, 1617, 1618, 1619, 1620, 1621, 1622,1623, 1624, 1625, 1626, 1627, 1628, 1629, 1630, 1631, 1632,1633, 1634, 1635, 1636, 1637, 1638, 1639, 1640, 1641, 1642,1643: n = A,T,C or G

SEQ ID NO: 30039 - DNA, 1214 bp, Homo sapiens; identical to SEQ ID NO: 20119

SEQ ID NO: 30040 - DNA, 622 bp, Homo sapiens; identical to SEQ ID NO: 25742
  misc_feature 1, 618, 619, 620, 621, 622: n = A,T,C or G

SEQ ID NO: 30041 - DNA, 1214 bp, Homo sapiens; identical to SEQ ID NO: 20119

SEQ ID NO: 30042 - DNA, 1729 bp, Homo sapiens; identical to SEQ ID NO: 24015
  misc_feature 1, 2, 3, 4, 5, 6, 7, 8, 9, 10, 11, 12, 13, 14, 15, 16, 17: n = A,T,C or G

SEQ ID NO: 30043 - DNA, 793 bp, Homo sapiens; identical to SEQ ID NO: 23716
  misc_feature 1, 2, 3: n = A,T,C or G

SEQ ID NO: 30044 - DNA, 1490 bp, Homo sapiens; identical to SEQ ID NO: 21073

SEQ ID NO: 30045 - DNA, 1490 bp, Homo sapiens; identical to SEQ ID NO: 21073

SEQ ID NO: 30046 - DNA, 856 bp, Homo sapiens; identical to SEQ ID NO: 20855
  misc_feature 779, 810, 856: n = A,T,C or G

SEQ ID NO: 30047 - DNA, 2887 bp, Homo sapiens; identical to SEQ ID NO: 24617
  misc_feature 1, 2, 2885, 2886, 2887: n = A,T,C or G

SEQ ID NO: 30048 - DNA, 1490 bp, Homo sapiens; identical to SEQ ID NO: 21073

SEQ ID NO: 30049 - DNA, 2543 bp, Homo sapiens; identical to SEQ ID NO: 25764
  misc_feature 1, 2, 3, 213, 2541, 2542, 2543: n = A,T,C or G

SEQ ID NO: 30050 - DNA, 890 bp, Homo sapiens; identical to SEQ ID NO: 25765

SEQ ID NO: 30051 - DNA, 1490 bp, Homo sapiens; identical to SEQ ID NO: 21073

SEQ ID NO: 30052 - DNA, 1674 bp, Homo sapiens; identical to SEQ ID NO: 25767

SEQ ID NO: 30053 - DNA, 245 bp, Homo sapiens; identical to SEQ ID NO: 25768

SEQ ID NO: 30054 - DNA, 398 bp, Homo sapiens; identical to SEQ ID NO: 22245
  misc_feature 398: n = A,T,C or G

SEQ ID NO: 30055 - DNA, 2497 bp, Homo sapiens; identical to SEQ ID NO: 25770
  misc_feature 1, 2, 3, 2384, 2435, 2458, 2490, 2497: n = A,T,C or G

SEQ ID NO: 30056 - DNA, 690 bp, Homo sapiens; identical to SEQ ID NO: 25771
  misc_feature 1, 2, 18: n = A,T,C or G

SEQ ID NO: 30057 - DNA, 463 bp, Homo sapiens; identical to SEQ ID NO: 25772

SEQ ID NO: 30058 - DNA, 3617 bp, Homo sapiens; identical to SEQ ID NO: 25773
  misc_feature 1, 2, 3592, 3593, 3594, 3595, 3596, 3597, 3598, 3599, 3600,3601, 3602, 3603, 3604, 3605, 3606, 3607, 3608, 3609, 3610,3611, 3612, 3613, 3614, 3615, 3616, 3617: n = A,T,C or G

SEQ ID NO: 30059 - DNA, 463 bp, Homo sapiens; identical to SEQ ID NO: 25772

SEQ ID NO: 30060 - DNA, 1801 bp, Homo sapiens; identical to SEQ ID NO: 25775
  misc_feature 1795, 1796, 1797, 1798, 1799, 1800, 1801: n = A,T,C or G

SEQ ID NO: 30061 - DNA, 1360 bp, Homo sapiens
  misc_feature 1360: n = A,T,C or G
acctttaaagaagacccttggagtcttctataccttcttctccttccccatctcactccaccccactttgtccctgatgtcttggggaaggtgtagaacaccctagcagttcctattgtatatacttgggagccactgagaacagaggacggccagtgagtccaagcctcgttcctccttctgcctccccggagccacaggatggatttaggagccactgctcagtgcacttctcccttccaactgcatcaactaactctcgggggtgttctgctcaccacaccgtccttcggttcttactgagtcacagactcgcctgcccactacgtgtcctgggttctctctactcagatcccttccagaaactttatatgggtagaggaagccagggcggcaaatgcgagaccaaatatcattttgccaatgagtctgaggctgtggtctctggatccagtcattatgtttttatagaataattaaaccggatgctaacggtgttttaaaaaataataataaaacaacttgtttccttttggccacccccaggaagggctgatttcaaaatctgggggcgagcaacctcaaggaacacaatttccctccctatcaacaagaggattttaacagcaaagaagagaggcagcacctcccattggcagaatgaccgctgagccaggctgggtttgggtttcttctcttctgattctgctgctcactgtcatagccttttgtgtatagtgatgtgtctgtatctttaatgtaaatagagagatgatgaaaaaagagtctattttagtgttaggaagccccagcaggggagtcggaagagcttggaagagctggggagagggtaggggaaaggtttttccaggggccactgggtttgagccctgcttctgtgcacagccacaccaccctctcccgacagccctcaaagacgtagcaactctttctctcaaggtgctaaaggactcagaaggtgcagcacgtccagtgggtaggtacttgttgcatgcaaaagctgtagtgtatctggtccttcctccccagcttttgtgtggggttcttgctttgtgtggtattttgttttcccctctaatgagagggcatggcctgagtcagaagagctaccccaggtgaaactggaagtgcatgaggcagagcgtccgtagcatttccagtttgttctgtataggaacagaggtgcctccgggaaggaggcagcgaggtaggtagctatgataggcacctaatgcttctcaaggacttattttttccttcttgaagactagtagtaacatcttatgatttagagtaagttgattggaaccataggtatttattgattggaggaagggan

SEQ ID NO: 30062 - DNA, 2813 bp, Homo sapiens
  misc_feature 1, 2260, 2262, 2269, 2279, 2301, 2307, 2325, 2355, 2379,2381, 2382, 2401, 2404, 2409, 2410, 2428, 2435, 2450, 2451,2453, 2455, 2457, 2470, 2472, 2473, 2480, 2481, 2483, 2488,2499, 2501, 2509, 2517, 2523, 2525, 2534, 2536, 2543: n = A,T,C or G
  misc_feature 2550, 2553, 2554, 2555, 2556, 2561, 2563, 2568, 2569, 2570,2575, 2583, 2584, 2591, 2593, 2595, 2599, 2600, 2604, 2608,2618, 2619, 2620, 2622, 2627, 2632, 2645, 2648, 2655, 2661,2669, 2671, 2675, 2682, 2686, 2691, 2707, 2708, 2716: n = A,T,C or G
  misc_feature 2723, 2725, 2728, 2735, 2736, 2737, 2751, 2753, 2767, 2776,2782, 2788, 2790, 2799, 2800, 2806, 2810, 2811, 2812, 2813: n = A,T,C or G
natgggagtcgacccacgcgtccgggcttagattgggttgcagactccattaattgcatttgaacccaactaaaacaggatacacaatccttgttctgacatcgagtgcagcttgtggtttaaaatgagcctgccggctgcatgggtgcgcgacagtacaagcagggcttcaaggagtctgcgcccagtgttttaagggactacgacactgacaatttggggaaagcgtggtcttgatatacggggcagaaagagctctgtacagtgcacacacctgctgccgtccctgggcagcccctgggtccccccagccatgactgttctgcgcgagctcctgagctgggcgacctcagtgtgggtctcgccttccaagccagacagtcgttggagtccagcttgcccggcgccggccttcactggttggctggagcggcacttggcgtcgccgccggcccctcatgggggttttccgtttgtggagtgtttggtaccgcgtggtagttaaccctccatgccaggcgactgcattgctgcattcaggtaggaaagggtgaaagaatttttttttgtttttgtttttttaaagtacaaggaccgctctgctttgtaagcaggaaccgcagtcccctgaggagggtgtgtgaagactcgctcatttgagttctttgaaatgggtcccttggtcctgctgtcacattgccttgagctaacggatcctgttcccatcataggccggtccttggggcattgggcaggtgggggctttgtgcctctgtggctgctgctgtctgttctctaacaggcagaactgagggattctgaactcaggatgtgcagctctccagactgagaccccaaggctgactccaggtggatccattgtctctttattctcattacgatttatcagaaaagtgagacaaatgcaggattctcaaatgctgaggcagccccggaattggggggatctttctgttgttagtccacccatattttcaagcaggcattaaaggaaggtcagccactgcgcctagaataagtaggtcaggcctgctccatccattgtccccggccccgcaccctcctcctgagaagactgtggctcctgacacgtctagagaggaagggccccgggctgctgagcgaacacagtatgaagattgcttactgatccaaatgtccattttattgcatgtttgttactttttttgttagatgtaatgtaagattctcttatcacatccattccctctgacattagttttgagttaattgagattctttaagcgttagcctggggaaggtaagtctttatcttccattagacattttaaatttaaaaatctaagtaaaacaccagccgtgtttctcaggtatgagttaaaagcacaggtgggcgggctccaagcagtccagagggcgatgaggatgccgattgctgggaagatcctggtccctttttgtccccatgttttcaagaggaaggaggacgctgccattttacttgagtgaaagacccttcgtcacgcacgaaacccccgagggctctgggctcggtcctgctgccccgcagtgggcgggctctgtgtgtcttacggttgcatctgttgtacctgagaaacattttttaaacaaaaaaattcaacacaaaagaattttttaagaaaaaaatgctactggcctaaataaggtttatagttaagtatttagtcttaagttgtaagatgctaagtgtagtcataagttacccgagggtgtgtctaaagggaagggggtgctgggacccgcagcctcgccctaaaccagagctcggtttgtttaggtggaagttaaacgagctgagcctcgggacagcaagagccaagcgccgggacagccaggtgccagccagtgggggagccgggttgtgcccaacgctgccaatggctgggcaggccagcccccgcccacgtggcagcaaggatatggcccgcaaggaatgtgggtgccggcaggacaggcgattggtggctatggaccgccccctgcaggaagaggagcccccccgccacccccaccgttcacctcctacatcgtgtccacccctcctggaggcttcccccctccccagggcttccctcagggctacggtgccccgccacagttcagttttggagcggctgtgggtgtcgtctggactgaggtttttaaatatttctttctctaacccatcagcacaataaaaaaaagtcactggttcaacaacagggtttaaaaaaananaaaaaanaaaaactcgngggggggcccggtacccaattngccctntagtgagtcgtattacanttcactggccgttgttttacaacgttgtgnctgggtaaaccctggagttacccnannttaaatcgttttgcagcanatncctcnntttttgcccagtctggcntaaattngcggatgagggcccnngnancngatcggacttttncnnaaagttnncngagcntttgtttgggngnattggaanaatttttnaggttntnttttttttnanaattctngttaaanttnnnnttaantnatggnnnttttnttgaaccnnttgggcngnanttgnnaagntccnttttaaatcnnnanggttnggccnggggttgggtttntgnttttccnttttgngccagagngnatanttttagnaagntgttnacaggaaagggtgaanncggttttntgggagntngcncattcgnnnccagttaccatatntntttttgggtgaggnttttttggntttaantggccntnatggggccnnagtttngagnnnn

SEQ ID NO: 30063 - DNA, 1966 bp, Homo sapiens
gtccgaagagagcgatccggaccctctggacagtgctagatgccattgatcagatgtggctgccagtggtgaggacttggcgcctcaatgagcggcactatgggggtctaaccggtctcaataaagcagaaactgctgcaaagcatggtgaggcccaggtgaagatctggaggcgctcctatgatgtcccaccacctccgatggagcccgaccatcctttctacagcaacatcagtaaggatcgcaggtatgcagacctcacagaagatcagctaccctcctgtgagagtctgaaggatactattgccagagctctgcccttctggaatgaagaaatagttccccagatcaaggaggggaaacgtgtactgattgcagcccatggcaacagcctccggggcattgtcaagcatctggagggtctctctgaagaggctatcatggagctgaacctgccgactggtattcccattgtctatgaattggacaagaacttgaagcctatcaagcccatgcagtttctgggggatgaagagacggtgcgcaaagccatggaagctgtggctgcccagggcaaggccaagaagtgaaggccggcggggaggatactgtccccaggagcaccctccctgcccgtcttgtccctctgcccctcccacctgcacatgtcacactgaccacatctgtagacatcttgagttgtagctgcagacggggaccagtggctcccattttcattttagccattttgtcgcctgcaccactcccttcatacaatctagtcagaatagcagttctagagcacaggttctcagtctaagctatggaaaagctccccttatccaacagagtttaaaagtagtgactggggtgtgggaggctggtccaaaggctcgggggaggcacctgtaacggcccgggggacgagcagaccggctgtcccaagagggaaggctaggactcgttaagcacctaccggggggacacaccgaacaaacacgtgggatacgccctccaagcgtgtgacgggtgctaatatagactgcggcacgtgtcggctgtgttagcagagcagacgcccataccgacagcatgcacgacgacaagcgacacaacaccacaccaccacaacctacacgacaccacacagcacacgaccacagcacgcacgaacacgacacagcacaacgcgcacaacagaggagcaagccgaacaggacgacgccaagccggagaagagcgtgacgaaccaagaagggggaagagagcagaagagggcgcgaggagccagggggacgagcagaacagggaagggagagcaacggacagagaagacggagcgaagagagccaacgcggagagaagcgagagacaagacggacggagggaacgggagcaggagcgagagaggcagggagggggggacgagcgagaaggagacaggacagggcaggccgggggagagcgcggagcgggcaggcccgacgccggcggcgacgcggggagagccgagagaagagcggaggaaaacaacgagcgagaaggccgaggagtgcgagggggagagcgacacgaggcgagggagcagaagcacgagaggagggaccacatgggggagcagcgaaaggacggggcacaccgacagacgacagagacagggccacggagaaggagacgagagcgaggcgaggacggccagcagcaacagcgggcggagcagacggcgccgcagcggacgagagacccggcagagaggcacggcggccggacagacagcgaacgagagagaggcaggagacaggagcacgacaaagcgaaggagcgcaggagggcaaggaggaaggacgccaccgaaagaggagagagaggagcgagcgagaagaacagaggcacgcccgccaggccacgaccgaagcgccagacccagcgcacaccacgccagagagacgacccgagacagcgcaca

SEQ ID NO: 30064 - DNA, 494 bp, Homo sapiens
  misc_feature 1, 2, 3, 4, 494: n = A,T,C or G
nnnnagcgacaaaagcagttagaaagggaacagctggaatgggagggagagcgcagaatatcaagtgctggtaagaagtttacaaactcttctgtgttcttgtatctgagcttggatgatgtctcttgtgcagtcatgtgttaaaatatttcgcatttgagatgtttgggattaagccatacaatttgaaattatgaataaatatgcagcaattactactttaacattttctttttatttctctctgtattgcttttattgcttggagacttaaagaaagctcttggaaatttttattctgccattctaattcttctaacaccctataaaatggctataaagtgtaagtgtgtttttatgggaaattttttatactggatgaacttcaaatatatttccctcatgagatcacttaaattgtctcaaatattatagtaccaggcaggacggccgcccccgcggtgtggctgttcttttccacacaggaaacagcn

SEQ ID NO: 30065 - DNA, 737 bp, Homo sapiens
  misc_feature 736, 737: n = A,T,C or G
ggcgggcgcccctcccgcagcctcgctgccgccttgcaggttgatctcagactgctgtgctagcaatcagtgagactccgtgggcgtaggactctccaagccagtgagatgaactcggtatctcagatggaaatgcagaaatcaccgtcttctccatcgctcacgctgggagctgtagaccggagctgttcctattcggccatctttgctcctccctgcaactaactccattcttgggtgaagctgcacacatacatgtaagagaagcaaaaatgtcagatgatatcaggaaaaggtttgaatttccaaattctcttatccaatcacaggctgtgggtcatcttattgctgcagtcctaaaggaaaatggtttttcagaaaagattcaccaatctacaaatcagactcctgctttgaacttgctgtgggagaagtgttgcagtgacaatgtagtggttcgaacagcctgctgtgaaggtctggtggcactcgttgctcaggatcatgcagagttcagctatgttctcaatgggatactcaacttgattccatcaaccagaaatacacatggcttgataaaagccattatgcacttactacaaatgcaagctcttaaggaaggacaaggtggggaaaagaatattcagagtatatataccattagaaatcatcctcatcctttgataactgtgcttgaacacagacctgattgctggccagtgtttttgcagcagcnn

SEQ ID NO: 30066 - DNA, 470 bp, Homo sapiens
tatagggcgaattggagctccccgcggtggcggccgaggtacagagggcaaggaaggaatttttctgtaatttggaaaaatgggaactgtgagaaagaaggagttggaagctcatacttagggagcatctacaaggacgtctttttcacgttggttggaatatccaaatcaaggattatttcagaatcacccagatgattaaaaaactactgagatccaggttgtatttcagcagttctgacaattgctctgggtcgaagcttgaatcagtagttaagaaaaacaacaaacaaaacaaattttggggcttttctcactgatttacagttaaagctcatttactcttcctatgactttagatggaggatatttccaagtcttcaggatggagacatggagggaagtgagactagtgatgtgcctcaaggttttgctgttgttctaaccatgaggagcactattcaaaccca

SEQ ID NO: 30067 - DNA, 409 bp, Homo sapiens
actaagcccagccaaggaactacaccttctcgctgaaggaggcgcctccggcttcccattggcagagctgaacggcggcgtgagtgctccggtgctttggggccatgattaggcaaataagagtggcttgaacatggcactgtgatatggtgatgggggatgtgggaaccacaccggctgctaagtgatcaacaggtggtggcatgaatagcctggacacgctggacaaaggttatgtcttatgaagtcaaatggtcaatttcctgatgctcatgtgcctttgggcttccccaaacaccaccactccctgagcagagacgcgcctaacagagagtcaaccgttattttatgccaaagcgaaaggcgtatcacagagggcttgggccttagtatccaatatccccaaagc

SEQ ID NO: 30068 - DNA, 453 bp, Homo sapiens
  misc_feature 1, 2, 451, 452, 453: n = A,T,C or G
nnctgtttcctgtgaggaaaagaacagccacaccgcgggggcggccgtcctgcctggtacctaaataactatctgcccaggaggccagccgcttcctgcatagcatttccttcctgcagtatgggaaggaccaggctttctcagaccacagaatcttgagagccatttccacgtggagcaagtggtggctaccagccttgggtctacataactagggcctcatccctggcccaagaatcctgctccacagccttcttgtgtccctgtaggaggagaaacacctggcaacttaaattttttaaaataacttttttttttttgagacggagtctcgctctgtctcccaggctggagtgcaggggtgcaatctcggctcactgcaagctccgcctcccaggttcatgccattctcctgcctaagcctcccaagtagctgggactacaggcaccnnn

SEQ ID NO: 30069 - DNA, 618 bp, Homo sapiens
  misc_feature 1, 618: n = A,T,C or G
ngactcagattctgatcaagagaatgctgcctctggcagtaatgcctctggaagtgaaagtgatcaggatgaaagaggtgattcaggacaaccaagtaataaggaactgtttggagatgacagtgaggacgagggagcttcacatcatagtggtagtgataatcactctgaaagatcagacaatagatcagaagcttctgagcgttctgaccatgaggacaatgacccctcagatgtagatcagcacagtggatcagaagcccctaatgatgatgaagacgaaggtcatagatcggatggagggagccatcattcagaagcagaaggttctgaaaaagcacattcagatgatgaaaaatggggcagagaagataaaagtgaccagtcagatgatgaaaagatacaaaattctgatgatgaggagagggcacaaggatctgatgaagataagctgcagaattctgacgatgatgagaaaatgcagaacacagatgatgaggagaggcctcagctttccgatgatgagagacaacagctatctgaggaggaaaaggctaattctgaggatgaacggccgcccccgcggtggagctgctatttgccacacaggaaacagcn

SEQ ID NO: 30070 - DNA, 2497 bp, Homo sapiens
acaggcgtagtccaagaacagcagagggagttcttgctgcccgaactgtttccatctcagtccagattatcagagcctgtggtctgcaagcagcagccaaggctttggctgaacgggaacccgctctacagtttagtgccacagtcggggtcaatgcctctgtcaccactcatctctccttcctgccccagggagaacagcgccgaacccaccctgtggcctgttctttctgccctgagttctcccatcacgttgagttcacatgtaacttggtgactcagcactgtagtggagagtcctgtttcctagcagagttgttggagtttgcagaagttatttttgctgtctatcatgaaaataccaagtcagcaagtgatataatcagtattgagtcatgcaaagagtatctgcttggagtagtaaaagttccaacaaaagagctgctgatcaagagatctgggatcacaggatggtatcctatcattttaccagaagacgggggcctacctcatggcctggagctcatgcagaagatcgtgggtggtctggagctttcgatttccttcacgcatcgtggagatagagaacgggtgttggaagctgctgagcatttgggctggagctttgagaacagcctgaaagattttgtcagaatggatgaaggggagccagccactgtcaccatctccaccccaaggctgtggctgcccatccattgtgtgctgcttgctggccacaaccacattcataagaatacatattgctaccttcgctacaagttctatgatcatgaagccttttggacccctctcaagaagcctaaggaatctgtaaacaaaaagcagattatggtcactttcaaggcatccaaaagagcagaagtcaccaggggcccatcactgctttggtacttcagggaggagaggctagagatccaagtgtggcgagcttatggcaatgacagtgtggagagaccccatcagacagacagctggattggctcagcctatgtggacctggccagacttggggagaggtcagcgaggacgctaactgtcagtggtgtgtatcctctgtttggacgaaatgcttccaacctctcaggagctgccttgcgagttcatgtggttctttcctctctttcctcacaccttgagcccactcatgagctggactccatggactgcagcagccacagtgagtctgagcagctccccagaaggaatgatgaggtccagctctctccaccagaagtcatctcctgccaccagaagtctcctgcctccacccaggtcccctgcagcagcaccacagctgaagtccgcctgacgcaggagggccctgctgatttggatggaacgtttgcagtcagtatcctagtagaaagagcaatgcacttgagcttgaaagggagccccttgacagagcggaaagtatcgatacccagttgttgtgtatcctttgcaacagccgatgagtcatctcctgtatacacccaagtgggttgaaaacacagattcccccatcttggaattttcaacagcagtcaaggctatgcaaaagagctgcttctggacccacaacaaaccctggtcttcaaagtttggcataaaggagatgaggagagggtgatttggctttgcctcggtggacctctccccacttctctctggcttccatgtttgtctgtggctggtacaacatcacagacttcagtggagagtgccaggggcagataaaagttgctgtctcccctttggagagtttgatacacttcaaagaagaaaggcaagcaaggcgtggagtggagacctcaaaatcactgatcccaatatacagtcccttttccttccctgcctctgatacgtatgctgcattctccagccacatggcaaggcagaccctagaccaacttgctcatgcctcctcaaaggagcttgatttctcctctcctgggagaagtgataccacaagaagccaagcatcacgccatgaagagcatgtgcagaacattcgccggtttcatgaatccctgcatcttcagggagaggcacccttgccatgtgatgacaaactgaccacatcacctttgtcctcccaaacctccattctgacttctctcaggaagaatctgagtgagcttgatcagattcagaggtacttccgccagaagctcaccaagcctttcctacccctcagccctcagactcaaacggccatctcacagctccaggagagctgtagggaccatcttgggccaggtgccagcagcctagaccctgggagccagtgtatcctggagaaatccagtaacctggtgttgcaagtcagctccttaatcacagatctgcagactatcaccagggattcgcaagcagctttgagttctcaccgagccaggagtagaagcaacaaggccaccaccctcccagatgctcaggacacagaagcactgcaagaacgatgcacaatgccagatgagccattggtaagagct

SEQ ID NO: 30071 - DNA, 1166 bp, Homo sapiens
  misc_feature 1158, 1159, 1160, 1161, 1162, 1163, 1164, 1165, 1166: n = A,T,C or G
agcgcatgagcactgaccttcctcgtggggaaggtctgcagacccgtgtgaacatggcagaggccacactccagctcccacccacataaacctttgcaaccacttcactacctctcactgggtctcgtgggcttgggacagcaacggtctgttagtcagtgtgcaggtggttggcccagccgatgagaactcaaatagcacggatttcctggatgagctaccacgtggcgctcttcaggttctgcctctgggaggctgtgtgcacctcagtcaccacagctcacggccgtccccagttgagtcccccttctgaggacaagtttgaaactgggaaggagacaccccctggttccgccagcacctatcccactgatagtgatcccctggcctccccgagcctccttaggcaatggccactggtttgtagacagagagtttcttgcagccttgaaaattttattccctaagtggggacagctctggtattactgcttctttaatttgttccacaaaaattatgctgaaatggacctgaatcagccctgggtgtgcttctgttggcgcctgctgctgaggcccggcctgcccatcggcctgtagtacgccatcgaggtcatcatggagccagccagcttctcttctcatcaaggaggcagagacccctggtggaagccaagagtgaccgaagagggcttgcatcacgtcactccagtggttccctccttgtccaagtcctcgttttaagggcatggcccgttggctccagccgttggcttctgttcagggtccttgctcccatcagaggtgtttgattttgctcctggggctgcgatggagaaccttttgtggcagatggtgctgcctacatctcattggttctctgtacctgtgcccgttgcgcatgttcacagacaggagagtcgccagcaaataccttggcagcctttaaatgtgaaacgtctgttacttgcgctggaggcgaggctgtgcagggagcctgcttctaatcgtgggctccttatctgttcggttcctcccctcctgttctaatgctgttcggttctcactggggggtaatgctgctactaggctcaggctaatggccctttcgggcgggggggggagggcctggcccctggttctgtgccccgatatgcnnnnnnnnn

SEQ ID NO: 30072 - DNA, 743 bp, Homo sapiens
  misc_feature 1, 2, 743: n = A,T,C or G
nnagctgtttcctgtgtggcaaagaacagccacaccgcgggggcggccgccctgcctggtacccgggatgcccgttaactaaaagctttgcagaaataagaagtggctgctcctgttagagcggcttgactagctggtccactccgggcctcagtctggggggctggcgggcaggttgcagcctctccgtgatcagtgtgccttggattccattggatctcttagtctggccctcatttttcaagctaacagaaactttctgtcgtgacttttggcgtatgctacctgggaggaaacgcagtatttgtgtttggaatttgcccccattagacgataaagcacaaagccttctaaataaaatgcggtcccacggccagctgttcagaggatcttgacgctcttccttgggtgacggacccaggagagttcatcctgcaggaacccgtggcctcaggctttccaggagggaggttagagaaagggaaggagcccagctggttcacctcccctcggattagcagaaacgaggcgagtctgagcagggccttgtgtggctctggagagaagcagtggactaaggagacatacacctcggtttccccctcatctgaggttgcactttccacagttatagcttccataggcccaccacaggctgaatgtattaaataggaaatttcagaagcaaacagttcataacctttaagcacgcgccgttctgcacagactggtgagatcatgan

SEQ ID NO: 30073 - DNA, 612 bp, Homo sapiens
  misc_feature 1, 2, 3, 4, 5, 6: n = A,T,C or G
nnnnnncgaaatacttctagaattaattaacgccgggggaggggaaaaagaaaaaggagaaggggagacaggaaggagaagaaaaacaaaagcgagaaaaagagctgaaaatgggacaacaagaaagattcctttttaaggaaaatgaataaactacctgtcaaaataagtataacatccttttcattctggaattttaggaatggttgccttcccttccaaaaattccccatccagttatcataaagcgaattatctgacacctatacacattacatactaaagtatttattgaatgagcaaggaccaccagtcaacaagctctacctatatacaacatttccaatcagtctatctattctctcacattaaaatacgtctagacaggccaggtgtggtggctcatgcctgtctgtaatcccagcactttgggaggccgaggccagtggatcacttgaggtaaggagttcgagaccagcctgaccaacacggtgaaaccccgtctctattaaaaatacaaaaattagccgggcatggtggcacgcacctatagtcccagctacttgggaggctgaggcaggagaaacgcttgaacccgggaggtggaggttg

SEQ ID NO: 30074 - DNA, 605 bp, Homo sapiens
  misc_feature 605: n = A,T,C or G
tcgacccacgcgtccggcaaactcagcagaaatcacttcaggccttgaagcatcaggtagatttggctaaaagacttgcacaggaccttgtggtagaggcctcagactcaaagggagcctctgatgttttattacaagtggaaaccatagctcaagagcatagtacactaagtcagcaggttgatgaaaagtgttctttcttagaaaccaagcttcagggcattgggcatttccagaataccattcgagaaatgttttctcagttcgcagagtttgatgatgaactggatagcatggctccagtggggagagatgcagaaacattgcaaaagcaaaaggaaactataaaagcctttctaaagaaactagaagccctcatagcaagcaatgacaatgccaataaaacctgcaagatgatgttagccacagaagaaacctctcctgaccttgttggaatcaaaagggacttggaggccttaagcaaacaatgcaacaagttactggaccgagcccaagccagagaagagcaggttgaagggacaattaagcgccttgaagaattttacagcaaattgaaagaattttctattctgctccagaaagcn

SEQ ID NO: 30075 - DNA, 635 bp, Homo sapiens
  misc_feature 634, 635: n = A,T,C or G
acataaattatatatccagttccctattaccacctgtggtggaagcagagcctttgctagaaatggtcatgtggtatagcagagacccatacctgccaccacacccggctaatttttgtatttttagtagaggcaggattgcactatgatagccaggctggtctcgaactcctgacctcaggtgatccacctgcctcagcctcccaaagtgctgggattaaaggcgtgagccaccgtgcccggccccagagacccatggcactgggctccttggtcggaaggttcttgtgtcccaagtgtgatgaacagacagctgccaatgtcaagggaccatgaagacctggccagtagcatcttaacagaaactagacaggttaaaaaacaaaacaaaacaacaacaacaaaaaaacaaaccctgcactctcagagaggatcgtttctgaatgttttgctctgggcaagactctagagtctctgtgaaaagtcttaataacatttgttaaatccaaacacgtggttgcaaatgtttacctactacagcagccaagtggaaggtctattgctgctaaattcagtgctttttactctttttcctcccagattagctaaaagtctctttacaaatcggacgcgnn

SEQ ID NO: 30076 - DNA, 3285 bp, Homo sapiens
  misc_feature 1, 3283, 3284, 3285: n = A,T,C or G
naagattctgaagctgtggggatctccagcattatcagcaacctgataaccgtgttcccacgaaatgttttaactgccattccaagtgaacttttctcctcctttgttaactgcctcacacacctcacttgttcttttgggcgaagtgctgcattggaagaagtgcttgataaagatgacatggtatacatggaagcatatgataaattgttggagtcctggttaactttggttcaagatgacaaacatttccataaaggcttttttacccaacatgcagttcaagttttcaattcctatattcagtgccacctagctgctccagatggcacaagaaatttgactgccaatggtgtggcctctcgtgaggaggaagaaataagtgaacttcaagaggatgatcgagaccagttttctgatcaactggccagtgtaggaatgctaggaagaattgctgcagaacactgtatacctcttctgacaagtttattagaagaaagagtaacaagactccatggtcagtcacaacgacatcagcaacagttacttgcttcaccgggttcaagcactgttgacaacaaaatgcttgatgatctctatgaagatattcactggcttattttagttacaggctacctcttagctgatgatactcagggagagactccgctaatacctccagaaataatggaatattccattaagcattcatctgaagttgacattaatacaacacttcaaattttgggatctccaggagaaaaggcttcttccatcccagggtacaacagaacagattctgtgattaggctgttgtctgccattctcagagtttcagaagttgaatctcgagcaataagagcagatctcactcatctactaagtccccagatgggcaaagatattgtttggtttttaaaacgctgggcaaagacttatctcctggtggatgaaaaactgtatgatcagataagtctgccattcagtacagcgttcggagcagatacagagggttctcagtggataattggctacctcttacaaaaagtcatcagtaacctctcagtctggagtagtgagcaggaccttgcaaatgacactgtgcagctccttgtcactttggtggaaagaagagaaagggcaaacttagtaattcaatgtgagaactggtggaatttagctaagcagtttgcaagccgaagcccacctcttaatttcttgtcaagtcctgtgcagaggacattgatgaaggctctagtcttaggaggttttgcacatatggacacagaaaccaaacagcagtattggacagaggttcttcagccacttcagcagcgattcttaagagtgataaaccaagaaaacttccagcagatgtgtcagcaagaggaagtcaagcaggaaatcactgccacactagaggccctgtgtggcattgctgaggctacccagattgacaacgtagcaatcctgtttaattttttaatggacttccttaccaattgcattggattgatggaagtttacaagaataccccagagactgtcaatctcattatagaagtttttgttgaagttgcacataaacagatatgctatcttggagagtccaaagctatgaacttatatgaagcctgccttactttgttgcaagtgtattctaagaataatttagggcggcaaagaatagatgttacagcagaagaagagcaataccaagacctgcttctcattatggaacttcttactaacctgctgtcaaaagaattcatagatttcagtgatacagatgaagtgtttagaggacatgagccaggtcaagcagcaaacagatctgtgtcagcagcggatgttgtgttgtatggagtaaacctaattctgcccttgatgtcacaggatctcttgaagtttccaaccctttgtaatcagtactacaaattaatcacatttatctgtgagatttttcctgaaaaaataccacagcttcctgaggatctgtttaaaagtctgatgtactccctagaattaggaatgacatcaatgagttcggaggtttgccagctttgcctggaggccttgacaccgttagctgaacagtgtgcaaaagcacaagaaacagactcaccactttttctagcaacacggcactttcttaagctggtttttgatatgctggttttgcaaaagcacaacacagagatgaccactgcggctggcgaagctttctacacgttggtgtgtttgcaccaggctgaatattctgaactggtcgaaacattactatcaagtcagcaagacccagttatttaccagagattagcagatgccttcaacaagctcactgcaagcagcactcctcctacgctggatcggaagcagaagatggccttcttaaagagtttagaagaatttatggcaaatgttggtggtctcctttgtgtaaaataaacaacagaactttatgcttaatttagatcctttctgcaaaggtgcactgccacttgctgacaagttgacccttgacgtctctgtccttattcctcagttcacttctggccactttgggactatcttggagacgcctgaaacttctgactactgtactgtacatacacgttgaaaccagggacgcggtcaactatggtcatcagccttctgctgttaacgtgtcacgccacaactctgtcatactatactggtcttcaaagagttctgaatgggtgatttacaaacttcttcaacaactgaaacttccattatactgtgcaaacagactattgggcacctaccgaacataacatattgcagtgccctttcatctcctattcacccatagggtggcctagaccacaaagtttacgaactctcggtccattacacatcttgacactggcatatcatgctaagagccagctggtatcctcaacaactcctcccactagcaatcgcccctgccctccaccttggagagcaggctgggtgaacccagggccagcattctatagagccccaaccgtggtagaaccattcagaagtcacgaactgctctgggtttggtcggagcccccaccggagctcctccactggtccattcagcgcttccttcccattttcggatacagccccgcaacaaagggtccgggacactgacctgcgaaaggaacacattttgactcctccttttaagcacgctcccggatgcctctcataaggctttgccttccctttgtactaccggggcatcactaacttcacagcagcgcaggggcacccattaacagannn

SEQ ID NO: 30077 - DNA, 572 bp, Homo sapiens
  misc_feature 572: n = A,T,C or G
accacctcttttggcgagggctttggaccttacccggtgtgatgggaagtcctggaagtgtgttaagcaggggagtctttttgatcagattttctagaaaacgacagtgggctgctgtggacctcagagaggcatgtgtgatagtgtgtttcgggctcttcccacgaaactcggctctgcacagtgagacctcatttcctggttctgtttgatgagtgagcgaatgcacatggcaggcggtcatgtcccttgggcctgcgaggtgaggaagggtccctgagccctgtggggatagagactcttccaccattctgacatgatccgagttagcaggcagcactgtccagatggaaatggggatgggaggcagaccatctctctcagcgggtccagccatgagccagcagactgtttcccattggcccccatctttcagagtgggatgatctttctaacaaagaaacccacacaggaatttggtgtgtgtgtgcatgtgtgtattacctttcaggatggaagccggtggggtgtggagcgaggggctggcatggttggcctcgcccagctccagn

SEQ ID NO: 30078 - DNA, 465 bp, Homo sapiens
  misc_feature 1, 462, 463, 464, 465: n = A,T,C or G
nagctgtttcctgtggggaaaacaacggccacaacccgggggcttgccgggttcttgcgtggacagaccccacagagtgtttcagaattgccctcctccccacccaccaggccagtccatcgtgctcccccaggctatgtgggttgagcaaacagcagcagttgccttggggcttggtttattggggtaatagctttccttttgcccctgagacctggggcagtatgcccagaacccctccctcctgcacaccccacagtaggcacattctcccactggcagcagatgtgttttctggcaagtagagaaaatggctttccttgccctgtgagaggtctcataagatccagccatagccaaggccatgtttgtcacctctggaggcctggtcagtccttctgtgggcacagaacatttctctcccacctaagttaggacctgcatccctgtttgggagcatgnnnn

SEQ ID NO: 30079 - DNA, 522 bp, Homo sapiens
  misc_feature 522: n = A,T,C or G
aggaaaattagtccattaaagcagcagccaaacccagcacaagccaggattaatgaagctcctgacatttaaaaatttaagatttcaaactttgtttcctgtgaataagcaaagtcagtgagcgaattaagtttgtgtgtgcacgtgtgtgcatgtgtgtgtctgcttgaacaaacagcgaatagctggatttaaaccaaccttaagacttgcaccacagctaaattccacattgctagatggggaccggagctgagtggtggccgatcgctcagctgggcgtgtcctgtgaggactgtgttgctgtcacggtcattccactgtacagtgtcagtgtggttggtgtatgctggatctctcacctatgaaatctttactttggtgggttgtttgggcttggatgcttgtaacatctctgtggcatcacatgggccagtcagtaactgccctccttgacccccgagcagtccatgaacatcctgacctccgtgctgctgctgtacaccaaggaggaggaagccn

SEQ ID NO: 30080 - DNA, 1954 bp, Homo sapiens
  misc_feature 1, 2, 3, 1943, 1944, 1945, 1946, 1947, 1948, 1949, 1950,1951, 1952, 1953, 1954: n = A,T,C or G
nnncgcaccagttttgactagtcgacctcgtttacgtctgccgcagcaacggggtgcggcagggtggggaacgcgggagcggggccagctcccaggaaagctggtctgcgagcggcccctgcccggctcccaggtccctgcgcgaccccgcccttcccgagaccccagccgggctgccgcccgcgtcccggaagctccagcctgaaccatgtttttcacttgtggcccaaatgaggccatggtggtctccgggttctgccgaagccccccagtcatggtggctggagggcgtgtctttgtcctgccctgcatccaacagatccagaggatctctctcaacacactgaccctcaatgtcaagagtgaaaaggtttacactcgccatggggtccccatctcagtcactggcattgcccaggtaaaaatccaggggcagaacaaggagatgttggcggccgcctgtcagatgttcctggggaagacggaggctgagattgcccacattgccctggagacgttagagggccaccagagggccatcatggcccacatgactgtggaggagatctataaggacaggcagaaattctcagaacaggttttcaaagtggcctcctcagacctggtcaacatgggcatcagtgtggttagctacactctgaaggacattcacgatgaccaggactatttgcactctttggggaaggctcgaacagctcaagtccaaaaagatgcacggattggagaagcagaggccaagagagatgctgggatccgggaagctaaagccaagcaggaaaaggtgtctgctcagtacctgagtgagatcgagatggccaaggcacagagagattacgaactgaagaaggccgcctatgacatcgaggtcaacacccgccgagcacaggctgacctggcctatcagcttcaggtggccaagactaagcagcagattgaggagcagcgggtgcaggtgcaggtggtggagcgggcccagcaggtggcagtgcaggagcaggagatcgcccggcgggagaaggagctggaggcccgggtgcggaagccagcggaagcggagcgctacaagctggagcgcctagccgaggcagagaagtcccaactaattatgcaggcggaggcagaagccgcgtctgtgcggatgcgtggggaagctgaggcctttgccataggggcccgagcccgagccgaggctgagcagatggccaagaaggcagaagccttccagctgtaccaagaggctgctcagctggacatgctgctagagaagctgccccaggtggcagaggagatcagtggtcccttgacttcagccaataagatcacactggtgtccagcggcagtgggaccatgggggcagccaaagtgactggggaagtactggacattctaactcgcctgccagagagtgtggaaagactcacaggcgtgagcatctcccaggtgaatcacaagcctttgagaacagcctgagccttcagccctcacagatgcccagcctcatagctgaagttgcctgaatgatcctcctgttgcatgtaacccactggcctccctgagcatgtccattgacagtgaggtcccacccctcatctctccttgccaaatagtttgtgccttgtcttgaagggggttgctccccttgccaacctcacactgctatgattgccaactccagcggtcccatgtcagccttctgatgatcccactccaccccacctcaacttatttaacttcctaattaaatcagactgtttgagcctgttgtctagaatattttcctgaccaagactgagggatgggctggaggttttcaactttgctacccaaataaattgctgtaagtaagtactaataaaacagaagcaactggaaacgttaaattattttaaaaaaaaaaccccccaaccctcccctaaacccnnnnnnnnnnnn

SEQ ID NO: 30081 - DNA, 663 bp, Homo sapiens
  misc_feature 1, 2, 3, 4, 5, 6: n = A,T,C or G
nnnnnngtaagcaggcctatcagaaccagagatccttttgattccagctgacagtgagccatgggtctggctctcagctgcctgcatctcctgaggcctcaggcagctggaaggctggaaaaccctaagctggccattctgccacagggctgctccctgctgccctccccttccctttggctggaaaccccggtggaagcacagcttccctctgaagcaacaggaggtggagcttgaaggtattagcatctggcaaggcacactcagagcagcacatggtgcagagaagctgaaagatcaatactgcccctgtacctgagaggcaagcttcaggaaagaatgagccatgtccaggaaggagtggcagaaagcacacaatgttccctgtccctgtgtttgctgtcatctagagaagcaagctgtctttaagaaatccaactatttctgtctgatatgcagagaatccaagggcctctaaaggagaatcaccagtgtatccctccaaagagtcacgtggcctggctaacgacagtcgttccctcctcctttctaaaacgggaatacacagcagagcaggcaggtgggctgtgcaccacgtggggtggcagcagcgagccccactcccgcaggccctgcctcacctgagcggcagcagaaagcagt

SEQ ID NO: 30082 - DNA, 1484 bp, Homo sapiens
  misc_feature 1482, 1483, 1484: n = A,T,C or G
acaagcaaaatatctccatgaacattctgagcagttctaaaggtgatgggagatgctttgactcagggacccaattcaaagattcccaggcacagacagagcctctgttttctgccctcagtcatgacagcagggcccagtctggacataggtgggcaccagagcttgtcaacatgacggaaggaagagatgaaccatagcatctttccggatctctatgtattagcctgaaacccctttggatcacatctccctactaaagaaggacatttgagcaaagacccagtgcacaaagcttagtgcctgtttgacatccagcggaggtagcttgtggcagttgtcacagatagaaatgccatggaaggcggccagtagcttatggaggcagcattccctggtgggtcaaactgagcctgtgaggtctgtgggattgcagggctggtgatttgattttgtcagaacacacatattgttcaggcacagagagaccacctcctgttaaccaactctccattgtgggtaaagctcaatgtcaaggcattcatttacaaatgggagctgttgattcttgtgaccaggatctggtgtctgataatcggtaacagggtgtatgagagcccatattaaaaatcagccgttgttggtgaccacacaatcagaacaaaggaacacattttccaggttaataaaattgtggaaacaatattcccagggcctgagagtcccggccccagccccaggagtggatcaacgtaaggcgttttcacccgccctgatgcagaatgagcgcctctgttcaggtggtgagtgagtgccactgttcagatgacagttgtgcatctccatcctctttgctggaaagcaacagcaaaattgaccccggctcaattaagtgaaaggagttactgcattgatgggaaagctgaggaccctggctaggaacgggcaggactagaggaccaggaagcaggaagcacggcagtggtctcgcaacatggccggtctggcctggacaccaaccccagtgctgcgcctctcactcaggtttcaaatcctagggaggcgtatctcattttcaagctaaggtacatgcctgaccttggcctacaagaggcccagatatgagtcttcctagactggcatccaattcaaagcaagtcagggcacttttcagaagtagaaatcagcgctgggctgctccaaagcaacagacacccacagcaagttaaaggtcatgagtcaaagaccatcactcgtgcacctgtaataacccgaagttagaattaggaggcactgcagaggaaccatggggtgttgcataaggagggagttgagatgggcttaataggacttggggttttgcttggtgattctaaagaggatttgaggaagagagggtcagtctggattggatattggctggaagtgggtgcaattaatgactagttaccttaatcatttgtatctaggaggcaaagagannn

SEQ ID NO: 30083 - DNA, 731 bp, Homo sapiens
  misc_feature 1, 2, 3, 32: n = A,T,C or G
nnncgaagttgtgcatggtagagcactcaggntggagtccaggcggatggacacccatacgccatcgccgatccacgccagctgccgcacctggctctcccgccgcgggtgggcgtcaaatgacttctgtggagtcatggctgcccatcaacagggctggggagaggagaggaagtggggagccccaaacctgccacagctccagggccacctgcagtcccctcagacctcccagccagcgcctatcttaaaagaagttggcatgaaagctgcactccaggtcagcatgaacgatggcctctcttttatctccagttctgtcatcatcaccaccacacactgttctgacggttccatcctggccatcgccctgctgatcctgttcctgctcctagccctggctctcctctggtggttctggcccctctgctgcactgtgattatcaaggaggtccctccaccccctgccgaggagagtgaggaagaagatgatgatggtctgcctaagaaaaagtggccaacggtagacgcctcttattatggtgggagaggcgttggaggcattaaaagaatggaggttcgttggggagaaaagggctccacagaagaaggtgctaagttggaaaaggcaaagaatgcaagagtcaagatgccggagcaggaatatgaattccctgagccgcgaaatctcaacaacaatatgcgtcggccttcttccccccggaagtggt

SEQ ID NO: 30084 - DNA, 376 bp, Homo sapiens
  misc_feature 1, 374, 375, 376: n = A,T,C or G
nactctgaggatccccacgcttcaacattaccaggttgtgtagttctttatatacctttttctatagccagagtcatactgtagggctcacccacatctgtttcctccttcctactactaagtgccttaaactccgaagtacacacactccccaccccatcactgttgctccagtgttagcattttcacttcatgctcccactttgctctctcactttaattcttttcagggttctgtaatgacagaaacttgaagctcctcactatcagatctttcctcaagaaatatgaaatgattctctgttctagaggaaccgaggaggatggggaaaagaaagtcagacaagaggtggaaggagagaacaggactggcnnn

SEQ ID NO: 30085 - DNA, 1770 bp, Homo sapiens
  misc_feature 1, 2, 3, 4, 5, 6, 7, 8, 9, 1691, 1764, 1765, 1766, 1767,1768, 1769, 1770: n = A,T,C or G
nnnnnnnnngtcttggaggaaagcaaagggagagaaatggacttcaccagtggtctttggcttcatcaattcacaggaaatggcatcaagatggttcaactaagacatgatcactaaaaacattataataatacctttttgaaaaactcagtttctcctgtttactaaatatttatttcatcaacatgggctgcgttccactgtgtcaggattctgcatgtgggtggagcactgttccagcctgagaagatggttctgaggccacttagcaagacattttccagcatgagcaggtttctctgtggaaatagtgacacctgttctggtgtgttgtctttcctcagggaacttaaggggtacaaagctcctgaaaatgttctttatgctggttgaagctcttatgtcgctgtactgattccctacgatgcagatttgaatcacagagtaattaaaatatggatcaaataaggctggggctcaccaaggctgaaagctgtagccattcaaggcatcatttctgtcatgaaaatataggaccttttcaaaacatgccttcaggaaggtgttctcttttcaaacaaaagtctaatgactgcataactcttcttgaccacatcttacactttctctagacttgcttatttacagctactggaacaaaaagatgaaatgaataaagcacactgattgtcctaagagtcttctgtgactaaaagcacatgagcttctccccaggctgagctttgaccctcccaagcatttccccaaaggccatgacactgcatcagattgcccctggacactttcctcagagttttcaacaaatataaactgaggagtggagcacagcaccagatttgctaatcaagaggcaatggtcccagtcccaaatgggtgctgtgtgtgaatacagagcccaggagaagggaaggaggtctgtgaacatcaggaattgcaaaatcttgctgaaccaatagaccaacagccattaacatttgtcaatgcaaagatcctaaaatatacaagtgtggagttgtcctgccctaagagctgaagctgtgacaatcacgctgccatggtagatatttaagctcccctgaggttactgaatctaacaatgaataaacaatgaagagtagctaatttttggaaatctctttctatgaccggaaaatattcacaaactcagagtgattgtttggggtgaaagatggtcccatgccttgtgggcctctctttgctatctatacaacgttggaaatgaacccctcccttacaggaaagtgaacagcaaccaaggtgagcccaccctgggagggcagagtgggtgtactttcctcgaagagccctgaacacaacagggcacacaaacagccacagcaccctcaacaatgccccaccatctgcccaccagggcacacagattcacgcagattcagtgacacattccaaaaaaagggaattaaggaggacccatggcatggctaatggggagagagctttactacttttagcaccattgctaattattggagcaaagaaaggcatacaaggaatggaacccaacctgtttaaagtaataaatgtcaaccctaaagtgcatggaaccatctctccttcccttttgaggactgtgtgcttcacaagctgggcgtttgctgcatggggttttctaatgtaatgtgaatttncaatgtgctttgtctctgtagagtggctttaaaaagcccttgaagtcctcagctttaaatccatgctaattannnnnnn

SEQ ID NO: 30086 - DNA, 709 bp, Homo sapiens
  misc_feature 692, 693, 694, 695, 696, 697, 698, 699, 700, 701, 702, 703,704, 705, 706, 707, 708, 709: n = A,T,C or G
accattcaagttctacatttggccaacggaaaactatttgttgagaacccactctgtggggccccagggataaaatgagcaaaaatggggtccctgccctcaaaagtcctgtggtctcctggagacagacattaatcaataactactcaggtgcgtgtgtattacaaactgtgccaagtgctttgaagcagaggggcacagttaagtcttgacatttcaagacttagccactttgcaactaccaggttttggctgcaaagttccagatggcttctgtcttttgcatttcatactttaaacccttgcaggcccttccctaactatcaagggcctgtcccagaagcaactcaagttttgttatttttaatttttttttatttttgagatggagtctagctctgtcacccagattggagtgcagtggtgcgatctcagcccactgcaacctctacctcccgggttcaagagattctcctgcctcagcctcccaggtagctgggattacaggtgcctgccaccatgcccagctaattttttgtatttttagtagagatggggtttcactgtgttggccaggctcgtcttgaactcctgacctcatgatccgcctgccttggcctcccaaagtgctgggattacaagcgtgagccaccatgcccggactagttttgttatttttatgcagctaccannnnnnnnnnnnnnnnnn

SEQ ID NO: 30087 - DNA, 638 bp, Homo sapiens
  misc_feature 1, 2, 3, 4, 5, 6, 7, 8, 9, 10, 11, 12, 637, 638: n = A,T,C or G
nnnnnnnnnnnnaccttttcgggtctaattcttgtcagtgccaccagaccttgtcctctctccccacgcgtccgcgaaccaactacactgaacttcttgtagttcaaacttctgcacctttggccattgcccaaactcttaaatctggctacttcccaccttaactgccttctccttacctagtctgtgcttgtgggattccgcccaaattagatttcctccagacaggcttaggtgtttacctgatgttccagatggtatttgtccagtggactattggtgctgtgagggcagggcacatgttgtcacccatactcattgcctcggttggtgtctagcacctagtaggttctcaaatactttttgaatcacagtgcctgccgatatatttaatgtttcaaaatagttctgccgtcataaagaaaaacatcatggtgtaggggtcatgaaagctgattcttgatacttctgatttgagcctcattgttttcagtgatttttgatagctcccattaatgggttctttgcaccacccagcatcctaactcatgatgtgtactggtatgtataatcttggcattgatctcattagctataaaggttggcctgattttttttcctcaactttcaccttgann

SEQ ID NO: 30088 - DNA, 405 bp, Homo sapiens
accagcatttatcaaacggtcaccctgtgcccagctccacactggacactttcccatagtctctcatttcatttacttttcactgtatctttaaatacccaaattaccagacatacaaaggagagctaccatttcattttcagataagccttgtccatccagttggcaatttgattgcagctataaaaattttttaatgatgccaggtaagaagccaataaaaactgaaggaattaaaagaaaaaataattgtcaaacatgccagaagtctggagaaaagtggggaaagcaacttccttgtatatcaggcaaggaaaagcctagggaaggctaagaatttctgttgctgagtcccgtgtgctgtggtgacttaggaggcctcccaaagccctcccatttaaagga

SEQ ID NO: 30089 - DNA, 1012 bp, Homo sapiens; identical to SEQ ID NO: 20300
  misc_feature 1011, 1012: n = A,T,C or G

SEQ ID NO: 30090 - DNA, 2562 bp, Homo sapiens
  misc_feature 1, 2, 3, 4, 5, 6, 7, 8, 9, 2435, 2497, 2536, 2557, 2558,2559, 2560, 2561, 2562: n = A,T,C or G
nnnnnnnnnacacaaatgggaatcccttttcccaaaaaaaaaaaaaaaaaaaaaaaaccagtctggagctgctgctgccccttcttcctttactttggccgtcatcctagagggaatgtactggaattaaacgtcgagtcatattcttccctcttagagcaacaaaatttgaatgtttctctcactttctggaatttttaaaaagcaaactttttaagttattttttcagattttatttctcattagccttttttccttgaactccattttggagtgcaccctgtagttgtaagagcattgtgctgagagcgttccccaaatgagggtctgcagcttgcactgacccctgagttcctcacccaccagccccgtgccgacccgtctaacccgtgtgggggtgctccactcaaataggcccttggcagaaaagattgtccgttctgtccacacactgcctggatacagtctccagctctaggagatggaattggtttgctccatttagaaatagatcaaaactgggcattcagtagatggtaccaatatcttcctgtactgggaaatactaaatttagattgtgaatatttacctaatgataatttttagagaaggagatatcatagatgagtatgattgggaagttcagaaaactaaaatttgatttttacagccatccaactatagaatcattagaatttagtcatttatggataaattaaaatgaacacctggactcttgttaaaatcagaaagtccaaaccaaagataggcacttcccattcaccattctgttttaaagcagtaaaaattgaggtgcccttggatatccacaagcctaaattgagtacacccttgaaccagagcccctcagttaatggggtgaccgacatggggtagctgatcccagggggcattcccctctcgagctggccctgcactgggtggcctggggattgtgcttccttgcacagtggtgcacatttctatgtgtggatgagattttcttgtcaacttttcctgccaagacactaaatgcttttcagtgctaatactgacctgatagtagagatttctttccctgagtcggatggtagcaggatttacttggtaacccttggtttaaaatacctgtttttttgtttgtttgttttcttttgttttttaaggaaataagatcaataggcggagggaaattgtttctatatgcacttattaaataatttttgttaacaaccctgccctgggataaaagtgaatggaagtacatgactgagtaacagtaattaattctttgccctgatcgtttatttggggactgtatatgctttcttgactgacaatagaatgttgtattagttttcattgtgtctttatttgcagttcacagcacttttgttttccatatgctacaaactaaaagtttagcaattacgttatattccaattctggagtccagattgtacaaattagatgaaattctaattcgtcattttaggaagaaatcaattacctaaaattactggctcttttcaacataccctttagtatgtaaaaaaataagcttcaaatgcgtgggttaaagttaactatcaatcccagtttaagaatgatatttctgtaagaaaactgctttattttccaagttgtagtatttaacataggctgagtcacaaataagtttttaattgtatcttaatgcagttgtctctgcctttcaagtcactttgattgaaacattttaagcagaacaaatatagccaataatttaaaataatcaccccaaaaccatttctcaaacctgctaaaactttgagcatgtgaataattttctcctcttcacattcttcttatgtgggaaggaagtgaatttgaaatattaaaatctgccctttggaataggctactttggccgtttataacttgatttctactcggggaggaaggtacattcccaatagctttccaattgggatatcctgtgatatgattggcaggctgtccgagtagttacacttaataaaatttgggttcgaaagcagattcctggaagttcaaaaataactaaaacagccccggataggttagaaagtgaacttaaatcattctcagaattagaaaataagaagttattttttatcttcaaagataaaaagggggccgggcacggtggctcacgcctgtaatcccagcactttggaaagccgaggcaagtggatcacgaggtcgagagattgagaccatcctggccaacatggtggaaccccgtctctactaaaactacaaaaattagccaagatcacgccattgcactccagcctggagacagtgagacgccgtctcaaaaaaaaaaaaaaaaagataaaaagagttttgagcaagctcaaagacccgtgtgccagcagtcagatgccccgttgggtgcacaggctaangcagcccggcccaatctggaaaccagtcaggcttttgccagcccctaatctaactgattggnacatgttggtggatacccccaactttgggaatttcctanggttaagagaacctctagaannnnnn

SEQ ID NO: 30091 - DNA, 619 bp, Homo sapiens
  misc_feature 1, 2, 3, 4, 5: n = A,T,C or G
nnnnnccgaaataattgaaatagccacatgtagctatagaggctgccttacacagcacacctctagaagggaaactaagtggtatagttgacatccttagcttccctgttaatattaaaggccggtattggtggcacttaaggattggaatgggttaagaacttcccagcactgtacagttcttttaaagcacaaagcttgggagaattaatatatgcaggataactgaacgcaagagacttgtggaatgcagttctaacctgataattgtgtgttaatcgggagtaacaggacaggccattacggttggttacacctacttatgctagatgcataatgtttggagccttccccactgatgagaagcaatttatgatcttgtgctagaaagttaataatgcttcacagcatctttttgagaggttgattagaaaacacacacatacacgttggtagtcacttgtgggtgaagcctgaaggggctatacaatttattttttttcagattgactgatggctttatggacagccaggcttgctaggagcttggttgtgttcagggctattgctgtccctttttcctttgaaggaatttaattctctgagatgtagtcttaat

SEQ ID NO: 30092 - DNA, 2831 bp, Homo sapiens; identical to SEQ ID NO: 24082
  misc_feature 1, 2827, 2828, 2829, 2830, 2831: n = A,T,C or G

SEQ ID NO: 30093 - DNA, 453 bp, Homo sapiens; identical to SEQ ID NO: 30068
  misc_feature 1, 2, 451, 452, 453: n = A,T,C or G

SEQ ID NO: 30094 - DNA, 1526 bp, Homo sapiens
  misc_feature 1525, 1526: n = A,T,C or G
tttttttttttattttttttgggtgacacttattatccttcagtctttattttaaataaggcccctgtcctttaccctcccaaagtacttttagacattttccttctgcccagaatcctctgcccggtcccctgtagctagtgtccagacactggtcacagacctccactgagcccagttagagcgctgacctcccatctcaggacttcttggcccttgcccattgccatactctactgtcagattttaaaactgctagaccatgtgccaattcacattgacttgtagccactaggaccctgtgtctttttctattgtgcttgttcatggccaggaatcaacgaactttggacagacaatcagtagactttgggtgtggccttggtgaaggcttcccactttggtgacttgcatgtgcccctctttgttgagggggttttgaagcagcttctgcgtcgttgggagctggctgctgcgcccagcctgaggccctggaccccttttgcaccatcctaatttcaacatccagatgtcaattcagaaaattattatatcattctaatgactcaaaacataaaatcccctcttttgtctcatgttgaagagctgatgacatcggacctatcaggtcagacttattttcctagtcagagactgaatggcatattttcaaagcacttcgtctaaattgcatggcacacaccccaggagcccaaagatctggttgttctcttgagatgcagagaggaggcccacaggtggcggaggggtgaaggaggaggagccaccacttccgaagcatcagaatgtcaaaatctaagttttccacgaggtcagcagcaggtgtctcctggtctggagagggcatggaagtggccacaggtctggacttctctgggtggatgtgagggagggtgattgaactggaggagggggctggcttgagaccttcctgttctatgttgggggggatactgagggtccgtctcactgggacgaagagggggcacagatgcaggtatgcccaggtacttgagtcccagccaaagcggcaaagccagacctcccgggattccttgagtttggacaaagggtgtcccgacgacgataaagagccaggagcagagagccctgcatcttgcctggggccccttgtatctctggctcatggcctgtcctgggcacggggaggaagggagacacctgtaataataacagagaccgcactggactatgggggatcacaatgggtttcagtttgattgagagaaaataaggtaagggacacgtgctcgcctgagtctctggagtaagagttacgccttggagaaggagggcagccaaaggccacgcagaaattgggggttcaaggcttgcccagccggccccaagggtgtgggggtccacatggcctcacccaggggccagtggggtggctttgctcatttgagggtgtgcagggaaccaggccagagggggcatgcccccgcggtgctggctcttcttttaaccacaggaaacagcnn

SEQ ID NO: 30095 - DNA, 405 bp, Homo sapiens; identical to SEQ ID NO: 30088

SEQ ID NO: 30096 - DNA, 1832 bp, Homo sapiens
ggccctcgaggccaagaattcggcacgagggtgagttcctccggccgggctgcggggctccgctcagtccgggagcgcagctgggccgcggcgctccgacctccgctttcccaccgcccgcagctgaagcacatcccgcagcccggcgcggactccgatcgccgcagttgccctctggcgccatgtcgcagaacggagcgcccgggatgcaggaggagagcctgcagggctcctgggtagaactgcacttcagcaataatgggaacgggggcagcgttccagcctcggtttctatttataatggagacatggaaaaaatactgctggacgcacagcatgagtctggacggagtagctccaagagctctcactgtgacagcccacctcgctcgcagacaccacaagataccaacagagcttctgaaacagatacccatagcattggagagaaaaacagctcacagtctgaggaagatgatattgaaagaaggaaagaagttgaaagcatcttgaagaaaaactcagattggatatgggattggtcaagtcggccggaaaatattccccccaaggagttcctctttaaacacccgaagcgcacggccaccctcagcatgaggaacacgagcgtcatgaagaaagggggcatattctctgcagaatttctgaaagttttccttccatctctgctgctctctcatttgctggccatcggattggggatctatattggaaggcgtctgacaacctccaccagcaccttttgatgaagaactggagtctgacttggttcgttagtggattacttctgagcttgcaacatagctcactgaagagctgttagatcctggggtggccacgtcacttgtgtttatttgttctgtaaatgctgcgttcctaatttagtaaaataaaagaatagacactaaaatcatgttgatctataattacacctatgggatcaataagcatgtcagactgattaatgtctactgtgaaaatttggtagtaaattttcatttgatattagatataaatatctgaatataaataattttaatatactagtcatgatgtgtgttgtattttaaaaattatctgcaaccttaattcagctgaagtactttatatttcaaaagaatgaataacattgataataaaatcgctactttaaggggtttgtccaaaataaatattgtggccttatatatcacactattgtagaaagtattatttaatttaaatggatgcaggttgtctactaaagaaagattatatataactatgctaattgttcataatcaacagaaaccaagatagagctacaaactcagctgtacagttcgtacactaaactcttcttgcttttgcattataaggaattaagtctccgattattaggtgatcaccctggatgatcagttttctgctgaaggcacctactcagtatcttttcctctttatcactctgcattggtgaatttaatcctctcctttgtgttcaacttttgtgtgcttttaaaatcagctttattctaagcaaatctgtgtctactttaaaaaactggaaatggaaaaaaaaataaatctttgccaaatccttcaaaaaaaaaaaaaaaaaaaaaaaaaaaaaaaaaaaaaaaaaaaaaaaaaaaaagggccggccgttaaattatttaaaaaaaaaaacctccaacccctcccctggacccgaaaccttaaaagaatgccattggtggtggtaacctggttattggcacctattatgggttccaattaaaccattaccttcccaatttcccaaattaaacctttttttcaccggctttcaa

SEQ ID NO: 30097 - DNA, 1479 bp, Homo sapiens
  misc_feature 1, 2, 3, 1473, 1474, 1475, 1476, 1477, 1478, 1479: n = A,T,C or G
nnncgaccccttcctggatgaccccctgccccgggagtacgtcctctacctccgtccctcctccttcccgaaccatccggctcgggctccttccctggcccagcccgactccctcctccttcccggccccttagcacagaagctttccgacttttggcagcagtcgaagcagatctgcgggaagaacaaggcacacaacatcttcccccacatcacactctgccagttctttatgtgcgaggacagcaaggtggatgccctgggggaagccctgcagaccacggtcagtcgctggaaatgtaagttctcggccccgctgcccctggagctctatacgtcgtccaacttcatcggcctctttgtaaaggaagacagtgcggaggtcctcaagaagtttgctgctgactttgctgcagaggctgcatccaaaaccgaagtgcatgtggaacctcataagaagcagctacatgtgaccctggcttaccacttccaagccagccacctacccaccctagagaaactggcccagaacattgacgtcaagctagggtgtgactgggtggctaccatattttctcgggatatccgatttgctaaccatgagacattacaggtcatctacccctataccccacaaaatgacgatgagctggagctggtccccggggacttcatcttcatgtctccaatggagcagaccagcaccagcgagggtgtggatctatggcacgtccttaaccaccggctgctctggactcctgcctgagaattacattaccaaggctgatgaatgcagcacctggatatttcatggttcttattcaatcttaaatacatcgtcgtccaactctctcacgtttggggatggagtattggagaggcggccttatgaggaccaggggctcggggagacgactcctcttactatcatctgccagcccatgcagccgctgagggtcaacagccagcccggcccccagaagcgatgcctttttgtgtgtcggcatggtgagaggatggatgttgtgtttgggaagtactggctgtcccagtgcttcgatgccaaaggccgctacatacgcaccaacctgaacatgcctcatagtttacctcagcggagtggtggtttccgagattacgagaaagatgctcccatcactgtgtttggatgcatgcaagcaagactagttgggtgaacgccttattagagagcaataccattatcgactcatgtctattgctccccgtcccttcgctgggtcagactgcccacatatctgcaaggtttaccacaagcaaatcactggagatccgtgtacacccggttttgcgtggcccaggtgtgggagcacattactgctggatcccacaaggaggggcgccactcgggggcaacacaggctcttctactcacaatggtgccgcaccagattttagaggcccaacacaatatggttgagagaccgggcgccnnnnnnn

SEQ ID NO: 30098 - DNA, 564 bp, Homo sapiens
  misc_feature 1, 2, 564: n = A,T,C or G
nnagctgtttcctgtgtggaaaagaacggccacaccgcgggggcttccgtggtacttagaagaaaactccactccctattctaggttttgtccagagacctgaactaatgatagagtcaaagaatgtatgcaaagagcattgaggcacctagtttaaggaattgttgagggcagaggctgaaatgcagcacaaagcgggtgagtcagaaagtcccttaggtcagttgttcgcaccctccttctcccctactcagagacacaattcacttgcaactggaagccctgggaagaatttcccacctagttctgtgtctgaggagagaaaaaaacttgctaaggaccaagttagagagaaaacccaaatgagaacagcgaatctagccatctttctttgaatcagaattagttggagaaaaagtgtcaggtagaggtagaaccacctacgcccccactttccccaaaatagagtaagatacgacaatggttggtttcctagagtctggggacccaggctacataaatagcctctaacagaaaagcatctcctggactaaggggacagan

SEQ ID NO: 30099 - DNA, 564 bp, Homo sapiens; identical to SEQ ID NO: 30098
  misc_feature 1, 2, 564: n = A,T,C or G

SEQ ID NO: 30100 - DNA, 405 bp, Homo sapiens
  misc_feature 1: n = A,T,C or G
naccattctcttcactggcaaatctagcttcactggcaaatcatctctggacatagcattaagcctactcccagactgagagctcttgatgggaccagagattgaatagcctaccctatagcacaagatttctaccttgggattgggttagagctggctggcaggtgagtcacagaagtgacagccacccttgacaaccctttccactccagagagctctaatgctcactcctcttcccccatgctccctctctagggtgttgtggagggaaggagagaggtaagaaagtccttcccagtaacctcaaaatagtgagtgcgcctatttaagtccagcactttgggaggctgaggcgggtgaatcttgaggtcaggagttcgagaccagcctggccaacatggcaa

SEQ ID NO: 30101 - DNA, 434 bp, Homo sapiens
ggcgccgccgtcgaaggcggcagcctggaacacatcaacgccaccttcctggccctgttcggtgtcgccgcggtgctcgcggtggccaccgcggcgcgcttctacatggtgtcctggctgggcgagcgcgtgacggcagacattcgcagcgcggtctacggccacgtggtgcgccagagccccgaattcttcgagaccacccgcaccggcgaagtgctgtcgcgcctgaccaccgacaccaccctgatccagaccgtggtcggcaccagcatctcgctggcgctgcgcaacacgctgctgttcttcggcggcctggtgatgctgttcgtgaccagcccgcgcctgacctccatcatcctgggcctgctggtgctggtggtgctgccgatcgtgctgttcgggcgccgcgtgcgcaagctgtcgcgcgattcgca

SEQ ID NO: 30102 - DNA, 953 bp, Homo sapiens
  misc_feature 1, 948, 949, 950, 951, 952, 953: n = A,T,C or G
ngatacggtaataacgcatttaacaactggttgggaatcgtgataccatccctccgttctcctatctggcttggaagaatcgtgtagaaagccagatggtttgtgtattcccactcgggaccagcacgaaactgcttgtctgctttgcgtagctgactgtgtatgggatccaggagctggggtgatttatttttatgggattcctggagcgcagggctggtgaatccatgacaaggtccgggagcagcagaccaaaaccacagcagcctcctagtaagtgtaacaaatagttaagcaaactcgggctacaaacaaagactttgctacctccctcctccacaacccccaagtaattagccttctggagctggctcttagctgaggctcctgctacctcctgctccacccgccccttcctaggttacaagtaaatcattgtcaagggccagccaggggaaggtttcaattaaggttctgttctgctgcctttgtttctcccctgctgttgtaggcacttacagctgcgttgttatgaaaggagggaatagccctttgtgtctttgatctaattaaacctgcttggctgtgtttatccgcagggcaggtcacagatagggttggctgtgccactccataaagtatctattgtggaagcagccaaaaagggctgctgtggcaggaattggttaatttctccttccacttcccttcctgaatagtgaagggagcccttttaaaacaaggctttggtggtaatcctgtgatttttttttctcccccatcccctcactggcccatccctctcaccctcacttttgttctgctggtgggtaaaatcttaggctgaacacatatttcaatggtaagatacttattttgctatccacacttgatgcaattgaattcaaggtgcaaagtcttgtactgagagcagtctccttgtttgcnnnnnn

SEQ ID NO: 30103 - DNA, 1275 bp, Homo sapiens
gggtgggcagacatctggggcagggaaggcttgggtctgagcccttgcccggggcatgatctgcggggcagttccgaagttgccagcatcttggggtggggctaggggcgtgggtagtcctgacctcctttctccggccagcctgactttgtcggcatcatctgtactcgtctctcaccaaagaagattattgagaagtgggtggactttgccaggtgaggcaagaatggctcagggggtgggcagacatctggggcagggaaggcttgggtctgagcccttgcccggggcatgatctgcggggagcagggtttctcaaccatggcactattgacatttccagccagataattctttgtcataggggctgccccgtgcacgttaggaagttcagcagcatccctggcgccagcagtactgcctagttgtgacaaacaaaaatgtctctgcacattgccatatgttacttaggggggcagaattgtttccagttgcaaaccactggtggaggggcccctgactgaaccctcgctcctatccgcagacgcctgtgtgagcacaagtatggcaatgcgccccgtgtccgcatcaatggccatgtggctgcccggttccccttcatccctatgccactggactacatcctgccggagctgctcaagaatgccatgaggtggggtggcttgatgtgctggcttgggggcggacaggaaccggggtgcttgtacctactggtctttcccctctgcatagagccacaatggagagtcacctagacactccctacaatgtcccagatgtggtcatcaccatcgccaacaatgatgtcgatctgatcatcaggtttgccctgagtgggagttgagctgaggtggatgggatgggggtctaggcactgtttctgacttgatttaggaccttgagccccttcctgccccattctgggacttggtccctgaccagacaaactattctctgaatcctgagatggccatgagctgcttattaatggatctggggccagctgcaggcctaggtatcctgcctctgtcagcagctgaggagcttgaaattgagaaatagtcaggagtcggtctaggatgctgggccgaggataaatgtcacatcctgtgagaaggtataagcagtcagtggccctggcaggggtgaggatgatataaacaaggcccaagggtctaggtggaccacattccagctctgggtggaaggaacaggaaggcagactttgcactgtctgcttggggggtggtgagt

SEQ ID NO: 30104 - DNA, 799 bp, Homo sapiens
  misc_feature 799: n = A,T,C or G
cgggcaggtacaggcgtgagccaccgcgcccagccgggagatgctgttaatattgaagtcaaggcatcaggcatacagcaggactgtagttggtgggtcaggccatcatatttacagatgtggcctttggcttttgctttgaggagaaaggcatgtcattggagaattatgaaaggtggcacccatcgggaatggatgtttacctaaacagcacccctctagctgctcagctgagaatagattttgggacaagtgcagaagtgggaaaaccagttaggaggctattgtgaaagcggaagaggtgatggtggcttggacttgggtggtaaaatgtgtttgcagactggttataacttgaaagtggaggccaaaggaattgtctatggtgtggatgttggatgtgagagtattccggtgtaaccccaggtttccggcctgagaggaccacaggaggagcaggtggtgggagtttgagtatttagttttggacataccaagcttgagttgcccatttgatgtccaagcagagatggtagtagagccgggtgccatggctcacgcctgtaatcctaacactgtgggaggccaaggtgggcggatcacgtgaggtcaggagttcaagaccagcctggccaacatggcgaaaccccatcactactaaaaatacaaaaatgagccaggcatggtggcacgtgcctgtaatcccagctacttgagaggcggaggcaggagaatcgcttgatcccgggaggtggaagttcagtgagcagagctctcaccactgcactgcaccttcaan

SEQ ID NO: 30105 - DNA, 1012 bp, Homo sapiens
  misc_feature 1, 2, 3, 4, 5, 6, 7, 8, 9, 10, 11, 12, 13, 14, 15, 16, 17,18, 19, 20, 21, 22, 1011, 1012: n = A,T,C or G
nnnnnnnnnnnnnnnnnnnnnngtaggcatttatttacatcatatttcaatacttcagaagcttaaacagtgtcaggggtatagcagttctgagaaacagttttacaagaagacataaactaaggggtacccatgagtgcgtctcatccttcctctcccaggccagagtaacaggtatgctgagatgctcttgcccttggccccggggtgctcacctccagcctcgagctgcctcacccagttagccagggggctgcacaggtgtttgcgtgtcctacatgtggcctgtcatgaagaaggtccgcatacgtggctctaggctgtgcaggcaagtcttcccaagggactgaaggaagtcaccctgaaatcctctccccatgaggacctctcctaagtcagatttctcactgctcctcgctccagctcctgctgccatttgcctgggggttgccagttgacaaatcctcccccagctggagtgctgccgcagctttgtcccaagtatatattctgttgcctgtccccagagcggctgtgctctgggttctgggagccacatgctccagcacgactgctttcaggatacctgaatgaggaaagcctgggaagcttagaaaggtatcctggattggaaggccgaggcaggtggatcacctgaggtcaggagtttgagaccagcctggtcaacatggcaaaaccctgtctctactaaaaatacaaaaattagccaggcgtggtggtggacacctgtaatcccagctacttgggaggctgaggcagggagaattgcttgaacctgggaggcagaggttcacggttgcagtgaaccgagattgcgccactgcactccagtctgggaaacaagagcgaaactctatctcgaaaaaaaaaaaaagagtaagaaaagaaaagaaaggtatcctggaaatgtacttctagtaacagtaagcttgactgaccaagaacagggagaatattccatgagaaaggaaatgtttctttccggacgcnn

SEQ ID NO: 30106 - DNA, 1072 bp, Homo sapiens
  misc_feature 1, 1072: n = A,T,C or G
nagctggggtggtccgctgctgagtgctgcggggcgcgttcactggctcgcgctgggggcgtgtcctgtcgcctcgtgcgcgctggtttcttgggtcgtgcaggtgtgctgccggcaggggaagcgttctctatgatcgtgtctcggaattgccccgtggggtttggccgttctatgtgggtccgcgttccaaaaggttcacacgtggagtgggttcgagaggtggttagtagaagcccacaattgccgattcagagctgacctagagagtatcggtgaacagtgatatattgaagtctggcttccggtagactctctcgtcatcgtggatcagtgcataggtggccacttggccgagcgcatgtctccgttcccgaagatctgggggatcgttccatacagagcttgcagggtcatcagccccttggctgcgtggtacaggctcgtctggtcaccctccaggtagcactctttgaatgcaccctctgattgccatggataagagatccccatcgaatggaatgagatctaagctgtactcctccctgtgaataaaggatcccaagacacccagatccttcaaccgctgttcgcacaacaggctacggcgtggcacaaacagaatatgaaaatctctcgttgggcctcgtctatcttcactgagcacgttttcagcgattatatccatcaactctagcctgggtctgacaaaaaaaattatattcttcacatcagctgccggcaaacgatttcctttaagtgtgaacattttttccacttcatgttccttcaatagtgaatactgtgcaatcaggccaaagggtccagttaggtattcatcccaaactattgccttgcttcctgcgcacttgtccaggaactcgcgcagctcgcgacgcaccgcctcgcgcaacacgtttaggttcactcggccgtaggacagatgagccgccatcttgctccaccaccccctgccccacaacgccaaccgagtccgccggttcctacgggaggaccacggacgcagtcacgtgaccaaacccacgcgtccgcgaacgcgtgggcggacgcn

SEQ ID NO: 30107 - DNA, 595 bp, Homo sapiens
  misc_feature 589, 590, 591, 592, 593, 594, 595: n = A,T,C or G
tatagggagtcgacccacgcgtccgctttgtctgtgggtccgtatcactttgctcccttctggaattccacttagatgagcgtcggccctttcatccctctccccccgtctctgtaccttttcacatctctccgtgtatgtttgctctattcttgattctgtttatttttaatgtacggtgtaacctgtcctttcagtttctaattctaaagatgacatatatttaaaatttctaaattattagttactttcacatcttatctgggtgtttttgatagacattgcttatttatttttgtgattccattctttattcaaatatttcatatgatagtcttcagttttaagaacatgcttttttgaaaagcgctagatatttgtgacgtggagttccttgactgtgtttgaagtccttgggagggtggtctacagccagatatttttcctgctcaagcccacacagagtgaccaacttccttgatgcttctgtaatttttgtttgttttgtgggttcatgtgtagccttaatgtgagggtctgcttcattactttgcgtccagggtctccccagctgtataggcagctgggnnnnnnn

SEQ ID NO: 30108 - DNA, 743 bp, Homo sapiens; identical to SEQ ID NO: 30072
  misc_feature 1, 2, 743: n = A,T,C or G

SEQ ID NO: 30109 - DNA, 3881 bp, Homo sapiens; identical to SEQ ID NO: 23987
  misc_feature 1, 2, 3, 3863, 3864, 3865, 3866, 3867, 3868, 3869, 3870,3871, 3872, 3873, 3874, 3875, 3876, 3877, 3878, 3879, 3880,3881: n = A,T,C or G

SEQ ID NO: 30110 - DNA, 2778 bp, Homo sapiens
  misc_feature 2775, 2776, 2777, 2778: n = A,T,C or G
acaggaggctgccagaggggaagcagcaagcaagactcaggcacacatgctctacaggtggctctttgtttgcctgaccaaagttctttgcaaatcttagcacagtttcaaactagtgacctgggaggagatggaaggggtgttgagcaggctgagctagctgctgaggtcaaaggctgatgagcccagaggaaggggacaggtcagggatacatctcaccactgtgaataagtttgtccagatttttttctaaagttacttcccttggaaagatacacttgagaggacattgtagttaaataatgtgaactgtaacagtcgtctactggtttatttttcatattttttaattgaaaattgagcttgcagaaatagccacattctacacatagttctaattttaaatccaaatctagaatctgtatttaatttgttttttaacctcatgctttttacatttatttattgatgcatgtcagatggtagaaatattaaaaactacacatcagaatgatacagtcacttatacctgctgactttataggaaagctgatgatataaatgtgtgtatatatgttatatatacatatattcaatactgcctttttttttgtctacagtatcaaaattgactggttgaagcatgagaagaatgtttcccccacacccagttaagagtttttgtgtctgttttctttgtgtatcagtgaacgatgttaagaatcagtctctctttttgaagaaaaagcaatattccttggaaagcaaggagaattgaaggactatgtttgccgtgaggaaatagattttcatgactagtttgttttatacttttaaggttggcatctatgtgggccttatatactctaaaatgaactttagtcaccttggtgcttatgggccattacttgacctatgaatctttaaggcacaatcagttgtactttacatttaaagatcacttgagtgatggccgcctttccctcctacccgctccttccccacatgccttccaaggttagctggtaactgtagggctgcagagctgagcccatggttgtgtgtaacttgccctcaccctcctcattgccaccttaggtcactttatgggtctcgtcctccagagggttcggaagtggagtctgttggcagccctcctgcaggccctagcaccctgtcctgctccttaactgtgtgtgtgactctccaagagagttgtcctgcctgctgaagtgaaccagtacccagaaagacaactgtgagccatcttggttttcactcgctgtttagctgaggtcttgggccacaaaaggggtttcacaaacctctggatatatcagagtttatgagaaaggaaacatgctcagtcaaaccaaatcaaacaaattgaattttatgttttataaagtgcttctgaaagctaagatttgaaagaagtctgaaatcaaagtatttggcagcataactccttaaaggtagtggcgttgatagaccattttcagacagaatttataaagaatctgaaaaggcaggtctgtgatagagaaatggacctgcattcagatccaactgcccagcaagcgtttggatgcagacactgctctggacgtggtatactccccagagtccataaaaatcagtgcttattttaggaaacaggttgccccccacaactggggtaaaagaagagagaaaagtcacgcttttctctcatttcattgtgtgtgcatgtgtgcgtgtgtgtgtgtgtgtgtgtgtgctgagatgtgtgatttttctttctcaaggatcatggtgggatcacagaactcttttatacaagtgagatccaggtctctgaatatctttttgtatataataataataaaaagctcctcaccaaattcaagcttgtacattatattttctttctgtgtttttaaatttaagttttattgttttgtatgtaaatatgtggacccaggaactgttattaatgagcaaaaagttactgttcagggcagtgattctgtttaataatcagacaaaatgtagacgagctttttaaagccatatagttttaactctgtacagtaggtaccggcctgtattattgtaacaataactctagcaatgtatagtgtatctatatagtttggagtgccttcgcttccatgtgtttttttttttaatttgttcttttttaaattttaattggtttcctttatccatgtctccctgtccaccccctttccctttgaaataataactcactcataacagtatctttgccccttccacagttaagtttcagtgataccatactcaggagtgggaagaggaaatcatattcgtaatttcatttcgttgaagccctgcctttgttttggttctgaatgtctttcctcctcggtagcagtgagaccggtttcatttcatacttagtccattcagggacttagtgtagcaccagggagccctagagctggaggatatcgaatagattaaattttgctcgtctcttccacaagccctaaccatgggtcttaaaaacagcagattctgggagccttccatgctctctctctctcctcttttatctacttccctcccaaatgagagagtgaccgagaactggtttttataaatcgaagttcctaatagtatacggttagatacgtcagggtctggtttgtgaatactacagtactgcgcgattgcccgtgccataaggtgtggttcccaggaccttaccattctctcaactttacctgcatgaatcatttcttccatcnnnn

SEQ ID NO: 30111 - DNA, 1183 bp, Homo sapiens
  misc_feature 1, 2, 3, 1074, 1097, 1160, 1178, 1180, 1181, 1182, 1183: n = A,T,C or G
nnnaagaaattgagcttttattagaaggcagcctggactggttgtgtcacctcctaacctcagatgccagctcaccagatgagtttcaccgtgacctaagccacatccttgggatacctcagagctggcggctgtacctggtgaacctgtgccaaagatgcatggacacaaggacgtacacctggctgggcgccctgcctgtcctgcactgctgtatggagctggccccgcggcacaaggatgcctggagacagcctgaggacacctgggccgctctggagggactctccttctcaccgttccgggaacaaatgctagatacgagttccctacttcagtttatgagagagaagcagcatttgctgagcatagacgagcctctcttccggtcctggtttagtctgctacctctgagtcacctggttatgtatatggaaaacttcattgagcacctgggtcgttttcctgctcatatcctggactgtctttcagggatttactaccggcttccgggacttgagcaagtcttgaatacgcaggatgttcaggatgttcagaacgttcagaacattttagaaatgctgttgcgactcctggacacttaccgggacaagattcccgaggaggccttgtcaccatcctacctgactgtgtgtctgaaactgcatgaagccatctgcagcagcacaaagctacttaagttttacgagctgccagccttatctgccgagattgtctgcagaatgattagacttctatctctggtggattctgcaggacagagagatgaaactggaaataattcagtccaaacagtcttccaagggacccttgctgctacgaaaaggtggctccgagaagtttttacaaagaacatgctcacatcttcaggtgcctcattcacatacgtcaaggaaattgaggtctggaggcggctggtggaaatccaattccccgcggagcatggctggaaggagtcgttgctgggagacatggaatggaggctcacaaaggaggaacccctctcccagatcactggctactgcaatagttgctgggacaccaaaggcttanaggacagtgtggccaagaccttngagaaatgcatcattgaagcccgtgagctcaacctggcaggtgaacaatcttttcttctgggnaacggattcggcttacancnnnn

SEQ ID NO: 30112 - DNA, 2608 bp, Homo sapiens
  misc_feature 1, 2, 3, 4, 5, 6, 7, 8, 9, 10, 11, 12, 13, 14, 72, 73, 74,75, 76, 77, 78, 79, 80, 81, 82, 83, 84, 85, 86, 87, 88,89, 90, 91, 92, 93, 94, 95, 96, 97, 98, 99, 100, 101, 102,103, 104, 105, 106, 107, 108, 109, 110, 111, 112, 113, 114: n = A,T,C or G
  misc_feature 115, 116, 117, 118, 119, 120, 121, 122, 123, 124, 125, 126,127, 2608: n = A,T,C or G
nnnnnnnnnnnnnncagggtcagggggaaggggggggggttttttttttaaaaaaataaaaaggcccccccnnnnnnnnnnnnnnnnnnnnnnnnnnnnnnnnnnnnnnnnnnnnnnnnnnnnnnnncaggtaagagaccagcagctctttgaggttttgcaggacaaaaaaaaattttttattaagtgtgaaagcaaaacaggtacatctatttaaatattttttacatatttatagatacaacaaagacaaataacttagcaaaaattacaagtttaaagaatagtactattttgaaacagccaatatagtatctgaaaatattccattttatccataatcagtgagtattatttccaaaaaaagtaacttgcattttcttgtgaaaaatatggttttttttttagatgtctgccaagatttatcagaaaagtccatctttctaaacctaaaaaattgtaatgcctttattgagaactttttttacctaatggctttaaaaaccacgtgttttcctttggacttaggtgaattctaaatctttacttcactttcaaactacagggcatcgacataaacaaaaacaaatcagattgagagttttgggttgcttttcttcatactgagcgaagaaccttctccctggctgggtgaaagaccatggtgtactgtgatgtccaatctaccacacagggcttcaccaagccaaagcagccacactgaaagaaatctgccaggttctgcatgaatccaagattgtatggtgtcttcctgagggacaacgtctgtttcatatgcttgctctgcttctgcaggctgattctctcatgggaggtcaggcccagaaaggcaatctgaaagagttgatttaataataaaaatgttgaccatgagaaatggaaagttgctagcatcaagatatataaaacccaaggggaacaggccacaatctgattgaggtaagtccataatccatcttctttgaatgttgtggcacaatgactggacaaatagatgaaagatccatatataatccagccacataccatggaaaggaaaaacaagaagaatatgtaatagtgatggttgccaaaacctatgcaccgtccagtccacaggcagtgttgatcatatcgagccacacagcagttgcatacatggcagtggagtgaccttaatggcttccttataagacatgatgtacaaaatgttctgaagtccagagagccagtttctgcaagggtgatgatattcactttcttttcttcttcagaagccttagtgaagcctggatcagttgcccaagtcttatagaaaaagtatagaaaggctactatgctgaaaatgaaactgaaatagaaaggggctcctgctaaatcaggaaaaaataagatgaaccaagtcataaatatccaaaaaacagaacttagcagaaaggctgttggtaagtatacaaggttcttatacccaaccaagaaccttggaaacaaagatgtcagaaaaaacagtgttactagaagacatccttttaaaagccaagaatctgaattgaagtccaatatgtatccaatagcccacatggtaatcacagaaagcatcagcagcaggaagagctcgcatttctgcagccacctccaaagtctgaacttttggttggctctcattttggcttctgtttttagcatatgaataatgagctgatttttgttttgtagagccatatcaagaggtgtttctcccttaacattctggatatccaggctagaaccagcttccaaaagcttatcaactgcattaacatttcctgctgcaactgcccagtgaagtggagtgttttggtgtattttatcaaccacattgagagaaggattaaactttaaaagaaatccagttggttctggcccaattactttgtgagctgataacatgagaggtgtctgcccatttacatctgtcatattcacactctgtccctttgagatgagatatgctataataggcatgtgttgaaacaatactgccaggtggatgctgctgaatccctctccatcaataagagtggggtctgcaccatgctggagtaataatatgaccataggtaaatgtccttgtcggatggcccagtgaagaggagttgaatttaaatctccacccaactgatctacaacagcaccttttgaaatataaaaccttacaagatccagtctgttgttaatagcagcccaatgaagaagcgacacattttctttatctggttgcctgacatcatatcctgcttctaccaactctttacatcgttcaaaaattccgtattgagtagctttgacaatgtcacagttactagagtcctctataagaggaagagcttctcttgcattggcaagttctttgttttcatgtgcacagatgccatatcgaccaaatcctggagggtgggggccatggctgtgattcctgcactgcgagcccagccccggcccctccatctccccaggagcccacagcggctgaggctactaggcaagtagcgactgccgccagcccgccagcccgccttgggtcgcctcttctcccacttcctgctggcgccctccggacgcgtggtcn

SEQ ID NO: 30113 - DNA, 453 bp, Homo sapiens
  misc_feature 452, 453: n = A,T,C or G
aatctccagatgttccagagcagttttcagatattaatttaagcaaatctcttcctcaagaacagaagccacttgaaattaaaccagcaccttttgtgaggagccgattcaaaagaccaaaaccaaacttagcaagagcagctttgaagagagagactacagaatcagaaaaatatatatatgagaagaaatcagaaaccgagaaaatggagactattgtgatgcaagaaaataatgaacaaactgatactctcccttctcaacatgtgagtgtatttgagatggaagttctgtgtgggtgttttttttttttttaagttattaggactactaaaagcacctggcattaaaattctacaaatatttctgtgtaatttttgctgcatgtgatattgctcccatgcttaatgtgcctcattgttccacataatttgtgtaagaatctcagatann

SEQ ID NO: 30114 - DNA, 1330 bp, Homo sapiens
  misc_feature 1328, 1329, 1330: n = A,T,C or G
acccctagcagaaacagagtttcgccatgttggtcaggctggtctcgaacttctgtcctcaactgttccacctgcctcagcctccgaaagtgctaggattacacgtgtgagccactgtgcgcggtacgcggggaaccgaggcagcagcggacgtgagcgataatggcggatatggaggatctcttcgggagcgacgccgacagcgaagctgagcgtaaagattctgattctggatctgactcagattctgatcaagagaatgctgcctctggcagtaatgcctctggaagtgaaagtgatcaggatgaaagaggtgattcaggacaaccaagtaataaggaactgtttggagatgacagtgaggacgagggagcttcacatcatagtggtagtgataatcactctgaaagatcagacaatagatcagaagcttctgagcgttctgaccatgaggacaatgacccctcagatgtagatcagcacagtggatcagaagcccctaatgatgatgaagacgaaggtcatagatcggatggagggagccatcattcagaagcagaaggttctgaaaaagcacattcagatgatgaaaaatggggcagagaagataaaagtgaccagtcagatgatgaaaagatacaaaattctgatgatgaggagagggcacaaggatctgatgaagataagctgcagaattctgacgatgatgagaaaatgcagaacacagatgatgaggagaggcctcagctttccgatgatgagagacaacagctatctgaggaggaaaaggctaattctgatgatgaacggccggtagcttctgataatggatgatgagaacacagaattctggatgaatgaagaacaacacaagctgttctggatgaagagaaaatcgcaaatttctgatgatgaagggccaagggctcaaaattgagaacacagggatcaaatattacaagagacggctcttaaaccaagacctgccaaaagacgcgacaaacacagacgagcgtccgaaacaaaacacagaaaggagaagctatggaaaaaagagcaaatgacaagcgagggtcaaaaaaatagggaggacggagaatataggaaggggagacgaacaaaccacgaggggtggggagaaacaacaccaagcagaagggagacgagagatgcaagcacaaacaagagcacgagcgaccataagaagaagaagacaagcaagaagcaaatgagacaaacacacctgacaacgaacaatgataagaagcaaaagcaagtaatcagcttcgccacgcgttgctgtatgcctatgccagcttgcctcttcnnn

SEQ ID NO: 30115 - DNA, 506 bp, Homo sapiens
  misc_feature 490, 506: n = A,T,C or G
accctgggcaggggctagggagagttgtcctctggatcctgcctgctctgtgacttagaacaactctgtcccctctctgggcctctttcctcagtccctccttgagtcagggcttgggaatggggtgaagtggggaggatgcttccttccacaggaatctgggagggtcaggtgcactgctctgataggctgaggcttggggcccttatgggatcctccctcatcagcccttctccctggataccaaactttttggctggtttctcggctaacagcaaggctttcctgaaccctttcttagctggggaagggaggttcaggagggagtctcagagcctctgacaaagttagggaaccccagggaagtaatgaagggggcaatgccatcctctggtctttccaaacagggaacaccttccaaagccacttgggtcatttggggtctagaggcttagagaggacaggacatcttggaaagagctgagctcangccttggtgctgggcn

SEQ ID NO: 30116 - DNA, 1198 bp, Homo sapiens
gtggttaagttggtgacatggctcagaagtttatttctttaaatttttaagttttttttctttttagtcttcagaaaggcaacagtagtcttttaacgtcactgttaaaagtgtaagactcttttaccccctgagagtcccctttccctttcttgcgtcctttcctctttattctttttttttttttttttctttactgagacggagtctcactctgtcgcccaggctggagtgcagtggcgcgatctcggctcactgcaaactccgcctcccgggttcaccctttctctttattcttatcccggtcagactcgccccctcctccaagatatctctctgttttattttattcgagccgttgcagttctcttgggtgatcgctccttccctcttcaacggatccctccccgcctccatcctcgttctgtgggagagaccagccttctggtgctgcagtcaggaatggagctgacagcgctctggaagccccatcgcaggaagactctaatttgtccgaggagttgtctcactccgccttggacaggccttctccaagattttacactgtcttgcccgcccggaggcacgacgaggcaacgtaaaagatgcagttcttaaagacctcggtgatctaatagaagccacaggatttgataggttatttgaggggactggtgcacggctccgcggaatgccggagacactggggcaggtagcaaaagccctggagaagtatgcagccccctccaaggaggaggaaggtggaggtgatgggcactcccgaagcgggcgagaaagcagaccaagttgggttactgtctcttaaactgttagggaaagttgagactgctaagaattccctggtcggcctgcatggccagacgggcctgcatcacttggcaggaccggaatatcacgcatcacacaccagctaggagcaaccaggacaactccgagatctcgggaagctacggaggaggtgccactaacaggtcaggtcacgaatgcggccggggcaggatctacggcgcacgacatggcgagggcgatcaggcgacagcgacaaaccgcagaattagaccgcagacaccagcaaagacactgacgaccacacacactgacccgaggcaccccgccacgaagcagacccggcgccgccgcggacaccactgcacgaccacctcccccgccgcccctg

SEQ ID NO: 30117 - DNA, 1939 bp, Homo sapiens
  misc_feature 1, 2, 3, 1917, 1918, 1919, 1920, 1921, 1922, 1923, 1924,1925, 1926, 1927, 1928, 1929, 1930, 1931, 1932, 1933, 1934,1935, 1936, 1937, 1938, 1939: n = A,T,C or G
nnngtccttacccacttttccaaacggggaagactcaggtatcaggaattacccattgcacattttgcggggggggggggctaatgtagacatgacaccaagtgcttttcattttaattctctaagcagtagatgagatctttcccttgggagaaatcacagagatggagttttccatttctgcttatacgaaatatgactgaaaatgaacaaagccacctttttaaccaaatacactagaacatatgcactcaagagttagcataattggagttattttcttgatgttgcatgtgccaagaacacttagggttcccctttgggattacctttgaagccatgcaaggcaagaggcctcacaactttatagtcagaccttgtgttttatccaacccctcctcctgcccaccaagatcatcctgagctgcttcacccattttatttagcagacttattttctaatgctctttagctgttaaaaaaaaaaatcattcctcaaaaaatagatctacccttaaaggacaaagatttaccaacactgaagaacccttacaaagttgacagtttctaaagagggttctaggaatgttctgtgtaaggtcagcttcactggaataaacatacatcttcccaaggtgactacttcaaaggcaacactacccattcgggtgcagaaattaccgtacttactctgccataaatgtaaaatgtgtataaagttaagctattgcattttttcataacacatttaaatagaaattggcttttaaagtattgtagttaaaaccagatctcaccaagtaatagttgtgcaattgacaaatgtttggtgccatgtaatggagatgtcacactacacagttgtagtttaaatgcagtccaacataaggtgcatgccactgaactgtaaccctagtaatgtgtcttgtacagttgaaaaataatacttcacctttatataggttaagatatgtaccttatctttaccactcagggtggctttaaaagacggacagctttaggtttgttctcactggaactggttacactttctgtgcaaacttaaccaagtgacgatcgtctggaagctgcattccctcatttccactgtttggtgtgaatctagtctccccactttatctaaaaggaggctagcagggccccagcctgagcagagcagctagagagtgcttccagattcctttgccaaaggaggcccattttccagctgtgagtgacatctgtagtcattggcttcattgcctggcactagccctgtctagaagtggagaaagctggatcacagctggaccacaaccagccccaatccaggatttcccataccatgctggctgtgggctctgtgagcctcagccaggtggccaggctatacttgtcacagctggccacaggcctgctgaaggaacatggggtgtagagccagagcctggttctggttctccgcttgaacagctgacctcgtgcaatcacaggaactctgcgtctccatgtttcactcagatagagaaaatgcctcctttgtttacctctttgaagctgaagtaagtgagactggtgcatgtaaattaatggtagtagagcacctcccacatctgattttataacagtttcccatcactccttaaagaaaaaggccaggccgggcgtggtggttcacgcctgtaatctcagcacttcgggaggccgaggcgggcggatcatgaggtcaggagattgagaccattctggctaacacagtgaacaaaaaattagtcgggcatggtggcgggcgcctgtagtcccagctacttgggaggctgaggcaggagaattgcttgaaccttggaggtggaggctgcagtgagccaagattatgccactgcactccagcctgggtgacagagcgagactccgtcnnnnnnnnnnnnnnnnnnnnnnn

SEQ ID NO: 30118 - DNA, 2440 bp, Homo sapiens
  misc_feature 2439, 2440: n = A,T,C or G
cgtccgcgccatgctcctgcctcagcctcccaagtgctgggactacatgcgcctgccaccacacctggctaatttttttgttttttggtttttttttttagtagagacggggtttcaccatgttcgccaggatggtctcaatctcctgacctcgtgatccgcccgcctcggcctcccaaagagctgggattacaggcgtgagtcaccgcgcctgaccctgttaaagtattttctaagcttctttgaaaacggaatctctttgtggttgctgctgataaaactcctttgacctgacgattgctctaagtcctaattgccatatttatattcccatagtaagagtgtttggagatagtgtttgagcttttttgctggtgttaaaaatgcataatgaaagatggcagagagaggcatattatatccaattcatgagttgtttgtgttaacagaaagcttattttaatcacttaacattgttgatttgtctaatcacagtagcgctattgattaggagcctgacctttagatggttgacttgtgagtgtattcaatatggtgaaatatggtgttgatatatggctgcagattttagaggtgtcattagcaaaggtataggagtaaaataggggttatagtattccttactcaaattctgtatgtgctagagctggctggagtctgtggcatgctcattggtgtaagtcggtaaggactatgctttttgctccacatctctgttgtgggaaagctagtctcttgagcattcttgatcagaatggactggaataatttaactttcgtactttcccaggctattagtattatctaatgagtggcttaaagataccagaaacactgactgaggtctccacctgcttctggctgaatgaatgggagcttctagccattgaataagaggcagtagccaatgtttcttattctgaatggtccaggttgacttttataagagaaacactcagccttttaattgctgaaggtctggcccatagactaagattgcacattcttagtctaggttacacttgaactagactgcacccactgacgatatattcagttcaggtgttaactcacttggattagcatctggcctgtcctatctgaatataggttgagacgtgtattggaatctctgactagtcagaatacgttcttagttatattctcaatactgaggaatttttacttgtagaaactgaaggctcggaagaggatgataaagaaaatgataagactgaagaaatgccaaatgattcagtccttgaaaacaagtctcttcaagaaaatgaggaggaggagatggggaacctagagcttgcctgggatatgctggatttagcaaagatcatttctaaaaggcaagaaacaaaagaagcacagctttatgctgcccaggcacatcttaaactcggagaagttagtgttgaatctgaaaactatgtgcaagctgtggaggagttccagtcctgccttaacctgcaggaacagtacctggaagcccacgaccgtctccttgcagagacccactaccagctgggcttggcttatgggtacaactctcagtatgatgcaggcagtggcacagttcagcaaatctattgaagtcattgcagaacagaatggctgtactaaacgagcaggtgaaggaggctgaaggatcgtctgctgaatacaagaacagaaattgaggaactaacggaactgctacccgaaactcagagcagaagcatagaacgcactgcacaagcgagctctcagcgctaaatgggcaactgctacgcctgcaccccaggcctctgcaaccgctcacccctggccgccgcagctcccatagccaaccacgctcggcaactaccatgcgccggccagcgcagcgcctcgcgccaggccctccgagcggactcgcccagggcaccaacacgcccaagcagcaacggctgcctcccaacaactcaccaccgccgctcgactcggctcctccccccgcaccctcgcaccaaccagcaccacggcacgcaccgcccacgagcgacccacgcagttccccgggaaaacgactccgactggcccccccaaaaggccaaccccaacgaaccccgccagagtcgaaacggcacgcggccaccccgcgccgccatgcccgggtcccgcgcagcccggcaccaccggaaccggtcgcccgggcgccaaccccaatggcacgcgcacccaagcgcgcgccccacccccaccgcgcctggacgcagccgggggaacacatgggtggaacagggacaccgcgggacagcacccggccaaagtctgcaccccctacgccccccccctcccccggcgcaccgcacgcgggcccccgccacgcaaccgcacgcagcgaacctaggaccccgacctgcacacggccactccgcgcacaacgcnn

SEQ ID NO: 30119 - DNA, 1935 bp, Homo sapiens
  misc_feature 1934, 1935: n = A,T,C or G
actcagcagttaaaagattcatctggagtcgcaaaatgaaaagccgtgttctaacctgaggaatcagttaggggacaggagttccgtgggccaggaatgggctcagggagtggggctgcgtgtcacacacagtagctgtgttgcagtggcctagggccttgggggttgtctttaggaaacaccctgaggggaagcaggtaaagagcctgggcagtattgtgactagtttcattgttttcctcctgctgaggtctagcagagcccttgctttgtcctctcggctgggtctggctgccagctggtgtgatttgagaaactgaccttacgcgcagtcaaggtccagctgacaaggccttgtattccttggctggccgtgattggccctttcctctgcagaaagcagcttagggaagcccaagcaagggagtgtggccggtagaaggccctcgtcgcttccttctggagccagcccagccacacaacgttttccagatgcgtgagtctggtttgtgacatcccgttcccttctgccggttggtctgatgcaagaggaagagttacagttgctctgaattttattctcagctgaaaatgttggcacgtgtatctggatgaacaaaacagatgtggatgtatctgaggattgagggactatcaatgcagagttaatgttcatggttattaattgtgatatacaatactcaggtgaggagtcaacattcctggatttaaagaatctacagttttgtgcaattgtgatttgagaaactggaaacattgtgccaatggctttgagttcctataacaacggtgttaatttgattaactcactgatatcttttaaaaataatagacatttgcttcctacacctttttgtacatgacctaaagagtatattcccagaagctgctggtcagacacatttagggatgacagttgaagaggacttttttaaagctgcatgtgaatatttcctctgtgtgatttgtctgatgtagaaaagttttcccctcatttttatgagtaaaaacactaagtgggtggcaggggggtgggggttcttatgggagtgtcataccgcggcatgttacctgactggagactagagactatttccattataagccttcagaaacccaaccatgtctttactgtgtctagctttttaaatactgattggttagttttatttttgcccacagtttcttgggcaaaaaggttcttcattttgtctgaaaaagaaattatttgccagaggtatttggagcctctttgaaggggagatagagtgggggtgggttgtggggagggtggagttattggggtttggggttctgtttccatacaacatgtttatttccgattcctcagaagatcctttattatgaataacctcagtgtaatgttaatttcccgtccccatgtcaaaattgtcaccctaagccttttttttttttttttttttttttgggaaaggggctcctcggtcagcccacgcgggagtgcaggggacagtgatctggactcagggcgaaggttggacctcggtgggctcagggaccacctcccaagtagttgagaccacgtgttggccccatcacacggggccgattttaattttggggagagagggggtggtccaggggggtctcaaactctgtgagctcaagcaaggtgcccgcttggtgtctccccaacagtgcggggattttagggggtaaacacactggccacgcagacataccctgtggccttttaaagacggattgtattcaattaaacttcttgggcatcatctgggtgcttcacccttcctgggagggaaaattccagaggcctgtttaaaagccacctagtgtttacacctccctttatggcttccaaatggtatctcatggggggacccagtggctataccttgggaaacaaagann

SEQ ID NO: 30120 - DNA, 380 bp, Homo sapiens
ggtcacggtctcaaagttgtccccgcgagccagcgcctcggcctcggcgtggtgcactgccacgcggtcgaactggtaaaggccgccggagtggtcgaagtgcacgtgggtggccacggcaagcagtggccggcgcgccgcgtcctctttggcctctcggtcctgcaagaggccggaggagtacaggtactccgggaggctgcgcagccccaggcctgtatcgatcaccacgtcctgctcggagccgcgcaccagccagatgttggcacggttgcccccctcgtagaaacgttcttgaatccagaagataccatcgcctagagacttgtgggcgtaccactcgagcgccgacatgctgggcaggggtgcagccaggcgcg

SEQ ID NO: 30121 - DNA, 743 bp, Homo sapiens; identical to SEQ ID NO: 30072
  misc_feature 1, 2, 743: n = A,T,C or G

SEQ ID NO: 30122 - DNA, 380 bp, Homo sapiens
  misc_feature 1, 2: n = A,T,C or G
nncatgcctgtaatcccgacattttgggaggccgaggcaggtggatcatttgagatcaggagtttgagaccagtgtctagcacagagcaggtagcgattataaatatgcctaggagtctgccagcaccatgacaaaaggccacccaggcaccgggcacggcatgcgtgaagccagagagagctcgggagtctccgttttctcatccataaaatgtttactgagggaggtccctacaccaggacctgctggtaggggcaggccacaagagctgggtggacacggggcccaggggcatgtccgcgaggttagcctcttcctccaaaccgcccctacataccttacttacctcggtcaaacttcttgccctccgggtcaatat

SEQ ID NO: 30123 - DNA, 2813 bp, Homo sapiens; identical to SEQ ID NO: 30062
  misc_feature 1, 2260, 2262, 2269, 2279, 2301, 2307, 2325, 2355, 2379,2381, 2382, 2401, 2404, 2409, 2410, 2428, 2435, 2450, 2451,2453, 2455, 2457, 2470, 2472, 2473, 2480, 2481, 2483, 2488,2499, 2501, 2509, 2517, 2523, 2525, 2534, 2536, 2543: n = A,T,C or G
  misc_feature 2550, 2553, 2554, 2555, 2556, 2561, 2563, 2568, 2569, 2570,2575, 2583, 2584, 2591, 2593, 2595, 2599, 2600, 2604, 2608,2618, 2619, 2620, 2622, 2627, 2632, 2645, 2648, 2655, 2661,2669, 2671, 2675, 2682, 2686, 2691, 2707, 2708, 2716: n = A,T,C or G
  misc_feature 2723, 2725, 2728, 2735, 2736, 2737, 2751, 2753, 2767, 2776,2782, 2788, 2790, 2799, 2800, 2806, 2810, 2811, 2812, 2813: n = A,T,C or G

SEQ ID NO: 30124 - DNA, 660 bp, Homo sapiens
  misc_feature 1, 2, 3, 4, 5, 6, 7, 8, 9, 10, 11, 12, 13, 579, 580, 581,646, 647, 648, 649, 650, 651, 652, 653, 654, 655, 656, 657,658, 659, 660: n = A,T,C or G
nnnnnnnnnnnnnaaagagagtttgcaggctccaggaatgggtggggaatggggccctttcctagtttataaggctataaggcatgcttggagcccaggaattctatctttcttgaaaaaaagtattctttgggaaaactgaaggttggaagtcccaccccctccccttaattttaagaagaaggtaaagctctctggcgttctagtgtctccttcttgggaatgtggccctcggggccatggtctcctcacaccattcagaatgagcctatgaccccccaccccagcctgctctggaaatgcaggcagcccatataagaagcctggtcacatgctgttcctcttgcttccccctaagtcagcatctctaggcaggggtctcccctaactccagcttcccaaaaacccccattacctttccttctgaagccatgatgtggcggtgcatcgacttgtacttctagctgaactgcctgttttttaggtttttttttcccaaccatcttaactgattaaagtatcctatcagtccccaaatatcaagaagcccatttccaaatgtgtggcattggccaaaannnaaaaaaaaaaaaaaaaaaaagggggcccccccccggggggacccccaatccccccttttgggggnnnnnnnnnnnnnnn

SEQ ID NO: 30125 - DNA, 409 bp, Homo sapiens; identical to SEQ ID NO: 30067

SEQ ID NO: 30126 - DNA, 409 bp, Homo sapiens; identical to SEQ ID NO: 30067

SEQ ID NO: 30127 - DNA, 630 bp, Homo sapiens
  misc_feature 1, 2, 3, 4, 5, 6, 7, 8, 9, 10, 630: n = A,T,C or G
nnnnnnnnnnctcagaaggagttgagagagcattagcccctccagatgtccaccatgagagactgcttcttgtttccattcttgggtttgtggcaaacctaataggaatatttgttttcaaacatggaggtcatggacattctcatggctctggccacggacacagtcattccctctttaatggtgctctagatcaggcacatggccatgtcgatcattgccatagccatgaagtgaaacatggtgctgcacatagccatgatcatgctcatggacatggacactttcattctcatgatggcccgtccttaaaagaaacaacaggacccagcagacagattttacaaggtgtatttttacatatcctagcagatacacttggaagtattggtgtaattgcttctgccatcatgatgcaaaattttggtttgatgatagcagatcctatctgttcaattcttatagccattcttatagttgtaagtgttattcctcttttaagagaatctgttggaatattaatgcagagaactcctcccctattagaaaatagtctgcctcagtgttatcagagggtacctcggccgcccccgcggtggggctgttgttttccacacaggaaacagctan

SEQ ID NO: 30128 - DNA, 2138 bp, Homo sapiens
  misc_feature 1, 2, 3, 4, 5, 6, 7, 8, 9, 10, 11, 12, 2135, 2136, 2137,2138: n = A,T,C or G
nnnnnnnnnnnncgcaaacaatttgacattgggcattcaaggtgttttcctgttggcaagtttgataaatgcggcccctgtttgtttaaaacgccacctttaaaaaggaattatgttctgcaagccccctaagttgggtttcgtctagggtttttccattcttttacgttgtttaatttcgtctatttatattgtaattttactttttatatttttttttttgttttttgtttttttcttttttttttttttttttttttttttttttttttacttacaaaattaattttattttgcaaaactcaacaaatacacgttcagatctggtttctcttcaaaacatgtgtttgttttttttaacaaacatgcaagttaatttggcatgccaaacatctttctctctagctcgccttggaaaaatttttttcataacacaaacaagggtgcaaatattgtccaaacctatttacatttttaccctctagaattacatacattaatatttattgggaggaaagcaaaactgcaaaacatagtctttggcattcacatttgcttcagcagtataattaaaaccttatatttgttttaaagataaacagtttgaaggaaatttaataaatcttgttttggctctgcaaaggagccactatatcaaagcatttaactggagctgttgagttcctgctggtagaatattacttccagcctatttattagcttgtcttccggtggcccaatacatgcttttttccctctacactgaatgaaagtacaaaaagaaaaccatttcttttctctttttcccccagcatcatgcaaggcaaggcaacaccacaaatacaataactgaatttactttgattatactttagtttcttacacttaaaattattttgtattataatacttacttggttatctaaaatcaacattgttgattttaaacggttataaagccagactttaagaagcatttaaaacaattcatgaactctgtatgaaaggaaataattgcctccagcttattcttttgcatttgaagtaaaagaatttccagtatcatcagtttactagaaaataagacttagggggtccatataatttattcacatctttttatacatcgtaaacaaggataggatacttctgacagtagcctataaagattttttaaaatttatccttcagtatagaataagtgtcaagggagcactttaagcatgattctggtaggtctgttaggagtctattttccagaaaaattttgtaggaaattgttctgattttaaataaactaaattcatagatttgtgttgacagaatatgatttgtgaggtaaagtcactgtattatctccggtctaaagcacaatgtagcatgtgcaaaagaaactaaagagacatgtatttcaaactccaggcagaaaggcagaatataagagtgcatagagaagagagtgcttttcaggtcagatagtgaaggaagacacaatagttacctaaatcaataagctgtaagcaacatataaatatgcaatgccatttcactgaatgtgaacaggatcaattagaaattgtactgtgatatccacatatttttgagaaaaattcccaagccaggcgaatgtggattggaataaagacataggcagtgtataccaccatagcaataatggttagtaagatggtgttaaacatagatcgctcccagggctctaaaacagcacagcagctaatgatttggtattgatagtagagccaggagaaatattccttcacacgcctcaaatccatggttggctccttcaagctgcagtaagtttgtcctaagaaagtccaggtctggttcttcagccttgctccttcgcgaaatgatcctgtgtgggttagttctcctctctgggttgctgtttcctcatctcccagttgggtgtatctccctgcggcttaggtgagcgccgaggctttggctcctccccagctgctgcgagcttcccactgcccccgcgtcctgggagcctcccggagttaggtgttaggccccgccctcaggactcttgctaaaactcaaattctacctggctaattccggtgattaattattgacaaaaggaaaacactcatacgcaaacnnnn

SEQ ID NO: 30129 - DNA, 2095 bp, Homo sapiens
  misc_feature 1, 2, 3, 4, 5, 6, 7, 8, 9, 10, 2094, 2095: n = A,T,C or G
nnnnnnnnnncgtgcgcccttggtccgaaaggcgtgccctcggcgtgggagcaaagctggccccccccgctttgggggggcgaccatttctcacgggtcccacgtagggtatcacccccactttctggggggcttgataattgataaggcccaacccctctctggggtgagactaagtgcaccaaggcggccatcgtgccctaggagacacagttgcagtataagacaggacagaagagaacagaaaaacaaatccaactggaaaaaggggtgggagaaggaagtgtgctaggtacacacatccagggagtaggggaagttcccacacttgaggcctccatcctcttgaaatgaccagaattgatccaagtagagatattcctttcttctggaaataaaccttggggatggctaggcaggatgaaaggaaactttacatggagaatgaatcctacaccctggcccatcattccagcctccaaaactggccacacacccactgaagggttccagtcccaggagaggtgtgaggttctggtgaagagcagcaatagtcaaacatcttcccccaggcttgaatgcttttggccatctctgggttgctgtgcccagatgtagagatgggtggagatggaattgaggtaagggaagagattactcaatctatgacagagacccaatccaattctctgcataatcatgagtcctcttaggtcccacctctgtgaggtgccaggctgctgacccactctctaccccacctgtgtaggaatggccatattccatcgtgtgtgtgcatgcctgcacccacatctgtagtatcttgagtgtcatccatcctagggcccaccaggagggaagcatgccatagtgagttttataaagttatcagcaaaattcagacacttttagttcatcccacacagcaaagtgcatccagagtagttgcttgagccaggtccatctgtccagtcaggtcctgaagaaggcaaacaacccccttcccctagctcctatatcatagaaacaacaggagatattacaaagatcaaggcacttgggagagagtcaacaataacattctaatactacaagcagacttctcatggggaggaagagagggaagaaaaatgggcaaagaggaaaaaggacaatgtatttctgagggtcagaaagagcctactcgacaggatggagttatctggatggaaggagcctgcagcctgaatttagcaaaggaagaagagaactggtggctagaatatccccacaattcccccaagtgtctcagaaccccaccaccttgaacatcagagagaaccaggcagtctcttaggcaaagatgttggtaataaaatccaggaatcgcttagcatactgctccggatggacagtagagatctctgccccagccccatgcttgacagttttggctgcatgagctgctttcttcttggcatcatactgtgtaaggatatcaatgaggcccatgaagtagacctccttctggggggctccttcagcactccggatggcatagacatcaatgaaggactcaaactctcctgggcccaggggccgatgggaatggatgtagcctccgataccctctggggaggtgccataggagcccaccagagcaggaggtccagtcaggctgcagtccccatccacctctgactcatcctcccgcacgggcgcttcctcctctggttcagagccccgaatgatgtcgtggatgcctagcagaaggctgtagtccatgatcttcagctgcactagaaactccacatctctcttcagcttctccagaaatattttcttctcctcttcaccaatatatactttctggttcttgttgagaaagtccatatccttaagggtgggcaattctttaaccttttccttatcgctggcttcccgggacactagggaacccttgaggtcatacttcctgtgcacaggaagacggtggctaaacatattgcgcatcacaagcatgtagctgtcttcgttgtccacattgattcggtaccaggcagggcggccgcccccgcggtgtagctgttctttgcactcacaggaaacagctann

SEQ ID NO: 30130 - DNA, 696 bp, Homo sapiens
  misc_feature 696: n = A,T,C or G
actctgaggccctgatggctctcgccaccatggcgtcactccgcgaccacagcacaccagaaaacactcagcattatggatgacctcatcagctccccaggcaaaaacaaaagtgggaggggacacatgctcattatcagggtgccctcggtgcagctggcgatgttagccaaggagcggctacaggaggtgcgcgacaaactgggtctgcagtatcggtttgagatcatccttgggaacccggccaccgaactcagtgttgcaactcactttgtggcgcgattaaagagttggagaggaaatgaaccagaagagtggatccctcggacataccaagatttagacggtctaccttgtattgtgatattaactggcaaagatcctcttggagaaacctttcccaggtctttgaagtactgtgacctccggttaattgactcaagctatttaactcgcacggccttggagcaggaggtgggtctggcatgctgctatgtctcaaaagaggtcatccggggacccactgttgccctggacctcagcgggaaggagcaggagagagctgctgtcagtgagaatgactccgatgagctgctcatcgacctggagcggccccagagcaacagcagcgctgtcacagggacctcgggttccatcatggagaatggagtgagctcttcagcacagctgacaagn

SEQ ID NO: 30131 - DNA, 2961 bp, Homo sapiens; identical to SEQ ID NO: 24131
  misc_feature 1, 2, 3, 4, 2961: n = A,T,C or G

SEQ ID NO: 30132 - DNA, 2095 bp, Homo sapiens; identical to SEQ ID NO: 30129
  misc_feature 1, 2, 3, 4, 5, 6, 7, 8, 9, 10, 2094, 2095: n = A,T,C or G

SEQ ID NO: 30133 - DNA, 961 bp, Homo sapiens
  misc_feature 961: n = A,T,C or G
agggagtcgacccacgcgtccgtactgaaagccggaccccaggccgccgcgctgccgcccggcctccccgcctgcgcgccgccatgggcagtcccggtttccccttgtaaagatggcggtgagggatcgctgcaacctttagactaatgactgtccgaaacatcgcctccatctgtaatatgggcaccaatgcctctgctctggaaaaagacattggtccagagcagtttccaatcaatgaacactatttcggattggtcaattttggaaacacatgctactgtaactccgtgcttcaggcattgtacttctgccgtccattccgggagaatgtgttggcatacaaggcccagcaaaagaagaaggaaaacttgctgacgtgcctggcggaccttttccacagcattgccacacagaagaagaaggttggcgtcatcccaccaaagaagttcatttcaaggctgagaaaagagaatgatctctttgataactacatgcagcaggatgctcatgaatttttaaattatttgctaaacactattgcggacatccttcaggaggagaagaaacaggaaaaacaaaatggaaaattaaaaaatggcaacatgaacgaacctgcggaaaataataaaccagaactcacctgggtccatgagatttttcagggaacgcttaccaatgaaactcgatgcttgaactgtgaaactgttagtagcaaagatgaagattttcttgacctttctgttgatgtggagcagaatacatccattacccactgtctaagagacttcagcaacacagaaacactgtgtagtgaacaaaaatattattgtgaaacatgctgcagcaaacaagaagcccagaaaaggatgagggtaaaaaagctgcccatgatctttggcctgcacctaaacggtccaattacatggagcagctgcacagatacaccagctgtcttacn

SEQ ID NO: 30134 - DNA, 918 bp, Homo sapiens
  misc_feature 1, 2, 918: n = A,T,C or G
nnacgccgtccgggcctctctgggccgcgccctgagcggacactacggggccggggggcggcggcggcagtggtggcggcggcggcgggggtgggcgccgcagctggcccgggtggatggagttggaggggcggggtgctggcggtgtggcgggggggccggcggcagggcccgggcggagccccggggagtcggcgctgctggacgggtggctgcagcggggcgtgggccggggggccggcggcggggaggccggggcctgcaggcccccggtacgacaagatccggactccggcccggactacgaggcgctgccggctggagccactgtcaccacgcacatggtggcaggcgccgtggcagggatcctggagcactgcgtgatgtaccccatcgactgcgtcaagacccggatgcagagtctacagcctgacccagctgcccgctatcgcaatgtgttggaggccctctggaggattataagaacggagggcctatggaggcccatgagggggctgaacgtcacagcaacaggcgcagggcctgcccacgccctttattttgcctgctacgaaaagttaaaaaagacattgagtgatgtaatccaccctgggggcaatagccatattgccaatggtattgagccttcctgtgctggttcccccactttcccaactctttgggctttgctgctgtcagtgctttccagtctcagcatggtttggagctgaagctttgggctgggataggccagattataagggagggacttccaaacctgatgttctcagacaacgggccgcttcaaccctgccttttcctttggggcacctcaacaaagggttacagtatcctcccttacctaccagcttgacttgttcctctcatctccctggcatcaacttctaatgccctggn

SEQ ID NO: 30135 - DNA, 3503 bp, Homo sapiens
gcttttattgctgttaaatgcaaatattgctatttattttttcctttctgctctggtttggtttggccgacacagatattccagtgcatgtggtacctaatggatatgatagaaattatttccccaacttttataaattgcctaatgtttaccttcaagttcgctggatgatttatttttgaaagccacaaatgtgatttttctggatgaattgtttttcttatatatgcagcaatgtaattttacattgatctgcggggtggtttaaattttatttttacaaggcagtttttcagtcaaattatatatttgatacaatacgctaggatagaccggccacacgtcaggcagccgggacaccggagtgtccccaggaggcctttggggctggggtggcccgtggcttgttccctgcgcctctgggaactggatgagtccttcggcgggactgtgacccgctggacagttaaaaggatttttcatgggcattttcctacacataaggcagttccattaggaggagctttagaagtcgacataatccagacagtggacaatcccagtggcccagacaagccatacgacattttcctgtgacctctctctgacccatctctcacgctcatgagaaaaggaatgtacaataaatagaaacagaaacttcctcagtgctcatgcgcctcacttgcagaacgtgagtatttcatttatgtttgaagcccttccccaaagtgaccgaggagttgcactctagctgccgtgccagcagtctcgtctgctgtgacgcttctcggtgcggatgcagtgcacctgtgactttgtcatgggggtgcccctgttacacacacacacgctgactcttttttatgaggaaaatcttcgactcaaaataattgcactgattttttgacaacttctttttacgatgtcccacttcgcatctgctgtacttgtttgagatgattgtaaatagatttgtggtaggagaagtgacatgaatgcaacacgtggctctgttgtggagacactgcctcgtattcagtattatgtgttaaagttgtgtggacttaactctgttccgccctttagcttcgtgtctgttgaccatttatgaaggacaagctcgcctcattttctttttcttctgaagggaagttctagatcggttactaggagaacatggtctcttggtgcctgatgatttagtcctaagcagactcgttgcagtcttgtgaacactgttgtggtctgtttgattcctcgtcgcttaccgtggctctccaaagcatggtctttgagttccacccagcctgggacagtcccagacgggaggcatctgctccgcctgctactaggacgcaagggcctccttgcatctctgtggtcagagtcatcttaaagccatgaggttactgtcgtgtcaaagctgtcatttgtgcccgttattttgctggagtagcagcgtgtgctgtagcccccgtgtgtcactctgtggtcaggctaccctgtgtcacacccagcaagaagtttttcagccccagaccagtctgtgtgtgtgtccgagtcacaccagtgccattacggtgccctcgcttatgcttctttcagtatgttttgccatgttattgtctaaagtgaatgtattggcttagccaaatcactacagaaggtggttcctaaataccttttagtttaaaaaaaaatgcagataaaggctacctctgaattctcaatagattcatcatgtttgctcttaagtgtagctgtccacactgaaaacagccaatatgttgcctgaataaactgaattgtgaacatctatctgttcagttctggcttgaaaatgtgtgtgccatactgtgacccacgggcagcccctcctcctctactgtgtcaggtggaccagggtcacctctgttctgcgcagctttgagattctaggattctacggccggcacgaatggcatgggagggttctctgcacgggacggcataacggcatgccatccttcaggctggcaggagcctgcgcaggtgtggcaaaatcttgaaacagcctgtgtcctgcctggcttttcactttcctatttaatataagaaagcacttttttttctgctttacctacaaatgggttgaaaatggcctcctctgtcctctcctctcttttatacactctgtaaaatcacaaaggtgcttcaacaccgactgtcatgcaaataatacatttaaaatagttgcatggtttcaaagacaatgcagacgtaattggcctttgactttgggacctcgggttactctcactccctactgcaaaacaaactaagggttgaaagcaaagcattctgttcaaatccagggccctttgtttgaaaagaacacagggcccacagctggtgttttgaagtagaagttcccactagtggcgcagtggaccgtctgatgctgacttgcaggaagtcggtcctgggaggctctgaacacccctccctgtgattaaccactttgctgtcagaaatgtcattttcccatacactgtgctgtgggcccggggcctccttcgcttctttctttgggttccatatgttgcccgatcttgaggttagcgctcgccccaatttctccatgagtttactctgagttgacaggcgatgatctgacagttggaggtgtctgggtgtttggaggtggccccgttctcatgttggctgctcatcagacattgagtttggccccggcggttctactacgtcactacctggaagcaattgcctttaacactctgctgtttggggtttcgatgctttttatgctgcgttgcgtgctttcattccggaagagctaagtgtcctttgcagtctctctgagaatgttttgtaattctgccgccacgctgttctgtgcggaccgacctcaagaggcttgggcccccgtgggtgtcccactgcctgccggcccagggtacaggctgcttgggtccgctgggctggccttgggctgtcagaatctggtccagggtgtttcgaggggacactgcacagccgctcgcccctcgactcagtcatgggagctgcagcacgcagatccaccgcaagcttcctgcacgcgcatctccggaatgctgcgctgggccctcccaccatcttcgcgtttgtgagaatttactcagaagtgagagaactgaagattcctggtgcttttgttaacacgtttctatcttattggttggtgtggaaatgttagatgtgttgttaggtttttaaatgctgtgggtggtatgattaaagggttaagtcctcacctcagcccccagcccccttttggggggtaggaagaggctgagttatctcctatttaaaacctccttggatttaagtagttcagagttaaagctaaaacaccaaatattaactctttcccccaagtgtctccaggaactggacgttggggccattcttattcagttctttctgtagctccaaggtccttaaaatgagtgagttga

SEQ ID NO: 30136 - DNA, 1363 bp, Homo sapiens
  misc_feature 1, 2, 3, 4, 5, 6, 7, 8, 9, 1362, 1363: n = A,T,C or G
nnnnnnnnngcggcttcagtgccagcggggaggtggtacccatgtcctttgcactcgtgctgggctggtgcaacgtcatgtacttcgcccgaggattccagatgctaggccccttcaccatcatgattcagaagatgatttttggcgacctgatgcgattctgctggctgatggctgtggtcatcctgggctttgcttcaggtaatcatctgtccaggaccaggggccatggcagggaagagatgaggaagtctagggggcactggctctggctaaacttggggaggaggagtaatgcagagatcagaggagacctatggtatcagaggatgggacgtcctccagaggtgagaaaaatcgggagtgttagggagaggtggctcttaggatcaagatgaggctcatacaaaactagggaccgtaaaaacccaaagtttggagcactgcagagctggtgatattgagatgaagggaccaggatggacatgcacgcagagcccggggtgggctggtcgtctgcatggttgccatggtaaccctcacccccttgggtggagcagccttctatatcatcttccagacagaggaccccgaggagctaggccacttctacgactaccccatggccctgttcagcaccttcgagctgttccttaccatcatcgatggcccagccaactacaacgtggacctgcccttcatgtacagcatcacctatgctgcctttgccatcatcgccacactgctcatgctcaacctcctcattgccatgatgggcgacactcactggcgagtggcccatgagcgggatgagctgtggagggcccagattgtggccaccacggtgatgctggagcggaagctgcctcgctgctgtggcctcgctcccgggatctgcggcacgggagtatggcctgggagaccgctgtccctcggcgcgctggaagaacaggcaacgatctcaaccggcagcggatccaacgccaccgcacaggccttccacacccggggctcctgaggattcggcccccagactcagtgcaaacaactagagctggcgctgtccctttcagccccagcgtgtccccttcctaattgcgctcaaggtcccgaaagtaccttcccgtagacgtgccaatgggcgcaagcgctccgggcaagggggcccctgccggagaagacctgcgtggcgaccactccaccaggggctccggacgcaccgcgaagctgggatatccagaaccgacgcgtgtcccacctggcccggacctggcccccattaccggggggccaacgacacaaaccgaaacccaggagccatcccggccaggggaaacagcggccccacgccgaacatcctcnn

SEQ ID NO: 30137 - DNA, 502 bp, Homo sapiens
  misc_feature 1, 2, 500, 501, 502: n = A,T,C or G
nnataatggaaatttatgtgattatgggacccacaatatattggatttgaaaaagtatgtcactgatattcaaccctcagagcaaaatgaatcaaacattaataagcttagaaagaaagtaaaccggaagacagaaataatttctggaatgaaccacatgtatgaggataatgataaagatgtggtgcatggcctaaaaaaaggtaatttttttttcaaaacccaagaggataaagaacctatctctgaaaacatagaagtttccaaagagcttcaaatcccagctctttctactagagataatgaaaatcaatgtgactataggacccagaatgtgttgggtttgcaaaagcagatcaccaatatgtaccccatctcccccttcacgccgtccaccccgtcgatgccacgcttgcccttctctccgttgtagaccttgggtatcccggagccattatcaaaaaggatccacttttcacccttggtttcttcgaaccagnnn

SEQ ID NO: 30138 - DNA, 1770 bp, Homo sapiens; identical to SEQ ID NO: 30085
  misc_feature 1, 2, 3, 4, 5, 6, 7, 8, 9, 1691, 1764, 1765, 1766, 1767,1768, 1769, 1770: n = A,T,C or G

SEQ ID NO: 30139 - DNA, 415 bp, Homo sapiens
  misc_feature 414, 415: n = A,T,C or G
ccgggcaggtactgagcccctaccctctggctgcctctttgagtctgatttttgaggccccttctctccaccctatgtgtgcatctgtaatttaaaattgcctttttatctttttctctgctgttcatctgtcttaagtcagtttcattctgaggccagccacagaacctagaagggtagaggcaactttcttcttttcctgccactgcggcagcatatccccacgggcagacacagacgtggaaatgcacgaagatggagcagcagcaggaaagggactggacagccctgggcacccacctgccactcggctaagctctgctcctccctggcctgcagattccctgtcctggtgatctgctcccgaaggtacagggcggcagggggctggtgggctgctggtgccactggtann

SEQ ID NO: 30140 - DNA, 979 bp, Homo sapiens
  misc_feature 979: n = A,T,C or G
acagctttgcaaacaggctaccccagggcttgcccttttttgtgagggtagtcctttgggatcttgaccccttccctggatttttgtctgtgttaatgtcttcatgttgtgtatttttgcacttaatatttgccctgtgtatgttttcccagcttatttacacacaaagcataacagatctgagcataatgagactgcccatctttttagctacagatacctgtaaagttgcatatttgtgggaacctgtattctgagcttaattactgtagcctgggtctttcatttcaagatgatgtgcgaggtgatgccgaccatcagcgaagcagaaggcccccctggaggaggtggaggccatggttccggctccccttctcagcctgatgctgattctcatttgctgaacagttgatggtctccttgcttgaagtaagggtccgccttcttgatacactgagagagactctagaaacgctggccttaacccaggggaagtttcccgaggttggtcatgaaagcgattccttgcagagacagctcaactcggcacttccacaggtatgagtgcttttaacctgaaactatagatttttctcctctaaatgtttttttcttagtgtcatcttttgttaatgtttccgatgagtattttccgtaacgatttgtgaaatgatagtttctggtgtttgtaagtctaatactaagttcctagggattaaacttcttagggagaactaatcgttgtactctaaagtcatgtgaaaattcctcattattttcattcctatctttgggaactgcctaggttcaggaagttctcctgagtttttgaaaaagggctctgaagctacctatctatttggtgcctccattctgttgtcttaagccttttctggctaaacttgtacttcccttggattatctcatgtatttctaatttcctaatgtaattttatagacaaattggattgatttctcn

SEQ ID NO: 30141 - DNA, 2436 bp, Homo sapiens
  misc_feature 2284: n = A,T,C or G
ccaaggccaagctgaagccaggggctcccttgcggcccaaactgaacccgaagaaagcccgtgcctacgggccaggcatcgagcccacaggcaacatggtgaagaagcgggcagagttcactgtggagaccagaagtgctggccagggagaggtgctggtgtactgagttcagatatcttgccccggtgggccatcattggttggctcctgacaacgtgcacgtcaaatgtcgctgcctccaatgccaagctggctttgttttatgactggctgttctttagtccagacaaggatagcattatgaacatagaaccagccatcctggtcatgcaccactccatgaagccccacccagccatcactgccacactcctggacttcatgtgccgcatcattcccaacttctatccaccattggagggccacgtgcggcagggtgtcttttcctccctcaaccacattgtggagaaacgggtcttggcacacctagctcccctgtttgacaaccctaagttggataaggagctgcgggcaatgctgagagagaagtttcctgagttctgcagctcaccctccccacctgtggaagtcaaaattgaggagccagtttccatggagatggacaaccatatgtcggataaggatgagagttgctatgacaatgcagaggcagccttcagtgacgatgaagaggatctcaacagcaaaggaaagaagagggagtttcgcttccaccctatcaaggagacagttgtggaggagccagttgatatcaccccttaccttgaccagttggatgagtccctgagggacaaagtactccagctacagaaggggagtgatacggaggcccagtgtgaggtcatgcaggaaattgtggaccaggtcctggaggaagactttgactcggagcagctgtctgtccttgcttcctgcctacaggagctcttcaaggcccactttcgaggggaggtcctgcctgaggagattactgaggagtccctggaggagtctgtaggaaagcctctgtacctaatatttaggtaagcacgcagctataggagatactgttctaccctccatcctgcctgacagcacacacatgtgctcctgtcctggggtaatgggactcgctttccagggaggaggacatatgctgtgggcacagacagcccatgccacctgagaaactccatgggagagtttgccctgggtaaagatctgatcctctccttccatgccccaccttcaggaacctatgtcagatgcaggaagacaacagcagcttctctctacttctagaccttctctccgagctatatcagaagcagcccaagattggctaccacctgctctactacctgagggccagcaaagccgccgcagggaagatgaacctgtacgagtcatttgcccaggctacccagctgggcgatctgcacacctgcctgatgatggacatgaaggcctgccaggaggacgatgtgcggctcctgtgccacctcacgccctccatctacacagagtttccagatgaaaccttgaggagcggagagctgctgaacatgatcgtggctgttattgactctgcacagctccaggagctggtctgccacgtgatgatgggtaacctggttatgtttcgaaaagactcagttctcaacatactcattcagagcctagactgggagacctttgagcagtattgtgcctggcagctctttctggcccacaatattcccctggagaccataatccccatcctgcagcacctcaaatacaaggagcacccagaggccctgtcctgcctactgcttcaactccgaagagaaaagcccagcgaggagatggtgaagatggtgctgagccggccctgccatcctgacgaccagttcaccaccagcatcctgcggcactggtgcatgaaacatgacgagctgctggcccagcacatcaagtccctgctcatcaagaacaacagcctgcctcgcaagagacagagcctgaggagctctagcagcaagctggcccagctgactctggagcagatcctggagcacttggacaatctgcggctcaacctgaccaacaccaagcagaacttttttagccagacgccaattctccagggcgctgcagcatgtccaagccgagctgtgacgaagcccacaagatgaaattcagtgatctcttctccctggcggagggatatgaggactcttccaccaagcacccaagagcgggaaaagcagtctgtccagctcgaagtcgaaagatggcaanaggccccaaggcgagaaagcgggccacagcgttcagaagggagaaggacgagctaccaggacaaagggcccgcggggcgaaggagggcgcgtcccacccccggggggcccccggggaagggcccgcgcgggacacagggctttgtccccaaa

SEQ ID NO: 30142 - DNA, 1596 bp, Homo sapiens
aggaagagatcccagttctgatacatatgaggaagattctgagttgttgctccagatacgaaatgatgtgcttgactcactgggtattagtcctgacctgcttcctgaggactttgtcaggtacctcctgcttctggttttaattagagccttccccgattacattttcctgtgaattttttcctatccacattagatctgacatgttaaaaccccctacttctaagggaacttctctaatctattatcctcatccccaaatagtgttttcttcctatgggttcttataatgttggtatcaatctcacagcatctagtgcctcctgcctggtgtgacagttacctgtgtgcatgtgcaatttctaatttcccacgctagactgtgagcttcctaaggcaagaatcatgccttgttggtttctgtattcctcatggtgccaaacacagtgccttctacattgcaggcgctgaataaacatttttaaagcaaaatgatgtggatttttaaaataaatatttaagtgctggtaagatgagcatgtatccggggtgcccatgaaatgttcttggggccgtgtggggacagtcgtcattcctcctcctgccacccttttctttcagtgagtcactgtggatggtcccagctgtgtcatcccaaagttcagcagggaaagctgagctgggcctctccaggtgagttttctagaagcatttctcaaactgtgggttacatcaacttgggtgtcttgagctgtaaggaaggaactccggagtcagctgggctacaggggagcttctctaagtcctgcgggaggccagacccagcctgagcttgctgttagctagcggaggcagctgctggtggcccaggtgctcgacaccaggcatccctctcctcccacgaagggtgtgcataatccccttcaacaggaaatgcttcccagaagcctctcaacagcctcccctcctgtcctatcagctagaagcgcctcgctttgtcccaagaccagcaggggacagggaactgtccgagcccgtggctgtgtggaggaaggcgacccccagcacaagattggtttcctttgggaagggaagagggagtgtgttggggtaaggggtagagcagaggaatggtcagggggcaacaaccgctgacagctgcaacaggtgcatggcatctcacagggaggcagggaggtgcgagctcctaagtaatggagcaaaaaaattctattctgtagaatggggagagaaaatgtgacattttaatttttttttgcatttatattcctaattcctacttaaagtgaatatactgccgctgtagatcataaaatgtatcttttccatggccaacaaggggcatcttttataaatgcataataacccagtttgtatcaaagggtatcgacttaagtgaaatttcaacatgctgttactttttccttttaatgtaattctgttttccaaataaatgggggagacaaatggactttgagtaaatttcttagcatatcaaactgcctttcacaaacagatctttgtatggattctaagaagactaggagtaactgggtgcagtggcgtgtgcctata

SEQ ID NO: 30143 - DNA, 6330 bp, Homo sapiens
ggggatccttccgctgggctcagccgtttccggagtctgcgctgcgcccggttccgccattgcggctctcctggcccctggagcctccgcccccgacccgagctctttcgtctgcctgccagtttcctgcgtccccggagaggatcctgctgagcccagcctcccccctccccttctcctcctctcccttggagagcccgggcagccactgccccgcagccccagtgacaggaggagaccataacccccgacagcgccatggcccagattctgccaattcgttttcaggagcatctccagctccagaacctgggtatcaacccagcaaacattggcttcagtaccctgactatggagtctgacaaattcatctgcattagagaaaaagtaggagagcaggcccaggtggtaatcattgatatgaatgacccaagtaatccaattcgaagaccaatttcagcagacagcgccatcatgaatccagctagcaaagtaattgcactgaaagctgggaaaactcttcagatttttaacattgaaatgaaaagtaaaatgaaggctcataccatgactgatgatgtcaccttttggaaatggatctctttgaatacggttgctcttgttacggataatgcagtttatcactggagtatggaaggagagtctcagccagtgaaaatgtttgatcgccattctagccttgcagggtgccagattatcaattaccgtacagatgcaaaacaaaagtggttacttctgactggtatatctgcacagcaaaatcgtgtggtgggagctatgcagctatattctgtagataggaaagtgtctcagcccattgaaggacatgcagctagctttgcacagtttaagatggaaggaaatgcagaagaatcaacgttattttgttttgcagttcggggccaagctggagggaagttacatattattgaagttggcacaccacctacagggaaccagccctttccaaagaaggcagtggatgtcttctttcctccagaagcacaaaatgattttcctgttgcaatgcagatcagtgaaaagcatgatgtggtgttcttgataaccaagtatggttatatccacctctatgatcttgagactggtacctgcatctacatgaatagaatcagtggagaaacaatttttgttactgcacctcatgaagccacagctggaataattggagtaaacagaaagggacaagttctgtcagtgtgtgtggaagaagaaaacataattccttacatcaccaatgttctacaaaatcctgatttggctctgagaatggctgtacgtaataacttagccggtgctgaagaactctttgcccggaaatttaatgctctttttgcccagggaaattactcggaggcagcaaaggtggctgctaatgcaccaaagggaattcttcgtactccagacactatccgtcggttccagagtgtcccagcccagccaggtcaaacttctcctctacttcagtactttggtatccttttggaccagggacagctcaacaaatacgaatccttagagctttgtaggcctgtacttcagcaagggcgaaaacagcttttggagaaatggttaaaagaagataagctggaatgttctgaagaactgggtgatcttgtgaaatctgtggaccctacattggcacttagtgtgtacctaagggctaacgtcccaaataaagtcattcagtgctttgcagaaacaggtcaagtccaaaagattgttttatatgctaaaaaagttggatacactccagattggatatttctgctgagaaatgtaatgcgaatcagtccagatcagggacagcagtttgcccaaatgttagttcaagatgaagagcctcttgctgacatcacacagattgtagatgtctttatggaatacaatctaattcagcagtgtactgcattcttgcttgatgctctgaagaataatcgcccatctgaaggtcctttacagacgcggttacttgagatgaaccttatgcatgcgcctcaagttgcagatgctattctaggcaatcagatgttcacacattatgaccgggctcatattgctcaactgtgtgaaaaggctggcctactgcagcgtgcattagaacatttcactgatttatatgatataaaacgtgcagtggttcacacccatcttcttaaccctgagtggttagtcaactactttggttccttatcagtagaagactccctagaatgtctcagagccatgctgtctgccaacatccgtcagaatctgcagatttgtgttcaggtggcttctaaatatcatgaacaactgtcaactcagtctctgattgaactttttgaatctttcaagagttttgaaggtctcttttattttctgggatccattgttaactttagccaggacccagatgtgcactttaaatatattcaggcagcttgcaagactgggcaaatcaaagaagtagaaagaatctgtagagaaagcaactgctacgatcctgagcgagtcaagaattttcttaaggaagcaaaactaacagatcagctaccacttatcattgtgtgtgatcgatttgactttgtccatgatttggtgctctatttatatagaaataatcttcaaaagtatatagagatatatgtacagaaggtgaatccaagtcgacttcctgtagttattggaggattacttgatgttgactgttctgaagatgtcataaaaaacttgattcttgttgtaagaggtcaattctctactgatgagcttgttgctgaggttgaaaaaagaaacagattgaaactgcttctgccttggctagaggccagaattcatgagggctgtgaggagcctgctactcacaatgccttagccaaaatctacatagacagtaataacaacccggagagatttcttcgtgaaaatccctactatgacagtcgcgttgttggaaagtattgtgagaagagagatccacatctggcctgtgttgcttatgaacgtggccaatgtgatctggaacttattaatgtttgcaatgagaattccctcttcaaaagtctttctcgctacctggtacgtcgaaaggatccagaattgtggggcagcgtgctgctggaaagcaatccttacaggagacccctaattgaccaggttgtacaaacagctttgtctgagactcaggaccctgaagaagtgtcagtaactgtaaaggctttcatgactgcagaccttcctaatgaactcattgaactgctggagaaaattgtccttgataactctgtattcagtgaacacaggaatctgcaaaacctccttatcctcactgcaattaaggctgaccgtacacgtgttatggagtatattaaccgcctggataattatgatgccccagatattgccaatatcgccatcagcaatgagctgtttgaagaagcatttgccattttccggaaatttgatgtcaatacttcagcagttcaggtcttaattgagcatattggaaacttggatcgggcatatgagtttgctgaacgttgcaatgaacctgcggtctggagtcaacttgcaaaagcccagttgcagaaaggaatggtgaaagaagccattgattcttatatcaaagcagatgatccttcctcctacatggaagttgttcaggctgccaatactagtggaaactgggaagaactggtgaagtacttgcagatggcccgtaagaaggctcgagagtcctatgtggagacagaactgatattcgcactggctaaaacaaaccgccttgcagagttagaagaatttatcaatggaccaaataatgctcatatccaacaagttggtgaccgttgttatgatgaaaaaatgtatgatgctgctaagttgttgtacaataatgtttccaattttggacgtttggcatctaccctggttcacctgggtgaatatcaggcagctgttgatggggctaggaaagctaacagtactcgaacatggaaagaggtctgcttcgcctgtgtagatgggaaagaattccgtcttgctcagatgtgtggacttcatattgttgtacatgcagatgaattagaagaacttatcaactactatcaggatcgtggctattttgaagagctgatcaccatgttggaagcagcactgggacttgagcgagctcacatgggaatgtttactgaattagctattctatactctaaatttaagcctcagaaaatgagggagcacctggagctgttctggtctagagtgaatattcccaaggtgctaagagctgcagaacaagctcatctttgggcagaactggtgtttttgtatgacaagtatgaagaatatgataatgccataattaccatgatgaatcatccaactgatgcctggaaagaagggcaattcaaagatatcattaccaaggttgccaatgtggaactatactacagagcaatacagttctacttagaattcaagcctctgttgttaaatgatttgctgatggtgctgtctccacggttggatcacactcgtgcagtcaattatttcagcaaggttaaacagctaccactggtgaaaccgtatttgcgttcagttcagaaccataacaacaaatctgtgaatgaatcattgaacaatctttttattacagaagaagattatcaggctctgcgaacatcaatagatgcttatgacaactttgacaatatctcgcttgctcagcgtttggaaaaacatgaactcattgagttcaggagaattgctgcttatctcttcaaaggcaacaatcgctggaaacagagtgtagagctgtgcaagaaagacagcctttacaaggatgcaatgcagtatgcttctgaatctaaagatactgaattggctgaagaactcctgcagtggtttttgcaggaagaaaaaagagagtgctttggagcttgtctgtttacctgttacgatcttttaaggccagatgtcgtcctagaaactgcatggaggcacaatatcatggattttgccatgccctatttcatccaggtcatgaaggagtacttgacaaaggtggataaattagatgcttcagaatcactgagaaaagaagaagaacaagctacagagacacaacccattgtttatggtcagccccagttgatgctgacagcaggacccagtgttgccgtccctccccaggcaccttttggttatggttataccgcaccaccgtatggacagccacagcctggctttgggtacagcatgtgagatgaagcgctgatcctgtagtcacctattttcgtactgaaacatcgtctttacccacttctcagtttataatgggggaaaacaggcaacgtgttcttgtaacctttatttcatgaaggacttctttttgtttctaactataaacttggatcacctatgttaaaaccttatttcacattccacatcattttagaatttattttcgaaggggaatagtttcaatgttttattcacttgggctttttttcttccccctctttctttaaagaactgctcaatattcaatctgttgtgaagaacctgatttgcactctgtagtgtttaaagaaacaaagaactgctcaatattcaatctcttaaatttagtgtatgtaaacagcttacaaatacgtattgtctaaatgcatttaaatctgttttattcaaagaaaagctaaagcaaaaacactggcatatgaccatgcaagactgtcagtgccaacaaagacaacactaatcagcacatcgtacactggattgcagtgcttcccagattattgaaaaatgttacagacaacttgcctgatttttaaatgagcgtaaaaggccctctaacctatgcaggtttccccattatgcatatagaaaatgctagtatgttttgctcacttcatatgtaacaggtgcccttatgttgtgctgtatcctgtgctttttctgtgggaccattccattcaggagcaaagagcaccatgattccaatcttgtgtgtgtttactaacccttccctgaggtttgtgtatgttggatattgtggtgttttagatcactgagtgtacagaagagagaaattcaaacaaaatattgctgttcttcagttttgtttgtggaatttgaaattactcaaatttaaaataaattactggactgtggaataacataagaatgaagttttcttaaataccactcataacgaaaagaacagtagtttggagttattaggaaacgaggttagggggctgaaggaaagatggggttggactgttaacacttggctttttagtg

SEQ ID NO: 30144 - DNA, 2271 bp, Homo sapiens
  misc_feature 1, 2, 3, 18, 2270, 2271: n = A,T,C or G
nnngaggtcccctgcganagcaggtaactgaagccgtggtcattgagaagatcacctgggcctcctggacaagcgtctgggagatgaagtcattggaatctggccacgaaatgcagacaaggctgatgtcaactgcgcatgtgtgacccacgctggcctgaacattgtcacaggagatgactttgggctggtgaagctctttgattttccatgcacagaaaaatttgccaaacataagcgatacttcggtcactcggctcacgtgacgaacatccgtttctcttatgatgacaagtatgtggtcagcactggaggagacgactgcagtgtatttgtgtggcgatgtctgtaaaatgccagaagcctcttatgttattgctgctgctgctaccagccagcaactgcagaggccatgctgaggtgcctccttgccaccagccgttgggaaatgcctaccatgctgccccggatgcacaagctcaaaacgctgcagaagttacacaactgctcccataatctggactctccaaaaccgtgatgccacgaaggaaggtcaagttttaaaatgttaaagactgcttgcctctgttcctgagactaaacagtatacatactaactacattgacaaagaaatcctatctgataatgtagcccgctgacgaattttgaagcctcggttaccctaaccaatatgtagcttttaatttgcatcaaaacttttacaaagatgttttgctattgtttctatatacttcaagaatgttcatttttacaaataagttgaacaagacagcctaagttagatgcaccgaagtactagaaatatcgctagcctctgttctccagtttagctttcaaaaccaaatgagccatgtataaaggagttgagaaacttaatttttaaatgtttcatttgcagagttttatatccattaagtgcctttgaaagtttccagttgtgtgggctgctgtctcacctcccaccaatttctcctttctccttatggtgctaaaacctcaaagctgaggagggctgcaggacccttagcagattcagtgtgtcacccttgtcctgtgttcacgccaaggcttcctaaatgaaagacatcggttacctgcttatgggaaggtgagcagcaaaggaattgaagttcgggacagggtagaattatgggttttcattgtgtttcatgccaaacccacaaaatccaaaatagaattcaagttaaacaaacttctactacaaaatggaaggggaaaaaggctcaggaaggtctatgagaatgagctgacttatctcgttaaatcttaagataaatgagggtaacccaaggctgcaccttggtgtaccaccctgagtggagttgaggtgacttcatttgattgcttcaggcgaactatataggtcaagtccagattataaaaaaattatctgcagaacaaattgtaaacccaaggaatagctggtaaatcaaaattataaagtgagttagagttccttggagttggttgtatgacggaatatgacttggacaatctttaccagaagccatccgtaagcccctcagtcacactttccatgtagctgaccagtgactacaggatgtggctgacagtgctcactgaaaggagagttggtgcgggactggtggttctgagcacatagacgcctattagtccttctggtcagtgaacgaaaattctagacctacagttactggctacttgcatttgtcagtttagagaaaaggtaaaatgaggcattttcaattgtagaatagactaacatttaccacagaagtgcttcagcattctaaatggattagatcactcattaagctatttttatatgccaatttactaatgccttacatcaatccactaataggttgttgggcccgcagtagagtccctatgcagtcccaattctgttttctgtaaccatgtgactggtgatgcagagtgataaccatgtctgctatcttgtactagactcttcatgctgatcggatctgcattgaaataaacatgttggaagaacaatggctcgattatgatgactgtacacacatatttaagagcaataggtccgggtgtctggaaaacttattgtaacgttatatgggatggactgatttatgttgtcatatatctgctcgtttgaatatgtgggtaacacctgggcccgattttttccaggtataccttcttacctttcgtgccttcaactggtttgcacacacacaaacacacaaacaaaacacaccann

SEQ ID NO: 30145 - DNA, 348 bp, Homo sapiens
tcattgttcacgcctctccttcgcgtatgtgttttctactgttcttgcactgtaaaggcagaggttgcatcgggcccttatgcaaagccccaaataattactggctgactcttctcagggaacatttgctaaccctgtcacaagccataaggttccaccacagattgccctgtggctctctcgttacgtttctgtgtggacgtttccacatggtctgaggcattcatccaagaagagcaggatgtattagtgactgcacagattctgccttggcccacaaagaggacatccagggcagtcctggtcatctgtaataacattgcccagtgagttgaggctgacctgagt

SEQ ID NO: 30146 - DNA, 302 bp, Homo sapiens
cctggtaccatgaaggaagattgaccctgttggtatgcctgtgggggtgggatgtgagtgggactgataaactgatacttttggttcgtatgtaccgggcagctggggagcaggagaagctggaggccaccaatcgctaccacatgcccaaggaaacccgaggacagccagcccgagctgtggatctagtggaggaggaatcaggagccgcctcgtctcaagttgtataaagttgtctccgtgtcccctcctccctctgcccccagtgtttcttctgattttttttcccctttccctccctc

SEQ ID NO: 30147 - DNA, 558 bp, Homo sapiens
  misc_feature 551, 552, 553, 554, 555, 556, 557, 558: n = A,T,C or G
acccccttttttttttttttttttagagacgaagtctcgctctgtcacccagactggagtgcagtgacacgatctcggtgccaccacacctgcctaatttttgtatttttagtaagagacagtgtttcaccatgttagtcagcctgatcttgaacacctgacctcgtgatccacccgcctcaccctcccaaagtgttgggattacaggcgtgagccaccgcctgcacccggcctgaatactctttgagccaatcaaatgttataaattaaaatcacattaactcataatcttattccttaaaatgagtgacttacaggtgtcgtaacaggtgacttctcactgcttggagaatccacttgagaattgagatttggcaaatgtagttggttggcttcaggcattttgtccagaaatggaaatgtcagcgttgcttcgggttctggagattttggctttaccaccttttgtgacagcaccaactccacctttccactcatttcattttctggtttcttctggtctttttcttccgacacatcattcttcagcnnnnnnnn

SEQ ID NO: 30148 - DNA, 647 bp, Homo sapiens
  misc_feature 1, 2, 646, 647: n = A,T,C or G
nnacgcgtccgagaactatgcagtcttgtctgttgggcacattgctgctgctcccagttcttctggcgtttccctgctgagtgaagtgcacgcagcgccatgtcatggttaaagactccacggcctcctgccacctgggagatagttggattatctgtgccttagcatggcctcccaggccctccttacccaccttttcagcacatcccaccctccagtgctgtcacgccagatcctgtttgtgcctcgtgccctgcctcagtctctgctgcctccctgagtgccttctgctcccttcgcaccagcggggccctcttgtccttcagtgccacacaaggacccctccctgagtatcccatccccacggaaacccttgggctcacaggcccacccaccacttgctggctgcgcagccttgggcaggtggctgaccttgctctgcccacccctggagggcgatgtctgtgagggactccagtcgttgtgaagtgtgagccctcaggacctcctgcgtgaagaccgcacaagctgaaggtggaaagtttcacacagcccagcccgtgataacccttcctgtctgccaagagccaggcctaccttgagtgggctttttgtggggttagtgagcctaccccctcaaggaaann

SEQ ID NO: 30149 - DNA, 1338 bp, Homo sapiens
  misc_feature 1, 1338: n = A,T,C or G
nctcccatctgaggcaatcttgcctcccagagagaaattttgcaatgtttggaggatgttgtcacagctagtagcgggtgctctgggatctggtggatagatgccaaggatgctgtcaagcatactgtactgcccagaacagtggcccatagcagggacctgccctatcaaaatatcaggtgtatggaggtggagtcccaacgctagagcagcccttctcagctccaccctgcccggggagggaggaggagctctggtttcagagcagtgccgggattgcctttccccaggatctgtgtcggccatccaggaagaactgtactggccaagcctgggaccacacgtctgcagagatcctgctctgctggcctgagccccaggccttggcctcctgtgcttgggtaaccatggccactgggaaaagcaaggaccgtgtttgactttcttggagaggtgaaagaggtgaaagaacaagttgtgtgctagaaaacttttgaggaattcttatttgtgttagagcagaggaggtcccagataccaagtggcgcctcccaggaaaggctgggagaagaggtggcctggagtaccccgagatcccagcagcgcacacagtggagggatgaggatggatgggtcctaacccctgattttgatgggatgtgttcatgtcctatctcctctcctggacacattaaggggttgggacaagaagagactcctgtgagatcagcagacctcgtgtttaaggagagaatgcctgcctgcaacactcatggagagggacacttcctggcccacctgctaaatactccaaactctgggcaggcgcctgattctcaacacaggacttccttaacagtttccggatcagtgaccaacaccacgttcaggttctgaatgcgacccaccacgagggatggattccaccggccgccctgctgccgatacatgcgcgccagccacgccagtgctggtcgaaaacagtctgggcaccggccccctgtgggggccctcaaccccgctacgagatcccacccgggctgagtatgtcgctatgggcaggccccggcacgctatccccgctactacaagaggcaacccggcgctccgagcacgcgggctactacacgcagccgccgtacgagccccccacgaaacgtcgcacacggcgacgactcccacgactcaggccacacaggcccgacaacgaagaagggcgctccagatcaccccccactcgagggcgacaatacgagcgacaagccacgagagacccaccatacataacacaacgacgaccacgacactcacaccgacaacacgacaacgtacgctacn

SEQ ID NO: 30150 - DNA, 2896 bp, Homo sapiens
ctgctgctgtaatttggcttgctcttccagaagcctctgtttgagctctcgttcagtctccagcttcttctccaggtcattgagcttgtcagagaggctctcggccttcagcttctgctctttgagagcctgctgcagagcgagaatctcagccttgtgctccttcactgccagctccaccacctggcgagactcggtgatccgctgatcggctctcgccctgctctgtttctcggtgtccagcatcctctgcagctctcgaacccgacactcaaactgggatttctcatcacccaggacgctcctccaggcctcccactgccgctctttttctagcagctcatcgtttagggcctccaaatccatgacctgttcctccagcatggtgcacgtggtcttcagagcctccatcgtttgcttctggctggtaagctgcatctctcgttccgtgatctcccggcggagatggtccacttcacttcgcagttgtacaatctcgtcgttggcgccagaagcctcatcgagttgtttggacaagtagaagttttggttgttgagttcagcgttgtcctcggtcagctggtttagctgctcctccaggtctgtgattacagtacagctgttacgaagagcatcaaatttgcgctggatttcatctctatgtgccgtgagtgcctggatctcctcttcggcttctgccgtggtctcttccagctctgtcttcgcctggcgaagctggctctccagggccgcccgtgcagcctgcagggctgtcaactgtgactcgcgctcctgcagggagagctgtagctctgtgagctggcgcttgagctccagtttctgctcctcgtgctctagactgacctcccgcaatcttgtctccagttccagcagccgattcttgtcactgtggtcttggtggctgatcttctccagctgctcctccagttttcggttctgggcctccaacttcccagcctgtgtctccaggtaaaatttctgttgcctgagttcagaaatcatctcttcttgggccttcatgttcctttgggtaaaaagactgctatttgctgcaagtttattggcttcagacagttccacaatcctctgttccagggatctgatcttggaatccatagcattgatcatcgccttctgttcgctgagaattttgcccttctcatgggcctcctcctcgtgtctctgcatcatgttctccagtgtctccttgtcagccaggtctttctttatctgattgtccaacactttaatcttttccctcatagtgctgctctttctgtttcaggtgcacttctaggtgctgggctgagacttgggcctcccgatgtttctcttcgagctccagaattttatcagccatctgctggatctgttgggattttgtctggatgtcatccttcagtctgttttctctacgctccatggtctctagtctctttaccttgttctccagagaatggcggcgttcctcagcttccaccagcttctttctgatgccttcagaagaatcctctcggttctgcagcttctccagctccctctcggctcgctcctttgcctggcggatattctgcagcagctcggtggcctccgtgctggcttttacagccttctccagtttctcttggagctcctgaattttgagctgctgctcagcattgatcttctccagtttcgcatattctcccacttcaggcttcccttgatccttagccttcaacagtttatgctgacattctgtcgctttccgcttgaattcttcagcagcaagccgagactctctcagctcagattcgtagagatcactccgtcttcttgctgagacaagatcctcttccaactgattcatcatcaacctcatttcttccacttgagcctggtactcctgctctttgatttcttggagcttccggctctgctctctgatatcatggagaagctgcagtgctttgtcatcctcctgggacacctccatccgtgcttgctccaaacttcgctttaagctactgcattctgtgatgtaggtagcaaggtcctgctccaggagggatctctgagtctcagaggccttcagctccacctccttctgactaagcacagcctccacctctgacactctccgatgtaaccgggtcatttcctgctccatcttgtgacacttgtcctgagagtcttgtagctctttgcttttgatgagaagtttcttttccatggagctagtcttggcaggggagtccagacccgacacaacagaccaaggcttttccatgtgccaggtactagaccaagtgttttacgtatttcatccatccccgcaaaagtctcagatctaccaagaatccccagtgccttgctgtacgaaaaccccacaaacggcagttcttcacccgagaagcctgaggggctcagctggcacggagaggatgaaacccacgaattcttctctggttcatcaaaattggaggtgtcatcgtcagacttgagggtgggaacgaaggggggaggagagttacgaatgttgttccagtcaattttagagaagaaaggatggcagcaaagaccttcaaacttcagtctctctttctggccgcacaacaagctttgaatcagatcaagaaagtcactgctcactttggggtcatctggaaatttcaaaaaccgctggaaattcataatgttattgaaggttctggcagaggttccctctgcgaagggggatctcccataaatcatctcataggcaatcacgcccactgaccaccagtcacagtccaggccgtaggtgccttttccatccccgttcatcacagtcagcacttcaggagccatgtaatctggggtcccaatcgggagtttggcattcaccatcttgttt

SEQ ID NO: 30151 - DNA, 3383 bp, Homo sapiens
cgctgttgtggccacatcggcgtttgcacctcgctgtttttccttctcgcgcctttttttcgcgcccccttttttttttttcttgggggccccttccccgtgcgcccgccctctttccaggaaaaaagggatcctttcgccgcctgtgttaaagcgtgaccaccttggagccagcagcagatctctgacccagagttcaagacagcgttggcagcataattgggccctctctatggattaccaattagcagtgtggtggtgcgtgcctgtagtccccgctgttcggaaggctgaggtggaagaattgcttgagtttgggaggttgaggctgcagtgagtcgtgattgcaccactgcactcagccagggcgacagagcaagactgcctcaaaacagaaaagaaaacaaaggctaattctcaggctctacaccgaacctactggatcagaatccctggagctagggaccagaatctgtttattggtgattctgttgcatgcttttgcactattctaaaacctatgtgtgcatacacacacacacacacacacactcactctcttagcccttgttaacccttatcgatcctagacaaatgtatggggaacccatcagaggctattctttagggctagtgttcaatttgactgtttttaatatgaaagattatggatcacatttcaaacagatgtgaacgtggagagaataatacgatgtaccgcagtgtgtccatcactgttcttcagaaattcacattgggtcattttgttttagccatctctttccacattatcttctttttgttcttttaaatttcgggggtaatatgaagcaagcctcagctgggcagaccagagtctgttccctttttatatatcccggcgtcttagccgggtactcgtgtctgaatagtgagtaccttttgggcctggcactgggcaggccttcagctgggtcattctctacctggcgatggctttaggtgagttgtggagctcttttcacctttttgcctcatctgaaaatagttcctggccagaagggagaattggtgagaaaagtttcaacattttaagtctcatgctataagtttgcctgtcttttgtctttcaaggtgaagctattaaatttgttctcagctaccctccatgtcctagcagatagaggacttggtctgaccttcagggttgtgatggggcaggttgggaggtgggcggggagtctctgtggtctgggtgctgaggttgacccgatgggcaggtgaagaaaatcaccttctccattccccttgatttctttatcgtgtgccgcacgaggcatgctgaagggacacacacctttccccctttttatttacaaagtagagagctgagaaagacagctcatgttctgttttgttttgtacacattatctttctcaagagatgtgatgtccttaagtaaactgacctgccttcatggcttgtcctgtaatgaatgcgttcaagacagtgttttggggacaggaaagaggcattcttaggtaagcggcggtgggggatggggtggggtggagaggaaacccttctaggaagtagttcaatgaaaaacctaaaaatgcccaaataaacattcgcttacatattatatatcttgggcttctttttatgacagttcattcagggacccagtcagtaaacaggtagttaacttcgtgtaaccaagcaagggttttgtttatcttttttaaagtagaaaaaagtgaggctcaaactctctctttctccttgtcataactattggtttacagtctttatttgtttaaaagtaaagcacattgtatgtatttatttggcaatacatgaggccattaaaaccctgagcctaaggtaccacagttagtctcatttgcctcttgtcctgtgaactccacttagaatgtcattgaacttgggcagacataattctagtgtctgttccaaacgcactgtgtcacagaagctagaattaccattagaggcacaaacccctgagaatacacaagggggcacgcttccagtagatgtgttggggaaggaggagggcagaggggacaggggacaggattcagctttgtggtgggtcctgagggttcctaccaggggtagccaggatctgggaaacagatcagcgactctagtctgaagtggctgcctggttcgggggctgccttcagcaagattcaggcaggagagacggaaatagccaccttccaggcgtgagtcctggagataaaaatggattttaacctaggactgccgggagctggccctccgcggctgctcagactagggctgtgtgtgctggctctcgcctgtttccggtgtctaactggcttgtttctctttatggcttggcttcattccgacctggggtggggccacatccaacccactgcccactggctgtccgtctggcctgccccgcggttccaaccacagtggtgaagcagcgcttgcagatgtacaactcgcagcaccggtcagcaatcagctgcatccggacggtgtggaggaccgaggggttgggggccttctaccggagctacaccacgcagctgaccatgaacatccccttccagtccatccacttcatcacctatgagttcctgcaggagcaggtcaacccccaccggacctacaacccgcagtcccacatcatctcaggcgggctggccggggccctcgccgcgcgccacgacccccctggacgtctgtaagacccttctgaacactcaggagaacgtggccctctcgctggccaacatcagcggccggctgtccgggtatggccaatgccttccggacggtgtaccagctcaacggcctggccggcctacttcaaaggcatccaggcgcgtgtcatctaccagatgccctccaccgccatttcttggtctgtctatgagttcttcaagtactttctcaccaagcgccagctggaaaatcgagctccatactaaaggaagggatcatagaatcttttcttaaagtcattctctgcctgcatccagccccttgccctctcctcacacgtagatcatttttttttttttgcagggtgctgcctatgggccctctgctccccaatgccttagagagaggaggggacggcacggccgctcaccggaaggctgtgtgcggggacatccgaggtggtggtggacaggaaggacttgggaaggggagcgagaaattgctttttctcttcctccctgggcagaatgtagcttttctgcttcactgtggcagcctcctccctggatccttagatcccagaggagggaagaaaatttgcagtggctgaaaaccgttaaaaaaaaaaaatttatgtatataaaagttgcattacccagtgccaaataga

SEQ ID NO: 30152 - DNA, 1003 bp, Homo sapiens
  misc_feature 1, 2, 998, 999, 1000, 1001, 1002, 1003: n = A,T,C or G
nnagctgtttcctgttcatagctgtttcctgtgtaggaaaagaacggccacaactcaggggcatacttgttgcctggtgcaaaaacagcggcgcagcggaggcggaccgcagtcgagtctgcagagtgttgggtctgtagccagcaaattacttcatcatctagattatccattcagttgatcctaattagcaaggataacaagaatcgtccgcactaaagtcccctgcagcgtgaccatgtcgagaccccggaagaggctggctgggacttctggttcagacaagggactatcaggaaaacgcaccaaaactgagaactcaggtgaggcattagctaaagtggaggactccaaccctcagaagacttcagccactaaaaactgtttgaagaatctaagcagccactggctgatgaagtcagagccagagagccgcctagagaaaggtgtagatgtgaagttcagcattgaggatctcaaagcacagcccaaacagacaacatgctgggatggtgttcgtaactaccaggctcggaacttccttagagccatgaagctgggagaagaagccttcttctaccatagcaactgcaaagagccaggcatcgcaggactcatgaagatcgtgaaagaggcttacccagaccacacacagtttgagaaaaacaatccccattatgacccatctagcaaagaggacaaccctaagtggtcatggggatgtcagtttgtcaggatgatgaaacgttcattcccgggtgagctcaatctatcatcagtcaaagactggggccttaaaaaatggtttcttctcgccagagttttatccgcctgacaggagagttgtagatgcctgaggatagaccactagcggcaacgggcgatgcgactttcaaatactttacaaaagtggggcgtgcacaggtgacacggggtaacaaaagacgaattccaaataaaaggccgattactggcagaacctcactaacgcatatagnnnnnn

SEQ ID NO: 30153 - DNA, 1363 bp, Homo sapiens; identical to SEQ ID NO: 30136
  misc_feature 1, 2, 3, 4, 5, 6, 7, 8, 9, 1362, 1363: n = A,T,C or G

SEQ ID NO: 30154 - DNA, 543 bp, Homo sapiens
  misc_feature 540, 541, 542, 543: n = A,T,C or G
ggcggcggagggccgaattcccttttctcaacggcttgatttcagagctgggctggtctctgacaggctcagctggagagggacgggttgggacgcactgtccttttgcccttccccctccgcgagcagaagctgactccgcaggagcgagggtcgcagagctgggggatttcagtctccacatagttttggagccggacttttgaagaatgattcgtgaatccggaatgggtgacagcgtcatcacggcattttattgacagaccatggattcttacagtgcaccagagtcaactcctagtgcatcctcaagacctgaagattactttataggtgccactcctctgcagaaacgattagaatcggtcaggaagcagagttcatttatcctgactccacctcgaaggaaaattccccagtgttcgcagttgcaggaagatgttgaccctcaaaaggttgcattccttttgcataaacagggggctttatattagttaactcccttatataaattctcctattgtaatcttcaaagagtannnn

SEQ ID NO: 30155 - DNA, 460 bp, Homo sapiens
  misc_feature 1, 2, 3, 4, 5, 460: n = A,T,C or G
nnnnncctacatcgccaatcgagtgactgacaagctgacacctattcacgaccgcattttctgctgtcgctcaggttcagctgctgatacccaggcagtagctgatgctgtcacctaccagctcggtttccacagcattgaactgaatgagcctccactggtccacacagcagccagcctctttaaggacatgtgttaccgataccgggaagacctgatggcgggaatcatcatcgcaggctgggaccctcaagaaggagggcaggtgtacccctgattaaaagttttcacggtattaaatccaaaatgatcaaccttctgttggaagtagagaaccgaatagttcttggctacagccgggagggatgtggggttggttggcaagtgtaggctcccgagggcccataaggccggcagcccccgcggtgtagcccttcttttccacacaggaaacagctan

SEQ ID NO: 30156 - DNA, 1014 bp, Homo sapiens
actggctgctcccaccctcgcacgcaccctcaatacccacgggtcaccctggaagccgctacattctggctggtagagtcgtggaccctcttctccttggatcagatgcttgtttttgatgtcggcttgttgtggaccaatgtgagaagatgagcttcctgggaattcattcgtttgcttgtggcactaactctagtcacttagggaaaatatcgttgcacctgacttcatctcatgtggctgtgggtagacctgtgcagttagtcagctcccggcctggaaattaacacaaaggaaaaacctgaccacacaggccttcagggaagctgtggtctgagggtggctggtagaactgccagagagtagggcattttccatggctccagatcaccttctgaaaatgcgactatagcccctgcctattcccggggtccacctggtctgcagaccccataataccaggaagagctgggtgttctggcaccagtgaaacaatacctggttttttattttaaaccagcccatcttccccgctgcagttggaaccgttctacgtggatttgggatcaaccagcaggcctttcctgagctgttactgtgtggagtgggcgctgaggctcctgccattgatgcaaagaccccaatcctgacctgaaggcgctcacaatctctccccaacggcctggtgtgaaacgcagacgcaacgcagcaggcattctccccagtggctgcctccagctctgctgagtcttggattttttcagccgctcctggtgattggagaacacctccagactggccgtgagggccgcaagggcagggccgtgcctgtgctgtctctgtgtcacgtcttccagccgtgcagacctcagcactgtttgccccaggactgcagctcgctcgtctttctaagccagcacttctcaagtggggtccccatgttgttagtaatatgggttctcagctctgccccagacctgtgctgggtcgactctagagcgtgcagcttgtcac

SEQ ID NO: 30157 - DNA, 1730 bp, Homo sapiens
ccggtgggaactactcgacccacagagccgatcgcggagcggattctgcttttaggagtacccgccaacaagcgggaccgagcaggaatccgtatctgggaacaggatgcccctgtcccgctggttgagatctgtgggggtcttcctgctgccagccccctactgggcaccccgggagaggtggctgggttccctacggcggccctccctggtgcacgggtacccagtcctggcctggcacagtgcccgctgctggtgccaagcgtggacagaggaacctcgagccctttgctcctccctcagaatgaacggagaccagaattcagatgtttatgcccaagaaaagcaggatttcgttcagcacttctcccagatcgttagggtgctgactgaggatgagatggggcacccagagataggagatgctattgcccggctcaaggaggtcctggagtacaatgccattggaggcaagtataaccggggtttgacggtggtagtagcattccgggagctggtggagccaaggaaacaggatgctgatagtctccagcgggcctggactgtgggctggtgtgtggaactggtgagaggggtagggcaagggagaagaagtttcctgcaatggtggtgacttgggtgggaaggggagggatgggcctgaaacttatttctgggttgtgtttgtgtttctttgtctctagtgtgctacggccaaatttagagtgaatcactccaagggttaactaatgtggggagcctcttttggcattaggtatgaagatggctgtagatagttgtagacagtgtggactggggcctcgagactgggcagagaggtgtcagctctttcctctgagcagaggatggctataaaagtgacagaggaggccgggcatggtggctgacacctgcaatcccagcactttgggaggccaagggggaggatcatctgagttctggagttcgagaccagcctgaccaacatggagaaaccccatctcttactgaaaatacaaagattagctgggtatggtggtgtttgcctgtagtctcagctgcttgggaggcagggagaattgcttgaacttgggaggtggagactgtggtgagccgggatcgcatcactgcactccagcctggtcaacagagtgagaccctgtctcaaaaaatgaataaataaaaataaataaaataaatttcatctttgtcacacatggaaattgccagctgtgttatcagtgtattaactgattaaagttttatttttaatgttactcaagcaaaaaatatgaatggcattttagattgacaatatttagctatttctgagcaactctgtgtgatttatacaggaaaaaagggataaacattataagttttctttaaggtctttgttctcaatgactaatattaaaataaactttttgtagtcttggacagtaaagcaccaaaaccagaagacattgatgaggaagatgatgatgttctccatgtctgtaaaactttggaaccacatagctgatttgttaaatctagtccatgccagcttccaaaaaccaaacttttagttagcttcattctttgatgcctcatcataaattttctacaagatctggaacatcagtcgacgcggccgcgaatttagtagtagtagacggccgctctagaggatccaagcttacgtacgcgtgcatgcgacgtcatagctcttctatagtgtcgcctaa

SEQ ID NO: 30158 - DNA, 406 bp, Homo sapiens
catctacttcccagggcttctgtgaagcatccaccatataacatagatgagagggtgcgtgggacatgggtcaatacacgacttccctccctcatgtgcctgattctaaacagagcagcccaaatctgccatgacaagggtgacagagaggtagctttggtgacttgacctggagcaaccatgtgtggataacatgttgcttagggcctcttctaacctcagggggtgaaagtgggaatgtacctggcgctcttcgtggtgggcacggtgggcaacacggtgacggcgttcacgctggcgcggaagaagtcgctgcagagcctgcagagcacggtgcattaccacctgggcagcctggcgctgtccgacctgctcaccctgctgctggccatgcccgtggagctgt

SEQ ID NO: 30159 - DNA, 1178 bp, Homo sapiens
  misc_feature 1, 2, 1107, 1134, 1144, 1167, 1168, 1169, 1170, 1171, 1172,1173, 1174, 1175, 1176, 1177, 1178: n = A,T,C or G
nnctaatgataaacaaaagaaggtaattacatgtagaaaatcaaagtgaatgggaatgtggttcaggttacttgtttttgaccagccttgtttcttcagttactgtaggccttttgagacctgtctccatctagtattttactgagaaacaaattggtgtggcatttgctatgtaaattactcatctaggaagatcttcctgttcctgagcttgctttctgttctttcctttggttcccatctgtagctgatgtgttctaccttgggcctgagtttttcttatgctttggttttgcatgcgtcacataacccacagccgttggtaggaatgaggtcgaaaatcttcatcagtatttgaggacttggttcttaagatatattcaagaatgctttccctttgcccaaaggtgaaagtatcattaaagttgtcttagtatggtaaggatttttttttctctgcttggcagttaagagttcaacatggggctgggcggggtggttcacgcctgtaatcccagcactttgggaggcttaggcaggcgttcgagaccagcctgggcaacatggcgaaaccctgtctctacccaaaatacaaaaattggccaggcatagtgctgcatgcctgtggtcccagctatgcaggaggctgaggcggggcaatggctggaggccaggaagtggaggctgtggtgagccgtgattgtatcactgcactccagcctgggtgacaggagaccctgtctcaaaatcaaaggagttcaacatagtatctacctgattggaaaaaatgcaggggcagtttctttggaacaggctctgttgcatttggtgagcaacttaacttttggaaacacaggggcttacaccagtactttctccagtgacactattgctgtctcctctggtaacaatctttgtgtttcaggtagatgacattaatgctgataagaatatctcttctgcacagattgttggtcctggacccaagccagaagcctctgcaaagcttccttccagacctggcagataactatgacaactttgtcctaccagagttgccatctgtgccagacacactaccaactggcatctgctgggtgccagcancttcaggcatctggaaggacattggantttggatggntcttttcccgggggtttttgaannnnnnnnnnnn

SEQ ID NO: 30160 - DNA, 556 bp, Homo sapiens
  misc_feature 556: n = A,T,C or G
acatcggtcctgcaccgggcctcacgggcagggagccccgctttaatcaggcttccacacctcacggagggcttcttccagcttctgcctgtaggctgtgtagcgcctcttcaggttctgcagctgttcatcttcttccttgtccaagatgcgcaagaaattctgtagttctggaaggctgaaggcttcccactctccaatttcatgttcacgaagaacaaaactaagtgtgtctgttctgggccctgctaccaaacgcaggtagagtggatgttcccggtctgagagcttgcaggcgtagacttggtcttccctgtgacaacgcttataaagtgcaaacttggcagggctctcagtcacgagaaactttttgagcagggcctcgatcacttccccgacagtgtttgtgctgctgatatgaagtgtattcatacagccattgctactgggagagagttttccagaatttggagaagtctgtggaggtttgcagagttccatctggaacaaggaaggccccggggtgtggccgttcttttacacacaggaaacagcn

SEQ ID NO: 30161 - DNA, 1212 bp, Homo sapiens
agcatgagtggatacgaccaagttttacaggaaaactccagtgattttcaatcaaacattgcataggtaaatattttctcaaaaaatataaattcccaatagcaaatactgatatgttgtaataatgctttctatagcagtcaatggctctaacttaactccatggaggctgccatttgggcacagtgagttgcctttagtccagcttggttgtctcacttcctgcccaccatgaataggaaaagcaagagacttcccctgtgctcccttttctcaaatgccattcgagggacacattgtgaatgtttatgttaaattttttttaaaaatgccttgtttagctttaaaaatacgaagtaattttgcaatttttgaaaaacactagttttcctttaaacttaatttttcatgttgatcctgaagaatccgttaaaatggtagcacaagagtctggcaagttggtactgcagagaaaaggggttaatatgaggcttgtttggagtcgggattcccctttcccaaacatgcgtctcgccacttggacagcagccatttgtactcgtatactttttaaactttttcttggaatactatattttatttgactggtagtctgatattactcctaacttgtcaaattgatctctttgcaggtaaccaaggagcagtgaacagcagctactacagtagtggaagccgtgcatctatgggcgtgaacggaatgggagggttgtctagcatgtccagtatgagtggtggatggggaatgtaattgatcgatcctgatcactgactcttggtcaacctttttttttttttttttctttaagaaaacttcagtttaacagtttctgcaatacaagcttgtgatttatgcttactctaagtggaaatcaggattgttatgaagacttaaggcccagtatttttgaatacaatactcatctaggatgtaacagtgaagctgagtaaactataactgttaaacttaagttccagcttttccacaggtaagtaagaggatgtacttaaagcaggaaagggtatcgaggtaaaaggacgtgatttattgtaagttgtggcctgttgcaggttaatttggacactgtgttggtggctgttggaaagaattgctttatttttgtggtaacaaattagggggcgggttcaaattaaagagggacattgggggtgggaatcagtgcctaaaca

SEQ ID NO: 30162 - DNA, 1014 bp, Homo sapiens; identical to SEQ ID NO: 30156

SEQ ID NO: 30163 - DNA, 1484 bp, Homo sapiens
  misc_feature 1, 2, 7, 8, 17, 1484: n = A,T,C or G
nnaatcnnggacgagcntgggaggcagaggttgtgatgagccgagaccatgccactgcactccagcctgggcaacagagcgagactccatctcaaaaaatagataaataaaataaatttcttccatgtctttttatagcttgacagctcatttctttttagcacagaataacatcccttcattgcacacactgtgtaaagaatgactcctttgagttagggatagatatgtaaacctcttcagccctttgttttggtatgaaaaggtgcgataatttacctcaagaggatttacatcaattcgtgctgttagagaccttagtaacttgcatagcatttagtatgctttgaaaagttacctttatgaataaggtatgtcaagtgtctgtcatgtttcttatgcagattgacctttgcctgcattatatcttacatatttccctttttatgtaattttttttttcatatccaacatttcctctgactcttcataataaaatgttaaagcacacagctttcattatatgtatttttttggccatagaactggaaaactagatgacatttcctagtcagggagtttctctatatactgctgtcatataactgcaggcatgaaattatttcagactcccctcctaattcttcatctttatagtaatgtgcatttacctgaagctgatatttcaaaatttagtgattctcaacatattatttttcctattgtgtgtcccttctgttttttctgtagttcataagcagtaattctttagaatttcactgacaattttgtgtaattgtggttgttcattaacttgcctgttagattttcacaggttactaaagtgttttatttatttttgtaatgatttacagatgatggtttttcagtatatattatgcaatagaaccaccatgcacaaattgttaatgctgcaaaatgcacattctacatgggtgtaagtagttttataacaagtactcacatttgcaatttgtaaatattcaaaattttattaaattcttccgaattttttctttcagtgttttgtttgcaattatgaattgtcatttttaaatattttttattagataagcttgagctgtgccttaccttttgtgtgtaataattatgtactaaataatgcattactatttgtttatcttcatatatgagactaccatatagctatgccaatttacgtgttccttggagtggtggtggaaaaatacctcttctttcagagtttatgtggatttacatagtatgagtgttttagctatagggtgttttaaactgtgcttaaaataatttgttacatgttttgttactgtgttactttattgaggacagctagtccctttgtgttgttaaacgtttaaagacagttgagaagcttcataactctgttcattgtaaatcttagctttcttgtaatatgtattttaataaaatatttaccttgcaactctaaaaagtcgacn

SEQ ID NO: 30164 - DNA, 521 bp, Homo sapiens
  misc_feature 1, 2, 519, 520, 521: n = A,T,C or G
nnaggggagtcgacccacgcgtccgccagtaatacgatcatacttcaaacgtgctgatccattctatgatgagcaggaaaatcacagtctcattggggtggccaatgtcttcctcgagtcacttttctatgatgtgaagttacaatacgctgttcccatcatcaaccagaaaggagaggtggcaggtcggctgcacgtggaggtgatgcgactcagtggtgatgttggggagaggatcgcaggaggcgatgaggtggcagaggtctcctttgagaaggagacccaggagaacaaactggtgtgcatggttaaaatcctgcaagctactgggttgccacagcatctgtcccactttgtgttctgcaaatacagcttctgggatcaacaggagccggtgattgtcgctcctgaagtggacacctcctcctcttccgtcagcaaggagccgcactgcatggttgtctttgatcattgcaatgagttttctgttaacatcaccgaagactttatcgagcatcnnn

SEQ ID NO: 30165 - DNA, 1675 bp, Homo sapiens
  misc_feature 1, 2, 1669, 1670, 1671, 1672, 1673, 1674, 1675: n = A,T,C or G
nngcgtccggtccgcggcagggccggaaggagtgcagcggctgccacggagctcgcagctgcggcttctgaggagtaagcggcgcggtagcgaaggccgccgaacctgcctggctagccggcgacttgagtgacgactcttttgaaacagatggtcaccatgtttagatattagcagtcccatatatgcatgtctgcatttgaaaatggaagagggaaacaacaatgaagaggtaattcacttgaacaactttcactgccatcggggacaagagtggatcaatctccgagatgggcccatcaccatatctgactcctcagatgaggaaaggattccaatgctggtcaccccagctcctcagcagcatgaagaagaggacctggatgatgatgtcatcctgacagaagatgattctgaggatgactacggtgaatttctggatcttgggcctcctggaatctctgaattcactaagccaagtggccaaacagaaagagaacccaagcctggaccgagtcataaccaagcagcaaatgacattgtcaaccccagatcagagcagaaagtcatcatcttggaagaaggtagccttctttacacagaaagcgatcctttggaaactcagaaccagtcatccgaagactcagagacagagctgttatcaaatctaggagagtcagctgctctagcagatgatcaggccatcgaagaagactgctggttagatcatccttacttccagtctctgaaccaacagccccgtgaaataacaaaccaggtcgttcctcaggaacggcagcctgaagcagaactgggccgcttgttgtttcagcatgaattcccagggcccgcttttccaaggccggaaccccagcaaggtgggatttcaggcccctcttctcctcagcctgcccatcctctaggagagtttgaagaccagcagttagcaagtgatgatgaagagccaggtccagcctttccaatgcaagaatctcaagagcccaatttggaaaacatttgggggcaagaagctgcagaggtagatcaagagctcgttgaactactagtgaaagaaacggaagcaagatttccagatgtagcaaatgggtttattgaggaaataattcattttaagaattattatgatctgaatgtactttgtaattttcttctggaaaacccagattatccaaagagagaagacagaatcattataaatcccagtagcagtctgctggccagccaagatgagacaaagttgcctaaaatagacttttttgactattctaaattgacccctcttgaccagcgctgcttcatccaagctgctgacctcctcatggccgacttcaaagtgctcagtagtcaggacatcaagtgggccctgcacgagctcaaaggacactatgcaatcacccgaaaggccttgtctggatgccattaaaaaatgggcaggagctgtcaccagaaaccagtggaaaaaggagcaagagaaaccaattgaaccagtgttctttcctttggtttccagtttgaccaggcggcgttcccactctaaacagagggtttgctttctcggaaaatagggacgcgattgttgggcctatgaacggcggggctcctctccgcgtggccacgagcgcggggttcttgtacggcaatcatgagnnnnnnn

SEQ ID NO: 30166 - DNA, 3281 bp, Homo sapiens; identical to SEQ ID NO: 21078
  misc_feature 1, 2, 3280, 3281: n = A,T,C or G

SEQ ID NO: 30167 - DNA, 1041 bp, Homo sapiens
  misc_feature 1, 2: n = A,T,C or G
nncgaacacgaggcaggaacggcagaatagtccttatcagtggcagaagatccttctgtagtatattttcagtgctgccgtatcgcgacagtacccaagtcggggacttgaagttggacggaggaagacaatcaactggtgcagtgagtttgaaagagatcattggtctggaaggtgtggagctgggtgctgatgggaagactgtttcctatacccaatttctgttacccacaaatgcctttggagcccggagaaataccatagactccacctcctctttctcccagttccgtaacctgagccaccgcagcctctccataggccgggcaagcggcacccaggggagcctcgacacaggtagtgacctgggagactttatggactatgacccaaatctcttggatgacccccagtggccttgtggcaaacacaaacgcgttctgatcttcccttcctacatgacaacagtgattgactacgtgaagccctcggatctcaagaaggacatgaacgagaccttcaaggagaagtttcctcacattaagctgacactcagcaaaattaggagtctgaaacgagagatgcggaagcttgcgcaggaggactgtggccttgaggagcccacggtggccatggccttcgtctactttgaaaagctcgccctcaaggggaaactcaacaaacagaaccggaagctgtgtgctggggcatgtgtgctgttagcagccaaaattggaagtgacctcaaaaaacacgaagtcaagcatttaattgacaactgcaagaattcggctgaacagcggaaatggtgccttgaatcccggtaggctgatcgcctccattgcggcgaagtgtcctttaaacgggggcgagaccacatgcccggaaacacgggggattttctcggggggccatcaaatggggaaagacacaaggttccccagggcgcacaaactcactggtgtccaacaactccagagggagagctgtcatatttcctcctctttttattttcactgctgatataccatcctatttgag

SEQ ID NO: 30168 - DNA, 1516 bp, Homo sapiens
  misc_feature 1, 2, 3, 1515, 1516: n = A,T,C or G
nnngaaagtggggtgaggttccctggttgagtaggttggcagacactaaagcgagctacacgatcatcttgctacaggcctctcacaaccttcagcatgccagcatgggtcaggcctcttcacagggccaagaaactcatagcatctcccacattactctcatcacttctccaaggtgctttgcaagactggaattccttggacaccattggagaagccccgctttttctggaacagcggcaaccaagaggccttgcagccctggaagtgggtcagggcccttggtggtcacctttttctccccagcagctctgcataggtggcctgcttggcagtgggacatcaggggaccggtcctgctttgagatggcagggtccctgttctgagagctctccagcctgagggcattgagctgaggctccaccctgagctctcctgcagggtggagggcattgtttcccagcacccaggcagtgtcttgctggtgtgtcgtgagtgctggatgtccaagtccctgctggccacggagggctcctgcctctcttcttcagcgccacaaaattacatggaggccagctggtttgtgaggagatgtttattttttaattctttgtttaccgaacgtttactgagcatctaccctgtgccagccctactcgtacgctctgtctccaaagatgaaaaaggacttctctgccctcaagggaaccccacagtatcttagaggagacaatcatgtcggtgagatggtgtggtgatgaagcctgctgggtatacagctcagggaaagtcatcgatgatggctcaggctcagcctgggcacgccccagaggagagagatggagtggggcctcaaagggcaggtttaggcagaaaagaaaaagggcattccagctggggcatgtgcaaaggcagcacgtaatgtgtaagttctagatcgtcagggaggaagggtcagttgggtgcctgtttttctgtttttagtcctttaaaatgagtagaagcaacctgttaccctggaaagagcactggacatagacctagtgctgcgtgatgttgagcacgtttcttcttccctttgagtcccagtttcccttttggttacagggggatagtagcccccagggatcatgtgaaagtgagaaagcccttttcacactgtggagcggtgcagatgtggggaaacctcaaagatggtttgcccattttaaatcctttcatctctcatctctctttcttctctcccttctgccctgacgtagcatggttgggtgggtgaaggcaagaagaactgccccgggaagaaggagcagcgacaggggactgaggaatccgagccacgaagtgggaatggccgaggactgcccaaagtgcgaactggtgagaggacagaaccggaggagaacaaacaaagtgccacccgaagaccacgaaaagaggggacgcccaagcgaaacggaagagagcggagagagaaaaacggacatcgagccgcaagagaagaagagagaacnn

SEQ ID NO: 30169 - DNA, 246 bp, Homo sapiens
acttactataaaaaataaggttaccaaaggctcagtggtcaggtgtccccccaccaaccaactggggcagaatgctagtgggcatcctcactgggcgccaccatcggtcccggagtcccagtgatgctctgtgccatagagcccccataacttcactactacgtgatagtaaatccccggcaaaaaccagcagcgccttgcaagcccacgccaccccaagcatcccaggactcttctgaaacgact

SEQ ID NO: 30170 - DNA, 607 bp, Homo sapiens
  misc_feature 1, 2, 3, 4, 5: n = A,T,C or G
nnnnnctgcatgtatgtatattttctcaaggcatctgtcctgcactagactttggcttgtctttccaggccagcttccagaggatgctttggcagttttccctctgggtaaccaagcaggctgcagccagcagatggcactgcagcagaaaggggcagagtccctttaggcccttgacaagcacggcggattagtaaccgtataatttaaccctccagttagccttggaggactcggtgtcgcacttccgcccgaactctaataaagcgggccgagttgtgtgcaattaaggatttcagtatgcaaatctgaatctgtacttttgtctcctccaccccacccccatcattagactggcaatgtcttttgtcacgttgtcaaagtgtcctcagagaagcggtgtctagatatcgccgatttctggttaaagtggctgaagtgatcccagcattaattaaatgcaggagaatcgagattctcctgatagtttaaggaaaagaaaaattcacacaagcaaacgggcaaccctttgaatgttttccgacgacgtggtgctttaggatctgaaagatgcgacttggttgttgttgttgttgttgttgttgtt

SEQ ID NO: 30171 - DNA, 359 bp, Homo sapiens
  misc_feature 1, 2, 3, 4, 5, 6, 7, 8, 9, 10, 11, 12, 13, 14, 15, 16, 17,18, 19, 20, 21, 22, 23, 92, 93, 94, 95, 96, 97, 98, 99,100, 101, 102, 103, 104, 105, 106, 107, 108, 109, 110, 111,112, 113, 114, 115, 116, 117, 118, 119, 120, 121, 122, 123: n = A,T,C or G
  misc_feature 124, 125, 126, 127, 128, 129, 130, 131, 132, 133, 134, 135,136, 137, 138: n = A,T,C or G
nnnnnnnnnnnnnnnnnnnnnnnaaaaaggggaaaaaaaaatttcccccccccggggggccccccttttttaaaagggccgggggcaaaacnnnnnnnnnnnnnnnnnnnnnnnnnnnnnnnnnnnnnnnnnnnnnnngtttatatatatttggattaagaaaatgaatcacaagccatataaaattgagataaattggaaaactctaaggtaagtacaatgtcttcataactccagtatttttcatttttaccttcaactctactttttctgataaaatatatcaggtattttaaccatatttcagccaatgtttgcatagtatttcttattccaatcataactttcatcttttttgt

SEQ ID NO: 30172 - DNA, 1148 bp, Homo sapiens
  misc_feature 1, 1148: n = A,T,C or G
naggctaggtacgaggctgggtgttgcggatgtgtgtggtggcggcggccgaagagcttgtgtgcggagctgagaggcctatggatgaggaggacgcggcggccccggtttgttctcatgaacaagatggatgacctcaacctgcactaccggtttctgaattggcgccggcggatccgggagattcgagaggtccgagctttccgatatcaggagaggttcaaacatatccttgtagatggagatactttaagttatcatggaaactctggtgaagttggctgctacgtggcttctcgacccctgaccaaggacagcaattattttgaggtgtctattgtggacagtggagtccggggcaccattgctgtggggctggtccctcagtactacagcttggatcaccagcctggctggttgcctgactctgtagcctaccatgctgatgatggcaagctgtacaatggccgagccaagggccgccagtttgggtcaaagtgcaactccggggaccggattggctgtggcattgagcctgtgtcctttgatgtgcagaccgcccagatcttcttcaccaaaaatgggaagcgggtgggctctaccatcatgcccatgtccccagatggactgttcccagcagtgggcatgcactccctgggtgaggaggtgcggctgcacctcaacgctgagctgggccgtgaggacgacagcgtcatgatggtgcgacagtacgaggattgaccggggccggtaacatgatgtcagagctgcgggactctgctggcatacttagggaacgcgcaaaagcatctgggatctggggccggccaagcccaggaaccaatcaggacccgaaccacataatggacgggggaaccgggacgcggtagacaaacgtgacactgacccgtgtgctggcccggagaagagatatccacagagagtgggcacccgggagcgagggaaaaaaggaccgggcgactagacgacagccaggagacacacaccacgaaagagggagatacgcacccttgtgcacgaacactcagcgaaaagaggcagcagaagcaccggcgcaaacgacacagggcggcaactctagagcaagataagcagagcaaaagagttacccagcacagcgcaccgcn

SEQ ID NO: 30173 - DNA, 785 bp, Homo sapiens
  misc_feature 762, 783, 784, 785: n = A,T,C or G
gcccgcgcggccgggcggaacgctagcggtgttggcgcggagtggaccccggctgcggcccctggcaatggcgccaccatcggtcccggagtcccagtgatgctctgtgccatagagcccccataacttcactactacgtgatagtaaatccccggcaaaaaccagcagcgccttgcaagcccacgccaccccaagcatcccaggactcttctgaaacgactccgggctaccagatcggccgtccagctggaatcaaccgatggaggctccgctgcaaactggaatggtgcttggcgtgatgatcggggccggagtggcggtggtggtcacggccgtgctcatcctcctggtggtgcggaggctgcgagtgccaaaaaccccagccccggatggcccccggtatcggttccggaagagggacaaagtgctcttctatggccggaagattatgcggaaggtgtcacaatccacctcctccctcgtggatacctctgtctccgccacctcccggccacgcatgaggaagaaactgaagatgctcaacattgccaagaagatcctgcgcatccagaaagagacgcccacgctgcagcggaaggagcccccgcccgcagtgctagaagctgacctgaccgagggcgacctggctaactcccatctgccctatgaagtgctttatatgctcaagaacgtccgggtgctgggccacttagaaaagacaataattttttatttttgccgccccctcctccccccccggntgggccagggtgactacgtannn

SEQ ID NO: 30174 - DNA, 273 bp, Homo sapiens
  misc_feature 1, 2, 3, 4: n = A,T,C or G
nnnnactcaggaggaatgcctgaagacagtaggtgaggcatacttagtgttcatttctacgccagcttgctggagtcatctcaggtcagcaggcccaccacagggggtaatgtctgccttgctctgggaatgaggtgctttccagccttggtaacaacctccacctgtctccctttgagcccttgcagaatgaagtgtttgcatcgcgacatcaggaccagaacagtgtggcctgcattgaggagaagtgctatgtgctgacttttgccgagt

SEQ ID NO: 30175 - DNA, 1911 bp, Homo sapiens
gtccgcgcccgcctcggctcccgcagcgctagtgtgtccgcctagttcagtgtgcgtggagattaggtccaagcgcccgcccagaggcaggcagtccgcgagcccagccgccgctgtcgccgccagtagcagccttcgccagcagcgccgcggcggaaccgggcgcaggggagcgagcccggccccgccagcccagcccagcccagccctactccctccccacgccagggcagcagccgttgctcagagagaaggtggaggaagaaatccagaccctagcacgcgcgcaccatcatggaccattatgattctcagcaaaccaacgattacatgcagccagaagaggactgggaccgggacctgctcctggacccggcctgggagaagcagcagagaaagacattcacggcatggtgtaactcccacctccggaaggcggggacacagatcgagaacatcgaagaggacttccgggatggcctgaagctcatgctgctgctggaggtcatctcaggtgaacgcttggccaagccagagcgaggcaagatgagagtgcacaagatctccaacgtcaacaaggccctggatttcatagccagcaaaggcgtcaaactggtgtccatcggagccgaagaaatcgtggatgggaatgtgaagatgaccctgggcatgatctggaccatcatcctgcgctttgccatccaggacatctccgtggaagagacttcagccaaggaagggctgctcctgtggtgtcagagaaagacagccccttacaaaaatgtcaacatccagaacttccacataagctggaaggatggcctcggcttctgtgctttgatccaccgacaccggcctgagctgattgactacgggaagctgcggaaggatgatccactcacaaatctgaatacggcttttgacgtggcagagaagtacctggacatccccaagatgctggatgccgaagacatcgttggaactgcccgaccggatgagaaagccatcatgacttacgtgtctagcttctaccacgccttctctggagcccagaaggcggagacagcagccaatcgcatctgcaaggtgttggccgtcaaccaggagaacgagcagcttatggaagactacgagaagctggccagtgatctgttggagtggatccgccgcacaatcccgtggctggagaaccgggtgcccgagaacaccatgcatgccatgcaacagaagctggaggacttccgggactaccggcgcctgcacaagccgcccaaggtgcaggagaagtgccagctggagatcaacttcaacacgctgcagaccaagctgcggctcagcaaccggcctgccttcatgccctctgagggcaggatggtctcggacatcaacaatgcctggggctgcctggagcaggtggagaagggctatgaggagtggttgctgaatgagatccggaggctggagcgactggaccacctggcagagaagttccggcagaaggcctccatccacgaggcctggactgacggcaaagaggccatgctgcgacagaaggactatgagaccgccaccctctcgggagatcaaggccctgctcaagaagcatgagggccttcgagagtgacctggctgcccaccaggaccgtgtggagcagaattggccggcatcggcacaaggagccacgggctggcattatgatgtccccagggtcacgccgtgccacacactcgggccgcgtggacactgggggcgcaacacaaggaagagagcttgagcggcgaaactgggggactgcacggtcgggttcccggggacccccaacagaagaggggggcgaggacccttccaccaagaaagagacgaccagagacccagcacacgagggctagggaggacaagcgacaactaca

SEQ ID NO: 30176 - DNA, 784 bp, Homo sapiens
  misc_feature 1, 2, 3, 4, 782, 783, 784: n = A,T,C or G
nnnnagcgtccgccccgcgtccgctgaaccctggaggcggagtttcagtgattctcctgccctccggcaggctggctactactcccatgccctgtatctggcggagaaccatgcacatcatgagtggtacctgaagatccagctagaagacattaagaattatcaggaagcccttcgatacatcggcaagctgccttttgagcaggcagagagcaacatgaagcgctacggcaagatcctcatgcaccacataccagagcagacaactcagttgctgaagggactttgtactgattatcggcccagcctcgaaggccgcagcgatagggaggccccaggctgcagggccaactctgaggagttcatccccatctttgccaataacccgcgagagctgaaagccttcctagagcacatgagtgaagtgcagccagactcaccccaggggatctacgacacactccttgagctgcgactgcagaactgggcccacgagaaggatccacaggtcacagagaagcctcgccagggcttcaggagaaaagacagttcgtgccgtctccattcttccgtcttggtggctgcctttcactgcattccttagaccagtaacaccttacctcggggctcaatggtcctctgtgaagagggaatggactgagggaaagagttgactggctttgtcccaagagaccttgtgattttccccttttgtccagcagctctgccctccttcctctccaggtcaaagagaaactttacgcagaggccatttccctgcnnn

SEQ ID NO: 30177 - DNA, 348 bp, Homo sapiens; identical to SEQ ID NO: 30145

SEQ ID NO: 30178 - DNA, 3715 bp, Homo sapiens
  misc_feature 1, 3714, 3715: n = A,T,C or G
nggaaagctggtacgcctgcaggtaccggcggaaagctggtacgcctgcaggtaccggtggaaagctggtacgcctgcaggtaccggtggaaagctggtacgcctgcaggtaccggtggaaagctggtacgcctgcaggtaccggtggaaagctggtacgcctgcaggtaccgctgtggcctctgcggctaggccggctcgagactcccgggcgccgaggcgctgccgcccgcctcgccgccccacgccgaaggaccacgcgcccgccgccgccagcctctcagcgctcccatgatcgcccggtgccttttggctgtgcgaagcctccgcagagttggtggttccaggattttactcagaatgacgttaggaagagaagtgatgtctcctcttcaggcaatgtcttcctatactgtggctggcagaaatgttttaagatgggatctttcaccagagcaaattaaaacaagaactgaggagctcattgtgcagaccaaacaggtgtacgatgctgttggaatgctcggtattgaggaagtaacttacgagaactgtctgcaggcactggcagatgtagaagtaaagtatatagtggaaaggaccatgctagactttccccagcatgtatcctctgacaaagaagtacgagcagcaagtacagaagcagacaaaagactttctcgttttgatattgagatgagcatgagaggagatatatttgagagaattgttcatttacaggaaacctgtgatctggggaagataaaacctgaggccagacgatacttggaaaagtcaattaaaatggggaaaagaaatgggctccatcttcctgaacaagtacagaatgaaatcaaatcaatgaagaaaagaatgagtgagctatgtattgattttaacaaaaacctcaatgaggatgataccttccttgtattttccaaggctgaacttggtgctcttcctgatgatttcattgacagtttagaaaagacagatgatgacaagtataaaattaccttaaaatatccacactatttccctgtcatgaagaaatgttgtatccctgaaaccagaagaaggatggaaatggcttttaatacaaggtgcaaagaggaaaacaccataattttgcagcagctactcccactgcgaaccaaggtggccaaactactcggttatagcacacatgctgacttcgtccttgaaatgaacactgcaaagagcacaagccgcgtaacagcctttctagatgatttaagccagaagttaaaacccttgggtgaagcagaacgagagtttattttgaatttgaagaaaaaggaatgcaaagacaggggttttgaatatgatgggaaaatcaatgcctgggatctatattactacatgactcagacagaggaactcaagtattccatagaccaagagttcctcaaggaatacttcccaattgaggtggtcactgaaggcttgctgaacacctaccaggagttgttgggactttcatttgaacaaatgacagatgctcatgtttggaacaagagtgttacactttatactgtgaaggataaagctacaggagaagtattgggacagttctatttggacctctatccaagggaaggaaaatacaatcatgcggcctgcttcggtctccagcctggctgccttctgcctgatggaagccggatgatggcagtggctgccctcgtggtgaacttctcacagccagtggcaggtcgtccctctctcctgagacacgacgaggtgaggacttactttcatgagtttggtcacgtgatgcatcagatttgtgcacagactgattttgcacgatttagcggaacaaatgtggaaactgactttgtagaggtgccatcgcaaatgcttgaaaattgggtgtgggacgtcgattccctccgaagattgtcaaaacattataaagatggaagccctattgcagacgatctgcttgaaaaacttgttgcttctaggctggtcaacacaggtcttctgaccctgcgccagattgttttgagcaaagttgatcagtctcttcataccaacacatcgctggatgctgcaagtgaatatgccaaatactgctcagaaatattaggagttgcagctactccaggcacaaatatgccagctacctttggacatttggcagggggatacgatggccaatattatggatatctttggagtgaagtattttccatggatatgttttacagctgttttaaaaaagaagggataatgaatccagaggttggaatgaaatacagaaacctaatcctgaaacctgggggatctctggacggcatggacatgctccacaatttcttgaaacgtgagccaaaccaaaaagcgttcctaatgagtagaggcctgcatgctccgtgaactggggatctttggtagccgtccatgtctggaggacaagtcgacatcaccatgtgttactggcctggaaactgaagggagttttgcaagtgaaaatttagatttctattgacatccttttgttttctaattttaaaaattataaagatgtaaatggaattataaatactgtgacctaagaaaagacccactagaaagtaattgtactataaaatttcataaaactggatttgatttctttttatgaaagtttcatatgaatgtaacttgattttttactattataatctagataatatgatataagagggctaagaatttttaaattgaatcatatatatgatataatttgatccttcttgtatcttgaagttttgtacttgggatttctggactgataaatgaatcatcacattcttctggtaaatattttcttggagctctgtgtcaactttgatcctttgtctcccaggaaggtgtgacctctcctttgcctgcatacctcaaggccaggggaatatgcctcagtgatgcatttatctttgtatatcaggccgcatgattcccaactttctgccacacttaaattacgttcctccatttcagttttgtcttttctgtctaaagttcagtcaaagagtatcaaaaaattatgtttcagctagactggtgtaatgtataagtttttgtatcttgtattagaggatttcgtagcttttattagaggctcatttccacctcagcatacaagatcgttagtcttttggcatgtgtgccaattagaatactaaagcaagtccaagcacatttttctcttctcacgtttctaataagtgttagggactttgcctcttttacttaccacgtccccaaaagtgtcaggtagacatgtcacaaatggctctgtagagagccatgggaagagagaggaggtggatgtggaaccataaagggttcagaaactccataagaggagtgggtttggatagaagcatttgaggacagtgctccaaggcttatgtgtatgatgaaacttaacacgggaagagactctgcagtagactgtgcgccggtgatgcgatttgaagggaactgggttcatccttaactctccttttgtgagctcaattcattgcggagatcggtaatccgatttctggggactcactctggacagaggtatagttaaaaaactgaccgcagtcaaggtcaggaacaggagatgaccgggaatcccgtctcaaaggaaaactctacgcgcggcggttatagaaaaacagggctctcctagtgttactctcagcaaann

SEQ ID NO: 30179 - DNA, 498 bp, Homo sapiens
  misc_feature 1, 497, 498: n = A,T,C or G
nagctgtttcctgtgtgacaaaggacagctacaccgcgggggcgtgcttgttgctgggccgggcggaacgctagcggtgttggcgcggagtggaccccggctgcggcccctgggtgtttccacaccggtagccagctgtgccctgaggtggaagaggaccggccacccaggaattttccaacaatggcgccaccatcggtcccggagtcccagtgatgctctgtgccatagagcccccataacttcactactacgtgatagtaaatccccgacaaaaaccagcagcgccttgcaagcccacgccaccccaagcatcccaggactcttctgaaacgactccgggctaccagatcggccgtccagctggaatcaaccgatggaggctccgctgcaaactggaatggtgcttggcgtgatgatcggggccggagtggcggtggtggtcacggtcgtgctcatcctcctggtggtgcggaggctgctagtgccaaaaaccnn

SEQ ID NO: 30180 - DNA, 443 bp, Homo sapiens
  misc_feature 1, 436, 437, 438, 439, 440, 441, 442, 443: n = A,T,C or G
ngctgtattgaacagagatagtattattccttctaggcatagtagggaggatatgaggtgtgagcgatatactagtattcctagaagtgagatggtaaatgctagtataatatttatgtaaatgaggggcaggggatgtccaaaccggacacacacagcacacaaaagaaaccgacaaatcgggcttccttaaaatgccaaacttctttcatctaaagccagcatgaggaagacaactgggtcagccacaaactgagagaagccatcaacggggagaaggtgaatactctggcttactggcagggaagacatgagcaggtgttttatgaaaggtgacatgcagatgggcagtggaacggccagcctctttcttgccgctgtcctaaagaaagggcaatgctgtcactgatgaggatgtacaacgagaaggggctcnnnnnnnn

SEQ ID NO: 30181 - DNA, 1770 bp, Homo sapiens; identical to SEQ ID NO: 30085
  misc_feature 1, 2, 3, 4, 5, 6, 7, 8, 9, 1691, 1764, 1765, 1766, 1767,1768, 1769, 1770: n = A,T,C or G

SEQ ID NO: 30182 - DNA, 2647 bp, Homo sapiens; identical to SEQ ID NO: 23285
  misc_feature 1, 2640, 2641, 2642, 2643, 2644, 2645, 2646, 2647: n = A,T,C or G

SEQ ID NO: 30183 - DNA, 820 bp, Homo sapiens
  misc_feature 1, 2, 3, 4, 5, 6, 7, 820: n = A,T,C or G
nnnnnnnagagccgcttccccctcctccctgtgctgtctgcaccgaggagagcggcctgccggaagtgggccaccatatctggaaactacagtctatgctttgaagcgcaaaagggaataaacatttaaagactcccccggggacctggaggatggacttttccatggtggccggagcagcagcttacaatgaaaaatcagagactggtgctcttggagaaaactatagttggcaaattcccattaaccacaatgacttcaaaattttaaaaaataatgagcgtcagctgtgtgaagtcctccagaataagtttggctgtatctctaccctggtctctccagttcaggaaggcaacagcaaatctctgcaagtgttcagaaaaatgctgactcctaggatagagttatcagtctggaaagatgacctcaccacacatgctgttgatgctgtggtgaatgcagccaatgaagatcttctgcatgggggaggcctggccctggccctggtaaaagctggtggatttgaaatccaagaagagagcaaacagtttgttgccagatatggtaaagtgtcagctggtgagatagctgtcacgggagcagggaggcttccctgcaaacagatcatccatgctgttgggcctcggtggatggaatgggataaacagggatgtacctgggccgcagagggcccattgtaggtatccggaattatgtcatctataaaaatactcacattaagacagtagcaattccagccttgagctctgggatttttcagttccctctgaatttgtgtacaaagactattgtagagacn

SEQ ID NO: 30184 - DNA, 3503 bp, Homo sapiens; identical to SEQ ID NO: 30135

SEQ ID NO: 30185 - DNA, 2046 bp, Homo sapiens
ccgcgagcccgtctctcctcgaatgaaaggaaataacctccggcgacagagccccgctctcaggcactgctggagaaccgagaccgacttctttctctttaccctcattggcgcttctctcctgcagtccgcctctgggccctgccgcatttcttgagacttaaagtggcattctaaaggcaatttaaaaatcatgtcaagctcagttgaacagaaaaaagggcctacaagacagcgcaaatgtggcttttgtaagtcaaatagagacaaggaatgtggacagttactaatatctgaaaaccagaaggtggcagcgcaccataagtgcatgctcttttcatctgctttggtatcatcacactctgataatgaaagtcttggtggattttctattgaagatgtccaaaaggaaattaaaagaggcacgaagctgatgtgttctttgtgccattgtcctggagcaacaattggttgtgatgtgaaaacatgtcacaggacataccactaccactgtgcattgcatgataaagctcaaatacgagagaaaccttcacaaggaatttacatggtctattgccgaaaacacaagaaaactgcacataactccgaagctgatttagaagaaagttttaatgaacatgaactggagccctcatcacctaaaagtaaaaagaaaagtcgcaaaggaaggccaagaaaaactaattttaaagggctgtcagaagataccaggtccacatcctcccatggaacagatgaaatggaaagtagttcctatagagataggtctccacacagaagcacccctagtgacaccaggcctaaatgtggattttgccatgtaggggaggaagaaaatgaagcacgaggaaaactgcatatatttaatgccaagaaggcagctgcccattataagtgcatgttgttttcttctggcacagtccagctcacaacaacatcaagagcagaatttggagactttgatattaaaactgtacttcaggagattaaacgaggaaaaagaatgaaatgtacactttgcagtcagcctggtgctactattggatgtgaaataaaagcctgtgttaagacttaccattaccactgtggagtacaagacaaagctaaatacattgaaaatatgtcacgaggaatttacaaactatactgtaaaaatcatagtggaaatgatgagagagatgaagaagatgaggaacgagagagtaaaagccgaggaaaagtagaaattgatcagcaacaactaactcagcagcaacttaatggaaactaggttcatgggacagagttagaaaactgggaatgaataagacatccataactactattcttttttcactgttttctaaaatcaaaaagggtttgtaactttttactgcccaactcttagatccttcattgaactgcctaaaaatgtcttgtttgttttatgagccctcactagaaggctgagtttgacatgttgatattacgtagctatagtttgcagtttctgggaagcaattgaaacactattaaccctgtgtatagtgtcaacagttaaagcagacgaaacgaagtaagctatatttctggactgaacaaagctctgctgtttagagcatttaagtttgtttagtggatccatactcaaaggaaagcataagcaaattttcctttacaatgcaaacatgccactggtggcagcacatggtaatttgtggatttttttttcatactcaagtaatggaggctagaaatgaagagaaccttctttttctcttgactttgacagcacatgctaaaaatctcttccaagaagtatgctaaagcttttcatttggttcctgttaaagttgttctcactgaccagcatggactcaggcaactggtaatgataagctatgagctccagtgcttttgccaaaattctcttgacagcacacctcctctctttccatgttatacaaaggacttctggcaaaatgattgagtccttcaagtttaaactaacatttggcaacagcaaattaaacgtttttaagatgt

SEQ ID NO: 30186 - DNA, 539 bp, Homo sapiens
cgcaactgtgtgatttgcttgttgagttttttgttgtctggtttttttgtttgtttgtttataccaataagaatgagccaccacacctgatcaaggacctatgttcctaaggagctccctggtaatgctaatactgctggtccacggaccacacttttgagtagtgagggcctgtgttcagcagcacagtagccaggagccacgtgtggctgtttcagtctccgtcttagttaaataaaactagaaaatccagtgcctcagtgactgtaattgcattgcatggaggaaagttctaattgggcagtgccacatcttaaaggaccgaatgatccactttttctttacttttaaattttctttctttatatttttagagacggggtcttgctctgtagctgaagctggagtgcagtggcactatcttaactcactgcagcctaaacctcctgagctcaagctgtcctcccacatcaacctcctgagtggctgggactgcgggcgcatgctaccacacccggctatttttttgttttttttgt

SEQ ID NO: 30187 - DNA, 1546 bp, Homo sapiens; identical to SEQ ID NO: 23050

SEQ ID NO: 30188 - DNA, 788 bp, Homo sapiens
  misc_feature 311: n = A,T,C or G
ctcagtgcccagcatgtctgtggtgagtgtgtagttcaggaagtgaactggcaaaactgagtatcaccctctcttcctgggttcttgccactcccctgaaaaccagggtagcattgtcacatcagatagctccgctacgtgtgcgctgaccatgctgagatgggcactgtggactcagcctctggtcattgctggaaccagcggcctccatgtgaggtacaggggaacgcactgctagcagatggttgggatgtggacactcgtcctgccctcttggcttggtgctgtgccatcgcacagtcattcgctgnttagcatgcatgggagagagtgaagcacaagggcccaggcccctgggagtgcctgccctcaagttggaagagcccttgggcacagcataggcgcctggcagaattggactgggccatgacccagggcattgggacctcacctaggagttggggttctggtcagaagccctgtggagacagggtctcccctgtgggcaccaaactgacctcaaactgctggttctttggccctggggacggggcttgttgaagtacagcattgaccaatttgacatatggaattctgcctacgtttatatggacgctgttgatgccggcaatattgctacttcgcttttttgcaaatgcattcactttgacaccatataatggaacagaagctctggtatggcttttccaccaaaagcctgaatctctcaatcctctgatcaaatatctgagtgccaccactggctttggaagaaattacattatgac

SEQ ID NO: 30189 - DNA, 3715 bp, Homo sapiens; identical to SEQ ID NO: 30178
  misc_feature 1, 3714, 3715: n = A,T,C or G

SEQ ID NO: 30190 - DNA, 449 bp, Homo sapiens
  misc_feature 449: n = A,T,C or G
acttctagatgctgtattgaaattgctggcagagtttattctatacaaaatgaacaatctggccccttgttttatttgtaaaggttcaatgtatctatgcctgcctacctcaatctgcaagggagtgtcagaaaggccccgcattcgccaagcccaaaagggagacacttcatctggaacaaaatagtggaagaaatggcgtctggggttcagtggggattcgcagagatacaactcgtcaacgaatcaaattcagtgatgacagagtatgcaagagtcaccttctcaactgttgtcctcatgatgtcctttctggaactagaatggatcttggagaatgtctgaaagtccatgacctggctttaagagcggattatgaaattgcatccaaagaacaagatttttttctttgaacttgatgccatggatcatctgcagtcattcattgn

SEQ ID NO: 30191 - DNA, 348 bp, Homo sapiens; identical to SEQ ID NO: 30145

SEQ ID NO: 30192 - DNA, 498 bp, Homo sapiens
  misc_feature 1, 497, 498: n = A,T,C or G
ngtactgatgcacacacaaattcctcggctggtcagtttaccactgaggcctgtaaaatgatatgcctgcagaatggctttcacattttccaatttctcttccaatgcttcttgctcattgatctccactgtttggttgggttctacattggcaatacatgctttcacgctggctcgccggtgccgcaccacagccctcagctcatctcgcagacgccttagtttatgaatcttggttccaagagcaccttcctgggcctgcacgctctgcagctcttcagactgtttacgggatctgctcacttgggtctctagcctttccaagtgagctaaaacacctcctttggactcgccatctggacgtaaagggttcgcctgctccatctcagattcccaagggccttcccatgaagttgtctaggcaaccggtgatagggactccaatgtccttgccaggccagaagcgagaattcccgccatccacgtcttcaaaaccnn

SEQ ID NO: 30193 - DNA, 2499 bp, Homo sapiens; identical to SEQ ID NO: 29148
  misc_feature 1, 2, 3, 4, 5, 6, 2497, 2498, 2499: n = A,T,C or G

SEQ ID NO: 30194 - DNA, 543 bp, Homo sapiens; identical to SEQ ID NO: 30154
  misc_feature 540, 541, 542, 543: n = A,T,C or G

SEQ ID NO: 30195 - DNA, 2256 bp, Homo sapiens
gtcgactaggctgcgagaagacgacagaaggggaataggctgtggcgtcacttccggcttccttcagtccgctggtccgcgagcacgagctgtgaggggattcacttgtgtgcggaactcctcggaaccatggcgtccctttcccttgcacctgttaacatctttaaggcaggagctgatgaagagagagcagagacagctcgtctgacttcttttattggtgccatcgccattggagacttggtaaagagcaccttgggacccaaaggcatggacaaaattcttctaagcagtggacgagatgcctctcttatggtaaccaatgatggtgccactattctaaaaaacattggtgttgacaatccagcagctaaagttttagttgatatgtcaagggttcaagatgatgaagttggtgatggcactacctctgttaccgttttagcagcagaattattaagggaagcagaatctttaattgcaaaaaagattcatccacagaccatcatagcgggttggagagaagccacgaaggctgcaagagaggcgctgttgagttctgcagttgatcatggttccgatgaagttaaattccgtcaagatttaatgaatattgcgggcacaacattatcctcaaaacttcttactcatcacaaagaccactttacaaagttagctgtagaagcagttctcagactgaaaggctctggcaacctggaggcaattcatattatcaagaagctaggaggaagtttggcagattcctatttagatgaaggcttcctgttggataaaaaaattggagtaaatcaaccaaaacgaattgaaaatgctaaaattcttattgcaaatactggtatggatacagacaaaataaagatatttggttcccgggtaagagttgactctacagcaaaggttgcagaaatagaacatgcggaaaaggaaaaaatgaaggagaaagttgaacgtattcttaagcatggaataaattgctttattaacaggcaattaatttataattatcctgaacagctctttggtgctgctggtgtcatggctattgagcatgcagattttgcaggtgtggaacgcctagctcttgtcacaggtggtgaaattgcctctacctttgatcacccagaactggtgaagcttggaagttgcaaacttatcgaggaagtcatgattggagaagacaaactcattcacttttctggggttgcccttggtgaggcttgtaccattgttttgcgtggtgccactcaacaaattttagatgaagcagaaagatcattgcatgatgctctttgtgttcttgcgcaaactgtaaaggactctagaacagtttatggaggaggctgttctgagatgttgatggctcatgctgtgacacagcttgccaatagaacaccaggcaaagaagctgttgcaatggagtcttatgctaaagcactgagaatgttgccaaccatcatagctgacaatgcaggctatgacagtgcagacctggtggcacagctcagggctgctcacagtgaaggcaataccactgctggattggatatgagggaaggcaccattggagatatggctatcctgggtataacagaaagttttcaagtgaagcgacaggttcttctgagtgcagctgaagcagcagaggtgattctgcgtgtggacaacatcatcaaagcggcacccaggaaacgtgtccctgatcaccacccctgttaagcattcccacgtgctgtcgatctttggaccagtttctagcaaagttgtgtttgaaagatactctattaaagaagactgtggaatctgtttatcggtgcccattatatccttaagtttggatatttagctgaccttcgctttaacataggtctaatttatttgccgtgccattttccatacaaatcagttgatttaaaaaagttcatttctcatactgtgcattaaaataaaaatttgaacagttaaaaaaaaaaaaaaaaaaaaaaaaaaaaaactttgtggcgccgccttggggccctgagaaaaagtttctaaagacccatcccgtggggcgcgcggcccaagtaggtaagtgcaccttggcaaagctggtcccaaggagaacctgcccaggactagtgctgtgttcttacacaattaaaaaaggccgggccaaccgagcgttctgaacaatcccaagggagtccgaaggcaagggtctatcaccgcgagtcaagcgagctcgaattaatctgcgcg

SEQ ID NO: 30196 - DNA, 2334 bp, Homo sapiens
  misc_feature 1, 2, 3: n = A,T,C or G
nnnggctgtgtttccggggacggcgcggggcagctgggaatccggaatgctgcccgatggccctgggtcctcgctgtggggcaatccgggcttgcaggcgaggtggagaaagagcgttttcgctacgtaaagcacatccatgcagtatttgggtattttattgcattcattctcttttatcaaaatgactggaaagtgcagaaagccccgaagctgatgctggtagtggaatctcaggcactgagtgtggcgagtctcaactggccactcccacggagcctggggaggcttcagcaagagccaagtgagagcagggcagaggccgggcccagcgccagcgaggcatctggggagccgtgcccttgttagcgctgaaaatggaagcccctccattcaggcctggacagatgatgggcagcgaatgtgctcacctgctgagctgcgcgtccgccccgcgtccgatcagggtagaacactgaggcgtctgtgggcgggtgtgtgcacatccacacttgtacactcacattcacatgcacatatgtgcacacgcatgcaattcatacacatgcacagttgtgctcacagcctcgcacgcccttgcacactcgcacttatacacatgcatggtcatgctcacagcctcgcacacgccctcgcacactcatccacacacagctgtgcacaaggaacacagagcagatgttctcagagggactctgacacctttgagatgagggttttttaatcactggaaggctctcttgggtctaacaggttcagagaatgtaacacctggttttcaaaacatttttcaaagaaatagagaattcccatacacaggcatacgtgacgttatgaggccggtggaggcctcgctcggtgttgccctgtatggttgagctgtggtttaaggtgaactctggagtgtgggctgcaggtgagggctccgtccctgggagctggtgggaggagctggaggctggcgccgccctgctcagagctgcctgcttgggctcgtctgaggcggttccgagctgcaggtgtctccaccaacctgctgtgctacacagcggggtctggggcagcctcaccactgcgtgtcttggtttcctcttctgtaaaacagaggctgcctccaacccttggaacaaacagggaagagccctagcaggcaggatgtgagtggagcctcaggctgctcctggagggtgtggctctgcctgccgtgcggccttccacacccgtggctactgtcacattcacacacatggccatgctgacacctgctctcacttctgccctgtgcagtgcttgtgtgcagccaggaaggcagcagccgcaggtgtggagggcaaggggacctcctgtcgggctccctgggcgtcctggtacactgggcgctccttgctggaccacagaaaacaaatgggtaaggccacgtcttcatttattctactttgaaaccgtctgatttttctaagctgtttcagtagctcatgcgttgaataagtagccctggaaacactgacaatgaactctaggcttcactggagagatctcggcacagacgaaccctcttggcagaagcttccaccccacacttgggcctgggcctgtccatcattcactgtggatggggcctggggcaggggtggtcttcagagctctccagagagttccgaggtgcaaccaaggcccagcagcacgctgttctgggaagttgagtggtttattctgtgtaacacagaatactaagatagaaaacagacagggtcaaggcttacttagacacttgttcttaaagatgtgaattttctttaagagacagcagaattctaggaccagggcccttggcccagttctgtagtcagagaactttatgaatgcaagcagttcccatacctctaagcatctccatttctcttctgtgagcccatcaaggtggtggctgcaggtgctaggtgtggcagacccgggcttctggagggtgggcagggctgtcatccagtggcctcatgtgtcctcattgccgggatggcagagtctgggaccatcccccaaactaggtgtgtccacatgaatttgagagccgaggaggtaggggtgtgggcaggagtcttactgttcattctgctgtgttcactcgagttgcctccacccctcccccaggagatggagccctggtagcaggaatccccattctcagacctcagatgccctctgcacctgggcactgagagcacagtcaaacagggctaagcagcttgtgccgcctggctttccccgggaacacctggcccactgtgtgccctagccctggacctgtctccgagt

SEQ ID NO: 30197 - DNA, 507 bp, Homo sapiens
  misc_feature 1, 2, 506, 507: n = A,T,C or G
nnatgcgtgcctgtgccctctccaacgccccccagatgctccccggcctggaacctgtaacatgcagtgcttcaacggtggcagctgtttcctcaatgcacggaggcagcccaagtgccgctgccaaccccgctacacgggtgacaagttgtgaactggaccagtgctgggagcactgtcgcaatgggggcacctgtgctgcctccccctctggcatgcccacgtgccggtgccccacgggcttcacgggccccaaatgcacccagcaggtgtgtgcgggctactgtgccaacaacagcacctgcactgtcaaccagggcaaccagccccagtgccgatgcctacccggcttcctgggcgaccgctgccagtacagctgccaagccgtgcaaaacatccacccacagcctgtcctcaggcatgggagagacatcctcagtgctttagcagcaagaaaaacggacgcccccgcggtgtggccgttcttttccacacaggaaacagcnn

SEQ ID NO: 30198 - DNA, 834 bp, Homo sapiens
  misc_feature 833, 834: n = A,T,C or G
actgggaaatgtaatttttgatgagggagagtttctccaaggaggcaacatctgtaaagacctgcaggagttgagggcaggcgccattcatcttccagcctttgggcaggcctgcccacttctctccaaggaccttctcctgccctcatgtgggtcctctggtccagaatagacttgtgaagtcattgacaacaatcctcaaacactgcactcccccaagactgcataataaactcattcatactaaggtattagcagttcttcatggagaactcttgggtggggagccaagctctgaaaagccccgtgagggaatgccttatctcaggaaggagccctgggatgggaaccacccctcctccctgcctctctcccccacagagattgagtctcacattataaagcaagaagatatacttaatggcaaagagaatgagattaaagagttgcagcaagttatcagccagcagaaacagatcttcaggtgaggggtctgggcccggctgggggttgttgatgacactggggagccagacctctggcccctacctacccttggctgtccacagcccaccaccagccggctccgttgcaggaatcacatgtctgacttccggatccagaagcagcaggagagctacatggcccaggtgctggaccagaagcataagatagcctcagggacacgtcaggcccgcagccaccagcatcccagggaaaaataaaatggccgccgctttcctgttctctgggtgtaatccccagcctctgccttctctgctctgggagtccccagcctctagcccctgctacttccctccctcttggatagnn

SEQ ID NO: 30199 - DNA, 392 bp, Homo sapiens
acttggagggcttcttgatatggaagttcacgttgtccagctccacgttcaggctgatagaagcggctgagtcactgtccactgtggactggaaactgctgactgatgtgcgcttgctaggactggcagaattagccaaattatcgtcaccttcttcagctatctgttctgtgtcactgtcatcaaactttatgtctttaaaccaggatggctcagagtgtccttccacggagttcactgagtcactgtcgggagaaggcgtctcagaaaattctgtacctgcggaccaggagcaagctgtgggagatggacaatatgcttatccagatcaaaacgcaggtggaggcctcggaggagagcgccctcaatcacgtgcagcacccgagtggcga

SEQ ID NO: 30200 - DNA, 498 bp, Homo sapiens; identical to SEQ ID NO: 30179
  misc_feature 1, 497, 498: n = A,T,C or G

SEQ ID NO: 30201 - DNA, 1479 bp, Homo sapiens; identical to SEQ ID NO: 30097
  misc_feature 1, 2, 3, 1473, 1474, 1475, 1476, 1477, 1478, 1479: n = A,T,C or G

SEQ ID NO: 30202 - DNA, 412 bp, Homo sapiens
  misc_feature 411, 412: n = A,T,C or G
acttttatctttctggcctttgcttcaaagttcaatatcatgggtcttgtgctttgcatctcacattgcatttcacactccaaggcctatgatattgaactttgaagcaaaggccaatatcataggccttggagtgtgaaatcttgtgcagattacaaatatccctattctctaaagtatgctggactaataattgttaaataattgacttgtaacatgtgcttgccagctgactttcttctctaaggcatcctaaaactagggaaatgagactactggattctattcccagctctgccacttgatgctatatgaccctgggctgcccacatttcttctgcatgcctattattttcctttcctcacaaaaacctcatgggcttggctgcatatgcattgggggtggaccann

SEQ ID NO: 30203 - DNA, 2334 bp, Homo sapiens; identical to SEQ ID NO: 30196
  misc_feature 1, 2, 3: n = A,T,C or G

SEQ ID NO: 30204 - DNA, 2190 bp, Homo sapiens
  misc_feature 1, 2, 2190: n = A,T,C or G
nnacccacgcgtgcggacagaagctgtgtgcaacccactgtattcacggcaaatgatgtctgagcttctttttgagtgctacgggattcccaaggttgcctatggaatagacagcctcttcagcttctaccacaataagccaaagaactcgatgtgcagtgggctaatcatttcatctggataccagtgtacgcatgttttacccatcttagaagggagattagatgctaaaaactgcaagcgcatcaatcttggaggaagccaagcagctggttacctccagcgtctcctccagctgaagtaccctgggcacctggcagccatcaccctcagccgcatggaggagattctgcatgagcacagctacatcgctgaggattatgtggaagaattacacaaatggcggtgtcctgattattatgagaataatgtccacaagatgcagctcccattttccagcaagctcctgggcagcactctgacctctgaggagaaacaagaaaggcggcagcagcaattgcggcggctgcaggagctcaatgcccggcggcgggaggagaagctgcagctggatcaggagcgtctggaccgactgctatatgtgcaggaacttctagaggatggccagatggatcagtttcacaaagctctgatagagctgaatatggactccccagaagagctgcagtcctacatccagaagctcagtatagcagtggagcaggctaagcagaaaatcctccaagcggaagtcaacctcgaggtggatgtggtagacagcaagccagagacccctgacctggagcagctggagccgtctttggaacgatgtggaaagcatgaatgattttgatcccttgttttcagaggaaacacctggagtggagaaggcggtcaccactgttcagcccgtgtttaacttggcagcatatcatcagctatttgttgggacagaaagaattcgagctccagagattattttccagccatctctcataggagaagaacaggctgggattgccacgagaactcttcagatacattctggaccaggtacccaaaggacattcagcgaaatgctggttcagaaccgtctttcctcactggctggcaacacgatgtatcctggcatgaaagccagaatggcagaaggacctgttggagatgagacccttccggtcttcttttcaggttcaacttgcctcgaaccctgtgctggatgcctggtacggtgctcgtgactgggccttgaaccacctagatgataatgaagtttggatcaccaggaaagagtatgaagaaaagggaggagagtacctcaaggagcactgtgcttccaacatctatgtccccatccgcctgccgaagcaggcctcccgctcctcagatgcccaggcatccagcaagggctccgctgctggtggaggtggtgctggtgagcaggcatagcagaggccctccagagagactgccctgcacgccatgccttgggccacgttggcagtgtgacaggactgtgattgtgctagatgtacctgcccaagtctgctggtcacatttggcagcaaaatggatttctcctggggagaacaaagttaagggacactgagacctgcccttcagaattcggttcacttgggggcttctgtggtagagactaactggccttctgatgtctttgttcaactgtggccagctgtggcatcagcttcctggagcagtaaatgaagacagagtggaggacacaaatgtacaaaatgcacaagactgatttcttaccacattttagtctttcttgttttaaaaaaaattctttaaaatttatcttgtcccgtgtagatactttattcttctggatgtattcagaaattgcatgaatgccccagtgaggggaggtctttcatgcatataaaaaggtaatgtttattgccgggcacagtggcacgtgcctgttaaggcccagctttgtgggaggctaaggcgggaggaatcgctggagcttaggagttcgaggctatcgtgtgctgtgatcgcacctgtgaataaccactgcactccagcctgggcaacataggaagacattgtctctaaaaagatacatttttcataacaaggtaatgttgattcaataaacagcagttgcctcaggaaccggaaaaacaccacaaagccactcccacacaagacaan

SEQ ID NO: 30205 - DNA, 910 bp, Homo sapiens
  misc_feature 1, 908, 909, 910: n = A,T,C or G
naccacgcgtccgggcgcacccgcgggagcggagccgtggcgcgctcgccccggacgccggccgcccctccgctcgccctactgagcgagcggcccggggcgccgaggggtccgcgccgcgcggggcgcaccgccctggccgccatgtgctcccagctctggttcctgacggaccggcgcatccgcgaggactacccgcaggtgcagatcctgcgcgccctccggcagcgctgctccgagcaggacgtgcgcttccgggcggtgcttatggaccagatcgccgtcaccatcgtcggcggccacctcggcctccagctaaaccagaaggccctcaccactttcccggatgtggtgcttgtacgggtacccacaccccagtgcagtcagacagtgacatcactgtcctgcgacacctggagaagctgggctgccggttggtcaatcgcccacagagcatcttaaattgcatcaccaatttctggacgttccaagaactggctggacatggggtccccatgccagacaccttctcctatggtgggcatgaagacttttcaaaaatgattgatgaagctgagcccctgggctacccagtcgtggtgaagagcacacgaggccaccggggaaaagctgtttttctggcaagagataaacatcacctctctgacatctgccatctgatccgccacgatgtgccctacctgttccagaagtggcgtgggcgtcaagtgtccgctgacagaacaaggcaagcagttggctattcaggtgtccaacatcctaggcatggacttctgtggcattgatctccttatcatggacgatggctcctttgtggtgtgtgaggcaaatgctaatgttggcttcctagcctttgaccaggcatgcaacttagatgtgggtgggannn

SEQ ID NO: 30206 - DNA, 428 bp, Homo sapiens
acttcctgcaggacaacctgccgagggcaccacctgctgcctcgaggtcactgcccagcaggaggagaagcaggaggatgcagccatctgcccagtgacagtgctccctgaggtaagcggggagtatcaccctgttttggtcacagcatctcctgtgaggcaggcccacccctgaggcatccactctgccctgggctttcctaagacctcccacaggctgggacattctgagattctgagctcttaggtctgtgctgaagcaatctgagtatgaagagcagccctgccctccagccactgtggcatcactggagacaacgcatggtgacccgggagctgagaaagcaggaggcaagagggaagggactaagtgtttacagagacttgagaggtggaactaccacaggcaggcacatctgtatccaggt

SEQ ID NO: 30207 - DNA, 936 bp, Homo sapiens
  misc_feature 1, 2, 3, 936: n = A,T,C or G
nnnctccgtcttattgcctgggcactcacttacagggctgcaactacatctgggaaagacaaatgttgccggccttggttcacacccattgaggcatatgaaccaggtcttgctggagtaaatccctgatatctggagggctatttgcctttcacgaaggcagaaggagtgaccaactctgacatttgtgtcaagagactctgaggagtctgctacacagtcctttgtgcagtcacggtctccagcagactcatgcagcagcccaatagattccagtacatcccgcagaatgccacctgtgagaaggtgccctcacttaagggcaaggaccccaacagggcaattccacacctgcattttccatttcctcttatagaggaagagagttgctagcagcacctctgcccagccagggtgtgggtccccactggtgccatcttgccggccagcccacagatggaatcttgaaggtcctgagcagcaaggtgaggggcttatttaaggggtatggccaggtggctgaaggaggaagctgctggccggaattcccagcggtttccacactggaacatctccccactgccaacttccatgcgctcgtccgctctttcccacctaccctctgaccagtccataaagagagcagaagcgggaaagggaggaagaagccaggggcagcctgcaaagcgtctgctctgctcagctgggtccatggctgtgcgtgccaacacttctatccttgaagtatccagactccacttctaggatttgctggggatgatgggacagctgcagcttcctggtcccagacagaaatacacagattctggtccagaccctagtcttgtaagcctctgtccaggtggggctgaaagcagaaccctgaagggctcgtccaccaagagtcaggcagttctagccctgagagaggtagan

SEQ ID NO: 30208 - DNA, 1896 bp, Homo sapiens; identical to SEQ ID NO: 21007
  misc_feature 1, 2: n = A,T,C or G

SEQ ID NO: 30209 - DNA, 1164 bp, Homo sapiens
  misc_feature 1, 1162, 1163, 1164: n = A,T,C or G
nccaactggcaggggtatccctgtggacggggggcttcctggatgcctaccctcccctgagtggctgctgttcccccagaagcgggaggccttctgccagctgttgcagctcatgaagaacaagcactccaagcaggacgagcccgacatgatctcagtcttcataggcacctggaacatgggaagtgtaccacctccaaaaaacgtgacatcctggttcacatcgaagggtctggggaagaccctggacgaggtcacagtgaccataccccatgacatctatgtctttgggacccaggagaactcagtgggcgaccgcgagtggctggacctactgcgcgggggcctcaaggagcttacggatctggattaccgcccggtgagggggggtcatcttgtccaggaccctgtcctcacacaccacctccaaaactagcctacttgacttcatgggcaaccctgggagcacagcttcactggctttttctctggtccctgagcatatcctttgggagatctgacctgagtccttcatgccacgagaggaaccatttctctccagtccgtcaggaagaggggtggcaagccttcctaccctgtgatggacacaaaagtctatttatagtgcagggggaaatgcaggcagtgggtgcagcagggcagtggtgaccatgcactctctacccagattgccatgcaatcactgtggaatatcaaggtggcagtgctggtcaagccagagcacgagaaccgtatcagccatgtcagtacgtccagtgtgaagactggcatcgccaacaccctggggaacaagggggctgtgggcgtctccttcatgtttaatggcacctcatttggctttgtgaattgtcacctcacctcgggaaatgagaagacggctcggtgagggggcgcctttcccatggtctctttacacccatcccattcacctgaggcctgttcccgctcccataccctagcccatgaccctcccgcaggcctgtctccagagaccccctgctctcttatcccaattcaagacccttctgttcctgaccctaaccttgtccccaggggcccggatctttaccccatccctgactcctgagacttcttccctttatgcctatccctgacttctggccctgaccctgggatctannn

SEQ ID NO: 30210 - DNA, 1513 bp, Homo sapiens
  misc_feature 1511, 1512, 1513: n = A,T,C or G
acatgaaagacagtgtgccctctggaccacactgaaagtggtaatatcagttattctgacatcaaagtatctgcacagtagaaaaacactttgctcattatcagggattaagcaattctttcaaaatgtccagataactgaatcatcccattctgtctagtggaaatcccccagagatatgttgcgcacacacaccccatcttaggggcacactcagatgcaccccatcgcagtaagcagcagctgttgtcctgggtgcttggccagtggggcccttgggatctgttgggtgactgtgggacccagtttccttccagactttttgaattcttagcattcccctccctctttcacaggccaaagtcacatttctggctccagcgcatgtgcccccaaccaaccgggtacaaggcagtgttcattttggaagagttgctgagccccattgtcacacccctcatcctcatcttctgcctgcgcccacgggccctggagattatagacttcttccgaaacttcaccgtggaggtcgtaggtgtgggagatacctgcgtcctttgctcagatggatgttcgccagcatggtcatccccagtggctatctgctgggcagacagaggcctcagtgtaccagcaagctgaggatggaaagacagagttgtcactcatgcactttgccatcaccaaccctggctggcagacaccacgtgagagcacagccttcctaggcttcctcaaggagcaggttcagcgggatggagcagctgctagcctcgcccaagggggtctggtccctggaaaatgccctctttacgtctatccagtccttacaatctgagtctgagcccctgagccttatcgcaaatgtggtagctggctcatcctgccggggccctccactgcccagagacctgcagggctccaggcacagggctgaagtcgcctctgccctagcgctccttctccccgctagcaacccgggcaggcgcccacaggacgggctcacagcaccatgacaggctctggggtggatgccaggacaggcagctccgggagcagcgtgtgggacggacagctgcagagcctggtgctggccgactatgctccacagagatggagctgaatgccctctatatggcaccaagcatccaacaagcagaaggcccacggctgaacctgagcggcatgtatggcacggccgggagagtgatgcccagtggagacagcgccacagagaagcgacgaggacacggaacacaacgaaggcagccagcagcgacaggaggacagggagaggacaccgaacacgaaagaagagagaacaaacacaaagagaacacaacggtgacaggagaagccgaagacacaaggacacaaagcgagaacaaaacagacgcaacgacgccgagagcgagaagcacacacgacacaggcgcacccataacgcaccagacaaagaaaagaagcgagacgcaagaagacaaccagagcaacacgggaagcaccgaccnnn

SEQ ID NO: 30211 - DNA, 1148 bp, Homo sapiens; identical to SEQ ID NO: 30172
  misc_feature 1, 1148: n = A,T,C or G

SEQ ID NO: 30212 - DNA, 995 bp, Homo sapiens
  misc_feature 1, 967, 968, 969, 970, 971, 972, 973, 974, 975, 976, 977,978, 979, 980, 981, 982, 983, 984, 985, 986, 987, 988, 989,990, 991, 992, 993, 994, 995: n = A,T,C or G
nagacagagtcttgctctgtcacccaggctggagtgcaatctcagctcgctgcaacctccacctcctgggttcaagcaattctcctgcctcagcctcccaagtagctgggattacaggtgcctgccaccacgcctagctaatttttgtacttttagtagagccggggtttcactgtgttggccaggctggtcccaaattcctgacttcaagtgatccacccgcctcagcctcccaaagtgctgggattacaggcgtgagccactgcacccagcctcacttatcattattaaactctaacatgtgttgatcacttaaaactctcgagttgtactgtgtgacatgtgatagctaccttatttcattacttcatttattcccttgaggcttggagactgatgtgtgagggaggagtctgagggctcctgggccctcgcccatgggagctgggtgcgtggctgtcctgttgttaggacaagctgcagggagagactgtgtttccttggccatgtcccgtggggcccagcatgatgtcctgagtagcagaaagatgggtgagggatgggctgcctggatgatgactggctgatgcattttctgccctcagttttcaccatggccaggatctcttcagagtcatgattcaatggaatttataccaagtgtgccctgatttgggggtgtttctcagatgatgtgtagtgcccccactcagaggagccagaagccaaagaaactcagatacacttgattctctaattcattctctcacaggaattgtcttctaaactgcaaatattaaacagcgcagagaatggtctcacaagctcagaagggatctgggaggaaatgaactgctaagagggttattttcagctactttcacttactgctttaaactgtgcttctattgtttgaggtttttgcagtgagcacatacgacttatataataaaaaaaattccatttnnnnnnnnnnnnnnnnnnnnnnnnnnnnn

SEQ ID NO: 30213 - DNA, 1290 bp, Homo sapiens; identical to SEQ ID NO: 20742
  misc_feature 1, 2, 1281, 1282, 1283, 1284, 1285, 1286, 1287, 1288, 1289,1290: n = A,T,C or G

SEQ ID NO: 30214 - DNA, 1657 bp, Homo sapiens
ttacttggaggtgatttgttggcttaagatgagccactgggggaagcaacctgaagtagagaggccaaatgtagatagggtgtctggaaagggaggccccaggacccagtgggctgggaatgccaggagctctcagggaacagtgtatccagggcctgcctggccttttgtgccccactatgctcggacacccccagagctggacctgtgtccccactttcctttatagtgtgatcagtttgtggcagagtacgagcccgtgctgatcgagatcctggtggaggtgatggatccttccttcgtgtgcttggtgagcctcactgggtggtgtggtcctctcgggcagctgtaacctggggggctgcagagacccggaagggttgctcttggccgtggggtggagtctctgggttctgctgcgggagagccaagaaggtagggagccagccccccaagccccatcgctttccttagcaaccctgatgttctgaaagagcgtggtggagctgtgatcctagctccttctggaaactgttttcttagttttgaaagcgatacatcgggcagctctcattctccccctttcttctttccttttctcaccatatagaaaattggagcctgcccctcggcccataagcccttgttgggaactgagaagtgtatatggggcccaagctactggtgccagaacacagagacagcagcccagtgcaatgctgtcgagcattgcaaacgccatgtgtggaactaggaggaggaatattccatcttggcagaaaccacagcattggtttttttctacttgtgtgtctgggggaatgaacgcacagatctgtttgactttgttataaaaatagggctcccccacctcccccatttctgtgtcctttattgtaggcattgctgtctgcaagggagcccctagcccctggcagacatagctgcttcagtgccccttttctctctgctagatgggatgttgatgcactgggaggtcttttaggcctgcccttgcatggcgcctgctggaggaggagagagctctgctggcatgagccacagtttcttgactggaggccatcaaccctcttggttgaggccttgttctgagccctgacatgtgcttgggcactggtgggcctgggcttctgaggtggcctcctgccctgatcagggaccctccccgctttcctgggcctctcagttgaacaaagcagcaaaacaaaggcagttttatatgaaagattagaagcctggaataatcaggctttttaaatgatgtaattcccactgtaatagcatagggattttggaagcagctgctggtggcttgggacatcagtggggccaagggttctctgtccctggttcaactgtgatttggctttcccgtgtctttcctggtgatgccttgtttggggttctgtgggtttgggtgggaagagggccatctgcctgaatgtaacctgctagctctccgaaaggccctgcgggcctggcttgtgtgagcgtgtggacagtggtggcccccctgggcctgcttgtgttgcctacatgtccctggctgtttagggggtggttcagcctgcccccctcccctgttttataaatggtccttttgacctttttaaataaatatggatgggggaaaaaa

SEQ ID NO: 30215 - DNA, 1631 bp, Homo sapiens
  misc_feature 1631: n = A,T,C or G
attttgaatgattcctggggggaattcatttgttttttgcaatcagagtctgaaacctgggctgcaggtcaacaatctcgagcagttatgaaaagaccagggttactggagaccaagaaaggaacgagcggaggaaggaaggaaggaaggaaggagaggggccggggattttgtgcaagatttaataaaaaacaaacaaaaataggaatggttgctttcaacattttccaggttgtgaaaggtttgccacgactctcaggggtgtggttctaagctgcatcagtggaacaaatacaaaatgctgtcctcctcctgggctggaaggcagtgcactttctcctcttaacagccagactagcgggtgaggagtcagtgctgtgacccaggccaagctggagtgtccgcatagctttttctctgaaccagtggggattccatctaccttgaggcgtgctggctgggccccgtttccacaccagcacatggtgagacagggtagcttatcaacaggctgctgggccttaatactgacagtgagtgtggcgggtcacagccaggaaaggactaacacagatgccctcccaggccaagctggagtgtccgcatagctttttctctcgcccgcggggatgccatctaccttgaggcgtgctggctgggccccgtttccacaccagcacatggtgagacagggtagcttatcaacaggctgctgggccttaatactgacagtgagtgtggcgggtcacagccaggaaaggactaacacagatgccctcccagcccccactgctggccgtcttttagaataccacggaaaaaagctttgatgaagacaacaggaagtcaacacagcagagagtggtgtggacaacccagaagccagcctcacgcattccatgcccacagttaacgatgacaacaacagcaataataataataataatgaaacaaaggtacaggtgaaaagcagcgcttggggtgtgctgctgcaagctggggaaggcgcgtgctcaacttggatgggacacacctagtctttcttcaagtccctggattcaaagagcttcaaccgttcttgcaccgtcaggccttccttcagactctgggtagagacagagcaggaggagaaaataaacacaccgttagaccccctgcactggaccggaccggaccagaccggaccgctggtggagccggcatcagtcagagagccgggtgcaggtgcggttagtgggcatgccaggaggagagtccccgggaaatgctgttattggaggatgttttccccttcacaaaattacttggatgaaaaaggaaaaaaaaatcagagagacaagaccatgtgtttaagcagctaaattctgagcttagggctctttagagaagcagtgatcaaacgaatccagccagggaaaacagtgcaatgagcaaggagactgcccatccccgtgtcttgtcttgtgaatggatttgtccacatccagctccagagattcttcacctgacagcctcagctgaggaggaccagatgctccagggaatccccagcaaggatgggtgtcccgggacagggcctcgctcctacagtgcctccgcagcacctgctgccctcaggggtaccgagctcn

SEQ ID NO: 30216 - DNA, 1734 bp, Homo sapiens
  misc_feature 1, 2, 3, 4, 5, 6, 7, 8, 9, 10, 11, 12, 13, 14, 15, 16, 17,18, 19, 20, 21, 22, 23, 24, 25, 26, 27, 1711, 1733, 1734: n = A,T,C or G
nnnnnnnnnnnnnnnnnnnnnnnnnnngccaatcattctgctctttattcagagtccgacacaagcccccacgtccatagccaagttttccccggtttcccagcagccagtgacttctgtagcattaggattcttatagtagttattgtctacatttctcagcagattgaatatgtactgcctcttactactggactgtttattcttaaatgtgtacagtatggatttatgtcgtctatatattatgcatttatttgtcttcttcgttgtgatggtaagctcctggagggcaagtcttgcatccactgctttgctggcaacccgactggtaagcttctggaaggcaaggcttgcatccagtgctttgctggcaacccgattgctaagtaccgtgttttaagcttagttcagtctcaagtgtttgcagccacatctgaagaccaataaagcaactgctggtttatcctttgggagctgacagaatttcttctcccaaatacatacacagtaaaatcataagcctggaatgaagaaaaaaaaatcttacgggcaatgcaatggctgcaaaactataaggattagaaatgtgaacccacattttaatccaaattagggcaatttagaggtggtagcgtaaagaatagcttgctgtaatatacgccatgctgatacagaattggcttttggccttgtcaaaattaaattgtgctttctgtattgatggtgggcatgtttctgcaggtctctcattctaagctacaacaggccctaagaggtagaagtcacatacctgaattacccgtgaagttgctttcagatcatatcgttggttcactcttacagaaggatcactttaaaatatctctgcatttgtatccttgcaatgccacaactaaaagacagttatctcataggtccttgattaaattaggaggctttttattgaacacaagaaatgatacttttcaggcactgggcagataacttgctagaaaggcattttttaactgtgctaagattgagctgagtgcgtggctggagacaccacacaacacggacccttgctaaggcatctagtccacccgcttgttatgtagagggtgaaatgaagcccaaaacagtcaatcgtgaactctaagccgatcaggtgggaaagccggcatctctagaatgaaaacctaaggctgcttctcccactttgcctgagcaaatatagtgagattacacagcaaggcatgtgtaaattgccagtgcctatttctcagaaccagatttggtgatcgcaaagactgacgtggccctctaggtgtgcctatactgcaccagaagagcaagccgagaaagcagtgctcaaacctagagcattcaacctttcataccgataaaggctttaaaaaaaaaaaaaaaaaaaaaaagtacctgcccgggcggccgctctttcggtcaacgacttaagtctttacggctgtgagcgctatgggccgcggtagctttccgttaacttcagatccgattgtcgccccactgccaaagttaccttccaacatcgttactgttgcactttacgcagtcaagtgtccaactcctcagatgagcaagtggtcggccctaaaaagggcctttgggatcgaaacgtgcaaagctggagcggcggcctagcctccgaagccgtacctgcccgggcggccgctcggccaccgcggtggagctnccaattcgcccctatagtgagnn

SEQ ID NO: 30217 - DNA, 4804 bp, Homo sapiens
  misc_feature 4776, 4777, 4778, 4779, 4780, 4781, 4782, 4783, 4784, 4785,4786, 4787, 4788, 4789, 4790, 4791, 4792, 4793, 4794, 4795,4796, 4797, 4798, 4799, 4800, 4801, 4802, 4803, 4804: n = A,T,C or G
ctccactctggctgggcgggaaagcaacgcgtccgctgctgggctggagacggcgggagccgctgctctccggctgagggaatcagagacagctccgtccctagtggagcgcaggggaggcagaagtcatgacaggcgaggtgggttctgaggttcacctagaaatcaatgacccaaacgtcatttcacaagaggaagcagatagtccttcagatagtggacagggcagctatgaaacaattggacccttgagtgaaggagattcagatgaagagatatttgtaagtaagaagttgaaaaacaggaaggttctacaagacagtgattccgaaacagaggacacaaatgcctctccagagaaaactacctatgacagtgccgaggaggaaaataaagagaatttatatgctgggaaaaatacaaaaatcaaaaggatttacaaaactgtggcagacagtgatgaaagttacatggaaaagtctttgtatcaggaaaatcttgaagcgcaagtgaaaccttgcttagagctgagtcttcagtctggaaactctacagactttaccactgacagaaagagttccaaaaagcacatacatgataaagaaggaactgcaggaaaagcaaaagtaaaatcaaaaagaagacttgagaaagaggagagaaaaatggaaaaaattagacagctaaaaaagaaggaaacaaaaaaccaggaagatgatgtagaacagccatttaatgacagtggctgtcttcttgtggataaagacctttttgaaactgggttggaggatgaaaataactctccattggaagatgaagagtcattagaatcaataagagcagctgtaaaaaacaaagtaaaaaagcacaagaaaaaagaaccatctttggagagtggggtccattcatttgaggaaggaagtgagttatcaaaaggaaccacgaggaaggaaagaaaggcagccagattaagtaaagaagcattaaaacaactgcatagtgagactcagcgccttattcgagagtctgcactgaaccttccatatcatatgcctgagaataaaaccattcatgatttcttcaaacgtaaaccccggcccacttgccacggaaatgccatggcactattgaagtcatctaaatatcagtcaagccatcacaaagaaatcatagacactgcaaatactactgaaatgaacagtgatcaccatagtaaaggttctgagcagacaacaggtgcagaaaatgaagtggaaactaatgcactccctgtagtttcaaaggaaacccagatcattactggatcagatgagtcttgcaggaaggatttggtaaaaaatgaagagctagaaattcaggagaaacagaagcagagtgacattagaccttcacctggggacagctcagtgttgcaacaggaatccaacttcctcgggaacaatcacagtgaggaatgtcaggttggagggcttgtagcatttgaacctcatgccctggagggtgaaggcccccaaaatccagaagaaacagatgagaaagtggaagagcctgagcagcaaaataaatcatcagcagttgggccacctgaaaaagtgagacggtttactctggatagacttaagcaactgggagtagatgtttccattaaaccacggctaggtgctgatgaagattcctttgtgatacttgaacctgaaaccaacagagaactggaagccttgaagcagcgtttctggaagcatgctaatccagcagccaaacccagggctggtcagacagtgaatgtgaacgtcatagtgaaagacatgggcactgatggaaaggaagagctaaaagcagatgtggtacctgtgactttagcacctaagaagttggatggagcaagccacacaaaaccaggtgaaaagcttcaggtgttaaaagctaaactgcaagaagcaatgaaactccgaaggtttgaggagcgccagaagcgccaagcactgtttaaattagataatgaagatgggtttgaggaagaggaggaggaagaggaagaaatgacagatgagtctgaggaagatggagaagagaaggtagagaaagaagagaaagaggaagaactagaggaagaggaggagaaagaagaggaggaggaagaagaaggaaatcaggagactgcagaattccttcttagtagtgaagaaatagaaacaaaagatgaaaaagaaatggataaagaaaataatgatggcagtagtgaaattggcaaggcagttggcttcctctctgttcccaagtctctctcatcagattctactttacttctgtttaaggacagctcttccaagatgggttactctcctactgaagaaaaatcagaaacagatgaaaactcaggcaagcagcctagcaaactggatgaggatgattcatgttcattgctaacaaaggagagcagccacaatagcagctttgagctgattggctccacgattccatcctatcagccttgcaacagacaaacaggccgtgggaccagttttttccctacagcaggaggattcagatctccttcccctgggctatttcgagccagtttggtcagctcagcttctaagagttcagggaaactgtctgagccttcacttcccatagaggattcccaggatctgtataacgcctccccagagcctaagacacttttcctaggagcaggagacttccagttctgtttagaagatgacactcagagccaactgttggatgcagatgggttcttaaatgttagaaaccacaggaatcagtaccaagctttgaagcctcgattgccattggccagtatggatgagaatgccatggatgccaacatggatgagctgttggatttgtgtactggaaagttcacatctcaggctgaaaaacatctacccaggaagagtgacaagaaagagaacatggaggaacttctgaacctttgttcaggaaaattcacttctcaggatgcctccactccagcctcatcagagttaaataaacaggagaaggagagcagcatgggtgatccaatggaagaagcacttgctctttgctcaggctcttttcccacagacaaggaagaggaagacgaggaggaggaatttggagactttcggcttgtttcaaatgataatgagtttgatagtgatgaggatgaacacagtgactctggtaatgatctggcactggaagaccatgaagatgatgatgaagaagaactcctgaagcgatctgagaagttgaaaaggcaaatgaggttgaggaaatacctggaggatgaggcagaggtgtcaggaagtgatgtgggaagcgaagatgagtatgatggggaagaaattgatgaatatgaagaggacgtaattgatgaagtacttccttctgatgaggaactgcagagtcaaatcaagaaaatacacatgaaaactatgttggatgatgataagcgacagctacgtttataccaagagaggtaccttgctgatggggatctgcacagcgatggtcctgggcgaatgaggaagtttcgatggaaaaacatagatgatgcttcccagatggacttgttccacagagactctgatgatgatcagactgaagaacagcttgatgagtcagaagccaggtggaggaaggagcgaattgaacgagagcagtggcttcgggacatggcacagcaggggaaaattacagctgaagaagaagaagaaattggggaggacagtcagtttatgatactggccaagaaagttacagccaaagcactgcagaagaatgccagtcgccctatggttattcaggaatcaaagtctttgctcagaaatccttttgaagccatcagaccaggaagtgctcaacaggtgaagacaggctcactgctaaaccagcccaaagctgtgcttcagaaactggctgctctctctgaccataaccccagtgctcctcgaaattcaagaaactttgtctttcatacactttctcctgtcaaggctgaggcggcaaaggaatcgtctaagtctcagaagatcccagagaaggactctgactggctcacctggagtggagctcctatccctggattcttcaggctttcatttgacccacatggttaagctgggagagacagagtccaaagagaggcggagaagggctattctgggcagaacaaacaattgatgactttatggctctgtggtctgggcagaactgcataaccctagatcaccaaagctgagagcctttaggagtgaggatttgggccgggcatggtggctcacgcctgtaatcccagcactttgggaggccgaggtgggtggatcacaaggtcaggagatcaagaccaacctgaccaacatggtgaggccccatctctactaaaaatacaaaaattagctgacgtgatgcatgcacctgtaatcccagctactcgggaggctgaggcgggagaatcgcttgaacccgggaggttggaggttgcggtgggccgagattgcgccactgcactccagcctgggcgacagagcgggactccatctcaaaaaaaaaaaaaaaaaagtgaggatttgggtcaccccaggctgaaggccaggggaacctgaatgataagggaagggaaaacttaggccacagtctgattagaaatggggctgaattccaccctgtttttcctttactggagattcaatttgaattactctgcctcccttcttattccttttcccttttaaaatagtcatcataatcataaaaatttcttttccnnnnnnnnnnnnnnnnnnnnnnnnnnnnn

SEQ ID NO: 30218 - DNA, 1303 bp, Homo sapiens
  misc_feature 1, 2, 3: n = A,T,C or G
nnnagattttccttagatgatctaaccttttgcagaaatgggctaatatagctgaactagacactgaagcaaagaatgaaaaggaaagcttagtgatcgaccgacctcgcgcgagaaagcagacctaacactacaactcgtttgaggaagacgagctcatggagttttcagagttagacagcgactcagacgaaaggcccacgagatccaggcgcctcaatgacaaagccaggcgctacctccgagcggagtgcttccgggtagagaagaacctgctcatctttgtctggggccggtggaaggacatcctgactcatggccgattcaagtggcatctgaacgagaaggacatggagatgatttgccgtgccctcctggtgtactgtgtcaagcattataagggggacgagaagatcaagagtttcatttgggaactgatcacacctaccaaagattgggcaagcccagaccctccagaaccactctggcttatctgccccagtccccagagggaggaaggggaagtagacgaagaaccagttgctaatcccagagctaaaggatgcagattggctagccacctgcaaccccgaggtggtcttgcatgatgatggctataagaaacacctcaaacagcactgcaacaaagtacttttgcgagtccggatgctgtactacctaaaagctgaaatactgggagaagcagctgagaaagcatttgaaggatctcctgccagggagctggatgtacctctgcctgacatcgactacatggagatcccagtggactggtgggatgctgaagccgataagtcacttctcattggcgtgttcaagcatggttatgaaaggtacaatgccatgcgagcagacccagcactttgcttcctggagaaagttgggatgcccgatgagaagtccctttctgcagaacagggtgttacagatgggacctcagacattcctgaaagaggcaacacagataaagaagacaatgctggggacaaagtagatggcctccagaaacaaacggagagttccagtgatggaggtgatggcgtttttagcgaaaagaaggatgacagccgggcagcccaggatcgctccgacccagacaatcgccctggccagtttcctccgccctcacagctcgtctcagacgtctggtcactgtttaccagcgctgcaaccgcaaggaactgtgccggcctgaaattctgggaccaggtaaccaaggatattgggttcaggaagagatgttcaggagaacctcagaaatggacctcatcaacaaggaagccca

SEQ ID NO: 30219 - DNA, 963 bp, Homo sapiens
  misc_feature 1, 310: n = A,T,C or G
nctctctctgctttcttctttctcagaggcgcggggacgtaggccgtctgattgcttttgttcgggaggtactggttaaaaggcactgctgatttcggctcaccatgggaagtccgccgtgcagacatgtcatccttcttcacatctggcagcttccgatgaggcaagtcggattcagagtcgcttcctctcccatcgctgcttcccctgaggactacatctggtgaaggcgtctgccgagagcgagagccaaaggaatccaggctgtcgaaggaatcatctctgccgtggcgaggaggagagagggatngctgcgctcggaatcccagcagtcgatgtagccactgtctcggatactgcgtttaggactttcaatgtcatcagtgtcctttcgcatctgagccaacaatccttcaaactccttcaggtttagtgtcgttccgctgtaggatgtgcagctgtttgctgcttttcccagccagtaaatggtaactaatacatttttcagcttcctactataatcaaggctcttgactgttactctgttggatgtatcctggaggtcactcgggtcaaaaagttgagattctttaaggccgagctctttacaacctctcaagaataagataatattgtccagtcctgcaatgggggtaggcaatctattgatctttttaacaagtcctggctttatagcattcagcaactcgcagaggaggattccattttctaaacctgtccgaaaatctttatcaccaaaacttctgccagttacttgctgtgagtcgcggttccattaacgggaggtaggcagatggtcagtgagctgaagagagacgtgcatttatttatctcgtcccttcctgcaggtggttagggggtttccagaaggttcctcatctcctcttgtcccactcaacctcccaggcctaggtatggtaaaggcttccccttcccaccagg

SEQ ID NO: 30220 - DNA, 676 bp, Homo sapiens
  misc_feature 1, 2: n = A,T,C or G
nncgcgtccggttctgcctaagctgattcccgcgctttggcttctctgagttggggttgtgtataggggtcttcgaacagttccggaaccagccagcagcctttaattcttgggcggaccacggccggttctgatatcttagggtgaagagagggaggtgtcggccagccaagagagaaaattgcggatcttgggctcaggaagacgggagaaggggttcggggtcccggggtggaagaacggtcgtcgtggttgcgcttatagaagtaggagcaggtggtggatcttaggaaaacggttccccgttctccaagctgttctgaagacatttatgtttcttctcttgatctgatttctagctctgtgctataccgtggcctggaatagttcaatgttttcattttcattgagcgtaaaagtggagatgttaattactgaggaatgtattgcttgaggcagttcaccttcagctttattacttaaaaataatacattatttaagtgtaatatagcaaattgttacagaaaaataatctgtatttttaatgcaaaacagagggttctcgtggcaaccttttactacctttgccttaacctttggccactgttcttggctaagatgagcagccaccataccacctttccttttgaccctgagcggcgagtccggagtacg

SEQ ID NO: 30221 - DNA, 221 bp, Homo sapiens
cctggccggattgttcattttcaagaagttgaatgtctcctgatgaaaacaccagcttcttctgtctcaagggcagctggtgctccatgctgcacacagcttggaaagatagctgtgttctctttcttcccatcgcctgtctgaagcccgccgctcctccagtgcgctaagcccccaccgaggaaaatggagtcgtcgaaccgagactgggaaaagatagt

SEQ ID NO: 30222 - DNA, 294 bp, Homo sapiens
  misc_feature 294: n = A,T,C or G
acggtgatgatgatgatgatgatgatgatgatgaagatgaagaagatggagaagaagagaatcagaagcgatattatcttagacagagaaaagctactgtttactatcaggctccattggaaaaacctcgtcaccagagaaagcccaacatattttatagtggcccagcttctcctgcaagaccaagataccgattatcttccgcaggaccaagaagtccttactgtaaacgaatgaacaggcgaaggcatgcaatccacagtagtgactcgacttcatcttcctcctctgaan

SEQ ID NO: 30223 - DNA, 1832 bp, Homo sapiens; identical to SEQ ID NO: 30096

SEQ ID NO: 30224 - DNA, 3503 bp, Homo sapiens; identical to SEQ ID NO: 30135

SEQ ID NO: 30225 - DNA, 1675 bp, Homo sapiens; identical to SEQ ID NO: 30165
  misc_feature 1, 2, 1669, 1670, 1671, 1672, 1673, 1674, 1675: n = A,T,C or G

SEQ ID NO: 30226 - DNA, 450 bp, Homo sapiens
  misc_feature 1, 2, 427, 439, 440, 441, 442, 443, 444, 445, 446, 447, 448,449, 450: n = A,T,C or G
nnagctgtttcctgtgtgtaaaacgacagctacacctcgggggcagtacgaggtactatggccataattgacaacaagttagggggacatataacagctgaaatacctcaaatatttgatgctgtttttgaatgcacattgaatatgataaataaggtgtgtaatatttcagttatgtaagggggaaattctgcaggatagccttaattcttgaaagctaaagtatgtctgtggatataacataattttaatgccatggagtttaaatatttaaacttgtatattagggaaatactttcttggttttcaagaacttacttcccaggagtttgaaaccaacctgggcaatatagtgagacttcatctctacaaaaagttcaaaaagtaaccagtcatggtggcatgtgccggtagtcccaactactcnaaaggctgaagnnnnnnnnnnnn

SEQ ID NO: 30227 - DNA, 1783 bp, Homo sapiens
  misc_feature 1, 1782, 1783: n = A,T,C or G
nacccgcgcggcccgaggttcggacaccggcggcggctgcctggcctttccatgagcccgcggcggaccctcccgcgccccctctcgctctgcctctccctctgcctctgcctctgcctggccgcggctctgggaagtgcgcagtccgctcttgcccctgttctttgcttctcgttttgttggtgaagatatcacagtgatgtctgcattcaacctgctgcatttggtgacaaagagccagccagtagcccttcgagcctgtgggcttccctcagggtcgtgtagggataaaaagaactgtaaggtggtcttttcccagcaggaactgaggaagcggctaacacccctgcagtaccatgtcactcaggagaaagggaccgaaagtgcctttgaaggagaatacacacatcacaaagatcctggaatatataaatgtgttgtttgtggaactccattgtttaagtcagaaaccaaatttgactccggttcaggttggccttcattccacgatgtgatcaattctgaggcaatcacattcacagatgacttttcctatgggatgcacagggtggaaacaagctgctctcagtgtggtgctcaccttgggcacatttttgatgatgggcctcgtccaactgggaaaagatactgcataaattcggctgccttgtcttttacacctgcggatagcagtggcaccgccgagggaggcagtggggtcgccagcccggcccaggcagacaaagcggagctctagagtaatggagagtgatggaaacaaagtgtacttaatgcacagcttattaaaaaaatcaaaattgttatcttaatagatatattttttcaaaaactataagggcagttttgtgctattgatattttttcttcttttgcttaaacagaagccctggccatccatgtattttgcaattgactagatcaagaactgtttatagctttagcaaatggagacagctttgtgaaacttcttcacaagccacttataccctttggcattcttttctttgagcacatggcttcttttgcagtttttccccctttgattcagaagcagagggttcatggtcttcaaacatgaaaatagagatctcctctgcagtgtagagaccagagctgggcagtgcagggcatggagacctgcaagacacatggccttgaggcctttgcacagacccacctaagataaggatggagtgatgttttaatgagactgttcagctttgtggaaagtttgagctaaggtcattttttttttttctcactgaaagggtgtgaaggtctaaagtctttccttatgttaaattgttgccagatccaaaggggcatactgagtgttgtggcagagaagtaaacattaccacactgttaggcctttattttattttattttccatcgaaagcattggaggcccagtgcaatggctcacgcctgtgatcccagcactttgggaggccaaggcgggtggatcacgaggtcaggagatggagaccatcctggctaacatggtgaaaccccgtctctactaaaaatacgaaaaattagccaggcgtggtggtgggcacctgtagtcccagctactcaggaggctgaggcaggagaatggcgtgaacccggaaggcggagcttgcagttagccgagatcacgccactgcactccagcctacatgacaatgtgacactccatctcaaaaaataataataataacaatattagaactagctgggcatggtggcgcatgcatgtagtcccagctactccnn

SEQ ID NO: 30228 - DNA, 1490 bp, Homo sapiens
  misc_feature 1, 1490: n = A,T,C or G
natagctgtttcctgtgtggaaaagaacagctccaccgcgggggcggccgcgacgaaaggcgcaggcgtcaggagggtgctgcccgctggagtctgcaaatgctgccttccaaaagggacctggtgggttctgttctccctggcaacacatctggctgttccagccaccagcgagagcccaagactggtaactgtccacaggcaacagggagtcatgtcgcggttctccaggagcacccagagtctgcaccacagacacgtccaggtaactggccataggctggtaggttcccggatatcccggatagaaggcaaactcagtggggcggctggggtacctcttccccggccgtgggagtctccgcggggtacgcggccagggtggctgcctgggcacagggtttcagcgagctccgggacactcggcaggagtagtacccgcctccaaagtaaccataaggcacgggagctggggacgtcccctggggcaccccagggcatgggtggcattgctttggcggctccgccgagcctggcagatccaagggggcatagttgacagcaggcatcagcgtaggcgccgctgggacacaccagccctcagtcactgggagaagaacctctcataccctcggtgctccagtccccagctcactcagccacatacaccatgtgtgaagaggagaccaccgcgctcgtgtgtgacaatggctctggcctgtgcaaggcaggcttcgcaggagatgatgccccccgggctgtcttcccctccattgtgggccgccctcgccaccaggctgtgatggtgggaatgggccagaaagacagctatgtgggggatgaggctcagagcaagcgagggatcctaactctcaaataccccattgaacacggcatcatcaccaactgggatgacatggagaagatctggcaccactccttctacaatgagctgcgtgtagcacctgaagagcaccccaccctgctcacagaggctcccctaaatcccaaggccaacagggagaagatgacccagatcatgtttgaaaccttcaatgtccctgccatgtacgtcgccattcaagctgtgctctccctctatgcctctggccgcacgacaggcatcgtcctggattcaggtgatgggcgtcacccacaatgtccccatctatgaaggctatgccctgcccaatgcatcatgcgcctggacttgggtggccggacctcacgaactactcatgaagatctcacagagagagggtatcctttgtgaccccgctggagagaaatggtgcggacatcagggcagctggtagtggcccggtttggaatggatggccgagggtccctcccgggaaagagggtccaggggggtcccaccggcagggcgcgccggcgggaacctcgccctggggggcgcggcggacccaccccggggggcgggtccttcacgccccctcccgtggagaaccccaaacagaggagcttan

SEQ ID NO: 30229 - DNA, 1609 bp, Homo sapiens
  misc_feature 1588, 1589, 1590, 1591, 1592, 1593, 1594, 1595, 1596, 1597,1598, 1599, 1600, 1601, 1602, 1603, 1604, 1605, 1606, 1607,1608, 1609: n = A,T,C or G
ccgcggtggcggccgaggtacctctccaggtaagtggataatagtcgccatgcttcatctgtagcactagactccttagtagtgatgacagatgagagctgattggctgctagccaggcccaggcttctgcttgtgctgcctctcctccaaattgcagaataacttgtatcaccactgtgtaatcaacaagctcttgtctcatggagtgcctctgcctaattggcttataaacagttacaagaaggttgatgctgctgaattgcttcgtttatacttaaactatgaccttttagaagaagctgtggatttggtgtcagaatatgtggatgctgtattgggaaaaggacatcaatacttcggaattgagtcctccactgtccgcgacagtcccaagggtgtggcattccatactcctctattgatcagcttctcccacagctcttgtgcgagagaacatgtcgccatgaagttcactagcatccgctaactttgcctcctaataatacttggagaacggtagcgaaggatctaacatcaaataagttggataaggcagcacgggatttattatatcgtcggaccttgtgatttggattgtcacctagcctttgtaaccgcttggtgcctcttaggacttaagactaccctacaggaaccctgtactcaaggccgattttgtaactgtaaatgatgtgtacaacattcaagtctgcattctgcacaagataggagggcggaagagtcagaggacctgtgcttgctggtggtgctaacactatttcgggtgtcaaccttggtctcaaatagctgcttttgtatatgattcacgagcttttttagagtttatatttttttaaactaccgaagacattcattatctgcaaattaagactcaccttcactttccaaaatagctgagggttgttggcttgttgtagctgaccaccaaaagcagtcactgcaaatcttttaattcttccctatcaccttttgtattttaatgcaattattttggtccagaactgacctgtattttctgtattgtacacaaaagctaataattttgtgtactttttatttattttggaggttttatatgatcttcaattgagtattaaataatttgcctagattaagcctaaaatgatgaccagctaattaaagaagatattttgaatctggttctgagctaaagttgagtaaattcttagctaagaaaaaattggaaatccatcatctatattagcaacagattctcagagtaaattgttaacttctatgatttatgataatcaagctggacttgatcatacaagttagtctcataatgtattggaccaaaatgtaaacttcattggtcagatttagaagcattcatgctcacaagttttgggaaagtgaaaaataataaaatcatcttggattttattctgtatattaaaatttatcttttaaggaaacaatctgtatactacttgcttgtatagccttttgacccttcttgagtttttcagaagcctttaatttttatactttcaataccatatttacattatatactttaattaacaatgtgagtttctctgnnnnnnnnnnnnnnnnnnnnnn

SEQ ID NO: 30230 - DNA, 1479 bp, Homo sapiens; identical to SEQ ID NO: 30097
  misc_feature 1, 2, 3, 1473, 1474, 1475, 1476, 1477, 1478, 1479: n = A,T,C or G

SEQ ID NO: 30231 - DNA, 402 bp, Homo sapiens
  misc_feature 402: n = A,T,C or G
gcccagccaagatgaatgcttgtaacactgacctgcccctatctctagtaagcttctgtaacttgatagatagattattccaatattttaagatcgcctgtcacttgttactgtggccttgattctctatgcaatatattccttttatggatccagacaccattttaattctcttttgcacctgctatacagggtaaaataacagatgtgtccatcttagatgaaggggtcaaagaggaagtagtggggtggggcttttggagctgatgattgcaacctaaatatttacttcaattgcacagattcccattgcaagtcgagagcgatgtggcgctccattctcctgctgcactaaagatcccgctgaagatgtcatcaacactcaatgtggctatgatgccn

SEQ ID NO: 30232 - DNA, 4922 bp, Homo sapiens
  misc_feature 1, 2: n = A,T,C or G
nnccgggcagcagaggggcaaagtggcaggaacctcttaaagggcgagacgggcggcgaccgagaacgcggtcggcccggtccccgccgcacccagcccagagaagagtttagtgactgaggccgaaaattcacagcaccaacagaaggaagagggtgaggaagccataaactcaggccaacaagaacctcagcaggaggaatcttgtcaaacagcagctgaaggagataattggtgtgaacagaagctgaaagcttctaatggagacactcctacacatgaagacttgaccaagaacaaggagcggacatcagaaagcagaggactttcacgactattctcctcgtttctcaaaaggcccaaatctcaggtgtccgaggaagaaggcaaagaagtagagtcagataaagaaaaaggtgaaggaggtcagaaagagatagaatttggaaccagtcttgatgaagagatcattttaaaggccccaattgcagctcctgaaccggaactcaaaacagacccatctttggatcttcattcattaagcagtgcagaaacacagcctcaccattacaattaagaattatttttagagtcttcttatttctgaagcatgtgaatattatctcgatcgttaaaagtcctgctcaggaagaactcagagaagatccagattctgaaattaaggaaggagaaggacttgaagagtgctccaaaatagaagtaaaagaagaaagccctcaatcaaaagcagaaacagaattaaaagcttcccaaaaaccaatcagaaaacacaggaacatgcactgcaaggtttctttgttggatgacacagtttatgaatgtgttgtggagaaacatgctaagggacaagatttgcttaaacgagtatgtgagcatctcaatcttttggaagaagactattttggtctagccatttgggataacgcaacctctaagacatggctggattccgccaaagaaataaaaaagcaggttcgtggtgtcccttggaattttacatttaatgtaaagttttatccacctgacccagcacagttaacagaagacataacaagatattatttatgtcttcagcttcggcaggacatagttgcaggacgtctgccctgttcctttgcaaccttagcattattaggttcttacaccatccagtctgaactgggagactacgacccagaactccatggcgtggattatgttagtgattttaaactggccccgaatcagaccaaggaacttgaagagaaggtcatggaactgcataagtcatacaggtccatgactccagctcaggctgacttggagtttcttgagaatgccaaaaagttgtctatgtatggagttgatcttcataaagcaaaggacttggaaggagtagatatcatcctaggtgtctgctctagtggccttctggtttacaaagataagctgagaattaaccgcttcccttggcccaaagtgctgaagatttcttataaacgtagtagctttttcatcaagattcggcctggagagcaagagcagtatgaaagtaccatcggattcaaacttcccagttaccgagcagctaagaaattatggaaagtctgtgtagaacatcacacgtttttcagattgacatctacagacaccattcccaaaagcaaatttcttgcgctaggatccaaatttcgatacagtggccggactcaagctcagaccaggcaagctagtgctctaattgacaggcctgccccacacttcgagcgtacagcaagtaaacgggcgtcccggagcctcgatggagcagcagctgtcgattcggcagaccgaagtcctcggcccacttctgcacctgccattactcagggtcaggttgcagaaggtggcgtcctagatgcctctgctaaaaaaacagtggtccctaaagcacagaaggaaacagtgaaggctgaagtgaaaaaggaagacgagccacctgagcaagctgagccagagcccacagaagcatggaagaaaaagagagaaagactagatggtgaaaacatttatatcagacatagcaatttaatgttggaggatttagacaagagtcaagaggagatcaaaaaacatcatgccagcatcagtgagctgaaaaagaacttcatggagtctgtaccagaaccacggcctagtgaatgggataaacgcttatccactcactcacccttccgaactcttaacatcaatgggcaaatccccacaggagaaggacctcccctggtgaagacacaaactgtcaccatctcagataatgccaatgctgtgaaaagtgaaatcccaaccaaagacgtccctattgtccacactgagaccaagaccatcacttatgaggctgcccagactgtaaaaggtgggatttcagagacacgtattgaaaagagaattgtgatcacaggagatgctgatattgaccatgatcaggtccttgtacaagccatcaaggaggcaaaggagcagcacccagacatgtcagtgaccaaggtggtcgtccaccaggagaccgagattgctgatgagtgagctcaggaactaacctaccccaactctgcccttctcccatccaagagaaaccagcaaaatgataaagaagctaacctgccatagtcagacttcagactttcaagattattctaaatcaccagaaaattaatttcagtttctattgggagtttataccaagagattcttctagatctcattgatccttttgaagagctttttctatattaggatatcagaattgttcaacttttcactctatagactgttttaagagttttggggtttttttaattgggtggtttgtaaccccttcagcctagcctctctgcccatttatttccaaccccaacagacactgacagggtccatggaattcttcgggaaatcctccaaggactcttgtcagctgtgttggaggccaaagccagcttagtgggacttccgcgtctctccctagtcttatcccctttggatgatggcagaaacttcatgaaccagccctttctcagagccagtgatgtgagtgtatcagaatgccagggagggcaccagccctgatccacagacctcggaaagatgcccctgttcctttgttgcgggtggttttggtaaggcagagccctctgctgagaatgtagtattgtttttcccctctccctcctgctttctttttggagcttctttgggtcaaagacatggaagttgcttcagatatctgatactgtgaatgtttgaacatatccgtggccttcacctctccagctacccttttacctcatcagaagcagtggctcagctaagtgctccccctagctcccatctcaggagaccaaatctcacagaaaaataggcactttgggccaaaagctctaatggaacatttttagtggtgatttggggaaggaaagttaatgaggtttttaaaataaggttttctagttttgagagtgtgcacttcacacaggggaatggggttacttctgtctgatcctgggcctttctttcatcccaaatgacaaggaatgtggctcagagaagggtttttcttttttgacctttcttctctcaacaggaacctgcctgaggacacccttctagagcaaggaattgacttttaggagccgttctccccacaagacaccacatgacaaggggtataagccccagccctgctcattcccactcaccagctgaggtctgtcaggttttgaaggcttgattttgtggtgggtttggggcttagttttcctttttttcattttgatttttgaaagtgaagatgatgccctaattcctggtaaggatttggggcatagttttttgtttttttgagacggagtttcgctcttgttgcccaagctggagtgcagtggcgcgatctcggctcactgcaacctccgcctcctgggttcaagcagttctcttgcctcagcctcccaagtagctgggatgacaggcgcacaccaccacgcccagcaaattttttgtatttttagtagaaacgggatttcaccttgttaggctggtctcgaactcctgacctcaggtgatccacctgccttggcctcccaaagtgctgggattacaggtgtgggccaccatgcctggccatgctgactttttaaacttacttccacagccaggcaggggactcactgaccagagagacagatgtgtaaagagaacaaccacacctacctttaggagactactaagtaggcagggatactctcagggtatctccctagatttattgctggggaaggcagcagggcctttccatccaggactctttgaataatgtggcttactagggatggagctgaaaatatttgcttatggactagggtccttcttgcagagaggtggcagcaagcttagcctgcccctgggttccataaagaggttctagctggtctgttaccttggtaatttgagttgtggtggtgctgcttggggtctcagatgtgatagtttgagctgtcagcaagactcctgggtccatgtctccgctgttgtcgtcagtctgggcagcctcataagtgatggtcttggtctcagtgtggacaatagggacgtctttggttgggatttcacttttcacagcattggcattatctgagatggtgacagtttgtgtcttcaccaggggaggctgtgaagcagtaaggaaagagttactagagtatttctggaggcaatggagaagtaatcttctgacactgatctgatcaaagtgttagctttaattaagtacagagctagctcaatctacaaaggtgtttaccctgcctaagacttcgacagtattccaaagtaaccctgacaaggtgtcaaatcatgagggatattaaaaagcagcattactgtaatca

SEQ ID NO: 30233 - DNA, 1770 bp, Homo sapiens; identical to SEQ ID NO: 30085
  misc_feature 1, 2, 3, 4, 5, 6, 7, 8, 9, 1691, 1764, 1765, 1766, 1767,1768, 1769, 1770: n = A,T,C or G

SEQ ID NO: 30234 - DNA, 771 bp, Homo sapiens
  misc_feature 765, 766, 767, 768, 769, 770, 771: n = A,T,C or G
acacacatgggtatgctctttatgcagagtctcactgttgcccaggctggagtgcagtggcgtgatctcggctcactgcgagctccgcttcccaggttcacgccattctcctgcctcagcctcccgagtagctgggactacaggcgcccaccatcacgcccagctaattttttgtatttttagtagagacagggtttcaccgtgttagccaggatggtctcaatctcctgacctcatgacccgcctgcctgggcctcccaaagtgttgttgggattacaggcgtgagccactgcgcccggcctcttaatgtatattaaatagccttagattgaaagaaactggtcttccagaggttgcttctggggagggaaactggtaggtaggggactgaggaaggtgtcttcattgtatactcctttttgatcatgtgtaaacccctgtgctagagggaaattttggaaatgaagaaaacaggaaaacactgagctaaagaaccaaattgttcacttacgacatggggattatttttttctgcatataaacacacatatatagtctagggttaaaggtgaatctacaacttaaagcatacacctttgcaatattttaccaataattcataattccaaattagaaagcacatccttatactgttttgtggggtttttgttttgaggcagagtctcactctgttcggcccaagcaggaaatgcagtagcgtgatctcagctcactgcaacctccacctcccgggttcaagagannnnnnn

SEQ ID NO: 30235 - DNA, 970 bp, Homo sapiens
  misc_feature 1, 970: n = A,T,C or G
ncacgaggccgagtgtcccggagctcgctgaaaccctgtgctggactgttcctcaggagcggcctgggtacccagtatgtgcagggagacggaaccccatgtgacagcccactccaccagggttcccaaagaacctggcccagtcataatcattcatcctgacagtggcaataatcacgataaccagtacacttactgcaactgcatgttgtctaaaatagtttttctataggatgtatataaaaactaatccctcttgagctgatttataatgtgtgtatatagccacacataaaaagctagtaatagtagggctctcagaaaatactttccagttgtctaaccttgaatgttattaactcttctatattacaggagatacaactcgtcaacgaatcaaattcagtgatgacagagtatgcaagagtcaccttctcaactgttgtcctcatgatgtcctttctggaactagaatggatcttggagaatgtctgaaagtccatgacctggctttaagagcggattatgaaattgcatccaaagaacaagattttttctttgaacttgatgccatggatcatctgcagtcattcattgcagattgtgatcgtagaacagaagtggccaagaaaagattagcagaaactcaagaagagattagtgctgaagtagcagcaaaggcagaacgtgttcaaggagaagtcaaagctccgtgccccttccagcacaaaagcaagtccattgaaccggtggctttttctgtcatctagctcctaaaaacaaaaacaaaggtaaattcctggagttcaacctaagtgttttgggtcaaaggtggggtcaaaggtgggctgtacaagtgttcatgaattgggaggccggagaaaagacactgagggtttgcagagagggtcttctgttctggagtctagttctattcagtctctctgagaggtgggtcagaacataaggn

SEQ ID NO: 30236 - DNA, 2037 bp, Homo sapiens
  misc_feature 1, 2037: n = A,T,C or G
nggtttctgtgagatttgttggatgaaccgtgttttcggtggttcctgtttgttttttttgttttccgagatggggtctggaatgcagtggtgcgatcatagctcactgcagactcaaactcctcggctcaagggatcctcccacctcagcctcctgagtagctacgttgaaaggcatatgctactacacgcagctaatttttaatcttttgtagagatggggtctcgctatgttgcccaggctggtctcaaactcctggcctcaagcaatcctcctgccacagactcccaaagtgccgggattataggcatgagccactgcgcctggcagagcctggtttttttttaatacttaatcttagccaaaaggctgagaagcgatggagaatgtggatttttggacgtgaattctgttgggtttggttttccagtagcctattctcttcgcagcctttgaacctaacacctctttggccccagctgctgtctgcacttgcagaccctcctgcaagctcaccctgtactaccgccgggggatgccgtgatcaaggagcatcctgcctgtggctggcagaagaggccattcactgcccattcgaaatctcaggcctcctctgactctgtaggaccctgtgccagtccaaggggggccggggtctcagctctgttccacagtgcacacgcctgacccaccctgggcccttcttggccccaagactctccctcggctactctatcaggaatggttttgaagaatgcaaagcaggacaggctcacaaacctcagaaacctaaactatatagcagcggcggtggtggcagcagccacccacaaaaagcaagaggcaggtgaattcccagcatccccctccacccacctgcctcctctgcttctgagagttaaggtcacgccaccaccttggtccctattctcacacactagaagacgggttagcagtttggcactccatgttgaaaagttgccaacccctgcccttcaggaaaatgtcctcggcctccacctcccacggacagctctgcctccttcctgccctctccctccccactccctctcaccctagtcctagcccctttaactgtccggagaacggacccgaaagatgtggatggtcccgttactgagggacacgaccaggtacctgccatccaccatggtggtaacccggggcttttccaggccgtggtaggctgtcaggaagtctccaaggagggaccccttcgggtccaggatcaccaccttgttgacttctcgaaggctcagaaagatgtagcccttcttatccacagacacggagcccggctggcagccatgcaggcctggccccttgtactccccaaccacctggcccagcccatcacagattaccacactattctgctgccagtccgaccccacgaaatgcccctgggggctggtggtcagaaacaccagcgcccgcaggccccggctggccttgcctccaggaatgaaccgggtggccaggctgccttccatattgtacacctccacgtggcccgccacgctgacagccacgcggtccccgctaggcagtgccgccaccgcgtggctggcctgggagaggctcagggccctgcgccactgcacttcgccgttggggttgatgagatagagccgtgcgctagcggagaaggccaccgcgctctgcagggcggccacgctgcaaggggagcagccctcagggaccggcacggtgcccttgtagtcgccgttgagggagaagcgtttcagtgcccggttctgctcatccgccaccaggatctcccggggaccgaagggacagagcccggtgatccggggggaccgcttgtctccaggcatccgcgtggggaaactgcagtaaaagatgggtctggggaggaggccagagccgtccagattcggccccagggctgggctgggctcccgggaaattgacttgagcctgcctttgaactttttcttcttgttgggtctgccacccctgtggggctgggcggacgcggggcgactccctan

SEQ ID NO: 30237 - DNA, 834 bp, Homo sapiens
  misc_feature 831, 832, 833, 834: n = A,T,C or G
gtcctggagcttgacgcgctggagcttgagaggtcagagagggtccttgcccccggcctgggactccggagttgcgtttctacccgtgcttcaaggtctagcccagccgaatccgcgtcgggctgtaactcgagtgccaggtttctgtatacatagccttcaggactgcttttggtggaaagagatagcaggtggtgctaattcactgtgttggtgggaactctggctacactgaaagattcttacccacgcgtccgtttgacccccaggctggagtgcagtggcacgatcttggttcaccacaatctcgtctcgaaggctcaggtgattctctcacctcagccgcctgagtagctgggaccacagtttcagctgtgagttcaacatggaggcaaatcagtgccccctggttgtggaaccatcttacccagacctggtcatcaatgtaggagaagtgactcttggagaagaaaacagaaaaaagctgcagaaaattcagagagaccaagagaaggagagagttatgcgggctgcatgtgctttattaaactcaggaggaggagtgattcgaatggccaagaaggttgagcatcccgtggagatgggactggatttagaacagtctttgagagagcttattcagtcttcagatctgcaggctttctttgagaccaagcaacaaggaaggtgtttttacatttttgttaaatcttggagcagtggccctttccctgaagatcgctctttcaagccccgcctttgcagcctcagttcttcattttaccgttagatctgagacctctgtgcgttccatggactcaagagaggcannnn

SEQ ID NO: 30238 - DNA, 533 bp, Homo sapiens
  misc_feature 1, 2, 170, 532, 533: n = A,T,C or G
nnctggcctggagagcggccaccactgcggatctatggaggaagaaatgatgtatatcactcatccaaactttaaggtcaaaggtgagaaggaaggtcaggaagaacatggcctggccaaatgtttttcaaagagggtctctgctgtcccagttcagccatcatcatgtngtagtgttcctgctcactttcttcagtggagatctggagcagcaaccatttgttccccagtgcagagaaggcgactcttttcctcggcacactggataccattttcctcttctcctatgctgtgggcctattcatcagtggcatcgttggggatcggttgaatttgcgatgggttctgtcttttggcatgtgctcttctgcattagtggtgtttgtctttggtgcgctcacagaatggctgcgtttctacaacaaatggctgtactgctgtggcagcaggctgtggcatgtgatgaacggcaagcatacccgccacagcccccgcggtgctcgctcgttcttttccaccacaggaaacagcnn

SEQ ID NO: 30239 - DNA, 412 bp, Homo sapiens
  misc_feature 1, 2, 3, 4, 5, 6: n = A,T,C or G
nnnnnncctcagctgagagctaccatggaggcttattctaggatggctaatcgagacttgttaagcagtgtgagccgtgagttttccggatatgtagaaagtggtttgaagaccatcttgcagtgtgccctgaaccgccctgccttctttgctgagaggctctactatgctatgaaaggtgctggcacagatgactccaccctggtccggattgtggtcactcgaagtgagattgaccttgtacctgcccgggcggccgctcgacccgtgcgtccagggagcaccccaaagcaacagcaccaggactgccaggggaactgcaagactcccggagggcgccatttcgccgcttgcccacctcacagggagcgcggtcgcagctcccacttccgccctcgcgggatgctcaacg

SEQ ID NO: 30240 - DNA, 2496 bp, Homo sapiens
gccatggaagaactgtaatatgagtaatttattaatctcaatttattatatgacagtattcaaaaataaagggaaaaatatactgaagttcttctagtattctagtccccaaaggaaaaatataatccaatctacaccaggcttccttcctttcccccaatctttgctgatttcatcagctttgattctttctaagacatttccttctgctcttttctgtgcttttgaacagaggcccacaacagcttccctatggggcccatgggagtataattaatcaagtaatcagctagccaacactgttaaaatgttttaatatcaatgtaaaatgagatgagagttttacaagcagatttcagaacaccaacactgatttccaatatgatttctctccctttcagaagcctaaagatgaacatatacaaatcttaggggtttttacaaaaagcatgttttttttctattttcatacatatacagttgacaaacatgcaaaataactaatttccaaatcaaaggtctctagcagaaacatccaaattaaaaatgaagcatttaaatttacttactggccatgaaatccagcaagaaaccaccctttcccccacacttcagaaaaaccaccaattccttcctagaggattgatggcattaacagtacttggctctcccttgtcagcatccagacatccccggttcaatcttgtaaattaatgttacagttccaattactaaaaatgccccaccatcttcttcactgcattacagcttagcaaggcacctaccaacaatgcagtttgggaaatgagccatgaaaaacataatggcctgagagttaaccatacatcctaggtctgccaattgaatgaggacattaatgggaatgtaaaattccaggagacattcttttattctcctctccaagttactagcatgtccagtatcagaaagaaaacagtagaggaatgtggcaatagccacatatgtgaaaccttagtagagctaaaaccaaactaaacaaaatgcaaactacagtgggacaaagaactgactctcatttgagttttatttgtggcttcaagcaacctccaaactaagaggctcataaattaggaaataattttaatgcactgagggttcagtaatttgcattagaatattattaaaatttatgttttgtaagagttgcatatacttcattgttgaattcggtgccaacagtaaacaaataactaaatgagatataacctcaaatatacccacttccaaaactaaaaagcattttaacacatttttctctgccaccctcaagtgaatcagtaaaacaaatagaaaatcaaaacatgattgtaatattacataagacaattattttacttaaataacttagtctgttccaaagtatttctgtccaaaatgtgtaggtgcaacaggatgaacttcagtagttaaaattgtgatctctggaaactcctgaatgattgatttggcaccatgaggagtggagaacagactgagtaggatgataacactgggttgaactccatgttctataagaacctttacagcttcaattacagtatttccagtgctgagaattggatacatcagaaggacttttctccggtaaatgtctggggggaatttggcataatatactttggctctttgtgtctcctcatcactctgaatcaggatctttccaattcgtatggatcgacagcagtctcgtaaaccttgttccattgcctcaccgcttctcattatgctgaccccacaatttcccttctcaaatttcactccttcatacttgtaccctgttggagtggtcaccatgcattctttatatggcagctgattcaatccctcttccacaacaagtctgatcaaacgatccgcagaaaacatgaagtcacctctactggctgtcttgtcccggatgatggtctgtagctcccgtatctgatcattcataggcagcagcttaagctgcgccccgatctgccgggagagttcgcagtcctctaggaaggagttgccagctggtgcgtcatagctgctactgtcaccactaccactgttgccctctgagttgaggctggagccgccgcaggccccagagtccagctcggccggcaggctagaatgggcgtaccccgtgaggagaatcaccttggccctggaggctctgtttccccctgcgtggtccaggatcagatcgccaggtcgcagctgctcgggacttggggttgaggcagagtttacttgctggttgtgacagggcatggagtccggacactgtaactccgtggccatacaccgggccccgggctatccccgctgctactgaacactaaagataaagaggaacgggtagaaaggacagatgctcacgtgctctctcggttgctcccgcctcctcagaacatctaaccctggctgtcctttcacccctaggccgctgttggtttcctcggacgcggggcggacgcgtgg

SEQ ID NO: 30241 - DNA, 915 bp, Homo sapiens
agtgcagcgaaatatgccatcaaatgaaaagccgaaatgcccagaactaccaccatttccatcatgtttgtctacggtccacttcattatatttgttgtggtgcaaactgtattattcattggttatatcatgtataggtctcagcaagaagcagctgccaaaaaattcttttgactaccattttcctgtgtacacagcaactaaggtaatcctcaccgctcctaagctgctgtccatcctcaggcttttctcattttaaataggagaaaactgaagttctgtgcctgcccacagtttcccagggaggaaacgcagagcctgaactgcaacagagcccgtccagcttcacggcccacgccgcctcactgtgctcggctgcctcgatcaagtctatctacatccacagaacaccaggcctggctctggggaccaacttcatcaatggtcatcggtacggatatcttcaactagacccctgaagagtaggatctgttctattttgttcagaacccagcatgatgctgtcctaacaaatactaaagtggtaactactctccttcaccagccctcagactaaagtccaaacagatgtaccggcccaggagccccggcagcacaggagcagtgcctcctttgaaactcagctctgcaggggagacccagggattaaaggctctgaatctgtaaggcagacagccctgcactcttgcttactgtctggggagaccttgggtgggtaatttaaaatctctgtgcctcagtgtcttctataagatggagcttttgtaaggaggaattgagtttcatgcctagaaagtctaaagtctggctctcaggcagggatcaataaacagtcgctcgtgatttctatcactgtggctgagggcagacactcagcccattcttaccggacg

SEQ ID NO: 30242 - DNA, 1780 bp, Homo sapiens; identical to SEQ ID NO: 23518
  misc_feature 1, 1771, 1772, 1773, 1774, 1775, 1776, 1777, 1778, 1779,1780: n = A,T,C or G

SEQ ID NO: 30243 - DNA, 1479 bp, Homo sapiens; identical to SEQ ID NO: 30097
  misc_feature 1, 2, 3, 1473, 1474, 1475, 1476, 1477, 1478, 1479: n = A,T,C or G

SEQ ID NO: 30244 - DNA, 3902 bp, Homo sapiens
  misc_feature 3901, 3902: n = A,T,C or G
cgtccgtggagatggcggctgcggctgagtgacggacggtggaggcccagagcccgggcctgaagggggggacaaacctgggtgcccgcaggagcccggcagggtactgtgctaaaccctggggagacggcgaagtggaaaacatatagagtctgtgccctcccagattttacagtcttacttggtcacttcacgtatgtacctgcggttataaattgagatgagtgctgtgaaggagaagtccattctgatgctctgagtgtcttacaagtatcaagaacttactatatgtggttgaataaacaatcaaggtaaagagcatcaagtaaaaacttctgcttgttgataagtacttcagacattcccccagtggctgaagtggcatatgaattatgaagttggatcatttggaatgaatgtaagagaattgccaagggctcctcctactccagagaggaaacctcatccagggccatgaagccacttcctcaccatctgtgtgctgcttaagctaatgctgcgggaaccatggttccttgggaggaatcaagctgactcttggcatgagattcctgccttcctagggttgagagcggcactgccatggcttctctggacgacccaggggaagtgagggagggcttcctctgccctctgtgcctgaaggatctgcagtctttctatcagcttcactcacattacgaggaagaacactcaggggaagaccgtgatgtcaaagggcaaattaaaagtcttgtccagaaggctaaaaaagcaaaggacaggttgttgaaacgagaaggggatgatcgagcagagtcagggacccaaggatatgagtctttcagctatggaggggttgatccttacatgtgggaaccccaggagcttggtgctgtgagaagccatctttccgacttcaaaaaacaccgagctgctagaattgaccactatgttgtggaagtcaataaactaataatcaggttagagaagctcactgcatttgacagaacaaatactgagtctgcaaagattcgagcaatagaaaagtctgtggtgccttgggtcaacgaccaggatgtccctttctgtccagactgtgggaataagttcagcatccggaaccgccgccaccactgccgcctctgcgggtctattatgtgcaagaagtgtatggagctcatcagccttcccttggcaaacaagctcaccagtgccagcaaggagtccctgagcacccacaccagccccagccagtcacccaacagtgtccatggctcccgccgaggcagcatcagcagcatgagcagtgtcagctcggtcctggatgagaaggacgatgaccggatccgctgctgtacacactgcaaggacacgctgctcaagagagagcagcagattgatgagaaggagcacacacctgacatcgtgaagctctacgagaaattacgactttgcatggagaaagttgaccagaaagctccagaatacatcaggatggcagcatcattaaatgctggggagacaacctacagtctggaacatgccagtgaccttcgagtggaagtgcagaaagtgtatgagctgatagacgctttaagtaagaagatcttaaccttgggcttgaaccaggaccctccaccacatccaagcaatttgcggctgcagagaatgatcagatactcagctacactttttgtgcaggaaaagttgcttggtttgatgtcactgccgaccaaagaacagtttgaggaactgaaaaagaaaaggaaggaggaaatggagaggaagagggccgtggagagacaagctgctctggagtcccagcgaaggcttgaggaaaggcagagtggcctggcttctcgagcggccaacggggaggtggcatctctccgcaggggccctgcccccttgagaaaggctgagggctggctcccactgtcaggaggtcaggggcagagtgaggactcagacccgctcctccagcagatccacaacatcacatcattcatcaggcaggccaaggccgcgggccgcatggatgaagtgcgcactctgcaggagaacctgcggcagctgcaggacgagtatgaccagcagcagacagagaaggccatcgagctgtcccggaggcaggctgaggaggaggacctgcagcgggaacagctgcagatgttgcgtgaacgggagttggaacgagaaagggagcagtttcgggtggcatccctgcacacacggactcggtccctggacttcagagaaatcggcccttttcagctggagcccagcagagagcctcgcacccaccttgcttatgctttggatctaggctcttccccagttccaagcagcacagctcccaagaccccttcacttagctcaactcaacccaccagagtgtggtctgggcccccagccgttggccaggagcgcttaccccagagcagcatgccacagcaacatgaggggccctccttaaacccctttgatgaggaagacctctccagccccatggaagaggccactactggtcctcctgctgcaggggtttccttagacccttcagcccgcatcctgaaagagtacaatcctttcgaggaagaggacgaggaggaggaagcagtggcagggaatccattcattcagccagacagcccagctcctaaccccttcagtgaggaagacgaacatccccagcagaggctctcaagccctctggttcctggtaacccctttgaggaacccacctgtatcaacccctttgagatggacagtgacagtgggccagaggctgaggagcccatagaggaagagctcctcctgcagcagatcgataacatcaaggcatacatctttgatgccaagcagtgcggccgcctggatgaggtagaggtgctgacagagaatctgcgggagctgaagcacaccctggccaagcagaaggggggcactgactgaccagcagtggagagggcacctttgggcccaggggtctggcaggagccagtggagcaggacagagggcaggcaggatggatggggaaggtggcagggtgagaactcagatgcacacaggtgaggggcaggaatctgctgttttgtgttgcgcactttgaggtatttccactacagttgaataataaaatagaaactagaacagggagaatcagcattcagttgctgcttttcctgtttattattactatcttttgtaatcggaggtttaccccttttgaagggactttacatttttactaccgagatataactaaatgcagctctgttgggcccagggcagaaatggctgctgtgtacctcttgggtccatttgctactgcctagtcttggttccttatgcagtattatagggcagcctttttagagcccttcctttagccaagacagagaagatagattccactgagctctattctgctctgacagaagtccatccctagtaggctgtgagttccatttcacctggggccgcctctcccctgctctgcacttcctgtctgtacaatagaagggggaggtgctgctatgaaggggagagtttagacccaggagagcccagcacctctttttaaggtggggtgatgggaatatttcaccagggtctattttctcagtttaagttcttttttgtctctttcaggaagttaagctcccagtgcagggtatcaatgtgaatctggtcctgagctttttagaaaataagagtggtggccgggcgcgctggctcacgcctgtaatcgcagcactttgggaggccgagacgggtggatcacctgaggtcaggaatttgagactagcatggccaacatggtgaaaccccgtgtctactaaaaatacaaaaattagctgggcgtggtggcagacgcctgtaatcccagctacnn

SEQ ID NO: 30245 - DNA, 498 bp, Homo sapiens; identical to SEQ ID NO: 30179
  misc_feature 1, 497, 498: n = A,T,C or G

SEQ ID NO: 30246 - DNA, 586 bp, Homo sapiens
  misc_feature 1: n = A,T,C or G
natcattactagtgaaaaccaagtgacaaacacactccccgaccccaagttcttccacatgtcccattgaggagagcacagccaataacgcagagtgtatttatgcgcagggctggctaaacaggctggctacgagtccggaacagtgtcaggatctggcttcccattggccgacatgacagaatccttctcgcgttgctctctgatgtacctctgaaatcacagccctgctgccatgatgtgcaattacaggatagaggtgccaggtgaaggtcccactgtggccaaggaaagcctttgtgagacgactacttcagggtgttccccatcagaggagcacacccctgatcttgtattcctcgtcaatccaaggtccatgtgaaatggtcagatggggaattttttcttccacagacatcaggatcttctgagtttcttcatcaaagccagatttgtgcagcctgggaaaatagaaataaagttttttattttgtttttcatttttacacagtattgcctctctacattctgatgtctacctctcctctcctctttattctttcctagaaatcactgggagaattgt

SEQ ID NO: 30247 - DNA, 569 bp, Homo sapiens
  misc_feature 1, 566, 567, 568, 569: n = A,T,C or G
nggaacgacagcattataccagcagaatggaccctttgtcacctaaatggctatatttgcaactgcagtataaatgtaaggtcttgtagcagcttcagataattaacattcgtaagtggagaggtggaaaatgcaaatgataatggtcaaaatatgagcctgcacctgtagttcaggccagtattccagctcccccactgcaatgcacatctgcgcttcttcattcaccagcatccctttctctaacaactgggatcacgctggagctgccaatcatgaaaccccgcctccctgcccaaaggcgtgtgcacgtgacccaagctgggccaatcagggtcctcttaagagattgacggacactgaggaaagaggcctctctcttctgggaatcctgacccagagggaccaaccatagcatggaccgtttctttggctgtgcaaaggctgcctgacgccaaccccagagaaaaacagaactgagagatgagatgaaaatactgcatgagccctcgatctagccacacctaaagccgaaacccctgcacttcccactaccaagagccaannnn

SEQ ID NO: 30248 - DNA, 1198 bp, Homo sapiens; identical to SEQ ID NO: 30116

SEQ ID NO: 30249 - DNA, 418 bp, Homo sapiens
ggaggttcacaataaaggtgctaagaaagagaatgtaagacaggaaaataattaaatattcttaccgagtgtcttcaataggccgtgtttaagaggcgtcttacactccctgttgccagtggctggaacacaatggatcacacaggggcgatagacaccgaggatgaagtgggacctttagcccatcttgctccaagtcctcagagtgaagctgtggctcatgaattccaggaactctccttgcagtccagtcaaaacttaccccctctgaacgaaaggaaaaatgtgctccagctgaggctgcaacaaaggaggacgagagaacaactagtggaccagggcatcatgccacctttgaagagcccagcggcattccatgaacagataaaaagcttggaacgagccagaactgaaaact

SEQ ID NO: 30250 - DNA, 997 bp, Homo sapiens
  misc_feature 1, 990, 991, 992, 993, 994, 995, 996, 997: n = A,T,C or G
nctgtttcctgtgtgtgaaagaacggccagcactcgggggcttacttgtttcctggtaccaaaaaacaacctctgtgagggactggatgccgtacattcactccgtcatcctgattgatgattttgagtctcctcagaagctggcagagtttattgactttctggacaagaatgatgaggagtatatgaaatacctggcatacaagcaacctgggggcatcaccaaccaatttcttctggatagtctgaagcatcgggagtggggagtgaatgatcctttgctgcctaactacctcaacggcttcgagtgtttcgtctgtgactacgaactggctcggctggatgccgagaaagcccacgcggcctctcccggggacagccccgtctttgagccccacattgcccagccctcacacatggactgcccagtgcccacacctgggcttggcaatgtggaagagattcctgagaatgacagaaaagaacaagagggaagacagaccttcaggctgggtgcagtggctcatgcctgtgatcccagcactttgggaggccaaggtaggaggatcgcttgagcccagggattcaagaccagcttgggtaacatggtaaaaccccatctctacaaaaaacagaaaaaattagctgggcatggtgtgtgtgccttgtagatccagctacttgggaggctgaagtgggaggatcgccactgcagcctcccaagtagctggatcgcttgagcccagggtattcaagaccagcttgggtaacatggtaaaaccccatctctacaaaaaacagaaaaaattagctgggcatggtgtgtgtgccttgtagatccagctactgggaggctgaagtgggaggatcgccactgcactccagaaactaaaaaaagaaccatgaaaaccttcacaaatatatctaagccaaatggatggctgggtctgcatccagtactcgaaggtaggcaggaatcgttgcccaaannnnnnnn

SEQ ID NO: 30251 - DNA, 1663 bp, Homo sapiens
  misc_feature 1662, 1663: n = A,T,C or G
ttcgcacaaagaaaaaaaaaaaaaaaggaaaaaaattagtgcggtgtggtggcacgcacctgtagtcccagctactcgggaggctgaagcgggagggtcccctaagtctaggaggtcgaggcttcagtgagcggtgattgtgccactgcactccagcctgggcgacagagcaagaccctgctttcccctcttgtcctccactaccctcaggaaaccaagaaagaccagcgtggagagttggtcgcccatctgctctaagctgctgtgtattcccctgtaatgtaaacatcgtgaaggtggagacccagttaaccttttaggtggaaggccagatgacagagggcggcatctgacccggaaggccctctgcaaccaggccaaatacatctacagggaaccaatgggaaacatctggggaggacaacccaaataagtatcatgcgagcaagggatggtttgagaactttaaaaatcgctgctgttttgcaacatacgaagttgatggggaggaaggacccttaaatcctgagtgggtatcgagtattccaagcaactggagagaggctttgtgcctcaacaggtcttcaacgccaaggagatgacccatcttttgcagtgcatgccttcctacttttggggcaaaagacaaaaatctggaaagcttagaggaagctaaggacaggatttccctcatttttttgtggcagtgcctcaggtgacaaaatgataaaaccactgctgctttacaaagactctaacaccccacttgtcttttagagataaacgccttcctgttttcttgtaatcacacccagaatcaccactgccactttttggattagttttacaatttttttatccatcaaatccgaagtcatttaacaaaaaaaatctggaaatcagaatgttgctaactgtggacagaggtcccaatcacccagattcattattctttgttcattctaatgttgatactgtgtttctccctcaggaaggccctagctttcttcagcccttgggtcagggtataactgaagcatttgaacataatcaagcatatgtttgaccactttgctgactgtattgaaaaaaccctcaccttactctgaaagaagcatggcaacagtacaatattgccgatgctttggtagtgataaaagaggtgatgggtgatataaaatcagccactcttaagcttgctggaaaactgtgggaggatgtgtgaatgatgcatatttccctagagctaatgaagaagttaaaaaaaaatcttagtgtctgcaaaacaggaagaagtctttgcagaggaaatcgaatgctgtctgatgctacaattcatattggatccctttcctggaatgaaagcctggactttttaaacacaggtttccatcaaattggttataacttattgaagagattgccaaagcaaacgtttcaaataaaggccaggattgagaagagagccaacttgaccaaaaggttccttcacgtcgacgggaagacaccagacacgggcggagcggcacggtggcacagcacacaacaacatgttttcgcccaacacacaggatcttccccacccacaaccaaacgggcacgcttcatctctggcaccttcgggagagaatccaccaacattcctctcacaggccctatcann

SEQ ID NO: 30252 - DNA, 486 bp, Homo sapiens
  misc_feature 1, 2: n = A,T,C or G
nnctgtttcctgtgtggaaaagaacggctacaccgcgggggcggccgaggtacctgagcttattcaggccgtgtcccccaggctcagggtggcctctctgctgacaccctgtccctatcttgccggcagggggcatgtgtccgtttcgccacatcagtggtgagaagacagttgtgtgcaaacactggctgcgtggcctatgcaagaaaggggaccagtgtgagttcctgcatgagtatgacatgaccaagatgcccgagtgctacttctactccaagttcggtaaggcgcctggagccctggaggctctgctgagaaccagggtgcagaggggtccgctggctgctcagtgcccacactgtctctgcctgcttttcccatctttctattctcagaggagaactctggcagaacctgccagcctcagccagcttttaggggacagtgtggctattttctgctcatctctttttttttttttttttt

SEQ ID NO: 30253 - DNA, 391 bp, Homo sapiens
cggcactgcgtagacgcggggagttcggtatcagtttacacgttgccttcagtaaaatccgccagaggtccacccattttgccttttccccttccttgccctgggagaagtcctcccttcactgggagagaacttctctcccagggcggtgcgacccggagctccagcgcccgagtctccacttcgtttgctgaaacttgctttctaccagctaagaaccatgctgcgagtgattgtggaatctgccagcaatatccctaaaacgaaatttggcaagccggatcctattgtttctgtcatttttaagggtaagaaaaagttttcttctttttctgaagtcctgttttggaatgttagtttcttgagtcaccttcttgaaaagtctgcattt

SEQ ID NO: 30254 - DNA, 1299 bp, Homo sapiens
  misc_feature 1289, 1290, 1291, 1292, 1293, 1294, 1295, 1296, 1297, 1298,1299: n = A,T,C or G
acttgtttgatcggcgcgaaaaggagtccgagctcggggaccggcctctgcaggtcggggagcgctcggactacgcgggatttcgcgcgtgtgtgtgtcagacacttggcatttcacctgaagaaaaatttgttattacaacaacaagtaggaaagaaattacctgtgataattttgatgaaactgttaaagatggagtcaccttatacctgctacagtcggtcaatcagttactactgacagctacgaaagaacgaattgacttcttacctcactatgacacactggttaaaagtggcatgtatgaatattatgccagtgaaggacaaaatcctttgccatttgctcttgcggaattaattgacaattcattgtctgctacttctcgtaacattggggttagaagaatacagatcaaattgctttttgatgaaacacaaggaaaacctgctgttgcagtgatagataatggaagaggaatgacctctaaacagcttaacaactgggccgtgtataggttgtcaaaattcacaaggcaaggtgactttgaaagtgatcattcaggatatgttcgtccagtacctgtgccacgcagtttaaatagtgatatttcctattttggtgttgggggcaagcaagctgtcttctttgttggacaatcagccagaatgataagcaaacctgcagattcccaagatgttcacgagcttgtgctttctaaagaagattttgagaagaaggagaaaaataaagaggcaatatatagtggatatattagaaacagaaagccctctgattctgttcacattacaaatgatgatgaaagatttctacatcatcttatcatagaggagaaggaaaaagatagctttactgctgtggttatcacaggggtacaaccagaacacatacagtacttgaaaaattatttccacctttggacacgacagttagcgtaagtaattatatttggcttaggaaatgttgctacttaacttttttaaggcagaaaacattacagatatattgaagcctctttggtatccgttttgctcctgtctcattttcttccctttagtattatccagtactctgatattggtgttaaaacagctctctattcatttattctgtaaatatttatagatcacctctagtgtactgagcattatttgaggcacaggattttgacaatattataaaattaaaaaagaacttcacagtttgtcaaattgagcactatatcacttccatgaccccgcgttaattaattctagaagtacctcgannnnnnnnnnn

SEQ ID NO: 30255 - DNA, 6123 bp, Homo sapiens; identical to SEQ ID NO: 29902
  misc_feature 346, 347: n = A,T,C or G

SEQ ID NO: 30256 - DNA, 402 bp, Homo sapiens; identical to SEQ ID NO: 30231
  misc_feature 402: n = A,T,C or G

SEQ ID NO: 30257 - DNA, 1363 bp, Homo sapiens; identical to SEQ ID NO: 30136
  misc_feature 1, 2, 3, 4, 5, 6, 7, 8, 9, 1362, 1363: n = A,T,C or G

SEQ ID NO: 30258 - DNA, 862 bp, Homo sapiens
aacatcgacggacgcatcaaagcaggtgtagagggaaatttatagcactaaatgcccacaagagaaagcaggaaagatccaaaatgacaccctaacatcacaattaaaagaactagaaaagcaagagcaaacacattcaaaagctagcagaaggcaagaaataactaaaatcagagcagaactgaaggaaatagagacacaaaaaaccccaacttcgacacgcattcaagggccttttgggcaaaaaagaaatgcgcatcctcatggtgggcctggatgctgcagggaagaccacgatcctctacaagcttaagctgggtgagatcgtgaccaccattcccaccataggcttcaacgtggaaaccgtggagtacaagaacatcagcttcactgtgtgggacgtgggtggccaggacaagatccggcccctgtggcgccactacttccagaacacacaaggcctgatcttcgtggtggacagcaatgacagagagcgtgtgaacgaggcccgtgaggagctcatgaggatgctggccgaggacgagctccgggatgctgtcctcctggtgttcgccaacaagcaggacctccccaacgccatgaatgcggccgaggtacgactgccagcaggttacccgtgcaggcatcaagcggatgcgggctcagctccctcatgtcaaagtccacgcctactttgctcccgtcaccccaccgacagcagtggcaggaagtggacagcgactgtgcaggtgctgtgtcattctctgacagcaactgcctgggcccaaggggtgatgaggcatcctttcctctagaagacctgagtcttcctgaccgactccaccatcacccaatctgttga

SEQ ID NO: 30259 - DNA, 880 bp, Homo sapiens
  misc_feature 1, 2, 879, 880: n = A,T,C or G
nnctgtttcctgtgtgtagaccaacagccacacctcgtgggcagtccgtcttgcctgggacaaatggcactgaacaggccactgtgaccatggtgtcatcagaggacatcgagatcctggagcatgcaggcgagctggtcatcgcctcgccggagggccagctggaggtgcagacggtcatcgtctagcatgaggtctgcggggtcctggccgggcagggacagggcagaggactctgagcgccccacccatgcctgcctggcctggtagagaagatggcacaggatggaggcgccccaagacggacagtgtaccacaaaaacaatcacttggtggagttcaaatcacacagagagaagatttagtaaattctcaaagttgcaaactggacccacctggagtcccaccgggactggacagcccccactggattatactggatatgtaggcatagagcttatgccaaattacctgaccagtaggcaggtagttgtgttattggcactattaaaccatgtttcttcctactgcccataaaaacaggcgaaattctaggcttccctgtctatgcttcccatgaaaagagaagcatagctataggaaattgaaaaaatgataagtaaccccctgggttaggtctacctggccaggtagacctaaccagaagaccaagggcatcatcaatcggtaaaattttccaaaagaggaaaaccaatgtaagtctttttccctgaaaaacttagttgtgtttgtaaagagctaagttgacattccaaagtccttggactggaatctccagtgtgtgccatgttcccagtgggcgtgatgaggtgtcctgaggagtatcaggctatggctttgctaccttgtcagcgacann

SEQ ID NO: 30260 - DNA, 1928 bp, Homo sapiens
  misc_feature 1, 2, 3, 4, 5, 6, 7, 8, 9, 10, 11, 12, 13, 14, 15, 16: n = A,T,C or G
nnnnnnnnnnnnnnnnagggactgctccgggaggaaagtcctcgagttatgcggccgcggcccaccaccaactgctcgccaccgaccccactactcgccaccgacccgctgctcggagcttcggttctgcgggttgtccagacttcaggcctgtgcgctcaatcgtggagaatgcgccggcaggccccccacccccagcctaaggtgcaggaaggaccagcacgaacccgctggctttgctgcgcggccaggagatgagtcccaccgggcactgagcccaggtacaggacatcagagaatgaacacagaggcagaggccctcatgtccctctcagagtcccggctctgcaaagagcccgtctgtctccagcttccagaattccgcactgtgaatctgtctacgtggactgggaaaacagggttggcaccactctgccactccgtttgtgcctgggaagggctaagtatgcaaggctacaaacatctacttcactgggatcccaaatgctcaacaaaccatgacctgctttggtcagaaccaccagaaatattaagggaagactcagagagtttgggggaggaaattaatggtgaattacccaggcactttctcaaatctctttttctctggaaggaaggactgactaggggcagcctgctggcttcattttcacacgacagaaaaatcatcgtattaaggatgggtgcttccaagaccagtgggtacaccctatggggtggacaaggagggaggaagagacagcctctacaattgtccacctacccagctgtcagctgagaaaaatgctaaacggacatcacagccacacaacgaatctgcccgttcccctctcctcagtcttcctgctgttaccagggtgagaggtgtaatggaagggggtctgagagaaagcttccctgcaaagggatcgccttccaaatttattcataattagctcaattcatgaaagcggtttctaaagtgctctacagagctctagatagaaaatatgaggctaacgatcatggcagctagtactggttatcgtgattattgccactgtcaggatgaatgattatgactgggccaggttctttgggaaccctggtggagtgggctgtcacatggggttccgtctccctgcacatactgggtacccaggccgctcctgaggaacagtccagcagccagtggcctgggaagggtgttgtctctaggggcctctcagcagagtccttggccccagcctgggcttggcaggttcctggtctccccaggacacccccactttcgctcctcccacccaggcaaggagatctcttaaggggtagcgctgttcttcaccttggcgagaaccttcttctctttgacccggcggttctgaaaccagatggtaatctggcgctccgagaggctggtggctgccgagatcttgcgcctcttgtccttggtgatgaacttgttagccgcatactcccgctccagctcccgcaactgccccttgctgtacggaatgcgtttcttgcggccgcgacgaaaggcgcaggcgtcaggagggtgctgcccgctggagtctgcaaatgctgccttccaaaagggacctggtgggttctgttctccctggcaacacatctggctgttccagccaccagcgagagcccaagactggtaactgtccacaggcaacagggagtcatgtcgcggttctccaggagcacccagagtctgcaccacagacacgtccaggtaactggccataggctggtaggttcccggatatcccggatagaaggcaaactcagtggggcggcttgggtaccaggcaggacggccgcccccgcggtgtggccgttcttttccacacaggaaacagcaattattttcttaaaaaagcttaatgtttgataaaataaaacaaacttttagt

SEQ ID NO: 30261 - DNA, 296 bp, Homo sapiens
  misc_feature 1, 2, 3, 4: n = A,T,C or G
nnnnggccctcgaggccaagaattcggcacgaggcctgcagtcatggcgcaggaagaggaagatgttagagattacaatttgactgaagaacagaaggcgatcaaggccaagtatccgccagtcaataggaagtcaagcgagtgcattttatgggaagctttctaaactccaactgagttccaccagctttaattattcctctagctctcccacctttcccaaaggccttgctggaagtgtggcgcagctgagccacaaagcaaactttggtgcgagccacagtgcatcactatcc

SEQ ID NO: 30262 - DNA, 5083 bp, Homo sapiens
ccgccaaggacccatccctgcgctgcgggcccggcgtggagccgcggagaggcagcgcgactccaggcagtgggtctctctgccccggtgctcgcgtctgcccctggcgcgggccgagcggaaccaggaatcgcagaaacggtcagcgcccagggctctaggccggccgccccgggtgccaggtgaattcctttccctgaccggctgtgagacgttggcccgtcagccgtcgtctttggcctgagtgtgcacatctgtaaaatggaagctcggactagtgatccgtgagagccttccacgtctgacgtgtgatctcgagagacctgcgtacattcggggtgccagaaggaaagcatagagatggggtcttgctgtgttgcccagactggtctcaaactcctggcctcaagtgatccttctgcctcagcttcccaaagtactgggattacagcttgaaatccatggcccaaaatgactctaccagtggagactctcttctgtgaagaagacgaccagataagaggttgggatgagcatgccactgcatcagatctctgccattccatcccaggatgccatctctgctagagtctacagaagtaagaccaaagaaaaggagagggaagaacagaatgagaagactttgggacatttcatgagtcattcaagcaacatttctaaggctgggagtcctccgtcagcatcagctccggctccggtgtcctccttctctcgcacttctatcacgccatccggccaggacatctgcaggatctgccactgtgaaggagatgatgagagccccctgatcaccccctgccactgcacaggaagcctccacttcgtgcaccaggcctgcctgcagcagtggatcaagagctccgacacgcgctgctgcgagctctgcaagtatgagttcatcatggagaccaagctgaagccactgagaaaatgggagaagttgcagatgacgtccagcgagcgcaggaagatcatgtgctcagtgacattccacgtcattgccatcacatgtgtggtctggtccttgtatgtgctcattgaccgtactgctgaggagatcaagcaggggcaggcaacaggaatcctagaatggcccttttggactaaattggtggttgtggccatcggcttcaccggaggacttctttttatgtatgttcagtgtaaagtgtatgtgcaattgtggaagagactccaggcctataatagagtgatctatgttcaaaactgtccagaaacaagcaaaaagaatatttttgaaaaatctccactaacagagcccaactttgaaaataaacatggatatggaatctgtcattccgacacaaactcttcttgttgcacagagcctgaagacactggagcagaaatcattcacgtctgattgtgtgcgggttgtcattttcctggacatccatgaagagctgaaggaaattgtttactgccaattgtatacctttcttatgtcctttaatagcatagactggacaggtgactatttatagtggcttctctttttctaaaccctccttagtctcctagaaaaccttcctgtgggccaggcatgcctgggtcctgcctctgcctggcagctctgtgggaaagtggaagaccccatgatgacatcatggggagccagcagagttcctgcccatggtcttgagctgaatgagagaataaaatgccaatcccaagggaagaggaggagcaggggtgcccaggccctgatacccagccgcctccggcttgcagtggtccccagcctggagcagagcattggggagtgtctagccatgacgagaagattccctctgcatcacggcgaaccccaggagatggtattgaaacagacccccaaacacagactcctgcctgccctctgccgatgctgcctcctccatgctcttgagcaggtggagccatggtgctctgtggtggcgcatgattcactgagcaaacagcactttacagaagaaaatctttattttgtaatatgtgtgtccagcgggattgacactcaaaaaaagtctcacttagaaatcttcccttccttacctttgtatctcctttacatcatgagagatcaaaaatccattttgccttacatatgctaagaagcgtggcattctttctgttcataaaacagactcatgacttttaagacaggacaagcaggccagaggctttttttttaatcacagatctcatgggaattagtggatgctaaatggcaattaaagcatgattcctatgcttttgagcctgttttatgacaaggtgttactttgtagacctggcccatacatttcttttttgtcaacactgaaaaagaacagtttctgagatcgaaatggaaggaaaggaagtgagtaatgacaacaaaactgaatatttaaaaaatattcctttatagttaaatctctccagttggtgttggcttcacattgaaagagcagccatgtgccaccctggccggggtgtgtgcactgcatgcaggttctcccttgcatgcaagatgggtgctggcccactgtgaggcttctgctcggggaagttctgtggagtcactaccagggccaagaggcaggtgggctggctctgggacgagggccaggtgtgagcaaactgccagggtccgctgtgccactgctccccggccacatgcccgcccagctgtcgccttaaccagactgaacagacaggatccttcagggcccttggccccactctcagtgcattctgtcatcagggattaccacctgtaccattttcataaaacaaaaccaaaatcactaccatcaaatggccttgtccctctaaaaagtctgcttaaaattctgtttttaaaacccagtttcctagttttccaggcaaatagttacctccgggaaagttgctgggggggcctgaagcacaatgtagcgcagatgcttcctttccaggccattctctcacccagcctgcacggaggagatgggagatgctgggggtcctgccctcagtctttttgggccttaggcgtttcgttcatcctgctaaggggatgaagcaaacacgaggtgattcctttgcctttcagagtggaagccctggagtttgttttgaaggccaggaggctgaaggatctctaagctacggtgtgggcttaatagcagcaggctttgtcctcctgtctcctccaagccagtgtctgattccttggcaacacaggtcttagtctgtggagtggctctgctgtggccttcctctggccgggcaggcactgtccagccatagccagctcctgagaataggtcagcctctcctttctgtctcccagggcacatccagcccgtgcctgtgttcactgtgccccgaagtgcaattacccataccccttctcagcctggggaccccaggcaaccacagactgtccactcaggggagctgaatcccaggtcagccctgccaatgtcccttaggaactgcccaggcaaggcccctggttttgtatacttgttcctgccacccagcagtagatgagtgtttcaggtgaagaccaggatagattttctaagtgtgaatccccacttcacatatggaaccccttatgctgaacttgaaaagcaccaagacttcctgtagacaagaaagtgcttaggtagggacagcccctgggcatcccacccaatgtagctggcaccccactatggcaaaggtgccttgataactgagccctgtatccctcccatgcccagccagattctcatgggaagccctctcccttcttttctgcctaacaccatctcatcgtttctggcctcactgtggacaatccacacacattcttctttcctctcctggcggggcacagagccacccccttgccttttcttttcttgaaggttctagttcagctcctgattcatcagacccttctagccccctgcatctagcagtgaagcatgaagcctggtggggatgtggtactcccatctggtgtggccaccagctctgccaatgttcctgtagccttggaaaacttgctctctcggttcttttgggtgctgtgtactccccagcttccccccttccccccccattttgcacctgggtttagtgaaaggatggcatttggttgacccatatagaaacccagaatgaggtctcagggccaggaggcctggtatttgtaggccagggaaggggaagaggcaagtggtctggggtatcaccagccagccctctctgatttggcctctactccccataagtcacagtaccataagcaggcttctggcctcagcaatttggtctttgtgcccaagtttattgtgagaatttcctgaaaactctataaaaggtctcttcctactgtaggcctctaatgtttctcccctttttgcttcagtccactcttcagtcttgtaggcctagttttcaaacctgcacatgtgtcctacctggccacaggcatgcaggcctcaggcagctgggccagtttgggagcctcgggtgatgtctgcacgatctggggctgcctctgcacccctgctgtgggcttcagggttggagaagggctgggaccaaccgggtgagatccacaagtctctggatgtggctgaaggcaaatacacaattgaagtactttctgttttgaagtgctttcccttttgaatctggtttgaaacatgcagcttctgtctctagcccaaggaaagaccaaaacatagggaaataaaagcatttatctttgtcttggaagtaattgttgaagttgtgcagttgatcagtgcacagttagatgcaatgtttatagaaattgattgttaaaccaaatttacactggcatgtgtggtgtagtttctaaaaggcacttcacatttgaaatttttcttaccttagaaagtttctagtgatctaaatgtctagttttgtattcttttgtgtgtgttcactgtttctcagtattaccacttgaataattctctgtacaggggggtttgtgctatacactgggatgtctaattgcagcaataaagcctttctttaaaaaggaaaaacagaaaaatggaacaacacc

SEQ ID NO: 30263 - DNA, 1883 bp, Homo sapiens
  misc_feature 1875, 1876, 1877, 1878, 1879, 1880, 1881, 1882, 1883: n = A,T,C or G
ccatgtaaatttcaggccagctggctccagccacgaattcttttccccgcccgccccccccctcccctcttccctaccaatgtttgttgactccttagtttggccagggaggccaaggggcatgtgaggtatcccgagctgaatgtttctgctgaatgtgcagcctgtactctggatcctgacacagagtgtgacccaccctcttctttgttgcaggtcagagatgtcatcatcgctgcaagcgttgcaggaatgggcttggcagccatgagccttattggagtcatgttctcaagaaacaagcgacaaaagcaataactgaaaaagactgtcctgtcagcgatgactttatacatcaagggggtcttgttttgctagagagtttggggtttggtttgtggatttcattgtgatttataataaggcttattttcacagaataaaataaagcaaaacgagggaggattttattgggggaagtgcagcaagaactgcctggtgtgaagtctgttcagggaacagccgggctgtcttcctggtcagggattgtctttcactttctttttgcgtgctgtgttctttgcgttgcaggaggcagagtccagctccagttatctcaagtagagggcgtttctggtcgtcaggatacatgcggggcggaagggagacagaaagacataatacacaagaacagaaagcagcagacagccaggacccttggcccggaactagatctaggatggcctctgagactcagcagctggagtctgtagatgttcagctgagttgaaaaaaaaaaagtcctcggctataaggaaatttagtatagatgcttgccaatcttactaaaatttcccttattttcctttgctctacacgtctttcctttgccttgttgcttccatctccttggcactcctgcttcctcactgcttctgcttgccatgatccccaagtctctgacccaccttcctgcctgctcctctcctcccacattggctcagattctttccccgctgtctgtgggtccacactcccagtggcacctccaggagagaatctgatggctcagttcgccagataactcaactttcccatggctaccttgggtcaggtgatctccactagacctatcgcctatgcctgatggtgggtcacatggtgcaaatgttgcctgagagcttagtggattagggatgtggctgggctcatggttgacgtccctgctgctgagcccttacgggtcaggctgggagaaggtaccatgttgtgtgactggtcatttgaggtcttgcagctgttgcttgctgggcttggcaggtgttcaaagtgaccatttttctgaagggtttttttctgagtattcctcagatgtactcccctggggccgacggtctttccttccacagggcgatgcttccctacttgcttgtgaatgtttccttcatctccaggttgtctggggacaattctgtcttttggaggcctgggcaggatttacagagggctcatgccagctccttcctgccgggtccacttctggtgtagggtaacaactggccattcatgtcctagtgtgatagaattaatcattttctttcaggacagtttcctttttttttgtggcgccagtttgagatggagcactatggcagtttccgaagccccaaatgagggaccgggcacaggcggggtttggaaggcggccccattggaaggggggggcctggggggtcacccaacattggggaagggggaaacaccgcgaggaacaaacggttaacagacagagaagaaccacaccttgagatttcacgtggtggaacaggcgcacatacggagcagacaggaagaagtacaaaaggggagcaacannnnnnnnn

SEQ ID NO: 30264 - DNA, 450 bp, Homo sapiens
  misc_feature 1, 2, 3, 4: n = A,T,C or G
nnnnatacagtggtccacagaccaagtcctgcattggggggtttgggtaataaaggaattcagcatgaccgatatagacctcaccacactcaacatttcggggagagaattatgtagtctcaaccaagaagatttttttcagcgggttcctcggggagaaattctctggagtcatctggaacttctccgaaaatatgtattggcaagtcaagaacaacagatgaatgaaatagttacaattgatcaacctgtgcaaattattccagcatcagtgcaatctgctacacctactaccattaaagttataaatagtagtgcgaaagcagccaaagtacgttggctgcggtcttaaagagtcccttgggcaccctttcctgtagatgtcaaacccctcctgaagtcaaagggcatcgtgccgccgccgggggtgggagcgctgcaggccaggcg

SEQ ID NO: 30265 - DNA, 673 bp, Homo sapiens
  misc_feature 1, 2, 3, 53, 54, 673: n = A,T,C or G
nnnctgaaggtggcgttggaaccacagctctgggaactgggaaaagtgctcgnnaaggctgggctgtccgctggctatgtggacgctggggcagagccaggccggagtcgaatgatcagccaggaagagtttgccaggcagctacagctctctgatcctcagacggtggctggtgcctttggctacttccagcaggtaaaggagctggaacaaagagcagagcagaacccaggcttccctccaggctgacatgttcctagtggccgtatcagtcactcacagtttggagtcctcagtggatgttctcacagctgttgttagatggccatcccctgagatccactgaagattcattttttaatcaggcatccagtgcattgaagagcaatgttatcatcatgaggaggaacaagggagaaataatcagataccaagggtttggtggacttccgagatgtggcccttgcactagcagctctggatgggggcaggagcctggaagagctaactcgtctggcctttgagctctttgcatggggagctggcggtgtggtggggtgcttaagtggctatgctcaccccgctccaggaggcctattttggtatgctgtttccagtagcttctagatactaggcatttggtatccaacctagtgccacagtgcctaaaacn

SEQ ID NO: 30266 - DNA, 1138 bp, Homo sapiens; identical to SEQ ID NO: 23274
  misc_feature 1, 1129, 1130, 1131, 1132, 1133, 1134, 1135, 1136, 1137,1138: n = A,T,C or G

SEQ ID NO: 30267 - DNA, 6515 bp, Homo sapiens
  misc_feature 6515: n = A,T,C or G
gtccgcccacgcgtccgctcagactacagacacgcgaggtcaggaagaagccgcttataaattaccgcttccttcgcgccgccgccaacgccgagccccgaggaccgcaagcccagaggacaagctgcgccaagagggagtgcggagcgttcacccagcgggtcagagagcgagcgggcaggcagcccccggccggcggaacccggcacagccgagcagagcgcgggcggcgccgcagccaccccagatccagaaccagaaccacagcccttctgaggagctcccaaacaaagcaaggagatggccaccaaggagaagctgcagtgtctgaaagatttccacaaggacatcctgaagccctcaccagggaagagcccaggcacgcggcctgaggacgaggctgagggaaaacctccgcagagggagaagtggtctagcaagatcgactttgtgctctctgtggctggcggcttcgtgggcttgggcaacgtctggcgcttcccgtacctctgctacaagaatggtggaggtgcgtttctcataccgtattttattttcctgtttgggagcggcctgcctgtgtttttcttggagatcatcataggccagtacacctctgaagggggcatcacctgctgggaaaagatctgccccttgttctctggtatcggctatgcctccgttgtaattgtgtccctcctgaatgtctactacatcgtcatcctggcctgggccacatactacctgttccagtccttccagaaggagctgccctgggcacactgcaaccacagctggaacacacctcactgcatggaggacaccatgcgcaagaacaagagtgtctggatcaccatcagctccaccaacttcacctcccctgtcatcgagttctgggagcgcaacgtgctgagcttgtcccctggaatcgaccacccaggctctctgaaatgggacctcgctctctgccttcttttagtctggctagtgtgtttcttctgcatctgcaagggcgtcaggtccactgggaaggtcgtctacttcacagccacttttccattcgccatgctcctggtgctgctggtccgagggctgacgctgccgggcgcgggccgaggcatcaagttctatctgtatcctgacatcacccgccttgaggacccacaggtgtggattgacgctgggactcagatattcttctcttatgccatctgcctgggggctatgacctcgctggggagctacaacaagtacaagtataactcgtacagggactgtatgctgctgggatgcctgaacagtggtaccagttttgtgtctggcttcgcaattttttccatcctgggcttcatggcacaagagcaaggggtggacattgctgatgtggctgagtcaggtcctggcctggccttcattgcctacccaaaagctgtgacaatgatgccgctgcccacattttggtccattcttttttttattatgcttctcttgcttggactggatagccagtttgttgaagttgaaggacagatcacatccttggttgatctttacccatccttcctaaggaagggttatcgtcgggaaatcttcatcgccttcgtgtgtagcatcagctacctgctggggctgacgatggtgacggagggtggcatgtatgtgtttcagctctttgactactatgcagctagcggtgtatgccttttgtgggttgcattctttgaatgttttgttattgcctggatatatggaggtgataacctttatgatggtattgaggacatgattggctatcggcccgggccctggatgaagtacagctgggctgtgatcactccagttctctgtgttggatgtttcatcttctcgctcgtcaagtacgtacccctgacctacaacaaaacatacgtgtaccccaactgggccattgggctgggctggagcctggccctttcctccatgctctgcgttcccttggtcatcgtcatccgcctctgccagactgaggggccgttccttgtgagagtcaagtacctgctgaccccaagggaacccaaccgctgggctgtggagcgcgagggagccacaccttacaactctcgcaccgtcatgaacggcgctctcgtgaaaccgacccacatcattgtggagaccatgatgtgagctctctcgggtcgacggggccggcggctttcctgctgtttactaacattagattctcataggaccaggtttacagagctttatatttgcactaggatttttttttttttgtaattgtcacagaaaatgtaattgtgggtatgtgtgcgtgcgtgtgtgtgtgtgtgtgtgtgtatcgtgtgtgtgtgttttgttttgatttgggggatattttgtacaaaaagaaaacccacgggaagatgtccgtggagaggcagagctttcatactgaattagatgtattttatgggaatttggtaaatttttctttgtatttttttttttacatataagtatatatacacttagagattgtcatatacttttaccacttgaattgatcttcttgccagcaatagatctcattttcaaaagcaattcttcggtgctgtgtagctggcagaaagttctgtccagtaaacgcaggatggaattttcctgggactctacacccatcttaaggtggtataccttccaaatcctggttcagatggaagaaatagcaggagagaggacccattagctggcagacccagggggaagaaaggagggctgtgaggagatacctcattaaacttggcttagtgaagaagagagatgccaaaggaatgaaccaacccttcacataaaggagactggctgaagctgaatgaggaggccctatagcagaagtctgattctaagagcagtagaaacttgtaccagaagcaaaatcccacttttaattttgagatggtgagtggatagtcagtagaccgtcagaaccactggccagagagggagctgctagagatccaagaaggctggcaggaatgaggctcacaactcagcctcgcaagaggtggcagaggcacaggaggccacagtccttcctggggcattccaggcagagaaggagcagaggctctcccggcaggagctggggtctcagggctcagatgagtctgttgcatttgaatggggtcatagcaggttctggtcattccccaagcaacatctcagcatctcttaaagttgcctgcaggaatgaagcatgacatacctgttgagggactaggggagtggtggggaggtgagtggaccaaaggatataggccccaggcatgcagatgggcccggtgtcggggaggggtgctttctttcctcatctccccactccccactctcagcctgggagactcctgccaagccctcattaaagatgccaccctgggctgccctggcacctagcaaggcacaccaagaacagcttttgagtctgtatcctccactgggggaagtgctcccagttcagaacaagggcagcccgtggtgctgacctaggatataacaaagctcttcacttcaaaacccctgcaatagctgggtttacagacatttaccacctggggacccaaaagagaaggcctaggagagttttctagaaggttgggattgtcagggtcctggccccccagaactggcttgatcaagggccttatgtggagcagaggttgtctctgaaccaggagagaaggtactatacctttcaaatccccagggcagacacacccccacccagcccctatttggacctaaactgtgccatttgaacagtcacttccaagctcagtctaaatgaaaccgaaacgtgaccacgcacaaaggcagtcactgcctcgaggggtgcagaccgcagaattttcacagcaggggctcttggaactctggaaacccccttcttaaatttgggaggaggagtatgcctttggtgtccccctcccaaggggcaattctgaaccccatctttggcaggcatacatatttcactgtttccaaagctatctactctgccaaacaacacccagtcctattccaaactctcaacgattctatcttgttcctgtttttctatgtatttatggttgccgtttgtgtctgatttgattttactgttttttccctgattttatggagtagcattgtgacctgttttcctttgtcttatataactttagtaaactaaccactgtcaatgattgagggcaggtggcacgtggggaagaggggacttggcacgcagtggctacctgggcatttgtggtcatttcagtttccatctccccagcgggggctccctgggtgaaaggccacagtattttgggttggtaggcaaattgcaacattctggacatggcctgaggaaggcctcttcttataagattctcagaccaaattctagaccaaagacacatgcagaccaagtccccaggccccgcctggaaggaagtcgttcctcaactctccccaaggcacctgtctccaatcagagccctctcgcccagccagccctggctctgtgtgcagagcatagctctgcgagtacctgtgtaataatgctcaaccttcatgtctccgtataaacgaaactttccatgagagctcatgactctggtccacctgtctatagagaatgggcaaagtccttcacctgctttctgcttgggatgggtcagaaatgctgatgcccgcacatagcccagccagccagatctggaaaggaagcgagggggttgtttaaatcaattttttaagatgaagaagtgggagacactgcgttgagatgggccatgctagggccacagagatttcctgacggtcagggagagaagggcctccagggtcccctaacccaacgcccttgttgtaaatgaggtaactgaggctcagggaggcactgtgagccaggaatggattttcttgaaacagctctagctgcaggttctccgaggtaggtgcagggaatggtgagtgtctaaccagggctacatccagcaacatcctcaaggtcttcctgacaaccaaagacaagcctttatggaaaaggaaatgcgctcccctccatgttcagggatgaggggagcagcagcagccacactcccaccatcctcacagaattcctggacccatgcggtggctccgtgagctgggtgactccagcctcacctgcacaccccagccctgcacggggccctccttcctcccagcagcccttggtgagctaggaattgagatccctgtttgtgaaagagggaactgaggtgcagagaagccagaggtgtgccagatccttaggcaggatttagatgaagtcgccctggctccagactgaccccgaggctctgcggggagtttccaggcagcaggaagtggccttggatgctctccttccaggacagcataacccctgggccatgtgcagctccttcactgccccctggatccccagcatacccccaaagacagtggggaaacacaaggggagagcacagcatggcccctccagcccacttcagggcactcttgtatcacccgggtaccgccacactggtcccccacccagccagcatctcccagcacagcccctctccctggggaaatgctctgggtagccagtctaaaggcagaggcacctaactgctccccgcagcccaccccacccaagattcagacacaagccaggaaaggacccaagagaaaatccttcaaggtggcctgaggtcccatccctccctcagacccatgtggtcccaggccaggctgcctgggacacggtaaataccactgtgtgcaaaaatcgaagtacaaaaccacaagactaaacaaaacaaacccagagagccaaacttgtagaggtgggcagtccagaaagcagggggcagccctccccctttccttctctccctgatcctcagaatatatattgttgtaataggaagcatttttgcattgttctcttgtgggtgtcactacagacatgttctggcgtgttctccgagggatggagcatcctgttatatatttgacttcaaattgagatgttggcttcatttttttttttttacccaattaatctcccaatccctagcaactgtgactctgtatttagcacaagagaaagctgagaatgtgggtcttgcctccttccagaaagtatgtctaggctcatcaggacatttttattaaagacttcaaaataattgcagagatatttcaaacttgttctcaaccaaagatacagcctacaagacgacttatccgcagcaggaccattgtattggaacaagaactggaagaggagacacgctcatagcctaataccagccctcggggtcaaagtgtaacagcacatagaacccggatattgcagagggatacaccaggaggcttcaacacaattctctatccgacgatttaaccaacacaagctaatagaagctgaatccgtatacacgtgaaccaacacctgctacacccaaaacaacaataacgcn

SEQ ID NO: 30268 - DNA, 1542 bp, Homo sapiens
  misc_feature 1, 2, 3, 1479, 1480: n = A,T,C or G
nnnatagaagagctatgacgtcgcatgcacgcgtacgtaagcttggatcctctagagcggccgcctactcctgccgccagccggtccaggcctctggcgaacatggcgcttgtcccctgccaggtgctgcggatggcaatcctgctgtcttactgctctatcctgtgtaactacaaggccatcgaaatgccctcacaccagacctacggagggagctggaaattcctgacgttcattgatctggttatccaggctgtcttttttggcatctgtgtgctgactgatctttccagtcttctgactcgaggaagtgggaaccaggagcaagagaggcagctcaagaagctcatctctctccgggactggatgttagctgtgttggcctttcctgttggggtttttgttgtagcagtgttctggatcatttatgcctatgacagagagatgatatacccgaagctgctggataattttatcccagggtggctgaatcacggaatgcacacgacggttctgccctttatattaatcgagatgaggacatcgcaccatcagtatcccagcaggagcagcggacttaccgccatatgtaccttctctgttggctatatattatgggtgtgctgggtgcatcatgtaactggcatgtgggtgtaccctttcctggaacacattggcccaggagccagaatcatcttctttgggtctacaaccatcttaatgaacttcctgtacctgctgggagaagttctgaacaactatatctgggatacacagaaaagtatggaagaagagaaagaaaagcctaaattggaatgagatccaagtctaaacgcaagagctagattgagccgccattgaagactccttcccctcgggcattggcagtgggggagaaaaggcttcaaaggaacttggtggcatcagcacccccctcccccaatgaggacaccttttatatataaatatgtataaacatagaatacagttgtttccaaaagaactcaccctcactgtgtgttaaagaattcttcccaaagtcattactgataataacattttttccttttctagttttaaaaccagaattggaccttggatttttattttggcaattgtaactccatctaatcaagaaagaataaaagtttattgcacttctttttgagaaatatgttaaagtcaaaggggcatatatagagtaaggcttttgtgtatttaatcctaaaggtggctgtaatcatgaacctaggccaccatggggacctgagagggaaggggacagatgtttctcattgcataatgtcacagttgcctcaaatgagcaccatttgtaataatgatgtcaatttcatgaaaagcctgagtgtattgcatctcttgatttaatcatgtgaaacttttcctagatgcaaatgctgactaataaagacaaagccaccctgaacctaagaaaaaaaaaaaaaaaaaaaaaaaaannccgccagtcatgcggcaggcaggggacacggctctgacaggcgctctgtccctggcctcagt

SEQ ID NO: 30269 - DNA, 3464 bp, Homo sapiens
  misc_feature 3349, 3457, 3458, 3459, 3460, 3461, 3462, 3463, 3464: n = A,T,C or G
tcacccacgcgtccgcaaggtcttacatggtatgtgtttttttaaattctgcactttgacagtggtagcaaaataaaagtaatccaaaagttatttttctattgagaagagagaagaggtgggttttatttttttccttttgattccaatcttttctcccagtgacaaagcataaatcatggacaccagagaataaggtggacctcaggaatccggaaaagactgagaagcttacattcttcctctagagggaagagtggggtgtttatagccatctctggaacctaaaacaaaaaacatgagttgtgtgccatggaaaggagacaaggccaaatctgaatcattggagctgccccaggcagcacccccacaaatctaccatgagaaacagcgcagggagctttgtgccctccacgccctcaataacgtcttccaggacagcaatgccttcacccgggatacgctgcaagagattttccagaggttgtctccaaacaccatggtgacacctcacaagaagagcatgctgggaaatggcaactacgatgtgaatgtcattatggcagcacttcagaccaaaggctatgaagctgtttggtgggacaagcgcagggatgtcggtgtcattgccctcactaacgtcatgggcttcatcatgaatctgccctccagcctatgctggggtccactgaaactgcccctcaaaaggcagcactggatctgtgttcgagaggtgggaggggcctactacaacctcgactccaaactcaagatgcccgagtggattggaggcgagagcgagctcaggaagtttctaaaacatcatttgcgaggaaagaactgtgaactcctgctggtggtaccagaagaggtagaggctcatcagagttggaggaccgatgtgtaacagttctgcccaacctccctctcgcctcagccccttcagtcctctgtgacgtgctgtggcctctacagtgggtctgcccttgccacttccccaaacatctcatcaagtttttccccttcagatctgacagtgcaataggacagacgtgtggactgttataagaactactcagtgttttgttcctgggcaaggaaggtaggagttctgtgcacttaaggccagtggtcacaaacccttgttttatttaagagacagaggagaaagtggagcggggagggaatcctagcttattttcccttttctatgaggacttgacacaggttctgctgagttgtcactgctgctccagactcacctagagatgctgcctccactttccatcctgtctgggtctgaaaacagtgggtctgcagatagtgcccacaaaccccatgtgactggtttgaaggacccagagcataaaggtctctcaggaaaccatgtccaaaaccctagcagcggtacagcatgctgtctccaacccttatccccaggtttaagggtggtttatggccatacgtggaggttttttgttgttgtttttgagactgagtttcactcttgttgcccaggctggagtgcaatggcaccatctcggctcactgcaacctccacctcctggttcaagcgattctcaggcctcagcttcccaagtagttgggattacaggcgcctgccaccacacctggctaattttgtatttttagtagagatggggtttctccatgttggtcaggctggtctcaaactcccgacctcaagtgatctgcccgccttggcctcccaaagtgctgggattacaggcgtgagccaccgcacccggcagagttttataatgaaaaattaactaatattctagtatgaagtgaggaggatactgaacaggatgtggctaaagccaacctgggacagccatggggtggcttggtttcttcactccagtgttgtccctaccatttcgcagcattgatttaggaggctctgggacaaaagagaagccaaagagcagttttcccagttcactcactctggcaaaatcaggaaaaaaaagtctgcttttgacatcaaattccactaatttggggcagcgttgggtgaggaaagtattgtgaagacaggcttcttggagtaggggcagccacaattcagtagacactctaggctcggaggctgccactgtagttgccaagctcaggttgggtggttctgtgctgtatggatggaataggacctgggctggtcatcttcatgtcgtttcctctctgtatcaatggaagttcaacccgcccctacctcttcagatagttgtaggccacttttctcttgtaactttggaaaacaaaagaggagaaataagtatcataccatatgcgtgtctccaaagtggatgtggttgcctcaaggcaggtggcaggcaggggtgacctgctggccctcagatcaatggtcgtggcaggtctgagagctgtcccactggccagacttctctccagcagcaaagccagcctggggcttgcatgttgatcctgagcaagcttaacggggtgaagctgggctttctcccccctgtgactggagtgcatgttgacaccagcactttttctgcacatgtatcttcaatccaacaaggccgtttttttaatgctgagtaacaggccaccaagcggctactgcgttatatcttctcagcaactggccgcagtctcttctgcaccattttctacaccagacctgcttggcaccacagggagctcttttcctgccctgcacaatgacattccaaccaccaccagccagacattacagccaaccttgctgattgtcacaagcaggaccttggggccactggcactgtcagatagtaagccatttcttgggtagaggaggaaactcctctccacaaatccacttgggcctgtgcaaatggcacttgaaagagtccccatgcacttggagtccatgagccaatgggatatgcaaagacgcttaaacatttcagggctggtttctctgttcatatccaattctggtgcttaggaacagggacccatgctgatgcccaagggcaaaaagccccacttcctttaaggaagtgaacaggcctgaccctgatgcccaataacgggcaaccctaggctttttgtttttcttgcttttattcctttttgttgttggccttgtgctgcgtttgtttacaaaagatgtattttgtttaaccaaatattaaaaatggaaaactccaaaaaaaaaaaaaaaaaaaagaaaaagaaaaaatgttggggcggctttggccaaacgattctagaattaaagcaacttaatattgggcccgaaattgaggcgatttggccaatatcccataatggggggggttaaaattaactgcggggggttttaaaaacnggaatgggaaaaaaaggggggcccacctaaataagtgggggaaaaaccctttctcacttggggttataaaaaaacccgccccccccccttccaaaaataggaaccgannnnnnnn

SEQ ID NO: 30270 - DNA, 1357 bp, Homo sapiens
  misc_feature 1353, 1354, 1355, 1356, 1357: n = A,T,C or G
gatcgacccacgcgtccgctccgcgctccgccacagccggccgacaccacaccagccggggagccgccgccgccgccgccacctctgagcagccggctgggagcgagagccgacagctagtctgcaagccaccgctgtcgccatggggagccgcgtctcgcgggaagacttcgagtgggtctacaccgaccagccgcacgccgaccggcgccgggagatcctgggtgaggaaaatagcagctgaatactatgacaacctccctcactacaattcctggataaaagtactgtatgattttgtgatggatgatacaataagtccctactcaagaatgaagaggcaccaaaaaggagagatggtgctggagtaaatatcattagtgccaaagggattcttctccaaaactttagatgataaaatggaatttttgcattattaaacttgagaccagtgatgctcagaagctcccctggcacaatttcagagtaagagctcggtgataccaagaagtgaatctggcttttaaacagtcagcctgactctgtactgctcagtttcactcacaggaaacttgtgacttgtgtattatcgtcattgaggatgtttcactcatgtctgtcattttataagcatatcattaaaaagcttctaaaaagctatttagccaccttgcccggcctccagcacactttctaaaatctgattcaatgggtatgataattaagtaacattgaaatatgtccaatcataagggatggggccagcatattcttcaaagcagatagaagcctggattccttaggaagggatttggccaaagagactccagacagttggggaggaggaggagatgctgtggaaccactggtcttaacagaagccgacagtgtctgtgacttccctctctgttgcacttaccaaccctcccttcatgtctggaatgagaaaagaaaaagagcatcatttccagagcccaggtttgtcatctcccaggcatctcagaaccagtatcctcttggagagcattcaaggaaaaagtccagaaagtgcgctgtcagaccacgtcactaagagtttcatcaagctcttagagatcgctcctgcagggcccactgctgtgcttctctgaaacatccatttattaacagagccccactattttaacatgttccaggccctttcagaacaggtcagacaccatacgcctatctctgcgtgtcatgctgagtctagaaattttgttgtctggcaagatgtgagatggaaaaacaaattctggggcaaatccatggaaattgatccaattggcacaacccatgtgactctgccagtttttggggatcattatgagnnnnn

SEQ ID NO: 30271 - DNA, 3942 bp, Homo sapiens
  misc_feature 1, 2, 3, 4, 5, 6, 7, 8, 9, 10, 11, 3515, 3739, 3879, 3884,3940, 3941, 3942: n = A,T,C or G
nnnnnnnnnnncccctcaaacttatttttaataatttcttttcccttcacagctatttgcatgcaaagaacatcatccatagagacatgaaatccaacagtatcctttggttgttgagttcatttgactgctcggttctaaatttagggaaacagaagggaggctttctatcacaagtggctctcggtgccaggggatatctttaagggaaaagaggcagaggacaggaaaacagaaaagtcaagaaaattagtaggcttgccctgtccctcagcagcttatgcctcacctggactgatgagagcgatgtttaggttaggttcctttctgagtttatctcaccaaaagtgatttggagagatttccgtaagcttgaaataggcataattttatcacactattagtaaatgtaacctgacggggattgggcttttgtcttaagtttatttctagtttgtggccagcgtgtgtatgtctatctgcttgttatgtggatagcaagtagctacaagccaaatgttgaaaggtttccaaaatcactaattaaaatagtctttcttgactgggcgtgatggctcacacctataatcccagcactttgggaggctgaggcaggtggatccacttgagcctaggagtttgagacttgcctgcccaatgtggtgaaaccccatctctaaatttaaaaattagctgagtgtggtggcacgtacctataatcccagctactcaggaggctgaggcacgagaattgcttgaacctgggaggcagaggttgcagtgagctgagatcacgccactgcactccagccttggggacagagcaaggctgtgtctccaaaaaataaataaataaaatggtctttctcaaaggtacataagtgggttcttcagaagtcactattagaagaggagaggggttgtttttatagaagagtaaatgaagaaaggtatttttaatgctgtgaggcgtgaaatttaacaattttgaatctgccaccctccacgagcctttccttgtgaaagaaagatggcattacaacccacgttttgcctcttgagcagtgagaggcatgatagttgcgttggattatgggacatggcctattttagggacatgtctgaggtgtggaacacctttcagtggtggggtttttagcagccaaacattataccatgaaagcaggcaccacagatttaaggaggtgtgaattcctgggcaccaacatcacaagttactttgtgtgtgttttgttttttaattttttgttcttttttaatttttttttcctcacaagtttgacttaaactgtatgacttctttacccagaagcgagccgacttcagttctcattttgaagtcactgagtggtaccgattctagtgaggaatttcttactacaacattgaacactcagtaagggatttgctattttgttaaccactcaagtttcagatggtgatttgagggcagaatacaggcagaaacgactgtaagctgtcaggccatccttggccctctggggagcactggagtgtggcctctgctcatcctgttagggtttcaagtacctgtattatgtggaaaggtcacaaggccagagacccagcacctagatgtgcaaatggggagaagaagcagggaagaaacgctggcttgcttttggctagggccaaataatctggcacattgaccaatccctgcctgtcttctggaagaaggtgcatttcaaaagcactttaaagaacttcagaaaccttaggaagttcagtgcagagaggctgtgacagaggtaaggtggagagattaccgtgttataaagaactttgggatatttttcaaaattaacctgaccattcttttgaaaccagagtccttaacaagcattgagatatatttctccatgaaggcttaacagtgaaaattggagattttggtttggcaacagtaaagtcacgctggagtggttctcagcaggttgaacaacctactggctctgtcctctggatggtgagaatctgggctcccaccagcagtctctggtatagggcaaaaggaatgccttggagatttatgtgcaaacttaaagcgtttctgtacatttccccgaaatccacatgacccctagtgacagccagcctcagggcaattgtagattttcttgaggaagctgttgatcagaaccactgtgaagcttagtgtggagaggagttaataagctgggtgacagaaatgctgggtcttggtcctttaaagacaaggattcctgagctgttttaaccagtgcctgagttggagtcctttgggggaaaagctatgtggggactgaagaatggactcattcataactaatgaaagggacagcctggcccctagatgtctgtgaggcctgtcatatggtgataaatgcacttttgtcatatggtgatacatgtaggccccagaggtgatccgaatgcaggataacaacccattcagtttccagtcggatgtctactcctatggcatcgtattgtatgaactgatgacgggggagcttccttattctcacatcaacaaccgagatcaggtaagtctgtgctggtgcgaaaggacccaactcgtgggagcccctgggcctccgccagcctaagcagctagagggttaggacttgttattatctgttgttcatttaccccccattagctcagctgttttctttcccttagatcatcttcatggtgggccgaggatatgcctccccagatcttagtaagctatataagaactgccccaaagcaatgaagaggctggtagctgactgtgtgaagaaagtaaaggaagagaggcctctttttccccaggtgaggctcagggctgctagaatgtgattaaagcatgggttggttcgtaaagatggcaatataaggtgggagtgttttgttttgttttatagggaggggacccaggtcctctacaagatggtggggggcagggtacatcctgtgtctttgagacacagctaatgagagcattcttgggctttgtttcagatcctgtcttccattgagctgctccaacactctctaccgaagatcaaccggagcgcttccgagccatccttgcatcgggcagcccacactgaggatatcaatgcttgcacgctgaccacgtccccgaggctgcctgtcttctagttgactttgcacctgtcttcaggctgccaggggaggaggagaagccagcaggcaccacttttctgctccctttctccagaggcagaacacatgttttcagagaagctgctgctaaggaccttctagactgctcacagggccttaacttcatgttgccttcttttctatccctttgggccctgggagaaggaagccatttgcagtgctggtgtgtcctgctccctccccacattccccatgctcaaggcccagccttctgtagatgcgcaagtggatgttgatggtagtacaaaaagcagggggcccagccccagctgttggctacatgagtatttanaggaagtaaggtagccaggcagtcccagccctgatgtggagacacatgggattttggaaatcagcttctggaggaatgcatgtcacaggcgggactttcttcagagagtggtgcagcgccagacattttgcacataaggcaccaaacagcccaggactgccgagactctggccgcccgaaggagcctgctttggtactatggaacttttcttaggggacacgtnctcctttcacagcttctaaggtgtccagtgcattgggatggttttccaggcaaggcactcggccaatccgcatctcagccctctcagggagcagtcttccatcatgctgaattttgtcttccaggagctgcccctatggngcggngccgcagggccagccttggttctctaacaaacaaacaccagccttgtttctctagnnn

SEQ ID NO: 30272 - DNA, 460 bp, Homo sapiens
  misc_feature 459, 460: n = A,T,C or G
tttcctttgctctacacgtctttcctttgccttgttgcttccatctccttggcactcctgcttcctcactgcttctgcttgccatgatccccaagtctctgacccaccttcctgcctgctcctctcctcccacattggctcagattctttccccgctgtctgtgggtccacactcccagtggcacctccaggagagaatctgattggctcagttcgccagataactcaactttcccattggctacctttgggtcaggtgatctccactagacctatcgcctatgcctgatggtgggtcacatggtgcaaatgttgcctgagagcttagtggattagggatgtggctgggctcatggttgacgtccctgcagctgagcccctacgggtcaggctttttttttgtaccaggcaacaagtatgcccccgagtgctggccgttcttttcctcacaggaaacann

SEQ ID NO: 30273 - DNA, 2208 bp, Homo sapiens; identical to SEQ ID NO: 28968
  misc_feature 2196, 2197, 2198, 2199, 2200, 2201, 2202, 2203, 2204, 2205,2206, 2207, 2208: n = A,T,C or G

SEQ ID NO: 30274 - DNA, 1737 bp, Homo sapiens
  misc_feature 1, 2, 1731, 1732, 1733, 1734, 1735, 1736, 1737: n = A,T,C or G
nncctgacatctggcttgcgattggctgggagggggtcagtctcgagtttttttttgtctgtcctggattggagccgtccctataaccatctagttccgagtacaaactggagacagaaataaatattaaagaaatcatagaccgaccaggtaaaggcaaagggatgaattcctacttcactaacccttccttatcctgccacctcgccgggggccaggacgtcctccccaacgtcgccctcaattccaccgcctatgatccagtgaggcatttctcgacctatggagcggccgttgcccagaaccggatctactcgactcccttttattcgccacaggagaatgtcgtgttcagttccagccgggggccgtatgactatggatctaattccttttaccaggagaaagacatgctctcaaactgcagacaaaacaccttaggacataacacacagacctcaatcgctcaggattttagttctgagcagggcaggactgcgccccaggaccagaaagccagtatccagatttacccctggatgcagcgaatgaattcgcacagtggggtcggctacggagcggaccggaggcgcggccgccagatctactcgcggtaccagaccctggaactggagaaggaatttcacttcaatcgctacctaacgcggcgccggcgcatcgagatcgccaacgcgctttgcctgaccgagcgacagatcaaaatctggttccagaaccgccggatgaagtggaaaaaagaatctaatctcacatccactctctcggggggcggcggaggggccaccgccgacagcctgggcggaaaagaggaaaagcgggaagagacagaagaggagaagcagaaagagtgaccaggactgtccctgccacccctctctccctttctccctcgctccccaccaactctcccctaatcacacactctgtatttatcactggcacaattgatgtgttttgattccctaaaacaaaattagggagtcaaacgtggacctgaaagtcagctctggaccccctccctcaccgcacaactctctttcaccacgcgcctcctcctcctcgctcccttgctagctcgttctcggcttgtctacaggcccttttccccgtccaggccttgggggctcggaccctgaactcagactctacagattgccctccaagtgaggacttggctcccccactccttcgacgcccccacccccgccccccgtgcagagagccggctcctgggcctgctggggcctctgctccagggcctcagggcccggcctggcagccggggagggccggaggcccaaggagggcgcgccttggccccacaccaacccccagggcctccccgcagtccctgcctagcccctctgccccagcaaatgcccagcccaggcaaattgtatttaaagaatcctgggggtcattatggcattttacaaactgtgaccgtttctgtgtgaagatttttagctgtatttgtggtctctgtatttatatttatgtttagcaccgtcagtgttcctatccaatttcaaaaaaggaaaaaaaagagggaaaattacaaaaagagagaaaaaaagtgaatgacgtttgtttagccagtaggagaaaataaataaataaataaatcccttcgtgttaccctcctgtataaatccaacctctgggtccgttctcgaatatttaataaaactgatattattttgtaaaacnnnnnnn

SEQ ID NO: 30275 - DNA, 563 bp, Homo sapiens
  misc_feature 559, 560, 561, 562, 563: n = A,T,C or G
acatcaccaagctgcagcaggagagaggccagatgcaggaggaggcccggcggctgcgggaggagatcgaggagctcaatgccaccatcatgtgagcttctgggccttggggctccaaccaggcaccccatcccgatgcagggcctgcctcagaggtggtgggaccctgtggcctcatcactggtcagtgcctctttgctgcagtagttctgctctttgtcaacctccttccacagacctctcttctctgtgcctggctgtggcccggcactgggccagccctgccatcttttgtcccagggtccttattggccactggctgctccacagctcccacggctcctgtcatttcagctcctgccagcagctgctccctgccacgggagtccccgttacccggcgccagtttgatcacatgaaagacatgtttgacgaatacgtgaaaacccggaccttgcagaattggaagttctggattttcagcatcatcatcaagccgctgtttgagtcgttcaagggcatggtgtccaccaacagcctggaagagctgcaccggacnnnnn

SEQ ID NO: 30276 - DNA, 3309 bp, Homo sapiens
  misc_feature 1, 3309: n = A,T,C or G
nggaagagatcacagggagtccagaaacgcctgtcatcccaagcttatgctgtttttctaaaagctctttatgggggcttgatattgggttggtggtctttgtccagaaatatgaagggacaaaggcgggccataaccctcccttctagagtccaggagcttcccctgccactgccacaacccccgatgccaccacagccatcgccactgccacctgcgtgtccgcggacgggcagcgaagatgttagccttcgctgccaggaccgtggtgaagcctctgggcttcctgaagcccttctccttgatgaaggcttccagccgcttcaaggcacaccaggatgcactgccacggctgcccgtgccccctctccagcagtccctggaccactacctgaaggcgctgcagcccatcgtgagtgaggaggagtgggcccacaccaagcagctggtggatgagtttcaggcctcaggaggtgtaggggagcgcctgcagaaggggctggagcgtcgggccaggaagacggagaactggctgtctgagtggtggctcaagaccgcctacctccagtaccgccagcctgtggtcatctactcgagcccaggcgtgatgctacccaagcaggacttcgtggacctgcagggtcagctccgatttgctgccaaactcattgagggtgtgttggatttcaaggtcatgattgacaacgagaccctgcccgtggagtacctgggggggaagccactgtgcatgaaccagtactatcagatcttgtcctcctgccgagtgccgggccccaagcaggacacagtcagcaacttcagcaagaccaagaagcctcccacgcacatcaccgtggtacacaactaccagttttttgagctggatgtgtaccacagtgacgggacacccctcactgcggatcagatctttgtgcagctggagaagatctggaactcatccctacagaccaacaaggagcctgtgggcatcctcacctccaaccaccgcaactcctgggccaaggcatacaacaccctcatcaaagacaaggtgaaccgggattccgtgcgctccatccagaagagcatcttcaccgtgtgcctagatgcaaccatgcccagggtctcagaagacgtgtaccgcagccacgtggcaggccagatgctgcatgggggcggcagcaggctcaacagcggcaaccgctggttcgacaagacgctgcagttcatcgtggcagaagatggctcctgtgggcttgtgtacgagcatgctgcagcggaggggccccctattgtcacccttctggactatgtcatcgagtacacgaagaaacccgagcttgtgcggtctcccatggtgcccctgcccatgcccaagaagctgcggttcaacatcacccccgagatcaagagcgacatcgagaaggccaagcagaacctcagcatcatgatccaggacctggatatcaccgtgatggtgttccaccattttggaaaagacttccccaagtcggagaagctaagcccagatgccttcatccagatggctttgcagctggcctactacaggatctacggacaggcatgtgccacctatgaaagtgcctccctgcgcatgtttcacctgggccgcaccgacaccatccgctcggcttccatggactcactcacctttgtcaaggccatggatgactccagcgtcacggagcaccagaaggtggagctgctgcggaaggccgtgcaggcccaccgaggctacaccgaccgggccatccgcggggaggcctttgatcgacacctgctgggcctgaagctgcaggccatcgaggacctggtgagcatgcccgacatcttcatggacacctcctacgccatcgccatgcacttccacctctccaccagccaggtccctgccaagacagactgtgtcatgttcttcgggcccgtggtccccgacggctacggtgtctgctataaccccatggaggcccacatcaacttctccctgtcggcctacaacagctgcgcggagaccaacgccgcccgcctggcgcattacctggagaaggcgctcctggacatgcgtgccctgctgcagagccacccccgggccaagctctgagcccctaggactcaggcctgccaatgccacagccaagcccaccctgggatgggccacccaccagggctcagctccttggttccctcttccttggttccctcttccctggtccccccaaatctactgagccacggaccgcatcctccagggggcctgcaggccccagccaagtgccttccgtgggtcatcccagcacctgccagggcccgacctggggctgagtgcagaggctgagcaggacgttaggcccgggcccctggcacgtcctccaccggtgcctcctctggggaagggaaccagccctccagagcaggagactggcaagagctctttgtctcaccagctcagccccggccactccctgccaactccatgaccaggccaccatctgtaccctgcttcccaaactcccaggacctggagacaggattgtctggggccgaggggccagggtgtgaggtttcacctccgttgcggctgtgctcctgtggataacattgctagcgagccgcctctggttccactcagcttggttcctgcccccgccctgctgtatgatattaatgtggaaggtcatcaataaaggggaattgtgttggtgaaaaaaaaaaaaaaaaaaaaaaaaaaaaacaaaaaaaaaaaaaaaaaacaaaacaaagcggggggcgcgcgcccaaagaagaacaccccccgggggggcccgagaacagacggccacccccacgtgcggagaagcaaacggggggccccacagaagaggaggagcacacactaattataagagccgagagcgagcggcggcgaggaggaaagaaaaaagcacggaaagagggcgaaacaaacggagcacacagcagggaacaaactgggagaagagagagaaaccaaaacagccagaggcgggcagaggcgacaacatagaggagcgcagacacacacaacaaaaacggaacaactacagcacgctaccaagaagcgagccaaacaatccccacccaatataagcagcgcgggtgacaacagggacggggagagaccacgcacgcgagagacaccaagactacgcagggtagcaagtcgggaacgacgcgaggggcgcaacgaccgtgaaaaaatgaaaagacaaaacgacaacacaattataacaacaagagaaagacgcagacaggcaaaacaccacggacggn

SEQ ID NO: 30277 - DNA, 2725 bp, Homo sapiens; identical to SEQ ID NO: 21731

SEQ ID NO: 30278 - DNA, 2239 bp, Homo sapiens
ggtacttaatgtatcgagtcattttctaaaggggaatatggaaccccagcctgcgtggaaggcatctcacataatgccttttcagtgagggtgttgatctaaatcttttaaaaatcatttggtgttagccatcaacggttgaaatttgtaatgtgggatacatctcaatttccttatctacaaattgctactacaaagaaaatttacatgtgttctctctagttttcaacttaaactgctccccagcagggaaacaaaaggtcatttgccctcgctgtagttggagatttgcactcatgatttccaggtgtttctgaattctttgaagctttttctgctgaaggacaagtggtgcacgttcagcagtttccttagaaccattgccaattgaaagaaccttgttcatcctgagagtcagcggaaaccctgtcattaatgagaggaactggaaagttgccttctatactgtgtaacagaacctgagctgtatattttgtcatgcagttgtgcttggtgtgtataagtctgacatactgtcatttaaggaaaagtgtaaagtagaaaatattgataaggtgaaaataacttgggaaataataaccttgttgttttcctcctctgattttggtcatgtttgcattttagtttttggctttcacccccaaccagtgaccaaagacttgaccactcaaagtccagctccccagaacactgctcgacatggacaccggtgtgattgaaggtggattaaatgtcactctcaccatccggctacttatgcatggaaaggaagttggcagtatcatcggaaagaaaggagaatcagttaagaagatgcgcgaggagagtggtgcacgtatcaacatctcagaagggaattgtcctgagagaattatcactttggctggacccactaatgccatcttcaaagcctttgctatgatcattgacaaactggaagaggacataagcagctctatgaccaatagcacagctgccagtagacccccggtcaccctgaggctggtggtccctgctagtcagtgtggctctctcattggaaaaggtggatgcaagatcaaggaaatacgagagagtacaggggctcaggtccaggtggcaggggatatgctacccaactcaactgagcgggccatcactattgctggcattccacaatccatcattgagtgtgtcaaacagatctgcgtggtcatgttggagtcccccccgaagggcgtgaccatcccgtaccggcccaagccgtccagctctccggtcatctttgcaggtggtcaggacaggtacagcacaggcagcgacagtgcgagctttccccacaccaccccgtccatgtgcctcaaccctgacctggagggaccacctctagaggcctataccattcaaggacagtatgccattccacagccagatttgaccaagctgcaccagttggcaatgcaacagtctcattttcccatgacgcatggcaacaccggattcagtgcaggtttggatgcatctgctcagactacttctcatgaactcaccattccaaacgatttgattggctgcataatcgggcgtcaaggcgccaaaatcaatgagatccgtcagatgtctggggcgcagatcaaaattgcgaacccagtggaaggatctactgataggcaggttaccatcactggatctgctgccagcattaagctggctcaatatctaatcaatgtcagggttcttcggagacggtggcatggggagcagctagaacaatgcaggattcatcccataatcctttctggctttcaaccaccacccatgatccattctgtgtagttctgaacagtcagcgatccaggcgttcactacgtctgggcaccgccacggagtcgtacacactgtatcgatccacctcgaggacgtaccaggtacagcggagcaagtccgtaacaaaccaacaacaggggggagcaacaataaagatacccctgaggggagcacgagaagaagccgatatccccgaagtctgatacacaacgggcccccaataggaagacgaaaataaacgcagcccagccgccgcaatacaccgcgagctggaacacgcgagggcatggtggaaagaacaagctggggcgacaggagaccccacggcgaccggcgcaagccaatcgtgatatgcaaggcaagaccggaagcgacagtaaaccagcacgcacagcgatccgcggacaggcgc

SEQ ID NO: 30279 - DNA, 1201 bp, Homo sapiens
  misc_feature 1, 1193, 1194, 1195, 1196, 1197, 1198, 1199, 1200, 1201: n = A,T,C or G
natggatgacagaaaagggaataacgttttgtttctccagtctaggaaaagcaagtcaggtagtggatagactgactggcgtccggggagcccagggtatgtgagggccacgtggatggaagcaaatgcctcctgcatagcccttggctctttgtcccacttgggaggagtccatggatgtaatatttacaaaacaattttttccttaccatttgcagaaagcattgcatatatttccttttagctcaggaaactggcatgccccaccctctgctactccatcagatgtaaatacaatgactgaaaaacgtgaggcatgtcattgtgaagaagtaaaaatgactgttgcttcagaagctaaaatacagctgtcagattcagaggcaaaatctcatagttctgcagatgatgcttctgcatggagtaacatccaagaggctcctctgcaggatgacagttgcttaaacaatgatatccctcacagcattcctttggagcaggggtcaagctgcaatggtcctggtcaaacaaccggtcatccttactaccttcggagtttccttgtggtgctgaaaaccgtacttgagaatgaagatgatatgttgctctttgatgagcaggagaagggaattgtaactaaattttatcagttatcagctactggtcagaagttatatgtaaggctctttcaacgtaaattaagctggattaagatgaccaaattagagtatgaagagattgccttagacttaacacctgtgattgaagaattgacgaatgcaggctttctacagacagaatctgagttgcaagaactctctgaagtgcttgaactcctttctgctcctgaactaaaatccctagccaagaccttccacttggtgaatcccaatggacagaaacagcagctggtggacgcctttctcaaatggcaaacagcgtcagtctgcacttggggcaagaataaagctggaattggtgcagtgatcttcacaacgtttgtggtatggttacgtaccacctttaccatgtgctagccatatacttacctacattgtatctggatgactgaatgttattcatgagtcattgagaggggaaacctatgaaaccgtctcctggtcttacacattgtgaatcgcaattcgccaaaatcagacgctgataatttccaaaaccgttgtaagccccannnnnnnnn

SEQ ID NO: 30280 - DNA, 394 bp, Homo sapiens
  misc_feature 384, 385, 386, 387, 388, 389, 390, 391, 392, 393, 394: n = A,T,C or G
cggcggaccccagtgtctttatccctcttttgcacagtcagcttctgcagctctcccgggctagcatggcagcgtggaagagttggacggccctgcggctctgcgccacaggcattgcttcagagtttggagttcgaggttatccaacaattaagctattaaaaggggacttggcatataattatagaggaccacgaacaaaagatgatattattgagtttgctcacagagtatctggggctctaattcggccacttccaagtcaacaaatgtttgaacatatgcagaagagacaccgtgtatttttcgtttatgtaggtggagaatcacctttgaaagagaaatacctagacgctgctttagaaatgattgtatatacctacnnnnnnnnnnn

SEQ ID NO: 30281 - DNA, 2129 bp, Homo sapiens
  misc_feature 2125, 2126, 2127, 2128, 2129: n = A,T,C or G
cgcgtccggtcatcttcgcgcgccggtgacggaagtgcggtgttgagcgccggcggctcgcgcccacgctgggccgggagtcgaaatgcttcccggtgccgggagtgagcgatgagctggcttctgttcctggcccacagagtcgccttggccgccttgccctgccgccgcggctctcgcgggttcgggatgttctatgccgtgaggaggggccgcaagaccggggtctttctgacctggaatgagtgcagagcacaggtggaccggtttcctgctgccagatttaagaagtttgccacagaggatgaggcctgggcctttgtcaggaaatctgcaagcccggaagtttcagaagggcatgaaaatcaacatggacaagaatcggaggcgaaagccagcaagcgactccgtgagccactggatggagatggacatgaaagcgcagagccgtatgcaaagcacatgaagccgagcgtggagccggcgcctccagttagcagagacacgttttcctacatgggagacttcgtcgtcgtctacactgatggctgctgctccagtaatgggcgtagaaggccgcgagcaggaatcggcgtttactgggggccaggccatcctttaaatgtaggcattagacttcctgggcggcagacaaaccaaagagcggaaattcatgcagcctgcaaagccattgaacaagcaaagactcaaaacatcaataaactggttctgtatacagacagtatgtttacgataaatggtataactaactgggttcaaggttggaagaaaaatgggtggaagacaagtgcagggaaagaggtgatcaacaaagaggactttgtggcactggagaggcttacccaggggatggacattcagtggatgcatgttcctggtcattcgggatttataggcaatgaagaagctgacagattagccagagaaggagctaaacaatcggaagactgagccatgtgactttagtccttgggagaacttgagccagcggctgtcttgctgcctgtacttactggtgtggaaaatagcctgcaggtaggaccattgcagtgatgggcagatgcgtctttcacacggaatcaggcacagtggccttctgtgacatgtgtttataaaaaatggttaagtatataataaattgaacatctttgagattggagaattatgtgagatttccacattatgtttactgggttcaatactgtccttgcttgttttattgcaggcaagcaaggcaaatggcctaaaatgctgtggcttatattttgataagaaatcaaaaaaccattggttaaaagatgcaactcagaagtctggaagtattctgaaagcatccatttaccgtccagttgacaggtttgagtctcctgcttgtataggtgacttgtgcccatgggtacattaaaggaacatgctgcccagggcctgggcggacagctcagtgggcaggatgtgtgctgggtctcagccccatgtgcctgcttgctgggcagttagtatagggcaaagcctgcctgcggcgaccctggctgctaggccattctctaggaacagctgcgactcataaagaccaagaagcataaataaactttcaaaaatttatttggctctttcgttaaaaactgtgcaaattaccaccaacacacacacagtaccaccaccggactgggcacacagaggcaccatatggtaaccctacgcccttggggaagcgcaacggcgggcacattacatcgacggtcacgaattacagcccagttggacacaatgccgaaccctggccctacataaacatcaaaaagacaataccccagggtatgactggacaaggctagaacgccacgaaccagaaggccgcgccaagaaaccattggaccccagcgagcatgttatcacgaacacagaatgcagcccgtgagaacacacgggcacaacgacgagcacacctgtccaacacaacaacacgccaacacagcaagcaacacacaccagcaacataacaaaaaaagagcaagacagacgagtgcagaccgaaagacacacgaaaaccagtccagcaacaagaagcaaacggccaagccagcaagatctcgcgacaacacannnnn

SEQ ID NO: 30282 - DNA, 1849 bp, Homo sapiens
  misc_feature 1811, 1818, 1834, 1846: n = A,T,C or G
ccgcgtcgacaattgttattccgactcactttagggcaaaaacttttttttttttttttttcattccacacagtttattgaaaatgctcagttacgatttcatacagatgaacaactgatcactttatttacccaattgcaaatagcagttaggagtacaatgcatcctttttacatcactcacattagggctcgctcatacacctcttccaggacctttgactgaagggaatcaaatggccgattgcctagttgctaacgcaatatctaatgctagacactttcacaatttaacccatgttaatgcctctagtctcaaatgcagatacagcattacctggaaagaagctaaagctattatccagcaatgcccaacttgccaaatggtacattcctcatcttttacaggaggggttaatcctcgaggattggaacctaactctatttggcaaatggatgtcacacatgttccctcatttgggagactagcttatatacatgtatgtgtggacaccttttcttactttgtctgggctacatgcccaatcaggagagtcttctgcctgtgttagttaaacatcaccttttgcagtgttttgtggtggtgggcattccagcttctattaaaacagataatgccccaggctatactagccaagctctagctacatttttctctgtgttattaaacacattaccggtatcccatataattctgaaggacaagccatagtggaaagaatgaatctctccctgaaacagcagttgcagaagcaaaagggggaaaacaggtactacaggacaccccataagcaattgaatcgcattattaactttaaattttttgagcctgcctaaaggccggatcttatcagcagctgaacagcatctacagaaaccagctgcaaagacagaagcagaacaactggtttggtggagagacctgataacagaaagttgggaaataggtaaaataataacttggggtagaggttatgcttatgtttctccaggactgaaccatcaagacacctgaaaccttatcatgagcgaatgctgaggaagagattccgggaggatcccgaggacccccccagttgcagccatgtcaagactgatgctgaggaggaccccaactgtcacgagcaacacccgtcaaacacagccatccacctgaggtcagatcaagaagctgtcacagatggcagaagaaaacctgaggaatggtctggaacacggacctggtggagaccctggagctgcagaacctgatgctgtgtgcgctgcagaccatctacggagcagaggcgcggaaggagtcacggggcacgcacgccagggaaggctacaaggtgcagattgatgagtacgattactccaagcccatccaggggcaacagaagaagccctttgaggagcactggaggaagcacaccctgtcctatgtggacgttggcactgggaagactcttcttttcatggtcaccctgggatatagacccgtaatcgacaaaactttgaacgaggctgactgtgccaccgtccccccagccattcgctcctactgatgagacaagatgcggtgatgacagaatcagcttttgtaattatgtataatagctcatgcatgtgtccatgtcataactgtcttcatacgcttctgcactccggggaagaaggagtacattgaagggagattggcacccaggctgggagcttgccaggaacccagttgccagggagcgtggcacttacctttgtcccttgcttcattcttgtgagatgataaactggcacagtcttaataaatntaatgancaaaaaaaaaaaaatngagggggccgtncca

SEQ ID NO: 30283 - DNA, 1113 bp, Homo sapiens
  misc_feature 1, 2, 1112, 1113: n = A,T,C or G
nnctgattggagctccaccgcggtggccggccgcccgggcgggtgcgttcttggtgcgccgggccgtggtgagtccgggctcccgtggccgcgtgctgggaggagactggagcccggttaggaagaatggagttggcgactcgctaccagatccctaaagaagtggctgacatctttaacgcccccagtgatgatgaagagtttgttggcttccgagatgatgttcccatggaaaccctctcgtcagaggagagctgcgatagttttgactcactagagtcagggaaacagcaggatgtgcgctttcattccaaatacttcacagaagagctaagaagaatttttatagaggacactgactcagagactgaggattttgcaggatttacgcagagtgatctgaatggaaagactaacccagaagtaatggtcgtggagtcagatttgagtgatgatggcaaagcatctttggtgagcgaggaagaggaagatgaagaagaagataaggctacccctagaagaagcaggtctagaagaagtagtattggtcttcgagtagcctttcagttccccaccaagaagctggccaacaaaccagataaaaacagttcttccgagcagttgttttctagcgcacgcttacagaatgagaaaaaaacaattcttgaaagaaagaaagactgtagacaggtgatacaaagggaagattctacctctgagtctgaggatgactctcgggatgagagccaggagagttcagatgctttgctgaaaaggaccatgaacatcaaggagaacaaagccatgcttgcccagttattggcggaattgaactcgatgccagatttcttcccagtacgaaccccaacctcagcttctaggaagaagacagtgaggccggccttctcggagggaccgccccgggttgaacaaccgagggggggtctgagaagtgggcaagacacacggtcgccgctatggcggagttacgtcgaccaggagcaggggaagcgggcgccacccggatctctcgcgggggacccaggcacatcgccggcattaacggacggcagcgaaacacaacgcggtggggctgacacggagagacaccnn

SEQ ID NO: 30284 - DNA, 3540 bp, Homo sapiens; identical to SEQ ID NO: 21108
  misc_feature 1, 2, 3, 4, 5, 6, 7, 8, 9, 10, 11, 12, 13, 14, 15, 16, 17,18, 67, 68, 69, 70, 72, 73, 3538, 3539, 3540: n = A,T,C or G

SEQ ID NO: 30285 - DNA, 1815 bp, Homo sapiens
  misc_feature 1, 1814, 1815: n = A,T,C or G
nacgtgatacatatttttttaggatttgccctctcttttctctcctccccggaaagggaggggaaagaattgtattttttcccaagtcctaaatcatctatatgttaaatatccgcgccgatctgtcttgaaggagaaatatatcgcttgttttgttttttatagtatacaaaaggagtgaaaagccaagaggacgaagtctttttctttttcttctgtgggagaacttaatgctgcatttatcgttaacctaacaccccaacataaagacaaaaggaagaaaaggaggaaggaaggaaaaggtgattcgcgaagagagtgatcatgtcagggcggcccagaaccacctcctttgcggagagctgcaagccggtgcagcagccttcagcttttggcagcatgaaagttagcagagacaaggacggcagcaaggtgacaacagtggtggcaactcctgggcagggtccagacaggccacaagaagtcagctatacagacactaaagtgattggaaatggatcatttggtgtggtatatcaagccaaactttgtgattcaggagaactggtcgccatcaagaaagtattgcaggacaagagatttaagaatcgagagctccagatcatgagaaagctagatcactgtaacatagtccgattgcgttatttcttctactccagtggtgagaagaaagatgaggtctatcttaatctggtgctggactatgttccggaaacagtatacagagttgccagacactatagtcgagccaaacagacgctccctgtgatttatgtcaagttgtatatgtatcagctgttccgaagtttagcctatatccattcctttggaatctgccatcgggatattaaaccgcagaacctcttgttggatcctgatactgctgtattaaaactctgtgactttggaagtgcaaagcagctggtccgaggagaacccaatgtttcgtatatctgttctcggtactatagggcaccagagttgatctttggagccactgattatacctctagtatagatgtatggtctgctggctgtgtgttggctgagctgttactaggacaaccaatatttccaggggatagtggtgtggatcagttggtagaaataatcaaggtcctgggaactccaacaagggagcaaatcagagaaatgaacccaaactacacagaatttaaattccctcaaattaaggcacatccttggactaaggtcttccgaccccgaactccaccggaggcaattgcactgtgtagccgtctgctggagtatacaccaactgcccgactaacaccactggaagcttgtgcacattcattttttgatgaattacgggacccaaatgtcaaactaccaaatgggcgagacacacctgcactcttcaacttcaccactcaagaactgtcaagtaatccacctctggctaccatccttattcctcctcatgctcggattcaagcagctgcttcaacccccacaaatgccacagcagcgtcagatgctaatactggagaccgtggacagaccaataatgctgcttctgcatcagcttccaactccacctgaacagtcccgagcagccagctgcacaggaaaaaccaccagttacttgagtgtcactcagcaacactggtcacgtttggaaagaatattcaaaaaaaaaaaaatctgttcaaaaacacaaaactccggggcttttttcgggggggaaaggggtttgaagggccttggcatctgttccgccccttttggtcaagtggaattggcggccccaagggggggtaaatcgaacnn

SEQ ID NO: 30286 - DNA, 3323 bp, Homo sapiens
acaccacctgagtcaccagagttggtggctggacctcctgcgacttccgagttgcgatgctgtacttctctttgttttgggcggctcggcctctgcagagatgtgggcagctggtcaggatggccattcgggctcagcacagcaacgcagcccagactcagactggggaagcaaacaggggctggacaggccaggagagcctgtcggacagtgatcctgagatgtgggagttgctgcagagggagaaggacaggcagtgtcgtggcctggagctcattgcctcagaggtgggacctggggagatgggcaggggttgggccaccatgggtacaggaagtaacaaagttatcttaactgatatttctccaaaaccccctttcacactcaggacctttctttgggctttatcttcctttcttatctccctcaagcaaaggcagtgcaagtccagtttatggggttgggacatttagggagcctccagggtccctacagtttcatctgatcccttccttccttcctcctatgaggaaggaggagcctagaagcacaagtttgagtgggtaggtggcattgaggggccactgctcatggcagatgggtttctgagaatgctgcctctggctttgccccaggcctggtgctgagtgaatggagctttctgcagggagtactcccgctttcagctctggctctggcagggagggactgtgggagtccagggaaggggctcaataccttctgacattgccccccaccacccgagaacttctgcagccgagctgcgctggaggccctggggtcctgtctgaacaacaagtactcggagggttatcctggcaagaggtgagggctggagggcagtgtcagggatggtgctcccagtgggggaacccacctgtaccttcccagtgttcattgaggagtgaacttcccagtcctttgctgatggttgagagtcctttctctgtgccctcattacccctctcccacggcagatactatgggggagcagaggtggtggatgaaattgagctgctgtgccagcgccgggccttggaagcctttgacctggatcctgcacagtggggagtcaatgtccagccctactccgggtccccagccaacctggccgtctacacagcccttctgcaacctcacgaccggatcatggggctggacctgcccgatgggggccatctcacccacggctacatgtctgacgtcaagcggatatcagccacgtccatcttcttcgagtctatgccctataagctcaacggctttagctgtttgtgtgtctgtccagcccaaaactggcctcattgactacaaccagctggcactgactgctcgacttttccggccacggctcatcatagctggcaccagcgcctatgctcgcctcattgactacgcccgcatgagagaggtgtgtgatgaagtcaaagcacacctgctggcagacatgggccacatcagtggcctggtggctgccaaggtgattccctcgtcctttcaagcacgcggacattcgtcatccaccactactcacaagactcttcgagcgggccacggtctaggggctctatcttctacccaggaacagcgggtgacagtgctgatgcgatcccccaatgactggcccggtcatatcccatatagcacagtttgaggagcgaatcaactttgccgtgttcccatccctgcagggggggcccccacaatcatgccattgctgcagtagctgtggccctaaagcaggcctgcacccccatgttccgggagtactccctgcaggttctgaagaatgctcgggccatggcagatgccctgctagagcgaggctactcactggtatcaggtggtactgacaaccacctggtgctggtggacctgcggcccaagggcctggatggagctcgggctgagcgggtgctagagcttgtatccatcactgccaacaagaacacctgtcctggagaccgaagtgccatcacaccgggcggcctgcggcttggggccccagccttaacttctcgacagttccgtgaggatgacttccggagagttgtggactttatagatgaaggggtcaacattggcttagaggtgaagagcaagactgccaagctccaggatttcaaatccttcctgcttaaggactcagaaacaagtcagcgtctggccaacctcaggcaacgggtggagcagtttgccagggccttccccatgcctggttttgatgagcattgaaggcacctgggaaatgaggcccacagactcaaagttactctccttccccctacctgggccagtgaaatagaaagcctttctattttttggtgcgggagggaagacctctcacttagggcaagagccaggtatagtctcccttcccagaatttgtaactgagaagatcttttctttttcctttttttggtaacaagacttagaaggagggcccaggcactttctgtttgaacccctgtcatgatcacagtgtcagagacgcgtcctctttcttggggaagttgaggagtgcccttcagagccagtagcaggcaggggtgggtaggcaccctccttcctgtttttatctaataaaatgctaacctgcaaaaaaaaaaaaaaaaaaaaccttggggttttttttgttttttttaaaatctttgctgagccctttaaaggggcctttaaaaagctaggttaagatttaagttaggttggcgccctggggtttgtatcatattgtcgatgatatcctcgggggtgatatgagctgatgagccttgcgggccttcgagacgccttaaaccgggggggcgggggcacacaagggtgttccgaggggcctcttctgctaatccgggggacccaaataagtttcgttgaggaggaaggaccttctttggtgttgtgccccgggtgctgttccagacgaggttctccggggcggggagacataacaggcgtcgtagtagctgaccaaagtggggtttactggataaagaagcggggggcttaaagaagacttaggggcgcccttggggtgcggaggccataatttcctgggggcaatgggtgtcccttgagggggcgccataaagggagttttttttccccttgtggggagaaaggtggttctctgccgccaggtggggggtcgggggatgtcctagggcatggacagtccgtccgggttagattgtttgcctacccccccagcgggggaaaggcggcgtacgagcgggagtctattattttttgacaggatcattcaggcggcgagtagctttctactggtggttcatccacggtg

SEQ ID NO: 30287 - DNA, 555 bp, Homo sapiens
  misc_feature 1, 419, 420, 421, 422, 423, 424, 425, 426, 427, 428, 429,430, 431, 432, 433, 434, 435, 436, 437, 438, 439, 440, 441,442, 443, 444, 445, 446, 447, 448, 449, 450, 451: n = A,T,C or G
ngataaagtatttgattcaagcacttttattttattaagttgattaattagaattactttatatatttttgttaatgaaacattgtgtgcataacacataaatacatagatatatttggcatgctggtaaaggtacatcttataaattcataaaaaccttcttttttccatcttaggcttcaaattcttcataacgtgtttcaataggtaacctgtatcaattcttggtaaccctaggcagttgtcagccaaatagccttaaatttgcatgctaaaagaaagaactcaggtgaaaatcaaatagcaaaatatacatcataagatatggtgagagaaagtctggtgtgctgaagagaaattaaaactgacttaattgccaattaaacatgaaattatagaaattataaaggccttctaannnnnnnnnnnnnnnnnnnnnnnnnnnnnnnnnaagattctatagctcttactttagagatgtacgcatgagataaatacaaattcaccagcttgcatataaataacctgttggatacaaacaatggtttttatctt

SEQ ID NO: 30288 - DNA, 4839 bp, Homo sapiens
gccgttttttgcccgtctgttgtgaggagcggcctggttggtccccgtcgagcgggtgtgttgtgatgtggtgccccgtggggtgggcgcttgtcaactttcgttgggttgggtctgttggcgcgccgcggttgtggtgcttcgccccggcccgggttgttgtggggggtcgttcctctgcgtccacgggtcgtctcgcctgccgcgtttgcgcggcgggtgggttgccggcgtgcgtccggcctgctgtttttgtttggatgccgtgcgagcgcgctttgctgcggctcgtgtttggagcgctgtagggctgtctctcccttagtttggcgtctccgcgcctgtttggtcctcgcacgaattgcgctgcgtctgtgcggtggtgcatgcttttgggggccctcctcctcctgcggtgagtttttcttgtgtgcgctcgctcgcccccccccttctgtttgttttctttttttttttttttttgtattgtttgtgtttttttttttttttttttttgaggagtgaaaacctttatttggaaaagtcagcaacatggatatggttcagaaaaaaacacagaaggagcaaaactaacatgaacatagaaagggggcctttgataaaacgtcgaacacatcactattctgaggaaggagaggtttgcgttgtttctagtaagacacagccctctgtggcaccaaggggctctcatgtccagtccaggccccagtctctgcgggagggaggagcagacggggttagcaccgttaatctcgagggtcttgagtgcagccagcgcccctgcgagtactctctgaggtcggggtcagtgctggtcagcagcggcctccagggctgtagggccaaggtccaggccggtcaccagcaggaccctcaggagacggggccgagtcgccgagatttatgtctgcaacggcctcctgaccttggtttcccaaaacgagacagaggccaatggctgccccaagctgaggagaagagcttgctttgagtttaattgtaaagtaactgttaggtgaggattggtgggaaaaaccagctatggggacagaggagagggaggctagtgcggcacaggccccgagagggcgtcttgctcaggctggtgggacgcagcacagaggtgcctagggaaggagctgcgcaggcaggagggagggcgggcacaggagggcagggcaggagagcccggggtggggaacccaggtgaggccagctcagggctgagccccagagggccctgcacaggtgacgccagctcagggctgagccccagagggccctgtgcaggtgacactagctcagggctgagccccagagggccctgcgcaggtgatgccaactcagggctgagccccggaggaccctgcacaaagcaggcagcagcgttgtgtcctggctttccaagcttttccttaaaaaaaaatctagcgaatcaggttggtcgggaaaattcgcatcacattttactctgtttagtgatgagtggggaggggtgggaggacagggtttggtgccggcgtgcagggtgggctagcccagcgccaccttcctggagactgtctggtggaagacaccgcggagcagggcctggtagctggggacacggaacaggtggctctcgccgtaggccacgtcgtactcggccgtcttgccggtgaccaggacgcggatgtggggctcattcacctggcggcccacgaccaccacgaagatctcgatgcctgcccgctgggcttcctgcacggccttctcgatggcagcgggcgtggcgccctgcgagttgccatctgagaagagcagcagcctcttcttggcagcgccagacgaggcctcgcggtagaagcgggtcacatagcccagggcatcgttgacgtcggtggcgtcgttgataaagtccatggcatcgacggcactggccagggccgtgtagttctgcaggaactgcagcgacgcccgctctgggcgctgctggcccgtgccgctgtactgcaccaccgccacccgcacgtcgtgggcggggtccgtcctgcccgctgtgaggaagcgctcggccaggcgcttggcgaagcgcttggtggtgtcaaagttgtggctgcccacgctggcggagccgtccagcaggatggtgatgtcagccggggaggagaacgtgatggggcaggtgtaatctggacacttcttgtctatgcagatctgggcggtgacattcttcaggaaggcatcctccagcagctctgcatagttctccttgaccagcgagaggccgggccggccctgggatggtgccaggccttggcaagaaatgacattgagctggtctgagcctgggatgaagtcaaacacgtctttgatgcccacggagaccacctggatgccggggctgcagagcacgttgagcggtgtggtgtccctctgagtgtctgagcgcccgtcagtgatgaccagggcgatgcggttgttcgggctgggcggcagcagctggtcccgcgtgtactgcagggcctcccccgtgaaggtgccgcccgccatccactgcaggctcttgatggcttccttgagctcctgcacgttccggatgctggggctgcgcaggctcacgtgctcctgcatctggctgtggctgtactgcaccacacccgcgtacgactgccctggctcgaacttgaccagctcgtcccggctcagccggtcgatgaccttgacgacgaagtccttggcaatctcgaagttctgcaggccaatgctctctgagctgtccagcacgaacaggaggtcgatggggccgcacttgcattcacagcaagagcacattttcatgatgatgtccaaaatctcgcattcgtccggcccaggcggtccttggtgtcctgggggtccctgggggccctcgggaccccggtacccctttgctcctttgactcctcggggtgcaatgtcgttgttatcgtctccggggtccccggcttctccctcgtcccccttgaggccggggtagcccttcgtgccgtttatcccgggagcgcccctgttgcccggatacccggggaagccggggaagccctcggtgccatttccagcggggccgtcttctcccctttcacccatcagccccgggtctccagggggtccggcaggtcctggggctcctctggcaccctcggaccctgggggaccctcatcgcctcggtagcctttaggtccgatagggccagcctcgcccgggtctccagggacaccaacggggccttctcttccctgatcaccctgcgggccagcttcaccagggtctcctcttggtccccgcgtgcctggggtcccccgtggtcctctctctccagggccaccccgctccccgggggcaccgtcaggtcctgggttcccctcgtcgcccgcctctcctttctctccggggggcccaggctctcccggctggccctcgtctccagatggtcccgagctccctggtctccccgcctccccgtcagctccaggctcgcccttttctcctttcagtccaaaggcgccggggtctcccttggggccagggggtccttgaatgccgtcaaacccgggcgagcccttgcagcctggcaggcctgggtaccccatctcccccttcacgccgtccaccccgtcgatgccacgcttgcccttctctcccttgtagcccttgggtcccctggagcccttctccccacggctccctttttctcccttcattccctggtacccaacaggtccgaggtccccgggtcttccaggatctccggcttctcccttctctcctgggagccccggcttgcctcgttctccctcaaagccggggtcgccccggagccccggaggtcctcttgcaggctggcattcgaaggagcagcacacttgctccacgttatttttgatcatgtccacgatggtgtcgatggtctggctgatggcctcctctgcgtcgcggctctggccccagtcagccgccgtgaagttgcgccggtacgtgtggtccgtggcgatgatgctcagacgcggctccaggtggtcgggtgtgatggccaccgagaagactttgacgcccaggtgcttggcctcgttcacagcatcctccagccccccacagggttccttgtagccctccagggggtgcccgtcggtcaccacaatcaggtacttattctccttcaggtgggagccccccacgaggagctgctccagccccttcttgatagcgcagtcggtgtagggtgcccttcccaaagtacttgaccgcgtccacgctgcttttgagtgcgtcgcggccgccaggcatgcgcgtgaggccttggatgatctccacctcgtcactgtagtgcagcgcgcctgcgttccacaccaggtttcggtcacagcggtagtacctgtccctcaggttgtcgatgaagcgcttggtgaaggacttgactttgtccacgagggccccgtagggcttcagcctcagggccacgctctcagaggtgtccagcacaaagaacaggtccacggggcagtcctggaaggccacggccctcggggtctccggctcatcctgcgcggctgtccagcaggcctgcagcagcaggggcagcagagcacgggccgccctcatgtctcgggcctgcggtcaccacacagcgcggccagggcagagtgggccgccgccgccgcccagagaccgaggctgccttctgctcccagccagaggcctggaccttggaacagggcatcatgtgacatcgcagaggacagatggtggaaaagacatgagcaacctaatggaagaggaaaatgggaacggacgcgtgg

SEQ ID NO: 30289 - DNA, 883 bp, Homo sapiens
  misc_feature 1, 2, 870, 871, 872, 873, 874, 875, 876, 877, 878, 879, 880,881, 882, 883: n = A,T,C or G
nnccaaggttttaaggggaatggttcctcacagaagagaggagcaggaaagaattgtcacctttagtctaccagaaatggagatttttaataacaagtttattccaaatacattccagttccccttgtgaatacttttttgactcacagggtatttcaaagtttattacttggttttcagacatttgaggcttttctggatatcaatttgttgttggtttctaatttaatttcaagtgttcagacaacatcctttgtatactatttcaggcttgaaccttttctcaatccatcgacatacagtctatcttggcactgccaagtaccatttgggtcaggattttgtcatttagatccgtatttttcctatatttttatctggttgttccgtcagttactgagagagcagtattaattcaccagctataattttggattgtcagtttcctgcttttgttctgttgtttttgattcacatactttgaggctctgtgtgtgtgtgtgtagtttgtgtgcactttgaggcacaatttataattgtaacatcatcctctctgattcttttatttttattaaattaccctgtttatttctggtgatatattttgttctgaagcctctttcatctagtgttaacatctctgttgaagctttttatgattagtgtctggatagcatatttttatgtttagcatctgcatagcatattttttctcatactttgtgtctttgtgtttaaattgtgtctctgtggatgccatattgttgggtcttgccttcctctcaggtctggcagtctctgtcttaagtagagtatttgtccacttacattgtaactaatcattgctaaggttggatttaggtctgccannnnnnnnnnnnnn

SEQ ID NO: 30290 - DNA, 2443 bp, Homo sapiens
  misc_feature 2423, 2424, 2425, 2426, 2427, 2428, 2429, 2430, 2431, 2432,2433, 2434, 2435, 2436, 2437, 2438, 2439, 2440, 2441, 2442,2443: n = A,T,C or G
ccccgcttgttaatgccgcttctggggtcccggcaccgcggcgctcgggtgtttttgggggcccgggtggagggcccgggtgccggggcccaaggtgcggcctcgctagcgggagagggagcgggatcaccggcccggagagagctctcagggccagagcggggcaggaggatgctttcccagccccaccatggagctgcgctgtgggggattgctgttcagttctcgctttgattcagggaatctagcccacgtggagaaggtggaatctttgtccagtgatggggaaggggtaggaggtggggcgtcagccctgaccagtggcattgcctcttcccctgactatgaattcaacgtgtggacccgaccagactgtgctgaaacggaatttgagaatgggaacaggtcatggttctacttcagcgtccggggaggaatgccaggaaaactcatcaagatcaacattatgaacatgaacaagcagagcaagctgtattcccagggcatggccccctttgtgcgcacactgcccacccggccacgctgggaacgcattcgagaccggcccacctttgagatgacagagacgcagtttgtgttatcctttgttcatcgtttcgtggagggccgtggggccaccaccttcttcgccttctgctaccccttctcctacagtgactgccaggaactgctaaaccagctagaccagcgctttccggagaaccaccctacccatagcagccccctggataccatctattaccatcgggagctcctttgctattctctggatggacttcgtgtagatctgctgacgatcacttcctgccatgggcttcgagaagatcgagagccccgtctagagcagctatttcctgataccagcacccctcgaccattccgtttcgcaggcaagaggatattcttcttaagcagtagagtacacccaggggagactccatctagctttgtcttcaatggctttctggacttcatcctccgacctgatgatccccgggcccaaaccctccgtcgcctcttcgtctttaagctgattcccatgttgaaccccgatggtgtggtccggggacactaccgcacagactcacgtggagtgaatctgaaccgtcagtacctgaagcctgatgccgtcctgcacccggccatctatggggccaaagctgtgcttctctaccaccatgtgcactctcgtctgaactcccagagttcctctgagcaccagcccagttcctgtctccctcctgatgctcctgtttctgacctggagaaagccaacaatctccaaaatgaagctcagtgtgggcactcagctgacaggcataacgctgaagcctggaaacaaacagagccagcagaacagaagctcaacagtgtgtggattatgccacaacagtctgcggggcttgaagagtcagcccctgataccatcccccccaaagagagtggcgttgcttactatgtggacctgcatggacatgcttccaaaaggggctgcttcatgtacggaaacagctttagtgatgagagcacccaggtggaaaacatgctatatccaaagctcatctccttgaattcagcccacttcgacttccagggctgcaatttctcagagaagaatatgtatgcccgagaccgtagagatggccagtctaaagagggaagcggccgtgttgcaatctacaaagcctcagggataatccacagctacacacttgaatgcaactacaacactggacgctcagtaaacagcatccctgctgcctgccatgacaatgggcgtgccagcccccctcccccgccggctttcccctccagatacactgtggaactatttgagcaggtgggacgagctatggccattgcagccctggacatggcggaatgtaatccgtggccccgaattgtactgtcagagcacagcagccttactaatctacgggcctggatgctgaaacatgtacgcaacagccgaggcctaagcagcactctgaatgtgggtgtcaacaagaagaggggccttcgaactccacccaaaagtcacaatgggttgcctgtctcctgctccgaaaacaccttgagtcgggcacgaagttttagcaccggcacaagtgccggtggtagcagcagcagccaacaaaattctccacagatgaagaattcccccagctttccttttcatggcagtcggcctgcagggctgccaggcctgggctctagtacccaaaaggtcacccaccgggtgctgggccccgtcagaggtaagccagtctgggagcccctgcaacatgtgttcggttgtctggggcattgctgggggaagtaagagcttgaagatatactgttggcccaggaccaaggggtgaatcaataaaattagtttgtagcagaaaaaaaaaaaaaannnnnnnnnnnnnnnnnnnnn

SEQ ID NO: 30291 - DNA, 865 bp, Homo sapiens
ctctgtgacaccagttcatgattctaaggttggcgtggccaggcgccggctcctcctctgaccacagctcctcctggatttagttgaacccgtcagtgtggtagctggggtgggagtcggctgtgagctgggtggtctcggtggcggatgccggctgtatgacgatcggcgtgtctgtggcctccctctcgtcagactgcagctgtgcctccagatcctcgggggacacgtagaactccgtctcctcgccttcaggcgccttgggcttacacttcccgcagcagcagttgaagcagcagcacagacagcagcagcagtagcagcacgtgaggaggccgcagaagacaaacagggccttggcccaccagctggacagcacgaagtaggtgttcacgttctcttccccaaactgctcggccacgtagagacccagcgagccgtacttgtcgtagatgttcctttttgtggcgtccgtgaggatggcgtgcgcgttgttgatctccttaaacttgtccgcggcctccgggttgtcggggttcttgtcggggtgatatttcaaggcaagcttccgataggactttttaatgtcatctgaggttgcgttcttgtccaacccaaggacgtggtacaatgactccccagaggtagacagtgagcgctgtctctggtctgccatgttaggctattctgcccgtccgcccgcccgcccgccctcccgccggctccgcggctccgctccccgattcgcggcgctgctgggcagcggccgacgcactcctcagcctggagaccccgggcggcggcggcggcggcggcagagggcgcgggtgcggcaccggcacccacgcgtccgcggacgcgtggg

SEQ ID NO: 30292 - DNA, 855 bp, Homo sapiens
  misc_feature 1, 845, 854, 855: n = A,T,C or G
ncgtccgcgctcgagctcacgagtgttgagaccatcagcctgcgcaacatggcgaaaccccgtctctacaaaaaatacaaaaattagctgggtgtggtggcgcacctgtagtgccagctacttgggaggctgagatgggaggatggcttgagcctgtgaggcggaggttgcagtgagcaactgtactccagcctgggcaacagagcgagaccttgcttaaaatcagtgttgaaaaattttagaagctaaataggtaaaaaagcaggaaggtgcagacctccactagtgctgctgctttatccatctggtcctgtgaaggctcaccctgaagctatgggatggctgcttttgtttcatttttctcacttgtgatttctgagtccttttaacaatgatgaggcatgattggggatgtggaagatgagtaggatggtggtgctacagctggaggccacaggagaggtgcaagctgggctcagtttgtgtggctgccccacccactgtgttacgccacagaggcagccctgggggttaggattggcagagctctcgtggagacctgccatcgtgctgatccagagccaccttgctattctctctgtagaggagaaggcagagcccccccaggctatgaatgccctgatgcggttgaaccagctgaagccagggctgcagtacaagctggtgtcccagactgggcccgtccatgcccccatctttaccatgtctgtggaggttgatggcaattcattcgaggcctctgggccctccaaaaagacggccaagctgcacgtggccgttaaggtgttacaggacatgggcttgccgacgggtgctgaaggcanggactcgann

SEQ ID NO: 30293 - DNA, 2564 bp, Homo sapiens
  misc_feature 2560, 2561, 2562, 2563, 2564: n = A,T,C or G
ttggagctccaccgcggtggccgagcggccgccccggtgagaggagggggaagatggctcaccgggacccgttctgctaggaagaaggggagcaggtggtgctgctactcgggaggaagcagagcagcctccgtcgctgtcgctgagagcctcacgagtcgaggtcctgcaggtggagctccggcagccgccctggttgaaggtttagaacagatgtggaaaaatgtttacttcagagaaaggggttgtggaggaatggttgtcagagtttaagacattaccagaaacatctttaccaaattatgccacaaatttgaaagacaagagttctttagtttcatctctctataaagttatccaggagccacaaagtgagttgctagaacctgtctgtcaccagctctttgaattctatcgcagtggagaggagcagttgcttcaatttacgctgcaatttctcccagaactaatttggtgctaccttgcagtctcagccagcagaaatgtgcatagcagtggatgcattgaagctcttcttctaggggtttacaatttggaaatagttgacaaacagggacataccaaagtattgagttttacgattccatctttatccaaaccatctgtataccatgaaccttccagcattgggtccatggctctgactgagagtgcactatcccagcatggtttgtcaaaagtggtatacagtggacctcatcctcaaagggagatgctgacagcacagaatcggcctcgaagtgttgacattccttttgttgtgttacaatgctgccttaacttacatgcccagtgtttctcttcagtcactgtgtcaaatttgttcgagaatctgtgtttgtggatatcctcgacaacatgtaagaaaatataaaggtataagtagcaggataccagtttcttcaggattcatggtgcaaatgttaacagggatttattttgccttttataatggagaatgggatctagctcaaaaagcactggatgatattatatacagagcccagctagaattatatccagagccattgctggttgctaatgcaataaaggcttcattgcctcatggtcccatgaaatctaataaggaaggtacaaggtgtattcaagttgaaatcacaccaacttcctctcgaatatcaagaaatgcagtaaccagcatgtcaataaggggtcataggtggaaaagacatggaaatacagaattaacaggtcaagaagaactgatggagatatctgaagttgacgagggattttattccagggctgcgtctagtaccagccagtcgggtttatcaaacagtagtcacaattgtagtaacaagccaagtataggaaagaaccacagacggtcaggaggaagcaaaactggaggaaaagaaaaagaaactacaggggaatcttgcaaagatcactttgctcgaaaacaaactcagagagcccaaagtgagaatcttgagcttctctctttgaagagacttactttaacaaccagccaatccctacctaagcctagtagccatggtttggctaagaccgcagcgactgtatttagtaaatcctttgaacaagtcagtggtgtcacagtcccacataacccgtcatctgctgttggttgtggggctgggacagatgccaataggttttccgcttgtagtctccaagaagaaaagcttatttacgtttcagaaagaactgaacttccaatgaagcatcaatcaggtcagcagagacctcctagtattagcattactctgtccacagattaattagtaacatatttttctcccataacctagtgaacctggaaatacaactttgcttctttatgaaagtaccctgggtctttcatccgtattcctgacaggagccctgatgtcttaaattctgaaggctcccctgactttatgaagggaagattgtctaggttgcagtaagttgaaatatggttttgttatttcttgattaagattttttccccttggtttgagtcttttttttccctcctcttatttgttattgttgccctaagattgtcagtgacaataaattttgacaggttgtctaatcaagttggttatgtctcatgtgaggttgtaaggtggtttttcttgttttggtttggtttggttttttaatagctcctattttggtggctgtgtgtttggccttcagagtcaaagggagtctgcatgtatgggaactgttttatagagaatggggcagaggcacaactccaggaattctctagctcctggtcaggaagccaatctgaaaacaggcatgtggaaacacaaaaatgatgtgtatgaaaagcacctgatgaaaatatttgtaagcagatcatctttatgattagaacaatttgctcaaagccctggaaaatgcctggtaacccagtgcctagaatattatatgattccaggggatggctagaggcatttctgttgttatctctgaaacatttttatatcaaaaatcagattgctggtaggtgtgttgttttgaagtgttttatctggatttagcatgtgaagannnnn

SEQ ID NO: 30294 - DNA, 1896 bp, Homo sapiens
  misc_feature 1896: n = A,T,C or G
ggcgtggaggtgtcggacgatcaggacaccggggacactctgggcagcgtcctccggggcttcttcaccatccggagttccaagagtctagagtggtttttgcagcatgggttgagtgtacaaagcctactgtgcgtgagatcctctccttccgtttctgaaatctcttactcaggtaaggcctcgccaagcctctatgcaccccacaaagtttctgcctccatgccgtccacagcgcctcttcccagacagccaggcccatctgctgcccagggaagcgcaggcgcctgctagggacgctatggacaccgtgagtccaaggcgctgctcctgccttgaagccacgcgctccacgccgcggccctcccattttctgcgtcctcagcgggctgagctgcagagagccttcccggacctattcccgtcctatgcattcacattggcatcctggttggggggaagaaaaacaagcgtgcccttagcagcagccccgtttccagaatgtgctgcctgttccccaaagcctgcttgtcccgcggaggacggctgcctttgaccctgcttatttgtctcactggttatctaatgaggaacaaacactaacctaaggtacacatcccatctgggcggtggcttcactcctgagtctgcaaaatcccaggaaacttgggtcttgctgcccatccttcctcagcacagggaacccggaagcccgttgcactgacagaggctcacaccctctgggttttttgttttttttttaaacttcatttctcttccaacccattgtgttcctctgccctcattctttacctttgttgtaagaactttagctccagggaactgaggcagaggccctgtttgtggtctgtgttgacagccacccaccctctcccacctcatgctcctgcacctgcaccaccaaggttgatgccggattcgaagccaggaaggcccagtccctcctctgctctcctcaaagacgcaaaacattttccaacaagagctgtcacagtggcagcaaagcaggggccacccgtctccacagtccttcagagtttcagctgcctcctggtgtccaccaaggtgagcccagggttttgtgaacaactttgtgtctaattcggtggacctgggcggactcacgacagacagtgttaactattgagggggcggcactcgtgtttgtgatccacttccacaccggctgaaactatagagaattcacgcgcgcgaatggtacgctgcagaatccatacgtacggcgggggacttacttcttgttgtttatctgtgctcgtctattttgtatttggcgcgccgccaacgaccaggtcaatgcgctccgacaactacacaatcatcatgagacagaccacgacgtaagacaacagcgacacgcacacaccacagaagaaaacgacagaagagagggaggaagcaagcgaaggaacgaaaagagaaacgaggagaaagaagagagaaaagaaaagaggcagggagaagagaagaagagaagagacgaacatagaagaagaacccaaacaacacaacccactaaccccgaccaaaaaaaccagagagagacgcaacagacagaaccgcgcacacaacaacacaaagagaagaagaaggcccagaggcgcaggcacagaggaagaaaagaggaggacaagagaccaaaaaagaaacagaaggagaacgaggaagacagcaaaaaaagaagaagacgaacgaaaaagaaaaagcagacaagaaacagccaaacagaaagaaaacaacaaacacagcaggacaggaccaaacagcaagagaacaagaaacaagaagcaggagaggcacaaaagaagagaccaacagacacgaacgaggaacacgccagagggcgcgaaagan

SEQ ID NO: 30295 - DNA, 1822 bp, Homo sapiens
agtcgacccacgcgtccggccttataattgactaacaaagcaacctgccaagttggtgaaggttaattattgcctcatgaaatatacattcatcgcataaaagaattaaataggaagatggccaaaaatgtaaaaaagtcgtataaatttgtctaagaagaaaaagacccaatttaagtagtctgtgacttgactcccaaattctgacctgatggatgaaagtgaagatgtttcgtatggcaaattcagtaatgctacctcagtatatagttctgtatacgtatttggaccaaagttattagataaaccaaaaatatttcatgaagcatcttctgcttcagagtccatatccagccacccagctatgaatgtatttagaaagatatttggtggaggtggaatttctaccagaggtcaagaggatttgtagggatagcctcaagaatgccagatgagtgtgtcagaaagcctgctcctacctctcgccagctgcgtgactttaggcaagtcacttaagtaccttatttcagtttcctcacctgtaaattgaacaggggttgaatggaataaaaagccctttgcaactctaaaagtcaattaacacacttactaaggtgttttaagtgaccaggaaggaaatcagaactaacctggattgttagcgaagaaaacagaagccaccaacaagcctatctgtcctttgcaattttgctccaagagcctattagcaatttgaattctgagcctctaagaaaacttatgctcaggtggcccctccaagtgttggtgccagagcactcttgccttgtatcctcacctacgccttccatgaactcatagcagtgctgtggcactgcaggggtgttttatgcattcacgttaggagcatgagcagaactgcatatgccagcaccacatgggcagcagagactccccactgccagatggatgataatggagctgcactgggaacaaccaggactgtcccagtcaacatgatacagatgaacatcctgccttaagtcactagctctctccaaagccagataaagtgggtttcttcacttacatctctctaatcttggctgccttattcaacctacagactctatgtcagtgctggattttctccccttgccctttaggtaagcagagtaggcaggaggagatttgaaagcgtgtcatacatattgccttgaaagaaaggacattcaggtgtcccttcggggttctgtaacaattaggctatgtgtgctgagagagggagcggagtcatttgctgatgtgctgctacctgtaactcaaatgcctcataggaataccagcggacaaacacatagaggaaaagttgaatctttcctatattggacaatcttccttcagtcttgtttctgcatcccaaagtgctgggattacaggcatgagccaccatgcccagccaaagatcatttttttatatagacttcagccctttgtaaatattgtaactggggagtatagagtagaaaaaaagtatagttaaaacatttgttctacaaattaacctttaaaaatataattactgctaaaaatagagtgctgttacacttaaggaaaattagtgccattttggaaatgagatcttgtgccataaatacagctgaactgaatataaatgttcacaaattaatgctgtcaaaggaatgagtaaagcagaaaaacttttaaccagcaacatttcaagtacgtagtgtggtccaaacatgatcatccagaattttcatatttttttctttgtacagaggtacatattctgggtgtctttataaaggaaacatttaaa

SEQ ID NO: 30296 - DNA, 795 bp, Homo sapiens
  misc_feature 1, 2, 789, 790, 791, 792, 793, 794, 795: n = A,T,C or G
nnagctgtttcctgtgtgtaaaacaacagccccaccgcgggggcggccgtccggcctggtacatgtggccttttggattcccaagaatatgtggaagttttaaaagcctttattctccaaaatatcttactttccagcttttcctcccaggctttttggtgtgtctattgtttgccttacctattattctttgcccccgatggcagaggctaataaacttgcctttacaaatttttgacaaatgcctgtagtcacctttcttcctcaggagatttccaagttaggggaactaaaataagcctccataattctttgaaaagaaggtccacggccaggcacagtggctcatgaccggccagctactgtcttttctttgacccttcctttccagtttttgaagataaagcaggaaataatcttctctgaagatacttgataaaaattcccgaaacaacaaaacacatgcttccacttcactgataaaaaatttaccgcagtttggcacctaagagtatgacaacagcaacaaaaagtaatttcaaagagttaagatttcttcagcaaaatagatgattcacatcttcaagtcctttttgaaatcagttaatattattctttccccatttccatctgaatgactgcagcaatagttttttgtttttttttttttttcgagatggatcctcactctttcgcccagctggagtgcactgcttcagtcccggctcaccagaatttccgcctcctgggttaaagcaattttcctgccttagcctttcgagcagctgnnnnnnn

SEQ ID NO: 30297 - DNA, 1218 bp, Homo sapiens
  misc_feature 1218: n = A,T,C or G
cccacgcgtccgcgccttccacaatgcagtgcggctgagcgcctcggagcccgcggggacgctgcggggggacccgtgctgaggcggcggcggcgacgtgggctgcggcgggcccgcggcgtcgggcggtgcggatgtcgggctgggcggacgagcgcggcggcgagggcgacgggcgcatctacgtggggaaccttccgaccgacgtgcgcgagaaggacttggaggacctgttctacaagtacggccgcatccgcgagatcgagctcaagaaccggcacggcctcgtgcccttcgccttcgtgcgcttcgaggacccccgagatgcagaggatgctatttatggaagaaatggttatgattatggccagtgtcggcttcgtgtggagttccccaggacttatggaggtcggggtgggtggccccgtggtgggaggaatgggcctcctacaagaagatctgatttccgagttcttgtttcaggacttcctccgtcaggcagctggcaggacctgaaggatcacatgcgagaagctggggatgtctgttatgctgatgtgcagaaggatggagtggggatggtcgagtatctcagaaaagaagacatggaatatgccctgcgtaaactggatgacaccaaattccgctctcatgagggtgaaacttcctacatccgagtttatcctgagagaagcaccagctatggctactcacggtctcggtctgggtcaaggggccgtgactctccataccaaagcaggggttccccacactacttctctcctttcaggccctactgagacaggtgatgggaattttttctttattttttaggttaactgagctgctttgtgctcagaatctacattccagattgaggatttagtgtcttaggaaatttttttaattttttttttttaaagaagaaaaaaaactacataatttctaccagggccatattagcagtgaaacattttaaactgcagaaattgtggttttggttcagaaacaagttgtatatttttcacccctgattatgggaaaaaaatcagttctgtctttgtgggttgctctactatggagatcaacagttactgtgactgagtcggcccattctgtttagaaatatattttaaatgtttagtaaaaaaaaaaaaaaaaaaggctaaattccccgggggccacttcctcccgtttggtacgggcctagggggtaan

SEQ ID NO: 30298 - DNA, 536 bp, Homo sapiens
  misc_feature 529, 530, 531, 532, 533, 534, 535, 536: n = A,T,C or G
cttcttcctcctgcccgtagtagccatggcggccatgagtttgttgcggcgggtttcggttactgcggtggcagctctgtctggccggccccttggcactcgcctcggatttgggggcttcctcactcgtggctttccgaaggctgctgctcctgttcgacacagtggagaccatgggaaaagactatttgtcatcagaccttctagattctatgacaggcgttttttgaagttattggtaagtttaaattttttgttgaattaaagtctttgcatgtaacagggaaaaaatttttgcctctttagaaaacatctttcattttatgaaatattttattttgtaaatttatatttctttctgtagaagatactgagactgtaaagtctgatttgttattgaatttctctttaaattagtgaagctttccttcttcacaaaaggatttacactaaatggaggtaaaacttgaaccattcctttcttctgaagattatggcgtttcgaaatagaatctgtgttcctataacnnnnnnnn

SEQ ID NO: 30299 - DNA, 320 bp, Homo sapiens
  misc_feature 223, 224: n = A,T,C or G
ccttgatgaactcccgggagcagggaaagcagaacttgtgtccgggcaccgaggggcactggacgaagtgggtgtcttctagccgctccctgcacagggtactttttggtgggagtggggggagggtgagtgagagagaggagggaaaaaagaggagagaaaatacaaataacttctattaggcccaaaatattaaatgagttcgcttaacacaaagttcgannccctgttcttgagagaggctagtggccaggagcctgcgttcccttctctgtctgtgcctgacctctctgacccccttctcacctagcaagggatgt

SEQ ID NO: 30300 - DNA, 1718 bp, Homo sapiens
  misc_feature 1, 2, 3, 1717, 1718: n = A,T,C or G
nnnagaaggcatagcactgcccccaccaagaacaatttgaaaccccccccccccccatcatatttaaaatctgggacaaagaaccgtcgggacggaactccttccattgcaaaagctcggcgcggcctcgggagctgcccggcggccccggaccgaggcagccctcccctttaaaagaagcggaggacaggattgggatccttgaaacccgaaacccagaaacagcatcggagcggaaaccagaggggaaaccttgaactcctccagacaattgcttccggggagttgcgagggagcgagggggaataaaggacccgcgaggaagggcccgcggatggcgcgtccctgagggtcgtggcgagttcgcggagcgtgggaaggagcggaccctgctctccccgggctgcgggccatggccacggcggagcggagagccctcggcatcggcttccagtggctctctttggccactctggtgctcatctgcgccgggcaagggggacgcagggaggatgggggtccagcctgctacggcggatttgacctgtacttcattttggacaaatcaggaagtgtgctgcaccactggaatgaaatctattactttgtggaacagttggctcacaaattcatcagcccacagttgagaatgtcctttattgttttctccacccgaggaacaaccttaatgaaactgacagaagacagagaacaaatccgtcaaggcctagaagaactccagaaagttctgccaggaggagacacttacatgcatgaaggatttgaaagggccagtgagcagatttattatgaaaacagacaagggtacaggacagctagcgtcatcattgctttgactgatggagaactccatgaagatctctttttctattcagagagggaggctaataggtctcgagatcttggtgcaattgtttactgtgttggtgtgaaagatttcaatgagacacagctggcccggattgcggacagtaaggatcatgtgtttcccgtgaatgacggctttcaggctctgcaaggcatcatccactcaattttgaagaagtcctgcatcgaaattctagcagctgaaccatccaccatatgtgcaggagagtcatttcaagttgtcgtgagaggaaacggcttccgacatgcccgcaacgtggacagggtcctctgcagcttcaagatcaatgactcggtcacactcagtaagtccttgcagagtccatgggtttcttcgacaagtggcttcaaggaagggaattcccacccttgtcttccagcaaggccacacacatgaaaccagcagaaaagagtcttatttgctggaaagacccccagcaagggcatagtgagcccttacagtggttccagtcagaaaaggcaccacttgggtgggcacagccccatgggtgtccaacttggtaagcagagcaaggctggacttgagtccccgtcctccacaaaacacagagccacaagccccagccctgcagcagccctccggaagcagcggggcactggtttccttgtcccctgccatctaccgagtggctcactctcaggtgggagtgctggtgatggttaattaggactgcagaaacatgagcctccttaacaaagtattgggactcttaagggtaagtgtgaaaaaggaatggtctaaatgcattaatcttgaataaaccgaaaaccaaaccattaggcttgnn

SEQ ID NO: 30301 - DNA, 350 bp, Homo sapiens
  misc_feature 122, 124, 125, 127, 128, 130, 131, 132, 133, 134, 135, 136,137, 138, 139, 140, 141, 142, 143, 144, 145, 146, 147, 148,149, 150, 151, 152, 153, 154, 155, 156, 157, 158, 159, 160,161, 349, 350: n = A,T,C or G
accaggcagctgggccccgcaggacaggccgcagcgggtggccggttctgttctgatagatttacagtatcaaactggaaaagaaagattgttacgaaaaatctgtagataaactgtgaatncnnannannnnnnnnnnnnnnnnnnnnnnnnnnnnnnnntttcttgtcaaacaaaaccaatggctctgggtttggagaacacagtggctggttttaaaaattctttccacacctgtcaaaccaaaaatctatcagcccacgtggtgtggttggtgaacagtgcatgccaggaggaagcagtccctcctcaccagctctccagccaggacgatcacacagagatgaann

SEQ ID NO: 30302 - DNA, 774 bp, Homo sapiens
  misc_feature 1, 698, 742, 773, 774: n = A,T,C or G
ngcacaatattctagtttatttcatcttgctcccaatgatacagtaggtcaagtccagtcaggagacagaaaaccagacagtaatttgaaaattttaataaagagaattatcaactaggagcaagtgaccgactatagaaggggtagaaagtgttacatattacaggaatagcatatatagggagcagccactacctctagggctgaggcaaagtacccaaggaagaaataaatttggaatagtcccctcccctccagggctgagatccaaaacatgttggaggagttgtggacatgaccaactggacggtagaggtctaatgagctgctgcaggctaaagctggcaatgggtgcttgtggaactcactggtcaattgtctcagtgacacaggtgtggaagaagtccgcagtggagccactgatacttgacacggtgagtgccactagaagtccccatacatgccactggcagccacacagaatcacgaatagacacacactggaactagaagaagaaagcccttcctcttgtagtatcctctgaaggccctctactgacaaaacgttagcctgtccactaacgaggaagaaatgcttacagggcccagcttcattatggtagagcaagcaataaatgatggatttggaactgaaaggcaataaataactggcataatatgcattaggatttttttcnccaatttttaccatcataaacaatgctgtgattgttaaaatttntggccctgggcttgtggtagtcggacggcgnn

SEQ ID NO: 30303 - DNA, 1887 bp, Homo sapiens
  misc_feature 1, 899, 900, 901, 902, 903, 904, 905, 906, 907, 908, 909,910, 911, 912, 913, 914, 915, 916, 917, 918, 919, 920, 921,922, 923, 924, 1887: n = A,T,C or G
nctggggagtcacctcagctgtcagttaccaccgtgttagaaagcagcctcaggaccggccacctccatcactggcgtcaccatgggggctgtgctgggtgtcttctccctcgccagctgggttccatgcctctgcagcggtgcctcatgtttgctgtgtagttgctgtcctttttttaagaattccacggtgactcgcctcatttatgctttcattctcctatatcatgcagagaaaagagatggaaacttacttgaagaagattcctggattttgtgaagggggatttaaaatccatgaggctgatataaatgcagataaagattgtgatgtgctggttggttataaagctgtgtatcggatcagctttgccatggccatctttttctttgtcttttctctgctcatgttcaaagtaaaaacaagtaaagatctccgagcggcagtacacaatgggttttggttcttcaaaattgctgcccttattggaatcatggttggctctttctacatccctgggggctatttcagctcagtctggtttgtggttcgccattgagggggttaattttaaactatataaactctatagatgattgagttaaagctacattttaggccgggtgcagtggctcacacctgtaagctcagcactttgggaggccaagacgggcggatcacctgaggtcaggagtttgagaccatcctggccaacatggtgaagccccgtctctgccgaaaatacaaaaaattagccaggcgtggcggtgcgcgcctgtgagtcccagctactcggaaggctgaggcaggagaattgcttgaacccgggaggcagaggttgcagtgagccgagatcgcaccactgcactccagcttggcaatagagtgagactccatnnnnnnnnnnnnnnnnnnnnnnnnnntatcggggcccccccccgggggggaaccccactccccccttataggggatttttaccccccccctatggggcttttttacaaaaaacttttaagattttaaggccctttcttccaacagcttttatagttagcagccattctttattttctggatagccaggttttatcacgcttctagtcaggatgctcctattccttctaaaaattacggtctgactagtgagcaaagtcttgaatttattcaaaagtcctaaataccttctctaggtaagacacttggtagatgagagacggaaggcattgtcaagaaccattttcatgagaggtggtgtgcaaaaaggtagaataaaagagttctttcaacaaagatttactgtctattctgtactagaccctgtaggttttggggtacagtgttaaacatgatagaggctctgccgtcttggactttaatagcttagagaagagagcaaatgagctgacaggtggttataatgtgaattagtgctgtggtttaggaatcggagagaactcaaaggagaggtatttggtgtaatggtaggctttctggagaaaatgatatttaagccaagaactcttagaagttagctaagagagagatgggaaaatgagacgacattgctggagtagataaaattgcatgttaaaggcaggaagatggggaaaaacaagttcagtaaagctggaatggggaaatgtagtccagggactgaatttaaagggcttatcaaacctcagcaaaagctgggaccctatgtcgaagggggcggaaaacatattcaagacggccggaccaacttcaaaactcacaaaccacggggcgagaacaacaagacagggggctaacagaagcgtaaacccagggggaagcccacaaagaggggacacaatagagaggaacgaacgaaggtgacaacaagccgagagccgcacaacagaan

SEQ ID NO: 30304 - DNA, 2334 bp, Homo sapiens; identical to SEQ ID NO: 30196
  misc_feature 1, 2, 3: n = A,T,C or G

SEQ ID NO: 30305 - DNA, 2639 bp, Homo sapiens
cgcgtccggccccaaagccggctgcgagagtcaccgaagatttccggagagccaaggagtcgggaagagccacttactgagcgttgccgaacgtgtacggagatagccgaagaggcggaaggcggggccacaagagcccttcctgcagggaacctcaggcttcagagagccgaaaagttgggaggcgtaaccacttacaggccggaagtgtccggggtggacgcattcgggtagccgaagaagtcccaggattgccgaagaagtcccaggatttccgaagcgagccgaagcatcgcgacagttttcagagacagctgatcggttggagctcttgcgccgagcagtcatggcggcggccagagctactacgccggccgatggcgaggagcccgccccggaggctgaggctctggccgcagcccgggagcggagcagccgcttcttgagcggcctggagctggtgaagcagggtgccgaggcgcgcgtgttccgtggccgcttccagggccgcgcggcggtgatcaagcaccgcttccccaagggctaccggcacccggcgctggaggcgcggcttggcagacggcggacggtgcaggaggcccgggcgctcctccgctgtcgccgcgctggaatatctgccccagttgtcttttttgtggactatgcttccaactgcttatatatggaagaaattgaaggctcagtgactgttcgagattatattcagtccactatggagactgaaaaaactccccagggtctctccaacttagccaagacaattgggcaggttttggctcgaatgcacgatgaagacctcattcatggtgatctcaccacctccaacatgctcctgaaaccccccctggaacagctgaacattgtgctcatagactttgggctgagtttcatttcagcacttccagaggataagggagtagacctctatgtcctggagaaggccttcctcagtacccatcccaacactgaaactgtgtttgaagcctttctgaagagctactccacctcctccaaaaaggccaggccagtgctaaaaaaattagatgaagtgcgcctgagaggaagaaagaggtccatggttgggtagaagaatgtgtatgacaaccacacacagtgaagctcttttttcaaagtaaatttgaagaaatgctacaagtatgagatgagatctaagtaaaggtgttaagatatttttaagtggtatgtgatcgtgtcattatcatctgcacttcactcaagagcttactatgtgtctaagtcatgttctaggcagaattgggtatttaaagtaaattgaggacaggcttctcccagattgtgacatgtatatctcagatacatgggtgtggcattgaaccacataatgagaacattattctctttttagtccttgtgagacaaggatgaagtctcagttgctgatactcgctgagcttactggccctctaacccagtgtttttttttgttgttgttgtgtacatgttatatttattttgaaaccagtttaatgggatacaaccagcattttaaaaaatgaaatagaatacagcatggaaaatatcagtgtattgttttatgaaactttcacgtgtatatatagaccaaggatatgtgctgagttttgatgtcaaatatatttctctttcagggtcatgatcaaaaaatgaaaagtctgcttaactccaatttctcttttaaaaaagcagacttacagctttcaggcaactgaaattcatgttaacatgtttttatttttattgctttgtatttttgtggttaccttctaagacaagtgattgatctaaagttccttttaagtttataccgctaaacaaactgagttgatttctatcacaggcagtaagtaggtagagcaaaaatggtgaagtgacttgtgaagactgaagtttgatgaagtctggtttaaggcacaggtaaactgagtgtggatgcaaaagtaccaggagctagcttttaaccttgcccagcctcagtttcttttcttagaagaagctatgtttgggtgggaagggaagagagggataagaaaatacctttcttccttgtaaactccaatcaacaaacatattttgagtgccttttgtgttccttggcaccctgttgggtattgggtacccttggcaccctgttgggtatttgggtacaatggtgagccagacagacacagcgcctgtccttttgtaagaatatttatttttataaaaaagtataaagtatacagtgggatgttttgatatacattatgaaatgattgctacagctgagctaattaacacccatcacctcacatagttactgtcttgtttcttaatatggacatttgcagctatgaatttccctctgcacactgttgtcatcacacactctcagttttgatattttgtgtttttgttttcattcatctcaaagtattttctaatttcccttgtgatttcttctttgaccccttgattgtttagaaatctgttaatttccacacatttgtaaatgttccaatttttcttttgttattgccagcttcattccattgtgttcagagatgatacagtcagtgcctgttcttatgaagcaaacattctataatagtaggaccagt

SEQ ID NO: 30306 - DNA, 4397 bp, Homo sapiens
gcgtccgctcgctcgcgcggcagcggtggccgaggcctcttggttctgcggcacgtgacggtcgggccgcctccgcctctctctttactgcggcgcggggcaaggtgtgcgggcgggaaggggcacgggcacccccgcggtccccgggaggctagagatcatggaagggaagtggttgctgtgtatgttactggtgcttggaactgctattgttgaggctcatgatggacatgatgatgatgtgattgatattgaggatgaccttgacgatgtcattgaagaggtagaagactcaaaaccagataccactgctcctccttcatctcccaaggttacttacaaagctccagttccaacaggggaagtatattttgctgattcttttgacagaggaactctgtcagggtggattttatccaaagccaagaaagacgataccgatgatgaaattgccaaatatgatggaaagtgggaggtagaggaaatgaaggagtcaaagcttccaggtgataaaggacttgtgttgatgtctcgggccaagcatcatgccatctctgctaaactgaacaagcccttcctgtttgacaccaagcctctcattgttcagtatgaggttaatttccaaaatggaatagaatgtggtggtgcctatgtgaaactgctttctaaaacaccagaactcaacctggatcagttccatgacaagaccccttatacgattatgtttggtccagataaatgtggagaggactataaactgcacttcatcttccgacacaaaaaccccaaaacgggtatctatgaagaaaaacatgctaagaggccagatgcagatctgaagacctattttactgataagaaaacacatctttacacactaatcttgaatccagataatagttttgaaatactggttgaccaatctgtggtgaatagtggaaatctgctcaatgacatgactcctcctgtaaatccttcacgtgaaattgaggacccagaagaccggaagcccgaggattgggatgaaagaccaaaaatcccagatccagaagctgtcaagccagatgactgggatgaagatgcccctgctaagattccagatgaagaggccacaaaacccgaaggctggttagatgatgagcctgagtacgtacctgatccagacgcagagaaacctgaggattgggatgaagacatggatggagaatgggaggctcctcagattgccaaccctagatgtgagtcagctcctggatgtggtgtctggcagcgacctgtgattgacaaccccaattataaaggcaaatggaagcctcctatgattgacaatcccagttaccagggaatctggaaacccaggaaaataccaaatccagatttctttgaagatctggaacctttcagaatgactccttttagtgctattggtttggagctgtggtccatgacctctgacattttttttgacaactttatcatttgtgctgatcgaagaatagttgatgattgggccaatgatggatggggcctgaagaaagctgctgatggggctgctgagccaggcgttgtggggcagatgatcgaggcagctgaagagcgcccgtggctgtgggtagtctatattctaactgtagcccttcctgtgttcctggttatcctcttctgctgttctggaaagaaacagaccagtggtatggagtataagaaaactgatgcacctcaaccggatgtgaaggaagaggaagaagagaaggaagaggaaaaggacaagggagatgaggaggaggaaggagaagagaaacttgaagagaaacagaaaagtgatgctgaagaagatggtggcactgtcagtcaagaggaggaagacagaaaacctaaagcagaggaggatgaaattttgaacagatcaccaagaaacagaaagccacgaagagagtgaaacaatcttaagagcttgatctgtgatttcttctccctcctcccctgcaagagtggtcctaggagaggacctggcacaccttaggttgacattcagaaaacttcaagacatcaccatcagcaggctccagttgaacactagtctgtgtaactttaaacatctagcagtaaatacttgcagttgtgatataaaggaccctgtttctgtagaaaagaaaacatttaacataatggttgtgaaatgtaacatgaagcaaactaactttttttttttttaacatctttgtttttaaaatagaatgatagaactttgccagtctttaagatcttggcttaatttaatgtattaatctgtttgtgcaaacataataccaccatttaaaaatgttagggagatgagttgcagtttttataatagattttttttaaagtttggtattgtaaaacattcacacctctgtccctcaaaattgataattacgtttaaagtgcagtcatttgtggttagaatcttgttttgtttgcttccattattgagttcctcctaaggaaattgaggagagggactgaatagaagcccaaattcatataaaagttgcgtttaagttgtattaaaaatagatatataagaaaaaattctttcacttgatgtttgttagaccagaaagtgtgtgtgttctgtagctcagttcccagacagctttttaggtagtggaggaggtggcttcatgtggcacttgggcatttatattccacttgggagggtcaggctgtggccttctggagcaggtggcttgttaaggaacgctagcagggcatggcacgtgagctccggaatagatgtcttcatcacttcttccactgtgtgttgacactgttttccttacctatttcctcagatccccagctttctcctctgctatgcattttcttcacagtgcagcttgcagtccgttgctgaaaatgattataagccctgcataatgttaagctttattgtgattacgtgtatgtttcttctttcttttaagcagacccatacctttccagggtcaaagtacagaatagaatacattgatacaaagtacagaaaaatactttgatttttatccatttcttttactctgtgtaaagacttgagaagtctaattcacaggcaaaccaatacagaattgactgcagttgaacagactagaagtatttgtgggaggagtgacatgaagcatgagttatctgattttttttgtagctgctatatattttaagccttcatttgcaattcatgtaacagttgtgtcataaattacacaataaagcagtcctgttcaaatttttttttaacgtggcttgtagaatttttaaaaaagtgatcttaggtttgctttttcatgcgggatgcagatgggtgctatcagagcctctcccacaccactatagtgtaataatgttattattactctacactgaaacgtattcagagttagatattattttagcttcagttgttctttagaggctttcaaatgtaccgatgatactgtttcttgcactgaatatataaacactccacagtgtttatattgggaagatattgggaaggaaatatatttgtaaaagatgaaggctgtatctatttttttttctttttaaactggttcacttaaattcttttgaggatgggatgtatttttcttgctgttcagtgctttttccttttcatctgttgttctgtggtcacagtgaccttagctacatagcagactttcccaaatgtattgattacaaataaacagttgttacttagcaagacctgaaaatatgtctgcaggtttctccttgaagcaaatgtgtgggatcattgcatttccagaaatctgcctccttcaccctccgttgacagtatatgtcatgcctcactttcttctagctgagctttaaatcattagagcttaaattgtcagatcgttcattgcctttccagggttatttagtaaagtttgttgaaaacaaaaacgccttttcttggttcttttttcagttattttgaaggtccagcatcctgattaaatgtctgacacattaatgaatgaccagcagcagctttcagctcttaaaaagacacttatattttgattttacatgctggttacctgttccattgttgtcaaatgcccactctccatcagatgtgttcctccattttcttatccacaaagtactcctcacttttcaatttgtcatgttactaaatggtgttacattaaagccctgtgtcccaaaaaaaaaaaaaaaaaaaaaaaaaaaaaaaaaaaaaaaaaaaaaaaaaaaaaaaaaaaaaaaaaaaaaaaaaaaaaaaaaaaaaaaaaaaagggggggcccttaaatttttttaaaaaaaaacccccccacccctccccttaaccctaaaaaaaaaaagaaagccatttgtggtggtaacc

SEQ ID NO: 30307 - DNA, 1041 bp, Homo sapiens; identical to SEQ ID NO: 30167
  misc_feature 1, 2: n = A,T,C or G

SEQ ID NO: 30308 - DNA, 438 bp, Homo sapiens
actcgcggcagggccggcgcgccggcggagagccatctgttgaatcgggccggaaggtggagatccggagggcctcgggcaaagaagccctgcagaacatcaacgaccagagcgatcgtcttctgatcaaaggaggtaaaattgttaatgatgaccagtcgttctatgcagacatatacatggaagatgggttgatcaagcaaataggagaaaatctgattgtgccaggaggagtgaagaccatcgaggcccactcccggatggtgatccccggaggaattgacgtccacactcgtttccagatgcctgatcagggaatgacgtctgctgatgatttcttccaaggaaccaaggcggccctggctgggggaaccactatgatcattgaccacgttgttcctgagcctgggacaagcctgctcgctgcctttgaccagt

SEQ ID NO: 30309 - DNA, 1029 bp, Homo sapiens
cgcgtccgggaagggagggtcatattattttcggctttatttatgtaacatttgctagcttgtaaaaggcgaatgtgaaatattgcatctgcattttccaaggctgattcgtgtagctacccttgccacagttgtgacggatgtatggatgttcttgaacatttcagaaggagtggtagaaaaaaacacacattcagccaaccacttatatgaattgaatgtatcagaagtgtactgaagggactggagatggttttcctcagatgagggggccccaaaattgatagtgcacatctgcacgctttctgcgaggcctcagaacttttcccagggcccctccctcaaattgtctccatgggaaacttgacccagtggcaagttgcactttggtgatcttggtggtctacacacccgttctgtggagagtcgatttacataagctgtgtatactcacacacacacactcacacacacacacacacacacacacacccctaccccacactgactgtctaccgacaaagaccctatttcctggcaaacggcctcctgaaccctgactttttgtgtacatacttgtaaacacggatttttctgggttttggtttgctttttccttttgtccccctgcccctgttctagcttgttcttcttggtttgctttcaacctgcttgatggatgtctgcagagtgctctctaagagtccacctcagtgcctcgtgtgctcagtggtcatgggaaggagcgaaggaaccatccttggttctcccagcttggttgtgtagcaatccctcagcattgtttttctcagcttcttggcaaaaattaaaacaacaacaacaacaacaacaacaacaaacagaaggataaactggcttgcctgtggaccctccccggctctggggccagtcgagagccattgagggacccagcactcagagacacaacacacatgtgtagctgcttctggctgagtgtgtttcctgtcaccaatggcctgtttggctggacgatgcctcggcttgacc

SEQ ID NO: 30310 - DNA, 3435 bp, Homo sapiens
cacaagggtgtataccaagagctccctaactcggatcctgctgacccaaactcggatcctgctgacctaattttccaaaaagactatcttgaatatggtgaaatcctgccttttcctgagtctcagttagtagagtttaaacagttctctacaaaacacttccaagaatatgtaaaaaggacaattccagaatacgtccctgcatttgcaaacactggaggaggctatctttttattggagtggatgataagagtagggaagtcctgggatgtgcaaaagaaaatgttgaccctgactctttgagaaggaaaatagaacaagccatatacaaactaccttgtgttcatttttgccaaccccaacgcccgataaccttcacactcaaaattgtggatgtgttaaaaaggggagagctctatggctatgcttgcatgatcagagtaaatcccttctgctgtgcagtgttctcagaagctcccaattcatggatagtggaggacaagtacgtctgcagcctgacaaccgagaaatgggtaggcatgatgacagacacagatccagatcttctacagttgtctgaagattttgaatgtcagctgagtctatctagtgggcctccccttagcagaccagtgtactccaagaaaggcctggaacataaaaaggaactccagcaacttttattttcagtcccaccaggatatttgcgatatactccagagtcactctggagggacctgatctcagagcacagaggactagaggagttaataaataagcaaatgcaacctttctttcggggaattttgatcttctctagaagttgggctgtggacctgaacttgcaggagaagccaggagtcatctgtgatgctctgctgatagcacagaacagcacccccatgctctacaccattctcagggagcaggatgcagagggccaggactactgcactctcactgcctttactttgaagcagaagctagtgaacatggggggctacaccgggaaggtgtgtgtcagggccaaggtcctctgcctgagtcctgagagcagcgcagaggccttggaggctgcagtgtctccgatggattaccctgcgtcctatagccttgcaggcacccagcacatggaagccctgctgcagtccctcgtgattgtcttactcggcttcaggtctctcttgagtgaccagctcggctgtgaggttttaaatctgctcacagcccagcagtatgagatattctccagaagcctccgcaagaacagagagttgtttgtccacggcttacctggctcagggaagaccatcatggccatgaagatcatggagaagatcaggaatgtgtttcactgtgaggcacacagaattctctacgtttgtgaaaaccagcctctgaggaactttatcagtgatagaaatatctgccgagcagagacccggaaaactttcctaagagaaaactttgaacacattcaacacatcgtcattgacgaagctcagaatttccgtactgaagatggggactggtatgggaaggcaaaaagcatcactcggagagcaaagggtggcccaggaattctctggatctttctggattactttcagaccagccacttggattgcagtggcctccctcctctctcagaccaatatccaagagaagagctcaccagaatagttcgcaatgcagatccaatagccaagtacttacaaaaagaaatgcaagtaattagaagtaatccttcatttaacatccccactgggtgcctcgaggtatttcctgaagccgaatggtcccagggtgttcagggaaccttacgaattaagaaatacttgactgtggagcaaataatgacctgtgtggcagacacgtgcaggcgcttctttgataggggctattctccaaaggatgttgctgtgcttgtcagcaccgcaaaagaagtggagcactataagtatgagctcttgaaagcaatgaggaagaaaagggtggtgcagctcagtgatgcatgtgatatgttgggtgatcacattgtgttggacagtgttcggcgattctcaggcctggaaaggagcatagtgtttgggatccatccaaggacagctgacccagctatcttacccaatgttctgatctgtctggcttccagggcaaaacaacacctgtatatttttccgtggggtggccattaggaagaactccaaatcaaaatgctatgtaaatgtctatgggtgacagtctgctgatggtagaaacctttctttttagttcacaagtcagagatttggacggagctgacacaaagagtttggagctcccccatttctggctctcctttcaggggttccttccccaacccttttcagcagcggtggctgccccccattctgacccctgactcttccagccagaaagatggtggttttctaaaggaactttagctgtcctgcacaatgccgatctgtgtcttgcattttgggtaaaagccataaaaataagaaactcagcctgtggcctttctttcttccaaggctgggcttcttttttttaagtgacttcatgcagtttgttgcttttaaaaatttgtccagaatcgttttctgcagaagcatggtctgttaggagcttactggccgtagcagaagcaattgtttcctgaattcttgacatttatctttgctgtattcatttagggcttgggagagtccgaagataattcagtcactgtcagattaataattttgtcaggacaaagaataccgttatgattatttaatcctttaaaattgtggtctccagagcttgttctcagaatggcccagaccaagccttaattgtgatagtgaatattaatggtcactttaaggagaaattataggccaagatgaaatgaacataaacctgtttgccctggctttcagtggaagatgatattagagaccaaaatctggttctgaaggtgtgtatcagccctaaggtgaaccagacttgggaaagattgtctttaaaaatcaatgagtttatgttttaacttctcagcttagttctatgcattgctctataacacacctagttaagttttatgttattcttgaactgtgattttttttctatttactttcatggtttggtgggccattgttatggactgaatgtttgtgtcccacccttcacccccaaattcccgtgttgaagccccaacctgcactgtggagctggggctgctaaggaagtaattaaggttacatgaagtcatggtggggctctgatctgctaaggttggtgtccttatagggagagaccccagagagcttgttccctccctccctgtgcatgcaaacaagagggcatgggagcacacagagagatggcagccacctacaagccaagaggagaagcctcacaatcaaactctcgctgctggcgag

SEQ ID NO: 30311 - DNA, 1031 bp, Homo sapiens
  misc_feature 1, 2, 3, 4, 5, 6, 7, 8, 9, 10, 11, 12, 13, 14, 15, 16, 17,18, 19, 20, 21, 22, 23, 24, 25, 26, 27, 28, 29: n = A,T,C or G
nnnnnnnnnnnnnnnnnnnnnnnnnnnnnctttttctttttttttttaatgtgagacaggatctcattctgttgcctaggctggagtgcagtggcgcaatctcggctcactgcaacctctgcctcctgggctcaagcaattctcccacctcagcctcccaaatagctgggatcactggcacaaaccaccatgcccagctaattttgtattttttgtagagacagggtttcaccatgttgcccaggctggtctcaacctcctgggctcaagcaatcctcctgcctcggcctcccaaagtgctgggattacagatgtgagccaccgcatccagccccacaccctcatttataccaattacctgcccagtaactgtggacttttgcttcctcacccctgctctgatctggaaggagagggattatgttatagcttgtcagcacagtcccaagttcaatatttctgcggcaaaaacttccttcaaaaaataaatgtacttcattgtattcaatgaattcaccttggaaatgcaccgcctcaacttgttcacatggcataaatgaaaggaattttatagtctcctaaatggcgtgtactgcaagacctcttgaacactttccagaggataggatatttaagtcatgcccttggcgttgcctatggcacctttcccttctgaaagtctggttcctgcccagtgaaccttggctttgtgagccgagatgctgacctgtcttagggccaaggagggctgcaggtttcctcccctccatgaagagcccttatttgatcactgtttgagccctagcttcaatttgaaattcccaagctccagcccttcaaacaggacaggaggctggattcaccagtggattggcctctggtggtattgcacaaccaaatactgtgcctgcagaacccgagccttctaggaggacaacggaaattgtcgaaaaatcacaaagaaagagagaaaaaagaaaacgcgaaaaaggaaagagagaaaaaaagtaaagaaaaaaaaaaagagtttg

SEQ ID NO: 30312 - DNA, 568 bp, Homo sapiens
acttgcagatggcccgtaagaaggctcgagagtcctatgtggagacagaactgatattcgcactggctaaaacaaaccgccttgcagagttagaagaatttatcaatggaccaaataatgctcatatccaacaagttggtgaccgttgttatgatgaaaaaatgtatgatgctgctaagttgttgtacacccagcactttgcgacctgcggccccagcaggcgcggaggatggcggggaggaagccagcagcccctgtgtttactgtcgtcagaaaggtcttgtgttttggttttggggtttttgttttgtttgtgttttgtttggcttgtttgttttttaaggggaaaaaagtttgtaattatttcatccaaatctcccgttatatatctgtgaataataagagattttataatagcaagaaaatgatgtatattttagtttgttgacaaataagtcatcatgatcacgaaggacactgagaaaaaataatttagaaccctggtttttgtgaaaaaaaaaaaaaaaaaaaaaaaaaaaaaaaaaaaaaaaaaaaaaaaaaaaagaaa

SEQ ID NO: 30313 - DNA, 958 bp, Homo sapiens
  misc_feature 1, 893, 915, 929, 953, 954, 955, 956, 957, 958: n = A,T,C or G
nacgcgtaccgcccatctactggggagcctgaggcaggagtctcgcttgcaacctgcgaggcacagggtgcaacgagccgagttcaccccattgcactccaccctgagtgtcacagtgagactctgtctcacaaaaataataaataaataattaaatccacttgcagtggtcaaaaataaatgttaaataaatgggtgagaaatcttgcggagaaatagactcctggcactataaaaatgatcctggagaataatttggctagactttgcaagaatgacaaaaatgattataagaatcagttgtctcactttggggaatacattctgggaaaataatgtaagagaaaaaatatttgcatacagacatttgaggctgctctgtatattacaggcaagaactggaaactgttcggctgcagggtgacagctaactagattgtggtttattaggggaatgagcctttctttgtgtatgacaactatgaaaactattgagaagaaatagttacgtgatacagtcataatcctcaaaaacggagaatcaggaattatgatcaaatagtgatagtaacaaggaaaacatctgtctaaataattactgagtagaaataggttcggaatttgtaaatagtcattaatttgggagattggggtttttttgttttgttttttgtttgtttttcattattttgtgctattattcatacgtgtacatttctacttcagtttttattatccattacataacatacatgcttgattatttgcttcaaggaaatacacctttataagtaatactcaataactactgggtttgagaatgaaggtgtcagaacgaatgagattgtcctatgaaagaagaggcaggagccagggaggaggatcccacccgnccggggctcaaccaggaggcanggccattggggcanggtggcagtccaaggaaccgctcnnnnnn

SEQ ID NO: 30314 - DNA, 405 bp, Homo sapiens
actaagcaaatgcaaggttataatttagctaatagtagtttacagacaattctgatgattatgatttcatttggtttaactaagctgtaccgctcacattcctcgtgccagtgctgccacttcagctccagctctgtcagtgtctgggtgttcccaggactaagaatgggcattgtcctcatcaggtcccccatgattcggcatatgcctgcagaggcggggctggcatcggcttccttggagagcatctgtcgggcctcatccagccggccctgcagcaccaagatggtcaccaagttccagaagctgtcatgtttgcttggattctcactgcccagaacatctgccgacaaactgtccacctcgcacacatggagccggacccagtcaaggagatggaggagg

SEQ ID NO: 30315 - DNA, 1978 bp, Homo sapiens
  misc_feature 1975, 1976, 1977, 1978: n = A,T,C or G
cgcgccgccaggctcgcaagcaccgcgtaggccagctggcgggtccgcgccgtctgtcatggcggcccccatcctgaaagatgtagtggcctatgttgaagtgtggtcatccaatggaacagaaaattattcaaagacatttacaacacagcttgtggatatgggggcaaaggtttcaaaaacttttaacaaacaagtaactcacgttatcttcaaagatggctaccagagcacttgggacaaagctcagaagagaggcgtaaagctcgtttcggtgctctgggtggaaaaatgcaggacagctggagcacacattgatgaatcattgttccctgcagctaatatgaatgaacacttatcaagcctaattaaaaaaaaacgtaaatgtatgcagcccaaagattttaattttaaaacaccagaaaatgataagagatttcagaagaaatttgagaaaatggctaaagagctacaaaggcaaaaaacaaatctagatgatgatgtacctattctcttatttgaatctaatggttcattaatatatactcccacaattgaaattaatagtagtcaccacagcgcaatggagaagagattacaagagatgaaggagaaaagggaaaatctttcccccacctcttcccaaatgattcagcagtctcatgataatccaagtaactctctgtgtgaagcacctttgaacatttcacgtgatactttgtgttcagatgaatactttgctggtggcttacactcatcttttgatgatctttgtggaaactcaggatgtggaaatcaggaaaggaagttggaaggatccattaatgacattaaaagtgatgtgtgtatttcttcacttgtattgaaagcaaataatattcattcatcaccatctttcactcacctcgataaatcaagtcctcagaaatttctgagtaatctttcaaaggaagaaataaacttgcaaagaaatattgcaggtaaagtagtcacccctcaccaaaagcaggctgcaggtatgtctcaggagacgtttgaagagaagtatcgtttgtctcctaccttatcttcaacaaaaggccaccttttgatacattcaagacccaggagttcctcagtaaagagaaaaagagtatcacatggctcccattcacctccgaaggaaaaatgcaagagaaagaggagcaccaggagatctatcatgccgaggctgcagctgtgcaggtcggaaggcaggctgcagcacgtggcgggacctgccctggaggctcttagctgtggggagtcttcatatgatgactatttttcacctgataatcttaaggaaaggtattcagagaatcttcctcctgaatctcagctgccatcaagccctgctcagttgagctgcagaagtctttctaagaaggagagaacaagcatatttgaaatgtctgatttttcctgcgttggcaaaaaaaccagaacagttgacattaccaatttcacagcaaaaaccatctccagtcctcggaaaactggaaatggtgaaggccgtgcaacttcgagttgcgtgacttctgcccctgaagaagccctaaggtgttgtagacaggctgggaaagaagacgcatgcccagagggaaatggcttttcttacaccattgaggaccctgctcttccaaaaggacatgatgatgatttaactcctttggaaggaagccttgaagaaatgaaagaagcggttggtctgaaaagcacacagaacaaaggtaccacttccaaaatatcaaactcctctgaaggcgaagcccagagtgaacatgagccatgttttatagttgactgtaacatggagacatctacagaagagaaggaaaacttacccggaggatacagtggaagtatgtgaatctccttttccaagtcaccttcgctaaataaacatgtaacagtgcatccataaaaaaaaaaaaaaaaaaaattcctgcggccnnnn

SEQ ID NO: 30316 - DNA, 1419 bp, Homo sapiens
  misc_feature 1, 2, 1419: n = A,T,C or G
nnccagcgagcgagcaagcaagcaagcaccggaccccggccgcgccttcagctacggcccgagcgagcccgccgccgccgggcccggccacagcctgcagcggagcccacgagaggcagcgccatggcggagcagacctactcgtgggcctattccctggtggattccagtcaagtgtctacatttctgatttccattcttcttatagtctatggtagtttcaggtcccttaatatggactttgacagcaccaataatagcatcccaattgactctacccaggctctgttccttccaattggagcatctgtctctcttttagtaatgttcttcttctttgactcagttcaagtagtttttacaatatgtacagcaggtaaatatgagtttctctgtctagtcttaacatactaaaaggaaaatttttcacctttatcattgttcaaaaattaagatttatataccatgtcatgtaagtttttccttataaatcttggcttcgccttctccgtctcaaccacgccacccttccccaactcctccttgaacctcttgatccacgtcatctgttgagacctgcccacacaatctgaaagaaaggctggagacgtcaaagtgcaggaattctatgacaccagagcagtattgctgtgctttggctgtggcgctttttctagattaccagaaggttgagcttggcatagaggccattgtcagcctctacccacgttcttgcaggtagaaacatggatagctaatcaaagtgattggactgtcagctctttgatgtgttttcaagctaagtattgatggaaatgtaaaaaaaaaatcggcaaaatgctacaagacttgttaggaggtcatcccctggcctgctgtttatcttttaggaaacttacctatgctttcccctacttcaaatcaggtacttttttttaataatgaagagattttttgtgcagtattaaaggaagacatttttcttctctagtcaattaaccgtatccacttgtctagtgtttggcggaatgaagtttctataagtcatgccacttttcttataattgttttaaaaaattatacctttcctttctctagttcttgcaacgatagcttttgcttttcttctcctcccgatgtgccagtatttaacaagaccctgctcacctcagaacaagatttcctttggttgctgtggacgtttcactgctgctgagttgctgtcattctctctgtctgtcatgctcgtcctcatctgggttctcactggccattggcttctcatggatgcactggccatgggcctctgtgtcgccatgatcgcctttgtccgcctgccgagcctcaaggtctcctgcctgcttctctcagggcttctcatctatgatgtcttttgggtatttttctcagcctacatcn

SEQ ID NO: 30317 - DNA, 1208 bp, Homo sapiens
  misc_feature 1: n = A,T,C or G
ncctgtgtgtcaaactacagctacgcccgcggtggcggccgtccgggctggtacagaaacaactcagcgtttgccttgtttgagcacagtttgaacatttggcagtgcctgagtggttgaagtttggccattgggattgaccaagatgtagctgttgtttgaggtgcatacactcaagttaggttttcattcttgtttacctattaaggtaggttgcaggtcatccacaaggactcataaatataattatggagtccttctcaggacatacttagttcactttaacaatgccttccctttggttattttctcaattttgagagactggccaaaacttcagtcactggtgtcactgaacatcctggcagtacagaggtctctggaaagattggcagacctgctaggaaagatccagaaagcattgggagaatatctggaaagagagcggtcatctttccccaggttctattttgtgggtgatgaagatttgcttgaaatcattggaaacagcaagaatgtcgctaaattacagaaacacttcaagaagatgtttgctggagtttcgagcatcatcctgaacgaggataactctgttgttttgggtatttcatctcgggaaggagaggaggttatgtttaaaactcctgtgtcaattactgaacatcccaaaatcaatgagtggctcacattggtagaaaaggagatgagagtcaccctggccaaactgcttgctgagtctgttacggaagttgagatttttggtaaagcaacttcaattgacccaaatacctacatcacttggattgataaataccaggcccagcttgtggttttgtcagcccagatagcctggtctgagaacgtggagaccgcactgagcagcatgggcggaggtggagatgccgcgcccttgcactctgtgctgagcaatgtggaggtcaccctcaatgtgttagcagactctgtcctcatggagcagcccccactccgaaggcggaagctagaacacttgattacagagttggttcaccagagagatgttacaaggtccttgatcaaaagcaagattgacaacgccaaatcttttgaatggctcagccagatgcgattttactttgaccctaagcaaactgatgtgttacagcagttgtcaattcaaatggcaaatgccaaatttaactatggctttgagtacctgcccgggcggc

SEQ ID NO: 30318 - DNA, 918 bp, Homo sapiens; identical to SEQ ID NO: 30134
  misc_feature 1, 2, 918: n = A,T,C or G

SEQ ID NO: 30319 - DNA, 1296 bp, Homo sapiens
  misc_feature 1, 2, 3, 4, 5, 6, 7, 8, 9, 10, 11, 12, 13, 1296: n = A,T,C or G
nnnnnnnnnnnnnccgaggtacatatatgtcacctgttggcccgtcaaaatgcatactccttctgtgaccagccaacaggtgacatatttgtatgcattttgacgggcctgggcttcaatggctttgaagaaaagggcaaggcaaagtgggatgcctgtgccaacatgaaggtgtggctctttgaaacaaacccccgcttcactggcaccattgcctcattcaacatcaacaccaacacgcgtgggcggacgcgtgggttcaaacgactcaagttccttggaaataaagaactctctcagggtctctcgttgctattcctggccctctggcacggcctgcactcaggatacctggtctgcttccagatggaattcctcattgttattgtggaaagacaggctgccaggctcattcaagagagccccaccctgagcaagctggccgccattactgtcctccagcccttctactatttggtgcaacagaccatccactggctcttcatgggttactccatgactgccttctgcctcttcacgtgggacaaatggcttaaggtgtataaatccatctatttccttggccacatcttcttcctgagcctactattcatattgccttatattcacaaagcaatggtgccaaggaaagagaagttaaagaagatggaataatccatttccctggtggcctgtgcgggactggtgcagaaactactcgtctcccttttcacagcactcctttgccccagagcagagaatggaaaagccagggaggtggaagatcgatgcttccagctgtgcctctgctgccagccaagtcttcatttggggccaaaggggaaactttttttggagaaggcgtcttgcttgtgtcacccacgctggaatgcagtggcgggatctcagctcacggaacttccactcctgggtcaagtgatttcctgcctcagctccaagtagctggatacagggggcacatgccagtaattaggattcagcagaaacgggatcacacgtggccagtgggctcgaaacagaccgaatgtgatcaccgattcgcacaccaacagcgcggatacacggcggtggccggtcccggcccacggggacatgtggcagcgacaagacacgatccccggtatgtccaacacagtaggagatacaccaaacagaatgtatacgtatcacagaaaagtaggggtcaccacccgcggagaggtgaggcgcatcacattagtgtaacacactgctgaaaggaaagccacgtacgctcattgtagtatataaatctcn

SEQ ID NO: 30320 - DNA, 428 bp, Homo sapiens
  misc_feature 424, 425, 426, 427, 428: n = A,T,C or G
accagcagtctcagttctccagttttttccaaataaatattggcccccgaggagtccgtgaaggacctgatgcacacggtcaggtgccgggcaggcgagaaggtgttgggccgcaggttaacgatgagagcacctgttgggtacaacacgcctccatgtttcagcatctacgtcatgggcttggttctggagtggattaaaaacaatggaggtgccgcggccatggagaagcttagctccatcaaatctcaaacaatttatgagattattgataattctcaaggattctacgtttgtccagtggagccccaaaatagaagcaagatgaatattccattccgcattggcaatgccaaaggagatgatgctttagaaaaaagatttcttgataaagctcttgaactcaatatgttgtccttgaaannnnn

SEQ ID NO: 30321 - DNA, 953 bp, Homo sapiens; identical to SEQ ID NO: 30102
  misc_feature 1, 948, 949, 950, 951, 952, 953: n = A,T,C or G

SEQ ID NO: 30322 - DNA, 6515 bp, Homo sapiens; identical to SEQ ID NO: 30267
  misc_feature 6515: n = A,T,C or G

SEQ ID NO: 30323 - DNA, 395 bp, Homo sapiens
  misc_feature 395: n = A,T,C or G
cctgttcctgtaaggaaaacaacagctccaccgcttggtcgttcctggttcttggaggagacgacactgaccgcagacccacccgatggcatcaaggtctttcccaacgaggaggacctcaccgacctccaggtcaccatcgagggccctgaggggaccccatatgctggaggtctgttccgcatgaaactcctgctggggaaggacttccctgcctccccacccaagggctacttcctgaccaagatcttccacccgaacgtgggcgccaatggcgagatctgcgtcaacgtgctcaacagggactggacggatgagctgggcattttttttgtaccaggaaagagggatgcccccgaggtgtggctgttggtctacacacaggaaacagctan

SEQ ID NO: 30324 - DNA, 352 bp, Homo sapiens
  misc_feature 352: n = A,T,C or G
acttgaacaaggaaagagacggctgtgccataaacaaggaatcacaggaaaactcagaagtgcccgcccttctttcttgctagtttcgtggtatgttctgctttgcttgtctgttttggtggacacacagtggtgccaattcgtatttcctaaaagagccacattggctgcttgtaaagagacctctcatttgaacagtgttggcaagatcgattgttctggttctagacagagccccatggctcccaccacctggacaggcttaaggcatatgggggtatctaatgtgtttacagaagccaaggcaaaagaaaagcttgcgagctatgaatttgcttttgcccaataagcn

SEQ ID NO: 30325 - DNA, 1193 bp, Homo sapiens
  misc_feature 1180, 1181, 1182, 1183, 1184, 1185, 1186, 1187, 1188, 1189,1190, 1191, 1192, 1193: n = A,T,C or G
caactgtagaacaggtgttggatcccagaacaagaatgattttattcaagatgttgactagaggaatcataacagagataaatggctgcattagcacaggaaaagaagctaatgtataccatgctagcacagcaaatggagagagcagagcaatcaaaatttataaaacttctattttggtgttcaaagatcgggataaatatatttcgtcatggctattgtaaaggaaaccctaggaaaatggtgaaaacttgggcagaaaaagaaatgaggaacttaatcaggctaaacacagcagagataccatgtccagaaccaataatgctaagaagtcatgttcttgtcatgagtttcatcggtaaagatgacatgcctgcaccactcttgaaaaaatgtccagttatcagaatccaaggctcgggagtgtacctgcaggtcattcagtacatgagaagaatgtatcaggatgccagacttgtccatgcagatctcagtgaatttaacatgctgtaaccacggtggaggcgtgtatatcattgacgtgtctcagtccgtggagcacgaccacccacatgccttggagttcttgagaaaggattgcgccaacgtcaatgatttctttatgaggcacagtgttgctgtcatgactgtgcgggagctctttgaatttgtcacagatccatccattacacatgagaacatggatgcttatctctcaaaggccatggaaatagcatctcaaaggaccaaggaagaacggtctagccaagatcatgtggatgaagaggtgtttaagcgagcatatattcctagaaccttgaatgaagtgaaaaattatgagagggatatggacataattatgaaattgaaggaagaggacatggcatgaatgcccaaaagataatattctataccagactgttacaggatcgaagaaagatttgtcagggagttcagaaggtccctgactccctagacagatcaagtggaggaagggactgtgtctgattcagaagatatgggaagctctgagtgctctggacacagactctgaagagcagggagaccatgccggcccaagaaaaaccagggaccctgagttgtaagaaaacaaaaaaaggggggcggcaaaagacccgggggcccaggtaacgggacccgcgtctggaaagggccacannnnnnnnnnnnnn

SEQ ID NO: 30326 - DNA, 428 bp, Homo sapiens
gcgttgcgcagaaggcggcggcggtggtggcttgtggtgcggcctcaccatacaggaacagggcagacgttagcgtgagtgatcactctcaatcccggggacccggtggccttagtctttcaggtggaacggtgtgcgacatgggaaagaaaaccaagcggacagctgacagttcttcttcagaggatgaggaggagtatgttgtggagaaggtgctagacaggcgcgtggttaagggacaagtggaatatctactgaagtggaaacctttgccagaaatacatataccttgtatattaaatctgagtctcagatttaatcatcgaagcgtagctgggttaagaaacagtctgatcgtaaggatgttgtcgattctgacccatggatgaccacaagaaaaagatatttatttctgcctggataattga

SEQ ID NO: 30327 - DNA, 2014 bp, Homo sapiens
  misc_feature 1, 2009, 2010, 2011, 2012, 2013, 2014: n = A,T,C or G
nagctgtttcctgtgaggaaaagaacggccgccccgcgggggcgtccgtggtacctgatggaacaccccctgaggcagggggccagtccccgaggccccaagccccagctgactgaggtccgcaagcatctgaccgccgccctggaccgagggaaccttaagtcagaattcctacaagaatccaatctgatcatggccaagttgaattatgtggaaggtgattataaagaagctctgaacatttacgcccgggtgggcctggacgatctgccactgacagctgtcccgccctacaggctgcgggtgatcgcagaagcctacgctaccaaaggactttgtttggagaagctgcctatttcttcttctaccagtaatctccatgtggaccgggaacaggatgtcatcacctgttatgagaaagcaggggacatcgcactcctgtatctccaagagatagaaagggtaatactttctaatattcaaaacagaagccctaagcctggccctgctccccacgatcaagaactaggtttttgcctagaaacaggacttcagagagcccatgtcctctatttcaaaaatgggaacttgacaagaggagtcggaagatttagagagcttctcagagcagttgaaacaagaacgactcaaaacctgcgaatgacaatagccaggcagctggcagagatcttgttgcggggtatgtgtgagcagagctactggaaccctctggaggatccaccgtgccagtcacctctggacgatcctctccgcaaaggagcaaacacaaaaacctacactctcactcggagagcccgtgtctactcaggagagaacattttttgtcctcaagaaaatacggaagaagccctgttgttattgctgattagtgaatcaatggccaaccgggacgctgtgctgagcaggatacctgaacacaagagtgaccgcctcatcagtctgcagagtgcatctgtggtctatgacttactcaccattgctcttggaagaagaggccagtatgagatgctgtcagagtgcctagaaagagccatgaagtttgcctttgaggaattccacctgtggtaccagtttgctctgtccctgatggctgctggaaaatctgcccgtgccgtgaaggtgctgaaagagtgtatccgcctgaagccggacgatgccaccatccctctcctcgctgccaagctctgcatgggctccctgcactggttggaagaggctgaaaagtttgccaaaactgtcgttgatgtgggagagaaaacgtcagagttcaaggccaaaggctacttagctctggggctcacgtacagtctgcaggccactgacgcttctttgcgagggatgcaggaggtcctacagagaaaggcgcttcttgcatttcagagggcccacagcctgtcacccacagatcaccaagcagctttctacctggctctgcagcttgccatctccagacagatcccagaggctctggggtatgtccgccaagctcttcagcttcaaggtgacgatgccaactccctgcacctccttgccctcctgctgtcagcacagaagcattaccatgacgctctgaacatcatcgacatggccctgagtgaatacccagaaaatttcatactactgttttccaaagtgaagttgcagtcactctgccgaggcccggacgaagcactgctgacttgtaagcacatgctgcagatatggaaatcctgctacaactcacaaccccagtgattctggacgtgggagcagctcttgatagaaccattgcttgcgacgacagcttaatacatactttgccgattcagaatccaaaaaggctccgccatgcacatcggtgcagctcatgatgggcacgcccgcggaagggtccccttggaacagtggccaaaaggccgtgtccccggttccggccatttgccccctagatttgggacctacacctctccaaggctccgccattttacgcgagcgcgaacggggtaaannnnnn

SEQ ID NO: 30328 - DNA, 630 bp, Homo sapiens
  misc_feature 1, 2, 3, 4, 5, 6, 7, 8, 9, 10, 11, 12, 630: n = A,T,C or G
nnnnnnnnnnnnaaatccacttgcagtggtcaaaaataaatgttaaataaatgggtgagaaatcttgcggagaaatagactcctggcactataaaaatgatcctggagaataatttggctagactttgcaagaatgacaaaaatgattataagaatcagttgtctcactttggggaatacattctgggaaaataatgtaagagaaaaaatatttgcatacagacatttgaggctgctctgtatattacaggcaagaactggaaactgttcggctgcagggtgacagctaactagattgtggtttattagaggaatgagcctttctttgtgtatgacaactatgaaaactattgaaaagaaatagttacgtgatacagtcataatcctcaaaaacggagaatcaggaattatgatcaaatagtgatagtaacaaggaaaacatctgtctaaataattactgagtagaaataggttcggaatttgtaaatagtcattaatttgggagattggggtttttttgttttgttcctggtttgtttttcattcccttgtgctattcttcattcgtgcaccaggccgcccgcccgcccccgcggtgtggctcctcttttcctcacaggaaacagctan

SEQ ID NO: 30329 - DNA, 352 bp, Homo sapiens
acatggctcagtgcactcccctctttgcctttacagttttccacttgatatgggggtgtaataacaacttcttccatgactacgatgttttttcttgccatttacagtctttaatgcttactaacattgagtgaagctaggggaggaggggtttctgttcggtcattaattatttccacttctgaaacatactgtaagtttatgagcaagatgtctgcatggttgggctttccactggaagagggacattttaaagccagcattttggattggtagtcaaaggctaccacctcgccctgcagccgctgctcctggcacgtccggcacgacacctggctcccaacgctgaagt

SEQ ID NO: 30330 - DNA, 1041 bp, Homo sapiens; identical to SEQ ID NO: 30167
  misc_feature 1, 2: n = A,T,C or G

SEQ ID NO: 30331 - DNA, 1192 bp, Homo sapiens
  misc_feature 1, 1192: n = A,T,C or G
ncctgtccccccgaaaagccctggtggtttgttttttttttttatagctatacccagaccttatgatccacagccacttaccaatgagcccaagagtgtccaccttctctggaagacaggatgtctgtacaaactcttgggtttttttccacttcaaagacacaagctctcccgtttaccacagcccttggatctgcacctgcccaaccatccctcccccagtgcacacaggtgcatctgacctacaccagccgccacgctggtagaccgtcaaaatgtcagttctgcagtactcggagacaaaggcatagactatcagatcctaaacaggatttaggaaacagacgattttcccctccaccttgaaaataaaatacatttcagcagatacatgtcctgaaatagtttacttgggagttcctaggaagatggtccattgtcaatcccttcttcaccagcctgggcatccagaattcttctcaaggtaacatgagtctttttattttttttaaacagtctttcttgctgtaagaactcttataatggagcctagtcctcctactgctaaggccttttcgtgccactggagtaacactgcgctgctattttctgtgggcttctcaaagcctttataaatgtacttcattaacaagtcaacgccgtttctgtccagtgactgcacagcctgctcaatctcactgctcttgaagtttgtgagcactttcagcaccacgccctgggctcgctccttcacagcttgattcttggtgttgacgggagagttccgcaaggctgcatggaatgcccgaagcatgtcccctgtgcatcaccaccagttaaggatagctaggctcaagcacatccatgccgtcatgaacaagctcacttcagaaacagctcaggaacagagtcagatgggatctcatccataccacccaccttccacggcttccaggggggcagagacggtttacagcctgcacagggaggctgcagggcacctctgccaaccatgcaaaccctcctttcaactccctctctaccttccacgtcaaagcaactgtcctggaggggtaacttgatgtaaaattggattgtgctcacttgcacctgcttggtgctgagcactgtatctaccctactggatcctcacagcacccgtgtgagacaggagcccaggggagaaagacan

SEQ ID NO: 30332 - DNA, 2138 bp, Homo sapiens; identical to SEQ ID NO: 30128
  misc_feature 1, 2, 3, 4, 5, 6, 7, 8, 9, 10, 11, 12, 2135, 2136, 2137,2138: n = A,T,C or G

SEQ ID NO: 30333 - DNA, 2025 bp, Homo sapiens; identical to SEQ ID NO: 25583
  misc_feature 2025: n = A,T,C or G

SEQ ID NO: 30334 - DNA, 2075 bp, Homo sapiens
aaagtgttgcgctccgggacgccagcgccgcggctgccgcctctgctggggtctaggctgtttctctcgcgccaccactggccgccggccgcagctccaggtgtcctagccgcccagcctcgacgccgtcccgggacccctgtgctctgcgcgaagccctggccccgggggccggggcatgggccaggggcgcggggtgaagcggcttcccgcggggccgtgactgggcgggcttcagccatgaagaccctcatagccgcctactccggggtcctgcgcggcgagcgtcaggccgaggctgaccggagccagcgctctcacggaggacctgcgctgtcgcgcgaggggtctgggagatggggcactggatccagcatcctctccgccctccaggacctcttctctgtcacctggctcaataggtccaaggtggaaaagcagctacaggtcatctcagtgctccagtgggtcctgtccttccttgtactgggagtggcctgcagtgccatcctcatgtacatattctgcactgattgctggatcatcgctgtgctctacttcacttggctggtgtttgactggaacacacccaagaaaggtggcaggaggtcacagtgggtccgaaactgggctgtgtggcgctactttcgagactactttcccatccagctggtgaagacacacaacctgctgaccaccaggaactatatctttggataccacccccatggtatcatgggcctgggtgccttctgcaacttcagcacagaggccacagaagtgagcaagaagttcccaggcatacggccttacctggctacactggcaggcaacttccgaatgcctgtgttgagggagtacctgatgtctggaggtatctgccctgtcagccgggacaccatagactatttgctttcaaagaatgggagtggcaatgctatcatcatcgtggtcgggggtgcggctgagtctctgagctccatgcctggcaagaatgcagtcaccctgcggaaccgcaagggctttgtgaaactggccctgcgtcatggagctgacctggttcccatctactcctttggagagaatgaagtgtacaagcaggtgatcttcgaggagggctcctggggccgatgggtccagaagaagttccagaaatacattggtttcgccccatgcatcttccatggtcgaggcctcttctcctccgacacctggggggctggtgccctactccaagcccatcaccactgttgtgggagagcccatcaccatccccaagctggagcacccaacccagcaagacatcgacctgtaccacaccatgtacatggaggccctggtgaagctcttcgacaagcacaagaccaagttcggcctcccggagactgaggtcctggaggtgaactgagccagccttcggggccaattccctggaggaaccagctgcaaatcacttttttgctctgtaaatttggaagtgtcatgggtgtctgtgggttatttaaaagaaattataacaattttgctaaaccattacaatgttaggtcttttttaagaaggaaaaagtcagtatttcaagttctttcacttccagcttgccctgttctaggtggtggctaaatctgggcctaatctgggtggctcagctaacctctcttcttcccttcctgaagtgacaaaggaaactcagtcttcttggggaagaaggattgccattagtgacttggaccagttagatgattcactttttgcccctagggatgagaggcgaaagccacttctcatacaagcccctttattgccactaccccacgctcgtctagtcctgaaactgcaggaccagtttctctgccaaggggaggagttggagagcacagttgccccgttgtgtgagggcagtagtaggcatctggaatgctccagtttgatctcccttctgccacccctacctcacccctagtcactcatatcggagcctggactggcctccaggatgaggatgggggtggcaatgacaccctgcaggggaaaggactgccccccatgcaccattgcagggaggatgccgccacca

SEQ ID NO: 30335 - DNA, 1544 bp, Homo sapiens
  misc_feature 1531, 1544: n = A,T,C or G
ggccgccccacttcttacaccccacttcttgcttgaccaacatgcaagttctttccttccctgccagccagatagatagacagatgggaaaggcaggcgcggccttccgggtctggaaaatccgcaagaccatcatgcagctgtgccacgaccgtggctatctggtgacccaggacgagcttgaccagaccctggaggagttcaaagcccaatttggggacaagccgagtgaggggcggccgcccggcaccgattccttcaccaagtcctggtccacagaagaagtgcgatgaatattaattgttgaattcatttcagggcttccttggtccaaataaattatagcttcaatgggaagaggtcctgaacattcagctccattgaatgtgaaataccaacgctgacagcatgcatttctgcattttagccgaagtgagccactgaacaaaactcttagagcactatttgaacgcatctttgtaaatgtacatcctggagcagtttctacagcaggagctgctcatcaacatcacggagcactgagctagtccctgagcacgtcgtcatgaccaaggaggaggtgacagagctgctggccacgatataagctccgagagaaccagactgcccaggatccagtgcgggggaccctgtggcgctgctacttttgggataaatgcgtgggcaggtggtgcagatcatcctggcccagtgacgacggctggcagtgtacatcacctacctggctggtgcagtagctaccgcctgacagcccctagaagtgctggacacacatgtgatccccatccctgcaggagaaactgcccctgacctgccagaatccagagccccacagactctcactggctgctgctcactctggacatcgcaccaaaggacaggtggacgtccaaccaacgattcatccacgtacctaggggtgagcgcttcctgtgcgcaaggaccgaccaatatcacctcgtggcataatgttgcgagatgcagacttcaccacgtgaacaaaggaccccaagaggcgagcgacaacctgggggccagcatgtgatgcacaggagcatctaagaacacaagcagacaaggacacatgaggattacaccatcattgacaggagaagatacagagaagttacaggagtataatacacaatctaggaagcaagtgaattaacataccatgtagaacacatacgagaccatattacacccacacattgatacaataaccaaaccacatagaagagagacacatgtaattcaggtttgacagggacacgacaaacccgctgacaatcggaagcaattaacactcccacgttgtacgcccagacccgaactacgaacacccgctagtcagtcatcacactcaggtatctcagagcaagacaaggcacgtgcaacgataccacgcacgaatgccagtaaggagtcggccgattatcaacacctggagcaacaaatgattcacgcaccgactgacttagagcgcgctacatcgacgacggcagaagcnatcaacacacgan

SEQ ID NO: 30336 - DNA, 381 bp, Homo sapiens
  misc_feature 380, 381: n = A,T,C or G
acttgcttgtaagcatgaggagggggttttgatgtgggttgggtttttatgtacccgggatgcccgttaactaaaagctttgcagaaataagaagaggctgctcctgttagagcggcttgactagctggtccactccgggcctcagtctggggggctggcgggcaggttgcagcctctccgtgatgcagcgcagccttggattccattggacctcttagtctggccctcatttttgaagctaacagaaactgtctgtagtgactcttggcgtatgctacctgggaggaaacgcactatttgtgtcttggaattagcccgcattagacgataaagcacaaacccttgtaaatgaaatgcggccccacgggcagctggacann

SEQ ID NO: 30337 - DNA, 559 bp, Homo sapiens
  misc_feature 1, 2: n = A,T,C or G
nnaaagtgaaaatttttcaatgtcgttatttttaatatacttcatagtaattttattgcaattaaagcacctgttttctaaattatctcagctttgttcaagagagaaaaaaaaatattgaaacaaaaggtgatggagttgagatcccaaaacagagtttgcctatggtctgtcttcctatgcggaaagtaagtacctgcccggtcggccgcccgggcaggtaccagatgggctgcgagtgcaagatcacgcgctgccccatgatcccgtgctacatctcctccccggacgagtgcctctggatggactgggtcacagagaagaacatcaacgggcaccaggccaagttcttcgcctgcatcaagagaagtgacggctcctgtgcgtggtacactgccatgggggacgctatctagtctaaaattacagagtcgaaaagatagtgatgatggtcccatcatgtgggttcgtccaggagaacaaatgatccctgtggctgatatgccaaagtcacctttcaaaaggaaaagaactaccaatgaaataaaaaatcttcagt

SEQ ID NO: 30338 - DNA, 1164 bp, Homo sapiens; identical to SEQ ID NO: 30209
  misc_feature 1, 1162, 1163, 1164: n = A,T,C or G

SEQ ID NO: 30339 - DNA, 970 bp, Homo sapiens; identical to SEQ ID NO: 30235
  misc_feature 1, 970: n = A,T,C or G

SEQ ID NO: 30340 - DNA, 551 bp, Homo sapiens
  misc_feature 1, 2, 3, 4, 5: n = A,T,C or G
nnnnnagccacaaatcttcaataaacgtggggagggctcccccacgttgcctctactttatcaattaactgagtagctcccctgacttttaatgtcatttgttaaaatacagttctgtcatatgttaagcagctaaattttctgaaactgcataagtgaaaatcttacaacaggcttatgaatatatttaagcaacatctttttaacctgcaaaatctgttctaacatgtaattgcagataactttgactttcttctgaatattttatctttccttggcttttcccttgcttccccttttgccaatctcaacacccaagttgaagacgttgtttttaaaatggtttgtcctgatgcttttgtctaattaaaacactttcaaaacaggacaacatttttctgtgattttccctcctttagaacccatacacaacttatcacttgctaaggagaactgtacaggcatccatctgtggtggggaaacagctgcttggggataagctgagacattttccatgggaaggtttgagatcatagaggtggatacaagt

SEQ ID NO: 30341 - DNA, 1017 bp, Homo sapiens
  misc_feature 1012, 1013, 1014, 1015, 1016, 1017: n = A,T,C or G
accttcaggcctggggcctgtgccaatagagtattactggatataggaatagctctgacacctcaaggtcaccctagaagttgaaggatttcagggctcacatattttagactcaaacttctagaacactgttctgacccagctgagctattgaagatagttttcacggcactgctatccttgattgacctcctaggggatctgtctctcttgagaataggcctcaactctaatttccttgggcccaagaccaagagtgggcaaggggagcctagcctgcaccttgccacctggtgttggccattatcagggtgccaggagctgaagtggcacatgttagtgtctacagagtgccacgtgggtagtgctaggtcttccaggaggctcagccactgatgactttaaggcatgcaggtctccagcatggctgcaggaaaactaagagaacttgtttctagtagatctacccttaaagaatagctaaaggaacttctccaccagaaagaaaatggtaaaagcccaaagctgagattttcagagcagggagaacaggatgagtaaaaatagaagtaaacatactagactattctttatctcatgagcttctttcatcatatgaaagaaatggtgatgcagaagttataatgacatctgatggtgctggtcagtgcatgtggaagaaatacttaagataattgtattttaaaactggaggggatacagagatctaaatggaggtaaggtctctacacctcactggaagtggtaaaacattgacaccagtaagctgtgataagttacctatgtgtatggcaatacttagaacaacccctaaggaaactgtgtacaaagcagtgtactcagaaacattataagtaaatcaaaatgcaactctaagaaatgttcaaggccagttgcagtgactcatgcctgtaatcccagtgctctgggaggccaaggcaaaagcattgcttgaggccagatgtgtgaggatgtagtgagctatgatcannnnnn

SEQ ID NO: 30342 - DNA, 430 bp, Homo sapiens
  misc_feature 429, 430: n = A,T,C or G
actcctgtcatggagtgcccaccatcgaatggacatattcatccaattggggaacgcagaagatcgtggagtggaaaccagggactcaggccaacatctctcaaagccacaaggacagagtctgcacctttgacaacggctccatccagctcttcagcgtgggagtgaggggttccggctactatgtcatcaccgtgacggagcgcctggggagcagccagtttggcaccatcgtgctgcacgtctctgagatcctctatgaagacctgcactttgtcgctgtcatccttgcttttctcgctgctgtggccgcagtattaatcagcctcatgtgggtttgtaataagtgtgcatataaatttcagaggaagagaagacacaaactcaaagaaagcacaactgaggagattgagctggaagatgttgagnn

SEQ ID NO: 30343 - DNA, 2228 bp, Homo sapiens
aacaaaaaaccggcaattgttatttattttaaataaaaagtcataatactattaggaatagagagcaagatataaaatcatatcaacccttttagataaatacaaaggacaaatgaaatacacaaaaaacaatatattttaaaaatccactgttagtttttagaaaaagatttagcagtttccattaagcactacatcccactattccatttttaggaaggacagatgcttgaggccataggttaccagctcttgtttggtctttaaaaatgcaagtaagttgctaacattttcaaataagatttcaacataactctgacaatgccacaggacacacagtttggctccatgtacacgtacctggggacagtggcagtccccaggtctctgccatgccaagatcaggccccaaggtcattcagcaccaggcacaatctctgctttcctgacaactggcctgctttgcttatttaccttagtagccttccaggtaactgacactggtgtttgaacgcttaactttcacaaagcttgtttaggcaaataaaatatgttcatactgatgctgggaattttgttactaattttttcccttaagttcaaataaaactaaggagttgataaaagggtattctgaacagaaaagtaaaaccaagagcacagaaacacctgctgtgtttcttctgccagtaacagtgacagagaaccctcaggcccttgctcgtccggctgcagcacacacggcctcacctgcattgctccccgctcctctctgctttttttccttggctagttgaatggctcggtaatcagttcttgctgagcccccactttcctgagaccaaagaaaagcatgtcagtcacttatctagacacaaaggaagggtagcaagggagctacagaagtgccataagcctgcttctgggacatatccgagctcccaaaaccagagtcaccagcaaggcacacaaagggccaaacgctacatccacttgtggcgagggccgaacaaacttggagctggaacaatgtatgtgactttcttatccagagaagcaaagttcattccttcatagtctaaaacatagccaaatattttaaacagaaacttttaaaatcaattacatacttctctgctttctgaaacaaacaccgagccttgcctgggtaacccagggtcaccttaccgcgacacttttcacgctgtttcacacaggtgcatggcaggcccggggcaggtcccaccttagagacccactgtacaggctgctctggtggcaggggctatactttgtcaaagtcttacacaaaaataataatgatggtactgaattcaggaacttgcctgagggagtcagacagtactcagaggacatcagctgttgcaagtctgtgaacgtttcctaagaaagacagtttaacacttatcgctatgaagagaaaaagagcagccctcaaagctcgtagcatacctgggacccattcaccacacaccatttgtactcagagaagcgaggtagcccaacgtcacacagctagcaagaaaatgaacacggggttaagaccaaggtcttgctggcttctctacctccacccacagctgcagctgcaccagggagcttccatttcccaaggcaccgaggcacacagtcctggcaccagggactgactgagcacttgtctctgacctgtggccacctcccatccctgcccagtcacctgtacacttagcaactactatggccacctaagcaaatgccggcaagcatggctctgccaccgacaagcaagacaccagaaatgcagagacagagactgtcctcctctctgactgaaagaaatgaaaggtggctccatggagcctcagctactatgtgcctcacaactgatcctactgcaaaagatgtaacattttttaaaagttgtggtaaaataagatgtaacattctcaacaatataaatgtcaccatcaaatttagcctgtgccacaaaaaaaatccctatctgatcattcccatctaggtcaggaaagtcagactatctcctaagaatctttaaattattttaaattaaattatattaaatgtataattgatataaagtatattaactgtccagcctcaaaactggggaagtactcttataatcctccaagaactaaggctcataaaccccaccctttttttttttcttgttaattctaatttaaaaaagagtttcggacgcg

SEQ ID NO: 30344 - DNA, 556 bp, Homo sapiens; identical to SEQ ID NO: 30160
  misc_feature 556: n = A,T,C or G

SEQ ID NO: 30345 - DNA, 415 bp, Homo sapiens; identical to SEQ ID NO: 30139
  misc_feature 414, 415: n = A,T,C or G

SEQ ID NO: 30346 - DNA, 409 bp, Homo sapiens; identical to SEQ ID NO: 30067

SEQ ID NO: 30347 - DNA, 1134 bp, Homo sapiens
  misc_feature 1134: n = A,T,C or G
actaagtttcagggttctcttcagcaatcattaattaatacttcagccattaattcagatgcaaataattttcttttttcttttttttgagatggagtttcactcttgttgcccaggctggagtgcaatggcgtgatctcagctcaccgcaacctccgcctcccaggttcaagcgattctcctgcctcagcccccctagtagctgggattacaggcatgcgccaccacacccagctaattttgtatttttagtagagacggggtttctccgtgttggtcaggctggtctcgaactcctgacctcaggtgatccgcctgcctcggcctcccaaagtgctgggattacaggcatgagccaccacacccagccagatgcaaataattttcttagaaaattatttcaaaagttattttaggcccagaaatcaaggattgttccaaccatgaaaatgggtaagacacctgccttaagcaaatctaacctgctattacttgccaaattttatatattcttttctcttgcctgtatttctaattagtgatttgtttaatgaagaactcttcatgtagagcaattaactgggcctaagaaatttcgaagctttccatgacataaagtggttaaaaaaaaatgctttgacagtcttcttctgccattagttcaactgcctttacgctttttttttttttttttttttggaaagggagttcactctggtggcccaggctagagtgcaagggcgtgatctgggctcagtgaacctctgcctcccgggtccaagcaattctcctgcctcagcctctgagtagctgggattcgggcatacgccaccatgcctgctaattggtgattttcacgcagagaccggttccctccatgtgcggtcaggctggtctcgaatcccgactcggggtgattctggctggcttgggctcccaagggtgtgggattccggtgttgagccacacccccagggggcttaggtttggtctcttgattctctacttgggtcgaccgacttctttgctggccatcgttttctggcccaccaggactctattcgggctccccctggtggcgcccccaccgcgtctcgcagttcgacacaagggggcgatctccgcgcgcgctcn

SEQ ID NO: 30348 - DNA, 405 bp, Homo sapiens
  misc_feature 400, 401, 402, 403, 404, 405: n = A,T,C or G
acgagctcttgtcattgacatggcaagctgatggcgtgcggtggctgcggggtatcagggccgggagccctttgggaggaagggaggcgttagaggagctgccttcggaggctcagggagtccctttggagctggttgtttccttggccctgcagcgcactgctcggggctcccaaggaggttgtgtgtatggttcttaattcatcaggacaaagacccccagcatgtgtgtacttatttcaacaattcttagagatgctagctagtgttgaagctaaaaatagctttatttatgctgaattgtgatttttttatgccaaattttttttagttctaatcattgatgatagcttggaaataaataattatgccatggcatttgacagttcattattcctannnnnn

SEQ ID NO: 30349 - DNA, 988 bp, Homo sapiens
  misc_feature 1, 2, 3, 4, 5, 6, 7, 8, 9, 10, 988: n = A,T,C or G
nnnnnnnnnnccatagctgtttcctgtgtgggaacgggggcctgcaccgcggaggcggccggtggggacctgatgctgcacatccacagcgacgtgttctctgagccccgtgccatcttttattccgcctgcgtggtgctgggcctacagtttcttcacgaacacaagatcgtctacagggacctgaagttggacaatttgctcctggacaccgagggctacgtcaagatcgcagactttggcctctgcaaggaggggatgggctatggggaccggaccagcacattctgtgggaccccggagttcctggcccctgaggtgctgacggacacgtcgtccttatgcatagatctgaattcagactttgtgaatttccagaggtgtgggtaatataatagaattcagtgagtgggcatggctgatcttgtgcaaattaaaagttatggggcataagaatagcaaaagttgaacttcttttaaaaaggaaagtaccctgagagccagtattggttgaggctcttcagtatgcccaggttggcagcactgagaaccgcaggaacggcctgttgttacaaaaaggagattgactcagctgcccttggtgcatctgactgactatgactgctgagagattccaaggacccttaatgccagggctaacctctccatgtgcagtgagacctctggaggaagtgtcatcctctggctttgtgtggtactcattatggtgcagtgcgggcatgaaatgaagacacccaaataggcttacagatacgatatgttttaaatgttcgtatttaacaaaaacatactgacactgtttggaaatggcaacaggaaagatagcaaaatgaaatactaaacatttacgaaaaagattgaacaggttacattgttttccaaggccagggggggcttgtgaaaccattcccttttgaggtggaaagggcaattcccctttcccaggccaccctttttaaagctctcn

SEQ ID NO: 30350 - DNA, 424 bp, Homo sapiens
  misc_feature 391, 404, 422, 423, 424: n = A,T,C or G
accctggtaagcagttggtggccgcccctgctggtcccttccccaacttcccaacctctccccaacctgggccgagggggagcagggtcgtagctgtggggcgaggggaggccaggccctaaagatgaacaggtgagaagcctccaaacaagatgggatgagggcatggggcacgtggtgccgaggtctctccagcctgagtgtaccgtgaacaggaagctattcgcctttgcctaaaacacttcagacaacacaactatacagaagcttttgagtcactgcaaaagaaaaccaagattgcactggaacatcccatgttaacagatattcatgacaagctggtgttgaagggtgattttgatgcttgcgaagagttgattgaaaaggctgntaatgatggcttngttcatcagtatatcagnnn

SEQ ID NO: 30351 - DNA, 2043 bp, Homo sapiens
  misc_feature 2034, 2035, 2036, 2037, 2038, 2039, 2040, 2041, 2042, 2043: n = A,T,C or G
gggcggccgcccgggcaggtacaatactgttgcgtgctccccgctctggccggtctttgttctttggaggcaagggagcacccctgcaaaggggggatccccgactttgggatatccccctcgccacccgcagacccaccttccaagagctacagcgtgtgctccataagctgaccactttgcatgtctatgaagaagaccctcgggaagcagtcagactgcactcacctcagacacactggaaaacagtaagagaggagagaaagaagcctactgaggaagaaataagaaagatctgcagggatgaaaaggaagcgctggggcagaatgaggaatctcccaaacagggtttgattactatctggcaactgtcagatctgagtttctgtcctaaaaatgcactggcaaattccctactctcataactgacccatttccttatttaaacacacacccacagtgtctatcttagcaattactgagacatgtttagtgacctttccaaatctattatctcttttgttatggatgtttccccagagctaagaaaatctttgtgtggagcagatgcgtggatgtgttgcatggatctcacatagtttatctttgattggatgctgtggtttgaggctgagggctgcttccatgctttcctctattgtgcggcaccctaaggctactcatacggagagtccagggacttgttcttgtctgggctgagagcctcatttctgcatgtgatataatggactcagctcttgatgtgctacttttatctgggtgacaaaataaaaacaatttcatttcaggctttcattcttatgcatctgcttctaccctctgagtactccctagatggatttcacatgtcaggtttttccctaggttcagggtcggagggagaagatggctttcaggtagagttggagctagtggagttgactgtggggactctggatctttgtgagtctgaagtattgcccaagcggaggaggagaaaaaggaataagaaggagaaaagccgagaccaggaggctggggcacatcggactcttctccagcaaactcaagaagaggagccttccacacagtcatcccaggcagttgctgcccccttgggccctttgctggatgaggccaaagcccctggtcagccagagctctggaatgcactgcttgctgcttgccgagctggagatgttggagtgctaaagctgcagctagctcccagccctgcagaccctagagttctgtctctgctcagtgcccccttgggctccggtggctttactctcctgcatgcagcagctgcagctggaagaggctcagtggttcgtctgctgctggaagcaggtgctgaccccactgtgcagtgagtaaaggtccccatcctgagtcattttgggtatagagaggataatttggaggttaaagttggcattggctacttggcaatattcccttggtctggttgggtgatgttgggaaaggcaggaggcaagttaaacccatttttggagtttttgcacctagggactctcgggcccggccaccttatactgttgcggctgacaaatcaacacgtaatgagttccgaaggttcatggagaagaatccagatgcctacgattacaacaaggctcaggtcatctggaataggaaggacaagcagagtgggaaggcatcacagatcctggctagatcctttctacttcttgcagttttaccaaagataacttatagggtcttatatttgaaatcctccaggtgccaggaccattgacaccagaaatggaggcacggcaggctacacggaaaagggagcagaaggcagcccggcggcaacgggaggaacagcagcagaggcagcaggagcaggaggagcgtgaacgagaagagcagcggcgatttgccgccctcagtgaccgagagaagagagctctggctgcagagcgccgactcgctgcccagttgggagcccctacctctccaatccctgactctgcaatcgtcaatactcgacgctgctggagnnnnnnnnnn

SEQ ID NO: 30352 - DNA, 426 bp, Homo sapiens
ggtggcggtcgaggtgctgctttcacggctgctttctccgtcctcccctgttactaccttgggctgtttcagcgggcgctcgcgttggtcttcgacccactttgcgtttgttcacgtgtgctcccgccgccgagtgatgatgcgggtgtgctggttggtgagacaggacagccggcaccagcgaatcagacttccacatttggaagcagttgtgattgggcgtggcccagagaccaagatcactgataagaaatgttctcgacagcaagagtttgaggaagaggcatagaaccctggcctggaaacacacaggaagagaaagagatcaggcaacagtgattctatagaaagggatgctgctcaggaagctgaggctgggacagggctggaacctgggagcaactctggccaatgctctgtgcccct

SEQ ID NO: 30353 - DNA, 495 bp, Homo sapiens
  misc_feature 493, 494, 495: n = A,T,C or G
acattttaaaaacatagaagattggaaaattggaaaaatccccatcaaaaatagtaaataacttaaaaatagcaacattttgggtatgttaccttccaatattgttttctgtgtaatttttttggtctcattttgccggagttgtaatgtatatgtagttttgtatcatgatccttttttatttttttgagacaaggtctcgctctattgcccaggctggagtacttctgaatcatacagatgctccggggatggagatggactctgaggaagtctgaccagaccctgatgctggcctctgtagggataagtggttttggagttgtagcggtggggagtggtgaggaacctttgccattgggaatggatttgaccctccagacaccatcactactcagcactccctctgcactcagaaagtcttggagataagggttcttgggatagagttcctctttgtgtgtggtgagctttccctgccatgctattgcannn

SEQ ID NO: 30354 - DNA, 2511 bp, Homo sapiens
  misc_feature 1, 2, 2505, 2506, 2507, 2508, 2509, 2510, 2511: n = A,T,C or G
nnagtcgaccccgcgtccggctgtagcaaacgccaccttttctttcaccaccaatttatatttcttaacacccatggagcaaagtgtggtgatgtttgaactgtagcctggggctctcgctcccatgggactcctcggggaatttctcagcagcaggatcgcctctgcgtccttgcagggggtggcgtctgctgggggcacatcccatcgtgcagggggaacggctgaggtcacaggctttgcctgacaagtgccactcacagctgctgtccacgtgccagccctgggacacagccctctgccatccttccacccactcggaggccagggaggcacctccgtgccacactgcaggcaggcagggccgcgcttgggatctgccgccttcttgtcagtgctgctttgactaattgcctgaggcacggccggagtgacttgctatttttagaagctaattcaggcttcagatgccatctaggtaatgaggagagagttcaggaaagctgtatctaagctccagcaaaggcggcctcttccgtaccagctgtcgctgcgtttacactgagacgagcacacagtcgggggcgtggctcaggtgtcagggctgcgctgttccacagccccctggggcagcctggcgggaccagaactcagacacgcctgggcacaaatcagcctcttgggagagctgctttgcccgcagaattcttttgccattaagcggttgatgtcattctttgaatgagtgacagtaattccccacctcagggtgggctgcgggggagattcagttggaaaagtaacccatgaggttttgtgcctctgggggtcctgaggccccacccgtgcctgggattctctaagacaaaggacaagtcttaaagccttacagcatcttaagtcttagatcacatttagagagacccggtacaggtggaacagtgcaaccctcagaattctgcactggcccttcaagaaggcagttgtgggctctttggacccttgacggggatctgtcctctgtcctcctaagcacaaagatgggaattcttcccattgcctgtttctctccccatctcggcttctacacaatgcaaagtggcccgctaactagagtccgtgttcagttttgaatacatcaaccaattattttgggaagaaaagaatctgccaaagaaactggaaatacagtttggaatcatttaatcaagcctgcatttattaatcaaagtgcacttttagatttcatccgaagtgctcaagtgaacatttcccaatgggtgttaaacttgggtgcacagactctcacgtggctcctagtctcaagtccacacccccacttcatgctcttactcttggctgagtcccatggaggcccgttagggaatcctgcaggatcagccgttgaccaggacggacggacggacggctggctggggaataccatgcttatgtcattcagagacaagcatttcttgagcgcctgctgtcggggcttagccgggtgctgctgatggtgcactggtgtaagcccagcccacagttcctgtcctcatggaatttgcagcctagtgaggaagatcctcccaagtcaaataaccacaaggtaactgcagggagagacaccgggataatttctgtgaagagaggacatggggtggctccgagagcccctgacagagggaactttgtggtcctagaaaccaggtggtgttttcctgaggaaatgacattttcctctggatcagagctgaggaaggtgcctctgtgtgtcccgtggccgctgtgacactgaccacacacctggggctggaaaataatactctctcccacagctctggagcgcaggagccatgggctgaggccagaatgtttgctccaggagcgtccctcgtggcccgttcaggtgcccagagttgcgggccttgcacgccttgtacgccttgttccctggcgcctcctccttccatgtgggtgtgcagcatcccgctccagggccttcagcctctgcgcccctcatctgctgatgcaggtgatggcatttaaggcccacctgggtactcctaggattcacctttatcaccgcatgagggagcattcccaggttccagggattagggataggactgggattcctttgggggctgctctcccgcccaccactgtgccggaatgtgatgcacacagcggccagcatatccaaaggccccaggaggacctggggtggctggaacaggacctggtgccgggagcaggcggggccggggattcccgacaaaggcttgatgtgtacttgaagtgagcaaagggttttgaataaaccaagaactggatcagatttatgttttttatagatggggtcctttctgtgtgaacggattggagggtcccggggtgggagctgaggcccaggaagagggcgttgcagccggactgatgtatgggtgggaaggcggccgatgcatttctttgccatttttttacccgccgagcttgggtcctcannnnnnn

SEQ ID NO: 30355 - DNA, 2564 bp, Homo sapiens
  misc_feature 1: n = A,T,C or G
ncgtccgcttgagcccaggagttcaagaccagcctgggcaacatagcgacaccccttctccacaaatgatacaaaaattagctgggcatgatggcgcgtgcctgtaatctcagctattcgggaggctgaggcaggaggattacctgagcccagaggtcgagggtgcagtgagtcatgatcatactactgcactccagcctgggtgatggaatgagaccgtgtctcaaaagaaaaaaaagacttggtttctaaaatgtaccagaagaggtggaattatttggttctgcttgtaggcgtggatatgattctaataaggttttttgagttcagagggtccccagaaatcctgaaggttctcgggttcttaagctctgtgtgtagtctataattgttgtaaacttggtgaagtatcttctcaggcctgggcttagggggtgagtgggtgtttctggtgacttgcgggatggggaatgagagctaggtgggagctgtgctggtgtcagtcagccctgtcctctatgaagggctctgctctgcggttggaaccctgagttacccagaggtcttcccatcctgagccaggtgataacgtggtgctggaccagacctacctgtggcagggtgttcgagtggcggctggagcacagatccatcagtctctgctttgtgacaatgctgaggtcaaggaacgagtgacactgaaaccacgctctgtcctcacttcccaggtgagacctgatctatactgtgcacaggccctgaattgcatggcagtcacactgagccagaaggggcattatttccacccataatcctgtctaaaaaagttgctctcattatcaggatgcacttttcctccacaccctaatggttctgtgtttttttttccccttaggtggtcgtgggcccaaatatcacgctgcctgagggctcggtgatctctttgcaccctccagatgcagaggaagatgaagatgatggcgagttcagtgatgattctggggctgaccaagaaaaggacaaagtgaagatgaaaggttacaatccagcagaagtaggagctgctggcaagggctacctctggaaagctgcaggcatgaacatggaggaagaggaggaactgcagcagaatctgtggggactcaagatcaacatggaagaagagagtgaaagtgaaagtgagcaaagtatggattctgaggagccggacagccggggaggctcccctcagatggatgacatcaaagtgttccagaatgaagttttaggaacactacagcggggcaaagaggagaacatttcttgtgacaatctcgtcctggaaatcaactctctcaagtaagagcagcccctccctgttctcctcggggtgatcccgggaaggtagaggctttctcgtaagtgttttgtctccaaataggaacctattccttcgacatcccaaatggaaagaccagtagtatttggagcagggagagcattattaagttctagcctcagcatagactttctccttcctaaaccctccccttccatattgttccatccagattcctctccaatgtctatcaaagtcatagttctaagcctgctgaaaggccagtgaaggccctggtgtcaccccagtctccccacaggtatgcctataacgtaagtctaaaggaggtgatgcaggtactgagccacgtggtcctggagttccccctgcaacagatggattccccggctttgactcaaagccgctactgtgcccctgctgcttcctctgctaaaggcctggagccctgttttttaggaactacataagggcgcgcagtcgaccatttgtgaagcgttagcaggcattgaggacttttttcctagagcatgaagctcttggttttccatggcaaggtactggtggtttcttaccgtgggggtccctggctgaggaaacaattctgagctggttcagccaaagagatacaactgacaagggccagcagttgcgcaagaatcaacagctgcagaggttcatccagtggctaaaagaggcagaagaggagtcatctgaagatgactgaagtcacactgcctgctcctttgggtgtgattgagtgccctcctggctcctgggctgggacaagtgaggaactagctgcagagggatgagtgaccaccatccaggctgagactgaaaggagcagaggctggaactacagtattctttcccctgctagcaaccatgtgcctcccatcctgactgtggagatgggatgtggaagtggggctggaacagagcttctgactagggaggagctaatcatgccctgcagttgaccgatggccagacgaacagcatggcgctgccgttctccactacggtacacgcatgaccatctggtccggacgtgcttgatatctgaacattacctgagtagtgaggtatttccactaacctctgagttgagacggaacgccatcaacaagagcctgtccttatcataaccgcacaacgttacacctgagacgggaactcatctaccgccgtggcgccctggaatggccttcgatctgccctggtg

SEQ ID NO: 30356 - DNA, 447 bp, Homo sapiens
acctttgttcctgaatatcaagtaatagggctcatctctgtgactgcttgcgacaagcacatagggcaactcattaccaactgctcattataaatgctgagctcttgagttcctgaggagggggtgggaatcttaggatttgttgccagatttgaaagtcactggaacttgcatattttcattttaatcctaagtgttattacgcaccagttggggttcacccttcatccctcacatttaattgtctgatatagaatagtgttgtgtccactgccccgctagacggctttcttaggggaattttcttctggttgtttcacaagacagattctgtccttgtcacccgggacagaaaactcagtcttttcaccctcattcagatgaagggactcaggacaggctctgtgacttacagggacccaatcaattcacaatgagaaattaccg

SEQ ID NO: 30357 - DNA, 1365 bp, Homo sapiens
  misc_feature 1, 2, 3, 4, 5, 6, 7, 8, 9, 1359, 1360, 1361, 1362, 1363,1364, 1365: n = A,T,C or G
nnnnnnnnnccagtatctctcacgtaaaaaataaaatttatttctttttacacaagcagcaaggcatgccctatcctgacataatttcattccaaatggaaatcagatcaaggccctaaagacacagtgtgaaggtgagagggttgccttggccagcctggcctggaggggatgctgaccgggccgccttcctcctgcagctctgacctggtcattcccttccaggagtgacgccagctcccggaggtgctccagctgctggagacgattgttcgaggtgaggaccagcctgtgcacctcctcatccactcggtcgtacaggcttgtggcggcctccagggtgtcccggctgtcttctgtgccaagctcttctctcctcagccgcgccaggacggtgcccccctccagcctgagagacacaagcagtgggtcttccaggacaagcttcatcatcgtctcatgctggtcaattaactcggcgacttcctgggctgttcttggggttctgtgggtgttcagggagcagaatgaattctgtaggaaaatgatggcttcttcacagtttgcagcgaagtgttccagcctctgacggaagcagatccagtcaccatggctgtagggaaaggagccgtcgaggtctgcggtcagctggcagctgtcaacaaatttgtgcacggccttcagggagctcacgacctcacactgaattattgcatccttgtcaggcctaaatgcagattctttatctacccaacagcaagatactatgaattataggagatgtgcttgttctgcaatcctgagagggcctgggagacggcaggggcagctggactcctgcgtgcatccaccaggacaaccagccccaggtcccggacctctttcctggggatgctatggaagtacagcagcaggcgggtcagctcagcacaggacgagtgttccctggtccagagcaggctcctggtgcggaccatgcaccactgctctgccatgacaggtctcgggtccctgggagggtgacgaccccaggactgcagcagctcctgactgacagtccagcacctgcttgggcacctggctggggaagtctcctgtgccagggtggccacccttcttgctcggggtgtggctgccgggcaggcacatcaggaaggcccagctggggttgtggcaatggaggctgccagccgtctgtgctgacacaggctgaggatgcaagaacagtcttcactctttggtgcagccagggaccctctactgggacacagtttggggtcaccacacagcttgtcctcctagcggcccccaggcactggagcctgctgagtggtgggaggtgtggcaggctgcagcacnnnnnnn

SEQ ID NO: 30358 - DNA, 2822 bp, Homo sapiens
  misc_feature 1, 2, 91, 124, 127, 2781, 2820, 2821, 2822: n = A,T,C or G
nngaacgcggtggtgcagtgtctcagcaacaccgacctgctggccgagttcctggcgctggggcttaccgggcggcgcgggcacgccgagngtcaccgagcagctggcggcgatgttgcgcacntcntggactcgcgaatacacgccccaactttccgcggagttcaagaatgcaatttccaagtacggctctcagttccaaggcaattcccagcacgacgcctggaattcctgctctggttgctggatcgtgtacatgaggacctggagggttcatcccgaagggccggtgtcggagaaagcttccgcctgaagccactaaaacctctgagaactgcctgtcaccaatcagctcagcttcctctaggtcaaagctttgtgcaaagccactttcaagcacaatatagatcttccttgacttgtccccactgcctgaaacagagcaacacctttgatcctttcctggtgtgtcctacctatcccctggcgccagacgaggttcttgagtgtcaccttggtcttcccctctaagagccagcggttcctgcgggttggcctggccgtgccgatcctcagcacagtggcagccctgaggaagatggttgcagaggaaggaggcgtccctgcagatgaggtgatcttggttgaactgtatcccagtggattccagcggtctttctttgatgaagaggacctgaataccatcgcagagggagataatgtgtatgcctttcaagttcctccctcacccagccaggggactctctcagctcatccactgggtctgtcggcctccccacgcctggcagcccgtgagggccagcgattctccctctctctccacagtgagagcaaggtgctaatcctcttctgtaacttggtggggtcagggcagcaggctagcaggtttgggccacccttcctgataagggaagacagagctgtttcctgggcccagctccagcagtctatcctcagcaaggtccgccatcttatgaagagtgaggcccctgtacagaacctggggtctctgttctccatccgcgttgtgggactctctgtggcctgcagctatttgtctccgaaggacagtcggcccctctgtcactgggcagttgacagggttttgcatctcaggaggccaggaggccctccacatgtcaagctggcggtggagtgggatagctctgtcaaggagcgcctgttcgggagcctccaggaggagcgagcgcacgatgccgacagtgtgtggcagcagcagcaggcgcatcagcagcacagctgtaccttggatgaatgttttcagttctacaccaaggaggagcagctggcccaggatgacgcctggaagtgtcctcactgccaagtcctgcagcaggggatggtgaagctgagtttgtggacgctgcctgacatcctcatcatccacctcaaaaggttctgccaggtgggcgagagaatgaaacaagctctccacgctggtgaagtttccgctctctggactcaacgtggctccccatgtggcccagagaagcaccagccctgaggcaggactgggcccctggccttcctggaagcagccggactgcctgcccaccagttacccgctggacttcctgtacgacctgtttgccgtctgcaaccaccatggcaacctgcaaggtgggcattacacagcctactgccggaactctctggatggccagtggtacagttatgatgacagcacggtggaaccgcttcgagaagatgaggtcaacaccagaggggcttatatcctgttctatcagaagcggaacagcatccctccctggtcagccagcagctccatgagaggctctaccagctcctccctgtctgatcactggctcttacggctcgggagccacgctggcagcacaaggggaagcctgctgtcctggagctctgccccctgcccctccctgccccaggttcctgactctcccatcttcaccaacagcctctgcaatcaggaaaagggagggttggagcccaggcgtttggtacggggcgtgaaaggcagaagcattagcatgaaggcacccaccacttcccgagccaagcagggaccattcaagaccatgcctctgcggtggtcctttggatccaaggagaaaccaccaggtgcctccgtcgagttggtggagtacttggaatccagacgaagacctcggtccacgagccagtccattgtgtcgctgttgacgggcactgcgggtgaggatgagaagtcagcatcgccgaggtccaacgtcgcccttcctgctaacagcgaagatggtgggcgggccattgaaagaggtccagccggggtgccctgtccctcggctcaacccaaccactgtctggcccctggaaactcagatggtccaaacacagcaaggaaactcaaggaatatgcagggcaggacatcaagcttcccagaaagtttgacctgcctctcactgtgatgccttcagtggagcatgagaaaccagctcgaccggagggccagaaggccatgaactggaaggagagcttccagatgggaagcaaaagcagcccaccctccccctatatgggattctctggaaacagcaaagacagtcgccgaggcacctctgagctagacagacccctgcaggggacactcacccttctgaggtccgtgtttcggaagaaggagaacaggaggaatgagagggcagaggtctctccacaggtgccccccgtctccctcggtgagttggcgggctgagccctgccatggacgggcaggntccaggctcacctcctgccctcaggatcccagagggccnnn

SEQ ID NO: 30359 - DNA, 878 bp, Homo sapiens
  misc_feature 1, 625, 878: n = A,T,C or G
nagtcacggcggtgagagggctgagtgacgggttaccccaaaccatacggagggccagagagtcacggcgggtctgctgggagccagccattgaaggtgctggagcagagagagatatggtatggagctgatccctatgatgaaagatctggacccttgtgtagatgttccgtgaagcaggaggttttcgtaacaccccagggcctgtaaggtttggtgtttccctttcaagatgccactttcagactttattctggctctgaaggacaatccctactttggggctggatttgggctggtgggtgtgggcacagccctggccctggccccggaagggtgtccaactgggcctggtggcattccggcgccattacatgatcacactggaaagtccctgctcgagacaggagctatgcctggtttgcttagctggctcacccgccacagtacccgtactcagcacctcagtgtcgagacttcgtaccttcagcatgagagtggccgcatttccactaagtttgaattgtccccagccctggaaaccattttatctggtatcgggggaaatggattcggggtagaaacgaagtccgagagatgcagattggatagacttgcagacggnggactcctggtaatcctgtcaccttcacggtcctggcgctggcccgaagtttcttccaccatcctggtggagtcgaggagtacttgcgccggaggaggggaaccgtgtgtcacggtggggcctgaaggggccttgggatcagcgcggaccacgatctgggttccaccgggcgtgggcgctgtcgggctccgcatatcgtccccgggtcgcgagggcttaacagggccttggccgggggaaggtaacgcgcgan

SEQ ID NO: 30360 - DNA, 447 bp, Homo sapiens
cccgggtgtgggcacctgtaatctcagttacttgggaggctgaggcaggagaatcacttgaacccgggaggcagaagttgcagtcagctgagatttcatcattgcactccagcctggactccaagggcaaagctctttagtgggcacatcagcacattccacgattaatcacagctcctcacagttgcctctaagtagtgacactaccgaaggacgggagttcctcctcctgcagtctgaggacttgcactctctaacggagtagattccaataaacttgcttccttcactgcgctctgtgactcgcctccaattcttccctgaagtagacccaagaaccctctcttggggtctggatcgagacccctttttccagtaacacaacccgcggggccgcctcccgcccaccctcaggtgcaggagaccccgggccatgcatccttccgg

SEQ ID NO: 30361 - DNA, 653 bp, Homo sapiens
  misc_feature 1, 2, 640, 641, 642, 643, 644, 645, 646, 647, 648, 649, 650,651, 652, 653: n = A,T,C or G
nnagctgtttcctgtgaggaaaagaacggcacacaacgcgggggcatacttgtttcctgtggtaaaaaaaacagccacgacctcttcctgctcgggctaaacggttacatgaaccaccgctctggggaacatcatgggctgtcatgggccatcatgaccatcccaggcaatgctaccagcatccccagctttgacctgctgcaaccgccttgcccgcttgggaagaacaaattgtgcgacgttccagccataccagaatctgacctggcaaggggaagcccaagaattttgctactaagaatttggagatagcatctgtggacaagtggagccaggtagaggaaaagggtttgggcgttgctaggctgaaagggaagccacaccactggccttcccttccccagggcccccaagggtgtctcatgctacaagaagaggcatgagacaggccccagggcttctggctaggtgaagaaaattgaaatcagccagcacgccaagtacacttgctctttctgcctgtcaacctcgcctggctccagcctcccctacccagggtctctgcacagtgaccttcacagcagttgttggagtggtttaaagagctggtgtttgggtactcaataaaccctcactgacnnnnnnnnnnnnnn

SEQ ID NO: 30362 - DNA, 4412 bp, Homo sapiens
  misc_feature 1, 4412: n = A,T,C or G
ngcgtccggccgacaagtgccgcggcgacggcgcacccggtggccgcccggacctgcttattgctgtcaagtcggtggcagaggacttcgagcggcgccaagccgtgcgccagacgtggggtgcggagggtcgcgtgcagggggcgcaggctcgggcggggccgacgaagttggggagggcgctcgaacccactgtcgcgccctgctgcgggccgaaagccttgcgtactcctgggtcctgctctgggccttcgacgacaccttttttaacctaacgctcaaggagatccactttctagcctgggcctcagctttctgccccgacgtgcgcttcgtttttaagggcgacgcagatgtgttcgtgaacgtgggaaatctcctggagttcctggcgccgcgggacccggcgcaagacctgcttgctggtgacgtaattgtgcatgcgcggcccatccgcacgcgggctagcaagtactacatccccgaggccgtgtacggcctgcccgcctatccggcctacgcgggcggcggtggctttgtgctttccggggccacgctgcaccgcctggctggcgcctgtgcgcaggtcgagctcttccccatcgacgacgtctttctgggcatgtgtctgcagcgcctgcggctcacgcccgagcctcaccctgccttccgcacctttggcatcccccagccttcagccgcgccgcatttgagcaccttcgacccctgcttttaccgtgagctggttgtagtgcacgggctctcggccgctgacatctggcttatgtggcgcctgctgcacgggccgcatgggccagcctgtgcgcatccacagcctgtcgctgcaggccccttccaatgggactcctagctccccactacagccccaagctcctaactcagacccagaatggagccggtttcccagattattgccgtgtatgtggttcttccctgatcaccaggtgcctgtctccacaggatcccaggggatgggggttaagcttggctcctggcggtccaccctgctggaaccagttgaaacccgtgtaatggtgaccctttgagcgagccaaggctgggtggtagatgaccatctcttgtccaacaggtcccagagcagtggatatgtctggtcctcctagtagcacagaggtgtgttctggtgtggtggcagggacttagggaatcctaccactctgctggatttggaaccccctaggctgacgcggacgtatgcagaggctctcaaggcgtggaggggctccggccgccacagcctgaattcatgaacctggcaggcactttgccatagctcatctgaaaacagatattatgcttcccacaacctctcctgggcccaggtgtggctgagcaccagggatggagccacacataagggacaaatgagtgcacggtcctacctagtctttcctcacctcctgaactcacacaacaatgccagtctcccactggaggctgtatcccctcagaggagccaaggaatgtcttcccctgagatgccaccactattaatttccccatatgcttcaaccacccccttgctcaaaaaaccaatacccacacttaccttaatacaaacatcccagcaacagcacatggcaggccattgctgagggcacaggtgctttattggagaggggatgtgggcaggggataaggaaggttcccccattccaggaggatgggaacagtcctggctgcccctgacagtggggatatgcaaggggctctggccaggccacagtccaaatgggaagacaccagtcagtcacaaaagtcgggagcgccacacaaacctggctataaggcccaggaaccatataggagcctgagacaggtcccctgcacattcatcattaaactatacaggatgaggctgtacatgagttaattacaaaagagtcatatttacaaaaatctgtacacacatttgaaaaactcacaaaattgtcatctatgtatcacaagttgctagaccaaaatattaaaaatgggataaaattatacatttttcttctcagttcttttcaaaaggattaatatttttaaagcacatatatgctactttccattagcaagacccatgaagggactgagcagcccagccttccttgagcccccagaggctttgagccatgaaatggcccagccaggggccagtgcccagggttggggcagagagccagcccacagtgcagaacagaatgctgaaacacaacaaaagtaggaagatgtctttggctaaaactttggcattaaataaaagaggcaaacaggatggaaacatgcagccctgccagccaggatggggcagagcaggggcacaggcaatcttgaaagctgactccaacaggggtgagaaccaggcctgggcatgtacctggatggtagaaagctgtgtttcaaccagtttggtgtgcccaggcagggagcgcgtgcaagaaaggaacagggaagggcaggtgggccaccctggccacagccagctcatcaagtaactaaagtggatgtagtgcaaatgtcgcaaccaagtactatggacacgctacctgcttgccttaagggtcatgtggcaatgtggagccaaaggcaggaccttgtccttatcctgggtgcctgtgtcctcagtcacagaaagagccccaagtcttcccaatgtgcatgggacaagggttgacctctcctgcctccttgttagttgagagctcctgggtccaggaatcaaggctcaaactttgtgcttctctttgcagtctgtgtcccctgctggcaccagcaggccaaagatggacagaagaatatctgggccactcagcccatggcagagcacccagcctgagcccaacctcagaacatcacaacagcccttcagcactggccaggtgtccaagaaaacccacagggtggtacagaggcccactgagcaggatgtgatgcacagttccacgggacagaggggcatgggtggtggtgtccctaggggagttccgctgttctcaggtggctaccaggcctgggggggccatacagggtcaccgaggcaatgtggttgttctgcatgacctcaaagatcattcgctgaagaccaaagcagaatgtggaaccaaatgggttggtgttgtttggggaggaagacctgtgcaggacaacaggcttctccacagggtggcccaggagctcctggatgttgtcccacttgctgtaggtcgtgcatgtttctgtctgaccatctgcgttttctttctttatggctagtgggatcttgaactcacagcgatgataaatgttgaaattataatgcccagggtaattggtgtgtagaacaaacttcttcactttgtgtgtattcgcatcaaagaggatgtccactccaagagtgaagtagttaaaaaagtagtcattacacttcgatggaacttgtttatgaggggaaggagaatgaattttcatcttgtcttctgatttatagaagactttgtgtggagagccaagcatgctaagaacatcttggcaggaatcaccaaaatacactgaacgttcaaatacccgcatcttggcatctgctaataggccaggtccacaacctgcagcaagtaggcgaagtcgtaaacctgcaggtccagttccatctcgaagaacatctacactctcagcatagacattgcccaggaaacagctcagaggcatcatgggagccttggtatcctgcaggctgttgccactgtagatgtacattcgttttacagttgctccatggggtatctggagagaagccaggccatgggcaaaattgggctcatactttggagcctcagtccatgagtctaactgaaaagagaaagacagtcctctgaagttgagatggaagagctgctcagcggagttgtacactccaggatgggttgcgccaaaagactggtcaatctgttcaatggtaggagctatggcctgagaattaaaatgcacgccacaatattttaactttactttagtcaaatcacatacttcgatcaccttaagtctctgattgaaagcatcaaacattagtttgatcccgtcctgagtcaggttaagaatgaggtcatggcttagaggagactgttcactgtagagaacctggacgtttttgatgatgcgacagtgcttctgaagaatggctactgcctgagccagaggcattcccagcgtgaattcccattgctcgttccccagagagcgttcgggcactacctccaggtccagcattggttcggctcgcctggcccgggcggcctccctgcggcagcgcagaagggacccgagctgcagcagccgcggcagcggcggcaacgacggccccacgcgtccgcggacgcgcgctttccacctcatcccggcggcagcggcan

SEQ ID NO: 30363 - DNA, 821 bp, Homo sapiens
  misc_feature 810, 811, 812, 813, 814, 815, 816, 817, 818, 819, 820, 821: n = A,T,C or G
cagccgcagcctggaggagctgctgctcgacgccaaccagctgcgcgagctgcccaagccttttttccggctgctgaacttgcgcaagctgggcctgagcgacaacgagatccagcggttgcctcccgaggtggccaacttcatgcagctggtggagctggacgtgtcccggaacgatatccctgagatcccggagagcatcaagttctgcaaggctctggagatcgcggacttcagcgggaaccccctctccaggctccctgatggcttcactcagctgcgcagcctggctcacctggccctgaatgatgtgtctctgcaggcactgcccggggacgtgggcaacctcgccaacctggtgaccctggagctccgggagaacctgctcaagtccctgccagcgtccctgtcatttctggtcaagctggaacagctggatctgggaggcaacgatctggaagtgctgccagacactctgggggctctgcccaatcttcgggagctgtggcttgaccggaaccagctgtcagcactgcccccggagctcgggaacctgcggcgcctggtgtgcctggacgtgtcggaaaaccggctggaggagctgcctgctgagctcggcgggctggtgctgctcactgacctgctgctgtcccagaacctgctgcggaggctgtccgacggcatcggtcagctgaagcagctatccatcctaaaggtagaccagaatcggctgtgcgaggtgactgaggccatcggggactgtgagaacctctctgagctgatgctcaccgagaacctgctgatggcccnnnnnnnnnnnn

SEQ ID NO: 30364 - DNA, 1831 bp, Homo sapiens
  misc_feature 1803, 1804, 1805, 1806, 1807, 1808, 1809, 1810, 1811, 1812,1813, 1814, 1815, 1816, 1817, 1818, 1819, 1820, 1821, 1822,1823, 1824, 1825, 1826, 1827, 1828, 1829, 1830, 1831: n = A,T,C or G
cactagcacaccagcaggaagctgaacagaaggctggaggtgccacggtgacaaggacgggatcctgtcggaggtgaaaggtgtagcagtcactcggcctacacccacagcatcgaccttgtgaacccagcgacctgactgccttgggagaattgaagcgaatgagagtggggagtgtgagaggtgcgtttggtgcagcatttctggcatgggaacagaactggccaggaggaagtgacgtctgggttctgcccgcacacattcctcgccaccttcttggtgtctgagaacctccagcttcacctccttttctggacccgagggcctggcggagcttccagctgggaccagacctccatggatccactccagaaacggaatccagcatcgccttccaaatcttccccgatgacagctgcagagacttcccaggaaggtccagcgccctctcagccttcgtactcagaacagccgatgatgggcctcagtaacctgagccccggtcctggccccagccaggccgtgcctctcccagaggggctgctccgccagcggtacagagaggagaagaccctggaagagcggcggtgggagaggctggagttccttcagaggaagaaagcattcctgcggcatgtgaggaggagacaccgcgatcacatggccccctatgctgttgggagggaagccagaatctccccattaggtgacagaagtcagaatcgattccgatgtgaatgtcgatactgccagagccacaggccgaatctttctgggatccctggggagagtaacagggccccacatccctcctcctgggagacgctggtgcagggcctcagtggcttgactctcagcctaggcaccaaccagcccgggcctctgcctgaagcggcactccagccacaggagacagaggagaagcgccagcgagagaggcagcaggagagcaaaataatgtttcagaggctgctcaagcagtggttagaggaaaactgagacgtgcacccccatgggatggagacccgaagggactcagacggagccgccgtgttggcagcgcctgggtgtgggcccattttggggaccaaacagcaagctgtggtcggatgagtgccaggacctgtgtaccgggacacgtgggagtcctcccagcatgatgcttgactgacccgaggaaggtcctcatgtttcgtgcctgtcattctcggatggctgtgaggcattccttggcaagggacgctgcgtaccagcggtcctcaccgcatctcacatggctcctgtgatgcatgttgtcgctttcccacccgggatctccatctctcttcccttcctgctgtcagtaagagatcacatgtctgtgtagtgtgaatgccttgtcgctgtcctgtgcttttgcaccattgagttgactgcctctgagaagcagcactaggcctgttgaaatgcaatgtgctgccctgagatccagtttcaagaatgggcaggtaaacgcagtgtgggaaaggaatgtggaatgagaacttggtggttcaccgctgtactatttgtgtaaatgtttacgtatgtgataagctacatgtatgtaaatgttgcaatacccctaacagtcgagtagtagtctcccttacaggaatttttgacggggttcctcatcatcaataccaaataaatatatgtaggaatggaaaaaaaaaaaaaaaaaaaaaaaaaaaaaaaaaaaaaaaaaaaaaaaaaaaaaaaaaaaaaaaaaaaaaaaaaaaaaaaaaaaaaaaaaaaaaaaaaaaaaaaaaaaaaaaaaannnnnnnnnnnnnnnnnnnnnnnnnnnnn

SEQ ID NO: 30365 - DNA, 262 bp, Homo sapiens; identical to SEQ ID NO: 16103

SEQ ID NO: 30366 - DNA, 1478 bp, Homo sapiens
  misc_feature 1, 1472, 1473, 1474, 1475, 1476, 1477, 1478: n = A,T,C or G
ngagacgagtctcatctgtcacccaggctggagtgcaatggcatggtctcggctcactgcaacctccgcctcctgggttcaagctattctgcctcagcctcccaaggagccaggactacaggtgcatgccaccacgcccggctaatttttgtattttttagtagagacagggtttcacccagcacattgagacaagctggtttcaaactcctgaccttgtggtccgcccgccccggcctcccagagtgctgggattacaggcgtgagccaccgcgcccatctcccctgcaatgtctttagttagaccttttccaccatcatgtctaactgggctacggtttggggaaagtgtccaaattagtccgtgttatcctaaaaggggtgtgccccggattagcagggccagggctagggtgagacaaatgaggcacctggggcatacatttaagttggtgcttgcttgcaggtgccaagagagtgcttccttgggtttacccccgtggtgcctcctttacctcattctggccccagccctggggttagagtcgcaccagtgtggtccaagtggcataattatctccctaaatgcttgggcagcatcagctttcagtagctgtgccccatgggaggcacattaagctagtggcaagttgagactgcagacctcagcttaatatcagttgttgcccaagacagatctcaccccacatcttcatgacaggcctaacaacaaggcactttgcccttaatcctctactactgcctgctcttcattttgggccaactgtacagctcattttgagatagtagctgatcatttttctgatcagttaactttgtcttattaagcaaaatggagaatataatgttgggaaataagtgtgttgattaaaagaaagtatccccttctaccatcttccatttgtgtctgggttgtgctgggtaaagttctagacttactaacgcagacttcattttggtccggtttccacagcatgcctcgggcatcagtgtccaggagtagctgtatttgaggtttccttcactctggtaggttcctgattcctgatgaaaataacttgaaaaaaaaataattatactactgatcctcttttgggataatgaaattgcgaaggaatgttgttgattataacttttattttttaatgtacagatgtactgtctctcattgagcactgatagaatttatttttctttcaatagtttaaaatcacttatgtggagacacatacttaagtgtgttcaactcgttttcttcccacatatctagtgtgacctttaaaaaccacaactttattttggacattaaatgtgcaatattcactacttattcattgttccacatttttcatacttgtacaaagggtaagtttttatataatggtgagaaacaggaagaaatgacaactggttaagtaaaattctgcaaataaactagattcgaatttaannnnnnn

SEQ ID NO: 30367 - DNA, 778 bp, Homo sapiens
ggccattaagtctctcattagagatgtttgctatgtggttaacaaaaattggtgatcttgaattcattttatgtttataatttttgtgaagtttctctaccagtgggtaatgtagggctcgcaaaggtatagtaaagctaggatttgcagtcactgtattgtcatgctaagaccctgttttggatgcttgtgttctctactgtagatgttttaaggatcacgaccactgctgtgtattaaaatcatgcagagtaagggtgctgccctgtgtcttctgttctcacagagatctgctccacaaagagagggacttacatctaggtttgatcagggattgccgtaatttttctgtaaaggaccagatagtaaatatttacagctttatgggcctcatttgatctgcttctgcagtgaaaaagcagccacggacaatattcatagcaatagggagtaggctggatttggcccctgagccaaactacaggggtagtttgttgacccctggtctatatgcagagtgagggagagagatggatttaaacccatcttccttaggccacttcatgtgccctttcatacacattagctcttggattagcagtacagggatggttcagacagtggcctcaacctcaatggcttcatcctcctcctccagcaggctgtaggaagcatggctctggcaaggccgctgcagggggtgggccaacagtttcgccatgcagttgtgcaactccagggctggcccagccagtgccacctcatacttgtagctggt

SEQ ID NO: 30368 - DNA, 1832 bp, Homo sapiens; identical to SEQ ID NO: 30096

SEQ ID NO: 30369 - DNA, 405 bp, Homo sapiens; identical to SEQ ID NO: 30100
  misc_feature 1: n = A,T,C or G

SEQ ID NO: 30370 - DNA, 1178 bp, Homo sapiens; identical to SEQ ID NO: 30159
  misc_feature 1, 2, 1107, 1134, 1144, 1167, 1168, 1169, 1170, 1171, 1172,1173, 1174, 1175, 1176, 1177, 1178: n = A,T,C or G

SEQ ID NO: 30371 - DNA, 841 bp, Homo sapiens; identical to SEQ ID NO: 22562

SEQ ID NO: 30372 - DNA, 518 bp, Homo sapiens; identical to SEQ ID NO: 28093
  misc_feature 1, 2: n = A,T,C or G

SEQ ID NO: 30373 - DNA, 475 bp, Homo sapiens; identical to SEQ ID NO: 21297

SEQ ID NO: 30374 - DNA, 450 bp, Homo sapiens
ctatagggcgaattggagctccaccgcggtggcggccgaggtacatgactgtgtgtgtatgtgtgtgtgtgtataattctttgttgttttggtaaaatcagaggagtgggttataagtgctaatttccttgggaaattaatgaactagggcaagtatagcatcccatgcataaaattagcacagggacatcagaattgtatgggtcttcttttttctttttttctttttttttgagatggagtctcgctctgttgccaggtttgagtgcagtggcgcaatctcagctcagtgcaacctccgcctcccaggtttaaccgattcccctgccttagcctttcgagtagctgggactacaggtgcacgccaccactcccagctaaatttttgtattttagtagagatggggtttcgcctgtatgggtcttttcttggaatgggggttacacccc

SEQ ID NO: 30375 - DNA, 473 bp, Homo sapiens
  misc_feature 78: n = A,T,C or G
ggcgaattttagctccaccgccgtggcggccgcccgggcatgttacaggcacgtgtcaccatgcctggataattcttngatttttttggtagagatggggtttcaccatgttggccaggctggtctcattaaactccgacctcaggtgatccacctgccttggcctcccaaagtcctgggattataggcgtgagccaccacatgcggcaaccccacagttttaacagattgtttatactttgatttggttttgcagatgatatgcatactaaggctttaaaaaattatctaaatgtttaataattttttgtttttgtgattgggaattatttacttctgggagtcatgatcctaaagaaacagtaaattggctgtttagagtgggaaaaaaaaacttcaggtaactttgttacttaaatcctgtctcttaattcataggttaagaccttaattttgcctctctcggtttatga

SEQ ID NO: 30376 - DNA, 370 bp, Homo sapiens
tcactatagggcgaattggtgctccaccgcggtggcggccgaggtaccacgacatctcgggagatacttcaggggattaccggaagattctgctgaagatctgtggtggcaatgactgaacagtgactggtgactcacttctgcccacctgccggcaacaccagtgccaggaaagggccaaaagaatgtctgtttctaacaaatccacaaatagccccgagattcaccgtcctagagcttaggcctgtcttccacccctcctgacccgtatagtgtgccacaggacctgggtcggtctagaactctctcaggatgccttttctaccccatccctcacagcctcttgctgctaaaataggatgttttcatt

SEQ ID NO: 30377 - DNA, 234 bp, Homo sapiens
ctcactatagggcgaattggagctccaccgcggtggcggccgaggtaccatatagatcaaaagctttgtaaccacgggaaaaaataaactcttccattccttaaagaatagaatagtttgtccctctcatgggaattgggctgtatgtatattggtcttcctccttagaattttagagatacaagagtttctacctagaactttttaatggacacaatttttcaccaacctttc

SEQ ID NO: 30378 - DNA, 486 bp, Homo sapiens
atagggcgatattggagctccaccgcggtggcggccgcccggtctggtacctcaacatatttgccttgatagcttaacttagcttttctaatataccttaatagagttaagttatgtaatactcaattctgatttggaaaagtctaacttttcttttagctctggttaggatgagtgtaaggtgggatgagtggggttttgtttctgcatgtgtccacactaattttaaacacacatctgaacaatagcttttcattatctaagttgaatatcttagatactgaatattactaaaatttactaacaatattaatactaaataataccatcttatacttatgcaaaatgttacatttgcagagctccttctcacacgtttgaccattacaactttctaagacaggctggacaaggaaaactggctctggctttcagaggagaagaggtgtctaagtaacctgcggcttttctgctgagcagctgtac

SEQ ID NO: 30379 - DNA, 394 bp, Homo sapiens
gctccaccgcggtggcggccgaggtactgttaacttctccccctcctggatctttgttttactaaatcagccctaaccctttctcttcagtctctttctcttgactttcccctagatcttgcccctagaccatcactcagctggttcctcttcattgcctccatcttagttcaaatgtttcttctttggacagtttggagttttgctccccctcttccctgccattctatagtaggttttttttttcttaaaatagtgcatatcatctgggtgcgggggctcatgcctataatcccagcactttgggaggctgagggggtgtatcacgaggttaggagataaagaccatcctggccaacatggtaaaaccctgtctctactaaaaatccaaaaa

SEQ ID NO: 30380 - DNA, 386 bp, Homo sapiens
acgactcactatagggcgaattggagctccaccgcggtggcggccgcccgggcaggtacagtcgtttgagctccatggaaaacagtggggaaatgtttcagtggcatttactgtgagtatttcttgagtttggcaagtccactacagcatgctcattggtggtcgagggcaggagaaaggggaggtcttggtgcattgctctcaagggagggcttttgcttctagtgccttccccaagacctcatggaccgttgacttgtttcatcatgtggagcttcatcttatgcaagctgaagaaacagtatgccggtttcattgctgcaagataattgaccccttgtgacttcatccagaaggtagcagcaacatgtgctcttagtgaaaga

SEQ ID NO: 30381 - DNA, 443 bp, Homo sapiens
gtttacgtgattgagtggacatgatcactctggataccacaatgaatgaaatttaaatggactaatccaatgaatgaaatataaaatgaaaataaaatgagaaatgtaagatacaggaaaagaatacttatttttgaaatcacagtgtggtggtattggctgataaaacctatctaatagtatcaataggttctttcacattctccaagggtcatagctgtacattaactgaggctaaattgaaaattatggtagactccagatttagaattgcactatctcacttatcatataaataactaaaccatattctaacatataatttttatttaatcatttatattacaaataatatagaaatattcagaacaaaagtggcatgttatacacaaatctaacctgtattgcacaatttatacaatatatgcaattctactctacaa

SEQ ID NO: 30382 - DNA, 521 bp, Homo sapiens
ctactatagggcgaattggagctccaccgcggaggcggccgaggtactttttttttcttttcttttcttttttttgatacagagtcttagtcacccagactagaggtcagtggcaggatctcagctcactgcaacctctgcctcctgggctcaagagaccagcccacctccgcctccaagtagctgggactacaggcgtgcgccaccatgcccggctacttcttgtattttttgtagagacggatcgtcaccatatttcttaggctggcctttaacttctgagctcaagagatgcactcccctcagcctcccaaagtgctgggattacaggcggccaggcctattttcaattttcaagtattgcatatcattgtgaataacattgtaaatcctttttatattaagtaacaggtagttaatccatttctaatgaataattttaaggttttaatccttccaagtgtacctgcccgggcggccgctctagactagggggatcccccgggctgcaggaattcgat

SEQ ID NO: 30383 - DNA, 509 bp, Homo sapiens
ctactatagggcgaattggagctccaccgcggtggcggccgaggtactagtcagtatgctgtagtattaatcagtaggtcaagttcagtgaagtaaaggagaattgaattcttgaagttcacatttaggcaaaaatttggcgttttaggaggtgagtataagacatgatctttatagaaaacgctgatgataaaaacagcgctctctgttaggtgcctttatgcttgactccattgtcatcttttcttaagaaactaagctcaggactgggtgcaatggctcatgtctgtaatcccagcactttgggaggctgaggctataggatcagttgagctcaggagttcaagatcagcctgggcaacatagctagacctcgtctctactaaaaaacaaacaaacaaaaaacaaaaaaaaacccccaaaaaaaccaacaaaccagcttggctgggtgggtgcgtgccttgtggtcccagctgctcaagaagctgaagcgggaggatagcttgagc

SEQ ID NO: 30384 - DNA, 462 bp, Homo sapiens
actactatagggcgaattggagctccaccgcggtggcggccgcccgggcaggacgcggggggctctcaaaaaatggtggccattattattatttgctcatggaccagtatttcaatgatggaaatactttagtgcctctaaaaatcagctctagtgttaacacacttaaggaaacccagtcaggtcacctctgactctgtaaagcattataaagaaaataatgaactcataagtgagttcttgtgagtcattcaggttttaagaagccactgctttgattttgaaaacagacaaaaaaatctcagaatctacttggactagggttcatttattctgcctgtttcaagtcagagcaaatactcctggaatgaccctctcctgtttcctgagtttgagccgatcctatttggcactgcaaacagggagaagtggatgtttgaggacagatgggaggtgcaaagt

SEQ ID NO: 30385 - DNA, 518 bp, Homo sapiens
ctactatagggcgaattggagctccaccgcggtggcggccggaggagagatggactgagttttggcgataggtcgcacaccttaccaacagcaggcggcgagggctccccacgctgctcgtttccagaggtgcctcgtattattgagaaggcgtgcagtgaatgaaaatgtgtccacacagctcctgctctgcctgtgacattgggttgctgtatattagctgggatagtatatttcaaattgctttctcaattgcaaagtatggtagaaataaatattcgctttaatttagtaactagaacttagaaaagttcctcctgtttcctgattgccaagtcgggatgagaaatagatttcataattatgatacaacttgatatcttgagataaatgtttaactttgaaagttaaacatggtattttttaaactttatcattttgtgttcattttgcacatctctatacctccaattttgaaaagaatttcttccaaagttatctttatgttatctttactc

SEQ ID NO: 30386 - DNA, 459 bp, Homo sapiens
ctactatagggcgaattggagctccaccgcggtggcggccgcccgggcaggtactcatcgccgttctttttaaaaatgtagacaaattatatttttcccctcaactttttttctccagaggtgtttatttcctttaactttcctcctttggaaccccgttctcttatttcttaacaactgatctagattgctcattcaaaccagggctgaaaatcaatcagaaaaagcagttctgtttcccttgaagaaaaggcttactttttaaactatgcaaaggtgaaagggggaatatttgcagtccattcgtggtaaatcaattataaaaatagctagtatttattgagcaactactctgtcagttacttgttctacatttcatagaacttaaagttctacaaaatagaatttaaaatagaacttggttggggtgtcgtggctcaccattgtaatcccagcact

SEQ ID NO: 30387 - DNA, 491 bp, Homo sapiens
gggcgaattggagctccaccgcggtggcggccgaggtacatgtctgttggtatactttttaagtatctgtttgcaatttctagaagtggaacttctattcaaagggctgtatacctaattttgacgtataatgcttaaatatccttcaaaaaggttgcatccagttactttctaactaccatcacctaagcagacctgtttccctcatgctctcaccaataccagtattaaagcttttatagtaaaataaagttcacctttaaacaccacctcaattgccaaacgcagctcaaattgtccagtgcttttttttccctcatgctgttcaccaatccaacagagccctggctaggtgacccatggggaaaagcatgcttttcacagggattcgctctactgttccttcttgcctctttaacacaaacacgtgcatgtgctcaaggattcacgaacaaaaacttactaagatatgaagcaccttttatcaacta

SEQ ID NO: 30388 - DNA, 657 bp, Homo sapiens
ctatagggcgatttggagctccaccgcggtggcggccgaggtacagattaggatcaaacacagaacatgttcagatcatacatttatatctggtgtcagaatccatctgcagatatggctgttagctccctggaggtgaacttgaaaggaaaaacatgtaaattacatcatgctaattgaataggagaaaacacagtggcagagcctttcttgatacttagccctaagtaaaattcaaaaacagacgttgcttcaggagctgctgaggtcgttcagggctattagaatggtgcctccgccacacttaatccattctgccgaattcaagaatatttatttccctgaaatgaactcacaagttgccctagaggaaaacttggagaactagagctgctcactgtgcagatgccatcctgatgaccccagagatgtttacatcagtgaaacctctgggaatagtgagccccctggctagttttcaaaggacttggggaagagggtagagctaaatcctgtgttctcaacacaggaaataatataacccccattgggatgaaaattcattcttgggtggtgacaaaatcttagacgttataatggtttgtggtctctaaggggccacagcattaaaatctcatggtgggtggagttgggcta

SEQ ID NO: 30389 - DNA, 263 bp, Homo sapiens
cgggggggggcgaggtacccagccttttttctattttgttcttgtcttgtttattttacattttatagcttttcatgtttctgaaaccacttaccacatttaggccaaaaggcgaaataataaaaaataaaaccaacctcacctaaaaaaaagtttaaggattaagtatttccatataccagtgttgaacagatttgaacaatatatttgattttatgctctccagttgctaaagtgaggaaaagaaacagaaccatattgtt

SEQ ID NO: 30390 - DNA, 397 bp, Homo sapiens
cagactaaaggcaggttgactgtgaggggtggcaggaagcttttgggtgatagatggtgagtggtctgtagtgctggttattccatatagacttttgccaaagctcatggaagtgtttgtttaaaatgggtaaatttattacatatgttatacttcactagtgaaatctttaaaaactatgctggtggcttcctgtcatcttctgaataaaccctgattcttctttttcaaggtaaacaagaacttctggtgtgccttccacctttcccatacctccctccatcctcacctctaacctctccacttcaaattgccatctgcacctcagttgcgagctgccccctactcgtgtgctcttgcctctgggtctaaagtctgcagcgcactcacccaccca

SEQ ID NO: 30391 - DNA, 473 bp, Homo sapiens
atacgactactatagggcgaattggagctccaccgcggtggcggccgaggtactgcgatcctgcaacaacaggagaatgtctgaaggacagtcccacacactggaaagctgggctatgggtggagatgcacagagattcgggtgctgatgaagagagggcacagaaacagtgaggacgattcacacatgcatgcacacttacgctcccccttcatttgagggtttacacacacctacctcacaggtctttgctaggaactgtgggggtgcaaagaagagcctgccctaaaaggaatcaataatctatttgtggacacggtctatcgagcggccgcccgggcaggtactatgcctagctaattttttttattttttgtagcgatgcattctcactatgttgcccaggctggtcttgaactcctggcctaaagtgatcctcccgtctttaccttcaaagggttgggattacaggc

SEQ ID NO: 30392 - DNA, 418 bp, Homo sapiens
aattgtagctccaccgcggtggcggccgatgtactatttgaaaatcattaggtttgggcatatatggatgaacaaaacaagtcccctgccctcttagatattatagatcattgagggaagaaacaaagtaaatggcacttttcacagtaaggatcgatgaaggaaaagaagagcgtggatgagaagatggcaagggaaccaaaattagaacatggaatttgggggatgctgccagggaagcttagctacgtggaagtagctaatggtgaagctcattctgtaagaaaaccatatgtgaaagcacagataatgagggggaacaagacttggcctccaagtaagaaataatactggaaaataattaccaagaatacatagatgagggatggagttagagaggtaggcaaggaccaaacat

SEQ ID NO: 30393 - DNA, 410 bp, Homo sapiens
gcgtaatacgactactatagggcgaattggagctccaccgcggtggcggccgcccgggcaggtaccctggaagcaacatctacatctttttcagcaatctagatgctggggacacaaggtccaccttccaggaatatggccatgacaccagaaatcacaaacatgatgagaatggaatgactggggaagaagtgccagatgcttcacttgtaaatgaagacccagcctctggggatgcagataccacctccctgaagaagctgaatatctgcagataagtggagttcaccaatgatgaggagcgggatggagaaaggaggtagggagagtcatccaaggaacatgagcaacatgttaaaagaattgaaccagagtccggtgaatatcagcactgggaccagttagcagag

SEQ ID NO: 30394 - DNA, 553 bp, Homo sapiens
tggcggccgaggacccagccttttttctattttgttcttgtcttgtatattttacatttttttgcttttcatgtttctgaaaccacttaccacatttaggccaaaaggcaaaataataaaaaataaaaccaacctcacctaaaaaaaagttagattaagtatttccatataccagtgttgaacagatttgaacaatatatttgattttatgctctccagttgctaaagtgaggaaaagaaacagaattatattgttttcatgtgctgacagccggaagcatgtaaacatctgcagaaaccaaacgtttcctggaactaagcttgagcagaaatctatcacgtggacctttgtttaaagaaccttgtgaaaaaccacagttatgtaaaagatccaggagcgcagttcatgtggattagattctctaggaggcagagagtctaaggagatcaaagaaaacaacgacttgggaagtgcatgtgctgagcgctggagccaaactagcagaaaggagttttagaggcactgaatccaggtctctggtttttggggact

SEQ ID NO: 30395 - DNA, 245 bp, Homo sapiens
atagggcgaatcggagctccaccgcggtggcggccgcccgggcaggtactaccttattgaattcttacaactattattgttccatattacaaaggaggaaaccaaagtctggagtggtcaagtaacttgcccaagcccatatagctggtaaatgctggtgttataataaccaacccaagcctactggctcttgaccactttgtttctactgtgtccattatcatgaaacccaggtttcttccagc

SEQ ID NO: 30396 - DNA, 377 bp, Homo sapiens
tacgactactatagggcgaattggagctccaccgcggtggcggccgaggtactttttttttttttttttttttggctatattactttattgaacaagtatttgctgaatgcctactgtgtgccagatgcaatgctaagcactaggtgaacagacactggtccccaccctccaaacaagtaagcatacatttatcactgcaacttgtaattatttgagggaaagtaaatcaaggtgctatgagagacaaaaagagcttatgttagttagacttactgaagaggaaaggcaactttgaaaagggacacaacccaagtagagaacaggtggccaggtgtggtggctcacgcctgtaatcccagcactttgggaggctgag

SEQ ID NO: 30397 - DNA, 489 bp, Homo sapiens
ctatagggcgaattggagctccaccgcggtggcggccgcccgggcaggtactctcgaatgctgtttacacagtgttttatacttgcaaaggactttacggaatgttatggcagtcttagagaaaggtggagaagtcctgacaggggtgtaggtgtatgtttagaactgcatgactacctgtatagtgtttgtcttttggattatgaatatagtaagcattttccatgtttcatagattcacatatttggtcttgtttaccttcacaacttcaaagtgaacctgctatgggagcactatcttccatgcataggcaaacttgtccaaagtcactcagcatcctcgatccatggaattataaaatgtgatggttatccagttcagctccccactggctatatgaatccctgacagtgtcctcctttagcttcacctcaaagctttcctgccatgaggaaagcttttagacagcatcagtcttttaaaaacaa

SEQ ID NO: 30398 - DNA, 406 bp, Homo sapiens
ctatagggcgaattggagctccaccgcggtggcggccgaggtacggggcagtcctgcacagtctcactctgacaacccaagttggaaatgctgcaaaaccaaggcccaggacagtgtgtggattatcaccaagagacctcagcctgcaagggccttcaggtcacacaggcctgtgcacagcatcctctggagtcagcctctgcatggacataaggagcactcaaaatacttgctcgtggcagccttgactgctgtgaatccaacacaccacataacagctgcctccaccttgccttccacaggggagtccgagtatttggggaggtcacagcctcttcaggctcaacatccgtctctttcccaactccacacacacccagggggttgtagcaagtgtgcccacctg

SEQ ID NO: 30399 - DNA, 433 bp, Homo sapiens
actcactatagggcgaattggagctccaccgcggtggcggccgcccgggcaggtacttttttttttttttttttgagatggagttttgctcttgttgcctaggctggagtgcaatggcgaatcccggctcacggcaacctccgccttccaggttcaagcaattctcctgtttcagcctcccaagtaactgggactacagcaagtgaaattactttacttttaaagagaaaaatatctattagtagcaagacagtttattggggatttgagcttattattgaaattaacaagtatgtaatgctcacatgatactctcaaatgaacttaaaattgaatggaggcagacaagttcaaaatagttgagaaaatgatcgtacctcggccgctctagaactagtggatcccccgggctgcaggaattccatatcaagct

SEQ ID NO: 30400 - DNA, 423 bp, Homo sapiens
gactactatagggcgaattggagctccaccgcggtggcggccgcccgggcaggtacttaagtttttttttttttttcttttttttgagacagggtctcgctgcactccagcttggacgacagagtgagaccccgtctcaaaaaaaaaaaaaaaaaaactaaaaaactgagcaatggctgactaggacctttataagacaaattaggcctcagaagttttctgggggccgcagcttgccttccttcccatcctccatgtctgtgacttccactagaggccaattcagaatgtctgggggtggggctcatttaaaaagtatttccaggccgggtgcggtgtctcatgcctgtaatcccagcactttgggaggcccaggtgggcagatcacttgaggtcaggagttcgagaccagccatggccaac

SEQ ID NO: 30401 - DNA, 404 bp, Homo sapiens
agggcgaattggagctccaccgcggtggcggccgaggtaccagctctggctgttgcccccatgcttatattcaaactcttttgcttaactacaaaagcccttggttatctagacctatctatggcttcgaccgaactcattgttttctcacttttctccagtaagatgatatattgctatctttgcaacactttcctttcagctccacaaacatgtgtttctgaatggtggagtgaattagcaagtaatttcacattccattttctcagaaggagatggagctaggaaaaataacaaaacctcatctaataaagatgacgctactcttccagaggggcaaagaggcaacctggatggcaaatgtagggtgttttttattgcctctcagctacattataaatctc

SEQ ID NO: 30402 - DNA, 490 bp, Homo sapiens
cactactatagggcgaattggagctccaccgcggtggcggccgaggtacgcgggatttttttgattgttgtttggcaagaaatattaatagtaacttttgtgtgtttgattattttcggggccggagcagcatctgtccagcacctttgggatttggtggttattgatttaagcacagggcttctaagatcagaacttggttcttcttcccacaagtgctctgttctggaaatgtgctaatgacacacattgaattatgtcagaggtttgtggccttaagttgtcgagggaggtgttttcatttggcgagaatctgtaatttgtggaacaataggattaagttctaaaggaaataggcccgatgaatctgcatagatggctagcttcgcaaagtaaagcacatagcccgtgaactgggggcaaactacacgttttggataatgtgagcctaaaaagaaaaaccctaaaacttttaaataaatttctaaaa

SEQ ID NO: 30403 - DNA, 570 bp, Homo sapiens
tcactatagggcgaattggagctccaccgcggtggcggccgcccgggcaggtacagaatacctggacaaagacaaaggtcagcctctagaatttgccagaaatgggccagcaaagtgcagcatcttaataactgagtgatactggcaggaagatttctccaaagactaactatggtgtttgaaatacgcctgtaaattatttgacactcatcccttcaaaaggtggggactaatttctgtccctttgagtgtagactacccttaatgacttgattctaacaaataaattgtgacagaaatcatggtttatgatttcagggactacatcctaaaaagcatgtcttactctctcttcaatcactcactgtaggggaagctagatgccatgtcatgaggacactcaggcagtcctatggggacatatcgatggcaaagagctgggtcttattgacaatagccagcattagcttttcaaccacatgagtgagccacccttgaagcagtacctcgggcgctctagaactagtggatcccccgggctgcaggaattcgatatcaagcttatcgata

SEQ ID NO: 30404 - DNA, 491 bp, Homo sapiens
ctccaccgcgctggcggccgcccgggcagttactattaaatttattgagaggtaatttatgcaccggcaggaagttcaaggggacagaaggggcttgctccactctggagccctatctcctctcacctccttccttctagtttgacatgcgatcttgtctctctcttttataaagtgcttccaggcccttttgattaggatgctgtcctaaatccttcctaaagagaggttttggagccaccaacactgcttcactgtggaataaactttccttattaagattcttcattcactcataatcatctcctttttcctcactgctcattcatttatggagatagcacccatatcatagctacttggtcaaatcatggtgatactccccacttaggagaggaagatgactaggttatagctcttgcctttaggaaattaaaaaccctgtggtgtaatctacattacacagtggaatatggcatatatcatgaaaa

SEQ ID NO: 30405 - DNA, 427 bp, Homo sapiens
gaattggagctccaccgcggtggcggccgaggtacatctgaattacatagatgtgctaagatggtatgtgtcggtgtgtattctttggttgcaagcaccaggcatgagttttggtgaatttaatcaagagagtaattcgttacaagaacttggggtttctgtgcaacccaagaaaagtctgaaaataaccaaatttagaaaatgtaaggaatcagggggtttcaagactctagatagcaagaagtggaaaatcctgtctccagggaacctcctcaggggagaatcagctccagctggtttatatccaagtgccattctccccaacctccaggagtgagagtttctttagtatgtcttggatcctatgcccactttgtgaccagggcaagagggcaccttgattgacagccccacccagaccacatgc

SEQ ID NO: 30406 - DNA, 244 bp, Homo sapiens
ggcgaattggagctccaccgcggtggcggccgaggtacacaatctcatttttgttctctcatatcgatccccaaagaggctggtatctatattcccattggccagatgaagaagctgcgggccagcaagcatgttacggctggaataattagctcagcaatcactgtttcgaagaattgcatcaagggcacttttgtatcatgtatattgaaggctaccttcttttggaaaggtggggaccagt

SEQ ID NO: 30407 - DNA, 383 bp, Homo sapiens
agggcgaattggagctccaccgcggtggcggccgcccgggcaggtacctcctagccatccaattatagaggctttccctaggatactgcttgcccttgcagggaatgagatctacacagcccatacaccttaagagtccagtattgatgtcggtgttttcatcattcctcaaagccatttctggaccattcttcctctagccccttataaaaatgcttgttcacctgagctcaaatcaacactatcaccttttaccaactatttctcaactgtctacctcttcagtcacttttccctccttcattaagactttacacccatatcagtcctcctcaccacctcaaagtttgccatttaacagcttgatctttctcttcttgacc

SEQ ID NO: 30408 - DNA, 285 bp, Homo sapiens
gactactatagggcgaattggagctccaccgcggtggcggccgaggtactcctttacattcttaaaaatcattaaggaccccaaagaatgtttgtttacaagggttacttacattgataattaccacatttgaaatgaaaactgagaaacttagtattaattcatttaaaagtaagaaaacaattacttatctacataaatgaaaaagctattttccaaaacaaaaaatgaaaatttagtaagatgaatagccttgctttatgtttatacatctcttaatgtttg

SEQ ID NO: 30409 - DNA, 438 bp, Homo sapiens
  misc_feature 180, 181, 205, 212, 213, 225, 226, 241, 242, 254, 255, 271,272, 313, 335, 336, 344, 345, 362, 363, 371, 372, 404, 405,427, 428, 429: n = A,T,C or G
gcgaattggagctccaccgcggtggcggccgaggtacagtctaactctagaagacagggctgggggctgcggaagtgggactctgttccctactacactggtcaggctggcaatggcgccttatgctacatgttggttctctgcagtatgtgactaatcaggtcctacagcaaacccagnnggaaatcggtttaacttccccatngggacanncccaagaatcanntctgaatgaggttannactaatatccannaggagcagaccataanntttgttctccaattcccccacctttagtgtggcaaccactncaaatactcacacatactgtcnncagcagcnnaggaagtaacccacacnnaggcaggnnagtggtttccaacctcccaagaaacagtcttnntttgtgtgagaaatcacacagnnnacgttctca

SEQ ID NO: 30410 - DNA, 525 bp, Homo sapiens
actactatagggcgaattggagctccaccgcggtggcggttatggtggtcgctagcattctcattttcaagaccactctgttcctttcttagaccatgtttctcatcttaagcagtcatgcccgagctggagacaggaaaccagacagcagtctgccctgataagggacagcattgtctgaaggcggggaatagccctgcttttacccccaactcagctctctttgcttgaaatttagtagtcatagaagaggcacaatgctgttgacagtttctgaaccaaaactaggattcatttcttccaaagcaaaaaaatagtgtcctcggccgctctagaactagtggatcccccgggctgcaggaattcgatatcaagcttatcgataccgtcgacctcgagggggggcccggtacccagcttttgttccctttagtgagggttaattgcgcgcttggcgtaatcatggtcatagctgtttcctgtgtgaaattgttatccgctcacaattccacacaacatacgagc

SEQ ID NO: 30411 - DNA, 363 bp, Homo sapiens
accgcggtggcggccgcccgggcaggtacatacattctatgacagactctaaaagttctcttcatgacaggcatcatttgtaacattagacaattgtatgatcatgcatattttacatgtttaatgcagtatctgttatggcaagtagcaggagtattgtattttgtttgaaatgtcatatttattgttgttgaggacgacaacatgttagatatttttaagagagatacgttttgaaatatgcacgattgaattttttcgtgtatatgatttgtttttcctgctcagtcaccgagttaatggccacatggacataaagatcagcttgatgtaagagggttattgaaggttttctattaaaat

SEQ ID NO: 30412 - DNA, 443 bp, Homo sapiens
acttttaaaaggtaggtgaccacttgacacaatgaaacacagtagtttgtgaattagggctcttgacagtaactgattggtattgccttgtcacaagactacacatgtgccttgcctagacaccaaaactaattagagtagtctattgtcccatggaaacctgaagacttcaagaattacttattgtcctatatgttacttttttgaggggagtaggagatttagggaggaaaatgttactatgctggggggcacattgttttatcattcactcagaacagattactaggagaatatgacttaactcttaagtggaatgttagatgagacaataccactagccaatttctgaaggcaaaacaaactttttacaacagtaataatggtaataataattactagcatacctgaatgcctaccggaaagcttattctactaagcaa

SEQ ID NO: 30413 - DNA, 381 bp, Homo sapiens
atacgactactatagggcgaattggagctccaccgcggtggcggccgcccgggcaggtactattacaggattttttgagatttataatagggatagcacttagcctattctgggttagtcttaagaaagcatatagaaacacagtgaaacacttttgagtcaagatttcagcatcatgggtttctacgtagtgtgattctcagtggtgtcttattttaaaaaggatacggctgggtgcagtggctcatgcttgtgataccaacacattggaaggctgaggtgggaggattgcttgagcctaggagtttgagggagctatgatcctgccattgcattccagcctggtcaacagagtgagatcctgtctctatttggaagaaa

SEQ ID NO: 30414 - DNA, 325 bp, Homo sapiens
gggcgaattggagctccaccgcggtggcgccgggggccattgagactgccatggaagacttgaaaggtcacgtagctgagacttctggagagaccattcaaggcttctggctcttgacaaagatagaccactggaacaatgagaaggagagaattctactggtcacagacaagactctcttgatctgcaaatacgacttcatcatgctgagttgtgtgcagctgcagcggattcctctgagcgctgtctatcgcatctgcctgggcaagttcaccttccctgggatgtccctggacaagagacaaagagaaggccttaagatcta

SEQ ID NO: 30415 - DNA, 466 bp, Homo sapiens
ggcgaattggagctccaccgcggtggcggccgacgcacacaaaagaaaaaaacctgcttctctgtgtttcatgcatgacgcacacacaggactggtctaacaagtcctgatctctcaggccaggccgcctccttctcctcccccattatccatgtgcctctccaaggccctccactgggacagatcacactgagttttctctaatcctgagaagagactgagttacttacctggatccctgtgcaaccttgccaaagacacctcacctagccctaaaaggagaaagcagggctttagggagaggccgataaggaaacaaagataagagggaggggcagaaaaacagaggaaggtgttagactaaaggaaggggagaggccaaatgcctttctccttcctacaagaggagagagatcaggtacctgctcgggcggccgctcttagaactagtggatcccccgggctg

SEQ ID NO: 30416 - DNA, 544 bp, Homo sapiens
  misc_feature 375: n = A,T,C or G
cgcgtaatacgactcactatagggcgaattggagctccaccgcggtggcggccgcccgggcaggtactatcacctggctataagttctgagtttaaatcttaggtgcagaactttctagctctatggccttgggcagattgcctaacttcagtgaatctcagtttctcttggccaatgcagacagaccagctacacctaacctggcgtgaagtttaaattacatgggatgacaagaaagcatttagcacccgctctacacacagctacaaataaccaagcactgattattatggtccaacaaagtgggagaaaaaaagaacaaaatatggtttttaagagaaatctaccaaacgcttcagtaatctgaggaaatnttagcttgagtttgacagaaatctcaagaatgctcagagtcgtggcctctttctttagagggttccttgactcctgcaatgtgagcctcaccatcatgtacctcggccgctctaaaactagtggatcccccgggctgcaggaattcgatatcaagcttatcgataccgt

SEQ ID NO: 30417 - DNA, 464 bp, Homo sapiens
gggcgaattggagctccaccgcggtggcggccgaggtacacacaggcattcacacccccaatacacacttcctccttctatctccctgtctgatttccactcatccattctcagctcctgtttgtctgaggccacatgcaactggatttgtcaagcccccttttcacaacttgttgtcacagtccattaccaaattgcatatagttatatattccactaattaggcttctaaaatatcattaacatgtctcttgatcattagcataacgtatgaggcgacgtcgttaggcacgactcgagtttgttaacgtggtaatgaaaggcacaaggcaggctctgcaggaaccaagaagcacagagaagtggggaatatccaagcaccaagatgctagccacaaaggcatagacagagacacagagagacaaaggcaagcacagagaggagatgcaaggcacgaggaaaa

SEQ ID NO: 30418 - DNA, 410 bp, Homo sapiens
ttggagctccaccgcggtggcggccgaggtactccaagctctgagaccacctcttctgcaaagccttcctgattctgcaaagaacaggtaggcatttcatccttgggacctcacagcaattcaggacacatttgtgtcccagccctgcttggcttggctgtctccatgaatatacactttgcaacttctgcaccaggcatcataccaagcacacagtaggcactcctgtgttttttgaataagtgactatatcatgaccacatttcaaatgcggaatatatgagctactagaaaagacataagggtagattttacatctttattgtatcctagatatacaagtctattactgccttttcccatgttctgtcaacatagcataaagaatggggatttacctgttagaaatt

SEQ ID NO: 30419 - DNA, 450 bp, Homo sapiens
  misc_feature 308: n = A,T,C or G
actactatagggcgaattggagctccaccgcggtggcggccgaggtacttgattgttctgaaattccttatgcatgattagagaaagagtaaatgacgtattttaggattgtgtttaacaaaagtgagatgctaattcttgaaaattaggcctctctatggggactgcacgtaatcacattaccctagatcttgagttagcgagagaatattctgtcaggtgattcactgaccttgcctataacttgaaaccaatagcaaatccagatgtagtttcactggcctttgaagtccagggcaaaaagacanagcgtgactccctgtctccccattgcatcctgattgtctccctgtccagggacagaataaatatcctcaagacattgactctttccacagtgaagaacttgaggttgggagctttggcctcatctctaatagggttcatgct

SEQ ID NO: 30420 - DNA, 413 bp, Homo sapiens
ctatacggcgaattggagctccaccgcggtggcggccgcccgggcaggtacttagggtaagcattaacaatattattcaaaatgttatatagagttcaactgtatacaatagagcatttattaaagtgtgtccaaagcgcttataaataaagcatcttcgaggcaggcggctcacttgaggttaggaggaaagcagactggccaacatggtgaaaccccgtctctactgaaaatacaaaaaaattagccaggcgtcatggcgcacccgtagtcccagctactggggaggctgagacacgagaatcgcttgaacctgggagggggaggttgcagtgagccaagattgcaccactgcactccagcctgggtgacagagtgggactctgtctcaaaaaaagaaagaaagaaagaga

SEQ ID NO: 30421 - DNA, 460 bp, Homo sapiens
ctccaccgccgtggcggccgcccgggcaggtacaaaatggtcctctgagaattttgttcctctttgtcattgcaaagagatgcattctagctggatgttttcatttatactcccaaattctaagactcttgtttctcctccagtgtttcacacagatggttagtgaaaaagtcctttctttccccccgaccaaataaacttgattttctgtctggtcctattcggttcagcttagcaagtaacagggcaaattttttttcttctttgggacttgaagtatggtgttttataattcactgagtgattacagagtgcccagaactttatgtaaattatttttgtttctcataactcatctgtgtagtagatattagtgttcccattacatagatgaggaaatagaagctcagcaacaaaaagtaattcatagctggtaacagaatttgaacctatgttttct

SEQ ID NO: 30422 - DNA, 602 bp, Homo sapiens
agctccaccgcggtggcggccgaggtacatagtatccatttatattatttctctatgtttcccatctttataccagactacatttcctagaaaatcctggacctctttaccactcagcaatgattctccaaacatcgtatataatataggacacagtcccaagctatgaaatctgcttaccctttctggcgttttaaagaattcagagagctccgttaatatcttctttcaagtattcatgttctacgaactgcagtaagacaatctacccaggaacccacaatataagcctccctaagtttttctccctcttttaatttttaaaataggattttttactattattatcgtagagacggagtctcactatcttgccgcgtggtctcaaactcctgagctcaagtaatcctcctaccttggtctcccaaagtgctgggattataggtatgtacctgcccgggcggccgctctagaactagtggatcccccgggctgcaggaattcgatatcaagcttatcgataccgtcgacctcgagggggggcccggtacccagcttttggtccctttagtgagggttaattgcgcgcttggcgtaatcat

SEQ ID NO: 30423 - DNA, 492 bp, Homo sapiens
actactatagggcgaattggagctccaccgcggtggcggccgaggtacctgggattacaggtgcatgccaccacacctggctaatttttgtatttttagtagagacagggtttcaccatgttggccaggctggtcttgaactcctgacctcaggtgatccacccacctcggcctcccaaagtgctaggattacaggcgtaagccaccgtgcctggttttgtctgccatttttaatgttcactctgagaatcagagggcgcatcccaggatgaaggtgactctgggacatgctgaccgcagctaccctccctgacttaccacttacatagatcaggccatgggctctcccctactttcactcagccttcaaaccaccagctccaccagcttcctcatcaaacttgctttctccaggcacatccctgagcagaattcacttaaaagttactgatggaagaaaaaacagagcaaatcaaggcacctgtaagttat

SEQ ID NO: 30424 - DNA, 404 bp, Homo sapiens
cgtaatacgactcactatagggcgaattggagctccccgcggtggcggccgcccgggcaggtacgcggggcaaagctggccttcctcatgaagctctgagagggatctggctatctcacaggaactgtgtgacatccaaccgtgaccttacaagcttgtttcttatcaagttttaaagctccccatccatcataggactttcagtaacttcctgtttctggatagagggaccagtagttctcatctgcagaggggagaaaatggacatgacttccattcaataactgatcagctcattcaggcccttgttacctcttacttccccagttgctttattcacctggcagaatcctgtgcatttttagatactcaataggatagtattttcccaggaaatcttttct

SEQ ID NO: 30425 - DNA, 466 bp, Homo sapiens
tggcggccgcccggcaggtacttctttttttttaactgggaaattatcagagtatatactttttcttatgaaattaatgtaacttacgggtgttataagttcataatcatgcaatataaaaatggctcactgagtaaataattatcaagtgtcaggcagagcaggccctagcaatacaacaatgaaagatgcagttcttgatctctgcataaaggagacagataattacttataatcagtgttattataaagacatagtcaaagtgctaagaatatgatagagaagagcagatttgattttgtgtggtcaggttgtcaaggagggctcctcagagtagtcatttgtgtaagctgaaccttagtaggatctagtgttaagcatttgcgttagagagaatactgactggctagaccaggggacaaacatgagcataatcccagaggtgtggaagaagtggtatatttc

SEQ ID NO: 30426 - DNA, 393 bp, Homo sapiens
gtaatacgactactatagggcgaattggagctccaccgcggtggcggccgcccgggcaggtactttcaaagtgaaacctcctctcctccacccagcttgccatcatctcacactgcttaagctcctgctgcctttcatgtctgcacattgactccaccaacctcatctggccttgttagttaatctacatgtctcctggaggagaacctccaaagggaaggatctctaacttagacattccactatctttgttgtacctcacacagtgggttttatgctcaaatattggttgaatgaataaaagtagtcaaattgcatataaatgcacacaggagacatttatcccctctctgaccctgatgagttttcatttcttcagataaatgtgtgata

SEQ ID NO: 30427 - DNA, 446 bp, Homo sapiens
ctcactatagggcgaattggagctccaccgcggtggcggccgaggtactcatacaataagaccctatacaagcatttaagtaacgatgcaatacaatatttaccaaactgacgacatgtccatgttatattgctaagctacaaaaaaaagtcatataacacatactctaagattccctttttaaaataatataaacatgcccatatacaaaagaataggaagataaatatatcactgcatggtattatagattactattttcttcttttcatttatgtatatcgtctccattttcacagtgaatatatacctattagtaagagaaaatccaatgaatatcttttttctttttttttgagatggaatctcactggctgcccaggctggagtgcagtagcgttgatctcagctcactgcagcctccacctcccaagttcacgcgattc

SEQ ID NO: 30428 - DNA, 202 bp, Homo sapiens
agggcgaattggagctccaccgcggtggcggccgaggtactcggggggagatcgtcagaaagtcttgaattggctgttgtcctacaatcctttgtggcttcgaattggtctagagacaacttatggagaactcatatctttggaagataacagtgatgtcacagggttggctatgtttattctgaatcgcctactttggaat

SEQ ID NO: 30429 - DNA, 415 bp, Homo sapiens
ctccaccgcggcggcggccgcccgggcaggttctcacttttgggtcctctcaaaattattgtcagataaagatttttccgggccatggatataataaataacccactcttaccgataaagggaagttagtgttgtaaaggaacaaatggtgattcaggtttgggagactttggaggtattcattctccactaagctatatcccaataccatcattatctgggtcagcctccgattcagcctcatcctgtgcttcagcagtggggtaaaacaaatgttacttgttagctgcttcttcatgaccttcatagactatgcattaatttgaagccctgcccccaaaaatagtgcttgggggggaaatgagttagtgattttgtgaagataatgggagttgaggaaaacacttaagtttgc

SEQ ID NO: 30430 - DNA, 407 bp, Homo sapiens
atacgactcactatagggcgaattggagctccaccgcggtggcggccgaggtaccattaaggaaaagagatttaaatgcaatgtgcctacattctatctagagggcccattcttcagttctgacttcaacaacaggactaggtttactggcattcatgtccagtgaaaggaaggcggttaggaggagtcgcaataactttctcttctgttaagagctcccgtagcactcagccactcctggtggtgtatccttgtgttgggtaagctacccatatgccaaatgctttctagtagaggtccagacacatacaggattgaggtcagagtcattcacagacattcgaagatatgaataaaaaaacaaatcctctcaaatacgcagaagatagggtagggtttccattatc

SEQ ID NO: 30431 - DNA, 440 bp, Homo sapiens
aagccggcattaaatgcttagaaatgtatgggttaaatgctttccatacatgatcttgtttaatacttatgatgatcctatgatgtaaaaatgttatctccctttccatgatgggaaaacagaaatgtcaagagattaagtaacaaactggtaaatgatagcactgggatttgaccccagactctgtggtcctaaccattttttttagggtggtcccgggtctgggtttgtttggacagccctggttgtgtctgttgtctcaaagtgattgttaatagtaataatagaacctgttttcaatcttaaaactgtcacaatttgtatgataagttatatgatcactttagtgattctgccccgaagatgagaaatggtgagtcattcaatggacatttataatcagaatgctttgggaaaggcccttggctatgtgtttagcc

SEQ ID NO: 30432 - DNA, 525 bp, Homo sapiens
cactactatagggcgaattggagctccaccgcggtggcggccgaggtacttcctctggatgggtgataaagttgagctttgtagatggggaagcagggagcaaggagaacaggaagaggctgaattctatattgactttggaaatgctattagttccctggcctgggacaaacaatctgttccttcttcccaccagcaaagggttgtcctggagcaggaagaagagaaaagtggaggctggggacctaccttgtagtagtcatagagcaggccgagggcagcagcactgtcctcatcaccattaatgctcatcatggccttggtggctgctgtcaggggattctccaagtatgacttccaggcttcatcctcactggtgtaggctcttcgggtattgaatggagggtcactgggcatgggcactaaggccactagtcttttattactgtaaaaacaagagaaatgtgaggttcattttcagagagagcaaattttttacccctaataatatacatattacatgac

SEQ ID NO: 30433 - DNA, 438 bp, Homo sapiens
gcgaattggagctccaccgcggtggcggccgaggtacaaaaattagctgggcatagtggcacatgcctgtagtcccagctactcgggaggctgatgaacaagaatcacttgaacctgggaggaggaggttgcagtgagctgagatcgtgccactgcactccagcctgagcgacagagcaagactgtctcaaaaaaataaaaaagaaaaaaataataaaaaggaaaacaaagcctttagaaaaacaaagcctttgaaaaaggatgtaaaattgaatatatagatacaattatttttaaaaagttttatagaaaaatatcctggattggttgatgttgttttaatatattttaatcatttttgtataatggcatgtataatatgttataaggaaagtaaaaaaaaaaaaaggtcttagcagaacaggcagaaaaatgcca

SEQ ID NO: 30434 - DNA, 461 bp, Homo sapiens
ctatagggcgaattggagctccaccgcggtggcggccgcccgggcaggtactcaagcacaaaagtgagcacagtgttgagcgattctgacactgactgcatgacaaccacagactctgtatccaaacactcgcagacaagaagctaattgcagtgatgaaaggcactccactaaaagcatgagtaatcgctgcagtgatgcacagataaccctctctcctttactaccagggtgctgcggcatttatctcaaacctgtctctacccaatctgacaaccttttgtctctctgaccaatggaaaatggaaatgatttttcactactgttcccgcagcagtgaagggtctcttctgagtgtggagatttagttcaacagttgagtataaaacaaatgcaaaagctgacatttgacatccatggcagaaataaaaggctaattaatgagatctgttggagtccct

SEQ ID NO: 30435 - DNA, 539 bp, Homo sapiens
  misc_feature 155, 200: n = A,T,C or G
agctccaccgcggtggcggccgcccggcaggtacatactgagttcttaataatgtttattgaattaatagataacccaaagtatcattttaaagtccaattagtatttcttggagagggtggttatttcgttaacttccagtccttctaagactnttaaaattgtttagtcacagttcaaattgaaatttattatttctncctcttcccattactctctttaccacttagagatgaccctgtcatacctctcccctgatggctccttcatatgttttaaaggacccatcctggctgggtgtggtgactcacacctgtaattccagcactttgggaggctgaggcaggcagatcacttgaggtcaggaatttgagacgagcctggccaacatggtgaaaccccgtctctcctaaaaatacaaaaattagccatgcgtggtggtgggcacctgtaatcccagctaattgggaagctgaggtggagaattgcttgaacccaggaggcagaggttgcagtcagctgggattgcaccactgctc

SEQ ID NO: 30436 - DNA, 455 bp, Homo sapiens
ctactatagggcgaattggagctccaccgcggtggcggccgcccgggcaggtactcttacttggcatgcagacatgtctgactccagagttgctgcttggagaataggagaaaacagtcccttgaagattaaacttgataatttgagtcatgtctcatctttgaactaaatgcttaggtttctggggtcaaaaagaagtgaagacagggaaatgattacttttccagattttgggcttcaagtcatgaactctgtaagacccttgccctgttttctgttactagaacaacatcatactcttagctcttcttcctcatttcttcaagagaagaatggatcatacattctaaaaaaatccacctggtagaggtgccgagcacatcacagccatcattaacaaaaaataaaaggataacagcccttggaccagcagaaatgagcagctggcattgtaa

SEQ ID NO: 30437 - DNA, 393 bp, Homo sapiens
ggcgaattggagctccaccgcggtggcggccgaggtacgcgggggagatggaggcttgcaggacctggtggttggggagggccagtgaccaggtgtttagaagcagcacctcctgtgattggggctgagggtgaactctgctttcaagcagaggtggtttgtcgtgggtcttccatgatgacaccaggtcaagagcctccagatgctcagagtcttgcaggctcagaacaagaattgtcaacttgccaagatgaatctgtctctcgggggaggacccacacagaacaaacgtttgaagcagaagtttgcttggtaaacatggaatcggaacatgggaattgggccactgggatattcaattgcgtcagaccattgtagctgatactcctggac

SEQ ID NO: 30438 - DNA, 458 bp, Homo sapiens
ctactatagggcgaattggagctccaccgcggtggcggccgaggtactggtctataattagaaaaactgttttaaattagatgttcccattatttatttaaacagctttttgctgagaaagcttagtggattaatgaggcagagggtgttttgaaatccaataaatagttcccacaggctgggtgtggtggcttatgcctgtaatcccagcactttcggaggccgaggtgggtggatcatgaggtcaataaattgagaccatcctggccaacatggtgaaaccccatctctactaaaaacacaaaaattagctgggcagtggtggcgcacacctgtagtcccagctactcgggaggctgaggcaggagaataggcgtgaacccgggaggcagagcttgcagtgaccgcgagatcatgccactgcactccagcctgggcccacagtgcaagactccatc

SEQ ID NO: 30439 - DNA, 484 bp, Homo sapiens
ctatagggcgaattggagctccaccgcggtggcggccgaggtactccaagctctgagaccacctcttctgcaaagccttcctgattctgcaaagaacaggtaggcatttcatccttgggacctcacagcaattcaggacacatttgtgtcccagccctgcttggcttggctgtctccatgaatatacactttgcaacttctgcaccaggcatcataccaagcacacagtaggcactcctgtgttttttgaataagtgactatatcatcaccacatttcaaatgcggaatatatgagctactagaaaagacataagggtagattttacatctttattgtatcctagatatacaagtctattactgccttttcccatgttctgtcaacatagcataaagaatgtggatttacctgttagaaattgaataagcggccgctctagaactagtggatcccccgggctgcaggaattcgatatcaagctt

SEQ ID NO: 30440 - DNA, 506 bp, Homo sapiens
gactactatagggcgaattggagctccaccgcggtggcggccgcccgggcaggtactggattaaacccaaagtataaaataaatatgtccatagtgatataaataaatagaaatgacaactcttccttttagaattccagttaataaatgcagaaggaatacagagaagagaccatctctgctagaacactaccataagaattgcggcagatgcattctaaatggatgcaaaaactagagggagaagtttaaggagaaacaggatatttacatggtctcaaagtatctctccccacttaaaaataattaattaaaaagagaaaaacagtcactttataatgaagaaatctggcagataccaccctgacaatgtgattgaggttaacatgaccagtgacacgaaaaatagccagaggggaacgtaaggtcagagtgctcactcaaaactctgcctcctttatactcacagcgtcgttaaaaaaagaaaacaaaccaaaacattcccc

SEQ ID NO: 30441 - DNA, 361 bp, Homo sapiens
atacgactcactatagggcgaattggagctccaccgcggtggcggccgaggtacgcgggatactcatttgggtatatacccagtaatgggatggagacttttcaatacaagttcttttccattgggagcatttgggtgccaatggcagggcattcagggaggggagcgaactcttcgtggggcagtcctctgtgtctcaggctgctgaaacatctaaattccttctctgttataattgggcaccagcctgccactttttcctttcgctgtaacttccagcaaccaaagttaaagcccctgcctcccagcggagggaaattacaatgtcaggaatacgatagaagtaaaaaaaaaaaaaaaa

SEQ ID NO: 30442 - DNA, 437 bp, Homo sapiens
ctccaccgcggtggcggccggaggagagacggactgagttttggcgataggtcgcacaccttaccaacagcaggcggcgagggctccccacgctgctcgtttccagaggtgcctcgtattattgagaaggcgtgcagtgaatgaaaatgtgtccacacagctcctgctctgcctgtgacattgggttgctgtatattagctgggatagtatatttcaaattgctttctcaattgcaaagtatggtagaaataaatattcgctttaatttagtaactagaacttagaaaagttcctcctgtttcctgattgccaagtcgggatgagaaatagatttcataattatgatacaacttgatatcttgagataaatgtttaactttgaaagttaaacatgggtattttttaaactttatcattttggggtcattttgcacat

SEQ ID NO: 30443 - DNA, 397 bp, Homo sapiens
cgtaatacgactactatagggcgaattggagctccaccgcggtggcggccgaggtacttgggtctggaaaagtttggttttcaaggggtccctattagaatgcaaatatttgggaacccaggtgttcttcagctgattttcttgattaacacatttgtgtcagaggatgtctgagcagtgaggcagtgtgagtcagatccctcaggtcctgatggttttacttgattgttcctgggaaatctaaatttcaccttctcttatctatttcaaggaaagtaatttattaaatgtaaactgaatgtaattcatttgaaaagatttgcaagatttaatatagtgaaatccacatatcagaaaaataatttatcaagccatttttcccaattttttcctgtag

SEQ ID NO: 30444 - DNA, 417 bp, Homo sapiens
gcgtaatacgactactatagggcgaattggagctccaccgcggtggcggccgcccgggcaggtacaaaagcttgtccaaacaaggaaacttggcaaatttttcagaagaaaaaacttaaaataataaaagagatactgctattagggtgaggtttggcatgcaaagtttcaacactgagcaagttttatggccaagctatatgtccttaaaaatagggctttataaatggaagcactggcacaaccttcactatagtattgcaaacagtaacgctattttatataacctagacaagaacgtctttttaaaatcaaaaagctggtctattttaatatgttgggctcaaaaatttttaacaaaaataattggaaccactattttgtttaaaatatcaaaggtgaaaagtcctggaacag

SEQ ID NO: 30445 - DNA, 491 bp, Homo sapiens
actactatagggcgaattggagctccaccgcggtggcggccgaggtacagtcttgttgcttgttgcttcttttgtttgtggtttgcatccagctgtgcaaattgctgttccctttgagtgtcacaccacttaatttcatgagacagttgtcttcaggaaagtctgttcccatgcccccaccctccaggaacccagctaacacccagagcttagctgtcaagacagatttctaatttttacccttcgatggcagaactttaatgttgtgtccctagaaatccttcagccctagaaaatgtggaaagtgggccaggggcagtggctcactcctgtgatcctggcactttgggaggccaaggtgggagaatcacttgagcccaggagtttgagaccatcctatggaggacttagcaagaccctgttgctacaaagataaaaataaagatcagctgggcatggggcggggcacctatagtcctagctctttggga

SEQ ID NO: 30446 - DNA, 401 bp, Homo sapiens
gcgtaatacgactactatagggcgaattggagctccaccgcggtggcggccgaggtacaaaaaattagccaggcgtggtggcaggcgcctgtagtcccagctactcaggagagtgaggaaggagaatggcgtgaacctgggaagcagagcttgcaatgagccgagatcgcgccactgcactccagcctgggtgacagagcaagactctgtctcaaaacataataataataataaaaggtattagtgtaactgctgtgtggagaatgaattaggatggctgaaagagtgaacactgatttaccaaataggaagttctcacagtagttgaaacacaagttatggtggctaggactgggaggggactatgaagataaaaaaaagcggtctattttgaaatagaa

SEQ ID NO: 30447 - DNA, 400 bp, Homo sapiens
ctactatagggcgaattggagctccaccgcggtggcggccgagggtggatctttaaagtgttcttatctacacaaaaaatttcagactcccaggagagagaatcaggttggcttaagtaggttcaaatatctacacctataggttggataatgggtctggaaactagagctattgtaactaccattacagtggtctagataggagatgatggtaatttggattatagttgcagtggagacagagaaaagtggatgaatatgttaatgggcagaagccatcgggatttatagaataaagtgattgtgaagatagaaggaaaaaggaaagagaatcatgaatgatgcctagatttggggctcaaataactggtggaaggtggagccatttactgagattgga

SEQ ID NO: 30448 - DNA, 478 bp, Homo sapiens
ctcactatagggcgaattggagctccaccgcggtggcggccgcccgggcaggtactacaggagcatgccagagtgcccaactaatttttcaaattttttgtagacacagagtcttggtttgttgcccaggctggtcttgaacccctggctttcaagcaatccttcctcctaatactcccaaagtgctgagattacaggtgtgaaccatggcacccaaccccaattagttgtcttaaatgtatatcagaacatgcttctcctctacttaaaagtagtaaaataggccagacacagaaagaaatatactgcataaatcttacttacatgtgaaatattttttaaaaaggtttgcatatataaaaacagaatagaaaagggggtcaccaagagtgaggaagggaggaagagattcaggtcaaaggggttgaaagacacatttatgggggatgaataaatttagacaactaatggatagcat

SEQ ID NO: 30449 - DNA, 422 bp, Homo sapiens
tatagggctaattggagctccaccgcggtggcggccgcccgggcaggtactgactgtctcaaattcttttatagctgtccctcatgtcacctagctgctgagagctttgtgatcctaacaggtgatgactcagaccgacactgcattggtaggaattccacaaataggtgcctcaatgtgcctagattgaaatatcagcctttcccagactgacctgatgggttgacttcaggtgtggtgtaaacacctacattttaatgtaaacatttcagtgtaatcaatgagaactatcattctgctttaatcaccatgagttctgaaataacaaaggatttgtctgacattcattctaagaaattcattcttacctgactaagaaacttttttaacctggcacaataataagaaatgacctgtaagta

SEQ ID NO: 30450 - DNA, 411 bp, Homo sapiens
gcgtatacgactcactatagggcgaattggagctccaccgcggtggcggccgcccgggcaggtaccttccagctgtgacaaccaaaagtgttcccagacatagccaggtgtcctctgaagggcagaattgtccccagttgagaaccactgcattaactcataggattagcaggatacattaaataactgtgtgaaaatacaagacatcatggttgtcttcctccttctctggcattccagtcttctctgattgtctatacttacgtagaagcagaaagaagaaacagcatattctatccacatccctatgtggtccagcaagtgacttgttacgtccatgctttcacatcatgcgattcaggtaagtttgtccttttctaatgggcttgatatttactgtgtgtgaagagc

SEQ ID NO: 30451 - DNA, 461 bp, Homo sapiens
ccacgcgtccggattttatggttttaaatatcaataaatattccaattgttaaatagtgctaaagtgtggtaatctgaaaaatgctgaccataaatattaaaatgtttataagagaaatggacttctaaaacccacacacaatacacacaatacaaaactcacactcataccaagaaacaaataaattatttctatagtaatattgttcttttcaatgtacagaaaattttccaagaaattaaaaatacaaaatgttaggtctgtagaccaattacacaagtacataagtctgtagatcaattacacaagtatattcaaatctaaatatagttataatatgctaatatattaatatcaatgaaaatattattctaatatttgtgaaactatcagacaaaaacagcaaagtaaatacagtattttgttttaatttattgccattgctttatgcaaaacattt

SEQ ID NO: 30452 - DNA, 338 bp, Homo sapiens
ctactatagggcgaattggagctccaccgcggtggcggccgcccgggcaggtccgggcaggtactgtggagattttacaagtaggaacttaagatgcatcccctggaggtcttgccagcagcgagtgacttcatttaattcaatagatagtcatgttaaagtattggcactttccaatggttgttaacaagaggtagtggaaagtgccttaactttctaatcagaaagcattcatcctgttgagtcaaggtcctcataggaaatagatggcacaccgaaattaggatgagtgtgatacagcagaccatcaagggacattgcagtaacccatatgtacc

SEQ ID NO: 30453 - DNA, 437 bp, Homo sapiens
atagggcgaattggagctccaccgcggtggcggccgcccgggcaggtaccccaaacctaaaataaatgttggaattaaaataaaactcatattaaagttttaaaaaagggctttgtattaggtaattttacctaaacgtaggctaatgtgttctgagcatgtttaaaatgagactagccgggccaggtgtgatagctcacatctgtgatcccagtgctttgggaggccgaggcgggcagattgcttgagcttaggagttgaaaaccagcctggacaacataacgagaccctgtctctacaaaaatgagctgggtgtggcagtgtgctcctgtagtcccagccatttgtagggctgaggtgggaggattgcttgggcctgggagctggaggttgcagtgaaccaagattgcaccactgcacttcagcctgggtgacaa

SEQ ID NO: 30454 - DNA, 456 bp, Homo sapiens
cgtggtggcggccgcccgggcaggtacatgataagatgggaggatatggggtgtgtatgcactgttgggagagcatctgaatttggggagacatctgttgaagcctgtatagaaggattaacatcaaaaacattggccattgactctggaacaagggggaaaatcaaaccatctcacccaaacactgtgacagtgtttgaagaatatgtgaaccaaacatttgactatatcttcatcacaagccctctctcttttatagaattgcctactcctaatattgaagaacacaattgtattcatcttatggatcttcaggggaattatccagtatcaggtttttaaaagctggctcctgtgacacacctaaaaaattccactccctagtgatatgaaataataaatgaatgagtgaaatgaatgaaaacagatgaaactgaatgagagaaatcaaataat

SEQ ID NO: 30455 - DNA, 414 bp, Homo sapiens
atacgactcactatagggcgaattggagctccaccgcggtggcggccgcccgggcaggtacatcttttcatttttttcaacgttgaatcctgtcagtgtattttctaccccaaaaattaatgtaaaaacttcatctgcatttcacacctacatcaatagtagtgtgtgtcacccacgagcagctgcttggaacgtgccctctctgagaggttacaaattggtctgtgccacctcacacacaaccgggatgtcagcatggaggacagagctggaaggaacctcaaaggtcagcagcaggatgatttctaagcctggctgagaaacataatcacctgagggagctcactaaaaacacaggttcctggactccgacccagacctactgaagcagaacttccaggtggagcccaggaa

SEQ ID NO: 30456 - DNA, 466 bp, Homo sapiens
ccaccgcggtggcggccgaggtacaggaaatatcaatattgggagagccaaaggactttctaagaactctagacaccacatatcctacaggaacaggtgacaaaagtaagagaagagggtaatgcactgtttgtatttaatatgggaagtaaaaacagatgaggctcctattgaggatatgaatctcacacagcacatgagggagaaactgttcaaaaagtaaaattacttctccatattctccaaccttacccatatccctttcccaacgcgtttccccttgactcatcgtaaagcagtgtgaacgtaatagaaaataacattctcttcttcttccccatcacagtgtgagtacctgcccgggcggccgctctagaactagtggatcccccgggctgcaggaattcgatatcaagcttatcgataccgtcgacctcgagggggggcccggtacccagcttttgtt

SEQ ID NO: 30457 - DNA, 460 bp, Homo sapiens
  misc_feature 7: n = A,T,C or G
ggcgaantttagctccaccgcggtggcggccgaggtacatttttgtcttccaggtgtaacttcaacatgttgttacttttgatccctcagttttaattcagtgtctaaagcctgagaaatgccagtggcctgacagcagcagacattgcacaaacccagggtttccaagagtgtgcccagtttctcttgaacctccagaattgtcatctgaaccatttctataacaatggcatcttaaatgggggtcatcagaatgtatttcctaatcatattagtgtgggaacaaatcgaaagagatgcttggaggactcagaagactttggagtaaagaaagctagaactgaagctcaaagcttggattctgccgtgccactcacgaatggcgacacagaagacgatgctgacaaaatgcacgttgatagggagtttgctgttgtaacaggaagacttgcaggacata

SEQ ID NO: 30458 - DNA, 490 bp, Homo sapiens
ctactatagggcgaattggagctccaccgcggtggcggccgcccgggcaggtactttaggggtcttaggtgggaggattgcttgaggacaggagtcagagaccagcctggtcaacatagcggaagaccctgtctctacaaaaaatttaaaaattagccaagcatagtggtatacgcccgtagtcctagctactcaggaggctgatgcagaaagatctcttgagcccaggaggtggaggatgcagtgagctataattgtgccactgtattccagcctggataacagagcaagaccctatctcttaaaaaaagagttcttaggactattttcacccgaaaactgaaaacacacaaatctttgaaatgaaatgcctatgctacctactcctagatttgccagatttcaatttaaagtttaaaaagtgctatcctttttcaatagcaggtaataaaattgagtttatagaattatacatacttttcccattcca

SEQ ID NO: 30459 - DNA, 410 bp, Homo sapiens
ttggagctccaccgcggtggcggccgaggtactttaagtatagctatctggaatgcttgggaccaggtgtgttttaaaaattcaggtttcagattgtagaaaggtaatatgcagcatataccacatagattgtgatatctccactgggatcagatgcagcatccggtgatcaaataatattaacatttctgcagtgaaacatgagtattcacactaagaataagatgaggaccattaaaggccttacaccagtcaggtgcagtttggctgccctgggagtttaggactgtctgaatactgccaagcgagttttatcataatcaagtgaattatgattaaacttgatttcgagctttttggattttgcagatgcaggcgttgtaggaatagcactgtcctgttgggcggct

SEQ ID NO: 30460 - DNA, 363 bp, Homo sapiens
  misc_feature 11, 23, 66, 85: n = A,T,C or G
tccaccgcggnggcggccgaggnacaaaggctggggaggttgcttaatgcgcaacaccaaggaagngatatgaaataaatagggntggtatccaccaacggatagaaatttttacaactatgtgtggggagagacagtgcaaacagaagaaacagaatgagctaaaacacgaagcatgttccagcatttttgtccttttgtttgaagtatagggtatgggaagaagtaagactggagagactaatgccattcttgtcgagtcctaaaagcagacttaggacttaattcaataagcaataggaagccattacatcttttgaactgcaatgtggcatagttacggacgtgctttaggaaggctgc

SEQ ID NO: 30461 - DNA, 406 bp, Homo sapiens
gtaatacgactcactatagggcgaattggagctccaccgcggtggcggccgcccgggcaggtacctggagccaccaggactccctctgagcccacaaaggagtgtcttctcaccaccccgattatactggtctagttatgctttggagttaaagccaggctgctattgcagggctgctgcaatccttgcaagcacagttgttctttgcttgcgcttgctctcgctctcgctctcactctcactcttgctcgctctctttctctctctctgacttcagtttaactttttaaacttcagtaataagtgttcctcaaaatagatggtcttcctggttgtaggtacctcggccgctctagaactagtggatcccccgggctgcaggaattcgatatcaagcttatcgata

SEQ ID NO: 30462 - DNA, 416 bp, Homo sapiens
  misc_feature 382: n = A,T,C or G
ctactatagggcgaattggagctccaccgcggtggcggccgcccgggcaggtaccacttcctgacttaagtcagagatgaccagcattctgagttaggacataatcactcagggtcctgacccactggtgaatggattgagagaggtagtgtggctgcacttgcatcaggagcaaacctgacatgactctaagctcagctgcttttctccttcttctcagaaaagctcagctgcagccaggtgcaggggctcatagctataatcccggcactttgggaggccaaggtgggagaatcgctggagctcgggagttcaagaccaacctgggcaacatagtgagaccctgtctctatttattaaaacatattaataaacaaaacanaaaaaaaaaaaaaaaaaagtacctcggccgctct

SEQ ID NO: 30463 - DNA, 609 bp, Homo sapiens
gcgaattggagctccaccgcggtggcggccgaggtacattaagcaaaactcttttagtttcattttccaaagatctatttgattttaatcaaacagccccaaaaaccataacgtaaacatgaaccagaatcagcgttttatactcttaaaaactagggaagctttgccttaagaatggctagattcacaggctcaaggaaattttcaggacaccgtatctctcacctctcacctgtttttcacttagttggccctgtttattctcaggtaaaatgaatgccaacaacatgcttgaccccaactccaagtttgtaacaaagaagggatttgttcttaaaaattcaaatacaagtcctaggtctgacactcattacccaaaattggatcgtacctgccggcggccgctctagaactagtggatcccccgggctgcaggaattcgatatcaagcttatcgataccgtcgacctcgagggggggcccggtacccagcttttgttccctttagtgagggttaattgcgcgcttggcgtaatcatggtcatagctgtttcctgtgtgaaattgttatccgctcacaattccacacaacatacgagccgggagcat

SEQ ID NO: 30464 - DNA, 394 bp, Homo sapiens
  misc_feature 214: n = A,T,C or G
gcgtaatacgacctactatagggcgaattggagctccaccgcggtggcggccgtgtatttctgtaaagcataaaatattgtttttaagttagttttcatatcatgttacttaattcatcatttcaagattaaatcagtatctagtaaattgatctgcctacctagcgattggtttccatcactaatgataaaagttttgatgcttctccctttntcaaggtgctacatactataatccttagaacatcttaagaaataaaaaggcaaggctgggcacagtggctcacacctgtaatctcagcaccttgggaggccaaggtgggcggatcacgagatcgagaccatcctggccaacacaatgaaaccccatctctactaaaaatacaaaaattag

SEQ ID NO: 30465 - DNA, 356 bp, Homo sapiens
ggcgaatttgagctccaccgccgtggcggccgaggtacttttttttttttttttttcagttctgggatacatgtgcagaacgtgcaggtttattacataggtatacatgtgtgggaaggggaggcaaaaccatgtagagttgtgcaggcaattgtcagggctttagctttgactctgagtgagatggaaagctactggtaagttctgaacagaggagtggcgtgattttttttttattatcttttcagttctgggatacatgtgcagaacgtgcaggtttattacataggtatacatgtgccatgggggtttgctgagaatgatggttttcagttttatccacgtccctgcaaagt

SEQ ID NO: 30466 - DNA, 401 bp, Homo sapiens
ctggagctccaccgcgggggcggccgaggtacatcagacaaggttctctagtgtcaagtgtaataaaataattttaaagactgaagatccctagcaatgagcaaactgaagctacaagagattatgtgacttaatgttacatgataaattaattaatttaaccaatatctattgagttaccattaatatttattacagtccttgctttataatccacagatctttctactttactactcagccctacatagctgataaagcaatgggtggggatactcagaatccctcatgttgcagccattaatttactgttgcttgtctccaaacctactcttctatttactattgtctgtgatgctggggctaggactgatcagatcacatctcttctttgccagtga

SEQ ID NO: 30467 - DNA, 669 bp, Homo sapiens
gtatacgactactatagggcgaattggagctccaccgcggtggcggccgaggtacatgccatgaaggacatatacaaggtaatggaaccacccaataaaaagtagtcttactatccttttgttttgggcatacaaaagcagattaaggataatcgtcttgttcatttatttatctatatacttatttatattctgtctctaggactgaaaaagccaaaagatcagggacctagttttgtttcttgctctttctcaagcatgaggacactgcctggcacatagagggctcacagtaaatatttcctcaatacatttgttgattaagtgaaggtgatagaaactgacagggaccttgaacaagattagagtattttatctgtatctatattgcatttgtttttgaaattctatccttatttgagctaatacaattttaacagaagacattttttatgtggagaagctataggaaataaaacctcataatgttgtaactcatgagagctaggatacatgtttgaacaaatattcttggtttgtctttatttctagatatgacatttgctttcttttttacaattcacctaaaggctgcttatttttaaatgtgtatttaaaacttcaaagttgcgagactatcttttagaataattagctataaagaatcaa

SEQ ID NO: 30468 - DNA, 436 bp, Homo sapiens
actactatagggcgaattggagctccaccgcggtggcggccgaggtacatcatgtagagaggcagactcgtcgctgacaaaagggctgacccctggaaaaccagcacagagccagctcttctgtctgaatccactctctccaaaacataacataagtcatggaaagaaatgagtctcaagaaatgagactcttaccgtgatgagagggggacattgaaaagctactttagtgattagggagagaagtccccttttgcatcccaaatcaagcagaggactggtagtccaaatataattttggaataacctgagtcacctgggccttgaggaatcctggcctcttagtccacatttgcagaaatatcaggaggtcaatcaggaagctgtttaggcatctcaacacagggtcaaaaagctcctaggtacctgcccgggc

SEQ ID NO: 30469 - DNA, 380 bp, Homo sapiens
gtaatacgactcactatagggcgaattggagctccaccgcggtggcggccgaggtacatgccaccatgcctagctaagttttgtatttttagcagagacagggtttcaccatgttggccaggctggcctcgaactcctgaccttaggtgatccaccctcctaggtctctcaaagtgctggaattacggtgtgagccactgcgcccggcccttagtagcatcttttaatggaggtagagttgagatttcagtgactaacaactaaaggtattaaaggtaggggtttatatgatacatttgcattttagaaaactgatctaagcttcaatgtgaagaacagattgaaatggaagggggagaagactagaagcagaaacatta

SEQ ID NO: 30470 - DNA, 602 bp, Homo sapiens
acgactcactatagggtcgaatggagctccaccgcggtggcggccgaggtacagtttttcagtttagttctcttagacttaaattgtccaacatctggagagcagagagaggcactcacacatttatacacattccttttgagtggattgaagggaaggtgggcagccattgctttgggggtcatcttccagacagctgcctgctagggagccctttgcattcggcgatgctgctgctgttcattgtctggccatgggagtaacaattttggacatcattgatgatgtctggaattctttggtgtctaagtgcatggtagtttttttttctttgtgttaggctggtttcaaaaatggactgtcaccatattttgttgctagcacttaacagtgagcttttaagagccctctatgtcttgaattttgggctccatagcccacttgtcccaaagtgagtcatttctttgaaagaaaaataaaaggaggaggattttgctttggtttctatttctgttttcatcttgctgcttcagcttttgctgtaacaaaggtttatgtaaagcactcacaaaaatgccctatggtcttgcacaacatttaat

SEQ ID NO: 30471 - DNA, 670 bp, Homo sapiens
gcgcgtatacgactactatagggcgaattggagctccaccgcggtggcggccgcccgggcaggtaccaggagggtattgatgtttgaggtccaaactgaaaacccatcacctccttcccactgctatagcagcgttagccctggggttcattatctagccagttcacaccttctaaagtggggctctgaaaatgtcttacttccctcacagacaaagcaattctcaagcctcctgagatcacccaccaaccagagcaactgctgtcacttggaggtgcagctgaattcttctaattgtgacacaaactcttgaaactgtaaatgctgaaagattaaatgaggttataacactcagaaggttttacaagtaaaagtaagtcaaatcaataggtctttatttcatatctgtaatggtttagctctgcgggaagtgttagcagctatatgaattaggaagaatttagaagacaatccctaaacacatgaaatgtccaagtaagaagataacatatttatccaaatatttaaagtgaaatgctccagatatgggaagcttacagttttcaagcaaagctttttagaaaaaattatggaactattttaaagagagctaaacatttctttgccttaggcagaatatacagaacacagattcaccttttctgtacct

SEQ ID NO: 30472 - DNA, 535 bp, Homo sapiens
actactatagggcgaattggagctccaccgcggtggcggccgaggtaccattcttatctcagaatgctgtaaaccatcagtagaagcagtttagatttggactgcatggtaaaatgaaaagtaataaccctccaaccacaacctagtcagggtattaataattatatgtagcaagaaaacaaagaagaaaataatattgaaaaaatggagattccccaaccagtttcatatttgaaggatctgagttgtatttttattaaggaaattttttttctgaatactgtcttccaaaatgttaacattaaaatctgaatcagaggactctgaatggaaaagaagtttgatcactgacacctagggctctgaagcgtgtgtggccacgtggaaaagtcgaaggatgcgctgtcgaatctcctttgtcttcactccatagacaattgggttgagcacaggaggaaccagcagatagatattggccaagatgacgggcagcggagagtcacgccgcttgctaaagcgatgcaccatggacaat

SEQ ID NO: 30473 - DNA, 407 bp, Homo sapiens
acgactactatagggcgaattggagctccaccgcggtggcggccgaggtactaaagcccattcttgctgaaaatctaggatgacaaacaactcacagggcaaaacccatgtggttaggtgggtgtttgttttgatgcgaagcctccagttttgttcctgtctaggcctgtcccacagtcatctgacattcctgcaaaaacttgtctttattttggatggacacacaagcaatggaattggcactgaaatttcagcttatggtgcagggtatgttaggatacaatttccccctgaagtaaatactgaaacactgacatgtgggtttgttttacttttttacttctaaaaatttgcaaacgggcacggcggctcatgcctgtaatcccactagtttgggaggcccaggc

SEQ ID NO: 30474 - DNA, 463 bp, Homo sapiens
cactatagggcgaattggagctccaccgcggtggccggccgcccggccaggtccatcaccctgctgagggacatccaggacaaggtcaccacactctacaaaggcagtcaactacatgacacattccgcttctgcctggtcaccaacttgacgatggactccgtgttggtcactgtcaaggcattgttctcctccaatttggaccccagcctggtggagcaagtctttctagataagaccctgaatgcctcattccattggctgggctccacctaccagttggtggacatccatgtgacagaaatggagtcatcagtttatcaaccaacaagcagctccagcacccaacacttctacctgaatttcaccatcaccaacctaccatattcccaggacaaagcccagccaggccccaccaattaccagaggaacaaaaggaatattgaggatgcgctcaaccaac

SEQ ID NO: 30475 - DNA, 481 bp, Homo sapiens
ctatagggcgaattgtagctccaccgcggtggcggccgcccgggcaggtacgcggggacagtagtaagcctcattactcagttgtgagggggaaggtagactctttccagacctttgataaaggggctgctcaaaaaagccacgaccttgggcctctgctaaaaccatggctttaagtaaggagggagcagatatataaaaaaccttatccctctttctaatctcttatgtcctgtgagtgtcacccattgagtaaacccaagtggaagtcaaccggaaaggaacttggatgatggcagcctttacagatacaagtaaagaaggtaattggcccaatttgtgtgaaaaaagagaataattctaatccaaaccgcctgtctctggaaataagaaaagctctggagggtctccaaagttaccagaggaaggcctgaattttatgggtgattgataaatatttccaagcttatgaagaaaaaaa

SEQ ID NO: 30476 - DNA, 609 bp, Homo sapiens
ctatagggcgaattggagctccaccgcggtggcggccgcccgggcaggtactatatggacaccaacatggagcagaaaatgagggcagcagtgtccaatctcattccaggtgagaagttgcacagtgtccaataggtgcatacatctccttagtaagtagttgtgattaacaatgaaatagaaatgaaaaatatatttttttatttatgtgtattatatttttcaagcagctaataagttggtaggacataatatttaattcgttggggacctaattatttataaattgaatggttagatatttcttttggcctaagccaccatgaaaaaatcactgaggcgctaagggaaacatgaactaagaagcccttctgagtctctgttttctcaactgtaagatgaagaaacctgctccaccttcctcttgcgattgttgaacggcagttgagatactgcgcagaatggaccttattgatggcctacccaacatccattctctactccctctactctgatggcacccggattagattgtggaatctaccccttcctcacatgcctttaggaagttgagtccagggaagctccaggagcaggctggttttatgt

SEQ ID NO: 30477 - DNA, 382 bp, Homo sapiens
ggcgaattggagctccaccgcggtggcggccgaggtactccctttccctgactcagccttttattgatgaaggcagggatgggatggggagagctcacctggcaaagactccacacaggtgtgcagcacaccctgatggggccagaaaatgtcactgtgagccctaggggtgaaagacacagtgatgggctgctgggcaactaccaagtgtagagatcctgagtgcccagagagttaccaaccacttcccttccctgtgcagatcagtggaggcagatacatacacaaaatgggaaggggaaagaaaacggcttttagatctccccaccatagagactataagattattccagaatggccacaattttttcactgcccactc

SEQ ID NO: 30478 - DNA, 478 bp, Homo sapiens
  misc_feature 289: n = A,T,C or G
ccgcggtcgcggccgcccgggcaggtacgttcttggggaatggctgcagggacccctggctattacatttgcatgtttctccttgttggtcagtagcgaactgtagggagcatcctcatcataggcttgcgggcaaagatgatcttgttatagttttcagttggacagtctctggaatccgcctgtaagtgtgtgggttctgggatcatggtaggagccatggccaataccgaataagcgccccacattgataacgtggattctgacagcgtgtccctgaacacagctntgccagaagacttggaagacttcctccttttcggctgaatgacgctggaaggtttattctgccttgatgcccagggtctttcctcgagggcacgcatgcattccagttctctagttttgcttttctcaatgagtcttttcactgtctgagaggtataggtgacataggcccggccagggtcatgttttt

SEQ ID NO: 30479 - DNA, 577 bp, Homo sapiens
gcgaattggagctccaccgcggtggcggccgcccgggcaggtaccatggatggaagtggggctttggcaaaggccctagcatataggcctggcactgtggactcggtgttgtctagcagagaggccttgaggaagtggcccagcagtgtgcttgcgtttcaagatatctatcacccaaaagacttcgagatagacaagctttgttccctgccaaagtgacaaatgtcagcttgctggaaaagtttgaacgaagtgagagtggtgggaagattatgacccctgaaagcttatcatatccaagttgtctgaaacacgacagtgagatgaagccccaaacatctccagcttgccaggatcataacaaggcaggacaggaaatgtgctatgtatgtttggaacgagcacaacgaaattccctgttgtacctcggccgctctagaactagtggatcccccgggctgcaggaattcgatatcaagcttatcgataccgtcgacctcgagggggggcccggtacccagcttttgttccctttagtgagggttaattgcgcgcttggcgtaatcatggtcatagc

SEQ ID NO: 30480 - DNA, 612 bp, Homo sapiens
gagcgcgcgtaatacgactcactatagggcgaattggagctccaccgcggtggcggccgaggtacgtatgttgaaagaggtaaataaatgtatgaaaatataaagcattcagaagacaattgtccataaaaaagaaccaagtgggtatcctggaaattcaaaatacaatgtctgaagttgagaattagatttgttacaaaccagatggcacacgtcagaaatctgaatgagaaaactcagaagcaagttaacagaaaatatccaaactgaatcacagaagaagactaaaagagagcatgggagttatgtgagacacagacaaaagttccaacatcgatgaaattggaatcctggaagaagagagaggggaagggcaagagaaatatttaaagaaaaaagtaattgagaattttccagatctgatgagaaactttaaatcactgaatcaaaaagttcactaagcccaacagggtggacacaagtgcacacacaaacatacacacaaaacccatccaagtacctgcccgggcggccgctctagaactagtggatcccccgggctgcaggaattcgatatcaagcttatcgataccgtcgacctcgagggggggc

SEQ ID NO: 30481 - DNA, 255 bp, Homo sapiens
cgcggtggcggccgaggtacctggaaagatgaacaggattgcagcagatagagacaggtagaaggagagagattccaagtggaaggataaaggagagggaagagaagcaaagagcgcaacttccaagaagattttctggtttctggcactggccatagatagctcgtgcagaatcaagcaaagaggtttatgctgagatattaatggaatgacattttgagagtcttgagaatgggcacaaaagtgggatgtgaa

SEQ ID NO: 30482 - DNA, 410 bp, Homo sapiens
agcgcgcgtaatacgactactatagggcgaattggagctccaccgcggtggcggccgaggtactccaaggctctagcaagaaatgaatttagggacctctgcctttgatatgtgcttcttcacaccccaccctctctaaaggaaaaacacacagaccactgaaaagaacactcttaaaaagattctgaaaactagcagtgaagaaagtttcaactagtgcttctcatattctctaactgtagaatccctttcctgagcatatcaggcccccaaaccaatttcaaggggcctctgaaatttctaaattggtttccaaaataaaattatcaaaatatttcacagaaaaacccagatttctgtcttctcttgcaaaaatgtggatgtgcaggcagctgtgggcttgtatctcc

SEQ ID NO: 30483 - DNA, 482 bp, Homo sapiens
ggcgaattggagctccaccgcggtggcggccgaggtacctagtcacttctaaagcagaagggagcatttggctgggaaacctaagaatggaattcataggttttttcctggtcattgtgtctgctagctcacagggaaacacactgtataggtgaccatgagaatggccttcagactaaccatcagtaggtatttctaattgtaactactgatgggagagttccagttgaacatcgcagaaagaaaccctcacttgacatgcacatctttcaagtatcaaaacacctgttcagatccctattgaaagggagacaggatgactactcattttgtgtctgcaggtgtttcccacatgtctccaaggctcacccaattaatccattttgtcaaaatcctcagaggaagtatgaggtagaggaatgagcttgcaattggcagcctgaacaactctattctctaagctggactctgggtcttggctt

SEQ ID NO: 30484 - DNA, 454 bp, Homo sapiens
attggagctccaccgcgggggcgggcgaggtacctaaatcaaataaaggaaacatcaaccagacacaaatccaggaacaagtgcaaatgcctcacttgtcctgttcaaaatgctaatataagaaagacaaagcaagaagcaaagaatcgttcaaaataaaaggacgtgggccaggcgtggtgactcatgcccgtaatcccagcactttgggaggccgaggcagccggatcacgaggtcaggagatcaagaccatcctggctaacatggtgaaaccccgtctctactaaaaatacaaaaaaattagccaggtgtggtggcgggcgcctgtagtcccagctactcaggaggctgagacaggagaatggcgtgaacctgggaggcggagcttgcagtgaactgagattgcaccactgcactccagcctgggtgacagaatgagactccgtctcaaaa

SEQ ID NO: 30485 - DNA, 399 bp, Homo sapiens
tagggcgaattggagctccaccgcggtggcgtgcccggcctctctccagtttccagttggaatccaagggaagtaagtttaagataaagttacgattttgaaatctttggattcagaagaatttgtcacctttaacacctagagttgaacgttcatacctggagagccttaacattaagccctagccagcctccagcaagtggacattggtcaggtttggcaggattcgtcccctgaagtggactgagagccacaccctggcctgtcaccatacccatcccctatccttagtgaagcaaaactcctttgttcccttctccttctcctagtgacaggaaatattggtgatcctaaagaatgaaaatagcttgtcacctcgtggcctcaggcctcttgact

SEQ ID NO: 30486 - DNA, 393 bp, Homo sapiens
gcgtatacgactactatagggcgaattggagctccaccgcggtggcggccgcccgggcaggtacatgtgtgcttttttgcatgtgtattacatgccaagggctttatatatgttatgtctgatccttctgacaccaccacgaagtaatattaattgtccccattttataaataagcaaactgatgcccaaaagattcattcaagcaaggctgtgcaactagtaaatggcaggaccaactttggcctgatgttcttttcaccgcaccacgctacctctttcagatgtccaagatggagccacatagcttggttatggggttccattagtctgccctcttatcttatttcagcacctaccctgtggccatgaaccattgattcataattttcctg

SEQ ID NO: 30487 - DNA, 468 bp, Homo sapiens
  misc_feature 11, 13, 64, 65, 297: n = A,T,C or G
actgaagcggntnggaattttctgatgaacaggacacatattcgtggctgggatgaaacgaggnngcagatgtgaatagaccatatcagaaagaaccttgaggcaaggccaaggaacttgagcttcatgctctaagcagtccccactgagggcttgcaccctccagagtgatggggcaagattatagctggcatgctcagaaccgtgcatgagcgaatgaacctctgaatgcacatacatatgagcatgcacattagcaggagaaaaaggtgcaggaccacagctgaaagtaacggngaagcacagaggaatttaagcaggagggtgccattgttagctttgtgtttaaaaagccctttctagttatagtatggaacatgggctgggtaaggcagggagattgggaaaaggcaggaagtgggaatgggagacagggagaaaagtttaggaagtggtgatagtcaaggc

SEQ ID NO: 30488 - DNA, 464 bp, Homo sapiens
  misc_feature 45: n = A,T,C or G
ggcggccgcttattcaatttctaacagggatttacacattcttangctatcttgacagaacatgggaaaaggcagtaatagacttgtatatctaggatacaataaagatgtaaaatctacccttatgtcttttctagtagctcatatattccgcatttgaaatgtggtgatgatatagtcacttattcaaaaaacacaggagtgcctactgtgtgcttggtatgatgcctggtgcagaagttgcaaagtgtatattcatggagacagccaagccaagcagggctgggacacaaatgtgtcctgaattgctgtgaggtcccaaggatgaaatgcctacctgttctttgcagaatcaggaaggctttgcagaagaggtggtctcagagcttggagtacctcggccgctctaaactaggggatcccccgggctgcaggaattcgatatcaagcttatcgataccgtc

SEQ ID NO: 30489 - DNA, 420 bp, Homo sapiens
ctactatagggcgaattggagctccaccgcggtggcggccgcccgggcaggtactatgaatgttctaaggcccttccaaacctgtaaattctatgattcaatgaattacagaatatattcaaagaattatagaacagaacatatattccacgttcatgtgctctaccagaacacatttatttgctctattcaattcaacaaatatttaggtccggcatggtagctcacgcctgtaatcccagcattttgggaggctgaggcgggtggctcacttgaggtcaggagttctagaccagcctgggcaacatggcaaaaccccgtctctactaaaaatacaaaaatcagttgggcatggtggcacgcacctgtaatcccagctactctggaagctgaggcaagagaatggcttgaacttgggag

SEQ ID NO: 30490 - DNA, 403 bp, Homo sapiens
tatacgactcactatagggcgaattggagctccaccgcggtggcggccgaggtacctggtgttgattagcctgtgtgagaaagataaggagagctggtaattataattgagcatgtgccatatgccaggcgttatgttaactgctttacatgcattacctctttaatccttataatcctcatagtgctattattatgaatatttaacagctgaggaaacataggcctacaaaggttaagtagcttgcttaaaatcattcaaaagtgatgtggtcagaattaaattctaagcctgtcagttctcagagcacatgttatataaactctctctgttatactgtctgcaagataggcagcttttaatatttgaaggctgtcaataaagattatatgagagtagttcc

SEQ ID NO: 30491 - DNA, 655 bp, Homo sapiens
ctatagggcgaattggagctccaccgcggtggcggccgaggtacatgaacttgaatggaaataaaaaggttaaaagcaagtaagtggtgctaacaacaacaaaaaggaacaaatctgaagaagtgggaacgtgatgaacaaaccccagccccctgagcctcggggacagcacagatgcgtgtgtattgcagcacagaggggcagggactaaggacagaagatgcatttgaagacatggtctaaaacttcccaaatttggtgaaagacaaatttatagattcaagatgccaaagtgcaataaatgcaaagaaaatcacaccgaggcacctacgtgcaaactgctaaaaaccaaatctttagattgttaaaaaaaaaaaaaaagaaaaataaattaaaaaaagagtcaacccataattctagatatccagcaaaatacccttcaagaataaaggcaaaatataaatcttagagaaatgaacactaagtgctttgctagcagcagacctgagaactgcattaaccatgacttgttccgggtagggctcccggccgctctagaactagtggatcccccgggctgcaggaattcgatatcaagcttatcgataccgtcgacctcgagggggggcccggtacccagcttttgttcccttta

SEQ ID NO: 30492 - DNA, 421 bp, Homo sapiens
ctatagggcgaattggagctccaccgcggtggcggccgcccgggcaggtactgttcattcaatttttctgaatatttgaaaaattttaacataaaatcttgagaaaaagtaaactgtagatgctaatagcatacaaagtgcagtcagtgtggagaacagaagagaaagatgaattccaatgaagagattcagcaggtttgtggaggagatgggattgagcagaaacttaacagattgggccttttaggtggaggagacaatataggaaaggcacaaacctggggaaatgcacaatgtatgctgaccaagaagtggtctggcgggtagagtaaggctggaagagactctgggagaggaacatgagaggtcccagggctctgaaccagggcaaccaacagaaaaggaagggacagactgggct

SEQ ID NO: 30493 - DNA, 356 bp, Homo sapiens
gggcgaattggagctccaccgcggtggcggccgaggtacgcggggattttttgaaaacaaagcgatattattttgacatccttaaaatagttagcatttgccttctatgtatttgtgaatgagatctcaaaatataatacttttcataagaaaggtcgcagaaataatatatgtcagcattttaagaaggggtatgattcgttttctataatgctaatcaagtaaaatgagagtctcagtgaagtggcacataataaaaatcttaaaatttttcatatccttttatcacagtaagacaaatgtttgttaagaaggaaagaaactaagaaagtatttgaggtcctaagtgagcccaa

SEQ ID NO: 30494 - DNA, 493 bp, Homo sapiens
actactatagggcgaattggagctccaccgcggtggcggccgcccgggcaggtacagacagggaaggacttgctgttggccatctttggagattgctgaccctggtttgcagattcttcttaggaactgtgatctttgtggttggggagtcatatgatctgattctttaacctgctgaaccttgagaagctaagagcagcaaagaaggggccagaagtagagaaagaaagaaaattagagaggcacagaggaaaggataaaaggggaatgaagtcagagaagtggagtctcaggaaccatggatatgcaactttgtttacaacgaactttctgctgcctttctaatcttcaaattaaaatttattttggccaccttattcccaaggggcatagcagatctggttcctgaccagttcaccttattggaccaataaatctcatgtgtcacatgatccactgactgtttctcttgtgactttgtcctggtcttggt

SEQ ID NO: 30495 - DNA, 455 bp, Homo sapiens
ctatagggcgattggagctccaccgcggtggtgacctaagtgtatatttatccaaacatctaatttattccagctttagatcttctcgcatctgagttattaaaatacacatttaatttacaatacctactagtatttatcaaaaatttactgaaattattcatggtatttggggggaaacactatctaaaaaggacccatgattgattatttgtttatttatttatttagtgcacttgattttgcagatgagtctggaagtgttagttgcaaagatatgcatttacttctctggctacaaaaaagaatagaattgcacaaagcatagcattgtgaaaaagaagaggcgatgacccctacaccgaccaaagtcccgtgctccactgcccagtgcctatgtcccaccactgtcgctgccaccctgcccgagagaaaagctgaaggggatgctaaag

SEQ ID NO: 30496 - DNA, 433 bp, Homo sapiens
cactactatagggcgaattggagctccaccgcggtggcggccgcccgggcaggtactccaacccaagcaacagagcaagaccctgtctcaaaacaaaacaaaacaaaacaaacaaaaaaaaatgaggtaggcatgttttattcccatcttacagatgaggagactgaggcaataataattcaatggcttatctaaagtcacaaagctagtaaggagcaaatccagttctgtctgcttccaacccaccttgtcccacttgcttctttattggagaaggggcagatatttactctgcagtccagggagcatggagagtcaagtagagaatcaaagtcagcaaagctgaacaccactgagagactgagaggaatgacagatgacaagagacagggttgggaattagtccattaggagccagcccttaacagcactg

SEQ ID NO: 30497 - DNA, 531 bp, Homo sapiens
gcgcgtatacgactcactatagggcgaattggagctccaccgcggtggcggccgcccgggcaggtacatcaccctgctgagggacatccaggacaaggtcaccacactctacaaaggcagtcaactacatgacacattccgcttctgcctggtcaccaacttgacgatggactccgtgttggtcactgtcaaggcattgttctcctccaatttggaccccagcctggtggagcaagtctttctagataagaccctgaatgcctcattccattggctgggctccacctaccagttggtggacatccatgtgacagaaatggagtcatcagtttatcaaccaacaagcagctccagcacccagcacttctacctgaatttcaccatcaccaacctaccatattcccaggacaaagcccagccaggcaccaccaattaccagaggaacaaaaggaatattgaggatgcgctcaaccaactcttccgaaacagcagcatcaagagttatttttctgactgtcaagtttcaacatt

SEQ ID NO: 30498 - DNA, 408 bp, Homo sapiens
gtaatacgactcactatagggcgaattggagctccaccgcggtggcggccgaggtacctggatttgaaaacattacctgagagaaaggtgaattattggggttcaggtcaattctgggcaggatctcatcagagtcagaatgtggtcacaaagtccttcatagtggacagaggaaaactaggaatgtggttgatgagatgaggggaaaaaaaagaatagtgacatgaaagaaaatctttgcctaaataacaactttatataaagctagctttgtgcctcagaagggagaatttcctgtctgcttcccttctgccagctgccagcattcacacagttggtattgatggttaggtttctgtgggctaatctgggattgtaattgccatttataattccaattccagaggg

SEQ ID NO: 30499 - DNA, 353 bp, Homo sapiens
tccaccgcggtggcggccgcccgggcaggtacgcggggtcttgaaggaatcccttatttgcacgtctcccgttttcttttcacatcaatgcagagtccctctgtgaatttacaacacccaacacccatgagttcagtccttaagaaggaaaattgagcaagtatttaattggttggacattgcataaaagaggtccatatccaggctaactctagaaattttattctcaaacttagttggcctcttttttttctgtcagaggaccattcttagtggcactggggaaatcttggcacccagaagaattcaactgcgctcactgcaaaaatacaatggcctacattggatttgta

SEQ ID NO: 30500 - DNA, 461 bp, Homo sapiens
ggcgaattgtagctccaccgccgtggcggccgaggtacgcgtttaatctatacatttccactttttgtaaaatcccataatttttctatagggaacaacagatctgtcatatactagcttatgcttttcttattctaagtggattttacagtttagaaaattccaagtaatcttgacacatcattattacccaaacaattacttccaagtcattgtttaaatagatgaaacccattacaacagaggtctcagaccttcttgcctcaggggccagagagatgacataactgaaatagctcagctttagccagcaattgcttaatggaaatgtgggatctttgttgctagctctgatttaaaaaagacagaaagaaagaaagccaggtagggcatggtggctcatgcctgtattcccagcactttggaaacacttttggaaggccaaggcgggcagatcacct

SEQ ID NO: 30501 - DNA, 490 bp, Homo sapiens
atacgactactatagggcgaattggagctccaccgcggtggcggccgcccgggcaggtacagccactattgtgcgtcctttcaagggacatcagggcagcagcacagcttaccctggggtccccctgggcaccccagcataagcagtgatgtgctagacagccaccaaaaccaaagtataactacaaaaccttgttccaaagggttctgggggagattcagggggaaaagttacatattcttaaaattttgatcactggtggatgcactcaaaatcctgctcctctctgggagcgattttcatgctgttcctgaaagctcagaaagaataggaaaattttatgttcagtgatagatgggctagacaatgggaaacctgcactgaaccagacacaaaggacctagcagaggtgacgcctgccagggctgtgcacctgtgttttcttaacatctgctgggaccccattagtaagtttctatgaaaatgaatt

SEQ ID NO: 30502 - DNA, 457 bp, Homo sapiens
cactactatagggcgaattggagctccaccgcggtggcggccgaggtaccacatgatcattcaaacactcaagcttgtttctgttgaagaggagagtcagaaaaagtagagcctaaaaagtccccaaaccagttaagtcacactgaggccagaactgtcatatagtatacacactccagggacaagaaattccgagggctcaaacagaagactcctcagagtggctcagcatggtctgtgataaacagacagaaacactatgaggaagtgctcttcacactacactcagaggttttccctcccacttacacatgattgttgccatctcagacttttcatagtaagtttttttgtttcgttttgttttgtttttgagacggattctcactctgtcccccagctggagtgcagtggcggtgatctcaaaaaaaaaaaaaaaaatagccggaagtacctg

SEQ ID NO: 30503 - DNA, 480 bp, Homo sapiens
  misc_feature 308: n = A,T,C or G
cgactcctatagggcgtattggagctccaccgcggtggcggccgaggtacatatacttgaggcatgaatttaaaggaaaagtcagcccatggtttggtgcaattccattttctactgttaaataaccaagttcttttttttctttatcatcttcgacagggtcatcagacctttttttttttcagaacctgaagtgggacatggggagtgaactcgatcttgctcttttgcaaattcaacgactaaagtatgacctaaaagtttcagttgatggagtcttgtcaatgcctttatagctgcttttcatntagggaatgtggcaaaagctgtatgttttcagtcgccccttatctgacaggacccgcacagactgagccccgaagtacctgcccgggcggccgctctagaactggtgggatcccccgggctgcaggaattcgatatcaagcttatcgataccgtcacctcggggggggcccc

SEQ ID NO: 30504 - DNA, 548 bp, Homo sapiens
acgactcactatagggcgaattggagctccaccgcggtggcggccggccaggattcaaaccagggagtctgctccagcactccggctcttaacctcaaccgtctgcctctccacaaacaccaggatcaaccacctagaccaaaaaaacagtctcacaaaccatcaaacattgcacttggtggctcaggaccttagcttcgtcttaaaggtccctgttatgctttttctgagtgccccagtgtggagtggtcttcgtgtttgtgagtgcaggggtcaggggttgtgtcttttcttcttgtccccttccaagaggtgacatgtatccttgatactggaagggcccttaaggtctagcactggctctctgtctcccttcatggcacatcagccaagtacctcggccgctctagaactagtggatcccccgggctgcaggaattcgatatcaagcttatcgataccgtcgacctcgagggggggcccggtacccagcttttgttccctttagtgagggtaaattgcgcgcttggcgtaatcatggtcatagc

SEQ ID NO: 30505 - DNA, 422 bp, Homo sapiens
tactatagggcgaattggagctccaccgcggtggcggccgcccgggcaggtacaggtggtaactgcaggggtgattaaaatgtctaagctgtctaaaagcaggaaaagcaaatagatttcatctcttatgttaacaccaatgagaaagtagtgagtatgagttgagtatgattcttctgtgggctggaaggaaagagcttgctgggggtctctgcttcttggtcaggaagaatggcctcaacttcacttagctatccctgtttgaaaataagttctttcctctgtagatgttttccttgttaatttctgtgcatgcctttaggacctctgccatttctttcctgtccgcttttcacttttttcttactgttgaagaacctatctctgccagacttctttatttccaattggttgatttctac

SEQ ID NO: 30506 - DNA, 269 bp, Homo sapiens
ctatagggcgaattggagctccaccgcggtggcggccgcccgggcaggtacctatagcacaagctgatgatagctggcaactgaacatttggcttcaatgtcagagtaatagagtgtggcaaactgcagagctcatgctccgcctaaaaggggcagctgctgctcagctcctgccaattaccaccatgccggaaattgggcctaggggtgcttcagctcctcctgtttttacccagaagctagggaaatctgggttttttatgtggaaa

SEQ ID NO: 30507 - DNA, 469 bp, Homo sapiens
ggcgaattttagctccaccgcgggggcggccgggggccattgagactgccatggtagacttgtttggtatcgtagctgagacttctggagagaccattcaaggcttctggctcttgacaaagatagaccactggaacaatgagaaggagagaattctactggtcacagacaagactctcttgatctgcaaatacgacttcatcatgctgagttgtgtgcagctgcagcggattcctctgagcgctgtctatcgcatctgcctgggcaagttcaccttccctgggatgtccctggacaagagacaaggagaaggccttaggatctactgggggagtccggaagagcagtctcttctgtcccgctggaacccatggtccactgaagttacttatgctacttttactgagcatcctatgaaatacaccagtgagaaattccttgaaatttgcaagttgtctgggttcatgtc

SEQ ID NO: 30508 - DNA, 499 bp, Homo sapiens
ggcgaattgtagctccaccgcggtggcggccgcccgggcagttacactgatttattctcaggagcaatttaactctcagttcatatttgggagaaagagattccataatatgccaaaccaaaaatgaagttattgtttaaatgtgatcatgtccataatttatctccctgggatcccttatggttggtttctatctgcacctgaccaaagtgttctatcataggattcaagggatttatgggctgggcacagggggttcacgcctgtaatcccagcactttggaaggccgaggcaggcagatcacctgaggtcaggagttcaataccagactgaccaacatggagaaaccccctctccactaaaagtataaaattagcttggcatggtggcgggcacctgtaatcccagctactcgggaggctgaaatctgctctttaattctagaagtaacatcaataatttttttagataagtagatgaacagatttatattcatct

SEQ ID NO: 30509 - DNA, 393 bp, Homo sapiens
cgtaatacgactactatagggcgaattggagctccaccgcggtggcggccgaggtaccgcatgctggatatggacagcagccttagttcagaaacatactccaagcaaatcatagagaatgtcacctcctttaagcttccatttctttataagaaaaaaaaaacattttgtagggttacataagaaggcaataaaataataaagagaaagcatagagcctggcatatactacatgttcaatatgggacagaatgtaagcaggagcaataacaaaagtggtagaaatttggataagtcaaagaataagatgtggaaactcgggaaagggagcgattaattctgacctaggctgcacctagccattttggagaaagtgatacaaatagaattttc

SEQ ID NO: 30510 - DNA, 640 bp, Homo sapiens
tactcactatagggcgaattggagctccaccgcggtggcggccgcccgggcaggtaccatggatggaagtggggctttggcaaaggccctagcatttatgcctggcactgtggactcggtgttgtctagcagagaggccttgaggaagtggcccagcagtgtgcttgcgtttccaagatatctatcacccaaaagacttcgagatagacaagctttgttccctgccaaagtgacaaatgtcagcttgctggaaaagtttgaacgaagtgagagtggtgggaagattatgacccctgaaagcttatcatatccaagttgtctgaaacacgacagtgagatgaagccccaaacatctccagcttgccaggatcataacaaggcaggacaggaaatgtgctatgtatgtttggaacgagcacaacgaaattccctgttgtacctcggccgctctagaactagtggatcccccgggctgcaggaattcgatatcaagcttatcgataccgtcgacctcgagggggggcccggtacccagcttttgttccctttagtgagggttaattgcgcgcttggcgtaatcatggtcatagctgtttcctgtgtgaaattgttatccgctcacaatttcacacaacatacg

SEQ ID NO: 30511 - DNA, 402 bp, Homo sapiens
gcgtaatacgactcactatagggcgaattggagctccaccgcggtggcggccgcccgggcaggcacttcttccaaggcagtggtcattagggcaatgtggtattgacacagggagagacaaataggccaatgggacaggattgagcattgggaaacagcccacacaaatatggaagcttgctgtgtatcagaggtggcctgcacatcctgggaagagcatggacttttcaatcaaatgttcaggagcagttggatacccacactggaaaaacattaagttggacccttaattacctcacatcatataccaaaaattcattcttgtcattctaggggattgaagacctaactatgaaaagcataactataaaggtcacatgactgaatatagaagaatatctt

SEQ ID NO: 30512 - DNA, 280 bp, Homo sapiens
tacgactactatagggcgaattggagctccaccgcggtggcggccgaggtacagtagttggatgtcgaggtttgattagattctggggttggtttgtttgttttggtggattgtttttgagtcgactttacagagggttgtttatccaccagaaggcacatgtgcttgcctgtgtcttttttgttattgttttgagacagagcctcgctctgtcttccaggctggaatgtagtggcacaatcttggctcactgcaacctccacctcccaggttcaagtga

SEQ ID NO: 30513 - DNA, 302 bp, Homo sapiens
ctactatagggcgaattggagctccaccgcggtggcggccgaggtacctctgtaaaatgaccttacacagaataaaagtctaggccttatgagtttatgtgaggtaaaaagttaatgtgatgctgagaagttatgttaaaagtatacttttatgtaagatttttgctcccctccatgtttacatagcatttccttactatcccatattggtttatgagaaaaatctccctaaattgaagattcttcacatcttccatttggtctctttttttggagaacaggatctcactctgccccccggt

SEQ ID NO: 30514 - DNA, 297 bp, Homo sapiens
tatacgactactatagggcgaattggagctccaccgcggtggcggccgaggtacttttccactttgtcttctttcctgccacacaccctatcctttcaggctgtgttgggatggacaaaagcagttctggagtcctaaggagaagatgagtgggatatgtttctgtgacctgcagtcattttaaagtttagctgttgctagctgactccatgtaagaataccttccaggaatttgatggctgtgcactccggcagtgcagctggcatggttatagggtgcttggccgaaggtttgca

SEQ ID NO: 30515 - DNA, 290 bp, Homo sapiens
gactcactatagcggcgaattggagctccaccgcggtggcggccgaggtacattctacaaacttttctttaagcttctaattaaagaagaaaaaaaattaggtgaaatgctcataaatcaagggcactgtgacccagtaaatcagcaggcattagcatgacataatagaaagtgtcccaactctgcataagtcctagctccataatgaacagctatttgttcttggacaactttcttctcttaggctcaatgtcttcttctacccccgtgtacttttttttttttttttt

SEQ ID NO: 30516 - DNA, 592 bp, Homo sapiens
  misc_feature 510: n = A,T,C or G
agctccaccgcggtggcggccgaggtactaccctccttgggggtcatttatgaatgtgggcagggatgaacgattgggtgttacaatcctggggagcactgcagggactctgtgagggccccagagatgcttaaaatgctttaagtggggcagtcctacacaatgaaaaattgggccacccaagtgcccaaatcaccacaccagaggaacacgtgataacccacccctctccttggacaatggggaaaccaaggccttggctggttagcagcagggtcaattctaaaacctaggcttctttgcccccagttcagcagttattctgtgataacatacagaaaacaaacaataaagctgggtatcatgttacacacttagcttattcaagaaacaaaacttcctgcttaaatccagttgcctttttttctgactcatttttcttcttctggcactagaaccagattaccacccagccaaatcagggcacaggccctgaccttcacacacctncctctcaaataccacatgggaccatttgttagcctgaatacaggaccactgcaattagaagaggctttagtggaaaagacat

SEQ ID NO: 30517 - DNA, 420 bp, Homo sapiens
ggagctccaccgcggtggcggccgaggtactcagaaatgcaagaacaaagtaaaagccaccatgagtcacaaacatatattctttactctcatcatctttgccacagaacttttgcacttgatcttacttttgtttttctgataatttgtgttttttcctttcttaaatggctctaagttaactcttattagaaagtttcaaacccccttctctcatcatcatgccccaaaatttgtcaaaaaaaagtttcagagatattatattgagttatttaggccaaaggcaataaatggctcttacaataagactttgaaaataatgtaatactctacaataggcatggtgtatcatgcataataaccctacccctttagagggcttgggcagaaagatccttgaggtcaaacatttgagatcag

SEQ ID NO: 30518 - DNA, 416 bp, Homo sapiens
ggagctccaccgcggtggcggccgcccggtcaggtaccaccatccccagcacatattttaaagttattcagacgcacctcagaactagggtaagtgcagtttaggatctcaactatgaaaaccagaggcaactggcacactttcattattaactgcaatgaaccatttaccaaccagctaattgctttctcctcaatctcctcccatttcttgtgccacttatgtcagggaattgaataggatgaataaatcactttagtacctcggccgctctagaactagtggatcccccgggctgcaggaattcgatatcaagcttatcgataccgtcgacctcgagggggggcccggtacccagcttttgttccctttagtgagggttaattgcgcgcttgggcgaatcatgggcatagctg

SEQ ID NO: 30519 - DNA, 503 bp, Homo sapiens
tatagggcgaattggagctccaccgcggtggcggccgaggtacgcgggatagttgctcagcatttcttactgcatgaaataatctttgttgtttttgccaaactctttaaattccttgaaaatgtgtattcttactaaacaaccttttctcctgagtctttggcatcagttagaagttaaaaagcactgcaagttttttgtaatcctgaagaggaggaaaagatgccaaaccagagtttattcaagataataagtggtatttttgagagatttattctctctcctctgaagcctgtttctactttagtttcacttccattttcctgcttctttgataggcagtgagatgatttttaatagcacatacactctgtcctgtttatagggtgctatcatttaatgagaagaaagtcaaataggacaaaaccgcaaatctttgaaacaaaactagaaagccctaatgggggctgggcataagggctcatgcctttaatcccagcacc

SEQ ID NO: 30520 - DNA, 288 bp, Homo sapiens
gaattggagctccaccgcggtggcggccgaggtacacttagattgatttttttctaccagaagaaatttctatgtaaaatgcttaaaaaccagtcatcaatttgatttctgtagcattggatatagagtgtgagcttttaaggtttttaatgtgttgccaaatgttatttcccaaaaggctttatcggtttcataccctgctggtgagctctgtcctgttttactagctttcagcatgtgtgcgtgtgtgcgtgtgtgtgtgtgtgtgtgttagagatggggttttgc

SEQ ID NO: 30521 - DNA, 447 bp, Homo sapiens
gggcgaattggagctccaccgcggtggcggccgaggtaccttcaattccagtcacatggctcgacctatctctcaaacttcttaaatgtgtagctttcttcttcaatagtgagaagtcttgctcctattgtctttaatatatttatatgttttcttattctactttacaaaaccaatattttgatacacatgccataaccttctcagctttaacattgctagtcatctctaatcataccctcagatttgactctgaatggtccttgttgtctcttcagccccagttgtttctttggcactggccgtcctcctgacctctactgtctccttggccctcaccctgaaagtccttccagactcacttgcctctggctctataagaccctgggtatcaccagggcctctgctcccttcatagaacccgtgtccctgaggccctactggctc

SEQ ID NO: 30522 - DNA, 479 bp, Homo sapiens
cgactcactatagggcgaattggagctccaccgcggtggcggccgaggtactaggagaggtcctgtgacctttccagtgcctcagagagtgagaatgggaaagaggagtggatgaagtagggcttaccctcctgtgggtcacctctcttccctgctgcttctgaaccccactcagcctccttccctcttccccagcaactatcccaaagctgttacatcgtgtggcaaacgtttactgaggcttttagggataatataagtcggtttctttacaaccattccttcacagccagaacgcacgtaatttaaaactgtgtcattttcacacacgtcccataatgtctccttcatggggagcttctcatggccttggtctctccccagaggctgcctatggccatatttctggggatccaattctcacacactgggcccctcattcttgggcttcccaccttcaggtacctcattcttgggct

SEQ ID NO: 30523 - DNA, 493 bp, Homo sapiens
ccgcggtggcggccgcccgggcttgtacaagttttttttctcatggaaatgttggcatattaattgatccacacaatcaaatatattagaaatggtgttcataaaagccctctaagggaaacagtagaaatctttttttcaaaacccttctgtgaaagcttgctgttaccacaaattataataaaagaccaaaacacataccagttatcatctatagactaccgtccctgagcaaattacttgactcaaactgttaatttggattaggaccattttttgtattttttggaaaagaatatcctgtgggtattttctattagaggcaatataattagacgatctgcttgtgttaatgctttctataaaatcccacataatgaataaaaaggatagcttatccattttaccttggattataaaaatcttgaccaggtgcgggggctcacacttgtaatcccagcactttgggaggctgaagcaagcaggtcatttg

SEQ ID NO: 30524 - DNA, 388 bp, Homo sapiens
ggcgaattgtagctccaccgcggtggcggccgaggtaccatgtcaggatgactgtctacgtaatggaagccctgtcgccagcttttcagcttcctttcaaattcccccaactccttcttttttcacgcagcaacttgtctctttccatggaaatgctggggatttaaagaaggcggggactcagctttgcttccactgcgcagccccagatacaggctgcaggagtcccagccaccttcctctcatcatgctttcttccagggacagagttatggcccctaggagagggttttgttccaccggaacagtcagttactaatgagctcatgctgcttttccacccctggggtccccagccatcctccaaccctgatctcctagggcacct

SEQ ID NO: 30525 - DNA, 617 bp, Homo sapiens
gcgaattggagctccaccgcggtggcggccgaggtactttctctttaaatcactacaggatgggattccaccctcatcatgcctcttgtcacaacccccatgttgtccaatccaataatttttctgtcttcttacttgacctcagtgacatctgacaattgagcttccttcctctttctagaaacttcctctcttgccttctaagacattatgttccccatttttctcccacctactggctcacaatctcagtttccttcctctagtcctcctcttctaataaacctcttaatatcaagttttttcaaggattcatcctgtttctctcccttcccctaagtcacaggtttgcaaaaaagacaaaaccaactcctaaagctttgcaaaaaagacagaaccaactccaactcctaaagaagctttagacatttctagcagtggttttggggaaaatagtaattgcattaagtgaggaagggccagagatgccaggtattcttcaatgcaagagagttcccaacaatgaagacttttaccatgtcatgattttcaaatgtgccactagataatcacatgggtaagaaacctacctagaagaccaggtgtggtggctcaca

SEQ ID NO: 30526 - DNA, 515 bp, Homo sapiens
tactatagggcgaattggagctccaccgcggtggcggccgaggtacttagcatgagctcattgacggtgaaattggccatttatacataggcaaatctataaggaaattaacaatatttcacatttcttctaattaatggtctttttgtgaacatgcactgcctactaatgtcagcttatctatgatttgaatgtatagctttctaaagcgtagcaatttttttgcatatttatgtgtcctaagagagtccccccgcttcatttttccatctctcagcctcatgaaaggctacctctatctagaatttgtgacagaggaagctgagttttggggttgatggaatcttcctggttacaatctagaactattagagttttgcaatgatagtaacagcaatgactaacccttgcttggaatagtagcctttaatcattatcctcagtttctatctgggaaaactgagtgctattttaagcagtcttctgctagtagtggcaagaatggagacataaat

SEQ ID NO: 30527 - DNA, 478 bp, Homo sapiens
ggcgaattttagctccaccgcggtggcggccgaggtacaaattagacggtgacaacatgcaactactaatttccaggacgcgctgaaacagatccaatgttaagataaaaataaactaaaatgattttcctctggtttgatttaggtagataatcaaggccataacatgccgatgtggaaaaatgtcccaaccatccccaggaatgaagaaaactaataggcaacaaaattgttaaaaaaaaaaaaaaaacccagctcttcttaggacattctttgctttcttttggtcttcctctttctatttaagccctgtattgttgcccaatacaccctatttaggtctcattttcttatctatgtcccacatactgagcctttcagtttcctttttactttaaaaagctatgtccaagtgtcatgctcttgattgaaggcagaaagacaacataataaaagtaaccactgctattgggcaacc

SEQ ID NO: 30528 - DNA, 391 bp, Homo sapiens
cgtaatacgactcactatagggcgaattggagctccacgcggtggcggccgcccgggcaggtacgcggggggctgaaaatcctctgggttggcaattgtaatcctgtggacattggtaatacccgaggatgcaaaatttccccaaaacaagcagaaaattttccatgaattgctgctataaagctgaattcctctccccaccccaacattttataaagagcaagtgacttttacagcctctgggtattgcccaatagcgatctggaaacaggctgctcttcgtttaaatgactgaacacacggttggggatctgttctgaaaggtggagggtgcccgcttgggaatagggacattataaatactggacaattgaagacaatatttctgaag

SEQ ID NO: 30529 - DNA, 574 bp, Homo sapiens
  misc_feature 7: n = A,T,C or G
gcgaatnggagctccaccgcggtggcggccgcccgggcaggtactcactttatttctatgatcacctcactgtagttttcatatgatttcccagtaggaacagttagtagaagctgggtgaagacaactggggattattatatcttagcctttgggaggcatttcatagcgttttccatttagaaacattctcagacccagaactgttagtagaacaaaagtttccatccccaaagtgacttgtaaggataaaaataatcttaaacttttaattttctctcatttgtcaaaatcagtattttctatttttaaatgtctaagactagaataattttctttgagttaaaacacagggccaggcatgatgcctcatgcctgtaatcccagtgctttgggaggctgaggtggaaggattgcttgaggccaggagtttgagaccagcctgggcaaaatagcaggaccccgtctctacaaaaaaatatatttttaaaaagctaggcataatggtgcacacctgtagtcccagctgctcaggaggctgagggaggaggactgcttgagcccaggagtttga

SEQ ID NO: 30530 - DNA, 338 bp, Homo sapiens
tacgactcactatagggcgaattggagctccaccgcggtggcggccgcccgggcaggtacttgattgttctgaaattccttatgcatgattagagaaagagtaaatgacgtattttaggattgtgtttaacaaaagtgagatgctaattcttgaaaattaggcctctctatggggactgcacgtaatcacattaccctagatcttgagttagcgagagaatattcactgtcaggtgattcactgaccttgcctataacttgaaaccaatagcaaatccagatgtagtttcactggcctttgaagtccaaggcaaaaagacaaagcgtgactccctgtc

SEQ ID NO: 30531 - DNA, 453 bp, Homo sapiens
gggcgaattggagctccaccgcggtggcggccgaggtacttaggccatctcaatcatcttcatccttttaactaagttattctaagacaatggtagccctgcactgaccactaagaaagcacacaccttgagccatccatccaactattataacctgggacttggtatctagtgatttcaaatctagtgattatcactgggctttcatattttcccccatgcagccaattcactctattgaactaataatctgactcactgggtggaatagccactcaatcttaagctctattcttgctggtgattggaaccctcctactcttggacagaatttcaagttgaccactgcctacctgtagtggactcacaagtattatctgactctctatctacttgtttttaaatcttgtgctaacaatagctgcccttgattacaggtaaactataatcttt

SEQ ID NO: 30532 - DNA, 437 bp, Homo sapiens
  misc_feature 368, 369, 370, 371, 372: n = A,T,C or G
tatagggcgaattgtagctccaccgcggtggcggccgaggtacattaaaaaaatgcacggtgtgataacccacaatctactcaaaaccagagcttaattgtaaaaaatttaaattctctcatttttgattgtcataagcctaaatgaaggcatactaagcagttagacatattttaatacactttctcccagtttattttcttaactaaagtcaataagaagccaatgggttttcttaattgaattcccctttagtttgtgttatggaggtgctttaaatctagacactagggcaggcaaggaattcccctgacaattttattttcatagttgtgctgtgctggccaatatatattaaaatagtgggnnnnnttttttttttcttctctttcatgttatttgaactccgatcgaaaacaaaaataactgctggaaaa

SEQ ID NO: 30533 - DNA, 512 bp, Homo sapiens
cactactatagggcgaattggagctccaccgcggtggcggccgcccgggcaggacgcggggggtatagatgttttaatataggggtttgcattctagacattaaactgctgggcttgattctgtatttttgactgctacagtgtaaaaatatttttgctcagagaaggattaaggacagaaatggtttgtttcagtcttagaattttatttagaatttcactagggttgagcatgggcaatgcttgccttttcctctaggaagccatagctcctcagttggaatctgcaaacttttgctctgaggtcttgggagaaactgagaccttgggaatgcatcccggactccagagagccctattcctcagggtcaggatgtctcaagatgaaaaattatctaaaaattatgtttcaactctaatatttatttagctgcattttccactcaggcacaggcaaagaaaagtgccagaaataaaaagaccaggggatttttcacttctttagatgaaaa

SEQ ID NO: 30534 - DNA, 441 bp, Homo sapiens
actactatagggcgaattggagctccaccgcggtggcggccgaggtacaattcaatggtttttagtatattcgcagttgtgcaagtccttcaatttttgagataaattagtaattgcataaaggttctctctcacttaagttttttatataaagagcagcagcatacttctactcactcagatggggttgtttttgcaatggtaaaagaaaatggacaggcctgttaggttcaagaactctcctgctctatatgggtgatccatgaagcagaataataaccacagatctaataagttaactttgcctctcaagttggaactttaagttttgtccattactcttatgctacatttcccaaataaaagaaaggaaaaaggaaacacaagggtaggcctctctgcagcaggccctaaatgaatccatccacttcaaaatgtata

SEQ ID NO: 30535 - DNA, 444 bp, Homo sapiens
agggcgatttggagctccaccgcggtggcggccgaggtacttttttaaaaagtgaaacaatttactttaaaacagcttgaaaaaatgatactgaaatacagatgcagtcaccaataaacgttagaaacgaaatattttaaggatacatttcctatttgtgtgtcttgatcttatgactacagaagagctctaaagcatttaggaaggagaaagagtctttgaattagtcatttattttagagtagtatttccataatcccctgggggtcttgtagaaaagtaaaattttgagtcccacttctctgaaattctgattcattaattttggggcagaactagataactggtatgtttaaaaaaattctcaaagtacctgcccgggcggccgctctagaactagtggatcccccgggctgcaggaattcgatatcaagcttatcgata

SEQ ID NO: 30536 - DNA, 423 bp, Homo sapiens
gctccaccgcggtggcggccgaggtatctcataccaggcttgctgcatttgctgtttttggtattttacattcagctgctgttagcccatgctctggaaaaattacaaatgaaccaatgcagtggaattttcacttctggccaagactgagtaacaaggtctggatttaccctcccagctgaaacagtttgaaaactaggtttccaagacattgggcctcaggcatggacagtgatccttgcaagaggagaaacagatggtgagctgtatgattgccccaggatagagtttccaagaagggaaaacccaggtggaggcccgtggtctctctgagctggggagatgaagccgcaagtcaacggaggctaatgtggctggaattggcagagcataactcccaaaaaaagaaagttgccctgggag

SEQ ID NO: 30537 - DNA, 443 bp, Homo sapiens
gactcactatagggcgaattggagctccaccgcggtggcggccgcccggccaggtactgttttaagatattggatggagaataataaattcctttttatttgcctactatgtgccaaacattggatgttatcttttaatcttaagaataactgaaatgtatgtggtgctagtttcattttacagggaaaataaaaaaagactgtgaggttaggtaacacacccaatagtaggaggagctctggtctgacttcaaagccccatttattatccagccaacctccttttattttatgttatatataaattctgcgatgaagactgcactccagtctgggtgactaagacggtgtctcaaaaaacaaaaaaaaagttcagtgctgacccctgtgtgcaaactgtctttgaccacagcactagacaggtaggtattcagtatcctgtt

SEQ ID NO: 30538 - DNA, 474 bp, Homo sapiens
cgactcactatagggcgaattggagctccaccgcggtggcggccgaggtacaaacaagtgagtgtcaggattcaaataaggaggttttgctccagaggcctcctgaatttaaccactgtgctagagacacagggacattcaatggagcattaatgtcccgagctggtgacaggtcgagctgaggctatagatgtgttgaggagtcagcatcagtggaggaggaaagagatgcggatggagggagactcggtgtctttgaaatagataagagagagagacaatgtaatggtttccacttggcacagaaagaaatgccttactaattagaggaccagggagacacaagaggagcctaagaagaatggaatgaattagaatcatcactgtggagtctgcgatagggagtcaactaaagtggaaataagtaattaccaaataacaatgaggggtcagcatcggcaaaggaatatgttt

SEQ ID NO: 30539 - DNA, 512 bp, Homo sapiens
cggtggcggccgaggtacataaaatacctgagaaatatattaaaaggacaattacagaactaactgaagagatagaaaactataaaatcttattgagggacataaaaaatatctgaacaaaaagaaaggcagtactacaatcttgcctgaaagagtttaatacacttggctgctaaaggcttatgtaaagtaaaaaaataaaataaaagactcagtataataaatacgtaaatgtaatacaattcaaactgtagccccagtagggtttttgagggaggagagggctctaggttgggggtagaattgataaaattttcttaaaatcaagtagcacaataaatgcctgaaaatagccaagaaagctatagaaaagaaagagtaatgaagaggttcttgccttactagctggaaagcatactgtaaagtaatatggaaacagtgtggcactggcccaagaatagacagagatacatgagggttatgaaaggtaagaaaaaaaaaaaaagaattga

SEQ ID NO: 30540 - DNA, 391 bp, Homo sapiens
atacgactactatagggcgaattggagctccaccgcggtggcggccgaggtactaagagattgtattgattcttttgttgaaaaatatttaaaaggctaccaagtgatctgtatctgaaaaatctcttaaatatctatttcccagggggtgtttcccagttggactcctttgccttgagataggtggaaagctatttatgcaaatttcatggctctatctctaatttctatttcactcattgtttacccatatatcatttttaactatggaattctctccagagaagcaaattaacagattttaatattttatcagacaattcaagttgtgggttacaaattagagaggattaaaatcttgtcctttcacagcctttgaaatgttattcac

SEQ ID NO: 30541 - DNA, 440 bp, Homo sapiens
cccaatagttataaggccctgtgagtcaaataatttatttatgaaggccataagaagccagacaggttaaacacagtcttccttgtgatgctggtgaacagccatatacttactgatggatctcacctcccaactcagactcttatggtcagaggcatatttagtgctttcataggctgtgatctactaaggatcacaatttttttcctataagtgttcatcatcatagattctgtgttacactgcccaaggattcattgctcctagctcttggaaatttgtttgacatcactcagctagcaacccctttgggaattattttggcagaagagagtcacctttgccttatccatggtcatactccctaccaggggcagactacgtccaatgactggctaataaaaaaggcctggctcctcacctcaattcaagacaaccct

SEQ ID NO: 30542 - DNA, 489 bp, Homo sapiens
atacgactactatagggcgaattggagctccaccgcggtggcggccgcccgggcaggtacatgaagaaaataaagtggatgaggagcgtatgcaaacaaggcaattgtttatttttctataaggctttttttagtcatctaaaactatttaatactttatattcttaaacatttatacatacagataacacaaatatcctatattttttaaaaccttaaattactttaaaatgaaaactgcttaggacatgtctttttatgatatgatggaacgtgtatatagtaacatttatttaaacttcattatacattttgcttctctgtgaccttgggcaagttacttaagctgactcaattttcccttctataaaatggagataactatacctttttttttttgagacggattcccactgcactccagcctgagcgagagagcgggactctgtcccagaaaaaaaaaaaaaaaaaagaaaatgcgtggaatga

SEQ ID NO: 30543 - DNA, 389 bp, Homo sapiens
gtatacgactcactatagggcgaattggagctccaccgcggtggcggccgcccgggcaggtacccactccctcaattttctctaaaggtctcatttcagacatttaaatgaatattatgctacacaacagggaaactcagatgtccatcccctccttattcattcaaacatttccactgccataatatggcagctgcaacaccaagaaagaagaaaggaaaaaagactaaaagaggtgaagaatgaaaaagacctcaaagaaatttttttttaagagactgggtcttactctgtcacctagggtggagtccagtggtaggatcatagttcattgtaaccttgaactcttgggctcaggcaatcctctcacctcagcctcccaagtagct

SEQ ID NO: 30544 - DNA, 403 bp, Homo sapiens
acgactcactatagggcgaattggagctccaccgcggtggcggccgcccgggcaggtacacaaactcctacttccagaagagaattgtttaggtttttctggcctaaattttatgcaatgaataaaaatttaaatctcttcatccatgatctactgcagttcaggatccttggcatcagatggtagtgataaaaaccggatattggggtgctgccggtggagaaaaatggaagaagccagaggtcagcaagaaggggaggctagtaggagaaagagagattaaagagaaacctaagaaggtgaaaaaaagaaaagttagaggggcagaggaaataaaatgtagaagagatgagaaaatattcaactggatagcaggagaaggggaaaactgtaaggagggtgg

SEQ ID NO: 30545 - DNA, 333 bp, Homo sapiens
ggcgaatttgagctccaccgcggtggcggccgaggtacccagaggacacagttgaaatgaggcacatttaggaaaaactaggctgtttaatatccatattgagtagctttgcaagttactttcacaaacttccctacagaattggttctaacagaactgttcaaggccaaggatttgttttttctgggtctgggggagtcatctttataattttaatattccattagaatgccttgacactagaaggagggtccatctcaatcacatcaataaattgatcccaacctttataaaaataagcttggatagaaaggaaaatccgaaaactaaggt

SEQ ID NO: 30546 - DNA, 474 bp, Homo sapiens
  misc_feature 63: n = A,T,C or G
gcgaattggagctccaacgcgccggcggccgggcatttcttcagggatctctgtgcatccttnggattatcctggcgagcgaggatattaaaaggggctggaaatgtgcaaaaacatgtcactacttagacattatattgccatcttgctgtttctagtgatgttaattatctccatttcagcagatgtgtggccttagatggtaaagtcagcagcctttcttatttctcacctctgtatcatcaggtccttcccaccatgcagatcttcctggtctccctcggctgcagccacacaaatctcccctctgtttttctgatgccagcttctcggcacttgctatttctcccgcgtacctcggccgctctagaactagtggatcccccgggctgcaggaattcgatatcaagcttatcgataccgtcgaccttgagggggggcccggtacccagcttttgttccctttagtgaggg

SEQ ID NO: 30547 - DNA, 448 bp, Homo sapiens
gggcgaattggagctccaccgcggtggcggccgcccgggcaggtactgccaggcatgctcctgccttgggcagagtgtatatgtgtgagtgcacctgcccttcccacagcctagaacgttcctcctccagacagcacacatggcctgctctctcatttccttaaggtctttattcaaaagtgactttctcagtgaagccctgtctgctcaccctgcgtaaaatttcagctcttctttctatctctcttcccagatttttttttctccttcatgttcgttggtgtctaaggtttatcatctatttcgctaatggtcagtagaatgtaacctccacgtaagcaaggagttttgtctgttttgttcatgtctatgtccttagtgcctggagcattccctaatatgcagtaggtgctcaataaatgtcagttggattaatggctgaaagaaa

SEQ ID NO: 30548 - DNA, 445 bp, Homo sapiens
atagggcgaattggagctccaccgcggtggcggccgaggtacattcagaatccatttgaaacttctctcaacataatttaaaaatgtaagtcaaagccagctgcaaaaatttgtagatttggcccgagaaagtgcctggattttacaacaggaagatacagatcgaccttccatatcaagtaatcggccctgggggctggtatccctattgctaccatctgctccaaacagaaagtcctttaccaagaagaaaagcaataagtttgcaattgaaacagtcaaaaacttgctagaatctttaaaaggtaacagaacagaaaatttcacaaaaaccagtgggaagagaacaattagtacctgcccgggcggccgcttagaataggttggatcccccgggctgcaggaattcgatatcaagcttatcgataccgtcacctcgaggggg

SEQ ID NO: 30549 - DNA, 607 bp, Homo sapiens
accgcggtggcggccgtccgggcaggtactttttgcatcggtggtagcttggtgctgggggtatgttattccccctctgtttccgcaggcgcccctctgagagaagagtggtcacagaatgttttctctatgctgagtaagccatcgaaagaaaagcacatgtgacttcttcagctcggtattaaccgagacaggtgtgaatagaagcggatttattcttcagctcccatcgaaccctaagtgttgatttcgccttcaacagtagttttttctaaccaaattcttcagtgtgtttggatgtgtccccagagtgagttaatatactgagggtcttagcagctgttgatagatttgtggtgtatatgagttttctcaggcatgtgtattctcactgagtagaaattctctcttgaccctggaatagttacttttattaggaatgtgtgatgttttctagattgtacctcggccgctctagaactagtggatcccccgggctgcaggaattcgatatcaagcttatcgataccgtcgacctcgagggggggcccggtacccagcttttgttccctttagtgagggttaattgcgcgcttggcgtaatcat

SEQ ID NO: 30550 - DNA, 407 bp, Homo sapiens
cgcgtaatacgactcactatagggcgaattggagctccaccgcggtggcggccgcccgggcaggtacgcgggggggcggtaaaccacagggactcagtcaaaagcagaatcaaagaaatgcagaggaagtaaaaagacacagacataggctgactcaggaccctagagatgaacatgagattgacaggggcaccagccgacattcggaatctgctgccaagataagaacagcgaggctgggcgctgtggcttacgcctgtaatcccagcactttgggaggctgacgtgggcggatcacaaggtcaggagttcgagaccagcctgactaacatggtgaaaccctgtctctactaaaaatacaaaaattagctgggcatggtggtccgtgcctctaatcccagctacta

SEQ ID NO: 30551 - DNA, 475 bp, Homo sapiens
agggcgaattggagctccaccgcggtggcggccgcccgggcaggtacttttttttttttttttttttttagatggactctcactctctcaccaggctggagtgctgtggcgagatctcagctcactgcaacctctgacttcttggtccaagcgattctcctgaataatacggtgggcattcaaaaatgctgttgaataaatctgtctggaaaaccgagcaattcaagatgacagaagacaagatgcttgctcatcagcaaataccactgaggtcatgtcatgagtgaggagccatgtgagacacagaaagcaacctagacagaaggaatggggtgtgtctctaactctggaagaactccagctttctgctagatctagtacctcggccgctctagaactagtggatcccccgggctgcaggaattcgatatcaagcttatcgataccgtcgacctcgagggggggcccggtaccc

SEQ ID NO: 30552 - DNA, 406 bp, Homo sapiens
taatacgactactatagggcgaattggagctccaccgcggtggcggccgcccgggcaggtacgcgggggaagcaaacccggcctcaccttttcctgcccgaagcagaagattctcgcagtcctggtttctccctccagaagacccccacccaaatcctctgtagctcctggtagtgccctgacccctgctgccaccgtccttcagagagcaacggaagagcttcccggagggcgaggaaaagagggaaagtagccagcaatgtcgaacgcagtgtataataagatgtggcatcagacccaagaagccctcggtgctttactcgataaagagcctcagaagatgattgaaccacaaagaaatcaggttttcatctttcaaacattagccaccttctacgtaaagtat

SEQ ID NO: 30553 - DNA, 474 bp, Homo sapiens
actactatagggcgaattggagctccaccgcggtggcggccgaggtacttgttaaaaattgtaatcagcctcttgacaatgtatgtgatttagacagcaaaacacaaaggttagatctgggctgataggaaggagacggcctatttgcactctggtgggcagggtggaggggtaagggaaagggtagcagagatgagccattttatagaggaggctctgtgaagccccaggcctcaaaccttggtgagtgggtagcagaaattcattcctggagaaatcctgtagccaaggctcgggaaggaagggcttctcgtccagaattctttcggccgctctagaactagtggatcccccgggctgcaggaattcgatatcaagcttatcgataccgtcgacctcgagggggggcccggtacccagcttttgttccctttaatgagggttaattgcgcgcttggcgtaatcatggtcata

SEQ ID NO: 30554 - DNA, 543 bp, Homo sapiens
ggagctccaccgcggtgcgcggccgcccgggcaggtacacaactattgagttttcaagaacagaaaaaagagagaaagtgagaatgagagtggtgttatctgtctttctttggaaactaatcaatcttcaaaaggaaaggaaagggacctctctcttccaacgaaggctgactgaaatgagccccaagccctattacccttgtaagaatggactgaatggatcccacctcagggagctttgccggccagaatcaacctgcttcctggagagataatgaggaggtgcagcagtgaaaaagaggcaaccatcctcaaagcccattctctcctcaccccaaacactgatggcaaagataggggccaaggtcagggacctgtcagaagccttcagtgaactgagttattcctggcagatggaagaaagccgggagaaataaatgctaaaatctttcacttcagaacttttctgaatcagtcaagatgacagcagagaactagtatgtccaaatataaacattgtatttgaagttatttgcttatgct

SEQ ID NO: 30555 - DNA, 391 bp, Homo sapiens; identical to SEQ ID NO: 30540

SEQ ID NO: 30556 - DNA, 401 bp, Homo sapiens
tacgactcactatagggcgaattggagctccaccgcggtggcggccgaggtacaaaaattctgttatgaatgacctgggtcattctccctgcctgactgacatcctggagtgtgtcattgaaaaccttcactttgctggcatcttcccaaatttctcagacaccctctctttgaacctggagcctcctggggaagtattaagagccaaccagctatgaaaacaatgtgctcttccctgtgctaagtgcctcttcttaggcagtaaaatgcttcagtggtatgaacatatggcatcaacatggcctctgaaaaccatgctgggtgtttaacaagcatggagggatggggacaggctgtgatgagctctggaggcttacagaacaggacctcccctcccccag

SEQ ID NO: 30557 - DNA, 473 bp, Homo sapiens
tatagggcgtattggagctccaccgcggtggcggccgcccggtgcaggtactcgatggacacagaaggtcacaggcataagcacaaatgcctagagctccttttcaggtaattgcctgaaacaaatgggctaccatttagggcttctgtcacacaggaagtcagataacttaatactactgtatgtttgcagcaggactagatctagagatctagagaaggagtggcccactgtcctttcctagcactgggttgtgggtaagcagacacacttagttcccatccagcgttgatcgctgtcctctcttctttggaaggccagacgttaatctgctccgtagattgtcatcgttgggacacagttctgggcatgaggcttgtagtaacaagcaacataaacctggtcctggtcctcattgggctgaagggtccttgagctaaaagacattgggggagggtgggcctgatacagtt

SEQ ID NO: 30558 - DNA, 516 bp, Homo sapiens
gagctccaccgtggtggcggccgcccggcaggtacgcggggttttttctaaattctttttagattacatagcagtttcttatccctcaccatgattggatcacctggacagccataaaaatatggatgtctgttccccttataggccaacatggtggaaccctgacttctaaaaatacaaaaattggctgagtgtggtggtgggcgcctgtagtcccggcttctggggaggctgagacaggagagtcgcttgaacctgggaggcggaggttgcagtgagccgaaattgtgccactgcactccagcctgggcgacagagtgagactccgtctcaaaaaaaaaaaaaaaaaaaaagtttttctggaaagcagtttcacagcagagcaacaaggctgaaattgccccagtcagcctttgctggctgacttccctttttccgttaatagcaccaccacacccagtaactaaggcttgcgtcctcagttatctgcacgtagggaagagtctggtcagtgat

SEQ ID NO: 30559 - DNA, 584 bp, Homo sapiens
gactcactatagggcgaattggagctccaccgcggtggcggccgaggtaccaggtaatgaggaaggtgatcccggcccccattccctgatggaacctagacttcactaagggattcagatggaggaggagatgttcaagaagccaggaaggatcaacaacagggtgccctcaattcactggggccacgttagtgccgattactaaatgtcagaccaactgcagtagcgctgtcatggccactcatctctccgggatttcttcccttccaagccagctaggttcaaccttctcatttacttttaatacaccacctcttatatgatctttcttctctacttagaaccctcccataagccgaacccaatctgccttttcaccatcttcccatcttcctactgcctccatagttattcttcgggatctagctaagtaaactcttaagtattctcccatgttttcctagcacctaacattatcaattccccctccacccccattttcttccacatacggaggctcaataaataatagttaaatgaggctgggtgtggtggcacatgtttgtaatcctggcactttggga

SEQ ID NO: 30560 - DNA, 391 bp, Homo sapiens
atacgactcactatagggcgaattggagctccaccgcggtggcggccgcccgggcaggtacaaaaacttttcatggacagaccatggattttaagttcctgaggataggggccatatattgttcactttcattttcagctcttagcacagaagtttgctgaactacattttaaaagaagatttttcactgttaatggtatccatagctgccatgacaacaaaaggatacgttaacagcatttcaattctgtgcatggtttacaaaatctatacattttatagctgtaaatactctagaataattatccagtccagttgcctcaatttatcaatgaaaaaaagagatcaggccaagcgtagtggctcacacctgtaatcccagtgctttggg

SEQ ID NO: 30561 - DNA, 576 bp, Homo sapiens
  misc_feature 438, 508: n = A,T,C or G
atacgactcactatagggcgaatgggagctccaccgcggtggcggccgaggtactttgggtttgtgttttaattacggaatgatctttgtaatataaccaagagaaaattagacgcttttcctttactattttctattactactttttaaaaaggtatcctttttctttttttctttttgagacagtcttgtgttgcccaggctgaggcaagaagatcgcttgaggcaaggagtttaagaccaacatgggcagaccaatacagtaagactccgtctctaccaaaaaaaaaaaaaaattagccaggcatggtggcgtgtgccagctactcaggaagatgaagtgggaggattacttgagcctgggaggtcgaggctgaagtgagtcatgatcgcgccactgcactccagcctgagcgttggagtgagactctgtctcanaaacaaaaaattgttgtatttggcaatcatgacttattttttgtgcataggtcttgcttctcaacctaantttaagcttgtgaaggtgagggtcaatgcaatgattattttaaagaataaaaattttctctttatatt

SEQ ID NO: 30562 - DNA, 409 bp, Homo sapiens
gtaatacgactcactatagttcgaattggagctccaccgcggtggcggccgaggtactctttctcgtggtctggaataaataccctaccactttccactatcacctagtttactgagtctcacgtattaggattgggtttaaatgtaacctgtattgcctcacccagaaagcctttccagtctacccctgctttgattatttccctatcctctatgctgcctttgttccctgtgtgtctctccacaacagcaattagagcacatatgatttattatctcacatattggtctcaactttcagtctatgaagtctctgcgcacagaagctcatgagcgttttcttcctttctgtggattacctttgcaaaggcccgagaccaccagagaacctgccttcctacctctcttc

SEQ ID NO: 30563 - DNA, 473 bp, Homo sapiens
ctactatagggcgaattggagctccaccgcggtggcggccgcccgggctggtacagacatagcagtggcaatgacggaaaagatggagctaagaatggtggggctgtagattaagaatacacaaactttaaataaacgtattattggcacttataacaagaaatggctcaataagcttcctaaagttggctccacagagatctgccatcaagcttttcctttctagcagaatttaggtttcttaaatggtgacaagaaattgttaataggccgggcacagtggctattaactataatcccagcactttgggagaccgaggcgggtggatcacctgatgtcaggagttcaagagcagcctgcccaacatagtgaaagcccatctccactaaaaaaatacaaaaattggccaggcgcagtgatgcacacctggaatcccagctactcgggaggctgaggcaggagaatcgcttga

SEQ ID NO: 30564 - DNA, 375 bp, Homo sapiens
taatacgactcactatagggcgaattggagctccaccgcggtggcggccgcccgggcaggtacccagaggaccagatgattgatgggttctaccacgagcatctaatagcgactgctgcagaactggtgtggaaaaggtttctattttataaaagaaagtatccagaaggctaaaggcagttgtggaatttatttcttcccagtgctctgattgtcaaaatttgaataaagctcagtgaaaggaggacagtaattaatgacttgatagccaaacatcgtaatgatgatttagtgatatactagactggatgaaagagaggtcactgtcttttcactatggattcatcataaacagtatcattcttctcaggaaga

SEQ ID NO: 30565 - DNA, 390 bp, Homo sapiens
atacgactcactatagggcgaattggagctccaccgcggtggcggccgcccgggcaggtacctttggttttcttaaagtgaaagtcagctatatctatcaacctttgtatttgaatagtcccgctttacactctaagaagggtcataaacagtaatttaatataattatgaccatgctaatgtgaattcttaggctttactatatttacaacagcacaattttgattcaaaatcagctcttccaactgtaataactatcttcaaaaactggtttccaggccaggcacagtggctcacgccagtaatcccagcactttaggaggccaaggcaggaggatcacttgaggccacaaattcaaaaccagcctgggcaacagagcaagattccat

SEQ ID NO: 30566 - DNA, 573 bp, Homo sapiens
actcactatagggcgaattggagctccaccgcggtggcggccgaggtacctacccctctgtgagcttatagcttaaaatgagatatatatgagataaatgagaaaggtttataccacagaataacattatgtaaatcaatttaaccaaataacaacaccagagggaaaggacttttagctaccactcatattatgtcccaatataatgttccagttcatgttgcaaatagggcagcaccctggctattgtgtggtagtctgtaagtagtgaaatagctgtggggtaaggcagtgagtctttcaccttagggagggtgcgagcccagacccacttgaccatctatcacaaatcttgctgaagttctaagatccctttcaactacaaattttcatgcttccatagaatcatccctgacctcaggaaaaaatacaaaaatggaacaaacaaaacagaatagtaaaacctgaagtaagaaaaaaagaaatgaatttgacattgtacctgcccgggcggccgctctagaactagtggatcccccgggctgcaggaattcgatatcaagcttatcgata

SEQ ID NO: 30567 - DNA, 527 bp, Homo sapiens
  misc_feature 382: n = A,T,C or G
tcagagcactccatggtatgacaggagtttgctggaccctctgcagcctcacactgactacctctgcggtagcatattattttgagaacgccatttaacctcttagtctcatgtttccacatccatggaatgggtgactctagagacctctgatctgactccatattccatgggttgtgagccccaacatgatccctgccaaagcctagattcctaggacactaggcaggtggaacatttataaaagaaaattctttttcattgttatggcagctctaatttctcctatgaatccttatatctttcctagatggtcatgtaaaactggttatggtggtgttaacgttaccctccatcaatcaagttgaattgcagaaggcanactgagaggaaaaaaaaaaaaaaaaaaaggtcctcggccgctctagaactagtggatcccccgggctgcaggaattcgatatcaagcttatcgataccgtcgacctcgagggggggcccggtacccagcttttgttccctttagt

SEQ ID NO: 30568 - DNA, 395 bp, Homo sapiens
atacgactactatagggcgaattggagctccaccgcggtggcggccgaggtaccaggtaatgaggaaggtgatcccggcccccattccctgatggaacctagacttcactaagggattcagatggaggaggagatgttcaagaagccaggaaggatcaacaacagggtgccctcaattcactggggccacgttagtggccgattactaaatgtcagaccaactgcagtagcgctgtcatggccactcatctctccgggatttcttcccttccaagccagctaggttcaaccttctcatttacttttaatacaccacctcttatatgatctttcttctctacttagaaccctcccataagccgaacccaatctgccttttcaccatcttcccatct

SEQ ID NO: 30569 - DNA, 404 bp, Homo sapiens
tacgactcactatagggcgaattggagctccaccgcggtggcggccgcccgggcaggtactttattttctatgtttcagaacccacagggatatttactatgtagctaaagatgcttaaggtgcagaatagctcagtcacaaatgtctccttctcaagctctgagtgttctctgggacaaaaaataagagagaagaggatcccatcatgggtagagagtgagagagataccccagcctgggaaaattttctttgttttggtagtaatcctggagctgcagatgaagacgatggttgacagaatgacttcctcgcccacccctccccacacagcaacatgttctcatgacgtcctggtgcatctggaccccatttttgtctccagaaaggattgaatgagctatt

SEQ ID NO: 30570 - DNA, 468 bp, Homo sapiens
  misc_feature 195, 214, 252, 253, 289, 290, 307, 308, 331, 332, 400, 405,406, 452: n = A,T,C or G
ctatagggcgaattggagctccaccgcggtggcggccgcgcgggcaggttcacttctgttctcctcctgatagaggggcttattctaaaccgtctcctggtccatcccccacaatttccgtttttttttttttttggtttggttgaatgtttgcctgcctgggaactgccagccgtcccatctcaaatctgcaanatcttcctctagactttgnggagaacagaaaagtagtctcctaactttcaagaggtnntagaatcctcagaaatgtggcactttttcaaggaannaagggttgtttaacctnngagtgataagaaatatctggagnngagagctcatcactttagtcggtgtgtagttgctgtgacttccgtctgtcctggcaatttctaatctnggtcnnctgcctgtgaattgcagaaagtgcttccacggtgttcttccagcanccccgtgaaagaaaag

SEQ ID NO: 30571 - DNA, 408 bp, Homo sapiens
ggcgaatttgagctccaccgcggtggcggccgaggtacactaggacttgactggaaaattttacaattcaagaaagcaagggacttctgttcctcttacctcctagtctttctgtctcctagggaaagagaaaaattacaaagaagaaatctctctctctctccattttaaagcaaaaatagagtcgggtgtggtggtgcatgcagatactctggaggctgaggtggaaggattgcttgatctcaggaggtcgaggctgcagtgagccatgatcgtgccactgcactccagcctgggtgacagagcgagaccccatcttgaatgaatgagtgaacggaatgaatgaatgagtgaacggaatgaatgaatgaatcattctctgccttctgggtagtaaccctggttttt

SEQ ID NO: 30572 - DNA, 449 bp, Homo sapiens
atagggcgaattggagctccaccgcggtggcggccgcccgggcaggtaccatacacaaggacatagcacctttgattagaagtatgttcaatacattattgtgaactacactaaaaataatgatttttcataagcaaaattctcagagtaacctgcaaaaacatccaccagatgaactgggttgaaaacatttaacagttccctctctaatgcaagttgcttctcagtattgggcaagttttctgtcttggtgtttaagtaaaaaggcatcttttatttgtgttaattccttgcaaacatagtgaatgttgtgagtagttattttcactactgcccagacaaaaggaaaataaacttttttagttaatgcttttgtagtttttcaaattagatcttttagtagcttccttctaaaatttcctccttcagccactgagtttatagtgtat

SEQ ID NO: 30573 - DNA, 409 bp, Homo sapiens
gtaatacgactcactatagggcgaattggagctccaccgcggtggcggccgaggtacagcattcttgtattgctgtgtttggctatcctagtatagtttgtgtttaggcttcatcacaaaatagtaacatgcagggaaaaatcaatgaaccaacgtgattccatgttatattgatgccattcccttattcactaatttcacatgagctcaatcacatcgcagaaacacatcctttcacaaaataaactgtatacttggatctacttatttttttctatatgaatgtagcatgtcagttctgtgttaatgaacaactatgtcttaaattttgtattttagaaaatgtaatgagcaacttattcatatctgtgataccttgccttcccagggtgggcttcagttgctgctt

SEQ ID NO: 30574 - DNA, 389 bp, Homo sapiens
tagggcgaattggagctccaccgcggtggcggccgcccgggcaggtactttaggctgagaaataaatataaggtgagaaaaaagaacagtctttatagtcagtaagagtgaaaagagaaagatggtagttggggaaagacagatggggagaaaggttggctggttgttaataaaacagtagaggatgagcatgtattataaatgctggtgggaagaaaccttgtggcaaggagggtggtagtgttggagaagaaagagaggatatagtagaaagttaaagaggaactggaagcaggtgggatccaggacataggaaggggaagagccttgggcagaggtgagacatctgcaggagggaaggaactgagagaagggaaggtgtgcaaatg

SEQ ID NO: 30575 - DNA, 378 bp, Homo sapiens
gtatacgactactatagggcgaattggagctccaccgcggtggcggccgaggtaccactacactccagcctggtcaacaaagcaagaccctgcctcaaaaaaaaaaaaattcactgcaaagagagaaaaaagaaagataaattgacccccataattgtgcttaatctggccaaaagttgaactgaaatgggattatcgttcctgttctggttaccaagtattacataacaagctaccccaaaacaattttgtaggtcatgaatttaagcagaactcagttggagaattctgttccatgaggcattggtggaggacacttggcattgatctggcacgtagagtggtgtggcgggtccaagctggtttccctcgtatttc

SEQ ID NO: 30576 - DNA, 342 bp, Homo sapiens
tatagggcgaattggagctccaccgcggtggcggccgcccggtcaggtactaggacaagcactggaatttcaagataaagatgatacggtccgcccctcaacaactgtatgctataatctgaaaaaacaaacaggcaattcccatacagagtcatacatacaatgacgagcataagacagcacttattggaagacatagaagggatactagcccagatttgtgtcaatattgtaggcttttgggtagaggcaattcataaggtgatatctgaaggggaaggaaaacacatgtaggatagagggaagaagtaaatgcaaacagctggaggtgaagacgatcac

SEQ ID NO: 30577 - DNA, 556 bp, Homo sapiens
gtatacgactactatagggcgaattggagctccaccgcggtggcggccgcccgggcaggtacctgtctctgagactgaagttgttttgttttgtttttttttgttttgttttgtttttagagtcaggtcttactgtcacccaggatggagtgcagtgatgcaatcacagaagctcactgcaacctcaaattcctgggctcaagtgatcctctcacctcaggctcccaagtggctatgatcatcaagaaataagtcaaaataagagttcaagaatacaatgtgtgaactcaacagttccccttctaaatattcatccaagagaaagaaatataaccacccaatgacttacacaacattgttcagagcaactttctttgcagcagctcaaaccagaaataatttaaattgcattccacttgagaatggatggacaaatggtggtatattcatacaacggggcaacactcagcaataaaaagaaaaaatccagtgcttataatagcatggattaattttgtagacaattttttgactgatgggagtcaaatattaaaag

SEQ ID NO: 30578 - DNA, 662 bp, Homo sapiens
gcgtaatacgactactatagggcgaattggagctccaccgcggtggcggccgcccgggcaggtactaggagaggtcctgtgacctttccagtgcctcagagagtgagaatgggaaagaggagtggatgaagtagggcttaccctcctgtgggtcacctctcttccctgctgcttctgaaccccactcagcctccttccctcttccccagcaactatcccaaagctgttacatcgtgtggcaaacgtttactgaggcttttagggataatataagtggtttctttacaaccattccttcacagccagaacgcacgtaatttaaaactgtgtcattttcacacacgtcccataatgtctccttcatggggagcttctcatggccttggtctctccccagaggctgcctatggccatatttctgggatccaattctcacacactgggcccctcattcttgggcttcccacattcagttacctcattcttgggctgcccacaaacagtcaaaatccttattttctaagctgaagcagttgagctctctcacttactcttacaaatctaggttttgcctagaagtagtcaaaaaagcaagacagagacatcttcatcaaccacaaagtctcatcaaagtattttactccatcaaagagccattcact

SEQ ID NO: 30579 - DNA, 554 bp, Homo sapiens
tacgactcactatagggcgaattggagctccaccgcggtggcggccgcccggcaggtacatttgttgggggcgtgacattaacatataaccacttagagtggacatgcagttagagaaaagtcaatgagctggaaccaagctgggaattccaacatgtagaagttaaacacaagaggaggagccagcaaaggaacagaaacagagcttccagcaggtggggggcatttggaagaaaacgatgccatagaagccaagatgaaatagacatcaaggagaaggaagtagtcaattgttttgaatgctatgaagaaagataagaataggtaaatagtccttatatttgataacagaggtcactagtgatcttgatgaggggtttcaatagaatggtgggattatatacctccctggattcaactgaggtaaggaaggcatacagaatagagacaggcactataaacagctctcataattgcattctagcaattagcaacactgtctgatggggaggtggctcaatctttcttgcataactgaatgaatgagtaaacta

SEQ ID NO: 30580 - DNA, 427 bp, Homo sapiens
tacgactactatagggcgaattggagctccaccgcggtggcggccgcccgggcaggtactcataccaggcttgctgcatttgcttgtgtttggtattttacattcagctgctgttagcccatgctctggaaaaattacaaatgaaccaatgcagtggaattttcacttttggccaagactgagtaacaaggtctggatttaccctcccagctgaaacagtttgaaaactaggtttccaagacattgggcctcaggcatggacagtgatccttgcaagaggagaaacagatggtgagctgtatgattgccccaggatagagtttccaagaagggaaaacccaggtggaggcccgtggtctctctgagctggggagatggagctgcaagtcagcggaggctaatgtggctggaattggcagagcagaac

SEQ ID NO: 30581 - DNA, 427 bp, Homo sapiens
gggcgaattggagctccaccgcggtggcggccgcccgggcaggtactttctaaaaacagagaggcatttgaatggattgaattcattatttccgtaagactcatctgctgtcgtagcaagtgaaaagaattttttacaagacctccagttccagatggaagacctcctgcatcatgggcaaatgctcttgcacctcgatcatcatgtggtggtatgttttttgtctgaaaatagggaatatcctttacctggaatatatcatttatatccaccgggagagcaagaccaatgtaatcatctgaacccccatatgtggcactggacaccatggaccgcactgaggaagatcgttgcagggtattttgattaataggactcaataaatcttctttatctaatgatgcataacttaaggctttcatgaacc

SEQ ID NO: 30582 - DNA, 379 bp, Homo sapiens
tacgactactatagggcgaattggagctccaccgcggtggcggccgaggtactctgttgtcttaaaaagcatggtttagtggtggtaacattgacctaggtgacaggcttcagtttagtttctggcactggtcatgaaactttgaacaagttaactcctctcttaggaccttatctttatgtagagaaagttggactaaatggctgttaaggtcttttcgggccttcaaatgctgtgtttctgtaataccacccttgtttaagccacagtcatctcttgtctggactcacaggagcttcctaacttgttttcatttttgtccttccccacattattttctacccagaatacaaagagacctttttaaaaatgtaaatca

SEQ ID NO: 30583 - DNA, 344 bp, Homo sapiens
  misc_feature 273, 290: n = A,T,C or G
aaggggccatgatccaaactgatgagatgatggacactgacttgaccacaccgacatctttcctggtgtcaaacatcctgaaaggggggctggtttttaaaaagcaaacagctgtggagggcaataagctggcttttccagcaatcaaaaagaaaagcaaaaaaaaagaaaaaaagctgaaggcagaggagtggccaatacaccccagtctgccaggatagattcaggttacagcttctgtcctgggaacaattgtgtgccccccttcacttntaatagtcagcctaatngctgatggataaatgaaaaatgttcagtgagccaacctgtctagggtcctaaag

SEQ ID NO: 30584 - DNA, 409 bp, Homo sapiens; identical to SEQ ID NO: 30573

SEQ ID NO: 30585 - DNA, 453 bp, Homo sapiens
tatactatagggcgaattggagctccaccgcggtggcggccgcccgggcaggtacgcgggggcctttaaagtgagagagggaggcagaagaggaagtcagagcgatgtgctgtgaaatctactaccgtttgctggttttgaaaatggagaaaaagagtgaggaactgagaaacatggatggccttgggaacgtggaaaaggaacttcctatgtcatgaagacactcaaggaactctatcgagaaattcatgtatcaagaaactgaggcctactgccaatagccatatgagcgaatcatctcaaaagtgattttatagcccctgtaaagccttcacatgactgcaaccttatgagatatcctgagccagtacctcggccgctctagaactagtggatcccccgggctgcaggaattcgatatcaagcttatcgataccgtcgacctcgaggggg

SEQ ID NO: 30586 - DNA, 624 bp, Homo sapiens
  misc_feature 410, 432: n = A,T,C or G
gagctccaccgcggtggcggccgaggtacactaagaacatggtgtagcaaacctatgaaatccacactggttctgcactcccagtgcacacagaggaacatatatgcacacacaagcataattacctgcactgccatcctcctctgaggagccattgagtgtcaaacaggtcggctcacacagggcctccgaggagatcctgccatgccacagctgtgaaaacctcccactggatggagcaaattatttagtgcaagcctggcaacactttggaggacagctagaaacacaggttctccagattcaatccatggagagagacacaagaattgaacagcaagaaccctggagtaagaggcgggagaaccaggttccagcactagttctgccactcacgaactcggtgcctntggccatcactctacctctcanggcctcagctctcaagaggggatataataaaggctgcccttccacaatcctggagttacggcaagagccatgaggcaagagagagaaaagaggtctgaaaattaaaaggcagtataatgtgagttacaagaagtattaaagatcagtttgggtgtcacgctctgtctgatgggaggccattcttagatgccc

SEQ ID NO: 30587 - DNA, 349 bp, Homo sapiens
ctcactatagggcgaattggagctccaccgcggtggcggccgacctactgagtatttggagatattagtttcaattatctgttctcacattccttttggtctgccaggttgcagtgcgaaagcaaggacagaccagccctgccatcataagccctatgaataccactgccaggtcaggtcatctggcctgctgcagacccgactattgaccttgatgtccttgtccttcaaatgtcgacctatcttttgtcttccagttttccaggggctcagatttttgactctagatcatattcttcttatgccttggtttctgaaacctgctagatggcatcctgaattataatat

SEQ ID NO: 30588 - DNA, 400 bp, Homo sapiens
cgtaatacgactcactataggtcgaattggagctccaccgcggtggcggccgcccgggcaggtacgcggggattctcaatcctacccatgatgcagacagattgcctcatttcagctcaataaaacatcaccaaattcccttaggcagaaaaagggtggggagtgccctttcttgaaggaatcccttaagtgcacgtctctcgttttcttttcacatcaatgcagagtccctctgtgaatttacaacacccaacacccatgagttcagtccttaagaaaggaaaattgagcaagtatttaattggttggacattgcataaaagaggtccatatccaggctaactctagaaattttattctcaaacttagttggcctcttttttttctgtcagaggaccat

SEQ ID NO: 30589 - DNA, 467 bp, Homo sapiens
  misc_feature 55: n = A,T,C or G
actatagggcgaattggagctccaccgcggtggcggccgcccggcaggtactttnttttttttttttttttttttttcgcatttttagtagagacagggtttcaccgtgttagccaggatggtctcgatctcctgacctcttgatccgcccacctcggcctcccaaagtgctgggattacaggcgtgagccacccatccggcctaacgagacttatttttactcaactagatggcgttcattcatttgcttactcagctgtgccaggagttaagttgggcactgggaattccaaaaccaacaagacattctctgtcatcagggaactcacagcctagtatgagagataaacaaatgaacatgaaattataattcagtaacaaagaatgagtgttatggcagagggaatgtgtaagagcttggcagggtatccagcagggatacctaactaagccccactggggaagg

SEQ ID NO: 30590 - DNA, 420 bp, Homo sapiens
ggcggccgaattacgttccttctaattagcactagatctctgctatattttacagaaaataacagaggctgaaacaggtaaagattattctctcatatgaagttattaggctaggcaaatcaggctagcacttttggaggccaaggtgggaggatcacttgaagtcaagagttcaagaccagcctgggaaacatagtgagacactgtctctaccaaataaaaattagccaggcatgatggcacatgcctgtattcctagctactcaggaggctgaggccagaggatcccctgaacacaggattcaaggttacagtgagccatgattgcaccactgtacctcggccgctctagaactagtggatcccccgggctgcaggaattcgatatcaagcttatcgataccgtcgacctcgaggggg

SEQ ID NO: 30591 - DNA, 382 bp, Homo sapiens
  misc_feature 169: n = A,T,C or G
tctctaaccctttcttctctatttttcatctaggtctctttaggtgtatctttcattttgtcatccctttcactgtatctaatctgcttaatcaatatgttacactgtaaattttaaattaccatatatgtatcatttacaaatccctttggttccaaacctacttggncaactttgattctcttcatcccacatcatattttctatctcctcttattttagtctacacctggtaattctaatatctgtaatctctttgagagtttaggtaatttgctgtatttgctgactgtctcagggtagcttgtttccacataggtccatttatattagaatgaagtcattaggactctatctgaggggaatctttgagccttggttt

SEQ ID NO: 30592 - DNA, 369 bp, Homo sapiens
ctcactatagggcgaattggagctccaccgcggtggcggccgcccgggcaggtacctggactcctaagcctcagggatttactgaaataccattctattttataataatccttaaccaagaattttaaggatcttaaatttttctgtggttctattgttatctgatatatagatgatctgctgccatatcctaaagagcagatgaggccgggtgtagtggctcacgcctgtaatcccagcactttgggaggcagacgaaggtggatcacctaaggtcaggagtttgagaccagcctggccaacatggtgaaaccccatctctactaaaaatacaaaaattagctgggtgtggtggtgggcacctgtaat

SEQ ID NO: 30593 - DNA, 469 bp, Homo sapiens
cgactactatagggcgaattggagctccaccgcggtggcggccgcccgggcaggtactcatagcaggtagcttcatcaagggtagttttcaatgcattttctgttgggtaaaaaactttcccctcaaaaatctgatgacaggcttctgctaacagtgaagcattggacagagctgccctcagaaaacgtttattctcccataactcagtattgtaaacaaatacaaaaatcagggcagagataagagacgcgctaaaaagacagtgcttccaagagcccatcattcacaaccaggaaatgagtaaaatatctctctcttgagataggatcagagtgtagatatatttaacttacattttctccaggttccgaaatcatcctcgtgatggctgaagctctcgttgggctgttccctgtcctttcagtcacggttctgggcctttttctttcttcttcccctctttactta

SEQ ID NO: 30594 - DNA, 485 bp, Homo sapiens
actatagggcgaattggagctccaccgcggtggcggccgcccgggcaggtacatattcactatggaaaagttggacaatatgggtatataataagaacaaaattaaaatcttactactgaaggataccactattgtatttctctgtttctatatctgaatccagtttgaaccatacaaaatgtaattttgtaaaaaaaaaaatcgtcaaatgttgacaattttatacaatttagcacatacacacacagcacactttcatttggtaatttccaacttgaattttagacacagataagaatgtcttccctccagagatcagggataattttgatagaatattcattttttttagcacttgctcacttgccatgtgttgctgaacaatcaagttatttttagttacactgcactaaaggagtctgaagtctggactagtgatgaattttgctgatctttcaacactgaatccctcttgagggaagag

SEQ ID NO: 30595 - DNA, 325 bp, Homo sapiens
cactatagggcgaattggagctccaccgcggtggcggccgcccgggcaggtactggagaaatgctcaagggaaccactggcctcaaatctcacctggctttggggcaggactgttcctcctcacttcccaaaagcctgagaagagagataaaggtggtagaccttcttttttctccagccataaagaaaaatgatacccagggaggctctcatccctttccctattgtctcccgtttaaggctggtgaggaagaaatggatgtaaaaggcagacaggggtgccaccaaaaaaacataaagtcctcagcaaaaatgcaaaaatgga

SEQ ID NO: 30596 - DNA, 411 bp, Homo sapiens
cgtaatacgactcactatagggtcgaattggagctccaccgcggtggcggccgcccgggcaggtactttttttttttttttttttcagtagagacggggtttcaccatgttgctcaaggctggtttcgaactcctgacctcaggtgattgcctgcctgggtctcccaaagtgctgggattataggtgtgagccaccacgccaggcctaataactccacttttaaagttttatgttgtttagattgtagtttactctttaattaccagtgtttaagattagtaacaaaagatgttaactactaaaattcattcattctttcacaattttattggtcttcacaaataaatgaaaaagtacctcggccgctctagaactagtggatcccccgggctgcaggaattcgatatcaa

SEQ ID NO: 30597 - DNA, 572 bp, Homo sapiens
tacgactcactatagggcgaattggagctccaccgcggtggcggccggcctcacacacagagccacctgccacctcttgacagctacgtgcacaggaaagaagtttcttttaatggagcccatgtgctatgagtctctgttatagcagctgagccaggaagtgcaggcttccttctgattccttgccctatttcttcttctctcagctctgaggctgagaccttaaatctgagaggaggtagatttactagtctctgattcatttattttttacttctttatttgagacagaggtcttgctatatcacccagtctagtcttgaactcctgggttaaggcaatcctcccaccgcagcctcctgagtagctgggactacaggcacgtgccactgtggccagcctctgactcatttaaaccatgtttctcagcctcaacacgactgacatttgggacagggtaacacattgtgagatgtttagcagcctcctcccagatgccagtagcactttcctgttcagctataacaataaaaatgtctccagacattgccaaatgacccctgttgtggggc

SEQ ID NO: 30598 - DNA, 523 bp, Homo sapiens
ctatagggcgaattgtagctccaccgcggtggcggccgaggtacacctccacgaacttctccccggccagagggctccaggcaaagggactctcagatgtgggcaacggaggctgttcgggaaccggattatttaattccaagctggcagcaatacatctttctttatgtccaaagggtccgaagaagacttcatcatcttcatttgcactcgaagaagacaacgaaagatcgaagtcaaatttttcatcggccaaaagaagaatgtcttccttcttagggtcatccatgttcacgtcccctgcccgggcggccgctctagaactagtggatcccccgggctgcaggaattcgatatcaagcttatcgataccgtcgacctcgagggggggcccggtacccagcttttgttccctttagtgagggttaattgcgcgcttggcgtaatcatggtcatagcttgttcctgtgtgaaattgttatccgctcacaattccacacaacatacgagccgggagcataaa

SEQ ID NO: 30599 - DNA, 402 bp, Homo sapiens
  misc_feature 319: n = A,T,C or G
agggcgaattggagctccaccgcggtggcggccgaggtacaaattcctaagctacaattagggaaatgaggtagaaatgccatttataagctttttccaacataactgattcaaaggcactgagttcacagtaatgagcaggagtgtcaggtggggtgaggtcgggagcgaggcaccatttctaaacagtgacaatacattattgagcacagcttgaattaagtccaaagctgcacatatccaattcactttttaagaaaataggaaagaaacaaaacaatgtataaataagcacaaaggaaacagcatcatttagggngtgatttttacgagcttcaagcaatttcaaagtgaactacaccaaaagtatttcatatgcttggaaagacaaagtaatctgtc

SEQ ID NO: 30600 - DNA, 220 bp, Homo sapiens
gctccaccgcggtggcggccgaggtacccctcttgtgctcatagtctgggccttctctataccagagtttagaataaaattatatgattattgccagataagtttgagtcttacgtaaggggagcttctgcaattcaggaaatccttttagccttcaagacaatcaaaagctacacattcactttctgctattgctttatggcttccttcctggaggcaa

SEQ ID NO: 30601 - DNA, 576 bp, Homo sapiens
  misc_feature 535: n = A,T,C or G
tggagctccaccgcggtggcggccgcccgggcggtaccccgaatgcataaacaataaatgcatgtgaatccaaagaaattcaggataaaaaaggtcactggaggattcaaaatagaatgatgttgagtagaggggcagggtttaaaatggcagcaacaggaaacacaggtatagatgtgagttaagattaaattcaatttaagaaattctctttggctgggcacggtggctcacgcctgtaatcccagcactttgggaggccgaggcaggtgtatcacctgagtttgagaccagcctgaccaacacggagaaaccccgtctctactaaaaatacaaaattagccaggtgtggtggtgcatgcctgtaatcccagctactcggaggctgaggcagcagaatcgcttgaacccaggaggtggaggttgcagtttagccaagatcacaccaatgcacttcagcctgggcaacaagagcaaaactccgtctcaaaaaaaaaaaaaaagtacctcggccgctctagaactagtggatccnccgggctgcaggaattcgatatcaagcttatcgataccgtc

SEQ ID NO: 30602 - DNA, 474 bp, Homo sapiens
ggcgaattggagctccaccgcggtggcggccgcccgggcaggtactgatctcccttaatccagaagtcagggaggaagttggctgtgtcatcatagtttctgggaaggcaggagttgatgtggaaacacttgtattccccagagtggaggtggtagccattggagatgtgggttttgttgtcactaagtcagccaaaacagaggaaggggatagatgtttataaatcacagtccctacattgactacaggtgtgtttgaggagggatgaattttctctctatctttggtgacttcagacgtggctaatatttcagctgaggtgctgctcaaatttggaggtgaactggtttcaggttctgagcttgtgcgcaacatgtctgtggtcttcactgggccaagggtgagaagtgcagtcacaggatgaggagaggaggagatgctctctggtaatgtggagaaaaaagaagttgagg

SEQ ID NO: 30603 - DNA, 469 bp, Homo sapiens
tatagggcgaattggagctccaccgcggtggcggccgaggtatcgggacttgtctccaggagacatgtttgggaagaagagctagactggagaatcatgagcatgttcaggtgaaaacatgtgagtggataagagcaagagggtgagaacacagaccaaggggctaagggacagactgtgttcagtatttgggtatggaacttgtttttgctacttgctagttctaagaccaggctcagactctaacttctctgtaatgtgggaataatgacagcacttaccttataagattttacaaagattaaaatatcatatataacagcacttaacacaagtaagaattcagtaaatgttgactgttattactattgtctgggtcgttataagttttgaagacacaattgcataaactgtcatcattaaaaggaaaacagagaaaagtagttctggaaggagtctgaaaggcatt

SEQ ID NO: 30604 - DNA, 396 bp, Homo sapiens
agcgcgcgtaatacgactactatagggcgaattggagctccaccgcggtggcggccgcccgggcaggtacgggacttgtctccaggagacatgtctgggaagaagagctagactggagaatcatgagcatgttcaggtgaaaacatgtgagtggataagagcaagagggtgagaacacagaccaaggggctaagggacagactgtgttcagtatttgggtatggaacttgtttttgctacttgctagttctaagaccaggctcagactctaacttctctgtaatgtgggaataatgacagcacttaccttataagattttacaaagattaaaatatcatatataacagcacttaacacaagtaagaattcagtaaatgttgactgttattactatt

SEQ ID NO: 30605 - DNA, 461 bp, Homo sapiens
gcgaattggagctccaccgcggtggcggccgcccgggcaggtacaatgtaagcttttatcatcttgcatgtgtcctctgagaggttcacatttttgaggccttgtctcatggaaactgggaaatgagcttctggaattcagacccaggatctggctgcattccagaaataaatatacatgttgggcgttgagatagacaattaaaagaataggagagtgtgcaaacttttgagaatgagaaggcagaaaatagactcttttctctcatgctttgctttgcttttgtttattttttatatttttacttttgagtatcagccagtgggtagcagggcaaaaacaaagcagccattgatctaagtgtaaggcagcaggaggaaggttaagagaatgagtgttattctttaggactacattcatagttgcatgggggtgcttttggcttaaagtctacaattaaa

SEQ ID NO: 30606 - DNA, 437 bp, Homo sapiens
accgcgggggcggccgaggtactaatatcccttaatggcagaatgtgataatcatggaattaattattgctaaagtagttttcagataaaaacaataaaaaagaaaacaaaacagattaaacttgacacaatctgaccaaacacgtgtcaatttacaatttcaaggttattttacaaaatacctacatttacacaataggctcccggcagcatttccagacaaatgttcttttaatttatcctgacatgctataaatgaataaattacactatttaaaaattatcatcagtaagttttcctttctcatgggtcagagaaaaagaaatgagcgcgcaaagaagattgagaggaagcgcacgcacacagataactttaaagaagcaggaggggctggggagggttcaacaatcactgaacctcacacagtgtgatgctc

SEQ ID NO: 30607 - DNA, 293 bp, Homo sapiens
gctccaccgcggtggcggccgcccggtcagtacatcatgtagagaggcagactcgtcttcgacaaaagggctgacccctggaaaaccagcacagagccagctcttctgtctgaatccactctctccaaaacataacataagtcatggaaaagaaatgagtctcaagaaatgagactcttaccatgatgagagggggacattgaaaagctactttagtgattagggagagaagtccccttttgcatcccaaatcaagcagaggactggtagtccaaatataaatttggaataac

SEQ ID NO: 30608 - DNA, 404 bp, Homo sapiens
  misc_feature 259, 393: n = A,T,C or G
gtatacgactcactatagggcgaattggagctccaccgcggtggcggccgaggtactttttttttttttttttttggtagagatggggtttcaccatgttgcccagcctggtcttgaactcctgacctcaggtgttctgcccgtctcagcctcccaaagtgcagggattacagctgtgagccaccatccctggcatatttttgtaaatttatataaactgtttgttttccataaactaggatcatgctgtatatattgntctatttactgactttccaactcatcaaaatgtctttggagagctctgtctgcacctgcaaatctctcccagggcttggcacactatggtccttgggctgaattaggcccacagcctgtatttgtaaatttttnttttttttttt

SEQ ID NO: 30609 - DNA, 406 bp, Homo sapiens
acgactcactatagggcgaattggagctccaccgcggtggcggccgcccgggcaggtacatcagcaacctttgaaaatacaacatgatgaaaatacagcatgacctggtgcctagccttatccttttattgaatatggagggaaagagggtgggactgcagaggttaagaccagtcggcggtctattggtcttttaatgtttctgggtctcagttttattcatatttaagcaagtaagcctgtgtagacttctctcagaggaaaatcagcaagttgtataaatgaaagcagattaagcatatgaatcctttcaggagaaaagttagttggggtgtctgttgttttgtatgaatctgaactaggaaagtcagacaaactagagaaggataaaaagtgtccttctgct

SEQ ID NO: 30610 - DNA, 429 bp, Homo sapiens
ctcactatagggcgtattggagctccaccgcggtggcggccgaggtacttgaaaggcaaatttcagtgcttttgttatgttggaggagggcttactgatgcgtgctaagaccgatttctgattgagggatgaaccttgggctcatttttttcttgtgaagtctctttctagaaaattttttggttttgttctttttaaaaaatacatacttttttgaatgtatcatgtcttcattaacaacagaaaatccacatggtgtttactaaacttgtttacgacattaaaaacttcctttttatttttagcagcccaggttgagtttttcacaagagatttttttcttagctgaggtattagttgtatagcaaggaagaattaagccagatttttggtgtgtggaaagacagttttctatccacgtctttttct

SEQ ID NO: 30611 - DNA, 343 bp, Homo sapiens
gggcgaattgtagctccaccgcggtggcggccgaggtacctggatttgactgatgtggtccccatcattttctgatagagttctttttgctgggatcctggaagatgatcttggtttatacatgaagaatctggggtccagtgaaagtgacttggtaaaacccacagatctgtgccgaaagccttggtcagctgccccttggcctgatgctcttttctctgcatcagtgcattgcttcacctcttcttcaaggactctgattaactggaagtggacataaactggtgttatttatgtgggattttgttttccttcctacatcttagtttgggtcactgaatat

SEQ ID NO: 30612 - DNA, 416 bp, Homo sapiens
gcggccgcccgggcaggtacaaaagcaactttgtcactctaaaatactatgcagatgtgtggaattatctcatttattacttccaatagccgagtggtttgtgtagatgggaagatggggagagttgtttaaatgacctgcttcagatcccactgcagatctgtcttagtcctatgctcatgagattacactgcaatcaccacaagcttctattctaaagggttctaatcattctttcagataggaaagggtgttgtccccaattcaccaccagaggacatctctgagagttagccgtgatattcctgggcttgataggacatggagcccatgctagcttttcatctaaatgctgctagcactactcacatatttgcatacagttcttataggacaatgcaaccctgcgcttgctt

SEQ ID NO: 30613 - DNA, 476 bp, Homo sapiens
tatagggcgaattggagctccaccgcggtggcggccgcccgggcaggtactttttttttttttttttttgtatttttagtagagacggggtttcaccatgttagccaggatggtctcaatctcctgaccttgtgatccacccgcctcggcctcccaaagtgctgtgattacaggtgtgagccaccgcgcccggcctttacgttgaattctttaaattcagcttgtgactttgcacttcaggattctgagtgttctctgtcttcttcctgcattgtttttcttataccatacaggtttttcattggccttgactttttgttgttaactcattcttctttgggtttattttcatttgtttctgctgaatattatttgtttcaaactaaaaataacattccacattttaattgatgtgcggactcttaatctacttaaaatgtgggctgaaattccatgattccagctagtctggaata

SEQ ID NO: 30614 - DNA, 564 bp, Homo sapiens
  misc_feature 324: n = A,T,C or G
actcactatacggcgaatgggagctccaccgcggtggcggccgcccgggcaggtactagtggacgagtgggaagttaagttagaagaaaagggaaaataaaagtacctagtaaatgggcaattactaagccctggaacctctaataccatattgctagtggtaagatgatgagcaatgaaactgaagaccgcctcagaatggctttgtgtcataagctaagaagtttgagccttgtcctgaaaatgttgggataccattaaaaatcttctttaggggtcttctgctatggttttccctatttttattatctgatcatttgaatnttgaaatccaaatatctcattttcttatatttaaagctacttccttaggtgtagtatacatgaatttttaatgtttaatatatcattggaccaaaatggtagaactattctaagaaagagtagggaactgacatttaagcacctactgggagccatgacctgtgtcaaacacgttttttaattctctcaatgatctattgagtgttcatctctgttttatagataaagaaagtgagcatc

SEQ ID NO: 30615 - DNA, 444 bp, Homo sapiens
gggcgaattggagctccaccgcggtggcggccgaggtacactaggaaatgcacgaagaaaattatttgcccagatactgcaaagattttctagctatgtgagaaatgaaaatgcatttttgccatatttggtaaactgaatgttattaagaggacaaacctcatgtaaaaaggagataagcagaaactgatttgaatattattgcagagcaaagtaaataatcatgatgcattcaacctttataaatgtgcaaaaacagattaattttcccaattacaagccttaataatattaaatgactttaaacacatgaagtagggtaagaaatagatagcaatgataatacacgagtgtgttataagggatattaatgaataaattgggtacacaaaagagggaggggatggagaaaaaagggaaaatgctggattaaagttaaacaga

SEQ ID NO: 30616 - DNA, 546 bp, Homo sapiens
gagctccaccgcggtggcggccgaggacagctcccattgttacctgattaaacatgcatgcagcactgatcacactctttttatctgatgtggatctgtggctgccacaatggacacttcatctgatgggctagcctggcatcctataaatgtgccagctggcttaagattacaccacctctatcaaaatagtttttgaggctgggcacagtggctcaagtaaaagcgggcggatcacaaggtcaggagattgagaccatcctggctaacacggtgaaaccccgtctttactaaaaatacacaaaattagccaggcgtggtggtgggcgactgtagtcccagctactcaggaagctgagacaggaaaatggtgtgaacccaggaggtggagcttgcagtgaaccgagattgtgccactgcactccagtctgggggacagggcgagactctgtctcaaaaaaaaaaaaaaaaaagtacctgcccgggcggccgctctagaactagtggatcccccgggctgcaggaattcgatatcaagcttatcga

SEQ ID NO: 30617 - DNA, 463 bp, Homo sapiens
ggcgaattttagctccaccgccgtggcggccgcccgggcttttacttattcgcataatgaaacttgggttattttgacaggatgtccgaacaaagggccaaattgaacattcacaagtaacgccgtttagaaggttgtgctaaacatcagaagagtgaaactccagaccagagatgagacaattatttttggattctactacaaagcaagcacatttcctatgctactcaaatattcccttaaaccagaagcaatggtgaaggggaaaggacagattgaacccccctacgcacctgcaagagattggtaagcaagatgagtgtctgcttccggatgaatgggtcggaatccttcagacacctggagatgttgggaatatacttgcccaccatgatggtgtagcgaatgtagagatcgcacattacaatgatgacgttgttgcggacagacacgttcttacaca

SEQ ID NO: 30618 - DNA, 361 bp, Homo sapiens
  misc_feature 45, 46: n = A,T,C or G
ggccgaggtactttgcacatacttcggcaaaacgatccactcgannagatgatgcctgaggacacaactccaatttagtagtttcttgataccctcccaaagcacctagcacagggctaagtctagagaatgcttttgaaatatctctcaaagcagaaacttgtgtgtatatattgggggaaagaaaataggtctacttcttaaaaaaaaaaaagccttgacctacttgaatgcgatgatgttagggtgcttcaacttcctcaaatgcttgatatccgtctcattctgttctctcactttcttggaggccacctcttccgcccggaacttgcccaaaaagacgctccttgggctccactac

SEQ ID NO: 30619 - DNA, 233 bp, Homo sapiens
ttttttttttttaaaggccgaggattaattaaacccggggaacaaaaaaaaaccagattaaccacacccaggcctaactttataaaagggataaaaagaaaaaaggaatcttataggacaaaagggttcatcaataaaaacaaattcccaaaaacccgggaaaaaaaattccaaaattcccccccaaattcaaagcaaaggaggaaaaggggaagtaaacttagcccccctaa

SEQ ID NO: 30620 - DNA, 366 bp, Homo sapiens
tacgactactatagggcgaattggagctccaccgcggtggcggccgaggtacttgcttaacagaagtctttaatgttagtgaatgaatgtataaaattataaactacgcattttcaaagagtagcatgtattttgtatcgaatccaagtaaatttttttcatagctacctaccacaactgcaaattattcaaaataaacttggatacatatccttatggggatatgggaagcccatctatattctcctacttgatgtttttaaagattgaaactttattctgaaacatcaggctctaaaaaattccatcattaagatgaataaatgggaaatggtttatttgttacttcgtaagcataaatgggaa

SEQ ID NO: 30621 - DNA, 487 bp, Homo sapiens
ctactatagggcgaattggagctccaccgcggtggcggccgcccgggcaggtactttttttttttttttttttttttcgaagagagggggtctcactttgttgcctaggctggtctcacactcctggcctcaagctgatccttccacctcagcctcccaaagcactggggttgctggcgtgagccaccatacccagctgaaaagtgatttcttataagccaagcaatcagcctctgcagagaagacaggaccctcagcacatatctagctctgtaattcctcaactcaagttgggcattactatcacccctacattaacatgttctcattaggaatatgaccaagaccaggacagagtcacaagagaaacagtcagtggatcatgtgacacatgagatttattggtccaataaggtgaactggtcaggaaccagatctgctatgccccttgggaataaggtggccaaaataaattttgatttgaaga

SEQ ID NO: 30622 - DNA, 380 bp, Homo sapiens
atacgactcactatagggcgaattggagctccaccgcggtggcggccgcccgggcaggtacgcgggggattgaaggagggctgggaaagcacaagacaggaagagtctgtgccaaaagaccctggataggaagaaacacaagaaaaaatttatccaaagtcaagattgagtgggagcccagaggaacgttgcattcaaatgacaaagaatatgaagccgatagggataaagtgagtaacccaaggtcacaagacaagagagctggtccaggacaagaacttggtgctcatgtcaggttctctctgccacatcttgagaatacgtgcatcctttgaattcttgcccttttcagtagaaagcatcgtgggaaaacatacaga

SEQ ID NO: 30623 - DNA, 499 bp, Homo sapiens
actactatagggcgaattggagctccaccgcggtggcggccgaggtactggaaagaggagtgctttggacttatcagctgaacttgtagtcgataaagccatggagttaaggtttgtgggtggcgtctatggtggcaacataaaaccaacaccctttctgtgtttaaccttgaagatgcttcaaattcaacccgagaaggatatcattgtagagtttatcaaaaatgaagatttcaagtatgtccgcatgctgggggcactttacatgaggctgacaggcactgcaattgattgctacaagtacctgcccgggcggccgctctagaactagtggatcccccgggctgcaggaattcgatatcaagcttatcgataccgtcgacctcgagggggggcccggtacccagcttttgttccctttagtgagggttaattgcgcgcttggcgtaatcatggtcatagctgtttcctgtgggaaattgttatccgctcacaattc

SEQ ID NO: 30624 - DNA, 464 bp, Homo sapiens
ggcggccgaggtacaatgtgaaagcagccagcacctattcttggttgtggctgaaaggaaccacatggagatctcttgagcaggcctggaggtgaaatactcccctttattgcagctgttggttaatgaagatatgttgagggaatttcacagctctggcatcaggtaggagactcacactgattctgtatgattctgacccagttgtcaaaacatagtctcccagcaggactgtgctttgctccctggtgactgtattctccatttttacaaactgctgtttgcacaggaagcctgccttggtcttgcccttgtcctccaagattagcattcgactctgaactccaacatcaagcctgttccctggaaatcaatgacaggtttctttttgtccattggaacttcttgcattgcctatttctattcttctgcccttagaacactgcactgactcatactgcatg

SEQ ID NO: 30625 - DNA, 402 bp, Homo sapiens
actcactatagggcgaattggagctccaccgcggtggcggccgaggtacgcgggtgaaaatgtgagagctctgttcacatctgacaggtctattggttgaagtttcaagtggcaactggtttgttagaaccagtctcttccagtgaagaaagttgttcactatttagcaaacgctaaggaggaagttcatgtaattcagataattcctatggtgtctccacagatactatgtggaaaagatggggagtagtgagagaaaacacaagaatatgtgaacccttcaggtctgtgagggatggaaggattgggattattggagaaaaataaggattgcattccagctgggcagatctaattcgagaataaacaggatgtgcctgtagatcaatgaaaagaaaggcc

SEQ ID NO: 30626 - DNA, 478 bp, Homo sapiens
ctcactatagggcgaattggagctccaccgcggtggcggccgaggtactccagcctgtgtgacagagcaagactctgtctgaaaaggaaaaaaaaaaaagaaaaatcatatggatcaaagtaattataatcaacattgtcaactgactttattaatcttttcaaatgaagtagctgtaaactttctttgctgtctccattaatttgttgtttttaacattagctaaggtataatggaaagagaacaaaaagaagggagaacaaaagaaggggaaagaagagagctagggcctgccttctcctggctctgtcacttgctaacggtgtgactttggacagggagatgtcccctctaggccctggtgaattagggagcttggcaaagtacctgcccgggcggccgctctagaactagtggatcccccgggctgcaggaattcgatatcaagcttatcgataccgtcgaccttgaggggggg

SEQ ID NO: 30627 - DNA, 498 bp, Homo sapiens
tatagggcgaattggagctccaccgcggtggcggccgcccgggcaggtactttgagaaggaaatactgtgttgtaatcatggataaaatatgcaggggaggggaggagattatagatattaatatagagtttagggtggcattaggcaaggatgacatctgaatatctaacttccattttacattgccatgtaagtctttttgcccagtgggtttgggggacattgaggcagaactcctggaaaatagaaggaagtgaaaggtcactggtctctccaataatcttgatgggaaggactagacaacaccattagcaaaatgtgcctcttaaaaactcaagacacaagcattatcttcatctcactgaaataacagctacatcctttattaacatgagaaaatcgaaaagcttaagaaaattgtcctgaaattggaatattggtaataatttgccagaaccactaaatctactttctggaaacagtaaacacttcaaata

SEQ ID NO: 30628 - DNA, 404 bp, Homo sapiens
ggcgaattggagctccaccgcggtggcggccgaggtacatgatgataaggaacacaaggcctgggataaaacaggatctttttttaaaacaagcacaaatagtgtctggaccagaatacaaaaatcacatcaatctttagaacaaaataaagaccgaagaaactgcaagcagacaacttctggtgatgaccattagtcccttctcggtagttttggagagttttttttaaaaaaagtttgagaagcaatgatataacttaacaattatgcaaaacaaggtagggtggcagtaggagatggaaacagaagagaaactataagcgtaactgagagccagttataaacttaactattaaaaaattgaactgtcctattattcttgagagaaaaactactgaactatg

SEQ ID NO: 30629 - DNA, 621 bp, Homo sapiens
  misc_feature 470, 472, 475, 476, 481, 494, 496, 497, 498: n = A,T,C or G
tatagggcgatttggagctccaccgcggtggcggccgaggtaccaggtttccctctcagcgggcccgttcccctgcatctttttacaacttaggtttattcactcctactgcagacagtcttttcccatactctggaagacatgggtgtaaaccaccatcaacccttccatagctcccacacaggaaggcatggccctctgccccacaagcttgtataggatatcctgagggaggaccctcctaggccctccttaagtcagtttttccctctatgtgggctgtcactcccacaacacccactatgtcctgggaaattaccctgaatcagtggttttcactaagactgattgggatgggaatgcaatttcccagcgaagaggtgggttttgtattcagaagaaaaaaggtttaaaatactatatttccattctacatgggctgtggctttctcagtttgtgtgaaggccanangannaaaanaaaaaaaaaaaanannnggtacctgcccgggcggccgctctagaactagtggatcccccgggctgcaggaattcgatatcaagcttatcgataccgtcgacctcgagggggggcccggtacccagcttttgttcccttta

SEQ ID NO: 30630 - DNA, 513 bp, Homo sapiens
tactatagggcgaattggagctccaccgcggtggcggcctgaggacttttttttttttttttttttttgccgactaagatcccagaagtatctgagaacttgggctgcgcagggaatgctggtgtgggagaagcaagccaactgagctgagctgcggccctgtttgtccttagctctccaaaacttgctgtctatgtcacttggaaggaatctgattcttttctgcaaggcactgacaataccttacaacagagctgggagataaaatgcagagcttgtgaaagtcatcagaaagttgaacacagatggtccccggcttaaaacggttcaacttgatgatttttcgacttgatgatggtgtgaacacgatacacattcagtagaaactgtatcgataagggctgctttattcaccagaagtgaaaaacacgatggttgtgtgagtatctgaagtacctgcccgggcggccgcttagaactagtggatcccccgggctgaggaattcgatatca

SEQ ID NO: 30631 - DNA, 423 bp, Homo sapiens
ggcgaattgtagctccaccgcggtggcggccgaggtacaatgtcctatatttacgaggaccttactacttttaaatcgctgtcgttcaaaaacaaaacaatttttttcagcgtgttcttatatgcccattactgagctggtccctggggatgcaaagacacatggacctcattgttttcctccaggaattcacttggaaaaagaaacacgggagatgctgcctagaatccttgatgcctccgaagttagactggagttggattaacccggcctctctctgtggaaataggagatggctagaagagtgacatcaatcagccacaactgcttcagcctcataacgtcggagcaatggtatcagacttgatgcagagactacccgggcatatgtggcttttttttttaaaatggagtgaaaaattc

SEQ ID NO: 30632 - DNA, 479 bp, Homo sapiens
ggcgaattttagctccaccgccggggcggccgaggtacgctttgggagaacgtttgaaagccctgttttggctgttgtcctacaatcctttgtgggttcgaattgggctagagacaacttatggagaactcatatctttggaagataacagtgatgtcacagggttggctatgtttattctgaatcgcctactttggaatcctgatatagcagctgagtatagacaccccactgttcctcacctgtatagagatggtcatgaagaagctttgtccaagtttacattgaaaaagttattgttgttggtctgttttcttgattatgctaaaatttccagactcattgatcatgatccttgtctcttctgtaaagatgccgaattcaaggctagtaaagaaatccttttggctttttcacgagatttcctatgtggtgaaggtgacctttcccgtcaccttggcttattgggattacctgtt

SEQ ID NO: 30633 - DNA, 330 bp, Homo sapiens
ggcgaattgtagctccaccgcggtggcggccgcccgggcaggtacgcggggaagcaggtcatccacctttccctgtgaaggggtcctccctcagggaggtagagaagataatgttaatcccctcctatccaagaaacaggctcccaccagtgccaagtgcagctttcagtgagcatggcttccagtgggcatgtgtgcctaggaatcagtagtcctatagccacaaaacagtcaaagacctggaacccaatggaacaggttccatgatccactgaaattctgtccggctcctatagaacagattttgttggctcactaatcaccagaaac

SEQ ID NO: 30634 - DNA, 462 bp, Homo sapiens
atacgactcactatagggcgaattggagctccaccgcggtggcggccgaggtacagtggcacaatctcagctcactgcaacatccacctcccaggttcaagtgattcttctgcctcagcctcctgagtagcttcgactacacacgcatgccaccatgcccagctaagttttatatttttttgtggagacagggtttcaccatgttgcccaggctggtttcaaactcctgagctcaagtgatccacctgcctcggtctaccaaagtgctaggatgacaggtgtgagccaccatgactggcctattttttgaggaacaattccagtctgctgagatcttgcctgtcttcctttattagagtcttttaaaagctccatttagcacagatatatttcattttgaatacctgcacatggagatctcaaagtatctccacttctctttttatatctggttaacctgac

SEQ ID NO: 30635 - DNA, 413 bp, Homo sapiens
gtaatacgactactatagggcgaattggagctccaccgcggtggcggccgcccgggcaggtacaacttctataatcttagttatatggtttgtgtctctctaaattataaaggggagagtaattacaataggtaggttaaacggcaacagcaagaagtggtagctactacaagcttgaaaaagggaaggaggccaggcatggtggctcacgcttaaaatcctaagctttaggaggctgaggcaggcagattgcttgagcccaggagctcgagaccagtctgggcaacatggtgaaactccatctctaaaaaaatgcaaaaattggctgggcccaggaggctgaggcagggacatcgattgagtctgggaggtcgaggctgcagtgagccatgatcacaccagtgaaccccagc

SEQ ID NO: 30636 - DNA, 461 bp, Homo sapiens
cgcggtggcggccgcccgggcaggtactaacaaagagccctattcttcattcttaatcttctgtaaagaatttgagtttggaagttgctaaagcaatgcagtgaacagtgtacagccttctgacgtgctcaagaaaataagccttgcatattaagggagaacttatttcaactttttcataatcgtatttaatgaaaacactattaaaccttataataaattacaatttgggttttgaaacacatgccatcttgtttagtttatctgctgaaatatagaaacaaaatcagcaacagatagaacaactaaaatgatacaaatctaaaggtgattaaagagttgtaataatcagaagagagtcagattcagacacgcacatgcccctcctaaatatccagtcttctcatctctcattctttctcaaatgtgctgactgtgagtaaaacgggcagacagactga

SEQ ID NO: 30637 - DNA, 458 bp, Homo sapiens
tacgactactatagggcgaattggagctccaccgcggtggcggccgaggtaccaagggtggtatggattggcagagccactcaggaaactgtcaatgacttatacttcctgggtctgggaacaagccagctatgttgctactgaattgagcagcaataggaaatgaactcgactccgaagttgcagttctaaccaaaagacaagaagatcaatattaggagaagtgggaaaaataacaaccagggcattggagatgagagaacgctggaaaaagattactattctggaaatcagtctcttgaagatggaattatgatctaagaggaagtgagtacctgcccgggggccgctcgatgagcaaaaggccagcaaaaggccaggaaccgtaaaaaggccgcgttgttggcgtttttccataggctccgcccccctgacgagcatcacaaaaatcgacgctc

SEQ ID NO: 30638 - DNA, 476 bp, Homo sapiens
attggagctccaccgcggtggcggccgaggtactctttctctttgtctggaataaattccttaccactttccactatcacctagtttactgagtctcacgtattaggattgggtttaaatgtaacctgtattgcctcacccagaaagcctttccagtctacccctgctttgattatttccctatcctctatgctgcctttgttccctgtgtgtctctccacaacagcaattagagcacatatgatttattatctcacatattggtctcaactttcagtctatgaagtctctgcgcacagaagctcatgagcgttttcttcttttctgtggattacctttgcaaaggcccgagaccaccagagaacctgccttcctacctctcttcctcatctccacccattccctgcctcacattcagttaacaccaaactgattgacgtttttttcaggtgctacttgattgatgctttcatgca

SEQ ID NO: 30639 - DNA, 500 bp, Homo sapiens
ctcactatagggcgaattggagctccaccgcggtggcggccgaggtacttagaaatacaattctgcaaattttatctttagggagttttatttcttgggaggatgattcaagaatatagtcacagatatttatttttgtctacagagaaaataatcatttaaatgaaaaacttttccactcaactgaatatgcactccacttagcacagtgagtggctgatgagcacaacacccgccaccccagcaggcttacacggcacttactatgtgccaggcacggttccaagaaaggtcactagttacattgcctcacacaatcctcacaacaaagtaggtaatattaacatccctcttttacagatgggaaaactgagacatgaagaggtttaaaagctcacccaaactgaaatgcctagtaagtgacagaaccaaaatacagatgcaggtcagcctcgctactgtgctatatgatactgtctctataatctactgctggcttt

SEQ ID NO: 30640 - DNA, 433 bp, Homo sapiens
actactatagggcgaattggagctccaccgcggtggcggccgcccgggcaggtactaattttaataccatttattccacagagcatacaccatattatattacttacttgttttttaaatgtctgataccctgaaatatatttaaattcctcaaagggatgcatattcctttgaatatgggtccacagatgagtttcagagtgtctgaaggacccttgacattttacgtagagacctagaaacactttctaggaacagggtctgtaactttttttctttttttttttttttgagacggagtctcgctctgtcgcccaggctggagtgcagtggccgggatctcggctcactgcaagctccgcctcccgggttcacgccattctcctgcctcagcctcccaatcgatactgcttttaaatgatgcttatatttt

SEQ ID NO: 30641 - DNA, 369 bp, Homo sapiens
ggcgaattggagctccaccgcggtggcggccgaggtaccaccagctttggtcggttttgcctctgcagtatggaggaagctattgcctttggatattttgaaagatctttttgcctttagaaccctatcatattcctatctctgctttgaggaatctcaatgtggtgcataattggttatcattcagtccttttaaatcaataacagccacatactttaaagattctattctgaagggcacatctcaatggccgtcaaagctgtggtttactgttttgatgccacatgaagctaagttgtatatcctttctcagttccttgtcatatttggtctttttttatattatctttttctggatcacatttgaa

SEQ ID NO: 30642 - DNA, 385 bp, Homo sapiens
atacgactcactatagggcgaattggagctccacgcggtggcggccgcccgggcaggtacttttttttttttttttttttttttagtagagatggggtttcaccgaactcctgagctcaggcaatccacccgcctcggcctcccaaagtgctaggattacaggcatgagccactgtgcccaggcttaggaacttttaataacacccctgagaagttactgtaagacacccttagtctgtggaatgccacccatgaatggacatgatttttctagatcaggacttctcttttcacccatgggccacaggccacacttggaaaagcttttgggaaggaattgtttgaatctgaagcatgaatagcctggagtaaataaggatgtgtc

SEQ ID NO: 30643 - DNA, 385 bp, Homo sapiens
taaggcgaatcggagctccaccgcggtggcggccgaggtacaaggagtagtctaaaacaagtgactttactacttattcttctgcatgtccttaccagcttcttaccttcttcaggttgagcatgagatcagcttcacagggatgggtccttaagggtttttttccatactagtttcagccttaacaatgagttttcaacccttaaacatgaaaaataaatagtgcgaaagaggggaggatggtagaaatgctttaaaattaccttttgtaaattttactttgtttatgttttaattgtgccttgcttatcaggcaagtcctacaaacaaagatctccacggcttctcaggtctcccaaggaacaggttcccctgttcctaaaat

SEQ ID NO: 30644 - DNA, 466 bp, Homo sapiens
cactactatagggcgaattggagctccaccgcggtggcggccgaggtacactgtgaaaactgaatttggagcacagctaggtcggcatccagggacctcttggctggcagtaatttctgggtcacacaaatttgtctttgcttctcagcaatcttcattttcaggaattggatcttttcttccagtagatgtatttcaatttctccatttagtttcatcttctcttggatatttattttttcataaaaaatgcatattccttcttcccgctctatcagctgaacgccactatggtcaaattcagaggcggaggctaagtgggcattgagaccaccgttttactagtcattgtggctccctctggctttggatgcacgatatacacaacatagcatacttccagaggatcacagatagtcaccaatggctttctagttaaattacatccacactttggaattctcta

SEQ ID NO: 30645 - DNA, 556 bp, Homo sapiens
accgcggtgccggccgcccgggcaggtacgtacttttaaaatctggcaactaaattctgaagtatgctataaaatttaaaccaaatccccatgaacatataaaaaacagcccagcctgtttcttccccaaatttgtctgtttattccatcgactaatgaaagtctctgtttcagactccgagatgcatatctgtgaattagtgctcagtttcccaaaactaaagttaaccttctttcctgcctctcactcttcatttgtccttgatccttccataaaaccccaaatccagaagcaatgattaggaaactgtagactctagtaaaagtaatttcactagtgtcagagaaagagaaaggttacccaattaaaagaactaaggcttggcatcagaaacagaagttgtgaacatgacaaataacatgaacaaatggagatggagaatgttatttaagcctaatgggaatcggtgcaaaatatgtccacctagtacctcggccgctctagaactagtggatcccccgggctgcaagaattcgatatcaagcttatcgatac

SEQ ID NO: 30646 - DNA, 482 bp, Homo sapiens
ggcgaattgtagctccaccgcggtggcggccgaggtactgttagtgtcatttcaccaaagacaaccattactagaacactccttagctagcataccaaacttttataaaaacagaaattctgaggctaaaagaaagcttttactatttgacaattggtagttaaaatacctagttcctatctagccaaacaatattttaagaagtatttgagaatgcacattctttcaacaccatcatcacagatcacagaaaccatggtatctaggcaccagagactcataaaaagaatggtaaatcattcagagagccttattttgaataggaaccgttcatgccgatgatatcctgaaatgatttagagtatgtgataatgctggcatgtagttaagaagcctggagaggagataaaggaaaagtgaggcccaccagggatctggaatggcacagggagttactgaggctgacagaaattctcacacta

SEQ ID NO: 30647 - DNA, 435 bp, Homo sapiens
ctccaccgccgtggcggccgcccggtcagtttacaaggaagactggctgaagatgaatctgagaacaaagcaggtctacagaggaaggagcagtgactagcctggtccctgaacgggtgaaatgggaaagtagctctggctccccactgccaaaaggcctcagtgatcttgctgtttggggttattagagcaccttttacccttttcaacaaagcccaattttacttaatctagttagaatttctactccttgaaaccaagagagacaaagcaaaatcaactataatttaaccattcctcctactttgagagcatgtaggttatttttaattttttgattaccctatgtgatgctatagtgaacatttctgaatacaaattcttggttgcatttctaggtattttcttaagatatatatgtatgtggaattaaaa

SEQ ID NO: 30648 - DNA, 406 bp, Homo sapiens
acgactactatagggcgaattggagctccaccgcggtggcggccgaggtacaagtgctcatgggtggcatcaggaaataatgagacctttctctcaagattttctacatatttaggttctgtcacatcaaggatgctgatatttaaatataaacctttttagaatgtatttgacagaatttcggggcatgaggcaatatatcatagcgctttaagagcatgggctcaggaaccagactgccagggttaaagcaaacctatgagttgtgtgactctcttggcttctgttttcttacttgtgaagataggtgtctcaaggtgtgttttaaggagaccatggatcggtgctcttaggacagtgtctggtgcacagtgaatgctctgtaagcagccaccgtggttctggg

SEQ ID NO: 30649 - DNA, 351 bp, Homo sapiens
ctactatagggcgaattggagctccaccgcggtggcggccgaggtacatactctctctggagttaatttttcacattcagtgatttttggtgaccctttcaaccccaacaatgtgagacaggtgagagaggccttgctttttatagtgggctggatataaataaataaggtgagactcagctttatttgtttttaatgtagaccatggtttggataaccttcatatgtcaagcagaaaatattgtagacatttaaaaaatatccatgggtatgttctttgtttccttgtgcaagcctttaaaggattacaggaatagcaagtgatgtgggtaactcgggccaataatggta

SEQ ID NO: 30650 - DNA, 473 bp, Homo sapiens
ctccaccgccgtggcggccgcccgggcagttactttttttttttttgtttttaagatatagggtctcatggtattacccaggctgctacacagtagctattcacagggacaatgccactactgatcagcacgggagtttgaacttgctcccttatattttattataaatattaactaaaatgggctcaaactgtccgtctgtccctatgtttctcagtggatgctaccacgcaccttcttcctgggctgctggccatgaagccacatgcatccacctgggcagttactggtggcctgtttcccactgcagggacagagaggccacaactgagattgcccactgtcactgagctttagaatgttgccagttatagacacgcaaacaatgccgggatgaacttgtcagtacctcggccgctctagaactagtggatcccccgggctgcaggaattcgatatcaagcttatcgata

SEQ ID NO: 30651 - DNA, 511 bp, Homo sapiens
tacgactactatagggcgaattggagctccaccgcggtggcggccgcccgggcaggtacatgggagtttgttttcatattctgtctccttttggaaatgtttgagattttccagtgtcttctttctccagtgtgctgagctattggtctgcccaaaaatctgatgttttccctttgttcccatgcagtgttccaagagctgccagggtggctttcgggtccgggaagtgcggtgtctgtctgatgacatgactctaagtaacctctgtgaccctcagttgaaaccagaagagagagaatcttgtaaccctcaggactgtgtccctgaagttggtaagtagagatttcaatcatgggggaaaggttttgtgttttttaagcttgtcagattctccggtgtgacaataacaagcctcttttaggtctttctgtgaccttgcacacagtcatggagttcagagggttgaggtgcttttggtattataaatttcatggtttaagatgatcattca

SEQ ID NO: 30652 - DNA, 531 bp, Homo sapiens
gcgaattggagttccaccgcggtggcggccgcccgggcaggtacactgtatactctctgttgtccccttttgatggtgtggcatacggggagctactcttgctgcccagcatcgtgagagtgtatcattctgcatgtcactagctaggaagtgagcagaattcaaaactcaagtatggtttgaatgtgcattgctgtcacattattgcaaaatcagaaaatcctaagtcagggactgcctgtatgtgggaggaaaacaatggagtgagttttgtgaattgctctgggctgataagggtccagagaccccgtgtgtaaaggagaatttatatactgcccatataaataaagaaaagggaaaggatagacagagctttttctctgtttgctgctgcttgttaattgtctgctttaactgtcttcccagaaataatttttatgtcagagtcatattttggtgttaacatagtatcctgtgatagtcagttttaaatcaggaagtatgagttctcctcctgtccctttgttcttt

SEQ ID NO: 30653 - DNA, 427 bp, Homo sapiens
gcggccgcccgggcagtttctcggggatgatcaaccaacacagttggaccgctcagagctgtaatgcatcaaacattgaccacatgcttccatataaacattaggaataaaggcaaagcactaagttattcgaaagtttaattatatcaatacttgctattcaaaacatttaaaattattttaatgcaaataattacactcaatataattttaaatcttcaagaagcaatctcctactacttttatcctacatacaaataaattatccaattattttaactttggattattctctataatgaacactttgaataatttaactcatgacaggattcatacaattaaccttttaaacatttggcttatagtttacatcacatttgattacccttttattaaatctcaatagcaccaaaaacctgacaat

SEQ ID NO: 30654 - DNA, 437 bp, Homo sapiens
ggcgaatttgagctccaccgcggtggcggccgaggtacttttaagacagaccttacctgtgactcttttaatttttcagttccatttggtaattcataaacatcatgtgaccagtgacctttcagcgcttttggaaggatattggccactttatcagctttatacacacaaagtgcccattttaccgtcgtatccatttttgcattttgctgaggacttatgtttttggtggcaccctgtctgccttttacattcatttcttcctcaccagccttaaaacggagacgaatgggaaagggatgagagccttcctgggtatcatttttctttatggctggagaaaaaagaaagtctaccacctttatctcctcttctcaaacttttgggaagtgaggaggaaccgttctgccccaaagccaggtgagatttgaggccag

SEQ ID NO: 30655 - DNA, 448 bp, Homo sapiens
ggcgaattggagctccaccgcggtggcggccgcccgggcaggtacgcgggaagaaaataaagagtttagaccccaaatccagccctcattccccaataatatggtgtctgtaaagttaaaacaaattattttccgggtcacaggacaggtggcactaagtttttggattggtggcaaaaaggatctgagccactatctgatgatgaacaggaacagagggcagtgcttttaaaacgttaatcacagcactttgggaggctgaggcgagagaattgcctgagggctggattttgagactagcctgggcagcataatagggccccatctcttaaaaaaaaaaaaagccaagcatggtagtgcattcctatagtcccagctactagggagagactgaagtgggaatatcacttgagccaggagatcgaggctacagcaagctatgaccatg

SEQ ID NO: 30656 - DNA, 412 bp, Homo sapiens
cgtctttttgatcccaatggtttattctttaactggtggtctctgaactggtaaataccactggagctatcaagaaagatcatttagtgttcaagatgaaaatgctggaattctttttctaataataatttcatctagaacagatacaaaagacacttaactctattaatgtttacaacacagatggtttctggcatccttcctctattgaaagtcagaagttgggtgtcacttatggtccacgtgtaaagcttcctgaaatgagtgtagagtcctaagacaccaagggaagcccgtggagcccttactggttagtttactgttttcggcatgctgcagtgtctggtagcttacatgtgtctggttacacagacgcagaatatcttacgttaaaaatccctcttaaaatgga

SEQ ID NO: 30657 - DNA, 318 bp, Homo sapiens
gactactatagggcgaattggagctccaccgcggtggcggccgaggtacgcgggatagtaatcttttaaatatataaggtattagcattaataatctaatagtaaaatctgttggtttattttttgcttagtccttgaaagttggtgtggtttgttctgaaaaaaaagagaagaagattaaaaattatcttaatgatcataactctgggtggcccctgttggggaggctcaccaggctggggtctggctcttggcaaagccccagcagctctgtgaccttgggtgaaggtcacagaaaatcccctatgagctctgact

SEQ ID NO: 30658 - DNA, 451 bp, Homo sapiens
ctactatagggcgaattggagctccaccgcggtggcggccgaggtacaaaaaaaattttcagaccatgctttttcctattataacatttcataatctcttccttgttttgtccctgcacctctacctccattaaccaggtctcatcaagttgtgacataagccaggtttcatcaagttgtgacaggtgacagaggcgtcacatgacaggggacctgattaggaaatccatatcctcataggatgcactttaacatcttcttgagctgtcttgatattttgagacatacggcaaagattccatatactgttccagtgaccagtgaccttgagaacatatttaaaactatagatttctgtgccccacccagagatcccaattcagtagcgctgaggtgggatctgaacatgagtagacttagaaagcctctagctgattctgaagcacagcta

SEQ ID NO: 30659 - DNA, 511 bp, Homo sapiens
ctactataggcgaattggagctccaccgcggtggcggccgcccgggcaggtactaagacccctgaatgtatataattatttaccaaaaccccaaacaaacaaaatcccaacattctgttagcgtaggtgatcctctgttaaataattgtaagctttgggatttaacggaagttgacggtgacttctgaccttactacgcttccaactactgacttagccaaactcctcaagtttacagaggtgaaagcccaagaaatcttttatttctatactcctaatgactttaattttctgccttgtttcttacaggatcttaataaatatccatttgtcttaccagaagcttgcatcctgcgttgtatggaaagaattcaaaagattcatgaacttggatgtcatgtaggaaaccaaaatacataatatctgtccagtaggtttatgagatcctttggaccagaagctatacgattcattatttacaagacattccactatcatggagcctgacaga

SEQ ID NO: 30660 - DNA, 450 bp, Homo sapiens
ctactatagggcgaattggagctccaccgcggtggcggccgcccgggcaggtacctctgcagtccataaagttaggctggactgaggcctatcattgatggattgaagctgtcatccagcttcccctggtgctgggaactgggtgtgtctccttacccctgtagggttgggctggccttcgagtggcagaaatgccagctatactgaccccacagctcacacagacgacaccatgtccttcaagccagtatgacaggggttattgtcccacgtttcaggtgggaagacagatgcatgatgaactgttataataataccagctgctgatcacagagcactgactaagtgacaggaaccatgccaagggcactactaggtcatcctctcaagaaatcctcatcacaacaccatgaggtagggaatcaatcatccacatttcacagatgaagc

SEQ ID NO: 30661 - DNA, 605 bp, Homo sapiens
ctactatagggcgaattggagctccaccgcggtggcggccgcccgggcaggtacctgctactaaataaaaacaccaggaatggtagtttttgctgttcttaacccaaaggaagaaagagcccttctctgaatggtttttgttgtttagttaagaaaatgccaactgaccaatgtcccagaaacaaatgggtgtagagccctagcatgcttcatttcaacacctttcacaaacagtagttttggcactttgcctaccaagctgtgagctaggcaactttccccttatattttgtgtgcctctgaaaacatctccagaattcaaatgacgatttttgacataagttatcccttcctcccctctgattgcaagggcagcatcactctttctgccatgcataagtcaacatttggagtcaatagccctcttgtacctcggccgctctagaactagtggatcccccgggctgcaggaattcgatatcaagcttatcgataccgtcgacctcgagggggggcccggtacccagcttttgttccctttagtgagggttaattgcgcgcttggcgtaatcatggtcatagctgtttcctgtgtgaaattgtta

SEQ ID NO: 30662 - DNA, 411 bp, Homo sapiens
cgaattggagctccaccgcggtggcggccgaggtacaggtccaaaagaaaaggtccaagaactaaatcctgactaactcaaattttaaaagtgggcataagagaaataaccagaaaaagagaaagccaaagagtagggggaaaaaatcaggagactgggggagtcctgaagcccagtaaagaaagcgcatgatggaaaaagtgtcaaatgtgtcaaaaaaaaaaaaaaaacgctgctattaggtcaatgaaggtgagaaacataagctgaccactggatttggcaacatggagataactggtgaacttgaaaagagcgtgatggaaaaagtgtcgaatgtgtcaaaaaacgctgctattaggtcaatgaaggtgagaaatatgagctgcccattgggatttggcagcatgg

SEQ ID NO: 30663 - DNA, 503 bp, Homo sapiens
  misc_feature 359, 416: n = A,T,C or G
tcactatagggcgaattggagctccaccgcggtggcggccgaggtacactaggaaatgcaggaagaaaattatttgcccagatactgcaaagattttctagctatgtgagaaatgaaaatgcatttttgccatatttggtaaactgaatgttattaagaggacaaacctcatgtaaaaaggagataagcagaaactgatttgaatattattgcagagcaaagtaaataatcatgatgcattcaacctttataaatgtgcaaaaacagattaattttcccaattacaagccttaataatattaaatgactttaaacacatgaagtagggtaagaaatagatagcaatgataatacacgangtgtgttataagggatattaatgaataacttggttacacaaaagagggaggggatgngagaaaaaagggaaaatgctggattaaagttaaacagatatcctgaatacttgtcatatccttaaggctatatacgttctgaatctc

SEQ ID NO: 30664 - DNA, 162 bp, Homo sapiens
tactatagggcgaattggagctccaccgcggtggcggccgaggtactatagtctgaatgtctgtgtctcagaatgggattagtgaccttataaatgagggagcttgtttgtcccttccactacatgaggttacagcaaaaagatggctgtctatgaaccagc

SEQ ID NO: 30665 - DNA, 394 bp, Homo sapiens
cgtaatacgactcactatagggcgaattggagctccaccgcggtggcggccgcccgggcaggtacatatatacaatatagcaaatatatgaatagcatgcttgtaaagtccaggatcctaaaacaggccaataagaaactaaaacaaatgaaaaagcagaacacatttttaaaggaaaaatcacccactcattgaagatctcacttcctactgcccccaggaaattcaaatagtggcaagcaatatgtaagaagaaacagagacagaacaagatctgaggctccaagcaaaacagtcctgcatgtcatctcttcctcttataaagtagtaactaacttcacatgaacagatatgtagatgctgagtagccacaactgagaaactcatccttaat

SEQ ID NO: 30666 - DNA, 514 bp, Homo sapiens
gcgaattggagtgccaccgcggtggcggccgaggtacaaaagaaatggtattgtattgtttgtttcacaggattattgtgaatatacttaactccatgagaaaaagtgttgtgaactccaaatcacatgtataagatcagcctgactgggtgcagtggctcacacctgtatccagcactctgggaggctgagacaggaggatcactcgagcccaggagttcaagacccgcctgggcaacacagtgaaaccctgtttctaccaaaagtttaaaaactagccagacatgtgcctgtagtcctagctactcaggaggctgaggctgaaggataacctgagcccaggagttggaggttacagtagcttatgattgtgccactgtattccagcctggttgatagagcaagaccccgtctcaaaaaaaaaaaaaaaaagagaagtacctgcccgggcggccgctctagaactagtggatcccccgggctgcaggaaattcatatcaagcttatcgatacc

SEQ ID NO: 30667 - DNA, 417 bp, Homo sapiens
agcgcgcgtaatacgactcactatagggcgaattggagctccaccgcggtggcggccgaggtacttgctgaaacacagagcaaggaaacgttatttcaataaatcaattttatgcagctttaaagtttagaaccttagagatgttgagctggaaagtataccaacaaccattttgtctttcattttacagagggaaaagttgaggactggggaagttaaatgattaatctcaggtcacaaagctattttggtaaaggatcaaatctcatgttttcttctgcataatccttttctcctcttatccactgtcactaaaacgagtcaaaaagtccattagatctaaaagaaataagacactttaaatcatgttttaaaacaggaggaagccgggtgcggtggctcacacttgtaatcccc

SEQ ID NO: 30668 - DNA, 649 bp, Homo sapiens
gcgaattggagctccaccgcggtggcggccgcccgggcaggtactattttgtctattggctaaaatgccattatatttacttatgcgcaaccacttcattatttataacaccaagaataattctaaatcctttctccctgaatttattccctctctcttccaaagacctggtctcatttatagaccacaatctacaaacatctgccccaaataagctacgcccataattccatttctcacgagagtccctggaaagtaacaaggcacctaaatgacactgaaagataaaatccttattttatcctatcattattttagaacgtgagttatatcatttttttactctaaatgaaccacccaaacatttttaagaaaaaagcacttcatatgtttatatatccaaccgggacagacattacaatttacactatcattttgctgtcacactgtttagaaacattttccatagaagataacccctgaaaactttctgtataaataaatactagcagaccctctgcacttctatttatgttcaagtttactgagactcagtgcaaagctatcttgcttttaaacaaagcactcatagataacaagtacctcggccgctctagaactagtggatcccccgggctgcaggaattcg

SEQ ID NO: 30669 - DNA, 399 bp, Homo sapiens
ggcgaattggagctccaccgcggtggcggccgaggtactgtgagtgtttattgggcagtgttgacaggagcttcagtctcagaagaaggataggaaattgctctcagactctgaaccctaagatgtgctgctatgttacatttctgcccctaatcctgatggtttctcctgctcaatgaagagcacctttaccaagtagtcacctgagtattagggctagaggaggtccgagggtatgacagcttcccattttatgagacgagatttgtctggagataaaatgagcatgtggtgtttggcagggctgcatgtgtaggtggtagccatcgctcatgatgttcatggttcttgtaattggagtaaggacctaagacacattgctagatgaatgttttcctg

SEQ ID NO: 30670 - DNA, 334 bp, Homo sapiens
cgactcactatagggcgaattggagctccaccgcggtggcggccgaggtacccagggaccaacagggaggcccgagtggcttgagcaagagagtgatcagtgagtaggagaaggcagcaggagaagctagagacgactgaactttacaggccacaaaagactaaggctttgggggaggaagaggaagagaaaaaaaataaaaataaaaaagattttttaaaaaaaggttctggctgttcttattctagaggatggggtagccatgaaagggccctgggtgcagggtgacaggccctgtctatgttaccgggctgcccagcagcaatggcatgtg

SEQ ID NO: 30671 - DNA, 377 bp, Homo sapiens
  misc_feature 313: n = A,T,C or G
cgtaatacgactcactatatggcgaattggagctccaccgcggtggcggccgcccgggcaggttcttctttagggctggttaattggttcaaataatttttaatttcctttctagtatcttctcaagttggaaaaatatacatacagtcctccttcaccttactctgtatttatattacccataactagcaagaagttcttgttctagattttttgtttgtttagttataacagagtaacataccatttaattacaatttttagccagaaaagtccccactattttactaacttgttaaaagatatctatatnaaattgcctggccttatatttttcagtagattagaccgtgccaatcacaatcctgggtggattt

SEQ ID NO: 30672 - DNA, 467 bp, Homo sapiens
ggcgaattggagctccaccgcggtggcggccgcccgggcaggtacaaagggaatggagaacttaggttggttacctgagagagagttacatctactgaacaattaagtgctcctcatcacgaaagaaaaggaaagaatgcggactgaatcctgtgccctgaaagtcgaatcagcatatacctgctgtttctatgtcaccaagaggctgattccaggtccaatgcagagacgatgaccactaggggtcagactttttacattactcctcttgaaagaaggaacccaagtcttggattttttaactggggaaaaactagagaggtcgtctatcctgcatctggccggcccatgtgtaaacagaatgaagagtcagcatggggaaagaatctgaatgccccgtttcttagccttttaaggatacagtgaaatgggacagggtctgagttaggaaactctttgaaattata

SEQ ID NO: 30673 - DNA, 443 bp, Homo sapiens
ctccaccgcggtggcggccgcccgggcaggtactgaagattttgcaccatcactgttgtttttctcataaattctttatgaggctattagtctctagggtgctcttctgaaaccagaaggaaatttggctcacacacacacacaaaaaaagttgccatataaaggcaactgcaaaatatagtgggaagttggtggaggatggagtttcactgagaatgggacagcaacatgatggaaagaacatgaacttgaatttcagttctaccacttactagaaagatgcctttgaacaagtctcaatttctgaatcttcatttgttgctctgtaaaatggggtcatattatctcacaaagttgtcacaataattaaaatgagatcttgttttctaagtcacctgacatatattaagtgtgaaatcatttttctttctcattttcttttt

SEQ ID NO: 30674 - DNA, 380 bp, Homo sapiens
ctactatagggcgaattggagctccaccgcggtggcggccgcccgggcaggtacctcctagccatccaattaaagaggctttccctaggatactgcttgcccttgcagggaatgggatctacacagcccatacaccttaagagtccagtattgatgttggtgttttcatcattcctcaaagccatttctggaccattcttcctctagccccttataaaaatgcttgttcacctgagctcaaatcaacactatcaccttttaccaactatttctcaactgtctacctcttcagtcacttttccctccttcattaagactttacacccatatcagtcctcctcaccacctaaaagtttgccatttaacagcttgatctttct

SEQ ID NO: 30675 - DNA, 408 bp, Homo sapiens
gcgtaatacgactcactatagggcgaattggagctccaccgcggtggcggccgaggtacatgccatgaaggacatatacaaggtaatggaaccacccaataaaaagtagtcttactatccttttgttttgggcatacaaaagcagattaaggataatcgtcttgttcatttatttatctatatacttatttatattctgtctctaggactgaaaaagccaaaagatcagggacctagttttgtttcttgctctttctcaagcatgaggacactgcctggcacatagagggctcacagtaaatatttcctcaatacatttgttgattaagtgaaggtgatagaaactgacagggaccttgaacaagattagagtattttatctgtatctatattgcatttgtttttgaa

SEQ ID NO: 30676 - DNA, 424 bp, Homo sapiens
acttcacggttcattttatttgatgatatagctaaaagcacataaaaaattctaaatcaatatctatattgcatttaacagcagaatactatttgaggaagatgcccaagcattcacaaattccagaggtctgcagtatttttacccattgcaccatatgactgagatgtattccatagactttgtccctaaagttctgccaggagcatttacttggccttaaatcctcagtggataaagtagtctacttattgctagatgggagaggctgattaccttcacctgcccttcttgtacattgatttgagtactctttacagttatcagtttacaattttttgactatcttaatgcatggttattggttagaaaagtgactctaaaaatgacatctgggtctcaatcgataattttcatatcaaat

SEQ ID NO: 30677 - DNA, 537 bp, Homo sapiens
gactactatagggcgaattggagctccaccgcggtggcggccgaggtaccaatggttttataatcttacagccttctttctggggctcttagaactgaccagaactaggaactgaaggccagccttttcttaaatatacagcatgacagtatgaccatccaacttcttaaaggtgttgtttatctatggtctaggtcagctaccggtttgccctgcatgtttgacatcacagatataacacgccacctggactacttccttcttcagggccttttaagactcttcagaggaaggccagctcctattggctctgcaaatccactttacagtgccagtgcccaaggctgtaagccctggagcttggagagaaatttggaagaaaagcaagagaaacagcaaccaaattgtcttagaatgtagaatgtctttgggtttgttttctcttttcaaacaatgacaaccaacatacagttcattatttccgttttctaaacagaggaccatgttcctacttggcgatatggggctaacataaaa

SEQ ID NO: 30678 - DNA, 411 bp, Homo sapiens
tatagggcgaattggagctccaccgcggtggcggccgggcaggtacaggtcccctaatggcaggcacggttgtagtgaccacactttccagctttggctgggacagcctagcttttgcctattgtcctaggacggtcattaatacagcctcttttcactctcctagtgcgtggatttggaccatcacctatatatacaatatggtcactgtttttaaagtggtagcaaagagagagtcatgagtgagagatgaatcccacaccaaggaggttgagaaacagttacatttaaggccacgtagcccttctgccagtcacttaagctcctctctcctcctagataggtctacattttgtctttaagggtagggggcaatgatccaacagccccttagaaaaaaatcgtgtgcca

SEQ ID NO: 30679 - DNA, 463 bp, Homo sapiens
ctactatagggcgaattggagctccaccgcggtggcggccgcccgggcaggtactgtatttcaaagctgacatttttttcccaaaatgtgcacctgtgaacactgcaaaaactgcaagtgcaaatgcacttgcaggtcatgaaattttgaggttttgtgcattgtaaaatcctggagcgattatatattagtcataatttcaatgaaaaagtaacgccagcagccttgagtattggcctgaatgtaatgctaaatgatgtgcgtccagggaactgttgctttttaagcgatggctttttgtcagtagctgctgtgactgaaatgaagttacaacttcaatacctctgtgcagagcagtatcaggaattctctgccctttggcagagctctgcctttcctcgttctttcagatgtaagacagcccaaatctctgacatgagccagtttagaactggaacgaatg

SEQ ID NO: 30680 - DNA, 243 bp, Homo sapiens
ctccaccgcggtggcggccgagtaccattcttatctcataatgctgtaaaccatcagtagaagcagtttagatttggactgcatggtgaaatgaaaagtaataaccctccaaccacaacctagtcagggtattaataattatatgtagcaagtaaaacaaaggaagaataatattattcgaaaaagatggagattctcccaacgcagtttcatatattgaaggatctagattatgtattttta

SEQ ID NO: 30681 - DNA, 477 bp, Homo sapiens
tatagggcgtattggagctccaccgcggtggcggccgaggtatctaaaggtcatttcattttcattcatttaagtcatttaatttttaaaatcaagtggataaaaacaaataaatgtggctttgataataattttgacttgccaaatgcctcttttccattgacccctggagctgttcagtgttgtgagccctaccatgtgttagggccacatctctttttctcacaaagggaaactggccacgaggtgggagtcataggagcgttggcttatgaatgatgaatagggtagagttggccatagtgatcacaaatcagatctgcaatattctgctatttatatactgaacccagcatcatattaagtgagaatttcattcataagcgcgcatttctcattacattccaaaaatcagaccatgaaaaaaacagctttgggaaacatttgagagactgttgcttgagtacctgcccgggc

SEQ ID NO: 30682 - DNA, 439 bp, Homo sapiens
atacactactatagggcgaattggagctccaccgcggtggcggccgaggtaccctaccactcaattttttaaaattcagataccaaacaaaggacaatatatcagctgtcaaatagcacataaaagtgtgtttatcatcattagtcatcagcaaaatgcaaattaaaagcacaatgagataccactaaacacccactagaatgactaaaattaaaaacacaaacatgttcaaggctgcagcgagcttttgatcacaccactgcactccaacctaggaaacaaagtgagaccctgtctctttaaaaaaaaaaagatgaacaccaaaatgtaagatccagacctaccaaattctcacacactgctgctgggaatgtaaaatggcacaaccaccaggggaaaaggtttggacaggtcttaaacacttaatcctatgtctacc

SEQ ID NO: 30683 - DNA, 455 bp, Homo sapiens
ctatagggcgaattggagctccaccgcggtggcggccgcccgggcaggtacgcgggtatcaacatttgaaaacttggggaattactaatattactgtagcgataaaatggaaattttgatgatacagacaatagtccacagagaattatgacttaaattattctttctaccaaccattttaagttagtttgccatcttatgttggtgctcttggaggcttacaaattattattatttgagacaggatctccctctgtcacccgggtggactgcgatcacggctcactgcagccttgagctcctggtctcaggtgatcctctagagtagccagaaccacaggcgtgagccacagcgcctggccaggaagcttacagattattaatgaaactttgttaagaacccttttaccttactgtcaaccagaaaagttattttactggtttgggaataaatg

SEQ ID NO: 30684 - DNA, 393 bp, Homo sapiens
cgtaatacgactactatagtgcgaattggagctccaccgcggtggcggccgaggtactttgatccttagggaataaacactccttagctggacagcaacacaaataactcttaaatgaactgcgtctgttacacacacacaggcacgcatagagtttcaatggggtttattgaaataaagtggcctctacactgaagaattgtaaggactgtattctatccatttcctgtttacttctccatttatttgtattcataggtaaggtttactagcacatcattaagatactgtaaaacagcattaaaatcctaccttttaatttcctcaggtaagcgcctctcttgtcttagcaatgcctcggttctcaggccttgtttatctttctctgtaatt

SEQ ID NO: 30685 - DNA, 407 bp, Homo sapiens
gtaatacgactactatagggcgaattggagctccaccgcggtggcggccgcccgggcaggtactgccagcaggaagtggttggtgccttagtgacccatatctgcagtgggaatgaagctgaagttgatactgccttagatgtccttctagagttggtagtgttaaacccatctgctatgatgatgaatgctgtctttgtaaagggcattttagattatctggataacataccccctcagcaaatacgaaaactcttctatgttctcagcacactggcatttagcaaacagaatgaagccagcagccacatccaggatgacatgcacttggtgataagaaagcagctctctagcaccgtattcaagtacctcggccgctctagaactagtggatcccccgggctgca

SEQ ID NO: 30686 - DNA, 488 bp, Homo sapiens
tactatacgggcgaattggagctccaccgcggtggcgggccggggtccagggaattggtgttaatatgtaattacagttttcattgggctttatggggtttatatctgcgttccagaaattgttgtttcctttctaaatctctaaacttttaccattactggaaaacaccaacagagggcatcaggatttaattctggggagagagcattacttctttaaatcaccatagcactgtgtgcaagccactttctctgagtgattcttcagctttaaaatggagtgatggcaaagaacgtatgttatttcctccatgaaacactacttcttaagagctcaagtccagaacccttcattcttccagacataaaagtcagcctggatggctaccaccactaatcagatttgtctgctgatgcaaggcccttcagtcattccagaactggtaaatggagtcaccctgaggacaggccctgctgctgattgatgt

SEQ ID NO: 30687 - DNA, 488 bp, Homo sapiens
gcgaattggagctccaccgcggtggcggccgaggtactgacactcattcatgattggaaggatggaggggaatcctttcttactttttgagatgaaacatctggcatgctgaaagactgaggcaggaactgctaggaagggaaactctttagagaagtaatattttaggaaggcagtagcttgtgcaaagcccaggatgaaaagggggaaagagaaagtggtgtgggagggagaaatgagaaaaacggtgggggacagaaaaaattgcatgtcactgtcaagagactggtggactggagactggcaaggcagggatattgaagcatgtcttgtttgacacactaagtttgcccttaatcttatgggccatggagagcaactaaaggtggctgtacctgcccgggcggtcgctctagaactagtggatcccccgggctgcaggaatccgatatcaagcttatcgataccgtcgacctcgagggggggcc

SEQ ID NO: 30688 - DNA, 424 bp, Homo sapiens
actactatagggcgaattggagctccaccgcggtggcggccgaggtacatttgttgggggcgtgacattaacatataaccacttagagtggacatgcagttagagaaaagtcaatgagctggaaccaagctgggaattccaacatgtagaagttaaacacaagaggaggagccagcaaaggaaacagaaacagagcttccagcaggtggggggcatttggaagaaaacgatgccatagaagccaagatgaaatagacatcaaggagaaggaagtagtcaattgttttgaatgctatgaagaaagataagaataggtaaatagtccttatatttgataacagaggtcactagtgatcttgatgaggggtttcaatagaatggtgggattatataccttcctggattcaactgaggtaaggaaggc

SEQ ID NO: 30689 - DNA, 423 bp, Homo sapiens
cgcgcgtaatacgactcactatagggcgaattggagctccaccgcggtggcggccgcccgggcaggtacgtgcagctgcatccttgcccattgacggtgagattatattggcaactttgaaaaaccaaatattattgaaatactgacccattttccctttacaataacatctttggctgggataattttacccacctataattctcgaagaaaaatgacttcaattatgtcacaaaatttaaaaaatcttaggattggaagagacattaaagagcaattccgagcctagcacagtggctcattcttgtaatcccagcactttgagaggccaaggcaggctaatttgcttgaggctgggagctcaagaccagcctgggcaacatagcaagaccctgtctctactaaaaacaaaaaaaaaaaaaa

SEQ ID NO: 30690 - DNA, 400 bp, Homo sapiens
agggcgaattggagctccaccgcggtggcggccgaggtacagcaaaatgaatggagatgttggatttagaatacaggtaggcaaggtaatcagagacatagaaagcattgggaaagccactgctccccaagaagtcatatgacctgtgggatctctagaggggacctcaagagaatggtgtgtgtcaggcactgcactagtgactttatgtagattgcttcatttgttcctgccaacagcccactgaaataagtattaaaattctgtgcccagtgaagaaacagagagggtgtttgtgatgctcggaaaccaataatattgtgtgtagctctcaactcaagttcagggtatgctgacaccttgccatttgtctcctcaaatggtcgtatgtatttccagg

SEQ ID NO: 30691 - DNA, 365 bp, Homo sapiens
gctccaccgccgtggcggccgaggtacgctttacgtgctttcctctctaggtttaattcttgtgtaatgagtggtatgataccatagctttaaaaggtatatttatgcaaatgatctcaagtttaaatttccagttcagatcttctctccatattccaggcttatagcttaactgccgtcttgacttctctacctgtaaaatttaacgttcagtgctacactcaggctggacatggaggctcgcgcctgtaatcccagctacactggaggctgagtcaggagaatcacttgaacgtgggaggcagaggttgcaccgagtggagatcgcaccactgcccttcagcctaggtgacagaatgagactc

SEQ ID NO: 30692 - DNA, 389 bp, Homo sapiens
ctactatagggcgaattggagctccaccgcggtggcggccgcccgggcaggtacgtaacaggacatcaataaatattagttgaatggaagattaaatcaacaaaatggtgagttcctgatgatcataggtatgtgccacctgggttctattccagtaaggaatgggagattggctgccggaggcaagaacgtgtttcatttacatttacgcatttgaccctgaaaaatgtcaccagattttacaagttatttacaatggtgtcttggaatgactgcaggctcgtaaataaccaggaaagataaggctgaaaaaaaaaaaaaaaaaaaaaaaaaggtacctcggccgctctagaactagtggatcccccgggctgcaggaattcaatttc

SEQ ID NO: 30693 - DNA, 224 bp, Homo sapiens
gggcgaattggagctccaccgcggtggcggccgcccgggcaggtacgcgggaaataaactaggtgtctaatgtaacttaaaatacagagaaggacatagagaacagaagtaaaaatagccaagtaaaggaaagcaaaataaagaaatagaagtcaatagggaaagtgatagatacagaagttaggcaaagataagcatgtctacacgtgtgtgttgtaggtgtg

SEQ ID NO: 30694 - DNA, 257 bp, Homo sapiens
gagctccaccgcggtggcggccgaggtactatatgctagaaacttggctgaatgatttgacattatcctatttaatgttcatgacaatccaataacgtaaccactcatatctcccttttgtgcagataacaaactgaggcccagagaaatcaaatatgttgcaaaatctacatcgttgaagagatgggtttcaaatccaggtcggcttggcccttgccacgacttcataatgaaattccatgggtgagtgttaccag

SEQ ID NO: 30695 - DNA, 412 bp, Homo sapiens
agcgcgcgtaatacgactcactatagggcgaattggagctccaccgcggtggcggccgaggtacttttttttttttttttttttttttttcatgtgaaagctagacagatctgatgctagccaagcattttagccatcagtaatgttcattacttggcacagagttggtatttcctaataaattttaaaataacactatgcgatatccagtagaaaataatatattcaaaatctactttaaagcatttacatcagaatatcacaaacccatgtaaaaattacccatggttacactgactactgaaaattagcatttcccctatgtttttgtctccactctagttcccttacattagatgttattactccacactttaaaacctctagtgctggtgagacttacaagtaagga

SEQ ID NO: 30696 - DNA, 435 bp, Homo sapiens
ctccaccgcggtggcggccgaggtacttggctgatgtgccatgaagggagactgttagttagtgctagaccttaagggcccttccagtatcaaggatacatgtcacctcttggaaggggacaagaagaaaagacacaacccctgacccctgcactcacaaacacgaagaccactccacactggggcactcagaaaaagcataacagggacctttaagacgaagctaaggtcctgagccaccaagtgcaatgtttgatggtttgtgagactgttttttggtctaggtggttgatcctggtgtttgtggagaggcacacggttgaggttaagagccggagtgctggagcagactccctggtttgaatcctggccggccgctctagaactagtggatcccccgggctgcaggaattcgatatcaagcttatcgatacc

SEQ ID NO: 30697 - DNA, 521 bp, Homo sapiens
actactatagggcgaattggagctccaccgcggtggcggccgaggtacagatcaatccctatcaaaatccaagatggctttttttttcttgcagaaattggcaattaatcttaaaattcatatggaaatacaagggacccagaatagccaaactaattttaaaaaagaacaaagggacaggaggagaactcatacttcctgatttaaaattgactatcacaggatactatgttaacaccaaaatatgactctgacataaaaattatttctgggaagacagttaaagcagacaattaacaagcagcagcaaacagagaaaaagctctgtctatcctttcccttttctttatttatatgggcagtatataaattctcctttacacaccggggtctctggacccttatcagcccagagcaattcacaaaactcactccattgttttcctcccacatacaggcagtccctgacttaggattttctgattttgcattaatgtgacagcaatgcacattcaaaccat

SEQ ID NO: 30698 - DNA, 429 bp, Homo sapiens
ggcgaattgtgagctccaccgcggtggcggccgaggtacccacagcattggctgttcttcataggagactcagagaagacttcataggagactcattattgtttactggacatcaggtgctatattgtatagcattcacattccacaggtgaggaaacaggctcagaggaataagtggcatgccaagatcattgagtatatcggtagcagaattaggattcagactttgttaggcctaactccaaagccctggcttttttttttttgagatggaatcttactctgtcaccgggctggagtgcagtggcatgatctcagctcactgcaatctctgcctcctgggttcaagtgattcccctgccttagcctcctgagtagctgggactacaggcatgcaccaccacgcccagctaatttttgtatttttag

SEQ ID NO: 30699 - DNA, 372 bp, Homo sapiens
agcagctccaccgcggtggccgccgcgccgaggtacttctggaggtgcttgaaatctgactactctactggagactacacaaaaaggctacaaggagggggaggtgcaggtgcccagctgagcccagactcttagccataccctccaaagcaccacacatcttccagccccaggtgccacctgactacaacaaagcacttactcaacggtctcgaggtgtccttaaaaaaaagaaagaaaacaaaacaaagcatcacacacgttccagcctcagctgcacctgacttaacagctgcatgacaaaccacgaaaccacaagaactatccaactcagcctatcatcccactgaatgaaaaataaataaaatgact

SEQ ID NO: 30700 - DNA, 509 bp, Homo sapiens
tatagggcgaattggagctccaccgcggtggcggccgaggtacaaagggatatagaacctgtaaataaatccgtgtgtctgtggtcaattgattttttgataaaataactaaaaatacacagtgaagaaagaaaattattttcaataaatggtgtagacaaaactgactatccacatacagaagaataaaatttgacttttattttgctctttatacaagcatcaaatcaaaattaaagtttaaatgtaaaactactacaaggaaatatagaaggagactgtatgacattggcctgagctatgattttctgtagattattccaaaaggcaacaaaagcaaaacacacaaatgagactgcataaaacttaaaacttttccacaggaaaagaagcaatgatagaattaagagaacccacaaatgggataatatttttaaaccatacatcagataaggggctcatataataatatataagcaactcaacctactcaaaaataagaaaaaaac

SEQ ID NO: 30701 - DNA, 353 bp, Homo sapiens
tatagggcgtattggagctccaccgcggtggcggccgcccgttcaggtacttagtttgctcccaacaataaattctctgacaaaccctaagtgtaactcagaaaaaagctacactaactaaatgcagattgaattaacataatctcccataatcagaagtttcctaaagacttttcatttttctttgttaacatttatgtctataatacctattgtcattactcctaagaaatccaactttaaaatataacaagcaagttttttgcaatgaaattggcagagtaagagttttataaccaaagggatctgtgtttaaattatgcactctctgccactttgtatctatgtgactg

SEQ ID NO: 30702 - DNA, 312 bp, Homo sapiens
gctccaccgcggtggcggccgcccgggcaggtacatgagtgtattccgtttattaatgaatatatgtgcacagcaggcctgagttgctcaaaccctgcacatgccaaagacaggcccttgaccagctcctgagagagaacctctaagcccttggaatatgccacctgataagagtgtatgtttatgctgaggtcttgggccacgcagtattggtttggcttctgggatggtaaagggagagtagctggcgtcactcatgtgggagctgcgtacctagacgagagaccccattaaaaaccctgcacaccaaat

SEQ ID NO: 30703 - DNA, 414 bp, Homo sapiens
cactactatagggcgaattggagctccaccgcggtggcggccgaggtacatactatagacataaacttgtttcgaataatttcagaataagtcgcacactcatgtcccttatcccaaaatatctgtatttcctaaaattaaaaatattttattatataatcaaaatgcaaatgattctgattatatacaataaatttaacactgataaaaataattgtaatctaacctactatctttattgcagttttgtcaactgatcccatatgtgtcttttttttttttgagacagggtctttctctgttggcccagactggagtgcagtggtgcgatcttggctccccacaacctccgcctcccaggctcaagcgattctcctgcctcagcctcctgagtagctaagactacaggcacat

SEQ ID NO: 30704 - DNA, 524 bp, Homo sapiens
gtggcggccgcccggcaggtacgcggggggcctcattctccttggctgaaaacagaccgtttttcattgtactggtgaattagaaattctatccagccactcctggagattgattttccgtctggggatctgacctcttgcttcactagcaagggtcagactgttctgagaggagtcaacgagctggccctcagaaaagccttctctttcttttttgctcttttttttcttttcttttttttttttttttaactgtatgtttcaaagggaaagtctgattactttggggacttaacactaccagtttgaattcttcttggtacctcggccgctctagaactagtggatcccccgggctgcaggaattcgatatcaagcttatcgataccgtcgacctcgagggggggcccggtacccagcttttgttccctttagtgagggttaattgcgcgcttggcgtaatcatggtcatagctgtttcctgtgtgaaattgttatccgctcacaattccacacaacatacg

SEQ ID NO: 30705 - DNA, 377 bp, Homo sapiens
gcgtatacgactactatagggcgaattggagctccaccgcggtggcggccgaggtacttttttttttttgtagagacagggtcttgttttatttcccaagctggtctcaaactcctagcctcaagtgatccttctgccttggcctcccacagcactgggattacaggcgtgagccaccacactaggcttggaacaattcttaagttcactctgacctctccctttcttatcacttcatgggagtttagttagtgctgtgatctttccacagaaggagctcatgcagaagaatatcatttcaacaaacatcatttcaagactgccggacttcctaggttacaacacctactgatggctctaactattagcaggtatag

SEQ ID NO: 30706 - DNA, 478 bp, Homo sapiens
tagggcgcattggagctccaccgcggtggcggccgaggtactgggatcgttgttctccttccacagctacaaaatcagttgtgtcccaacccagtagctgtaacttcaccttttctccaattcttccccactcacaccaacatttttcatctggaagagtcaactgtgaatgggacaagagcttttttttttttttgatacagagtctcgctctgttgcccaggctggagcacaatggcgcgatctcagcccactgaaagctctgcctcctgggttcaccccattctcctgcctcagcctcccgagtggctgggattgtaggcgcctgccaccacgcccggcgaatttttgtgtctttagtagagatggggtttcgccatgttggtcaggctggtttataggaccactgtcatatatgcagtccgtcatatacacttgggcaccagagtgaggaagaaagaaaggaaagaaaggaagg

SEQ ID NO: 30707 - DNA, 576 bp, Homo sapiens
tataggactatatggcgaattggagctccaccgcggtggcggccgaggtacgcggggggagaacgtcagaaagtcctgaattggctgttgtcctacaatcctttgtggcttcgaattggtctagagacaacttatggagaactcatatctttggaagataacagtgatgtcacagggttggctatgtattctgaatcgcctactttggaatcctgatatagcagctgagtatagacaccccactgttcctcacctgtatagagatggtcatgaagaagctttgtccaagtttacattgaaaaagttattgttgttggtctgttttcttgattatgctaaaaattccagactcattgatcatgatccttgtctcttctgtaaagatgccgaattcaaggctagtaaagaaatccttttggctttttcacgagatttcctaagtggtgaaggtgacctttcccgtcaccttggcttattgggattacctgttaaccatgttcagacaccatttgatgaatttgattttgccgttacaaatcttgccgtagacttgcaatgtggagtgcgccttgtgcg

SEQ ID NO: 30708 - DNA, 730 bp, Homo sapiens
  misc_feature 14, 133: n = A,T,C or G
ctatagggcgatgnggagctccaccgcggtggcggccgaggtacgtaacaggacatcaataaatattagttgaatggaagatttaatcaacaaaatggtgagttcctgatgatcataggtatgtgccacctgngttctattccagtaaggaatgggagattggctgccggaggcaagaacgtgtttcatttacatttacgcatttgaccctgaaaaatgtcaccagattttacaagttatttacaatggtgtcttggaatgactgcaggctcgtaaataaccaggaaagataaggctgaaaaaaaaaaaaaaaacagttgaagaatcagttgcttgttttaaaaactcatttcacaatgcgttattttcttaccaaagaggcaggaagctcaatgtctataaaactttaaagtaagcatttccctttaaaatgaagacacactcttaaacctctctgtgaaccaatctctccataaaaatttatgatgtatttgaattagagcatgctaatttaagtgtgatgcacaaagagcactgcaaaggaaaaaacaaaccttaattttatttaatcttaaataataactaataattgcacaagaaataatcaggatctttgaaaatataagccgtcatttacattgccattggtagcttaaatgtgtaggccaacaatcaaaacaaggagtcaaagttttttttaaggatctgaaataaaaaggcaaatagcaaa

SEQ ID NO: 30709 - DNA, 405 bp, Homo sapiens
gtaatacgactactatagtgcgaattggagctccaccgcggtggcggccggaggagagatggactgagttttggcgataggtcgcacaccttaccaacagcaggcggcgagggctccccacgctgctcgtttccagaggtgcctcgtattattgagaaggcgtgcagtgaatgaaaatgtgtccacacagctcctgctctgcctgtgacattgggttgctgtatattagctgggatagtatatttcaaattgctttctcaattgcaaagtatggtagaaataaatattcgctttaatttagtaactagaacttagaaaagttcctcctgtttcctgattgccaagtcgggatgagaaatagatttcataattatgatacaacttgatatcttgagataaatgttt

SEQ ID NO: 30710 - DNA, 487 bp, Homo sapiens
atagggcgaattggagctccaccgcggtggcggccgaggtaccattcttatctcagaatgctgtaaaccatcagtagaagcagtttagatttggactgcatggtaaaatgaaaagtaataaccctccaaccacaacctagtcagggtattaataattatatgtagcaagaaaacaaagaagaaaataatattgaaaaaatggagatcccccaaccagtttcatatttgaaggatctgagttgtatttttattaaggaaattttttttctgaatactgtcttccaaaatgttaacattaaaatctgaatcagaggactctgaatggaaaagaagtttgatcactgacacctagggctctgaagcgtgtgtggccacatggaaaagtcgaaggatgcgctgtcgaatctcctttgtcttcactccatagacaattgggttgagcacaggaggaaccagcagatagatattggccaagatgacgggcagc

SEQ ID NO: 30711 - DNA, 469 bp, Homo sapiens
actactatagggcgaattggagctccaccgcggtggcggccgcccgggcaggtacgttaacatacaaggtatgtaaatgaaaatcaatgcacttgtcatttcagcacaattccttattgcttacattcaacattttaaatacattttatttaaacactaataacttttgttcttgtcttggaagtctaatgatcttcttggctccctgcccctacagccctctaatcttcacagccgtggccacttagcccccatctggaggttcaggcttattctgcatcttggagctaatcttgtccctatgctgggggcatacaagatatcatagccaagagctaactgatttagcactcagctttgctgctggtttcattctgatcttgtaatttatttctcagatgtaggctatgcttctcccagcaacttgtaaccaaggcttggctttgtataccagttgcaatatctatcc

SEQ ID NO: 30712 - DNA, 397 bp, Homo sapiens
gtaatacgactactatagggcgaattggagctccaccgcggtggcggccgaggtaccaggagggtattgatgtttgaggtccaaactgaaaacccatcacctccttcccactgctatagcagcgttagccctggggttcattatctagccagttcacgccttctaaagtggggctctgaaaatgtcttacttccctcacagacaaagcaattctcaagcctcctgagatcacccaccaaccagagcaactgctgtcacttggaggtgcagctgaattcttctaattgtgacacaaactcttgaaactgtaaatgctgaaagattaaatgaggttataacactcagaaggttttacaagtaaaagtaagtcaaatcaataggcctttatttcatatct

SEQ ID NO: 30713 - DNA, 429 bp, Homo sapiens
  misc_feature 416: n = A,T,C or G
ctatagggcgaattggagctccaccgcggtggcggccgcccgggcaggtaccaactcttgtcaggctcagtggcagcttctacgacctgatggatggaaaaaaatcaaactctgtgactctatggttgactgccacctctgcaaccttgactcatctgctgaaaaggcaagaagaagaaagggcagcaagccctgttttagggactacataagatgaggggagataagggggacatagatgagttctttaggattgcgtgtgttttgagtttttgtttctaactgaagaaatctatcaatattaaatagggtgggaaaatggtttcttggaataactgttcaactgttgtgtaaataaggaaagttttaaatgagtattacttattgtaattaatgcagaaggacttccccagtcnaaaaaaaaaaaaa

SEQ ID NO: 30714 - DNA, 440 bp, Homo sapiens
ctatagggcgaattggagctccaccgcggtggcggccgcccgggcaggtacagagggtgccaggcactgtggtgcacacctgtagtcccagctacttgggaggcttgaggcgggcggatgcttgaggccaggagtttgaggctgcagtgtgctgtgattgctcctgtgagtagccactgcacttcagccctggcaacatagcaagaccctgactctaaatataaaaaaaagtatagcgggcacaaatggggcgaagccagggtgggatgcagagtctagagggagatgaagctggagaggcaggcagtggtcaacatgtggccatggaaaatagtttaggtttgattctgatggcactgggctgccattagagggttttgaagcaggtcagtgatgtgatacaactaaagtcttcaacagatcattctggagacagtgct

SEQ ID NO: 30715 - DNA, 444 bp, Homo sapiens
ttggagctccaccgcggtggcggccgaggtacacataaacacacacatatgtatgcatacgcacatatatgagatagaaatttctcctttaagtgccactctgtaggacctaagatatttctggattttgtttgtttatttttgttttacatctgtgagttggtatcaacttacctagcaaagtaaggggagaggcgcataaaaaaggcgcctttgcactttctggaaactagccacctttgactcaccttctgcctccagctcccagactcaggctctgagattagcaaggaataaatctccctgcctgcaggcagggtcacattcacaccctccgacactcagaatctgctccctttacaaagtcttagaaaactgaatccccggactgtctttacagccaatttggatgtttaccaacactcaggggaaagaaatcattcc

SEQ ID NO: 30716 - DNA, 536 bp, Homo sapiens
  misc_feature 49: n = A,T,C or G
tacgactcactatagggcgaattggagctccaccgcggtggcggccggnggccattgagactgccatggaagacttgaaaggtcacgtagctgagacttctggagagaccattcaaggcttctggctcttgacaaagatagaccactggaacaatgagaaggagagaattctactggtcacagacaagactctcttgatctgcaaatacgacttcatcatgctgagttgtgtgcagctgcagcggattcctctgagcgctgtctatcgcatctgcctgggcaagttcaccttccctgggatgtccctggacaagagacaaggagaaggccttaggatctactgggggagtccggaggagcagtctcttctgtcccgctggaacccatggtccactgaagttccttatgctactttcactgagcatcctatgaaatacaccagtgagaaattccttgaaatttgcaagttgtctgggttcatgtctaagcttgttccagctatccagaatgcccacaagaattcaactggatctgga

SEQ ID NO: 30717 - DNA, 425 bp, Homo sapiens
agggcgaattggagctccaccgcggtggcggccgaggtacaagtttcagccactggtggtttgccaaactggctgattacccataaacacacaacatggttctgttttgctcctagcaatccttaaaccattgcatgtctaacattctcagactaattcacaaatcagaaacatctgatgcccaacccataccaaatgcatttcagggcaaaaattatgctcctataatgtctggcttcctgtcttcaaggcactttgcttacatgactgaatcctcactgtgaggtgtagctatccatcatttttgagcaagaaagccaagatggataaataagtgactttcccaagacaactagagtggttggcaccatgatgggattggttgtcttatttttcagttggtcctgcccgggcggccgctctag

SEQ ID NO: 30718 - DNA, 479 bp, Homo sapiens
ctatagggcgaattggagctccaccgcggtggcggccgaggtacattttaaaagtcaggaagaaaataaaatctgactcttgtagcatttagctttgtattggagtggcctttgcaggtaatgccaacttccacgacatttagaagattcataaagtgctggtcaaaataatggaaaaaatagcagctgtcatttgatcagaatctgtgtgcaaaccaattaaaagccctgtcataactatttaagcatgtaaggtgatttatgattacctttcataaattaatgaattctaccaataagagcagggtgctacattgggtgctcctgttctcgcagagtttacagctacacattacatgaggactgctccaggtttgctgtgtttaaatgattgacaaggcagaaactgtgtcttttcttcaactgattggcactatctacttataacttataacttagcttatttttcactccccccc

SEQ ID NO: 30719 - DNA, 418 bp, Homo sapiens
ggcgaattggagctccaccgcggtggcggccgcccgggcaggtacgcgggggaccttgggcctcttttaaaaccatggctttaagtaaggagggagcagatatataaaaaaccttatccctctttctaatctcttatgtcctgtgagtgtcacccattgagtaaacccaagtggaagtcagcaggaaagtagctgggatgatgcagtctttacagataccagtaaagatgtcatctggccaatttgtgtgaaaaaagagaataattctcatccaaaccgcctgtctctggaaataagaaaagctctgagggtctccaaagttaccagaggaaggctgaattttatgagtctagtcctcaactctaaccaaagtaaaggaaactggaaagacacacgctttttcagtcattaatagaaa

SEQ ID NO: 30720 - DNA, 559 bp, Homo sapiens
gcgaattggagctccaccgcggtggcggccgagaagcaagtctttcaggacatacctaaagaagatagcatccatggtgcatgtttcatgtgcctcaccaggcatcaccatacccaccacagctcatgcgtgcggatgcctttgctacccaggacggccatacaaggaagccattggcagtcctgtgcacaaacggcatgtcaagaaattaaatgatttcctcagggccccgcaattaccttcagcaaagctgagattcccagccttctctccgctccctgagactgactctgaattgcttttctgctggagatgaaaacaagaacagaaacagtggaaactaatcacatttttaaaagttttacataaccacttaattataatacgcctgccccaaaagcactcctaacgtcctaacacatggtaacttatttgtttaattttataagtattttcagggacatggtgggagggagagcatcaggataaagagctaatgcatgtgaggcttaatacccaggtgatgggttgatctgtgcagcaaccaccatggcatacg

SEQ ID NO: 30721 - DNA, 483 bp, Homo sapiens
gggcgaattggagctccaccgcggtggcggccgaggtactccaagctctgagaccacctcttctgcaaagccttcctgattctgcaaagaacaggtaggcatttcatccttgggacctcacagcaattcaggacacatttgtgtcccagccctgcttggcttggctgtctccatgaatatacactttgcaacttctgcaccaggcatcataccaagcacacagtaggcactcctgtgttttttgaataagtgactatatcatcaccacatttcaaatgcggaatatatgagctactagaaaagacataagggtgagattttacatctttattgtatcctagatatacaagtctattactgccttttcccatgtgtctgtcaacatagcataaagaaggtgggatttaacctgttagaaattgaataagcggccgctctaaactaggtggatcccccgggctgcaggaattcgatataagctta

SEQ ID NO: 30722 - DNA, 390 bp, Homo sapiens
atacgactcactatatggcgaattggagctccaccgcggtggcggccgaggtacatggtgtatgtaaggaaggggtccagtttcagtcttccagagcagaactttctaacttgtgtgtgggtgttgtgctctgggcaggttaacagatccctccaactcgaggagtctgggtggctggagctctgcactggtcacctttggggtgagtagcctggccccaaagtgacatacaaacatcattttctgtgtgtgtcacagcctggagaaaggtgagaagtcccagatgatatcagtctaagagttttgtacctgcccgggcggccgctctagaactagtggatcccccgggctgcaggaattcgatatcaagcttatcgataccgtcgacct

SEQ ID NO: 30723 - DNA, 352 bp, Homo sapiens
cgcggtggcggccgcccgggcaggtactagaagtataattctattatcatgatagtttatgactatctgtatagtcagattaaaggtaactttagaacaatggataggtttttcaaatgcagaatcaaggttgcaattttgtagcatataagctctcaaatctctagggggaaatgtagaaaaataaaaacttactgaagtaaggcaatgtgcatcctacattattatggcaacaaatcgataatggtattacaataaaatctggtgtaatcacattttccttcttcgtattgcagtattaatctctgtctgatgggagatgagatgaatcacaagatgtataatggaatgc

SEQ ID NO: 30724 - DNA, 431 bp, Homo sapiens
gggcgaattggagctccaccgcggtggcggccgcccgggcaggtaccttgaattagagcctgaaatgggggaattgcagccataaaagacattctcagacaattggagactttcctgagttgtgataatggagttatgaatatgtaggagaatgtctacatagattttatgaagatgcatgtggcaacatatctgcagcttattccaaaaaaggtccaagaaaaaaaggaaaggaaagaaaataggaaaaactcggtcgagccaccatgccaagcctcactgtttctaataaccaaattgttcctgtatttattgagtctctgtttcatgccagacactctgctatagtctgaatatgttatttctgttaattctcataacagttctgtgagcaagaacaattaatatcacccttttacagattaggaaac

SEQ ID NO: 30725 - DNA, 413 bp, Homo sapiens
tagggcgatttggagctccaccgcggtggcggccgcccggtccggtacgcggggattacggtgagtgtagtaacagctactggtaatatttttgcaaatcacgtgaaagcattggagcaactgtcttggaaaatgctctttaaacttcaaaccccagtatgttttggtagtagtggatattacacatatatgctgctcttttcagtgttcttttattgtgcgaaaacatttttaaaacatttgatttattaataggatttatttttaataggattgttaataggatttatttttctaggacattgtctttaaacacttggatgattttatatgtcttaattctttaataatttgtagatgtaaaaaacttcgtgggcagaaagcgaagaaataggaaaggatttagatttatt

SEQ ID NO: 30726 - DNA, 393 bp, Homo sapiens
actactatagggcgaattggagctccaccgcggtggcggccgaggtacgcggggctatgttgtgtatatcttgcatccaaagccagagggaaccacaatgactagtaaaacggtggtctcaatgcccacttagcctctgcctctgaatttgaccatagtggcgttcagctgatagagcgggaagaagaaatatgcattttttatgaaaaaataaatatccaagagaagatgaaactaaatggagaaattgaaatacatctactggaagaaaagatccaattcctgaaaatgaagattgctgagaagcaaagacaaatttgtgtgacccagaaattactgccagccaagaggtccctggatgccgactaggctgtgctccaatgtcagtttcac

SEQ ID NO: 30727 - DNA, 305 bp, Homo sapiens
atacgggcgaattggtgctccaccgcggtggcggccgaggtactgagcatgtggcttcaacacaccagtgcctaagctattaaatgttacggttggcatctcactgtccttttatttctgaacaaacacttaatgatgcccactctatgccaggagcaactctattgccagagatgtttctgtggataatccacagtgccagatgttaaggattcccaggcgagggacaggggccagataaatttccaaacggccgtgtttcccaaaatgggtaggagatcattttaggtagtccatggatgtat

SEQ ID NO: 30728 - DNA, 434 bp, Homo sapiens
gggcgaattggagctccaccgcggtggcggccgcccgggcaggtacagatttagatgaagaagatcagaatgttgggtttctaggtttttatctttttagtagagtcggggtttcaccatattggccagggcgaacttctaacctcaagtgatccacccgcctcagcctcccaaagtgttaggatcacaggcatgagccaccgtgcccactgagaatttaatacactttatgtaagttaattttttatgatagttatctagctttgccagaccaattttgttagtaaatttaaaacattaaaaaattttgaatcctcctaattctgtgtctctaatttagtaattttaagttttgatccttgtttcattctatcattcttttatttaaaaaaattgccattggcttttctaaaagtgaatcgtgaatcatgatt

SEQ ID NO: 30729 - DNA, 479 bp, Homo sapiens
  misc_feature 303, 357, 454: n = A,T,C or G
ggcgaattgtagctccaccgcggtggcggccgaggtacgcgtggacagagagaaggttaagagcaacttgatgggaggcagctgcatggaacctgtcccactgaggaagtaaaacaggaatccaaaataatacgtttgctgggaattataaagaatttcattgagaaagtaaaaaagaaaaatctatgcaaaggaagtgattctgttgtttaatgccatcacctgtcattctgtctcttaccatggctggcttggctagtggcaccacgaacagatccctacagaccccaacaccaagaaaangtaggtttttcttctttctttgcagttctttggtatagatttgatgttctaggngtgggtggaaggccattcgtgtgagaaaagattacacttagtattgggaatgggtgaagggaatgactttcctttttcttaccctaatatggacttnttgtttttagagatgctgtcctgta

SEQ ID NO: 30730 - DNA, 649 bp, Homo sapiens
acgactcactatagggcgaattggagctccaccgcggtggcggccgaggtacaacatacactgtgtgtgtgtgtttcaagaagggacagcccagataaagggaggttactgaagcaggctaagtttcagcaaaatgtaaccttcaccttagaaaccaggaaccagagtaattagatacaatctttccaacactatgggagagatttgatcaattaaagccaagatcagttacattatttggtttacctaagtaatggacccttaaatgcaatcaatacttctctaggctgtgagtcttcaagacctgagatgcattcaaaaaacacaaatggattttcaaagggcctcgggatgttcatcacaggctgaggaggaggattgcagagggtggggggcagaaggaaacagacaacagacctgagcttgctgtatgaagtcttcatttccttccctcactgatgtgctgctttcatgttcattttgtagttcatgtatgaattaaatttgttttaccaaagaaccttaatctagggatgagcagccatgtcactcaattcattttaaaattgcagcattaaaactcatttaataggataaagaatacgattaagagttctatttgtgtttctgaaaatccacaaaacttaca

SEQ ID NO: 30731 - DNA, 378 bp, Homo sapiens
ggcgaattggagctccccgcggtggcggccgaggtacccctttcagactggcttctttcacttaggaatatgcatttaaggttcctccatgtcttttcatgtcttgatagctcactggataatatttctttcttttttctttttctttctttttttttttgaaatggactttgctccagcctgggcaacagagtgagaccctgtctcaaaaaaaaagaaaaaagaaactaaacgtctctgaatcatgggagtcagttctaccactagcactgagtaaacaccacaatggttatttcaccaccatgagcttcagtttatttgtctgtgaaatgggatcattggtaagagaaccccagactccctttcctagcgattgtt

SEQ ID NO: 30732 - DNA, 670 bp, Homo sapiens
tacgactcactatagggcgaattggagctccaccgcggtggcggccgcccgggcaggtacttttaacttagatacatttactttttatccactcagctgaaaaaagaggagaaaaataaaagtaggtcaggtcaatctgtttcctttcccatttaatgaattcatgcccaggagtgagtgagaaatgggaggactgaatctgctgttctccaagactagcttaggagtttctgacatcatgggcatcccagcaagccaacggtcacattagtcaccacgtatttttcatatcacgtgatccctctatcagtgtatcagcctttgctgtataatgaacaatcctaaacatcaatggcttaaaacaaaatcacttattagcacataatttggtaggttcatattttgggctggccgcaggtaggttttgcagatttcacctggtcttgtcattttgctgcagtcggctggcattttgaccagggctggaggactatccatgtgtgacaggaagctggttggctggggtgcctagtttcttcttggttctcttccatgtgggcttgggcttggtcaaatggtcttgggtttctctatgcaggaagagaggacagccccaattaacaagtagttttaacggtttggcttttggcatgttcactgatgtcctttt

SEQ ID NO: 30733 - DNA, 378 bp, Homo sapiens
ggcgaattgtagctccaccgcggtggcggccgcccgggcaggtacagtggggtatccctggggaggatagcttagatatcaaagcttacgttttgcaggcttcacagaacagatgatatagtagaatagcggtttccttctcatccacccccgcctggcttcctgtccataagtgaatagcatctgccttgatcttcctgaaatattttgtctttaatataacctctaagtatgctagccccaagaatggaaacaaggaattttcattaggaaaataacatttatgggagcctttcttttaagcagtgtgtatatgtgtgtttgagtgtgtgtgtgtgtgtgcgagagagagagagagagagagagagagagaaagag

SEQ ID NO: 30734 - DNA, 466 bp, Homo sapiens
tatagggcgaattggagctccaccgcggtggcggccgcccgggcaggtacttctagaaatgccacagaaatcaccacattcgccccaaatcaccaaatctcttaattcagattatacatgtccagaatatccagttctcctagaaacaaaatgacacttttatgtttccctaagtttgaaatatttttgaagtattaaaataagcagagccatagtcccacactgtatttttctactgagaatacaacaccagaagctaatctcatgaaattagcccatgtgaagaacaggctgttaactactgttgtgatggtaagtccagaagccctgtgcaaaatgtgctcctggaaccagctgggccagcatcacttcctaaatcagaatccctgcaggtggggcccagccagctttgtcttaagaagtcctccaggtgattctgatgcgtgcctgaatttgaaaactgctt

SEQ ID NO: 30735 - DNA, 610 bp, Homo sapiens
agctccaccttggtggcggccgcccggcaggacactgttgagctttctttacataaaaaggtaatgtttattttcctaatgatttctatccaaagtgacttgatgaataatatgtaattaacttgaggagagaaagcagaaggagccaattggttggagaaaacaatcttgatgccaaagagatgggttaggtctagagaagtgcacttgaaaatagagataatagttgaggtttgtggataaataaaatcgctcaaggagagtaatacattggaaagaagggaggtgtagagcagaacctgtggattagcagtaagggagactgagaagtggttagctgaagaaggaacaagtataccaagaaaaagtaggtagataaaaatcacaaattgaagatgttttgggacctgattgtttggcagagattttctgtattatttttttctacaccatatgtatgtataattagaaaattattttaaaatcgtattggtttcgtgtaattaacagtcctatattgttacctgggcaagttaaatagtcctaattgtccctgagttgttagagaatgtttgtgaaccactcagcacagaccttgacagataggttt

SEQ ID NO: 30736 - DNA, 408 bp, Homo sapiens
gtaatacgactactatagggcgaattggagctccaccgcggtggcggccgaggtaccttaccaccccatccccagagcattgcatggggtgtttggcacacagtaggtgctcaatgtagacgtgtgcactgtgacatgttagagccagacaggatctcatccagcccgttctctgcacccctccctcccctctccaagtagccctgctgtgggttcaagtaaagaggggctggggcgctggtctgattgtgtgggtgatttggggagatctcttcctcttccggaaccccaaaaggttgggacaaacacagcaacaagcccagctccctgaatttcagtgattcatttgtgcgataaaggagtgaatgataaagtgaaggacgattgtccccgcgtacctgcccgggc

SEQ ID NO: 30737 - DNA, 453 bp, Homo sapiens
ctatagggcgaattgtagctccaccgcggtggcggccgaggtacagggacccacttttttttcttttacctcactagtcctggcacagtgcttagcaaacacaagtagctcaataaataaatacttattgatggacataaggaagagaactggacactgtgcaaagcctgtctcagtatgaaaagccaaaactcccagcagggcaactgatctcagtcacctttccagagttctccctggcccaagagagccaatgtgaatcccaggactccctgtgttacaggaataaagtagctctggcaaaaacaggcctttgcagcaaatgctctaagagatcagggaataagcaccatagggttccatctaggaaaaatattaattttccttgaggagcaaagtgcacatgaagggcttcctgtgcatgggccagcttggggcgaaatcagtaacatt

SEQ ID NO: 30738 - DNA, 195 bp, Homo sapiens
tacgactcactatagggcgaattggagctccaccgcggtggcggccgaggtaccatggacaataccatcagagtttccaaaaggctggttctcactcttctcctgccacatgctttccctcacacccctggtgtggaataaatgttaaggaaagctaagacacaattgggaggaggggacacaggcctttccact

SEQ ID NO: 30739 - DNA, 457 bp, Homo sapiens
atagggcgaattggagcttcaccgcggtggcggccgaggtacttttaaatttaattttaataaattattcaagttattcatgccaatagcaaaaaattcaaatgaaacaaaaagcaagtttaagaagttaaagttccctttatcctttaccattcacatccagaattccccacaccaggcaataatcaaaattttggtagccacccttctatagatgggtagtattaacatcatttctatcctacaaatgataaaactaagtatcggccaggcacggtggctcacgcctgtaattccagcactttgggaggccaaggcaggtggatcacctgaggtcgggagttcgagaccagcctgaccaacatggagaaactccgtctctactaaaaatacaaaaaaattagccggatatggtgccacatgcctgtaagcccagctacttgggaggctgaggtag

SEQ ID NO: 30740 - DNA, 484 bp, Homo sapiens
  misc_feature 376, 386, 439: n = A,T,C or G
acgactcactatagggcgaattggagctccaccgcggtggcggccgcccgggcaggtactactgacttacctgccatgggctttctcaagacaagtcctgcaggagaggcacactcacttctagcgtcaactattgaaccagccactgccttcactcctcatctctcagcagcagtggtcactggatccagtgctacatcagaagccagtcttctcactacgagtgaaagcaaagccattcattcttcaccacagaccccaactacacccacctctggagcaaactgggaaacttcagctactcctgagagccttttggtagtcactgagacttcagacacaacacttacctcaaagattttggtcacagataccnatcttgtttntcaactgtgtccacgccaccttctaaatttccaagtacctcggccgctctaanacagttggatcccccgggctgcaggaattcgatatcaagcttatc

SEQ ID NO: 30741 - DNA, 405 bp, Homo sapiens
gcgtatacgactcactatagggcgaattggagctccaccgcggtggcggccgcccgggcaggtactttttacctttagaaaaacttgtaggtaaaaaccaacaggtgcattcaaaccaatcacacgccaacttttaccacccaccaccgtcttaccttctgctgctgtgttggctcattattttgcgcggacccgaaatgaaggctgtctcgtcctttctgtttaattggagcgcctggagagcacaggtgagttgttaaaaacccggtgaatcctgcatggatttgcaaaccaaactacatggagaaatcagttaaattctcaggtttcagggttgcagctgccactgagaagtgtatttaggcaggttctggcaacagacttggtgttgggcttgagtgggaa

SEQ ID NO: 30742 - DNA, 298 bp, Homo sapiens
atagggcgaattggagctccaccgcggtggcggccgaggtacccagcacaattctcacatgtgcttattttgaaattaaaccaatgcaaaagtttttaccctgaggtgttgctaattcatgaacctattctcttgacagtttttccctccaatataacctatatcttattaaatgtcttttcttcttctagattgtttccaatagtagcttaattttagctttgttcaggctccaaattagaaaaacgctgagattagccaaatatttgaacactgtaaggtattaatcagtttaatt

SEQ ID NO: 30743 - DNA, 414 bp, Homo sapiens
cgtatacgactcactatagggcgaattggagctccaccgcggtggcggccgcccgggcaggtacgcgggggtagctgggactacaggtgcccgccgccatgcctggctaattttttatattttttagtagagacggtgtttcaccgtgttagtcaggatggtctcgatcttctgacatcgtgatccacccgcctcggcctcccaaagtgctaggattacaggcgtgagtcactgcactcagtcaggttttcaggtgctggttccatggctcttcctgagccgaaaataaggaaactccatagaccttgtccactggaactcgttcccatctaccctccactctatccaggtaagaaaccaaccatctcaggaaaggaaccaggcaggagtcagaggggaagatgggcactgaag

SEQ ID NO: 30744 - DNA, 396 bp, Homo sapiens
ctccaccgccgtggcggccgaggtacgcggggttgtggggacccagagaatggtgtctctttaatagtgcgattgttgttgttgtatgcagctcaatcagaaaaacaggaatcctaatcaggaaagggctagagggatgtttactcaaggggaaatctagatggttactgttctgtattgataagaatgtcacctgttaagtgaagtcagccttttaattcagaataagttcagagaaggagacacaaaaactcagatttaaaaaatttgaatggtaaggatgatattgattaggcaccctaagaagtagattgcttttcgactttgatcccagaataagcttgtcattttcttttgtacctgcccgggcgggcgctctagaactagtggatcccc

SEQ ID NO: 30745 - DNA, 515 bp, Homo sapiens
tatagggcgaattggagctccaccgcggtggcggccgaggtacttagcatgagctcattgacggtgaaattggccatttatacataggcaaatctataaggaaattaacaatatttcacatttcttctaattaatggtctttttgtgaacatgcactgcctactaatgtcagcttatctatgatttgaatgtatagctttctaaagcgtagcaatttttttgcatatttatgtgtcctaagagagtccccccgcttcatttttccatctctcagcctcatgaaaggctacctctatctagaatttgtgacagaggaagctgagttttgtggttgattgtatcttcctggttacaatctagaactatcagagttttgcaatgatagtaacagcaatgactaacccttgcttggaataatagcctttaatcattatcctcagtttctatctgggaaaactgagtgctattttaaagcagtcttcctgctagtagtggcaagaatggagacataaatc

SEQ ID NO: 30746 - DNA, 529 bp, Homo sapiens
atacgactcactatagggcgaattggagctccaccgcggtggcggccgaggtacgtgtcaacatgtgacttaagatggttaatatatgtgtagaaacgatacgtatttcttttaggctgtgcctttaaaggaaatgagcaaacattcccctgccactttcccatttttgctggctagtaaataatgaaagagctggagcagatatcttggacccaaatatgggtggcagatgttgaggatgatagagccatcttactaattcttgcttgccaacatctggactgttatatgagagaaaaatgaaattttagatgcagtaagttgcaaaagcactattattttatgtaacctcaagaagaaaaatatacatacccagttaaactatgacataatgcttgaatgacattgattacaaaacacatttccatttcagaattgtttacaagtgaaaattttgtattttaaaacaatacatttcttgtttaagccactgcacctgggattcattgtgttagtggtttatgctata

SEQ ID NO: 30747 - DNA, 474 bp, Homo sapiens
acgactcactatagggcgaattggagctccaccgcggtggcggccgaggtacttttttttttttttttttttttgtttcagtgaaagaacatcagtgtatcagcacagcaaatattccaaatgccaggctggattccctccaattaccaggacctccaggcttctcctcctttcaagaactttctgaccctggatccagtctaaatgttggttataaactcacctgacatccacagggcccttccaaaatactgtcaagtaagtgattcttaaatttagttcaacaaacaccagttgttggacttggttgcatccaggattagttttcacaacaatcccatgaggtaggtgggggctggcactttgccccattttatagataaagatgccatctcggaggctcaaatggcatgtgcacagccagttaggggcagacctgagactgcattcaaatctgatctgcttctacccata

SEQ ID NO: 30748 - DNA, 438 bp, Homo sapiens
atacgactcactatagggcgaattggagctccaccgcggtggcggccgcttattcaatttctaacaggtaaatccacattctttatgctatgttgacagaacatgggaaaaggcagtaatagacttgtatatctaggatacaataaagatgtaaaatctacccttatgtcttttctagtagctcatatattccgcatttgaaatgtggtgatgatatagtcacttattcaaaaaacacaggagtgcctactgtgtgcttggtatgatgcctggtgcagaagttgcaaagtgtatattcatggagacagccaagccaagcagggctgggacacaaatgtgtcctgaattgctgggaggtcccaaggatgaaatgcctacctgttctttgcagaatcaggaaggctttgcagaagaggtggtctcagagcttggagtacc

SEQ ID NO: 30749 - DNA, 462 bp, Homo sapiens
  misc_feature 58, 62: n = A,T,C or G
gctccaccgccgtggcggccgcccgggcaggtactactgacttacctgccatgggccnttcntaagacaagtcctgcaggagaggcacactctcttctagcgtcaactattgaaccagccactgccttcactcctcatctctcagcagcagtggtcactggatccagtgctacatcagaagccagtcttctcactacgagtgaaagcaaagccattcattcttcaccacaggccccaactacacccacctctggagcaaactgggaaacttcagctactcctgagagccttttggtagtcactgagacttcagacacaacacttacctcaaagattttggtcacagataccatcttgttttcaactgtgtccacgccaccttctaaatttccaagtacctcggccgctctagaactagtggatcccccgggctgcaggaattcgatatcaagcttatcgata

SEQ ID NO: 30750 - DNA, 404 bp, Homo sapiens
tacgactcactatagggcgaattggagctccaccgcggtggcggccgaggtacttagcagctgtgtgacctagagcacagtgctttgagtttttgagtcttagcttctgtgtctataaaatggggttcacacaactcaccttacagggctgtaagattagattacacagaaaatatattttttggctgtgggggctggaagtgttgctgattagcatttgaaatcccatcctgtgggtgagaaaaccccaccttatgacttggtgggaaacaaagccaacctcccactgatgaagctgaaagtagcagaaccttgcttctactgcctcccttgcagctagaggcaggcacaggactagcctgtcaattggatgcaaatgctccaggccttgaatcacaacctgg

SEQ ID NO: 30751 - DNA, 626 bp, Homo sapiens
ggcgaattggagctccaccgcggtggccggccgcccggcaggtacagacatacaaatatggctccaccacttatttcactcatctttacatatttcttggagtctcagtttcttcattagtaaaattaagataattcacctcattgttagcacaaattagatgatgcatgttaaatttaacacagtgctagtcacaaaaaactcaataaatgtcagttatttttatgataagacaattctaagttaaacaaactggaggtataggtttgatcagcagaagagtagaacacacgagcatatgcaacaaaaaaattaaatagggtttaacttccaaaagatcaaatatatcattaattggaacaatcaagacctagtagctggggataggaagaaattagttacctcattccaagtaactaagtgataactagttctaagaaatacaaagaatttaaaatgaaattttatttcactaacttattatttcactagaatttaaaatatactatttatggatgtattccagggggggggaatactgaacttattcttattaatacagcaagcgttaatcactagatatttatttaataaaaattagaattgtcaatatggttaaaaataat

SEQ ID NO: 30752 - DNA, 413 bp, Homo sapiens
acgactactatagggcgaattggagctccaccgcggtggcggccgaggtaccctgcccagagatttctccaaaatgagctcttgtgaatgcaggcaagctaaagccacacaatgaagctgaaattcattcagcttagcttctcctgagagccttctttttgtgggggtaacattgcccttttgtttcacagcgaggtctgcgctaagacttgctacttagggagtcaaagctaataaaacataccgtctagaaatacagacataactggtagaactatacaagaaaaagaaagggcagaggaagaagaggaatgtgattgtgaagaggtatgaaggggattacaaatccctgcttctcagagcgtggtccatggactagcagtgtggacatcactttcaaatctattagaaat

SEQ ID NO: 30753 - DNA, 479 bp, Homo sapiens
cgcggtggcggccgaggtacttgattgtctgaaattccttttgcatgattagattatagagtaaatgacgtattttaggattgtgtttaacaaaagtgagatgctaattcttgaaaattaggcctctctatggggactgcacgtaatcacattaccctagatcttgagttagcgagagaatattctgtcaggtgattcactgaccttgcctataacttgaaaccaatagcaaatccagatgtagtttcactggcctttgaagtccagggcaaaaagacaaagcgtgactccctgtctccccattgcatcctgattgtctccctgtccagggacagaataaatatcctcaagacattgactcttttcacagtgaagaagctgaggttggagctttggcctcatctctataggttcatgctgcatttctgatctcaacaggcgggagaaggtctttcctgctccccttcctcctggcacat

SEQ ID NO: 30754 - DNA, 578 bp, Homo sapiens
  misc_feature 172, 569: n = A,T,C or G
atacgactactatagggcgaattggagctccaccgcggtggcggccgcccgggcaggtacttttttttcttttccttctttttttttttttttgagacggaatcttgctctgtcacccaggctggagtgcagtggcgcaatctcggctcactgtaagctccacctcctgggncacgccattctctgctcagcctcttgagtagctgggactacaggtgcccaccaccacgcctggctacttttttgtatttttattagagacggtgtttcactgtgttggccaggatagtctcgatctcctgaccttgtgatctgcccgccttggcctcgtagctctttttgaccctcagggacagtcactgaattatgtcttgggagcccatgcttctgaggcaggcttagggagcaggagagcatacaggtgtagcagcctttccagctgatccccatgccctgctgcacctggagggctggagcaagctattctcatattggggaaaagggctgatgggacctcagtcatgtggcagagaatctgaaagccagaagcttggcaggtctgtctcggngtggggtga

SEQ ID NO: 30755 - DNA, 581 bp, Homo sapiens
atacgactcactatagggcgaatgggagctccaccgcggtggcggccgcccgggcaggtacaaagtccctgaggcaaaagcatgcttgctgtgttctaggaaaagcaaggaagacagcatgtctatagcagtgggaggtggaaggataataaacagtacgtgaggttagaggggaccaaatcatgtattttccatccagaggttcccaaccttggctgcacattagatttattctaaggagcttttaaaaaataccaatgactgggtcccagcctagagtgattaaatcagaatctctggaggtagacttgagaatctgatgtttgcaagtttcctaggcaagtcaaggctgaagaagactgctgcaggccattgtaagagccaagcgttgatctcattcaacctttccctcagctcttctagagacagccagcattctcttatggcacaaatacagcctttcaccctgacagaaagacacaggacaacaaattcaatatattaattcactggcatggatgatattctcaagactaattgtttccagtttgataggagacaaattaaaggctggaaggcac

SEQ ID NO: 30756 - DNA, 420 bp, Homo sapiens
tactatagggcgaattggagctccaccgcggtggcggccgaggtacgcgggacaaaaaaggaatcctaatgctacagaactgccactcctaccacctcctccaagcctacccaccattggagcagagactagacgtagaaaagcacgacggaaagagctagagatggagcagcagaatgaggcttcagaggagaataatgaccagcaatcacaagaagttccagaaaaagtaactgtatccagtgatcatgaggaagtagacaatccagaagaaaaaccagaagaagagaaagaagaggttatagatgaccaggagaacctagctcatagcaggaggaccagggaagatagaaaggtagaagccatcatgcatgcttttgaaaacttagagaaaagaaagaagcggcgggatcagccctt

SEQ ID NO: 30757 - DNA, 386 bp, Homo sapiens
tagggcgaattggagctccaccgcggtggcggccgcccgggctggtactgaagattttgcaccatcatttttgtttttctcataaattctttatgaggctattagtctctagggtgctcttctgaaaccagaaggaaatttggctcacacacacacacaaaaaaagttgccatataaaggcaactgcaaaatatagtgggaagttggtggaggatggagtttcactgagaatgggacagcaacatgatggaaagaacatgaacttgaatttcagttctaccacttactagaaagatgcctttgaacaagtctcaatttctgaatcttcatttgttgctctgtaaaatggggtcatattatctcacaaagttgtcacaataattaaa

SEQ ID NO: 30758 - DNA, 232 bp, Homo sapiens
tagggcgatttggagctccaccgcggtggcggccgcccggtcaggtactaagggatcaagggactttttccaaggctgagcaggtttaaggaaaacatctaggtgaaacatctaagggctagctagcaataggagagccattatcactctttttttttttttttttttttatttttttttttttttttttttttttttttttccttcttttttttttttttttttttttttt

SEQ ID NO: 30759 - DNA, 507 bp, Homo sapiens
actactatagggcgaattggagctccaccgcggtggcggccgcccgggcaggtactttgttcttctctcccctacaagagggcaggaacctggtcttagtcatttgtgtatccaacagcatcaagcaggtatgtaaagagtgcttgttgaataaaacttaatataaaaatttaagttagctctacgcaacattgatgtaagagacagaagtgccatgtctctgttccaattagttttattacttaggcatgagggttcaggttccaagttcccaggtcggtgttaatgtcactgctgaatttaccttggagaaggcaccaaagctaaccacagcagagacattgtcactcacagcagtgttgtgattagccaattgtctttggtcgcgttatgtattgccatccttcacaccgcagatggttcttatcagcgcgtcatgtccatccttattcacggttacctgttctatgggaataaggctttgagagaaattcggcccatattaat

SEQ ID NO: 30760 - DNA, 459 bp, Homo sapiens
gcgaattggagctccaccgcggtggcggccgcccgggcaggtcactaatctgtattctaagtttgaagatttgatcttcatgatgatgtgaatctgtgtttcctagtcttgagaaatggattttaggctgggttctagagagctgaagtgatagtgagctgtgctggtggaggtgaagatgtagagtgttctagaggtgactagcattttaagctaaggattgttggcaaatagaagatgaaagaataggaaataattccaagatcttcaactcttctgcattacaatatgtaaccaaatgatcttaattgtctagtcaaccaaagtttacaaaaaataaattctgccataactgtgactcaaatatatgcgaatgcataaaatatgggtaagaaagtgaatttgaggcttgaacacaggtaatttagaggatcttataagaattgccaagacttgatg

SEQ ID NO: 30761 - DNA, 415 bp, Homo sapiens
ctataggcgcgaattggatctccaccgcggtggcggccgaggtacatacttcagaggctagtttgcaggagtcactattttaatccatgcacagtgttcagcccagtgcctggcacacagtgggtgctcaaacaacagcttttctccctgcatgttggtcattagggtcacaggctctgaagtcaggctcctagggtaatatcctgtccctatcactttcaattgtaggaagatgggcaaattacatacccccataagctttaattttcttactataaaacagagataataattgtatctaccttatgggttattgcaagcagcacatacagtcacccaaataaagtatataagagttctcttgtaagttcccagtaagtgctcactcctatgatatttgaatgttccccatttg

SEQ ID NO: 30762 - DNA, 459 bp, Homo sapiens
ctactatagggcgaattggagctccaccgcggtggcggccgcccgggcaggtacgcgggtgatctaggtcctgggaatacagcagtgatcccaacagacaaagccttgtcctcacagagcttaccttctagaacgaacaaagaaacacataaacacacaaaatgtcagatggtgggatgtgctacggggaaataaagcaagcattccctaccctacacttccttgtaagaggtaagagtgggttgctagtttgtatcaggtgttcagggaaggccttactgacatttgacctaaaagaaaggtaagaatgtgacacctgatgataaatagggaaagagtatttcaggcaggagaatcacttgaacccagggggcggaagttgcagtgagccaagatcacaccgctgcactccagcctggcaacagagtgagacttcattttaaaaaaaaaaaaaaaaaa

SEQ ID NO: 30763 - DNA, 459 bp, Homo sapiens
ggcgaattgtagctccaccgcggtggcggccgcccgggcagttaccaaccaggtgaggaagtcagcatccagcagggttgtttaagctattcaggatcacacagcaggttggctacacgccaggactgggtggggcccacagtgggtgaaactgtgaggaaatccacaagcacctctaggtgctcaggatcggctcctacagattctagtccaatctcattcatgacctcatttgcttttcagtttaacagtgcttggttttggtttactatttttcccatggaaacattttttaattatgtcttatcagttattctccatttatcccaaagggtcggttttgtgattttaaaattgacactatgtagacctttatctttcatcatacgcaaaaatcaactcacaatgagtttaagacttaaacataagaccaaaaactataaaactactaaagaaaac

SEQ ID NO: 30764 - DNA, 400 bp, Homo sapiens
gtaatacgactactatagtggcgaattggagctccaccgcggtggcggccgaggtaccgcatgttgacataagatgaaatgcatgaagaacattctgaaaaaagtgaaattttctccagtgcttggctttatcgagagctgatcttgtgatttctgtcactcaggctgtggatgcaagttaaaaagcatcatctgtaaccagtcacaggaggatttctgagttgggctggggtaggggagagagatttctgctttgggtccccatagtttctgtaactctggtttagtttccttgtcactggatcctgcattccttgagggcagccattgtattttatctttcagctttactaaagtatatgaaaagccgggcatgctaaagtgtacctgcccgggcggc

SEQ ID NO: 30765 - DNA, 424 bp, Homo sapiens
ctactatagggcgaattggagctccaccgcggtggcggccgcccgggcaggtacgcggggagttgtgagtgtggaaggtagactctttccagacctttgataaaggggctgctcaaaaaagccacgaccttgggcctctgctaaaaccatggctttaagtaaggagggagcagatatataaaaaaccttatccctctttctaatctcttatgtcctgtgagtgtcacccattgagtaaacccaagtggaagtcagcaggaaagtagctgggatgatgcagtctttacagataccagtaaagatgtcatctggccaatttgtgtgaaaaaagagaataattttttatccaaaccgccctgtctctggaaataagaaaagctctgaggggtctccaaaggttaccataggaagggctgaattttat

SEQ ID NO: 30766 - DNA, 476 bp, Homo sapiens
ggcgaattttagctccaccgccgtggcggccgaggtacgcgtggggagaacgtttgaaagtcctgaatttgctgttgtcctacaatcctttgtggcttcgaattggtctagagacaacttatggagaactcatatctttggaagataacagtgatgtcacagggttggctatgtttattctgaatcgcctactttggaatcctgatatagcagctgagtatagacaccccactgttcctcacctgtatagagatggtcatgaagaagctttgtccaagtttacattgaaaaagttattgttgttggtctgttttcttgattatgctaaaatttccagactcattgatcatgatccttgtctcttctgtaaagatgccgaattcaaggctagtaaagaaatccttttggctttttcacgagatttcctaagtggtgaaggtgacctttcccgtcaccttggcttattgggattacct

SEQ ID NO: 30767 - DNA, 496 bp, Homo sapiens
tactatagggcgaattggagctccaccgcggtggcggccgaggtacatggccagctcctcatggtgattgttgccgtgaggaaatgtgaccacttttgctagatctagttttttcaaaagatgcccgcattttgaaatgtaatgtaaattatcctaatatttaactctagacaatttaagtaaaaaccaacaaccaaccaaatgaacctcaacacaggacgggtatggcccgtgggccaccagtctgagacagctaatctagaattgcagtcagccggagtgacttgtattttcacggttctgagtgtaacacccacagttccactttagagttgaagaaactgacgtagggggagttaataattgagctagtcaatggtaaacataaggtttcaattgccggtgtgtctgaattgtgaagccaagttttttttccatctcactgcctttaggcaaaggagggagataataatggagagataaaaggaggaatgga

SEQ ID NO: 30768 - DNA, 476 bp, Homo sapiens
ggcgaatttgagctccaccgcggtggcggccgaggtacttttggcagacatctttaatccatcacatcatgccttcccactgatcacagatgtagcttcagggcattcgagttaccacttaagatggatatgagtgaccctcccttatctcactcttctcctttcacagaagcaggatctgaggcccagagagggaagctataataaactcccctaagtcaggtcccttctaagaggcagaggtaggtttagaactcaggcctcagaaacttccagaagccaagccatttgggctgtagttggtggacagtctatcagcgctctgcagatgtttcttctcagttagggaacttggaaaatgcagaaagaaagattctgtctctaagactctgtgtatgatcctactcggtaatctgcctgcttggagaaaaaatatttatcttctgggacggctttaccacaaggcctgaatgcta

SEQ ID NO: 30769 - DNA, 370 bp, Homo sapiens
accgggggcggcgaggactaatgaaggtctccaatacctaattttccaatagggcttagatttatgaagttgtatattttttcctccttataaaaagctctttttataaagaatatccatgtaatactaaaacggggaaatctcctaaataatatattttttaatattacttttttaaaaagctagggtgagcacctcacaatcaaaatttaatgtatttgtcatattgaaatgcagggttttttgaaggaaacatggtaggtaaacattttagttcccaactcctgatcgttaaaatgcaaaattgggcctggtgtggtggctcacgcctgtaatcccagcactttgggagaccaaggcgggtggatca

SEQ ID NO: 30770 - DNA, 328 bp, Homo sapiens
ctactatagggcgaattggagctccaccgcggtggcggccgcccgggcaggtactgagcaatttttagagtcctagttctcatggaaattattgttctgtaaagaaaataaatataccaactattacaaaaaataagttataacattacagaagcaatagaaactttaaggggcaattaaatttgtcaaataggtcaggaaacatatggcatatagcatcacagatttgaatttagccttataccctaaaatacacatgtatatttactatgctataaactacacaagcaagatataagtgtgtgtgttgtggggggaggtgaggggg

SEQ ID NO: 30771 - DNA, 394 bp, Homo sapiens
gcgtaatacgactcactatagggcgaattggagctccaccgcggtggcggccgaggtactcatataagagtatactaataatgatcgctagggcaatagtggtagaaaaggaaagaaagaatagatttcagagatatttcattggcattaaaaattacataactggatgttttgagctggaaaagtgtttagagatcatctagcccattacgaaaaacaaaacattaatgtagtctttccagaaagcttttacctcaaaacttaagttgcatttcaacctcaacctttttcctctagctgagtctagcatatcccccactgctcctggccccaccaggctaatactactgccgtatcagggattttattttattacctcttacttaaatactca

SEQ ID NO: 30772 - DNA, 397 bp, Homo sapiens
gtaatacgactactatagtgcgaattggagctccaccgcggtggcggccgacgtacccaatacttcataaggccctgagagtcaaataatacaattatgaaggccataagaagccagacaggttaaacacagtcttccttgtgatgctggtgaacagccatatacttactgatggatctcacctcccaactcagactcttatgggcagaggcatatttagtgctttcataggctgagatctactaaggatcacaatttttttcctataagtgttcatcatcatagattctgtgttacactgcccaaggattcattgctcctagctcttggaaatttgtttgacatcactcagctagcaacccctttgggaattattttggcagaagagagtcacctt

SEQ ID NO: 30773 - DNA, 419 bp, Homo sapiens
agcgcgcgtaatacgactcactatagggcgaattggagctccccgcggtggcggccgtctaacagtagaaggttgcccaggcagagctgtggtagcagttgtgaagaacgaaggagtaggagcttgttgagtgttgatttacaagtaagagaccattatttagcacaaaatataaattgtatgattagcttaagagatttgcctgggaaaactgtttattgagatggttaagtcataaaggaggagtttcatttttatttgatttgatttttgtagagacagggtcttgctgtgttgcccagactggatcaaattcctgggctcaagcagtcttcctgcctcagcctctaaagccaccaaggccagctttttaaaactttattttatatataaaaaaagagtttaaaggattacaaagg

SEQ ID NO: 30774 - DNA, 410 bp, Homo sapiens
tacgactcactatagggcgaattggagctccaccgcggtggcggccgaggtacctgaacaaatcccatcaaggacagattctcagtcttgaagaggcagcacagtaaaggggaaagatcatgagttttggggccaggttcccttggatattgtggggtccccacacttctggatgatgttggataactctttgagacttaggcttcacatctgtaaaatggaaatacttatttttcagagttgtcataaacactaaatgatttgacttatatcaacctaattcctactggctcattgaactcagctcagctgtcccctctgttcggatgccttccccagtggggcttagttaggtatccctgctggataccctgccaagctcttacacattccctctgccataacactca

SEQ ID NO: 30775 - DNA, 470 bp, Homo sapiens
ggcgaatttgagctccaccgcggtggcggccgaggtactttccaatttaggttttacctgattgacatgtgttcctaagaatgatattcagccaagacttttgggaaaatccattatttgattccctgcacagcaaaagcccacctgatacaaacataagatgctttatggaatagataaatccaggttgggggagaaaggagaaaatggctttaaaatatcactttgccaactcaagatgagagttttaagatgagggcatcccttgtaactgtaagcacatagggaaggctcaataaatgcttaccaggtgaaattcttctcatgtaagctacgaaagcatctcttaaatatttttacaactgatttcctgttcaagctcatgcttgccagtgaagatacacttttctatctcatgctaacaacttaattttttataattctgaccactttcaaatgagcctattttg

SEQ ID NO: 30776 - DNA, 460 bp, Homo sapiens
ggcggccgaggtactgatttgtctaaatttttggatcgctgtcctacatgtcacctagctgctgagagctttgtgatcctaacaggtgatgactcagaccgacactgcattggtaggaattccacaaataggtgcctcaatgtgcctagattgaaatatcagcctttcccagactgacccgatgggttgacttcaggtgtggcgtaaacacctacattttaatgtaaacatttcagtgtaatcaatgagaactatcattctgctttaatcaccatgagttctgaaataacaaaggatttgtctgacattcattctaagaaattcattcttacctgactaagaaacttttttaacctggcacaataataagaaatgacctgtaagtacctgcccgggcggccgctctagaactagtggatcccccgggctgcaggaatttgatatcaagcttatcgatacc

SEQ ID NO: 30777 - DNA, 401 bp, Homo sapiens
cactactatagggcgaattggagctccaccgcggtggcggccgaggtacatgtctgtggtcccagctactcgggaggctgaggcaggagaattgcttgaacccgggaggcggaggttgcagtgagctgagattgctccactgccttccaacctggacgatggaacgagactgcatctccaaaaaaaaaaaaaaaaaaaaaatcaaaccacatgaaatattttggactcttatactaattccaacactttgaagatctggggagaacaaactagattggtgctttccttggcttagtatgttctgtttttatagggagagcaaattattgttcaccagcactattaaaatagctacaacaggatgggcatggtggctcacacctgtaatccaacactttggg

SEQ ID NO: 30778 - DNA, 579 bp, Homo sapiens
gactactatagggcgaattggagctccaccgcggtggcggccgcccgggcaggtacaaaaagactaagtcaaaaaatttcagctgtgcacagtggctcatgcttgtaatcccagcactttgggtggccaagggaggaagattgcctgaggccagcagttcgagaccagtataggcaacatagcaagagcccatctctaaaaaaacaaaaccaaaccaaattagccaggtgtggcggctggcacctgtgttccaactacttgggagactcatgtgacaggaagatcacttgagcccaggagttagaagctgcagtgagccgtgatcttgccactgcactccagtctgggcaacacggcaagatactgtgtcaaaaaaattttttttgataaaaaataaaagagttacatgacattcagagaccatccaaaaaacctgtgggttcccggctgggctcagtggctcatgcctgtggtcccagcactttgggaggccaaagtgggtggatcacttgagggccagagtttgagaccagcctggacaacatggtgaaaccccgtctctactagaaatacagaaaa

SEQ ID NO: 30779 - DNA, 517 bp, Homo sapiens
tacgactactatagggcgaattggagctccaccgcggtggcggccgcccgggcaggtactctgcatagatggcagattacaggatggataggagaaagtgtttaacattccaccccacatcatcgcgcaatctgaggcagcaccacaaaatctgatgccagtagccctggagtaatatcaggacaccaggaaatttgagttgattgagacactatggctccagagttctgctaacaaccacctgaaacaaacttagtaggagaagaccagccttccaaaaaattattattttaatggaatataaagaatgaactaggaatagaatagtaagtatgtgtgaaggccacatactatgagtagatattaataaaatatgtgtgcatttatatggtataaagtctagaaatacaaccgattttgtagctaaagatatatacatgtaggtaaatttaagatttaaagatttttttgcgtgtatgtatacatataagcttagatgtatataatgtctaaaaca

SEQ ID NO: 30780 - DNA, 378 bp, Homo sapiens
ctactatagggcgaattggagctccaccgcggtggcggccgcccgggcaggtacgcgggatatggaaacttcctacatcactttgctgtgtgtgtttacacaggtggattttgctttacttgcactgacagcacacaggagggcagcacacaccccaacccacatcaactgccattaaagaaaagaaatttcagcccataatttcatgtccagcaaaaataggcatcataagtgaaggagaaataagatccttttcagacaagcaaatgctgagggaattcaatatcaccagatctaccttacaagagctcctgaaggaagcactaaatatggaaagaaaaaaccttcaccagccacttcaaaaatgccagtgaagaa

SEQ ID NO: 30781 - DNA, 478 bp, Homo sapiens
tacgactactatagggcgaattggagctccaccgcggtggcggccgcccgggcaggtaccattcttatctcagaatgctgtaaaccatcagtagaagcagtttagatttggactgcatggtaaaatgaaaagtaataaccctccaaccacaacctagtcagggtattaataattatatgtagcaagaaaacaaagaagaaaataatattgaaaaaatggagattccccaaccagtttcatatttgaaggatctgagttgtatttttattaaggaaatttttttttctgaatactgtcttccaaaatgttaacattaaaatctgaatcagaggactctgaatggaaaagaagtttgatcactgacacctagggctctgaagcgtgtgtggccacatggaaaagtcgaaggatgcgctgtcgaatctcctttgtcttcactccatagacaattgggttgagcacaggaggaaccagcaga

SEQ ID NO: 30782 - DNA, 465 bp, Homo sapiens
ggcgaattggagctccaccgcgggggcggccgcccgggcaggtaccaagtgctttacatgaattattggatttcattcatgaagttgattccttgctgattatattaagcactgtttcttttggtttgtttacttatctagtatctgtcttacttacttacaggagggcaaggagcatgtctgttttattctctgctatataccagtgccttatacctcaatcaatgtttgctgaattaataaattaatgaatctgtgaaagaaaggatgagccctctagaaatgatctttgactctcttctatcaagtgctcttgattctttcacaagcagcatttctgggatgcattcatttctttatcattcctacagccataggcctgctcctgactgtcacgggcttaagtctggactgtggcagccacatcgtaattcttatgtgggtctagcttcttctcactcccag

SEQ ID NO: 30783 - DNA, 455 bp, Homo sapiens
ctcactatagggcgaatttgagctccaccgcggtggcggccgaggtacctggaacatagtggtatttggcaaatatttgttgaatgaatgaaatgaatttactaagctctatttgccctatattcttctgtgtgatttatattttatagcccctttgtttcctaatagcaccctaattaccgtcattcctcactgaggaaactgaggtttggtgaggtcaagtgacttcttcaagacacttttttttttagacggaatttcactcttcttgcccaggctagagtgcgatggcgcgatctcggctcactgcaacctccatctcccaggttcaagcgattctcccgcctcagcctcccaagtagctgggactacaggcatgcgccatcacgcctggctaattttgtatttttagtagagacggggtttctccatgttggtcaggctggtctttgact

SEQ ID NO: 30784 - DNA, 400 bp, Homo sapiens
tatacgactcactatagggcgaattggagctccaccgcggtggcggccgcccgggcaggtactagctgaggtcattaattccccttaccttcacgtttggccaaaaatgaagagaaaaatattttctgtttttttttttaaataccacagtgttcaggttcttgatatgagtaaatcacttttgacggagaaaaaaagaatcgttaatgttgactgtttccactagtcaaattacttgtttatcagactttagattataggaatctaaagaaaagagtaacatttcaaaataattttgataactgttcaagccttagtgagctcttctcaaacaagaaaagccacatccacttgaacacattgtaggaaaaattaggaagagttttttttatttattgtc

SEQ ID NO: 30785 - DNA, 375 bp, Homo sapiens
gtaatacgactcactatagggcgaattggagctccaccgcggtggcggccgcccgggcaggtactgcaatgaattcagaaaagaatcaggcctgttactctccgaaggcctttctctttctttatcctctgaagtaaagctgaggactgctttttgggtgaactaacacttaggagttgagagtttcagaaaaagggcttgcaatgtcatgtcctattgccactgaagaagaaaaaggcacaccaacttcacactcagctactccaagttcagtttcaattaaacataaagagacagctgggccgggcacgttggctcacacctgtaatcccagcactttgggaggccgaggtgggcggatcacgaggtcaggag

SEQ ID NO: 30786 - DNA, 600 bp, Homo sapiens
  misc_feature 200: n = A,T,C or G
gctccaccgcggtggcggccgcccgggcaggtacctacttgaaggacttcataagcaaattacgatttaatttacaagaacactatgtcacacgtatacacacaggtttttatatttgttgtcttttccgtgattatctcttacagtgttgtatatttaatatattcattttcattttaattttatgtacggttcctcanttccttcatatgtgtattacatttccctggaactatcacgtattttatatacttagcaatggaaagctcctggtttcagttgtctgtgcagcaggcagggggaggagaagaaaatgggtcacactcctgaccctgcctgcatagccacaggttcccaaaagcagaggtccctgctgtgcaccttccctgggacaactttcttattgatgggtcttgtgtttaattaatgagagtttgttttaagggtatggggccaggtgcagcttccgaatccagtgcaagagtggaaataagcttccaaaacagtatcacctgagagagaactgagtccatccctgtagtacctcggccgctctagaactagtggatcccccgggctgcaggaattcgatatcaagct

SEQ ID NO: 30787 - DNA, 401 bp, Homo sapiens
gactcactatagggcgaattggagctccaccgcggtggcggccgaggtactggatatttttgcatataaacttgcagtaatagttcaaaaattaatagtttttgacattggcttttctgagaagagaaattgaaagtgtcacaaaataaaaaaagatgaaatgaagcatataattgtcaattttttcaattttctagccaacagagaatcgaaggattctgttcaaatattagtaaaaattgaaaataaacttgtgcttatattttgtttgcaacacactagttaatttaacctgtgactagttatctctaccgaaggtggatgtgtagtttctggttttaaaattcaagcaaactggaaaataatccatctaattatgctttctttcccaagaagttttt

SEQ ID NO: 30788 - DNA, 408 bp, Homo sapiens
gtaatacgactactatagggcgaattggagctccaccgcggtggcggccgaggtactctagtttattattattttttttttcttttaaggcgtagcattactagaagtatagctttgggaaccttgtagcatcttaaagacttttaaagggttgacagctattggcaaattgactaatacagagaactaaactttggttcatgtattcaatgtctaaatgaaaaatgggaagataaaagagctaagaatgaaatgtgatttcatgtgcttctcctttttagctcttataatagattgaacagatttgatatttgtggtaaatacactcaggcagagtgacagaggcttggttgtcatttagcctttagggccttagtggagttaatgagaactgcaaatggtcatcaa

SEQ ID NO: 30789 - DNA, 441 bp, Homo sapiens
  misc_feature 363: n = A,T,C or G
ctatagggcgaattggagctccaccgcggtggcggccgaggtacttcaatcctaagatgccactgaatggtctcttacagtcctttatggactattaagaaaaacagattgctagttcaattgtcacatgctatcagttgcaagtggtaaaactatacatctcagaatcagtaaagtgtggtatctggaataacagttacaggtaaattttttttaatgatttttatgatgaattacatacatagaattaaaagttcaaaaacctaccttaaagggtaagatacgttacttttctatgctagtaggaattcaaatccttgaatgataaagccatttagagtcttattccaaggtcctgctgancagagcctgatgtcaacgatttccatgacataatcttgtaactttgtaaaaggcttttcttttcccgtcttctctatc

SEQ ID NO: 30790 - DNA, 495 bp, Homo sapiens
ctcactatagggcgaattggagctccaccgcggtggcggccgaggtacttgagttttttcccttacaacttatatagtctgtgagggattagataggtatgccttaacatgatgctaaagatgtggctagggttgcatatttcttatatgacttagttaactttgccctcttccaaggtcacagattttgtccctgaccccaatcaccatgcacatgtgcacatgcacgttcaacatgcctttggtaaaataaaagaggaccaggagaaagtgttcaaacttgccacttcctgacttctagaaaatagctgaaagcccatgccctgctgatggcatatcctcagattcaagatctaaaatgccgtcgtaacaaaacacagtttgttttgctagcttttctttttccaagtggtatctataaacatttgcgaatggcagctaaattggtttttcttaaacagtcatgagttgattgccaatcaacaaggcaagcct

SEQ ID NO: 30791 - DNA, 420 bp, Homo sapiens
agcgcgcgtaatacgactactatagggcgaattggagctccaccgcggtggcggccgaggtactgaattcaggcaagggcacgaaatccttaaagccaagcctatcgccttttctgacttctgctagcgagcaggcccacgacactgtaggcacaaggcagagatcccaatattttgataaataacgtagcagatgtcctaaagcttcccagagactctgttaactcttggaataaagttttcactttaaatcctgtatatatcaggaaattcaaacataatggtatatggatttctctttcatctgaaaaacaccaatgcaatagattaaatgctaccaccaagccagatgcagccccgcctccaacctgcaaggaacccattccctcgacatagacctgtgctggcgacatggctgac

SEQ ID NO: 30792 - DNA, 518 bp, Homo sapiens
atagggcgaattggagctccaccgcggtggcggccgaggtactagtcagtatgctgtagtattaatcagtatgtcaagttcagtgaagtaaaggagaattgaattcttgaagttcacatttaggcaaaaatttggcgttttaggaggtgagtataagacatgatctttatagaaaacgctgatgataaaaacagcgctctctgttaggtgcctttatgcttgactccattgtcatcttttcttaagaaactaagctcaggactgggtgcaatggctcatgtctgtaatcccagcactttgggaggctgaggctataggatcagttgagctcaggagttcaagatcagcctgggcaacatagctagacctcgtctctactaaaaaacaaacaaacaaaaaaacaaaaaaaaacgtacctgcccgggcggccgctctagaactagtggatcccccgggctgcaggaattcgatatcaagcttatcgataccgtcgacctcgagggggggcccggtaccca

SEQ ID NO: 30793 - DNA, 379 bp, Homo sapiens
actactatagggcgaattggagctccaccgcggtggcggccgcccgggcaggtacttttttttttttttttttttttttggtatagatggggtcttgctatgctgtccaggctggtctcgaattcctggcaagtgatccgcttgcctaggtccctcaaagtgctgggattacaggtgtgagctatcgctcccacactgacgatttttggtgggagtgaggggcagggatgcccttcatcagaagagactgagaagagggagaagagggacagctgtggacaaggccttataagaaggccttggatttgggaaccagagggtccctgtgctgggtcaggccttcaagtttacatcccagagatgtggctgtaaaggaaag

SEQ ID NO: 30794 - DNA, 372 bp, Homo sapiens
gtatacgactactatagggcgaattggagctccaccgcggtggcggccgcccgggcaggtacttcaccttagaagtggagcttaacgcatgatacagtgttacatgaaaaatgtaacttatgaaagattcttcggtgtttgttgctcgacgtgatttggaaaaaaatcagcttatttgatcattctttattcaactcagtatcctggcaaaataaactattccattttctccgtatattaatataacctggcatgccctacttcagtgcccataatgattctctttcctccataagagagatgtgttcctttcatcttaacctttttaaatgttgtttgttccatccacacctgaattaattcccgatttta

SEQ ID NO: 30795 - DNA, 411 bp, Homo sapiens
tacgactcactatagggcgaattggagctccaccgcggtggcggccgcccgggcaggtacattgctacacggccgggggccattgagactgccatggaagacttgaaaggtcacgtagctgagacttctggagagaccattcaaggcttctggctcttgacaaagataggccactggaacaatgagaaggagagaattctactggtcacagacaagactctcttgatctgcaaatacgacttcatcatgctgagttgtgtgcagctgcagcggattcctctgagcgctgtctatcgcatctgcctgggcaagttcaccttccctgggatgtccctggacaagagacaaggagaaggccttaggatctactgggggagtccggaggagcagtctcttctgtcccgctggaac

SEQ ID NO: 30796 - DNA, 493 bp, Homo sapiens
cgcgcgtaatacgactcactatagggcgaactggagctccaccgcggtggcggccgaggtacatagtagccatttatattatttttctagtttcccatctctataccagactacatttcctagaaaatcctggacctctttaccactcagcaatgattctccaaacatcgtatataatataggacacagtcccaagctatgagaatctgcttacacctttctgggcgttttaacataattcagagaggctccgttaagtatcttctttcaagtattcatgttctacgaactgcagtaagacaatctacccaggaacccacaatataagcctccctaagtttttctccctctgttaattattaaaatagatttttttactattattatcgtagagacggagtctcactatcttgccgcgtggtctcaaactcctgagctcaagtaattctcctaccttggcctaccaaagtgctgggattataggtatgaccct

SEQ ID NO: 30797 - DNA, 478 bp, Homo sapiens; identical to SEQ ID NO: 30781

SEQ ID NO: 30798 - DNA, 428 bp, Homo sapiens
tccaccgcggcggcggccgcccgggcaggacaattttctaaagcagagaaaatccttcccaagaaaataaacactcccaaacaactgtcccattctgttacctatttggattacataattattatgaagtcaagactttcttactgacacgccaaaaaagacctctcatctcataagctgaactgcctttttctccactatccaaagttccaaaaaatctccaagtccctaaaaagcaatcaccactgctcactgtaatggtcatgaaaaactgcactgcctcatctgtgcccagaacagaaactgaggtcaaaatattttcagagtttggggatatataagttattgtataccatattcttgaacaacaacaatgataaatatcctcacaaatgccctaaaatgccctacattgggaagaaaacact

SEQ ID NO: 30799 - DNA, 351 bp, Homo sapiens
ttggagctccccgcggtggcggccgcccgggcaggtaccgtatttttaaattaaggagttttagttataatgaaattgatttgtagtctgttttgccgtaaacttgtttttctttaaattgttcttacagtgatatcttactatttttaactgtctggggtttctgatatggggatttcagcccctggttaatcagtcttgtccctacaagtccctgatgcagtatgtttatttgtgatgtttaaagaacatttcttggctgggcgctgcggcttgcgcctgtaatctcagcactttgggaggctgaggtgggtggatcacctgaggttgggagttcgagaccagcctgac

SEQ ID NO: 30800 - DNA, 648 bp, Homo sapiens
  misc_feature 82, 641: n = A,T,C or G
tacgactcactatagggcgaattggagctccaccgcggtggcggccgaggtacgcgggatattagggctggttaagaaaaanacaaaccaggtgaagataatctttgactttttccacctggaatttaacactttttcttttctcggaacatacagcacctagaatccttaaacactgcttaggctgccccgagacccacatgtgacctccattagccctgagctccactttatgatgctatcttcttctttgcccatcaaaatggccctctggtgccacttcctatctggcctcctgacctcctttcagtgagttataataggtgataaaaggtattaaccagccaaaggagttttcctctggaaggtagcattatctcaaacctgtttctccaaacttatgtgccacagaatgatggtttgggaaatggaaatagatgggcaggaaaatgatttctgtggtcaaatgtttgcaaaatgctgtgtacctgcccgggcggccgctctagaactagtggatcccccgggctgcaggaattcgatatcaagcttatcgataccgtcgacctcgagggggggcccggtacccagcttttgttccctttagtgagggttaattgcgcgcttggcgtaatcatggncatagct

SEQ ID NO: 30801 - DNA, 536 bp, Homo sapiens
cgcgcgtaatacgactcactatagggcgaactgcagctccacggcggccgaggactttaaaattgctgcactgagagtggaagaaagacagaagtaacagggctgtggataggggaaagggaatgtattgggaagagagacgcaccatggagtcacgtccccacaaatacacagcacatttcagaaagaaggagcaggcactggccaaccaaaacgagtttgaggaaaaatctataaaaggttctgtgccacacaggaaagactgcctgacaaattagctaatgaggacaaggcatctgtccttggaggtctcctccagatgcaaattggcccaaatttgaggccaactgacctctatggaaaaagcaaaaccaaagtcagattcctgtcatccggagaacaactgtcaccttgatcacactccaaaatcaagataaaagcttggctttccaagggtcacaatgggcttacaataaatgagcccatgtaggaagaaataaatatgtgaagcacctctttcacttgacatttggggc

SEQ ID NO: 30802 - DNA, 473 bp, Homo sapiens
actatagggctaattggagctccaccgcggtggcggccgaggtatcgcgggggtggctaaggcggctttagtttcagcatgaagcgcaccccgactgccgaggaacgagagcgcgaagctaagaaactgaggcttcttgaagagcttgaaaacacttggctcccttatctgacccccaaagatgatgaattctatcagcagtggcagctgaaatatcctaaactaattctccgagaagccagcagtgtatctgaggagctccataaagaggttcaagaagcctttctcacactgcacaagcatggctgcttatttcgggacctggttaggatccaaggcaaagatctgctcactccggtatctcgcatcctcattggtaatccaggctgcacctacaagtacctgcccgggcggccgctctagaactagtggatcccccgggctgcaggaattcgatatcaagcttatcgata

SEQ ID NO: 30803 - DNA, 495 bp, Homo sapiens
  misc_feature 433, 462, 468: n = A,T,C or G
tccaccgcggtggcggccgaggtacaatggtttcctggaacattctgagtaaagaaatggggaaaccaatacagcttacctagcttgttaccttctatgaacgctggcattaaaagtaaaaggcagccttgggaggaagaaatgcaaacacagagggagaacatagcttccccttgtctctctctgccacaaaagcctggccaaagtgactctactaggttgaagcagcctgcataataaaacgcttaaccttggctaagttaacctcctcagccattaaaaaaaggggggtgggggaagggctagcaaaatcaagcttacgggaaataaacctaatcaaagccgagtagtaacaaagggcaccagaaacatttctactgtttcacatcccacaggctggccaagagcccggaattttcattacaactttcanagagagccagagggagggaggaaaagatntcacanaagcattatcaaggccccaacccagga

SEQ ID NO: 30804 - DNA, 431 bp, Homo sapiens
actactatagggcgaattggagctccaccgcggtggcggccgggcaggtacgtgatctttcggcaagttgattgagggaggtgggggaactgttttcctctggcaatggggagaagcttctttggctggcccagagggttcaagattctccagcttaactacacgaatacccccacaccaggtttcgtagtcccacccttactcgttagggctctgattgtgacatacgagacaggtcgaggctgcacatttgacctactttgaaaatttaccacatggaaaagtcatgatctgggtctgattttagtgcagttggccctgaagctgcaggagacaagagtctctttttctatggatacagaatctttgcacttttagaatatgcctgaagccagcaattagctgctttggtttcattttctttttgcaag

SEQ ID NO: 30805 - DNA, 413 bp, Homo sapiens
gtaatacgactcactatagggtcgattggagctccaccgcggtggcggccgaggtacttgagttttttcccttacaacttatatagtctgtgagggattagataggtatgccttaacatgatgctaaagatgtggctagggttgcatatttcttatatgacttagttaactttgccctcttccaaggtcacagattttgtccctgaccccaatcaccatgcacatgtacacatgtacgttcaacatgcctttggtaaaataaaagaggaccaggagaaagtgttcaaacttgccacttcctgacttctagaaaatagctgaaagcccgtgccctgctgatggcatatcctcagattcaagatctaaaatgccgtcgtaacaaaacacagtttgttttgctagcttttcttttt

SEQ ID NO: 30806 - DNA, 284 bp, Homo sapiens
ctcctatagggcgaattggagctccaccgcggtggcggccgaggtactgggattataggcgtgagccaccgcttttgtcctctaacgagatatttctaaaggttaggccttcagtcaagaattttaaagctggatcttagaggttatctaaactaacctccccatttcatagataaggaaagtgagtcccagaaaagcactggtttggacaagttcagaaagctaaacagtgactgtggatgtatgattctgtctcttaactcctaatccaaatgtcttctcac

SEQ ID NO: 30807 - DNA, 402 bp, Homo sapiens
gtatacttatagggcgagttggagctccaccgcggtggcggccgcccgggcaggtacaacctgaatgcttgtaattagatttcataggagggaaaaattttctttatcaacctctttgaatttatttgatttgtaacgctccacatttccacctagacttttttttgttttttattttttgttttgaaacagaatttcgctctgttgcccatgctggacgcaggggtgctatctcagctcactgtaacctccacttcccgggttcaagtgattctcctgccttagtggattacaggtgcacaccaccacgcctggataatttttgcatttttagtagagatggagtttcaccatactggccaggctggtttaaaactcctgaccttatgtgatccacccacc

SEQ ID NO: 30808 - DNA, 489 bp, Homo sapiens
gactcctatagggcgaattggagctccaccgcggtggcggccgaggtaccacagttacttctaaaatgtgttgctaaatgtagaaatctctatccccattgacttctcagttggaaattagttcatgacctagagactgagagcaccccggctgtgctttcagagcaggagtccttggatgtagctgtggaatgagcagcgttggaggatttgaaaaaatcctggacctgaaacgtaagctggcctgtgtttccctgatgtgccctatgccttttattgtgctgatttctactatcttaataaatagtaacattaaagttctttctgtgttcaaaaccttttccttgttttcctatcaaactgtttttgaaagcctatttcatctattttgagcaacactgataactgatgttcatcgaaggcagaaaggttggaggaactttggccagtgtggggcagacagaaacccatgggtattccccctaggca

SEQ ID NO: 30809 - DNA, 405 bp, Homo sapiens
atacgactcactatagggcgaattggagctccaccgcggtggcggccgaggtacagctgctcagcagcaaagccgcaggttacttagacacctcttctcctctgaaagccagagccagttttccttgtccagcctgtcttagagagttgtaatggtcaaacgtgtgagaaggagctctgcaaatgtaacattttgcataagtataagatggtattatttagtattaatattgttagtaaattttagtaatattcagtatctaagatattcaacttagatatccaatggttattcattatctaagtccaatatcaggggtatggctctagatatcaatagatattggacttagataatgaaaagctattgttcagatgtgtgtttaaaattagtgtggacacatgc

SEQ ID NO: 30810 - DNA, 559 bp, Homo sapiens
ggtggcggccgcccggcaggtacataatatcatatatgagttaaatcttaatcacatgaattctatattacatcactgaggtagaaggaacaatatttaatagacagctgcaataaatatttttgtgaagaattcttttgtcataaatcaaaatcataaccttagttctgaaaaagaaaaattatatcaaataatggtaaatacaatattggatcaaaatttttttgtctttttacgttacaaaatttatgttacttatagcaagtatatttattctctaatatgagattttttaaatgtagagttcacttgaagtaagacaaactaatattcttaattttattatgatgtagattcttgatacatgcataaacatgagaaatgtcatacatttattaaaccacagtgtgcttggaacacactagacattgggatgaagacatttaaaggaagattcctgtcttcactagacttacaatctagttgaggaaaccagactgctgtatacaaactgacattaatcataattttaacttggttcaaaattatttatatttat

SEQ ID NO: 30811 - DNA, 467 bp, Homo sapiens
agggcgaattggagctccaccgcggtggcggccgaggtacgcgggggggctgaggtgggtggatcatctgaggccaggagttcgagaccggcctggccaacgtggcggaactgcatctctactaaaaatacaaaaattatctgggtgtggtggtgcacacctgtgatcccagctactcgggtggctgaggcaagagaatcgcttgaacccaggaggcagaggtttcagtgagccgagatcgtgccactgcactccagcctgggcgacagagcgagactcccatctcaaaacaaaacaaaggtgggtgtcttgagtgccttttgagtataggccttcagactttctgaggattgggaaagcatttttttttaaccttaaaatatttattgaataaagaatggcaagatcagaaaaataagctctggttaggatttgatgtggggcttcattctcagctctggtgctac

SEQ ID NO: 30812 - DNA, 591 bp, Homo sapiens
  misc_feature 574: n = A,T,C or G
agctccaccgcggtggcggccgaggtaccaggtaatgaggaaggtgatcccggcccccattccctgatggaacctagacttcactaagggattcagatggaggaggagatgttcaagaagccaggaaggatcaacaacagggtgccctcaattcactggggccacgttagtggccgattactaaatgtcagaccaactgcagtagcgctgtcatggccactcatctctccgggatttcttcccttccaagccagctaggttcaaccttctcatttacttttaatacaccacctcttatatgatctttcttctctacttagaaccctcccataagccgaacccaatctgccttttcaccatcttcccatcttcctactgcctccatagttattcttcgggatctagctaagtaaactctaagttattcttccatgtttttctagcacctaacatatcagtttccccctccacccccattttcttccacatacggaggctcaataaataatagttaaatgaggctgggtgtggtggcacatgtctgtaatcctggcactttgggaggctgaggcangaagatcgcttgagccc

SEQ ID NO: 30813 - DNA, 565 bp, Homo sapiens
gagctccaccgtggtggcggccgcccggcaggtacctggaaagatgaacaggattgcagcagatagagacaggtagaatgtatagagattccaagtggaaggataaaggagaggggagagaagcaaagagtgcaacttccaagaagatttctggttctggcactgtcatgatagcttgggaggaaacaggcagagagggttttggagaaacagagctgcaaagccaagttagatgttaggtgagttgaaaaaataacttagggcaaaagcagagggagggaggtatttactctgaacagagatgacagggtggggaggacagattgttttgagtaggcaaaggccaggagcatgaagcaagctaggaattgggaggctggcctagaagcatgggccacctgggaaagggacaaaagttaaagtatgacaaaccctttgtgttcaccaaatttcttttctggagtccttaaccatttgatcttactggaatagaagttatactagaactcactgcaaagtggagtaaggcttacagagggaaaacagcagagggcctaatgcaaga

SEQ ID NO: 30814 - DNA, 459 bp, Homo sapiens
gcggccgcccgggcagttacatttgttggtggcgtcgacattattatataaccacttagagtggacatgcagttagagaaaagtcaatgagctggaaccaagctgggaattccaacatgtagaagttaaacacaagaggaggagccagcaaaggaaacagaaacagagcttccagcaggtggggggcatttggaagaaaacgatgccatagaagccaagatgaaatagacatcaaggagaaggaagtagtcaattgttttgaatgctatgaagaaagataagaataggtaaatagtccttatatttgatgacagaggtcactagtgatcttgatgaggggtttcaatagaatggtgggattatatacctccctggattcaactgaggtaaggaaggcatacagaatagagacaggcactataaacagcgctcataattgcattctagcaattagcacac

SEQ ID NO: 30815 - DNA, 402 bp, Homo sapiens
tacgactcactatagggcgaattggagctccaccgcggtggcggccgcccgggcaggtacctggactcctaagcctcagggatttactgaaataccattctattttataataatccttaaccaagaattttaaggatcttaaatttttctgtggttctattgttatctgatatatagatgatctgctgccatatcctaaagagcaggtgaggccgggtgtagtggctcacgcctgtaatcccagcactttgggaggcagacgaaggtggatcacctaaggtcaggagtttgagaccagcctggccaacatggtgaaaccccatctctactaaaaatacaaaaattagctgggtgtggtggtgggcacctgtaatcccagctactaggaaggatgaggcagga

SEQ ID NO: 30816 - DNA, 505 bp, Homo sapiens
agggcgaattggagctccaccgcggtggcggccgaggtacttagcccctgacagtcacattcatttgtctgttactctctgtctctctccactggatgcaagctctacgagaccatcctttctgttgtccctgcactagtcacaaggcctggaccagtgtctggcatataataggcgcttaataaaccacagataaatggacggataccggaaactacaacaatggaaaatgcacactgcagaggaataaaaaattgttctggaaggttagcagtaggtatcattatgagctattttgaggtagagggtcaagaggagaatgaaggaaggttagtatgaaattcagaagaaagatgactaagacagggtcgctgtgctttatatgcaagtcacttgtcaatttgaaagcaggtggtgtcaccatgtagggagaagctttacaagacagacatgacctcaagatgcagaagacatgcaaatcagcctgggacttaacttgcacagc

SEQ ID NO: 30817 - DNA, 326 bp, Homo sapiens
ttggagctccaccgcggtggcggccgcccgggcaggtacgcggggaggaagaaaattgcattattcaagaaaataaccaagaatgtcagtcacaggagagctgctgtgtatagatgtctggttttttaaggagtgatgataatttaatcagcggtgcaaaggtgcgatctaaatactgcataaacctaatcatcttattctcaacctttctcaatactccacccacttaaagaggtgggtgtggccttcacagattcttataaaaggacatagaagagacaagctcagttttctccaaaggagaaggagcgcacttataagaagct

SEQ ID NO: 30818 - DNA, 459 bp, Homo sapiens
actactatagggcgaattggagctccaccgcggtggcggccgaggtactatatgctagaaacttggctgaatgatttgacattatcctatttaatgttcatgacaatccaataacgtaaccactcatatctcccttttgtgcaaataacaaactgaggcccagagaaatcaaatatgttgtcaaaatctacatcgttgaagagatgggtttcaaatccaggtcggcttggcccttgccacgacttcataatgaaattccatgggtgagtgttaccagtttctggtccatccttgcttatttcaagggtctcatcatcccatccactgtatcactttttttgttacaggctttactcttttctaccatggaaaagactaatgatatttttttctccataagcttggaaatattatcaatcaccataaaattcagcctttctctggtaactttggagaccc

SEQ ID NO: 30819 - DNA, 415 bp, Homo sapiens
gtaatacgactactataggttgaattggagctccaccgcggtggcggccgcccgggcaggtacttataacaactacaaacttcatctctatatgctttaaacagataaaagagaataatgcagtgataaggtagtaaatatggccagatagtttgaggtataaattcctctgtgttgcttgctttaaaagaaacaaaatacctgttacagatttcctctgtatataaaaatattacaagtcttttcttttgtggctctacctaaacaaagccaccatgtccattttgttatttcacttgttttgattttatgatagtcagtttatgatcaatggctatatgctagttcttcaccattttacgctgaagaattaaatttaatccattaactaatatttaaaaaagcaattacaaaa

SEQ ID NO: 30820 - DNA, 393 bp, Homo sapiens
atacgactcactatagggcgaattggagctccaccgcggtggcggccgcccgggcaggtacaacaatatcttattaaaaatagtagcagcatatgatgatttgaatttttaaaaaactaataaaaaagttctgtaatatacagaatacccatatcacaaggcaggcaggggaaggagtaaagaataaaatacatcaaacgatccacaagatgaaacaatatacattaatctaagttaatataaaaatagtataaaactcagccaggcacgctggctcacacctgtaatcccagcactttggaaggccgaggtgggcggatcacctgagctcaggagtttgagaccagcctgtctctactaacaatataaaaattagctgggagtcacggtggg

SEQ ID NO: 30821 - DNA, 246 bp, Homo sapiens
ctataggggcgaattggagctccaccgcggtggcggccgaggtacttatgactcactaatccagccacatgaaagtgatcattcatctgaataaataaataaacagttttcattattttctccatgaaaaggtctgaattaattgatgcggatttcctgccagcttacttttatctttaaggatttaaggaataaactcaaattcagaagtctctgcagaacatttgcgcaacatgtgttacagta

SEQ ID NO: 30822 - DNA, 602 bp, Homo sapiens
gcgaattggagctccaccgcggtggcggccgcccggcaggtacctgaacaaatcccatcaaggacagattctcagtcttgaagaggcagcacggtaaaggggaaagatcatgagttttggggccaggttcccttggatattgtggggtccccacacttctggatgatgttggataactctttgagactaggcttcacatctgtaaaatggaaatacttatttttcagagttgtcataaacactaaatgatttgacttatatcaacctaattcctactggctcattgaactcagctcagctgtcccctctgttcggatgccttccccagtggggcttagttaggtatccctgctggataccctgccaagctcttacacattccctctgccataacactcattctttgttactgaattataatttcatgttcatttgtttatctctcatactaagctgtgagttccctgatgacagagaatgtcttgttggttttggaattcccagtgcccaacttaattcctggcacagctgagtaagcaaatgaatgaacgccatctagttgagtaaaaataagtctcgttaggccggatgggtggctcacg

SEQ ID NO: 30823 - DNA, 507 bp, Homo sapiens
tactatagggcgaattggagctccaccgcggtggcggccgaggtacttttttttttttttttttttgtagagacgaggtctcgctatcttgcccaggctggtcttgaactcctgggctcaagtgatcctcccaccttggccttccaaagtgctggaattacaggcaagagccagtgcacctggcctttgaattttcttaccctcaataagtttctttcatgctgctaaagtgtatcactctctgtgaattgtctcagttatttttgagtcttgtagggaacctgaggaactcctgaaatgcctcacacttaatacccaatccatttcttccttttcctctttctcttttttttcttatcaccccgcctccattttgctgcaggacatccttaaagttatggactggggcaaagacaaaacacaaaaacgaaattcctgcccgggcggccgctctaaactagtggatcccccgggctgcaggaattcgatatcaagcttatcgatacc

SEQ ID NO: 30824 - DNA, 400 bp, Homo sapiens; identical to SEQ ID NO: 30588

SEQ ID NO: 30825 - DNA, 481 bp, Homo sapiens
gggcgtattggagctccaccgcggtggcggccgcccgtgcaggtacaaaattaatttgctcatttggttagagtatggttattgattagggggctaagcatttagttactgcatggggcagccaataataaaatcacagccctgtgtatttacctccacagtgtgtgctgataagtgcaaaaggtttgtgcaaattcttttgaagttatattgtaaccatggtatatgtattgaaaacttggccattttaccccattcctatgaatgaaaactatttggtgaatcagaggatagtctgaattgggatatgaaggccagtataagtgtcagttagcaaagtcagctctagtttagtttttttttttttcttttaaggcgtagcattactagaagtatagctttgggaaccttgtagcatcttaaagacttttaaagggttgacagctattggcaaattgactaatacagagaactaaacttt

SEQ ID NO: 30826 - DNA, 478 bp, Homo sapiens
ggcgaattgtgagctccaccgcggtggcggccgcccggccaggtacaggcacgtgccaccatgcctggttaatttttgtatttttttggtagagatggggtttcaccatgttggccaggctggtctcattaaactccgacctcaggtgatccacctgccttggcctcccaaagtcctgggattataggcgtgagccaccacatgcggcaaccccacagttttaacagattgtttatactttgatttggttttgcagatgatatgcatactaaggctttaaaaaattatctaaatgtttaataattttttgtttttgtgattgggaattatttacttctgggagtcatgatcctaaagaaacagtaaattggctgtttagagtgggaaaaaaaaacttcaggtaactttgttacttaaatcctgtctcttaattcataggttaagaccttaattttgcctctctcggtttatgacagta

SEQ ID NO: 30827 - DNA, 487 bp, Homo sapiens
actactatagggcgaattggagctccaccgcggtggcggccgaggtaccatttcaaattcggtttgttataaggaaagggtggggaaacctttggaagaagagagactaatagccaggagacttaactttttcattgtgttctgtcactttacatcctaaggctgtgctctcacctcacttttctttactcagttgggcagattacctttttggttttcccctgtttggttctcagttactttgatttcatattccttattgttcattcctgctgccactctctctggttaaaccaaattcccttaagggggagatggggaaggaaagagggaaatatcccataaagcaaaatagcttttgctgtcttggagaaattttattttgatttatttatttttttgagatggaatcttactctgttgcccaggttggagtgcagtggcgaatctcagctcgctgcatcctccgcctcctgggctcaagcta

SEQ ID NO: 30828 - DNA, 481 bp, Homo sapiens
acgactcactatagggcgaattggagctccaccgcggtggcggccgcccgggcaggtaccttttttttttttttttttttaagagacagggccttgctctgtcaaccaggctggaatgtagtggcacgattattgctcaccacagcctccaactcctgggctcaagtgatcctcccaccttagcctcctgtgtaagaatccaaccctatttataatactcttttgtcagacattcagatgatttctattttttaatattataagcagtgctatgtagaataatcttacagctgaacatttgcaaacaagtatgatatttccataggaattattggaagtaggttgctttgttaaagggtattccaaacatcaaggcttttaatacatactgccaaacttatccagaaaaagtttaccaaggcatgcagctgcaaaaattctatgagagcaccctgggaaacctatattttcttagttttaa

SEQ ID NO: 30829 - DNA, 450 bp, Homo sapiens
ctactatagggcgaattggagctccaccgcggtggcggccgcccgggcaggtactgtcacccatggccctgataggaaacagatggcatattcaagctggataatttgaagaggattaaatgaaacaagtattcacaaataggtgggcagagtttagaaaatcaacaagagatattgtagtatcctgggctagcaacagagaggatgggaatattgccccatagacctgaagtgcaaagagaaggagtgctacctcaaaaagagagctttgtggagaaggctgcctgatagcagctgtagtcccaggtagagggtgagccaccacgcccggcggttattacatagttttaaaagtgactcctcttaaggaaattttaattaagagaaaaatatcctagaactatgattagggtcaaaacagtatctatgttctttagggattaaggaaaa

SEQ ID NO: 30830 - DNA, 461 bp, Homo sapiens
gcggccggccgggcaggttcatgacctgcagaacttagccaagagtttgggtctccgggccaacctgagggcagacaagttgttaaaagccttgaaaggctacattaaacatgaggcaagaaaaggaaatgagaatcaggatgaaagtcaaacttctgcatcctcttgtgatgagactgagatacagatcagcaaccaggaagaagctgagagacagccacttggccatgtcaccaaaacaaggagaaggtgcaagactgtccgtgtggaccctgactcacagaatcatgaaaagcaggaaagccaggatctcagagctactgcaaaagttccttctccaccagacgagcaccaaaaagctgagaatgctgtttcctcaggtaacagagattcaaaggtacctcggccgctctagaactagtggatcccccgggctgcaggaattcgatatcaagcttatc

SEQ ID NO: 30831 - DNA, 469 bp, Homo sapiens
ctatagggcgaattggagctccaccgcggtggcggccgcccgggcaggtacgtccacggtcagccttgcggtaagcttgtgtgcttagaggaacccagggtaacgatggggcaaactgaaagtaaatatgcctcttatctcagctttattaaaattcttttaagaagagggggagttagagcttctacagaaaatctaattacgctatttcaaacaatagaacaattctgcccatggtttccagaacagggaactttagatctaaaagattgggaaaaaattggcaaagaattaaaacaagcaaatagggaaggtaaaatcatcccacttacagtatggaatgattgggccattattaaagcaactttagaaccatttcaaacaggagaagatattgtttcagtttctgatgcccctaaaagctgtgtaacagattgtgaagaagaggcagggacagaatcccagcaag

SEQ ID NO: 30832 - DNA, 309 bp, Homo sapiens
  misc_feature 278, 295: n = A,T,C or G
ccgggcaggtacagacttagttttcagaatgttccatgtatatgtttcttaattcccataaaaagtttcatctttgcttttccatgttttctatttgcacttcctagaaggggaattctaaggttttatttctatcctacaggaatgtaaaaaacttgatttcatataatctactggcaagtgtagttcctgagtggggagacgggctacaaaggattctgaagtagattggcttttatttcgtggctggtgatccaaactgagtattcctcataagnagtcttaaggggatggntgttgtttaccaac

SEQ ID NO: 30833 - DNA, 513 bp, Homo sapiens; identical to SEQ ID NO: 30630

SEQ ID NO: 30834 - DNA, 523 bp, Homo sapiens
acgactactatagggcgaattggagctccaccgcggtggcggccgcgcgggcaggtactgagacctttttcataacttacaggtgccttggcataacttacaggtgccttgatttgctctgttttttcttacatcagtaacttttaagtgaattctgctcagggatgtgcctggagaaagcaagtttgatgaggaagctggtggagctggtggtttgaaggctgagtgaaagtaggggagagcccatggcctgatctatgtaagtggtaagtcagggagggtagctgcggtcagcatgtcccagagtcaccttcatcctgggatgcgccctctgattctcagagtgaacattaaaaatggcagacaaaaccaggcacggtggcttacgcctgtaatcctagcactttgggaggccgaggtgggtggatcacctgaggtcaggagttcaagaccagcctggccaacatggtgaaaccctgtctctactaaaaatacaaaaattagccaggtgtggtggcatgcg

SEQ ID NO: 30835 - DNA, 509 bp, Homo sapiens
actactatagggcgaattggagctccaccgcggtggcggccgaggtacaattatttaactgtgtcaggaaattaactttattacaatactattgcccaatctagcaatttaatacaatattattgcttagttgctcaatctagagacgatattcaaatttcatcagtaacacttttttccaatgcagaacgcagcccgcagtcatgcgttgcagttacagttggagcgtgtcccttcgtctcttttaatctgaactcattcctcagtcattctttgtctttcatttttaaagagtgctgatcagttgttaactagaatgtcactccatttgtgtttgcctgatatttcctccttgttaaattcaggttatagtttctgtcaaggatagcacagcagcaatgggctgattccagggctggaccaggcataagtgtacctgcccgggcggccgctctaaactaggtggatcccccgggctgcaggaattcgatataagcttatcgataccg

SEQ ID NO: 30836 - DNA, 343 bp, Homo sapiens; identical to SEQ ID NO: 30611

SEQ ID NO: 30837 - DNA, 609 bp, Homo sapiens
gactactatagggcgaattggagctccaccgcggtggcggccgcccgggcaggtaccctaatgttttatataattatttactaaaccattccaggtgacttaattacaattgttgttttacatacatatatatacctatctctttatgtatctgtgaatacttactctatacagttcctagaaaacaaaatgccttaagcattgcatagttacaactcacttggcctgcttacttccttttaaaggagggaatgctttagggagggggaagatgcaagatggtttttaacccctatgtgctattcattcattggacatcttataatgtaattgtgttaaaactgcctggaaattcctaacagttcttagctttttatttgaagaaattttggagtgatgaaaatatagtttatttagggaaattcaaaagaaagggttaacatgaatccagcaaaacaaccttatccatagtgggtaaaaaaaccaaatctgctctgcaacctgaccctacttcagagttttctcctagttccttttccctactgttactttcccagtccttgctcctaccctccttgtctaatgaacgtgattgaattaccatttaga

SEQ ID NO: 30838 - DNA, 400 bp, Homo sapiens
ggtgacggccgaggtaccacttcagatctgttttcactggatatgactctgaatgtttttctgtagctcgtatccatccctagtcactttgccaggatgaatgctgttgggcagcagtagcctaagttacggaaggggagcagattgaatggggttttgagacatcttctctgataccttagctttccttctgctctggtcgctatccactcagtcgtgtgctagaaatgtttaacaaccaggatctctggggtgggggtggggggggaagcccttaatttgtagcattttgctgcaaatataaattataaataaaattctaatataaattagaattttatatcaaattctttgatataaattagttactcctcctgtggccgatttcaagctaccacct

SEQ ID NO: 30839 - DNA, 613 bp, Homo sapiens
  misc_feature 279, 587, 605: n = A,T,C or G
actactatgggcgaattggagctccaccgcggtggcggccgcccggcaggtactatgcacttcccatgctcctagggttaggaatagtttcaaacatgattggcagacataacaacggcaaatactcggactggggcataggactccagagtaggaaaaagacaaaagatttggcagctgacacaggcaacctacccctctctccagcctctttatgaaactgtttgtctgccagtcctgccctaaggcagaagatgaattgaagatgctgtgcatgtntcctaagtccttgagcaatcatggtggtgacaattgccacaagggatatgaggccagtgccaccagagggtggtgccaagtgccacatcccttccgatccattcccctctgcatcctcggagcaccccagtttgcctttgatgtgtccgctgtgtatgttagctgaattttgatgagcaaaatttcctgagcgaaacactccaaagagataggaaaacttgccgcctcttcttttttgtcccttaatcaaactcaaataagcttaaaaaaaatccatggaagatcatggacatgtgaaatgagcattnttttcttttcttttcttntttttttt

SEQ ID NO: 30840 - DNA, 459 bp, Homo sapiens
attggagctccaccgcggtggcggccgcccgggcaggtacctttctatatttagattctatctttgtcaagcaagatgacttgtttgacagggctctggtttttcacctctgaaaagctactcatccacagagcttgggattgaggggagaggaaagggggaggagatctggcttctctctccaactctgaacagattggatccaaataagggcccttctacatccctagccaaaatgcctgggccttggcagttgtcccaagacatagacaatggggtctgatggcagcttctcagacctggctttccctgggcaagaggcttttcctgaggctggcaatgccattttcttcagactcacaaaagggatttagggagggggaaatggggactgcaatgaggcaactcttgacagctttaccctggaaaactaggacccactttgtgggagcccagccc

SEQ ID NO: 30841 - DNA, 347 bp, Homo sapiens
atacgactcactatagggcgaattggagctccaccgcggtggcggccgcccgggcaggtaccccatatatgctggtggtttctaaacctaaattgttgtcccagcccattcctacttgcagctcggatgtgccttgctagcctggcttctctacctggcacctcacactcaggatgccaaaaaaagttctgttttctttccccgaaatcctgttctctgctgctgctccactgccacctgttttcttttcttttggttgctggttcccaccacccattcatattccagccggacacacgggattgtcctggactcctctgaattcctcatactcttaccctggccca

SEQ ID NO: 30842 - DNA, 356 bp, Homo sapiens
ctatagggcgaattggagctccaccgcggtggcggccgcccgggcaggtactgggattataggcgtgagccaccgcgtctggcctctaacgagatatttctaaaggttaggccttcagtcaagaattttaaagctggatcttagaggttatctaaactaacctctccatttcatagataaggaaagtgagtcccagaaaagcactggtttggacaagttcagaaagctaaacagtgactgtggatgtatgattctgtctcttaactcctaatccaaatgtcttctcactagataaggctgtgccttctacatttgaaggctcaaaccccatggatggatggagggaaggatgggtg

SEQ ID NO: 30843 - DNA, 416 bp, Homo sapiens
tatagggcgaattggagctccaccgcggtggcggccgaggtacataaaataaaaacataaatagtaaatggcacttttcttcatgtgaggcagggtgcagaataggtttgaggaaaaaagtaagtaaaaccagtgaatggaagcacaaatagtaagtggctgtgcttctcttaatttttctgtagaattttttctcaaattcttattattgaaatgcctattatgatgtagcaaacactgaggagatactaaggcttagagtttaagaaatctaattaaatagctaaacagagcacaatgtaaactcccacaatctgattccagattctgagtccaatcatctcattatttgtctcattatggaagaataacaaaccaacaagtgaaaatgctaaaactctaggggaacaccatga

SEQ ID NO: 30844 - DNA, 201 bp, Homo sapiens
ctcactatagggcgaattggagctccaccgcggtggcggccgaggtacttactaggaccaaagtcgaattttttaaattctgatatttttcttcataattttcttaaaataaaagggaaataaagaataaaaataaaatatgatggataagatagaagtcacttatgttttccttatcattttgaaggctttctttgcata

SEQ ID NO: 30845 - DNA, 234 bp, Homo sapiens
actcactatagggcgaattggagctccaccgcggtggcggccgaggtacaagcagccacttcagttttaccacattcatcttccacacactgatgaaccatatggaggcagcaggaattgaagtagaaccagagggagtagttaggacagacattctgattcattcattctgattctcactattggtcaggaggtaaaggtttcattggaatttttccttctgatgaaataaaa

SEQ ID NO: 30846 - DNA, 258 bp, Homo sapiens
  misc_feature 223: n = A,T,C or G
tacgactactatagggcgaattggagctccaccgcggtggcggccgaggtactttggcttttgtttctagaacaccaatgagtatatgctcattaagatagtttgatgcaataaatccttattttacttgcctctattactgcattgtaaactgttgtctactttgtcttcttgaaatcctacacctcccccagccccccacaattgggcctaatggaacaanttactttatcctgattttccccctaacccttctgg

SEQ ID NO: 30847 - DNA, 443 bp, Homo sapiens
ctactatagggcgaattggagctccaccgcggtggcggccgaggtacatgtggcctttcagctagcgcagaggatggaaaccagagtgggctgatgattggatgccaggcctgagccgggtgagtcctgttctcattatactgtaaagtgagctgctccaagcctccctgattcttagcactcccagtccctgcaggggtccctgagaaggttaatcttgcattaggccctctgctgttttccctctgtaagccttactccactttgcagtgagttctagtataacttctattccagtaagatcaaatggttaaggactccagaaaagaaatttggtgaacacaaagggtttgtcatactttaacttttgtccctttcccaggtggcccatgcttctaggccagcctcccaattcctagcttgcttcatgctcctggcctttg

SEQ ID NO: 30848 - DNA, 456 bp, Homo sapiens
actactatagggcgaattggagctccaccgcggtggcggccgaggtacttgagggctgctgggtgccccgcactgtgccaggaaatgtggagattagacaagcagtgcagggctgatgtatagtttagttaggaaggaaaaagccagacacagaagaggtcagattatagccttggacaacatggaagacaactcaaggcaacaagtgattggattggttcagacagtgctgtaaagtcctctcttccccttttccaaaatagtttatcttttccaacataaaaattacatggaggccgtgcatagtggctcacgcctgtaatcccaacactttgggaagccgagatgggtgggtcacttgaggccaggagtttgagaccagcctggccaacatggtgaaaccccatctctactaaaaatgcaaaagttagccaggcgtggtggcacatgcttgca

SEQ ID NO: 30849 - DNA, 529 bp, Homo sapiens
ctcactatagggcgaattggagctccaccgcggtggcggccgcccggcaggtacccaccttgtattagctgagtgactttggttaaggacagttacttaattatcctgggcctcagtttctctctttgaaaaacagattcattcactaaaataatatttatgaagtattcattttgtgatagcactagtctagctaccggggatatacatttacaaaacagattttaaaatatcctgtcctggtggacctcacattacgttcattactaacagggataatttcagtgcctctctcataggattgttgcaagaattaaattgatgaatacatacgtaacacttataacagtgtcacaaaatgagagctcagtaaaagccatcatcaccataatcaaatattgaattttcataaaaagttttcctttatgttttcccattccttgtttccttggaacttagaaataatagatttaagttataaaataatagtgttaatgtagtatcactagacctcaatttccttacctat

SEQ ID NO: 30850 - DNA, 240 bp, Homo sapiens
tagggcgattggagctcaccgcggtggcggccgcccgggcaggtacgcggggaggtttaaactgggaaatctgagaaatggtatggttgtatgtgggttggcattcttgcatgatgggagtggccacctgctttcatattctgaagtcagagtgttccagacagaagaaatagcaagtgccgagaagctggcatcagaaaaacagaggggagatttgtgtggctgcagcctagggagacc

SEQ ID NO: 30851 - DNA, 489 bp, Homo sapiens
atacgactactatagggcgaattggagctccaccgcggtggcggccgcccgggcaggtacagaagggcccctaatatgattactatagcaggttatagcagatattaaagaattccaaggaaggggagagaagacgcctttctggaagaggtatgctttaaaattgagaaatgtttaggtaaggagagaggcaccgaagacattgtgctaaatgtaaacaaagaaccttgatttatataaataaagtgaactcggtttttcttggacagtttattattttcttcttgtctaaggatgtctgttccatgacttttgaaacagattttgttccaatgtggaatatacctagtaggaataggtatgtcttgaaacaaggtagagtctaattaagttttcaattaagaatgtgtgctggaatttttagttcaacaaatctaaccccagcatatatttgcaatgctctgcgacaaggacttgtgggacagagaa

SEQ ID NO: 30852 - DNA, 391 bp, Homo sapiens
atagggcgttttggagctccaccgcggtggcggccgcccggtctggtactcaacaagttggtaaagctcttttaagctcgtaaactcatgctggctaggtttggtgaacgacgtagtaaggtgtctggtaactcattagttgtataaatgacactatactaaaccaaggcaatataattttaaacattcagatagaaaaaaagttttatttgagttactctttttgtttcagttttttctaaataagatgaattattttgatttaaaattaatatatagtaattgtagaaaatttggcatagaaaattcatgaaatacagtaaaaaaattaaaaatggataattccattattcaagtcacatataataaccagttaaccatttttatgttt

SEQ ID NO: 30853 - DNA, 416 bp, Homo sapiens
ctactatagggcgaattggagctccaccgcggtggcggccgaggtaccacgtcattactgttacctgggggaaaaaagtaaaaagcactgctcccagctagcactggtttcgtccccacactcaactgtgtctggctccgataatggggcacattttttttttggagaatcctttctttactattctgatgggcaaagattgaaaactggcaataaaaagaaattaaagctgtactttttcataaacagatggcaaaattttatgtgtatgggtgtatgcatacaagaaagggaaatcaagggccgggcgcggcggctcacgcctgtaatcccagcactttgggaggccgaggcgggtggatcatgaggtcaggagatcgagaccatcctggcttacaaggtgaaaccccgtgttt

SEQ ID NO: 30854 - DNA, 303 bp, Homo sapiens
tattctactactatagggcgaattggagctccaccgcggtggcggccgcccgggcaggtacaattattaatacttccagtccttgctcttttacacccaaagtgaggaaccaagagggttacgaaaccagggaatatgagaattgacatagtgggcatggaagggtaatgctgaaaacaccgaaaaggacagtgttcggatagaagataggagccagtgtgcactccctccagctgggtttttacacccctggatagacttgtgctgggcaggctggatttattttaagattcacgagagatg

SEQ ID NO: 30855 - DNA, 467 bp, Homo sapiens
tatatggcgaattggagttccaccgcggtggcggccgcccgggcaggtacattttattcatccgtcgtttgggtcagggtctgcgggcagacacaggtagctactgccctgttgtgagaagcaatacctcaattggtgccccatgtgaggagagctgtgtgaggacagtcaggggtctgcagaaacagaccttccgcaatcggagcccctttgtaaggcaagctttgaaggaagtgtaaggaccgctttcatgaggaaagctgcaaaggaagcctgaggaatgcgacgggcccccgggaaacaaaggtgaagaaaaaccgcgtggtcaagtcagtgagtaactagtaagtcattggtgcccactcaaggttaccaagttctggggaaagttggttcaagctgagatttcatcatgggacaacagttattagcacagcagaaacattatataaaagtattacaacagc

SEQ ID NO: 30856 - DNA, 440 bp, Homo sapiens
actactatagggcgaattggagctccaccgcggtggcggccgcccgggcaggtacatcttttcttgcctcacatcacctattttcctcaatcactgcttggatttataccccttgaagtgtcaacattataatctgtgcatcaggctctgctttccagcagatgcagcctaggatactcaggctaaaatccattatacctagtaggacaatgttaatgttttctcctttaatctcttagatattaatatggtgacagatagatagatagatattgatacacaaatctatctttcacttcttcattcctgaaataaattcttctcgtattttttaaaacactagatttttttatatgttagcattttatttaggaattattcatttatggtcttaaataagatcagtcattagaattattttactgtcagtatccggtttc

SEQ ID NO: 30857 - DNA, 154 bp, Homo sapiens
ggagcttcaccgcggaggcggccgaggtactatttttaagaaaacactgttggcatctaatatatagaaatgtatacattttgaaagtgtaatgtttggctttgaaactcttctcccagttattgagtagcaccaattcagaagcaacccatca

SEQ ID NO: 30858 - DNA, 207 bp, Homo sapiens
tacgactcactatagggcgaattggagctccaccgcggtggcggccgaggtacaattgaagtatgtgcagtttattgcatgtaaataaaccttttaaaaattaaccgatacaagttgacttacatgaccagaaagctcttgaaaaactctcctgttttctcccctatttttattcttgcatgcaccttatagactgtgttaacacat

SEQ ID NO: 30859 - DNA, 451 bp, Homo sapiens
gtaatacgactactatagggcgaattggagctccaccgcggtggcggccgaggtactacataaactgggctctttgttctctggctttaaatcgggttcaataaatgagaagcaacaaccagggtctctctggactcccacaactactctctccctttgcccttgctgggccaaatatggtgcaacttcctatcattgctagtccctaggtgctgcactattccttgctggattcccgtaacccttcccataccattgtaaatacctgcttcattacactctttgacctaattaagagtgttacttgtttcctatcaggatactaatagagagggacacctaactcagtctggggaagcctgggaagaattctcagaggagatgatgcttcagctacgttttttgtttgtttgttttttgagactgagtctcaatctgtggcccaggctgg

SEQ ID NO: 30860 - DNA, 445 bp, Homo sapiens
gggagtcacgtgtaagacgtgttttggcgaattggagctccaccgcggtggcggccgaggtacttagcagctgtgtgacctagagcacagtgctttgagtttttgagtcttagcttctgtgtctataaaatggggttcacacaactcaccttacagggctgtgagattagattacacagaaaatatattttttggctgtgggggctggaaaatgttctggattaacatttgaaatcccatcctgtgggtgagaaaaccccaccttatgacttggtgggaaacaaagccaacctcccactgatgaagctgaaagtagcagaaccttgcttctactgcctcccttgcagctggaggcaggcacaggactagcctgtcaattggatgcaaatgctccaggccttgaatcacaacctggtgacttgcacccaagtctattactattgtc

SEQ ID NO: 30861 - DNA, 473 bp, Homo sapiens
ctactatagggcgaattggaagctccaccgcggtggcggccgcccgggcaggtacagcagaactgcatggatcaggtaagtgtgctgagctgtggatcctcctaattcctgagctgggtgtgtagagacaagagcaggagactaggggctgatgatcttttagtcacatccatttaccccagagtgctctatacaaatagcatttttatgtattccccggcatgaaaaagctggaaagcaccaagagaaggttggtgttaaacaacatgaagttttggaatctcagaaagtctgaatgagttaatttttttgagctttagcatacttatcattttataatgaggataattccttaaagcaattctgtccaatagaactttgagatgatagaaatgttctgtatctgagctgtccaatggtgtagccactagtcacatgtggcttttcagcatttaaaaaatggctagtaaggt

SEQ ID NO: 30862 - DNA, 429 bp, Homo sapiens
atacactactatagggcgaattggagctccaccgcggtggcggccgaggtaccagctgctaagcatacaaagattcaaggttaaaaaaatcctctcttcattcaaaaagttcagcgtctagtaggatgaataaatgaatgaatgaataaaccaagtgaaacactgccaagtgctattgtttagatctaaaccaaagcctgcagagggaacagtggactctacctgggaagattaagaagatcttacccaagtggggacagggaacaaggtctcaaggtgtgagatgtcttccaggtgaagaagcgagagagggccattctaggcaaggagaaccccagagatgggtcaaacaagaggttggaagtaagtaggaaaaaatagtgaagggtgaaaagatatctgtcattttaaaatattaataaaagacag

SEQ ID NO: 30863 - DNA, 444 bp, Homo sapiens
gactactatagggcgatttggagctccaccgcggtggcggccgaggtacatgagtctcttttttttaagaattttaattttcctagtttcttatctttttaatgattattctttaagtggtatagctccattctccaagacatttaagacatgcgcttttaagagcagctgaaaattattggttgtttactatgggttttatccatttgtatactgtttttttttctcagctatcttcaaaatagccataggaggtagattccattattattttactctaaaaagagaaaactgagttttaaagtgttaaagtggcaggaccaagatgaagatacgaggtgaaagtaactaaaggttgttagcataacaattcaaccaaagatgcaattgaaacaatatgtctttgctgtcatgtctagacaatgagatggccagattgcaggc

SEQ ID NO: 30864 - DNA, 430 bp, Homo sapiens
ctatagggcgaattggagctccaccgcggtggcggccgcccgggcaggtacgcggggtaatctcagttacttgggaggctgaggcagaactgcttgatcccgggaagtggaggttgcagtgagccaaggtcgcaccactgaactctagcctgggcaacagagtgagactcagtctcaaaaaataaaaaatagaacgactgacaggccatcttccaatgttctgatctcccctgactctgtgggtccaacaggaccattctgagcaggtcgcagtcctgggcctggacaagtttgactggtcccatgccagttttttctctgcttttactcaatgccccaatgcccctcaagttgcctttgggtgaattcaacccaaaatgggctgatgagcaactgtccctgaaacatgggcacttgttattctcctggt

SEQ ID NO: 30865 - DNA, 456 bp, Homo sapiens
agggcgaattggagctccaccgcggtggcggccgaggtacttttttttttttttttttttttttagatggagtcttgctctgtcaccagcctggtgtataatggtgctatctcagctcactgcaacatctgacatccttgttcaagcaattctcctgcctcagcctcccaaagtgctgggtttacaggcgtgagccaccgcgcccagccaactttttgcttttatatgtctttcagtaagggtctgttgctagtaaacttagtcctgattggtgtgaaaatatatcttaaaccccacacttgaattaatttcaggtgcagggttattttccatcagcattttgacactattatgccatcatctattattactaagccattgttctaaatataaagttggtggtgagagtgcctgcttttctttcacggataacctgcttttctctctggtatcatt

SEQ ID NO: 30866 - DNA, 436 bp, Homo sapiens
tacgactcactatagggcgaattggagctccaccgcggtggcggccgaggtacctttagtccttctttttgcctggaacatggactcaggaggtggaagagccaggatgtgttcatgagaacatgcagtgacacgccaaggagagcagaacaagactctagaaggctcccaagcctgtgatgaattgtaagtgcatgtttattagcccaggacctcttcctctggagttgttccatgagaaaaacagtatctcttttggttaaaccactctagggtttctgtggcaaggagaatgtcatcgctaattgacacaactcaggttttgtcttttatttttatattcaacaaatattagcacatatgcctgtagctatgtgccagtaactacgacagatactaaaagacagtcctacctcgaggcacttgtggtctggta

SEQ ID NO: 30867 - DNA, 416 bp, Homo sapiens
  misc_feature 322: n = A,T,C or G
agggcgacttggagctccttcgcggtggcggccgcccgggcaggtacaagatttcttagggcgaatccaattccatcaatacttggggaaacacaaaaacctggtgcagctggaaggctgctgcactgaaaagctgccactctatatggtgttggaggatgtggcccagggggacctgctcggctttctctggacctgtcggcgggatgtgatgactatggatggtcttctctatgatctcacagaaaaacaagtatatcacatcggaaagcaggtccttttggcgctggaattcctgcaggagaagcatttgttccatggnggatgtggcagccaggaatattctgatgcaaagtgatctcactgctaagctctgtggattaggcctggcttatgaagtttacacccgaggggcc

SEQ ID NO: 30868 - DNA, 603 bp, Homo sapiens
  misc_feature 21: n = A,T,C or G
gcgcgtatacgactactatanggcgaattggagctccaccgcggtggcggccgcccgggcaggtactaactctaccactcttattctactgattctattactgctattaataattctattattactgattctccttgttattaggcaatattgataaaaagggggcggaaatgacacacacaattacttctttttcgagcacaaatacatatggacccttctgggtgctttccttataaaatgaaatggacctatccattttaggtgtgacatctacttttaaaattaaaaaaaaaaaaactatacacatgtttcagaaaagtttgtaactgtcacagttataatgcaacttgtttagtccatcagtataaatatactttttttggtcaaaaatctctggatggaaaaatgtgtgaattattcttaaaactgtgccttacaacgtggtagaaaattaagccaaaacacaagacagaatgaccaaaaccaccagatgttttcatagaatgcagacattgctctaatgaatttcatccctatggaaaatcccacccgattttataaggttcataatgtgtttccttaaagaatggaaacattatt

SEQ ID NO: 30869 - DNA, 413 bp, Homo sapiens
cactactatagggcgaattggagctccaccgcggtggcggccgaggtactttgggcttgatcattttaagtttcaattgcaaaaaaaaatttttgacggagtgttgctctgtcactcaggttggagtgcagtggtgcgatctcagctcactgcaacttccacctcccaggttcaagcgattcttatgcctcagtctcctgagctaaattttttttttttttgtatttttagtagagacagggtttcaccatgttggtcaggcgggtctcgaactcctgacctcgtgatccacctgcctcggccttccaaagtgctgggattacaagtttgagccactgcacctggctaacttgccctattttaaagtcaagcaatgggaagaataacaagattatatagtaatcagtttcatg

SEQ ID NO: 30870 - DNA, 648 bp, Homo sapiens
ctcactatagggcgaattggagctccaccgcggtggcggccgacgtacagaactagctagctagctcattggtttagatacgggtgccggtgaaggtttgtggcttaggaggtagattagatatttatttccattggactgaggcttaagctcagtttaatgctcatggatatggataacttattttgattcacctccagaaattgtcgttaagcaatttgtgtttgtgcaagtgttaccatctctcacaaaggatatgagtttctgaacactgatattttatagtttctgtatcattatactttgcaagattttggtcaaaaagaccaaaagctttatgtcaaaatgggaaagtagtgataataaaaagttactcagtatctttttctttgcattaattcccatgaatggattaaactaagagattaaccatacttaggggaaatgcaaacttttttctgttttcttttttttgagacagtgttgctctgttccgcatgagtgcagtggtgcagtcatggttctctcacctcctgagctcaacctgtctttccatctcagctttccttgctcttttaatttacgaaaatgttcctgtccatagccactcctgggacaagaataaacattgctttgttgaaatagtgt

SEQ ID NO: 30871 - DNA, 400 bp, Homo sapiens
atacgactcactatagggcgaattggagctccaccgcggtggcggccgcccgggcaggtacttttatctgacagaggcttcatttttctcaaatattcctttgaatcaaagacatccatcatattaaaaagagtaaaatcatttcagggaggattgctagaggatacagagggcagggatttagccttccaggtgacctctgctggggtcccaaggggtgggacagggtttttagtcactaatttaaaagtataaaaaggtttccaatgctttataagttaacaaacccatatcctgagaattcaaagaatactgaatggcaacattataaatagtaacatttgctattaaaaaaggcagtaagactctagctacctgaaaccaaaataagcagttaagg

SEQ ID NO: 30872 - DNA, 464 bp, Homo sapiens
acgactcactatagggcgaattggagctccaccgcggtggcggccgaggtacattcagggtcttcaatcttaagcttgccattatctcctcaaaataataaccaagtgatgcttactaggtattcaaattgagctgtcaccagaagtcttgttgaatattttctcacttccctaagcaagttgaaccaagcaggacagatatggagaatggatgattgctgatcacccaggtcattattgaagggcaaattgaaatgggttggtgcttgctaagaaggtagaagaggccgggcacagtggctcacggctgtaatcccagcattttgggaggccagggcgagtggagcacttgagttcagctcaagaccagcatggccaacatggtgaaaccctatctctactaaaaatacaaaaaattagctggacgttagtggcacgcccctctagtcccagctacttggaag

SEQ ID NO: 30873 - DNA, 473 bp, Homo sapiens
ctactatagggcgaattggagctccaccgcggtggcggccgaggtactcaaagtcaaatcatttatattttcatcatgtattattttcaccttaaatttcaaataaactacagtgaatgaaatatgtatctattatttacaaattaatttttactttgctatacttcccccaaattcagaaagccaaattaagatactgtttctttgtaaagtaatgcttaatacgccgttatcttctaaatatagtatggctttacagactaaactggttttaaaaaattctttgcatcttatctcatataagccttagagttaacaaagtcatttcccctttttaaaataaatttagtgacacaaagtttgcatgagcaaaaaagttattaccttacgtgaatgtcttacaaattgctctcttatcaacaggagacaatttcaaaatgtcattcttaaaatattaacttgctggctgggcg

SEQ ID NO: 30874 - DNA, 405 bp, Homo sapiens
ggcgaattggagctccaccgcggtggcggccgcccgggcaggtacttcaaaactattcataagcaaaaatcagtgtcaaaaatatttagtaacttaaaaaaaacaaaaagtataagtagagacggacaagaactcctcctgctttctcccactgggctcatcgtatttctgttccattacataagagactaaaactgacaaactctgttttatcgctaacacctaaaagcaataaatgtgatttgttaccatattatgataaaatttaaccaaaaaattttaaagatcggatattctgcagtttacagtgacatttatgtatatatgcctaaaagctacatataaaccttgaattcatttaaaattatttccaaagaataaatgaaggctgcttttgaagtgcca

SEQ ID NO: 30875 - DNA, 434 bp, Homo sapiens
ctactatagggcgaattggagctccaccgcggtggcggccgcccgggcaggtacctgctaagaatattttcagctacgagtatcagaaaactagcctagaggatcttaaacaaatagggtttttcacatgtaacaagaagtttctggtttgcgtcagctgctccatatcaccaccaggagcccagattctttcttaccttttttctcccctccctagagagctttctgcatttttgtgttcatggttgttgccccctggacacagaatttgacagaattgccaaatgtatcaacattttaggcaggaaaaatcgtaacgggcagaaggctgtatcatccatgtctgaaatccttttttagaggacaaaattttgtccctacaacactgctcagttgatttctgcttatatctcaatggccatttaatggccagt

SEQ ID NO: 30876 - DNA, 436 bp, Homo sapiens
tacactactatagggcgaattggagctccaccgcggtggcggccgcccgggcaggtacatcttgagccagttgtcacagctctgtgttaaagaacccaactaatggttcctagtttttaagaaggttaaggactaactagtctctagaccattatgagattaagataatcctgaaataaataataccgaagaagtaacctttttaagaacatacagcccagaaatgactgttagaattctcgcctcagatgctattcatagcttataagtagccttgctcttctcaccatgaggatttccataacattatttttaaagtcaggcacttctaaaacaccatgtgtgaaaacaccctaggccaatgcatgtaagaaaaatgtggaaccatatttgatcatcagacttacatcacgtggagtgggcttctctctttctc

SEQ ID NO: 30877 - DNA, 422 bp, Homo sapiens
tacactactatagggcgaattggagctccaccgcggtgggcggccgaggtccccgggtgctgagtaaagtctataaagagcagttgagaatccatggccagaaaataggttagagacaaaactggtgttggaacctacacgtcttgtcttgtaattcaggagcctcatcaagtcaccttgaagtctaccttggataagataacacaagacccatgacaaattgaagtgtatcacttaacaatgcctgtgaaaaagactttctctttagtaaccagaacacttttacagcaagagattttatttcagatgttcataattatttataaaagagacaactacataaccacttgctttgttaacagtggacagtgagacatcttgaagaggaagttgttggtctctttagattgggcagtctaaac

SEQ ID NO: 30878 - DNA, 424 bp, Homo sapiens
ctatagggcgaattggagctccaccgcggtggcggccgaggtacatttcaggctgaagaaatggcaaatcctaaggccctaaagcaggagcaaaattgacatgtttgaagaagacgagtgtgactggacctctgtgattggggggaagcggcgcaggatgaaacgagggaggtatgtaaggaccaaaacatggaaggaaagcaagatttccagaaaaagtggatgggagaggcactatccatgaatatgatccagttgtccaagaaagttaatttagcagaaagaaatggaatgttaatgttggttcagatgcagaatctaatatgtgttttattttaaataagggagagttaagcatcgttaaagacataagaaaagagaaagctgactccttttcttccagtgaccattagtaacgtattct

SEQ ID NO: 30879 - DNA, 409 bp, Homo sapiens
atacgactactatagggcgaattggagctccaccgcggtggcggccgaggtacttttttttttttttttttttttgttttgttttaactttgttgactaagatctcagaagtatctgagaacttgggctgcgcagggaatgctggtgtgggagaagcaagccaactgagctgagctgcggccctgtttgtccttagctctccaaaacttgctgtctatgtcacttggaaggaatttgattcttttctgcaaggcactgacaataccttacaacagagctgggagataaaatgcatagcttgtgaaagtcatcagaaagttgaacacagatggtccccggcttaaaacgggtcaacttgatgatttttcgacttgatgatggtgtggaacactattcacatttcagtagg

SEQ ID NO: 30880 - DNA, 324 bp, Homo sapiens
cgaattggtgctccaccgcggtggcggccgcccgggcaggacgcgggcaaatacttcaagctgttttggtgtttgattatgtcaaattttaagaaaaggcagaggatcagttcaggtattcaaaaggccaacatatccaaaaggtattcaaaaggccaagacagagctgcttttgtgtgggtcaggtagaaagtaaaggactgtatttctctgtccattgatttacaaaagaaattagtgtccattcacctttccaggcactctaataaatactacttattaagaagactttacatttaagtttgacctttttgtccaaggctt

SEQ ID NO: 30881 - DNA, 343 bp, Homo sapiens
attggagctccaccgcggtggcggccgcccgggcaggtactgggattataggcgtgagccaccgcgtctggcctctaacgagatatttctaaaggttaggccttcagtcaagaattttaaagctggatcttagaggttatctaaactaacctctccatttcatagatcaggaaagcgagtcccataaaagcactggtttggacaagttcagaaagctaaacagtgactgtggatgtatgattctgtctcttaactcctaatccaaatgtcttctcactagataaggctgtgccttctacatttgaaggctcaaaccccatggatggatggagggaaggatggt

SEQ ID NO: 30882 - DNA, 443 bp, Homo sapiens
tactatagggcgaattggagctccaccgcggtggcggccgcccgggcaggtaccgcatgcaaccagtttacatgaatctaccccagttgtcaagatggcacacccttccacctgcacattagtttcatccctgagccctacttacaggctggagccaggagagctggtggccttggaaccaaacagactgggccttgaactctggttttgatgctccccagctgttcaactatacaagcttcttaatctctctgggcctcagttcccatcatgttaggattgtctgaggattaaatgaaactgtcactgaagcacctggcacgtagcaggtgctctatccatgtggcagtcattatttttactattcagcgtctggttctgttgaggccctgcctagcccagtggctatttcatcagtctgtccctggagttgctgtgtttgt

SEQ ID NO: 30883 - DNA, 412 bp, Homo sapiens
actatagggcgaattggagctccaccgcggtggcggccgaggtaccctgagattgcatgtgcgcacgccctttctaatcttctgactttgagtgtggctggtctgtagcttttgctcattcttcctaatgaccatgggaataagggagtggggtggggggcaagaatggctgcaagtagtggggagtagttgaaggtgtgcaaaactgtgtctgcacccagcctgacccccaagagtcctgggcaggccccatggtttgggtgtgagtcctggtgagtgtttgctcaaaatctgcttgactattgatggttttttactgagtgttaaatttgattaaactcttaagtcctcctaagtgccaggaagacactctgctttctctccctcttttttctccttgattcatagtggt

SEQ ID NO: 30884 - DNA, 430 bp, Homo sapiens
gactactatagggcgaattggagctccaccgcggtggcggccgaggtacttcagttgaaaagttgaccaaagccaaaaaatgtctatctggtggtcagtagtttgataggttcaaggagttgaaagaagcctaggatggctgggacatgtagatcatagtgctaagagatggaaagcaccttgtgctatttggccgtttcagttgtgatgttttttaagtagagtgttgtgatcagaagggccctttagaaagattgtggctagaatatggagaacaaagaggagaccaccagagtggatgtgggaggccaatatgtaggttattctagtagctttgcagtgacttacacaaaggcagttttagcggacttgttcatgagttacctaagagataaaattgacaggacttgagaatgagttagatgatggg

SEQ ID NO: 30885 - DNA, 434 bp, Homo sapiens
tacgactactatagggcgaattggagctccaccgcggtggcggccgaggtacttcttaattagaatttagggctaacaagagatattataacatcaatacttgcattatatagaggaggcctttaaactactgtctagggaattcagagagccatgttcctttacaacattccttctcgtgcaattcaaagacaattgatagctagaaaatgtcaaggaaccaagattcttgaccaacttgaaaagcaagacttggataaatggcattatgagatatatttgcactaattgtttcaatttgactgaagtatgtcatctctgctagattgtaatttccacaagggctgaggcttcatgtctgcatatcaccccttatttatttctcagaaagggtcccctattacctagtgggaccctcaaaaatatttgatgga

SEQ ID NO: 30886 - DNA, 471 bp, Homo sapiens
cgactactatagggcgaattggagctccaccgcggtggcggccgaggtacgcggggtgatcaagctggaagattgaagaaggaatggggatggattggagtcagcattgtattctggtcatggtaaacttgccagtgtatataaatcatccaaatggacatggtgatgaggagttggacctgtagatctgaagcgtagagaggaaggcagagttggagatgtagatatgggagcctctggcctgtggagagagtgtatgatcaccatcctggactacacgtggagaagaaaagatgaccagcgacagagggctgggtagagccagcaaaggagacctcaaaaggatggcagacagggtgaggtaaggtcaggaatgtgtgctgtggcattactgaaacctaaagagaaaaaaatcgtgtttcaggaagaaatcaacttataaatgctgaggaagaaaggctagtagtgatt

SEQ ID NO: 30887 - DNA, 455 bp, Homo sapiens
ctactatagggcgaattggagctccaccgcggtggcggccgcccgggcaggtactttttttttttttttttttttttttgcagagatggtgtctcacttcgttgcctaggctggtctcacactcctggcctcaagctgatccttccacctcagcctcccaaagcactggggttgctggcgtgagccaccatacccagctgaaaagtgatttcttataagccaagcaatcagcctctgcagagaagacaggaccctcagcacatatctagctctgtaattcctcaactcaagttgggcattactatcacccctacattaacatgttcccattaggaatatgaccaagaccaggacagagtcacaagagaaacagtcagtggatcatgtgacacatgagatttattggtccaataaggtgaactggtcaggaaccagatctgctatgccccttggga

SEQ ID NO: 30888 - DNA, 453 bp, Homo sapiens
tatagggcgttttggagctccaccgcggtggcggccgaggtacttaatggacaggtgttttgagcagaggtttatagctcttagaactttaaatgaggcctccagtgaagttgattacaatggaatgagccaaacaaggcccgcagagttcacctccacttaataactcactaatgctgtccttcaaaagtccgaagattacagctctgaaccagagcagcacacagagggaaaacacaaggtaatctctcatctaaatgagggagtcagaggctgcaatctcagccatctaagaacttgccatccactagcaagcaggtttgtccctgaaaattcctgagcagtggacttgaaattaaacacagacccagtaaaaaatgaatatcagtaacaaataaaggggaaaacaaggtctattttccagatatagaatctaggaagtgtttaaaactc

SEQ ID NO: 30889 - DNA, 404 bp, Homo sapiens
tacgactactatagggcgaattggagctccaccgcggtggcggccgcccgggcaggtactgttttagtagcttacttgtgttttttaaagttcatttctccacccacaggatagctccatatcttccagcaccactaatgagtaagtattagggccaagctggtatctgcagagtgctgactggccaagagtctgcctgtgactcatgccttaggctgtccagcattggggtgctggggggctgtagccataacatttgcaggatttggaaattccacctcaagctccaatcccagggtgttgattctggctaaccatgtttatgcaaagcaatccaagcactttgactcactttgggaatctggcattcttgggcttttgatattgagacagtggaacacttt

SEQ ID NO: 30890 - DNA, 460 bp, Homo sapiens
gtaatactactactatagggcgaattggagctccaccgcggtggcggccgttttttgataaattttaaacttctggtttgaaacttttgtttcctgtgcttaaaaggagacagttaaaaacactctgatttggactgacagaatgttttttagatgttagatagatctagctttgaatatttatttgcagagaagtagcagggaggactaggaatgactttttcttaggaggtgctatgcattccatcaggtgactgacccctttgtgagctgtagtggtcagtcccagcatggcccacacttgttggctgtcttagccatggtggctgtggttggcgggtacctcggccgctctagaactagtggatcccccgggctgcaggaattcgatatcaagcttatcgataccgtcgacctcgagggggggcccggtacccagcttttgttccctttagtgagg

SEQ ID NO: 30891 - DNA, 327 bp, Homo sapiens
acgactcactatagggcgaattggagctccaccgcggtggcggccgaggtacgcggggacatcaatgcagagtccctctgtgaatttacaacacccaacacccatgagttcagtccttaagaaggaaaattgagcaagtatttaattggttggacattgcataaaagaggtccatatccaggctaactctagaaattttattctcaaacttagttggcctctttttcttctggcagaggaccattcttagtggcacctggggaaaatcttggcacccagaagaaattaaactggggcttactgcaaaaatacaatgggcctacattg

SEQ ID NO: 30892 - DNA, 366 bp, Homo sapiens
atacgactcactatagggcgaattggagctccaccgcggtggcggccgaggtactgggattataggcgtgagccaccgcgtctggcctctaacgagatatttctaaaggttaggccttcagtcaagaattttaaagctggatcttagaggttatctaaactaacctctccatttcatagataaggaaagtgagtcccagaaaagcactggtttggacaagttcagaaagctaaacagtgactgtggatgtatgattctgtctcttaactcctaatccaaatgtcttctcactagataaggctgtgccttctacatttgaaggctcaaaccccatggatggatggagggaaggatgggtggagggat

SEQ ID NO: 30893 - DNA, 410 bp, Homo sapiens
gcgaattggagctccaccgcggtggcggccgaggtacatacttcagaggctagttggcgggagtcactaagttaatccatgcacagtgttcagcccagtgcctggcacacagtgggtgctcaaacaacagcttctctccctgcatgttggtcattagggtcacaggctctgaagtcaggctcctagggtaatatcctgtccctatcactttcaattgtaggaagatgggcacattacatacccccataagctttaattttcttactataaaacagagataataattgtatctaccttatgggttattgcaagcagcacatacagtcacccaaataaagtatataagagtatcttgtaagttcccagtaagtgctcactcctatgaatttggtggttccccatttgaattc

SEQ ID NO: 30894 - DNA, 453 bp, Homo sapiens
acgactactatagggcgaattggagctccaccgcggtggcggccgcccgggcaggacagctaagaacacagggttgcctctaatctcagctccaggtcagagtgctattctcctaggaagggcaggacattagcatttctcatgctgctcctagctacttgttctgaggttaaattctgtgtaagtataattgagaaatgaaagctccttccttcccacccccacaacctcaagccccccatgcatggaacagagactctaactccttgagcataactgcactagaatattggagcctgtctttcccttggcttgtaaggtagagattccaggctaagagaggcaagcttataaggcctgaagctactgcctgtgcccttctattcagtattcagcttccaaaacagtggaactgctactcagagagggaaatgcacattatccctatgccca

SEQ ID NO: 30895 - DNA, 432 bp, Homo sapiens
tacgactactatagggcgaattggagctccaccgcggtggcggccgaggtactggttcatgtgtaactcatacatcccacaagcatctactgtgtgcagaatgtctcgtatgtgaaagacactgtgggcatataactgtggcttagatgggcttctaacccctgagaagataatatatcagcagaaaaaaaggaacatgtatatgaactgccatcacacaacctatccagaattccacaagaaaagtatggtcaaagagctaggaggtgttgaaggaaagattacctgcaggagaggcaatgcgagatgatagaagattctgagctatagagcgaggcggacccagatgggaatttcaggttttctcgggatgtgggaccctaaccaagcttcttatactttccaagcatccattttctcattttaaaaaag

SEQ ID NO: 30896 - DNA, 590 bp, Homo sapiens
  misc_feature 443: n = A,T,C or G
tacgactactatagggcgaattggagctccaccgcggtggcggccgcccgggcaggtactagacaacagctgtttccctggtgtatgatggagccaacaccagtcaggggtatattattacatctgattatcagtcaggataaggtaggcaattctctggtaacaaaccatcctcaaatctcagtgcttatataggcactatttcttgctccactagatggttcatacttgctcacactacccatcatgggtcgttaggagatctctgcttatggtcactcaggaattcatctgacaaaggagccaccaccttgaatatcatgggtcactgtgcctcgagggactgaggcagctctctctgtgagattgctgatatgcaactgggcttggcctctttattcttcttggaccgacttgacttctcactttcctgtttctcctgngaacactcgtaaggaatggctcagtgaatttccttctcaaggtcggcatatggtgtgctggtcctggacctgtttgcactcagatccatccttctgctctgccttgttctggggtgaagaagttgatcctcggcagggtgacttttt

SEQ ID NO: 30897 - DNA, 431 bp, Homo sapiens
  misc_feature 376, 390, 391, 402, 403, 404, 421, 422, 423: n = A,T,C or G
acactactatagggcgaattggagctccaccgcggtgggcggccgaggtccaaaactggtctgggatgcaaaaacattatagcacaattgatgagagagaatttactaaaaaattaataaattgatcaaagaaatgggattcctgtgcttcttcctattagtattacaaagtttgacctcatgacttctgcttggaaatactcaaactcccaaatccagtgcttactgactcagtttacctggctgtgtttcttttgtaggctcttattggcgggaggcagtgggaggtggtgttaatgctaccctgaacatacagaggactttctaaaacactgtctcctgtgatgccacccagcaggcaggaagaagtgtccantttgtaatcattanntttctattttnnncagatgaagaagacctnnngggctcca

SEQ ID NO: 30898 - DNA, 363 bp, Homo sapiens
gtatacgactcactatagggcgaattggagctccaccgcggtggcggccgcccgggcagtatttggttttcaaaagaatcttatggagagcatttttgaaagtagatgtttggaaatctttccaacattatgtgatttttgtctctaaaaatgatgtatattgcttataaaaactcatatctgcacacttatcttagaaactgaaattcctaacctcttttagaaatcttccaaatggagaggttgagttttaaatatattgaggaattctaaggaggacagtggcgcagttctggcttacttaaggcgtgcgaagggaagagagtcagcagagctcgtccagaggcagcaagcctcatatgc

SEQ ID NO: 30899 - DNA, 451 bp, Homo sapiens
gcgtaatacgactcactatagggcgaattggagctccaccgcggtggcggccgcccgggcaggactattcttagccactgttttattacaaataaaaccttcacaggaaacagaaggttagaagaatctgaaaatcattctttcccttataattcttgacttttagatgataaatccagtttttctagcagtatgttaaaattagaagattcatctgaatatatttaggcttaaaacaaactttattcacaaaacacagctatatctatataaaaaaagctaacttcacctcaaaataattcagattatattcttttttttttcctgtttctccttcccttttttttcctttttttttaaagtgatggggtctcactctgttgcccaggctggacttgaattcctggtcttgagggatcctcctgcctctgcctcctaagtagctgggact

SEQ ID NO: 30900 - DNA, 402 bp, Homo sapiens
acgactcactatagggcgaattggagctccaccgcggtggcggccgaggtactaagttgccatttaagaacctcttcaggttccccgtctccttgagctatgaaagttttcatgaacacttcagttttaatggcatgccaaacattttgttccatgagcaacgcaacagttttaaaaattgccattgagtgttttaatagaatttagccagttgtttttaaatatatttctatgagccaaggcttacaaaaatgtataaagaggaagtgcccagatataaagaagctttgaaatggttgctgttgcctccttaaaaatcatcattaaacaatctttcaaacagtcagtgtttggctcagtaatttaatcaaaatttgtaagaagtagcttgaatgaacaaaa

SEQ ID NO: 30901 - DNA, 433 bp, Homo sapiens
tatacactactatagggcgaattggagctccaccgcggtggcggccgcccgggcaggtacatgcatcaggccatggtgaccaattgtctgtggagggtgaggcagaaggaattgttgaggatgactgaggtgtctgggtaacgctttcaactgaaactgggaaaggggatcaactgaaactgggaaagggtttggtgtggcaggtataagtaatgagttcaagttgtatattctgagatggaagtgtcatgaggacattcaggtggagaaatcctgtaggacactggaaacggatccagagttcacagaagtcaggataaaggttagggctcattagcatctgggtgatgaacgaaggcttggagagaatggggtcccttatggggagtgtgattaaggacaaccggccgaaaatagaaacctgaagcaagga

SEQ ID NO: 30902 - DNA, 367 bp, Homo sapiens
atacgactactatagggcgaattggagctccaccgcggtggcggccgaggtacataaatatgaatatattctaccagatgtcaatcacagggaggaactagatagagacccaaactatgaacacttatttagtatcctttgggttgaagtttgggcagaaaaagggtgaaaggagatactgtcttttgatacaaatgcttctgtttgcttgaatctcttgcgtgcaaatgtagccatgtatcatttcagtaattaaacatagaaaaagcaaaacaagccgaactggtgctttgttttttgaacctggagttaagaaggtaagaaagaagcattgtcagtatctgcattccaagcttgttccaaagaa

SEQ ID NO: 30903 - DNA, 404 bp, Homo sapiens
tactatagggcgaattggagctccaccgcggtggcggccgaggtacaaatagactcgatcctcaaagactgaacaacttggaatcttcacaatcctgggatcatttgttagagcacttgttcttaaataatgtaacaatgatgcagttctcaacatgaaagtctgtgaattttagcaaaagaaatggagaggcttctggggttctgaattccataactcacagctctgaaggcgagactactgaaacattccaagtagagaaaggtcactagcaatatcagggtggtcccttgtaaaaggcccacaggctggcttccaagaggacttatacggtgacatttattatcttgatgatttaccagtctggctcttagcttttcaggttcagaaaccgatttaatcaa

SEQ ID NO: 30904 - DNA, 456 bp, Homo sapiens
  misc_feature 273, 368, 390: n = A,T,C or G
ccggctgggtcccgcactcttgattcccttgcattcaatgccttaccactctacaactgtcttctaacagagctctattccttaatcaccagtgtaatctatccaccttctgcatccctgtcactgagtagctgggtgaattctgggaaaaacaaatgctcagagttgtcttcccaaaacccagctgagctcccaacacaccttccaatccctctcagtttcttcagcaatcatcataccctaataccatgaaattcactatgcacaactctntcccctaactgcagcccaagaaaagctgaaaaactcaaaatcctgttatagcttcccactaacctcatctatatccacatctttccagacctctntcctgtcaggttcagaggattnttcctctgcttgctctttattctatccctagggagaccctctgcacctctgctcatccccgcgtac

SEQ ID NO: 30905 - DNA, 451 bp, Homo sapiens
gcgcgtatacgactactataggggcgaattggagctccaccgcggtggcggccgaggtacatttgttgggggcgtgacattaacatataaccacttagagtggacatgcagttagagaaaagtcaatgagctgaaaccaaactgggaattccaacatgtagaagttaaacacaagaggaggagccagcaaggaaacagaaacagagcttccagcaggtggggggcatttggaagaaaacgatgccatagaagccaagatgaaatagacatcaaggagaaggaagtagtcaattgttttgaatgctatgaagaaagataagaataggtaaatagtccttatatttgataacagaggtcactagtgatcttgatgaggggtttcaatagaatggtgggattatatacctccctggattcaactgaggtaaggaaggcatacagaatagagaca

SEQ ID NO: 30906 - DNA, 203 bp, Homo sapiens
ctcactatagggcgaattggagctccaccgcggtggcggccgaggtacgggttaacatttaaagaatctacattatagataacattttattgcaagtaaatgtatttcaaaatttgttattggttttgtatgagattattctcagcctacttcattatcaagctatattattttattaattgtagtttgatgatccttacagc

SEQ ID NO: 30907 - DNA, 419 bp, Homo sapiens
tactatagggcgaattggagctccaccgcggtggcggccgcccgggcaggtacgatcttggctcactgcaacctctccctcccgggttcaagtgattctcgtgcctcagcctcttgagtagctgggattacaggcgcgtgccactgcgtccggctaatttttgtatttttagtagagatggggtctcaccatgttggccaggctgatctcaaactcctgacctcatgtggtccacccaccttggcctcccaaagtgctgggattacaggcgtgagccaccacgctcagcctacaagcaattttttaaaaactgacacctattactgataaaattctctgtttaaaatcctatttactattttaaagataagtattagtttttttaaatacaataattctgttattgataaaatttaagg

SEQ ID NO: 30908 - DNA, 444 bp, Homo sapiens
cactactatagggcgaattggagctccaccgcggtggcggccgaggtacaagtgctgtatgaacatgtgggaatagtatcatcacacaactatctgtcctttttgctgaaagttctgaaatctccacctaagaatgttggaaaatggatataatgtgtaggctaaatgtgttgtatccaaagttgtgtaaggcagtggttttcaaaacttttaatagaagcaagtaaattaggatctctttggattcttattaaaatgttgatttctgggctccacaccttagatcatcttcattagaacctctcagacccgaatatgtgtattttacgtgaccctatggtttcctgtgcaaaccaaagccagagactcactgctgcaggggagtcaagcttttggttcttccttcctagtcactcaaggactagaaaagcagctctagtatta

SEQ ID NO: 30909 - DNA, 323 bp, Homo sapiens
atacgactcactatagggctaattggagctccaccgcggtggcggccgaggtactatgaaggaaaagtatgctaaaaaatatataacagaggcaccagatgggaggagagaagtgggtggtggatggaggtgagggtgggctgcccaggctagaaggacattccaggctgctaaagcatcatgtgcaaacgccctgggctggtaaggccccagtcacactcaaggaacataacggcggctagtgtgggttagaatggcaggaaaggaggtcagatcacaggggaccttataagccttggtaaagcatctgaaaatttgcattc

SEQ ID NO: 30910 - DNA, 462 bp, Homo sapiens
tatagggcgaattggagctccaccgcggtggcggccgaggtacatgagatgggagctcgacacattttatttggagaataaaagaaaatatgccgtcatcaaactagagcgtgttggggggcatctggtttacagaactaagtcaaggagaagaactctcaagcaatggtgacatctgccagctctgcaaagtgggccctgccttgtcacacaagtctccttgggcaaatgttttctatgtagattttagacactttcctgtgactttctcaaggtcttttggtgacacatgcagcttgaagcttttgcaaggggctggagtctaatctcttcttgcccagcttggctgcaggagaagaagggagatatgttaggacttggctttgactgaggtggtgtagcctggggttgcaagggctgttgccaaggctttctggtggcatcacatgcttcaggagttgg

SEQ ID NO: 30911 - DNA, 455 bp, Homo sapiens
gcgaattggagctccaccgcggtggcggccgcccgggcaggtacagaaaacagagtctgttgctgctattgttgtcacttcccttggagaggacatgtaaggccagcagggagccaggctcaaagacaaagaatagatgcagagagaactgggtttacagtcttccctggttccctcagggctgcgcttgaagctccctaaatcccagagcacgagagctatacgttcttccagctgtcagtccagatagagaatacctgcagctaaggagctatgggacttccattcagcctggcctggttaacacatggaactggcctgagtaaatgccctttgtgttcagctacaggaaacccctatgtcttatggaaaagctgctcaagctgagcatccttcaattcctgctcaaaggcagcagaaacaaagatatgtgcatgtggaagaatagagcattt

SEQ ID NO: 30912 - DNA, 405 bp, Homo sapiens
  misc_feature 379: n = A,T,C or G
ctatagggcgaattggagctccaccgcggtggcggccgaggtacttgcaggtggtttggcctggaaaatctagatgagtggtttttaaatttagttgcttattagactcaagaaagaaatttaaaaaacaatactgattactgagaccagcttttctagattcttcattcagtaggagtaaggaaaggccaatgaatgtgtattgataaaaaggttcctggccgggtgcggtggctcacgcctgtaatcccagcactttgggaggccgaggcaggtggatcacctgaggtcaggagttcaagaccagcctggccaacatgtgtgaaaccccatctctactaaaaatagaaaaattagttcacgttgtgggtggcagggngcctgttaatctcagctacttgggga

SEQ ID NO: 30913 - DNA, 186 bp, Homo sapiens
cgactcactatagggcgaattggagctccaccgcggtggcggccgcccgggcaggtacgcgggaaggacagattctcagtcttgaagaggcagcacggtaaaggggaaagatcatgagttttggggccaggttcccttggatattgtggggtccccacacttctggatgatgttggataacctctt

SEQ ID NO: 30914 - DNA, 450 bp, Homo sapiens
tacgactcctatagggcgaattggagctccaccgcggtggcggccgcccgggcaggtacgtataacaacatgaattcatctcaaagacattatgttgaagccagatttgacataactcattctttgtcattccatttatgtgaactttgggaatagtcaaaacttagctatggtgacagcagtcagggcagtaattatctatcgagtgtggagattgactgaaaagggcacaggagaactttctgaaataataaaaatgtcctatatcttgttttgcatcgtagttacacaggtgtagacagttgctaaaacgctaaaaactaaatgtgtaagatttatgcattttagtgtatttaaattataacccccagaaagcattgccttattttttctggagggtaaatatgctcgttaggagcataaggggatgattttgagaaaacccttgct

SEQ ID NO: 30915 - DNA, 349 bp, Homo sapiens
  misc_feature 329, 330: n = A,T,C or G
tacgactcactatagggcgaattggagctccaccgcggtggcggccgaggtacatttgttggggacgtgacattaacatataaccacttagagtggacgtgcagttagagaaaagtcaatgagctggaaccaagctgggaattccaacatgtagaagttaaacacaagaggaggagccagcaaaggaaacagaaacaggggcttccagcaggtggggggcatttggaagaaaacgatgccatagaagccaagatgaaatagacatcaaggagaaggaagtaagtcaattgtttttgaatgcttatgaaggaaagaataagaaaatagtnntaaatagttccttaatatt

SEQ ID NO: 30916 - DNA, 384 bp, Homo sapiens
tacactactatagggcgaattggagctccaccgcggtggcggccgcccgggcaggtactttcacttttgtgaataattttattttccaaccatggaagcatcatcgtgaggttgaaagaggatcattcttggaaaatacaattacttaacagttatgtgacctgggacaagttgagcctaaatgtcctcatcataaaatggaactaagtaaccctcataagaatgacgtagtgtatggacactgtttggcccagagtaggcagtgaaaaaattgtggccattctggaataatcttatagtctctatggtggggagatctgaaagccgttttctttccccttcccattttgtgtacgtatctgcctccactgatctgcacaggga

SEQ ID NO: 30917 - DNA, 410 bp, Homo sapiens
gcgaattggagctccaccgcggtggcggccgaggtacaccaagaaccatcaccgattctgttgacggaacatgaagcagttacacggggcttaggcaggaagagcacctgaggacagatcatgacttgcagacactgaatttcaaaaaatattggtgatgtgggatcagatttgttttaggaagatgacccctggggctgggtcttgtggagggacagaattcctggggacacaagtgaaggttaggagaccagttggggaatatgcgggcgcagaagtttcggtgagatacaaagagcccacggtcaagaatttatgtcatcaggaggtgaacgagggaggacgggggtcctcccactggatgtgggccaggggaagaggatgaggaattcataggagtccaagacaat

SEQ ID NO: 30918 - DNA, 448 bp, Homo sapiens
tacgactactatagggcgaattggagctccaccgcggtggcggccgaggtacccctcgtttggggttccaaaaaagagtcctctcactttaaaaaattaattaattaattaaaaaggcccagcctagaaactggaaggaaagaattctcatgtaatgtgtgtctatgatatgccaagcatagcagtgctctatttatatcatttatttaactcttatagtaaacccctgttttacagatgcaggggacgtaacttagtaggaagttacttatgcacagtataagtaggaaccaggaagagatggaacggaaattcaaattcaggtcagcctggcactaaaattcccatgtccttttctagtagattcctttacctctctcagagaatccttcaaaattcaaacctcaaaagtagattcatttggttctcctacataagcaatatcggg

SEQ ID NO: 30919 - DNA, 380 bp, Homo sapiens
  misc_feature 342, 353: n = A,T,C or G
tactatagggcgaattggagctccaccgcggtggcggccgaggtacttttttttttttttttttttttttgagacagggtttcaccgtgttagccaggatggtctcgatctcctgacctcttgatccgcccacctcggcctcccaaagtgctgggattacaggcgtgagccacccatccggcctaacgagacttatttttactcaactagatggcgttcattcatttgcttactcagctgtgccaggaattaagttgggcactgggaattccaaaaccaacaagacattctctgtcatcagggaactcacagcctagtatgagagataaacaaatgaacatngaaattataanttcagtaacaaagaatatgagtgttat

SEQ ID NO: 30920 - DNA, 191 bp, Homo sapiens
cactatagggcgaattggagctccaccgcggtggcggccgaggtaccctataattttttaaaaatctcgcccctcattactcctccacctgacatccttttagacaaaggctcaaagtcaattatgcagacaatggcacctttctcttctgtagctgacaacccggctcttgccttctgcaacccaaaaaa

SEQ ID NO: 30921 - DNA, 425 bp, Homo sapiens
tacgactcactatagggcgaattggagctccaccgcggtggcggccgcccgggcaggtacctaacaaagaccccaatatatgaagcacaaatggcagaatggtagaagtagaaaattctcaatgtgaactgctgactttaatataccaactagacctaacggacaaattcagaaacacctaatcaaaaaccttgaaatgagcaaaaattgattgcattttcacattgttttcaagcaagcaatttaaccaccttgctattttatggcatgcttattttttaaaaaaaagttatgatgaaatatgcataacatcatactcagtacaaagtttctggtatatttataattatgcaactatagccatggtataactttaaaatatttccactatcaggactagacaatcattactgatttccctttta

SEQ ID NO: 30922 - DNA, 422 bp, Homo sapiens
agcgcgcgtaatacgactcactatagggcgaattggagctccaccgcggtggcggccgaggtacccattcttaccagggagagctgggtgcaattaaagtttttcctgttaggtgcaagactttttgaatgactcatcatagttcctgcttaagacgtgtcaaagaggcccaaggctatatttaggaacttactatgaaattgcctgtcagttccaaccaatttttccaatatagtatatatgaagagttagtagcaagtaactttaaatacatgaaaaggtttttgttgtcattttttgttgttgctgtaaactggtattgaagattttcttaaacggatggacattcctttcattgtgaaatgatttaacacccattcagcatacacatgactatactggaatgaccctcatatgaccat

SEQ ID NO: 30923 - DNA, 393 bp, Homo sapiens
gcggccgcccgggcaggttcacttggaaaggattaaaaccttaattttattcattagaaatggattaactacctgttacttaatataaaaaggatttacaatgttattcacaatgatatgcaatacttgaaaattgaaaataggcctggccgcctgtaatcccagcactttgggaggctgaggggagtgcatctcttgagctcagaagttaaaggccagcctaagaaatatggtgacgatccgtctctacaaaaaatacaagaagtagccgggcatggtggcgcacgcctgtagtcccagctacttggaggcggaggtgggctggtctcttgagcccaggaggcagaggttgcagtgagctgagatcctgccactgacctctagtctgggtga

SEQ ID NO: 30924 - DNA, 416 bp, Homo sapiens
tatagcggcgaattggagctccaccgcggtggcggccgaggtactttttttttttttttttcttttttttttatttttagttgagacagggtttcaccgtgttagccaggatggtctcgatctcctgacctcttgatccgcccacctcggcctcccaaagtgctgggattacaggcgtgagccacccatccgggctaacaagacttatttttactcaactagaaggcgttcattcatttgcttactcagctgtgccaggaattaagttgggcactgggaattccaaaaccaacaagacattctctgtcatcagggaactcacagcctagtatgagagataaacaaatgaacatgaaattattaattagtaacaaagaatgagtgttatggcagagggaatgtgtaagagcttggca

SEQ ID NO: 30925 - DNA, 290 bp, Homo sapiens
tggcggccgaggtacatacttcagaggctagttggcaggagtcactaagttaatccatgcacagtgttcagcccagtgcctggcacacagtgggtgctcaaacaacagcttctctccctgcatgttggtcattagggtcacaggctctgaagtcaggctcctagggtaatattccggtccctatcacttttcaattgtaggaagatgggcaaattacatacccccataagctttaattttcttactataaaacagagataataattgtattctaccttatgggttattgc

SEQ ID NO: 30926 - DNA, 405 bp, Homo sapiens
gactcactatagggcgaattggagctccaccgcggtggcggccgaggtacctttagtccttctttttgcctggaacatggactcaggaggtggaagagccaggatgtgttcatgagaacatgcagtgacacgccaaggagagcagaacaagactctagaaggctcccaagcctgtgatgaattgtaagtgcatgtttattagcccaggacctcctcctctggagttgttccatgagaaaaacagtatctcttttggttaaaccactctagggtttctgtggcaaggagaatgtcatcgctaattgacacaactcaggttttgtcttttatttttatattcaacaaatattagcacatatgcctgtagttatgtgccagtaactacgacagatactaaaagacagc

SEQ ID NO: 30927 - DNA, 434 bp, Homo sapiens
tacgactactatagggcgaattggagctccaccgcggtggcggccgcccgggcaggtactatcttgcactttgcttcttcttcttaatgttttgactcaggcttcaccctagttaaagctcctttggcattttctccagttttatggcgccctttttttttccagttcagctggcctttgagctcctcttttgatgttcagtatgtttgtctagacagtctggccccaactctttgtcactaatttattttcgtattgtgatccatgatatacccccacaggctttaaataatttcaagaatgctgtttatagttgagcaaattataacctgcataaaggtggaaaatgagggagtaatggagaggtggggtgtggggggggactgcttgaaatccagcctggaggaaagggtgctttttctaattggtcaatg

SEQ ID NO: 30928 - DNA, 421 bp, Homo sapiens
ctatagggcgaattggagctccaccgcggtggcggccgcccgggcaggtacagatctgcgttaatttttgacagctcatatatacagatttttagaaatgtaatagaaaatgattttgcacatatggtgcaagtcttgctggtgtatgtttaatgtggcaacacgtgccagaactgtttggcaaaacatgttaaatggagtgcttgagtcagaactctaatgtaaatgtgtctaaacagcagtatgtatcattatgatgtatttttgtaaacatagtgatggctgctttcagtcatgtaagtgctggataaaaataaccacttcagttggagtaatgtaggaaaacgtcacccagcagatgggtagtcctctgcaaagttacactgtcagccagtggcactggttcttttatttatgttgg

SEQ ID NO: 30929 - DNA, 422 bp, Homo sapiens
gcggtggcggccgaggtacttctttctttctttctttctttctttctttctttctttctttctttctttccttctttctttctttccttcttgctttctttctctccttccttccttcctttctttctttcttgtcttgccaggctggagtgcagtggcacgacctcagctcactgcagcctctgcctcccaggttcaggtgattctcctgaccttaggtgatccaccctcctaggtctctcaaagtgctggaattacggtgtgagccactgcgcccggcccttagtagcatcttttaatggaggtagagttgagatttcagtgactaacaactaaaggtattaaaggtaggggtttatatgatacatttgcattttagaaaactgatctaagcttcaatgtgaagaacagattgaaatggg

SEQ ID NO: 30930 - DNA, 444 bp, Homo sapiens
attggagctccaccgcggtggcggccgcccgggcaggtacagcatggagatcaactaattgtattaaaaattattaggaagatcagttatcttttatctttactaggttaagttgatgaatttgaggaacaaagtttcttcgttattgatagtaggatggattcttgttggtttttaataatcttcttctgggattttagtagaatgttaatacaaaattgctttcatagaaccttttgaaaaaaataattctattcattggaacaccaaaggaattctaaatattcaaaattgttttaatcaaattctgttttaaaaacgactacagtggctcacacctgtaatcccaacactttgggaagccaaggcaggaggatcgcttgagctccggagttcaagacctgcttgggcaacatagcgagacaccatccctaaaatataaaa

SEQ ID NO: 30931 - DNA, 415 bp, Homo sapiens
tacgactcactatagggcgaattggagctccaccgcggtggcggccgcccgggcaggtactgcatggacaggagatgcttagatctgaggtgaggaaatccagagatgaatgttttgtttacctcatgggattgtggcattgttagccactcaatccaaccagattataatgtattaagaatttgaaacatcagccattgtggtttcacatacacagatgtatattattttgttagccgggtaatgacagtcattgtcaagtggaagatctaatcagactgaatattcattcatgccttgctttgtcaatagggaaaaaaatttcaaggacaatcggatattctctcagatgactgaacctttctttccatctacctgaaggcgaggaaaggaggagggaaggaggcttggacag

SEQ ID NO: 30932 - DNA, 174 bp, Homo sapiens
cactatagggcgaattggagctccaccgcggtggcggccgcccgggcaggtaccagcaaagatggatgtatacacatacacgagtcaatttactgtaatcctgtttcattagtgaaacacagagaaagaaaaaacaagaaaccacatgactgtccatcaacagatgatggctcg

SEQ ID NO: 30933 - DNA, 378 bp, Homo sapiens
ggcgaattggagctccaccgcggtggcggccgaggtacatttgttgggggcgtgacattaacatataaccacttagagtggacatgcagttagagaaaagtcaatgagctggaaccaagctgggaattccaacatgtagaagttaaacacaagaggaggagccagcaaaggaaacagaaacagagctttcagctggggggggggcattttggaagaaaacgatgccatagaagccaagatgaaaatagacatcaaggagaaggaagtagtcaattgttttgaatgctatgaagaaagataagaataggttaatagtccttatatttgataacagaggttactagtgatcttgatgaggggtttcaatagaatggtggg

SEQ ID NO: 30934 - DNA, 440 bp, Homo sapiens
cgactactatagggcgaattggagctccaccgcggtggcggccgaggtactatatgctagaaacttggctgaatgatttgacattatcctatttaatgttcatgacaatccaataacgtaaccactcatatctcccttttgtgcagataacaaactgaggcccagagaaatcaaatatgttgtcaaaatctacatcgttgaagagatgggtttcaaatccaggtcggcttggcccttgccacgacttcataatgaaattccatgggtgagtgttaccagtttctggtccatccttgcttatttcaagggtctcatcatcccatccactgtatcactttttttgttacaggctttactcttttctaccatggaaaagactaatgatatttttttctccataagcttggaaatattatcaatcaccataaaattcagccttc

SEQ ID NO: 30935 - DNA, 405 bp, Homo sapiens
gcgtaatacgactactatagggcgaattggagctccaccgcggtggcggccgaggtactaggaactgagtaatttggaaataacattaaccactttcatataccacacacctatcttgttaagtccaaaatgtcagtagtaataaggcttaatcattaagattaagaatattgttatatgtttggaatatgctaaatttatatgctcttctttgaccaaattcagtgtcaaacaaatgtcaatcacgtatctgatttattccctggtcggcattactgaaagaaaaatgtttatttaaatcagcatgtttcaatttattttattatttttttatactttaagttctgggatatatgtgcagaacttgcaggtttgttacataggtatgcatgtgccatggtggtt

SEQ ID NO: 30936 - DNA, 422 bp, Homo sapiens
ctatagggcgaattggagctccaccgcggtggcggccgaggtacctgaacaaatcccatcaaggacagattctcagtcttgaagaggcagcacggtaaaggggaaagatcatgagttttggggccaggttcccttggatattgcggggtccccacacttctggatgatgttggataactctttgagacttaagcttcacatctgtaaaatggaaatacttatttttcagagttgtcataaacactaaatgatttgacttatatcaacctaattcctactggctcattgaactcagctcagctgtcccctctgttcggatgccttccccagtgggggcttagttagggtataccttgctggattaccctgccaagctctttacacatatcccttctgccataaacactcattcttttgttact

SEQ ID NO: 30937 - DNA, 364 bp, Homo sapiens
tatagggcgaattggagctccaccgcggtggcggccgaggtacatttgttgggggcgtgacattaacatataaccacttagagtggacgtgcagttagagaaaagtcaatgagctggaaccaagctgggaattccaacatgtagaagttaaacacaagaggaggagccagcaaaggaaacagaaacagggcttccagcaggtggggggcatttggaagaaaacgatgccatagaagccaagatgaaatagacatcaaggagaaggaagtagtcaattgttttgaatgctatgaagaaagataagaataggtaaatagtccttatatttgataacagaggtcactagtgatcttgatgaggggtt

SEQ ID NO: 30938 - DNA, 432 bp, Homo sapiens
tatagggcgaattggagctccaccgcggtggcggccgaggtacttttttttttttttttttttttttaatagagacagggtttcaccatgttagccaggatggtctggatctcctctgacctcatgatccacccacctcagcctcccaaagtgctgggattacaggcgtgagccaccgcgcctggccgggtcaggctctttctaatctgtttaaaaccatatcacccagaaggtattcagtatatacttatttaaatgaattgaaagtcatatgagcagcatggacttactactttaaaaaccacattattagaaacctaacaccttggaagctctgcatattctgaatgaagaatatactaaaccactcagagggaaatagttattaaccattttaccacagacgactaaacaactaccatggcccttccc

SEQ ID NO: 30939 - DNA, 443 bp, Homo sapiens
gcgaattggagctccaccgcggtggcggccgcccgggcaggtactttatcacaaggaaaacttattctacattatcctgaccatggggaaagacttgtattttggtaagccaattgttgcttacttattctctgacctaacacactctccttctagcaccccaagctggttccacagggctataatgcaaattcggatacatttctttatggaccttgaaatcagactgtttggcagagaacatagtccacattattttggaaagccagctgtatcaccggagtctacttttatttaatcttttacagccaagaaatctatggcatgtttttgccagtctccctgatatttacatggatgatgaaatgtccccaaatttcactgaaccacagcaaacactttgactactattgtggcaggactgtaataacattgagtgcccc

SEQ ID NO: 30940 - DNA, 452 bp, Homo sapiens
gcgaatcggagctccaccgcggtggcggccgaggtacagttattatactgcatcttaaatagtggggtgatattaaatggttatattctggaagctcatgcccacactgcctttgaagttcaggctgcccagccacattcaggcattgattcaggaaactcccttggcctttcagtaagagagagctcccttatgccagaactgctttgaaatagaatccgaaacgtgttgtgcacgcgcttactgagctcgattccgatggggtcgcatcatcagcatagctttgtgatgggtaaccggaatgtacagagtgacccacctaaaacatttgcgagaccgtattcatctctcatctatagcattggaaaaaagcctcctaacaggcctccccaatttcatacttgcctacctaaaatatttcttacttgcacagtcagaatatttacatagaa

SEQ ID NO: 30941 - DNA, 614 bp, Homo sapiens
tctactcactatagggcgaattggagctccaccgcggtggcggccgcccgggcaggtacaaaattatctttattcagaagatcacatagcagcatgttcataatcaaaaacattttaccttagcaataaacaccagtcatttatgcaagagcttcccagggttggtagatatttttattgcttcattttgctctagttaaagaaatggaaaagatgcttttaacttattatcaatcctacatcaggtgtcaagaaatgcaaagcattagaaagagagagggaaagagggatcttcaatattctctgtaaaggagcaaattctgacatggtcatctcagacaccctcttttaattccaaagtctaaccttacaaaagcagagaaaggccgggcacggtggctcatgcctgtaatccaagcactttgcgagactgaggcaggcggatcatgaggtcaggaatttgagaccagcctggctaatatggtgaaaccctgtctctactaaaaataaaaaaattatctggacatggtggtgtgtacaatattttttgtctgtttccatgtgatatcaaatttattctttaatcctattgcatttacatgagtcaaggcatg

SEQ ID NO: 30942 - DNA, 408 bp, Homo sapiens
gcgaattggagctccaccgcggtggcggccgcccgggcaggtacttacgttgcctcgtgtcaccaaaattggtgtggctgctgtggtgcggggggctgcactgatggcaccccttcctgtcttcatcaagcagctgcccttctgccgctccaatatcctttcccattcctactgcctacaccaagatgtcatgaagctggcctgtgatgatatccgggtcaatgtcgtctatggccttatcgtcatcatctccgccattggcctggactcacttctcatctccttctcatatctgcttattcttaagactgtgttgggcttgacacgtgaagcccaggccaaggcatttggcacttgcgtctctcatgtgtgtgctgtgttcatattctatgtacctcggccgctcta

SEQ ID NO: 30943 - DNA, 415 bp, Homo sapiens
tactatagggcgaattggagctccaccgcggtggcggccgcccgggcaggtactcagctaagaagaggattgctttgggcataggaagcagaatgacgagttcagtcttcctcagtagttggagcacagttctcaaagcccatcaacactttggaatggatttgttgttttatttatgccatcaagggagagttgatatttgtgtattgctaaaaactactaaagtatgtcgatgcttaggtaggaacatacaaaccatatatcctctgggatctgcccaggtttctgtataaggcttgacctacgtaagatcctatgatgaagaccagaaaactttttttaaaagtaggtaaattaaaattaaaatcacgagttttgttcacattttgttcccatagggttccttagtgcaaaa

SEQ ID NO: 30944 - DNA, 369 bp, Homo sapiens
agcaggacccaggattcagacctgtaaaatttttatttcctggctggtttgtgtgccctcatgcatgttatttacagtgccatgttctttcacatgggaacactgacacaggtgaaatgggaggttccataggatgattgtgcaaaaacattaaagacaatcctagcagatgcagtgagttcaagggagagtccttgtggagtaacacgaaaggcctggtggatgagatgtttgaagatctaaatgcctgcagatagtgagctgtctgcaactaccacaaagcaaaatcatgggcgaaaactccccagggtaggatctggcctgagcatccccactgggagatgggaggtgaagggctctgtagtgctt

SEQ ID NO: 30945 - DNA, 572 bp, Homo sapiens
  misc_feature 121: n = A,T,C or G
ggcggtcgaggtactttcacttttgtgaataattttattttccaaccatggaagcatcatcgtgaggttgaaagaggatcattcttggaaaatacaattacttaacagttatgtgacctgngacaagttgagcctaaatgtcctcatcataaaatggaactaagtaaccctcataagaatgacgtagtgtatggacactgtttggcccagagtgggcagtgaaaaaattgtggccattctggaataatcttatagtctctatggtggggagatctgaaagccgttttctttccccttcccattttgtgtatgtatctgcctccactgatctgcacagggaagggaagtggttggtaactctctgggcactcaggatctctacacttggtagttgcccaacagcccatcactgtgtctttcacccctagggctcaaagtgacatttttctggccccatcagggtgtgctgcacacctgtgtggagtctttgccaggtgagctctccccatcccatccctgccttcatcaataaaaagctgagtcagggaaagggagtacctgcccgggcgggc

SEQ ID NO: 30946 - DNA, 438 bp, Homo sapiens
actactatagggcgaattggagctccaccgcggtggcggccgaggtacaggttctttgaatgcagtatttattcacatagttttcattttctgtcctgacaaaaacttggtgatgtttgaatgattacagaacaaataggattgtggtttatgtttcctattatgcatatttggcagttgaattatgacattagattgggacatggtgagagggggcaggatacggggtaggaggaggggagcaagttacaaaaggccccagttccgggaagctgggctgagttgttctgtttaacttcttcttcctttattcctatggttttatgattgcaaattggcagtggcagggcagctctgactatatttgctagaagcagatgtccacattaatttagatgtttagggattaaaaatcatagagggtggcgctaggaaata

SEQ ID NO: 30947 - DNA, 378 bp, Homo sapiens
atagggcgaattggagctccaccgcggtggcggccgaggtaccaggagggtattgatgtttgaggtccaaactgaaaacccatcacctccttcccactgctatagcagcgttagccctggggttcattatctagccagttcacaccttctaaagtggggctctgaaaatgtcttacttccctcacagacaaagcaattctcaagcctcctgagatcacccaccaaccagagcaactgctgtcacttggaggtgcagctgaattcttctaattgtgacacaaactcttgaaactgtaaatgctgaaagattaaatgaggttataacactcaggaaggttttacaagttaaaagtaagtcaaaatcaatagggtctttat

SEQ ID NO: 30948 - DNA, 265 bp, Homo sapiens
attggagctccaccgcggtggcggccgcccgggcaggtacactattatgtgctataaaggaaaccattgcaacaagaaaatgtcttggaaatttggctcccaagtttggtgaatctggagaatgtattttaatatggaaaatatggacagtcttctaatttttcagtttactttctctcctcttaaaaatatcactctattgtattattacgattttttttctttttttgtgatggagtcttgctctgtcacccagggtggagtg

SEQ ID NO: 30949 - DNA, 393 bp, Homo sapiens
  misc_feature 370: n = A,T,C or G
agggcgaattggaacctccaccgcggtggcggccgcccgggcaggactactggcttcccagtggttgggttgagtataagcccccaaatatgagtaaaagaagaaaaagttaattcaatcaccaagtcttgctcgcatattaaaaattggatagatgaatgttcaatcatatgttttggcttttggccagccagacgaggtcaatttttagatttgaactgcttagaattcttcaggcaagtcttgatggagcacttcttggacagttagaactttaccaggttcacaggagagctcagatgaagcgaacacctcatccacactggtttcctttggagacctttactgttgagagggtggtttttcatangccgcaaaatgaacaagttgcaa

SEQ ID NO: 30950 - DNA, 447 bp, Homo sapiens
gactactatagggcgaattggagctccaccgcggtggcggccgaggtacaaaaggacactatcaacggtatagaaggaagagtcagggtctagacttcaggcccgccttcaccacctaccatggaaccttgatctagtcagtgtgtctccttgggtttactaatttataaaagaggtgggcagggcaggtattattcctatatttatgattatgatcaactaactagatgcttttgaaaatgtgtagcaccgtgcccaccttagttttgtttttctctctcctttctagtttatggtagtaattaatggtagatgttgtgggttctccaggaaggtattgttaagataacagtttctgaagactgataagtctgacatgacagatgactacttgccgtcacattttaaacatactttgaactgatgaaaatcatttcaaaaaagagt

SEQ ID NO: 30951 - DNA, 394 bp, Homo sapiens
ctactatagggcgaattggagctccaccgcggtggcggccgaggtaccttcctccttaaatccacattccacatgagtttgtcatctttttagatgtatatttgggaagttgctccttgctgacaatccttgaaaagtgcccagttctcaggacccagttgaaataatttccgcctggggctgggcgcggcggctcacgcctgtaatcccagcactttgggaggccaaggcgggcggatcacgaggtcaggagatcgaaaccatcctggccaacatggggaaaccccgtctctactaaaaatacaaaaacttagccgggcgtggtgggcgggtgcctgtagtcccagctactcgggaggctgaggcaggagaatggcgtgaacccgggaggcgg

SEQ ID NO: 30952 - DNA, 472 bp, Homo sapiens
tatacactactatagggcgaattggagctccaccgcggtggcggccgcccgggcaggtacgcggggacacttcctgggctctgtgactctgacaaggcactgaatttagctgctactatcagttaaggctcagctcatatgtaatcagttccaggaccaccggtccccaggaagaggatggagaaattgaagctccaaatggctaagcaatctacccaagatcacacagccagattggtggcatctaaaattcgaacccagtcctgatgtgctgaacttcgcatctggatttctcaaaatgaagatgtggccaaggagaaacaacttcctattcctatcctgtagcctgccaagcctgagaagctacctccctgaaaatcttcctaggactcctcagcttcctcaatgctaccaaatacccactatctccatagacacacacaaatcccctccacccacaatgatgtcctgg

SEQ ID NO: 30953 - DNA, 396 bp, Homo sapiens
gtatacgactcactatagggcgaattggagctccaccgcggtggcggccgaggtacaagaagaaaggtcaatagactgttgtcatggaacaaaattcaaaacaggatgtataacagataggagagagaaaaacctgctggcagcctgggaatcgtgaatcttgcaggcatatttttggggtaaacaaatcagttggcagctgataaagagatcagtctgggcgttctgggtaggacaactagtatcaaagaaaacaattaagtgtggacagatttttcgaaccccctgatggtatggctgaggagcatatgaggcttgctgcctctggacgagctctgctgactctcttcccttcgcacgccttaagtaagccagaactgcgccactgtcctcctt

SEQ ID NO: 30954 - DNA, 446 bp, Homo sapiens
ctatagggcgaattggagctccaccgcggtggcggccgcccgggcaggtaccctttatgatctagataaaccattgtgttcttctatagtttttccaactatatttgaataggtgaagttaatatgtttaatcataaaatgctctcagatgcttgcaaaaacaattactccatcagataagaacacattaaaaaatttgaaaaatttaaaaaaagtcattccagctatatgcaaataacttttagtatatgcatctgaaaagctaccaaacgtaacaatgaaactctaaacttgtagtagaaaggtaaatgcactgtgatcagctttcacatcacttcagagtatattctaaaacttcttagattctacattatttatagagtgaactctaaattcaaacatttctcaggaacaaaacgactcccatccaattatttaattaggga

SEQ ID NO: 30955 - DNA, 362 bp, Homo sapiens
ctatagggcgaattggagctccaccgcggtggcggccgcccgggcaggtactgggattataggcgtgagccaccgcgtctggcctctaacgagatatttctaaaggttaggccttcagtcaagaattttaaagctggatcttagaggttatctaaactaacctctccatttcatagataaggaaagtgagtcccagaaaagcactggtttggacaagttcagaaagctaaacagtgactgtggatgtatgattctgtctcttaactcctaatccaaatgtcttctcactagataaggctgtgccttctacatttgaaggctcaaaccccatggatggatggagggaaggatgggtggaggga

SEQ ID NO: 30956 - DNA, 436 bp, Homo sapiens
tacgactcactatagggcgaattggagctccaccgcggtggcggccgaggtacattgcttctgttctctgtcactctgtttctgtgccagaagacacattgcttctcctcattctcttatgcagtgctgtttaagtggtggtccacaaattgttgctggatggtgatgagatcgattaggagtttatacctcaatgtaaattaatgcacttccttccttccttaagaatgtcttgccatgaaaatatcagcatgcctgtggatgtcattgatttaaatgagggcacaagttccgtatttccttgcagatgggtccagactgtttgcagactggccatggtccttgggccacactggaagaagaactgggctaagtattttttatgcctgtgatttaacttctccaataaaccgcagctcttgtaggatatgatggt

SEQ ID NO: 30957 - DNA, 397 bp, Homo sapiens
tacgactcactatagggcgaattggagctccaccgcggtggcggccgaggtactgcttgaatacactggccaccattgtttacctgttatgggacaggcaagatggggaagcaaaggaattattgccatcaaagagagaataacagcttacctggaaagttccactatttctaagaattacataatgttcatttgcctgatcatggaaggataccccccgtaagaatgggaatctgttcccctctactgatggctgctgggggcagaaagaatgatgttgcatttatctaggtttattagacaaagaaaagctacagcgttggtgagaacaacaaatccaggtaagactgcctaagaagagcctggccctgaaataatccttttcctcctttctgct

SEQ ID NO: 30958 - DNA, 414 bp, Homo sapiens
tactatagggcgaattggagctccaccgcggtggcggccgacgggcaggttctgcttcaaaaggcatgtataactaagacatatgaaaactaaaatgacaaatgggttattttcaacaggaacactttgaaaggaaaaagaaaacaaacaagaactgtaggatattctttttgaaggcaactgcatgatgctagattgtgtccatggactagatttctaaaaggccatctaaaatacatttttaaatacttattcctttcacaggtaatatcttacgaagtttgattatttttgaattgacataatatggacttaatatgggaggaaggtagttccaaaatgacagaagtaatcgcgttccacataacttttgtgtttgtatttacatatacaaacacatttttatcttgtcac

SEQ ID NO: 30959 - DNA, 439 bp, Homo sapiens
actactatagggcgaattggagctccaccgcggtggcggccgcccgggcaggtacagtcatatgcagtaaaggcaacaaatgcttgtccttgaatctgaacaatttctcaaggcattcaccgtctgcctttttcctagtttattcaatttgggataaaatgtgttgaatggaagttacgttacttttgcataaaaagaagtctaaaaaaatcacaatttcttttttcaagaatcaagttctaattcaattcatcaagcattaattaagcataaagttatattcaaagaagcactgggctaagagtttacggaacaaaggagacacaggtatctcacgagcttaaaatgagggatgaagaaaatatattcacaaataattacagttaaagacaacatgcggggctgggcgcggtggctcatgcctgtaatccaagcactt

SEQ ID NO: 30960 - DNA, 419 bp, Homo sapiens
ctatagggcgaattggagctccaccgcggtggcggccgaggtacaaggagggcatgtcaaattcacagtaaaggagtctaaagcgaggccattatatgcttctcttctacctatctcatatatgccatttatgagcccacttaatataggacctgccctcaccataacgctcaggcctataagaacttttatacctacaaagacttcctcacacctttgccttctgctctataactggccatgtctgtattctgttcagattagagagaggtccactgaagctttccccaaaagttaggagacaaaataacaatgcccctagtaagctgacaaagggaaacattgaaaacataaatgagggccaggtgcggtggctcacgcctgtaatcccagccctttgggaagccgaggctggcaga

SEQ ID NO: 30961 - DNA, 392 bp, Homo sapiens
gcgtaatacgactactatagggcgaattggagctccaccgcggtggcggccgaggtacagtttcaataatatgtttttttaattgatgttaaatatgctcctagaagctgcactgcaacaaagtaatttcagagaaaggcaaactggattcagttttcagataataaatatatatgtgcataattaaaagagattgatgtttccagaaaggagcacaatggaatgaagaaggtggtgcagaaaggctgagccctgtgctattagtgatgagtttcaccggaggtcttttttttttaaataaaaacttaatttctctgtctttgaattctatgagatctctttcagacaaacacaacattctgaaaatcaaagacttggggattacttgggaa

SEQ ID NO: 30962 - DNA, 420 bp, Homo sapiens
gcgaattggagctccaccgcggtggcggccgaggtacaagttctacaagttgccttttaataatgaatcacaactattactagggcatgcatggctttgtctagttctaaaaatgttaaaggatggaatataagatacagactgagatatgcttgattacaattagtctaccatatttaaatatgccgcagtgtattcatttaccaggtgaattattttccttcaaagtggtcttttttttttttttttgagacggagtcttgctctgtctccaggctggagtgcagtggcgtgatctcagcttactgcaacctccgtctcctgggttcaagcaattctcctgcctcagcctcgagagtagctgggactacaggcatgcaccaccaagcccagctaatttttttgtatttttagtagaga

SEQ ID NO: 30963 - DNA, 192 bp, Homo sapiens
tagggcgaattggagctccaccgcggtggcggccgaggtactttttttttttttttttttttttttttggaatttgagtctcactctgtcgcccaggctgaagtgcaggggcacaatctcagctcactgcaacctccacctcttgggttcaagtgattctcctgcctcagccttccaagtagctgggattac

SEQ ID NO: 30964 - DNA, 406 bp, Homo sapiens
cactactatagggcgaattggagctccaccgcggtggcggccgaggtacgcggggtcccagaagacaggtattattgtatttagcacaaagcaaagggaagaagaaacactgtttatgtccaaaactatggggcagtggtcttctcttttacttttctttgctgctgttcatgaagcttgttaccttttcgctgtcttttttttgagacggagtcctgcattccagcctgggtgacagagcgagactccatctcaaaaaaaaaaacaaaaaacaaaaacaaataaataattgtcgatgacacattgatggctttgaatatggtccagattttgccaccatttctaatcatgattagtagagggcttattgtgaaccaccctaatgagagaaagaaagaactggggt

SEQ ID NO: 30965 - DNA, 566 bp, Homo sapiens
gcgtaatacgactcactatagggcgaattggagctccaccgcggtggcggccgaggtacagatttgctacatcatatagcattttttagaccataatttagatctttccatcctccaactaagatttacctttttatatgaagctttaattactttccgcaacacttttgtcaaaatctgaagtctttaagaaccaagatgtttctgatgtttattttaatgttcagggattttggaggtgaggggctagaaacactgactcctgcccctgactcccgcccctgactcccgcatttattttcataaatgaaaatagtaaaataaattcattaagggtattatgtggagaatagaaacaagagtaaaggactgagagtatattagagaaaactatcataattttggcaagagataatggacatcgaagcttgagtgaaaataactgttagagaaaggagtagaggacctcgagatataaggagaaagtaaagtctaaacttgctaaatggactggatttgtgggatgagtgaaacggtgaagcaaggatgacttgaagtttgagtta

SEQ ID NO: 30966 - DNA, 400 bp, Homo sapiens
tacgactactatagggcgaattggagctccaccgcggtggcggccgcccgggcaggtacaggttctttgaatgcagtatttattcacatagttttcattttctgtcctgacaaaaacttggtgatgtttgaatgattacagaacaaataggattgtggtttatgtttcctattatgcatatttggcagttgaattatgacattagattgggacatggtgagagggggcaggatacggggtaggaggaggggagcaagttacaaaaggccccagttccgggaagctgggctgagttgttctgtttaacttcttcttcctttattcctatggtttttatgattgcaaattggctagtggcagggcaggctctgactatatttgctagaagcagatgttccac

SEQ ID NO: 30967 - DNA, 208 bp, Homo sapiens
atagggcgaattggagctccaccgcggtggcggccgaggtactgcctgtccttctattcacagcacatgtggcagcaaaccccatattacagtgatacatccctgcatcccttataagaatatatataagctttgtttcctcattgaagcaacaagacatggtttctcactcgtccttatgttcctcatagctcatattatgctactg

SEQ ID NO: 30968 - DNA, 438 bp, Homo sapiens
  misc_feature 85: n = A,T,C or G
tacactactatagggcgaattggagctccaccgcggtggcggccgaggtacaggcaacaaaagcaaaaatacacgaacgagatgnccataaaactaagaagcttctctgcacagcaaaagaaacagtaatagattgaagagacaacccacaaatgggaagagaatgtttttaaaccatatctcaggtaaggggttcataccaataatatgtaaggaactcaacccagaaatgagaaaacaagcttactaaaaaataagtaaaggagttgaatagacattttctaaaaacagacatacaaaaggccagatttttatcaaaaatgttgataaaaaacatcaacattcctaattatcagagaaatagatgtcaaaaccatgaagatattatctcacagatgttactgaggttattataaaaaagatgtggcggggcacggt

SEQ ID NO: 30969 - DNA, 174 bp, Homo sapiens
tacgactcactatagggcgaattggagctccaccgcggtggcggccgaggtaccacagtttgcttaaccattcacctactaatgagagtaggttcccataggtccccatcatcacatccttgtagaggcccctctgagcagggatcagacagtcccactcctcgggagagggga

SEQ ID NO: 30970 - DNA, 450 bp, Homo sapiens
gggcgaattggagctccaccgcggtggcggccgaggtactttcacttttgtgaataattttattttccaaccatggaagcatcatcgtgaggttgaaagaggatcattcttggaaaatacaattacttaacagttatgtgacctgggacaagttgagcctaaatgtcctcatcataaaatggaactaagttacccctcataaaaatgacgtagtgtatggacactgtttggcccagagtgggcagtgaaaaaattgtggccattctggaataatcttatagtctctatggtggggagatctgaaagccgttttctttccccttcccattttgtgtatgtatctgcctccactgatctgcacagggaagggaagtggttggtaactctctgggcactcaggatctctacacttggtagttgcccagcagcccatcactgtgtctttcaccc

SEQ ID NO: 30971 - DNA, 459 bp, Homo sapiens
gcgaattggagctccaccgcggtggcggccgcccgggcaggtacctcaccattccacctcattattcaaagctcaatgttgcagcccactttaagctgacaatattgatgactgcctctaaaatacaggacagggttacttataaacctttatacaggccggagtttcagatatatctgtggtagattatggtttcagcttgatgtgagagaataactgaaataattcctacccctcacccccttgccccctgctttttttttgagacagggtctcattctgtcacccatgctgcagtgcagtggtgtgatcacggctcactacagcctcgacctcctgggcttaggcaatcctcctgcttcagcctctcaagtagctggaaccacaagtaccttggccgctctagaactagtggatcccccgggctgcaggaattcgatatcaagcttatcgataccg

SEQ ID NO: 30972 - DNA, 578 bp, Homo sapiens
  misc_feature 523: n = A,T,C or G
cgcgtaatacgactcactatagggcgaattggagctccaccgcggtggcggccgcccgggcaggtaccgggccttgtgccaaacaccttagatgggttatctctgaacttcacatcagtcatatgaggtgggtaatatcattatctacattttacaagtatggaaactggggattactgaggttatttgcccaaggtaacacagatggtagattctggagccagagttggaaactgggtagtttgctccagacccaatgatctagcatcctagatgtggtccattagggctctctcttttcatccgtttgtaaaagagaagttttcactttcttctcaaaccattgagaaacaacttggaactggaagtgcaaagggagaattctaaagaaagcgttttaaaaaggagaaagaacaagaaagcaggacaccatttcctacctttggtattctccaaatagttggcaccaattctcataaaaaaaaaatggcacaaaatggtgcatatttttacacacacactnttgtaatgttcatttaagatttgaccacaatttaattaattaaaatgatataccc

SEQ ID NO: 30973 - DNA, 245 bp, Homo sapiens
gaattggagctccaccgcggtggcggccgaggtacctaaggaggcaacatctaaactggtcttgaggaacagccgaagatggcgaacgggacagttcctgaaaagggaatgtgagatttggcaatcaggatagctgtagcctttactacggaaaagtcagtggtggagacagcagacagattcagcgggctgaagagtaagcataaggtgaggatgggttgtgcaggatatatgaaaccattatt

SEQ ID NO: 30974 - DNA, 468 bp, Homo sapiens
ctactatagggcgaattggagctccaccgcggtggcggccgagaagggcattctccctacttgtgtgtcatcttagggactctcactttgaccctgagtgtgataggaaccatggggaagtctgagctgaggttggacgtgaaaggtctcatgttttaacagggtcactctggccccctccactgagaacaggctgaaggtggcagggactgagtggagagacctcttgggagaccactgcagcaagtcaggtgagagctggaggtggcttggcccaatgggtagctgtgaggtcgagagcaatggctggagccaggaaacctctgagtacctcggccgctctagaactagtggatcccccgggctgcaggaattcgatatcaagcttatcgataccgtcgacctcgagggggggcccggtacccagcttttgttccctttagtgagggttaattgcgcgcttggcgt

SEQ ID NO: 30975 - DNA, 439 bp, Homo sapiens
tacgactactatagggcgaattggagctccaccgcggtggcggccgcccgggcaggtaccatttggaacttatttttatttaagttttagctcaaggttctccagaatctgggagttgagaaaatgccaatggaaataggaaatatgaaatatccaggatcaatggtagacttttcttcttactgtaacagtgctctgggcacatttcttaccttgctatttttttggagaccaagaaaatattgcatctatgtccatccctacatagacctcacaaagcataggtcaaattctaataggcagccatgattctccaattttttgttcacaaataagtcgactgacttcctaattggagtcattgggggtaaggagcaacggacaatgtcagagaggaccacctcacaggtggacttgtgaggggctgggaaaagaaaag

SEQ ID NO: 30976 - DNA, 450 bp, Homo sapiens
atacgactactatagggcgaattggagctccaccgcggtggcggccgcccgggcaggtactttgtttttcaatgcaggacttctgcctacttcaaagaaaggggttcaaaagtttctcaaatgatttttaagtaaaagtctgttagattttttaaattagtaactgaatatgtatagatttcaaaagttctatacacatatatatatacacatatctgtgtgtatttttttaaaacctaaacgagaatattctgcatccttacgttgtcatttttacttaatactttgtgttacttcttacttttgataaggtagaaacttgcttttggtaaaaaacaatttgaccattaatttggtcataagaaaacaaatgctgctaccctgtgatgcccagtgtctaataaagattttttttttttgaggccaggctggtatgatcttggctcactg

SEQ ID NO: 30977 - DNA, 467 bp, Homo sapiens
actactatagggcgaataggagctcctccgcggtggcggccgaggtacgctccagcattacctctaagcaaaccttcaaatatggctactgtagaagcacttctctcagcagcacccctcactctttcctcaatgagaaaagaagttgaggccccaattgcatcctctttactgatccacccaaaacaaactccctgcaggaaagtagagggataagatttccaaaggagatgctgaagagtaaaaagcaatcacacttcaaaataggactttacaaataattaacaacagctccagatccatcctgttctcttctctagaaccactagaaactctcagatctgaaactgtatcatagattacacacctacatatcccactccatgatacacatgttgaacttcctatgtccatatccatcctccacatcctcagagttagcaaacgagttagacatctaagacttt

SEQ ID NO: 30978 - DNA, 460 bp, Homo sapiens
tacgactcactatagggcgaattggagctccaccgcggtggcggccgcccgggcaggtaccctgagaacagcaataatgcacaaacattactattccaacagctgcattgaaacacccttggtaggattgggaaaaagatggattattgccatttggacactccaggactgtccattaatactcctgactaatggaagatgataaagattgggcaagaaaaatgactgcagcaaacgccttggcatcttcaacttgtcacctttagcaagaggcctcttcaacagttcttggactgtgtttggcagccaggcactctcagaacggcaaggagacacagctaacatgatctttgcaatgcaacaaaacaagcgatcttgaggcgacagagtccaaaagatgacagaaaattcatccaactcctgaagcatgtgatgccaccagaaagccttggcaacagcc

SEQ ID NO: 30979 - DNA, 430 bp, Homo sapiens
actactatagggcgaattggagctccaccgcggtggcggccgaggtacctactttgtggggttattctgagagttaaataagaaccaaggagatcctaaatatattcatccaaccaataggtatgtcatttttgtagttgcttaggagttatttctagatgaaacagacaaaactctgtgcttttatagaacttattttctagtggggcaataaatataaaaagttaccatgacttccacaatggcagcatgaggacctctgtagacctacttctcagtgaagtgagcataactgattaaaattatgtaggtctttgggatcccagagcacctttagtctcgggagacgctctgccagccagaaatgatggaagaattgcatagcctggacccacgacggcaggaattattggaggccaggtttactaga

SEQ ID NO: 30980 - DNA, 419 bp, Homo sapiens
tatagggcgaattggagctccaccgcggtggcggccgcccgggcaggtactttattattccgagagagaaaggctagcccgaaaaagctgttacctaagcagctttagcataattgctctctgcacagaagaaatctctagaaatccaattttctctttggataagactaaagaaccaattaagaaattgagctccaaaattcctgtgatcacagcccacatggcacacggggcagcccagtctgcattgctgagggctgaatatctgttttcccaatcacctttctttgcttctttctctttcttgagctgcttgccttttagctgctttattgctcattaatatgtccactggaaattgaaagagggaggaaagggggctcttaacttctgcatttctacttattagtggcttttgg

SEQ ID NO: 30981 - DNA, 448 bp, Homo sapiens
ctatagggcgaattggagctccaccgcggtggcggccgaggtactagacctccctgtctcattctcattgaaacattttcttttggctttcataaacctttcagaccaatcttccctcctccttctacttgctccttaaatgtcaatgttttccagggttccattcctacattttgctcatttcttcatccaaccctcattcgctcttgactaaaatttgaccctctcagaatcaagaggagtttgagatcctctttgctacccacacttgttttcaaaccattacttcccctcatcttaaaaagccctctgggctgggcacagtggctcaacactttgggaggccaaggtggcagatcacttgaggcccggagtttgagacaagcctgggtgacagagcaagattctgtctcaaaaaaaaacaaaaaccaaaaacctctgtttcttt

SEQ ID NO: 30982 - DNA, 434 bp, Homo sapiens
actactatagggcgaattggagctccaccgcggtggcggccgaggtaccaccatgcctgactaatttttatatttttagtagagacgggatttcaccatgttggccaagctggtctctaactcctgacctcaagtgatccgctcacctcggcctcccaaagtgctgcgattatagctgtaagccaccgcgcctggccaggagggtctatatttaatgtcagacatggcccctctcttacaagagcaggtccaccaagtccaagagggtttgagatgcacagagggacacacataacgaggcagagactccgatccagtccactctgaaaaaaatccagctccccagagttaaggaccctcacaccccccttgaacaaggcctggtgttctgggaatattcaactcgagtctgcttcctcgctcggccttcctct

SEQ ID NO: 30983 - DNA, 430 bp, Homo sapiens
actactatagggcgaattggagctccaccgcggtggcggccgaggtactggtagtttaaaatatctcaatatgaaatggctgaataaaatcatcacattttcattttatatcaatggttctgaaagaatgatgcaagaaaaatctctaaccttagtgagatgaattttgtaaagttcagtgaattccttccatgcacatttgaagccagtccaggtttttcgacctaagtggcctcagtcatgttcagcacctaacgaacaaatcatctcctgtctccaatgtcattaacaactctatgggtgaatgaggatcactaactgtggagtaagaaggaagcaggcagcctgtttccaataacatgttgtgattcaaccacaatcaaatgttataaaactaatgtcttaaagttaatttgaccttgaaatgtct

SEQ ID NO: 30984 - DNA, 423 bp, Homo sapiens
tactatagggcgaattggagctccaccgcggtggcggccgaggtaccctggagccttgagcaacgttcttttgcattatgccaggaagaactgctggcaaatgtaagtgggcttagaattcatgactgcagtcagcagcagttgtgtaaatctagggagagactggtatttgacacctgcaagtcctcaaggttaacagaagtctcaaaaagcccaagccccagattttgtaaaatacatggtttcaccccaacctaatcaatgtcaccaagaaaacttgtaagtccaataagacaaacaatagttaagtctgcagaatatttccatatagatttagaagtatatttaactcttaattctctgctttcaatatcaattgtttttgagccttttcttgggtaaaagttaccgaatgcttttttt

SEQ ID NO: 30985 - DNA, 346 bp, Homo sapiens
  misc_feature 278, 338, 339: n = A,T,C or G
attggagctccaccgcggtggcggccgcccgggcaggtacacagttaatagtagtattgtataagccatgacagtgtagctccctttcattgttttaaacatgtctgtcttacttgagatcttcctatttaaagcgaaaaaagaaatttttttaatttccaaggataaaagctggggtgataatttttaaaaaacctgacaattaatttttgcgttattatttttcagtgaaacgaaaagccagcaattgtaataaatttccgttcatgaatgataantttagggctctttcaaatattggaagcccaaagttctaacctttaataaccttttaatannaaaaata

SEQ ID NO: 30986 - DNA, 459 bp, Homo sapiens
tacactactatagggcgaattggagctccaccgcggtggcggccgcccgggcaggtacgcggggagtagtaagccacattactcagttgtgagggggaaggtagactctttccagacctttgataaaggggctgctcaaaaaagccacgaccttgggcctctgctaaaaccatggctttaagtaaggagggaaccgattttttaaaaaaccttatcccctctttctaatctcttatgtcctgtgagtgtcacccattgagtaaacccaagtggaagtcagcaggaaagtagctgggatgatgcagtctttacagggtctctctgtcacccaggctgaagtgaaatggtgtgatctcggctcactgcaacctctgcctcctgggttcaagtgattctccagccccagccttccaaatagataccagtaaaaatgtcatctggccaatttgtgtgaaaaaa

SEQ ID NO: 30987 - DNA, 422 bp, Homo sapiens
gggcgacttggagctcctccgcggtggcggccgaggtactactattttggttagttgtttattgctttattttgcagatgaaaactccgctattgagagaggtgaaatattctatcccagcagaaaatcttccagtgagtcaaacatctgctagtgagttgacaaaaaaaaatctaggagctctttccgtcagcacttggaaatattcttattgttactgttggatgacccctggtttgtagacaccgcctatagggcaatggttgggttcagaattacagagcgagaggcataagcatcatagcacagagaaacatattaataaaagcctctgagaaataaaaatgagatcccaaatccaccaactgactgaacagaaccccttttggccaaggggacctcaaagtaatcttgaaaattga

SEQ ID NO: 30988 - DNA, 411 bp, Homo sapiens
gcgctatacgactactatagggcgaattggagctccaccgcggtggcggccgaggtacagaagggggaaatatgccccaaatgtcaatttcctcttgcagcactatatgtggctctcacagtggaagacggaagcaccatgaaatgtgggatacacaagataactgaaaatgtgagatgttcttgatgagttggtggtgacctttgcaaatttctccagttttgaggaattgtccttgagcaagtcagtccaagcagattttattttattattttgagacaaggtttcgctccatcacccagagttgagtgcagtggcacagtcatggctcactgtagccttgacctcctgggctcaggtgattctcctgcctcagccccctgaccagtagctggaactacaggcacatgc

SEQ ID NO: 30989 - DNA, 380 bp, Homo sapiens
atacgactcactatagggcgaattggagctccaccgcggtggcggccgaggtacatttgaatgagtaaataaagcaaagtcatatacatatatcactcttactagcagtcctggtaactcccacctgtttgttattggagtaggggtggcaataagctgctgttttataaatttaaggagtctcaggggtcatatcaccagttccaaaaaataaacgaattatgagattaacagtaaaatgtccattttaatgaaaatcctatgctaattcaaatgaggaccctactgttgaagaaacatttgctcttcacacataaacatgaaatataccctaactcatttatgagctgcagtcttgaatccaggcacaatatatcact

SEQ ID NO: 30990 - DNA, 171 bp, Homo sapiens
atagggcgaattgtagctccaccgcggtggcggccgaggtacttgagggcatcattaaaatcagccagtgttcagtgagagacttaatgatggatttaatagtattaaatgggcaaaaatgcccttggcctttacatgctcatttaaaaacatataaaagagcagtaattt

SEQ ID NO: 30991 - DNA, 206 bp, Homo sapiens
ctcactatagggcgaattggagctccaccgcggtggcggccgaggtactccttcatatagtagtaggttcagaaactcaggctaaggaaagcatccagaaaacattgtctgcctctgcaacagtttgtggatagcttgtaattgtagtttctgatcttgtcaaatctgtcttataaactctaaatgttgtggtcctcaccttggct

SEQ ID NO: 30992 - DNA, 457 bp, Homo sapiens
ttgagctcaccgcggtggcggccgcccgggcaggtacgcgggaaggacagattctcagtcttgaagaggcagcacggtaaaggggaaagatcatgagttttggggccaggttcccttggatattgtggggtccccacacttctggatgatgttggataactctttgagacttaggcttcacatctgtaaaatggaatacttaattttcagagttgtcataaacactaaatgatttgacttatatcaacctaattcctactggctcattgaactcagctcagctgtcccctctgttcggatgccttccccagtggggcttagttaggtatccctgctggataccctgccaagctcttacacattccctctgccataacactcattctttgttactgaattataatttcatgttcatttgtttatctctcatactaggctgtgagttccctgatgacag

SEQ ID NO: 30993 - DNA, 414 bp, Homo sapiens
  misc_feature 161: n = A,T,C or G
acgactcactatagggcgaattggagctccaccgcggtggcggccgcccgggcaggtaccctgcacacactatgttctcaagaaatattcatgtaataagtgaataattgaatgaatgaatgactaagtgaaacttctctttacaacaagcaaatgtaatnaggcctttctaagctctcatcatcctcattgtccttggtggattcccaccacactcagaattccttttcacctttccatgcatatgaggccccacctaatcaggtgctggtcttcttagctttctgtctcctaccactttttgtcttgcttcgggaactccactgtcttttctgttataggaacatgctaagggtattcttcatagtcaagagcacaagctctgaacccagcccaatctgtttttgaactcaa

SEQ ID NO: 30994 - DNA, 448 bp, Homo sapiens
cactactatagggcgaattggagctccaccgcggtggcggccgaggtacaaatttgatcattttattatatctgaaacagactaaaggcaggttgactgtgaggggtggcaggaagcttttgggtgatagatggtgagtggtctgtagtgctggttattccatatagacttctgtcaaagctcatggaagtgtttgtttaaaatgggtaaatttattacatatgttatacttcactagtgaaatctttaaaaactatgctggtggcttcctgtcatcttctgaataaaccctgattcttctttttcaaggtaaacaagaacttctggtgtgccttccacctttcccatacctccctccatcctcacctctaacctctccacttcaaattgccatctgcacctcagttgcgagctgccccctactcgtgtgctcttgcctctgggtcta

SEQ ID NO: 30995 - DNA, 310 bp, Homo sapiens
  misc_feature 180, 206, 207, 228: n = A,T,C or G
ctatagggcgaattggagctccaccgcggtggcggccgcccgggcaggtacaatgtcctatatttacgaggaccttactactcttaaatcgctgtcgttcaaaaacaaaacaatttttttcagcgtgttcttatatgcccattactgagctggtccctggggatgcaaagacacatgganctctcattgttttcctccaggaaatnntcacttggaaaaagaaacacngggagatgctgcctagaatccttgatgcctccgaagttagactggagttggattaacccggcctctctctgtggaaatagga

SEQ ID NO: 30996 - DNA, 427 bp, Homo sapiens
  misc_feature 322: n = A,T,C or G
actactatagggcgaattgtagctccaccgcggtggcggccgcccgggcaggtaccctacctgtaatatttgtattaataatatcttattagcattttaattagaaatttaatattaatgatttggaatcagtagttttcaacaattttaatagtgcaaatttatttgtagtatttgatggggagatatggtgttttgtgactatatttacaactggatgtatctgggaatatctcaaagtttctcccaaaaggaaaacatttctattacaaatatgtgacttgtgaaaataatttgtaattcttttcaatatatctcattnttttttttttttttttgagacagagtcttgctctatcacccaggctggagtgcagtgggggcgatcttggctcactgcaacctccgcctcctgggttcaagcaat

SEQ ID NO: 30997 - DNA, 558 bp, Homo sapiens
atacgactcactatagggcgaattggagctccaccgcggtggcggccgaggtacgcggggacagagagaaggttaagagcaacaagatgggaggcagctgcatggaacctgtcccactgaggaagtaaaacagagttttactcttgttgcccaggctggagcgcaatggtgcgatctcggctcaccgcaatctctgcctcctgagttcaagcgaggagcaagtgagtagctgggacaacagccctacctgatggactggacttctgcctggattggagtttgatcatgcctccatatgggtgtttaccaggcgtatgcattgaacctgagtttgtcccttcaatacaaggaaaatctctgccgcttagtgattttccaagaaacatgagcttctgcctttcaatgaggaagatactcagaagtcatgttcgagcactccggaaaatgtccttggagtttcaacatttctttggtcttccacatttcattttgtcctgattaaagaggaagccagttgctgtttgtgtggccatgtgagcaggcagggagatggtggct

SEQ ID NO: 30998 - DNA, 455 bp, Homo sapiens
tacgactcactatagggcgaattggagctccaccgcggtggcggccgaggtacttttttttttttttttttttttgtatttttagtagagacagggtttcaccatgttagccaggatggtctggatctcctctgacctcatgatccacccacctcagcctcccaaagtgctgggattacaggcgtgagccaccgcgcctggccgggtcaggctctttctaatctgtttaaaaccatatcacccagaaggtattcagtatatacttatttaaatgaattgaaagtcatatgagcagcatggacttactactttaaaaaccacattattagaaacctaacaccttggaagctctgcatattctgaatgaagaatatactaaaccactcagagggaaatagttattaaccattttaccacagacgactaaaccactaccatggcccttcccttgtttc

SEQ ID NO: 30999 - DNA, 434 bp, Homo sapiens
atagggcgaattggagctccaccgcggtggcggccgcccgggcaggtactaacattcaaaaaaccataaatatacatccacttaaaaagacacattccagttacgatacccttcttaaaacagaagtctgattattttatatattatctgatactgttactggcttgctattttgtgagctataagaagtaaactgatggttaaaatactataaccttgaaaatatacactaaccttcattatccaaaagaactgtcaaaaaacatagaaaaacagaaaacaaaccttttgaaagctttgtttcttctaccgctttggttagatgcccttcgacgatcagcttctctgccaaggaaaataaacgttaccatccaagcccaaactgagcagcatttccctgagctgggcagtgtaacacattccatgaccaaatt

SEQ ID NO: 31000 - DNA, 555 bp, Homo sapiens
acgactactatagggcgaattggagctccaccgcggtggcggccgcccgggcaggtacatttgttgggggcgtgacattaacatataaccacttagagtggacatgcagttagagaaaagtcaatgagctggaaccaagctgggaattccaacatgtagaagttaaacacaagaggaggagccagcaaaggaaacagaaacagagcttccagcaggtggggggcatttggaagaaaacgatgccatagaagccaagatgaaatagacatcaaggagagggaagtagtcaattgttttgaatgctatgaagaaagataagaataggtaaatagtccttatatttgataacagaggtcactagtgatcttgatgaggggtttcaatagaatggtgggattatatacctccctggattcaactgaggtaaggaaggcatacagaatagagacaggcactataaacagctctcataattgcattctagcaattagcacactgtctgatggggaggtggctcaatctttcttgcataactgaatgaatgagtaaactatc

SEQ ID NO: 31001 - DNA, 432 bp, Homo sapiens
actactatagggcgaattggagctccaccgcggtggcggcccaggtccttgggcttttgtttttaaaacaccaatgagtatatgctcattaagatagtttgatgcaataaatccttattttacttgcctctattactgcattgtaaactgttgtctactttgtcttcttgaaatcctacacctcccccagcccccacatttggcctatggaacattactttatcctgattttccccctaaccttctggcaatgcctctcagactccttccagaactacttttctctgttttccttttaatgatgacagtttatgcaattgtgtcttcaaacttataacgacccagacaatagtaataacagtcaacatttactgaattcttacttgtgttaagtgctgttatatatgatattttaatctttgtaaaatctta

SEQ ID NO: 31002 - DNA, 427 bp, Homo sapiens
actactatagggcgaattggagctccaccgcggtggcggccgcccgggcaggtaccataatttagttattgctcagtggttgaacatttaggttgcctctagatttttctatttattagaaacattcagggtttctagatttttcagttttataaggaacattccagtgaacactttcgtggaagacttttgcaggaatttcaacacctaattttgttacaaccctaactttctccatttgttttgatgagtagtaaatttttattttgaaaaagtcttaaggcaaaataaatgtaatgcacttatatttcaaaaatataattgccatatactacctataaaataggagtatttcaggaaatcaaacaaaaacaatgatttttctcaagcataaagaactatgcctggtatgacctgctccttttga

SEQ ID NO: 31003 - DNA, 404 bp, Homo sapiens
tacgactactatagggcgaattggagctccaccgcggtggcggccgggcacgatggctcacacctgcaatcccaaagtgcaaggattacaggtgttgagtcaccgtgcacggccccaagagatggtggtggtggtttgtttttttttttaacagtagaactgtttttttcgtttccattatttatttcctgattcacttataaatgttggagctattgaagcaattggaatttttttgaattatagttaacaatagtaaagatgtatcttaaaagatatagtagctttatttatcatttaatagtaatgtaatataaggccttacttgtgtgttccataatttttactttctgccagtatgaaatagccaaaagtgactgaaagccagtaattttcatatcccg

SEQ ID NO: 31004 - DNA, 456 bp, Homo sapiens
cgtaatacgactactatagggcgaattggagctccaccgcggtggcggccgcccgggcaggtacattacagagcatatgatctttcaaggttttgttccacatgtgttatgcatagtaactgctcatttctattaaaaatactcataaattgaatcacattacaaataagtgccatatacttaactgagcaatatacacacatacgcattcctgataggtgatacaaaggcaagaaattctgagaaattttaagattgtgatctgtatcatttggatggtatagcaggagtggcagagggaggaacgtttcctaagttcttcacttactggctcctgcacttaggtaggatcatgtcactagtgctggccaatgagcaaaagtatggtgtgccatttctggagtaagggaaacgtatgtgcaatttctaatttattttttctcttccattgatact

SEQ ID NO: 31005 - DNA, 443 bp, Homo sapiens
gagctccaccgcggtggcggccgcccgggcaggtaccgtaaaatacttgttttcttaactatatctcccactgggctcctggaggacgtgatcatcattgttccccaagtgcctctcatatatttggtggtctataaatatgaaataacaaatgaatgatggtgctatgaattcaaccacacccacacttcttttcaccatctgagagaaacagaaggatccaaatcttggtaatctaaatgcatgcctccaatacaaagatctttaataatcaccaggcctgaaccacttcttagcaattggccaggctgcaaggagccgtatcaactccttactaggacagcttaagcccctgaagaaattatctcatgcactaaggaatgacctgacataaaagcctacttgaaaataagctgatgcctgcccagagggaataatttaaa

SEQ ID NO: 31006 - DNA, 422 bp, Homo sapiens
  misc_feature 378: n = A,T,C or G
atagggcgaattgtagctccaccgcggtggcggccgaggtacatttgttgggggcgtgacattaacatataaccacttagagtggacatgcagttagagaaaagtcaatgagctggaaccaagctgggaattccaacatgtagaagttaaacacaagaggaggagccagcaaaggaaacagaaacagagcttccagcaggtggggggcatttggaagaaaacgatgccatagaagccaagatgaaatagacatcaaggagaaggaagtagtcaattgttttgaatgctatgaagaaagataagaataggtaaatagtccttatatttgataacagaggtcactagtgatcttgatgagggggtttcaatagaatggtngggattatatacctccctggattcaactgaggtaaggaaggcat

SEQ ID NO: 31007 - DNA, 210 bp, Homo sapiens
tatagggcgaattggagctccaccgcggtggcggccgaggtacattttacactgtcagctatgggttcagtcagatatgcccataaattcatttatgaagaagagctccctaaacttctaatgattttttcctggtggttttatttagctccaaaaacttatgttttttttcttaaaaaaattcccataaaatatattcatttatcaata

SEQ ID NO: 31008 - DNA, 296 bp, Homo sapiens
gctccaccgcggtggcggccgaggaactggatatttttgcatataaacttgcatttatatttcaaaaattaatagttattgacgttggctgttctgagaagagaaattgaaagtgtcacaaaataaaaaaagatgaaatgaagcatatataaattgtcaattttttcaattttctagccaacagagaatcgaaggattctgttcaaatattaataaaaattgaaaataaacttgtgcttatattttgtttgcaacacactagttaatttaacctgagactagttatctttaccgaa

SEQ ID NO: 31009 - DNA, 345 bp, Homo sapiens
ctatagggcgaattgtagctccaccgcggtggcggccgaggtacccagacctgcaagagttgtctcaaacaataacaacagtatacaaatgttaacccaatcttaattcagaacagcttaaatgtaataaggtaaccttggaaactatggcgagctctcaggtagaagctagaactctgtttcacgtgacagaagcagacagattgttaagaatctgttatgagtggagtcccatgccagggcttaccctggccaccacttactagcggaagccttgagcaaattctgcagccgttgtgagcgtcacagagtggtgaatgtaaagattatataacattctctatg

SEQ ID NO: 31010 - DNA, 432 bp, Homo sapiens
cactactatagggcgaattggagctccaccgcggtggcggccgcccgggcaggtacaataattagatcatggtatcaattcaaacaaagaaattgatgtcctgggaactggttatacaaatacattatttcttctctttgaaatgagtagaaggaaagggaactaataataaaatatcacattattgcctacccactaaaggcagcctgaaattttacaaaacagtcttcctggggtcgtctcgatggtgagatataactgcctttcataatactagaagtactgagacagaagaagaggctgggacccatctggattggctgtaggtaaatttgtttgtgctgggggctgcgttgggactgcttgacgcaaaaacacaacattggtctgagtccgaggtgtcccatttgatattggggcctgggactggcc

SEQ ID NO: 31011 - DNA, 448 bp, Homo sapiens
cgtaatacactactatagggcgaattggagctccaccgcggtggcggccgaggtacaaaagcctgacgatatggtcttgaggggtaatcctaaggctgttagaccgaaattaaaacaaaccttaccagtagatctgtgtttttaagacagctctatttaagaggaccatgctgattataccaagagataagccccacagaatgtaagggtgatcacttcagcaaacatgggcatggcattgcaattttctagtttttcacctcacagaagagcaaagatctcacaatcacttcgttaaatagcagcggattcctcaagacatacagtccgtggtatgcatgagcctgagtaagaggttgactttaattttttcagccttgaaaataaaaaaagttaaatgctcacgtatataattggttcaattatcactaaaataaagcagtgctga

SEQ ID NO: 31012 - DNA, 455 bp, Homo sapiens
ctactatagggcgaattggagctccaccgcggtggcggccgcccgggcaggtacatttgttgggggcgtgacattaacatataaccacttagagtggacatgcagttagagaaaagtcaatgagctggaaccaagctgggaattccaacatgtagaagttaaacacaagaggaggagccagccaagggaaccaaaaacagaagcttccagcaggtggggggcatttggaagaaaacgatgccatagaagccaagatgaaatagacatcaaggagaaggaagtagtcaattgttttgaatgctatgaagaaagataagaataggcaaatagtccttatatttgataacagaggtcactagtgatcttgatgaggggtttcaatagaatggcgggattatatacctccctggattcaactgaggtaaggaaggcatacagaatagagacaggcacta

SEQ ID NO: 31013 - DNA, 417 bp, Homo sapiens
ctcactatagggcgaattggagctccaccgcggtggcggccgaggtacatcatcgggaattcatgattaagtgactaaatgatttgtttctaaaacagagatgtatgctgtctgtggcaagggctgggagctgggcaacagctgggcagggggcacatcgccttaaagcctcatgcaccaaagagccaaaccggggagggctttcttagaaagcaaaatacagcgctcacactgcaggggtggcggcgcaggtgtggaaccctgtcttgatgcctaacgtgggggtcacagctatccgaaggcaggctccagagagcaccttgaccatttctgcttgttttctcccgtctatgccccagcctggcagtcactggcctctgatttaaagagtcgagtttgcgggtggtttgctaatta

SEQ ID NO: 31014 - DNA, 477 bp, Homo sapiens
gactcactatagggcgaattggagctccaccgcggtggcggccgaggtactcctactcatatgcttcagttaattatatatgttgaacaggtaggaagcagtgctgtttttatttattttaatatgttattcatacatttgaagaattatgttctttctgtaggcagctgaattttttttttttgagacgaagtcttggtattgtcccccttgctggagtgcaatggcatgatctcggctcactgcaacctctgcctcctgggttcaggcaattctcctgcctcagactcctgagtagctgggattacaggcgcctgccaccacgcccggataatttttgtatttttagtagagacagtgtttcactatgttggctgggctggtctcgaactcctgccctcaggtgatccgcctgcctcagcctcccaaagtgctgggattactggcgtgagccactgctgccagccggcagttgaa

SEQ ID NO: 31015 - DNA, 281 bp, Homo sapiens
tacgactactatagggcgaattggagctccaccgcggtggcggccgcccgggcaggtactgacctccccactcctcccttaggtgtgtagaatatgagagaacgatttagccttcatttagcaagttccacagggaaaccagtatcttcaaggaacagccaggttttagtgaaggcgaggtaaaggcaggaatgttcagtaaagatgttgaggagtagaggagctggttcacagtggaatgggggtttcaaacagctcagtaaaatggtttatgagggaac

SEQ ID NO: 31016 - DNA, 585 bp, Homo sapiens
  misc_feature 55, 398, 570: n = A,T,C or G
actatagggcgaattggagctccaccgcggtggcggccgaggtactccagcctgngcgacagagcgagactccatctcaaaaaaaaaaaaaatagctggtcatagtggcacacacctatagtccagacatttgggaagctcaggcagaaggatcacttgagcccaagaattcgaggctcgggaccatgattatgtcactgcattccaacatgggtgcagaacaagactcccaactccaaagaaagaaaaaggattatgggtttaaaacacttggaaaggatgtaagcttgtaggaaataaaatatcactgtcctcttttgctcagggtcagcaacatggtaaaatgaggaattttagaaattaacttccaggaaaaaaaaaagggagagagagagcangaagaaacacaaatatttacagttttgaaattatctactaattaggtgataagtagtgtgtagatagtggaaacagaataggatgcacagaagaatgttttgaatatagaaatgatacaaaacttgagcactgatcacaaatgctgaggcagacctgaagatggcacttcanggtttggacatatga

SEQ ID NO: 31017 - DNA, 449 bp, Homo sapiens
  misc_feature 226, 278, 283, 284, 319, 324, 325, 363, 364, 394, 421: n = A,T,C or G
ctactatagggcgaattggagctccaccgcggtggcggccgcccgggcaggtactttgaaagaattgatccagctgaattggaaaatgtgggaaggggatggggaagaggctgctccacctgagatctggctccaggacttacagcaaggggaacttgggcaagttacagacctgtcctatgccctcagttttctttatcagcagaaacagaaaatcatcccatanaactataagggtcgatggtattcagcgggtccccccaaactgagctgcacantctgnnagtcatgttagacaaacacatttctcaggccccancctgnnagccctctgaatcagaaattccctgtaaggagggatgnnatgaacttgaatttgcactgactttcccangctgttttcttacttctgatcaacttngggggtagggacccattgaagctgcata

SEQ ID NO: 31018 - DNA, 440 bp, Homo sapiens
actcactatagggcgaattggagctccaccgcggtggcggccgcccgggcaggtacgtcatttgggccaattgttcagactctttcttccctctgaaaccattaaccaaagccactaataagtagaaatgcagagttaagagccccttcctccctctttcaatttccagtggacatattaatgagcaataaagcagctaaaaggcaagcagctcaagaaagagaaagaagcaaagaaaggtgattgggaaaacagatattcagccctcagcaatgcagactgggctgccccgtgtgccatgtgggctgtgatcacaggaatttggagctcaatttcttaattggttctttagtcttatccaaagagaaaattggatttctagagatttcttctgtgcagagagcaattatgctaaagctgcttaggtaacagctttttcg

SEQ ID NO: 31019 - DNA, 450 bp, Homo sapiens
gtaatacgactactatagggcgaattggagctccaccgcggtggcggccgcccgggcaggtacgcggggccgggcgcggtggcgcgtgcctgtagtcccgagtaggtgggattacaggcatgtgccaccacccgggctaattttgtatttttggtagagacggggtttctccatgttggtcaggctggtcttgaactcccgacctcaggtgatctgcctgctttggcctcccaaagtattgagattacaggcatgagccaccgcacccggcaaaagccacatgttcttagcagttcttagtagtggtagagttaagtttgtctctggggctctttgttaccaccgctccagagttgcccattgaggactatcaattggaaatatgtccctgaggaaaaaatgatataccagttgattgtgtgttaccactcagatacacaggcaacaggg

SEQ ID NO: 31020 - DNA, 423 bp, Homo sapiens
tacgactcactatagggcgaattggagctccaccgcggtggcggccgaggtactataaaccaatgccatgtttttgtaaaggccggaatgaaagaaccacctggaatccgactcatggtgctaatactgaactcatttggcacaagttatttagattcaaaaaggccaccccaagagcactctctttcagtttgagcagaactcctgaaaatcatactaactacctttcattgtgttcttattatgagcaggatattgggataaagaacactggtttctctcatttaattccaacagcagtctggtggctcaggagctattaggattttttttgtatcgataaggagactgagggtcaaagaggtgacgtcacttgcccagggtcatagcaccaggaagcaggagagttaggctttacataca

SEQ ID NO: 31021 - DNA, 428 bp, Homo sapiens
taatacactactatagggcgaattggagctccaccgcggtggcggccgcccgggcaggtacatgcatactcaatgtttagttcccacttataagtgagaacatgtggtatttagttttattcttttttatactcagtccagatttgtggctcacaggctgggtagataaagacttttgtgtccaaatttccaaccagtagctgctatacacacatatctgggcctgccgattttcccatttgcttgttgaagaatcgacttttatgaaagaatcaagatctgtttattttcctaaaacaacagtaatgacggaatcataagtagaagtgggtaaccatgggttccctgaatccagcttctaggaacacactttctcctgtttctccacagttaagttttgtggataaggggaagatttatcataaaag

SEQ ID NO: 31022 - DNA, 347 bp, Homo sapiens
tacgactcactatagggcgaattggagctccaccgcggtggcggccgaggtacaaagcaaaatcaacatgctttttattttacctcattattacataaaaaatttttttgtagagacagagtcttgctttgttgcccaggctggtctcaaactcctggcctcaagcaatcctcccaccttggcctcccaaagcactggaattatagctatgagccactgtgctgggcccactacaccttttaaacaactcttctcctgtcacctctcaggtgttttattttagtttggtattatatttaagaattctttcttagtggcatacatttcatttctgtgatcagaaatca

SEQ ID NO: 31023 - DNA, 503 bp, Homo sapiens
actactatagggcgaattggagctccaccgcggtggcggccgcccggcaggtacatccattctcataatagaggtatctttcattaaggatggacttcgaaagtaactgaaacacctgtgtgaagggatgtgtgtgcctgtttatggggaaggggttaagagaagaagaagggataaaatatcatttctctttatatccagactgaaaacagtcaaaactaatacatttatacataaaagagattctcaaatacaccctgccaaatataatttataaagaagaagaatggcttataaataagtcaaatataataaaattgactcattgcaaagtaataaagctccatctgatagcattgggaataccgacttatgatttcagcaaatatttctgatttcactttagaaacagccttatattcccttaattatcttacctgataaattatctcagtaagtccaaagtaggtcagtggaaactcttttctctgggaactattcct

SEQ ID NO: 31024 - DNA, 436 bp, Homo sapiens
gcaattggagcttcccgcggaggcgcccgaggtacctgaacaaatcctatcaaggacagattctcagtcttgaagttgcagcacagtaaaggggaaagatcatgagttttggggccaggttcccttggatattgtggggtccccacacttctggatgatgttggataactctttgagacttaggcttcacatctgtaaaatggaaatacttatttttcagagttgtcataaacactaaatgatttgacttatatcaacctaattcctactggctcattgaactcagctcagctgtcccctctgttcggatgccttccccagtggggcttagttaggtatcccagctggataccctgccaagctcttacacattccctctgccataacacccattctttgttactgaattataatttcatgttcatttgtttatctc

SEQ ID NO: 31025 - DNA, 262 bp, Homo sapiens
atagggcgaattggagctccaccgcggtggcggccgaggtacgatcttggctcactgcaacccctccctcccgggttcaagtgattctcgtgcctcagcctcttgagtagctgggattacaggcgcgtgccactgcgtccggctaatttttgtatttttagtagagatggggtttcaccatgttggccaagctgaatctcaaactcctgacctcatgtggttccacccacctttggccttaccaaagtgcctgggtattaca

SEQ ID NO: 31026 - DNA, 449 bp, Homo sapiens
gcgaattggagctccaccgcggtggcggccgaggtacttttttttttttttttttgagatggagtcttgctcagtcgcccaggctggagtgctaacctctcctttcatgtggagatggacagggatggcaggagcactgagtgctcttgacaacaccattgaagatgatgctgacgatcagctaccctgtggagaaggcaggccaggctgggtgagaggggagctccttggaagtcagggggtctgtaaggacagcaaggatctctttgtcccaacctccagcagcctttatgggtgcttctgtgttggccttgattctgggatggccatctcagtgctgttgctggctagcgatttcagaaaactagatttttctaggcctgagccctgttttgagaaagaagcttccctctggtttgtagctcaacattaatgagttttggttcctg

SEQ ID NO: 31027 - DNA, 429 bp, Homo sapiens
ctactatagggcgaattggagctccaccgcggtggcggccgaggtacagtggcatgaccataacttgctgcagccttgaactccaggattcgagtgatcctcccacctgagcctccaagtcgctgggattacagacatgtgtcaccatgctcagctatttcacatcttttgatgtgatgtgacacaaagtatacaacatcacctatgggtgtccatgccaaaaacgggaaatgtttaacagtgagttattatatgtaacatccagcttacaggaatgataggaagagaggaactagtgaaatgatgccacaaggaagcacacagataaatccagaaagttagaaattctgtaggacaaatggcctggtctcttcaacaactgttgctgataatatgacaaaaaagagagtaagaagagcatgaggcatg

SEQ ID NO: 31028 - DNA, 474 bp, Homo sapiens
gactcactatagggcgaattggagctccaccgcggtggcggccgcccgggcaggtacagaattgattgaggtggtgggtctagaattaagagagctggatgagaaattactatagtcatctaagaatgaacggtagagcagtcagaatgaaaagagaaaactaggtcttaagaccaaatgacatgaggccatgtgtggtggctcaaacctgtaatcccagcactttgggaggccgaggcgggcagatcacgaggtcaggagatcgagaccagcccagccaacatggtgaaaccctgtctctactaaaatacaaaaaaaaaattagttgggcatggtggcgcgcgcctgtagtcccagctgctcgggaggctgaggcaggagaatcgcttgagcccaggaggcggaggttacagttagctgatatcgcgccactgcactccagcctgacgacagagcaagactccattccaaaag

SEQ ID NO: 31029 - DNA, 433 bp, Homo sapiens
agggcgaattggagctccaccgcggtggcggccgcccgggcaggtacctaacttattagggccctgataatcaaattagccaataagtaagaaaatgttttcttaaccacactgtaaattaagaggattcatattgaaatcacttttccattattgctgtcttagcctgctaaagttatatttagtgtagtgcaactaggcagggttgtgagagctgggaaggtagactgttgtattgggcagggtcagggcagataaaggaccaaaataatgcctgaaatgctgtattaacctgctctaccttgaactgctgtcttgaattggggggaaaaatgaagctctgaggggatggtgcacagggagaaaagagagaatctcaggaattgaaagtctcgatggagaagaggtgggagaagaataggaggctagagtg

SEQ ID NO: 31030 - DNA, 289 bp, Homo sapiens
taatacgactactatagggcgaattggagctccaccgcggtggcggccgcccgggcagtatttggttttcaaaagaatcttatggagagcatttttgaaagtagatgtttggaaatctttccaacattatgtgatttttgtctctaaaaatgatgtatattgcttataaaaactcatatctgcacacttatcttagaaactgaaattcctaacctcttttagaaatcttccaaatggagaggttgagttttaaatatattgaggaattctaaggaggacagtggctcat

SEQ ID NO: 31031 - DNA, 462 bp, Homo sapiens
ccgaggtacctgaacaaagtccatcaaggacagattctcactcttgaatatgcaacacagtaaaggggaaagatcatgagttttggggccaggttcccttggatattgtggggtccccacacttctggatgatgttggataactctttgagacttaggcttcacatctgtaaaatgggaaatacttatttttcagagttgtcataaacactaaatgatttgacttatatcaacctaattcctactggctcattgaactcagctcagctgtcccctctgttcggatgccttccccagtggggcttagttaggtatccctgctggataccctgccaagctcttacacattccctctgccataacactcattctttgttactgaattataatttcatgttcatttgtttatctctcatactaggctgtgagttccctgatgacagaaaatgtcttgttggttttg

SEQ ID NO: 31032 - DNA, 407 bp, Homo sapiens
tatagggcgaattggagctccaccgcggtggcggccgaggtacaaatatctatgagaagtcagattcagtggaaagtctgtgattatggttttgttttttaaatgaaattgaacatttaaactgcaaaacgtggggaatgaaaaagccatctgtcaggcactatatcacaaaagaatccacccacttacaaataatccctgaatgtcaccactcttctttctattcatcatcctggtgttgtaaatggaatactcacaataaagctgccattagcagagtatccctgtgatctatccttaccaaccatgttgatctaaagttggaggtcactgtgattagaaaactcaagacaccaccccctgccccaccagggttgaaagggactgaaaagtagatttttaactgt

SEQ ID NO: 31033 - DNA, 100 bp, Homo sapiens
tccaccgcggtggcggcccgaggtactattaaatttaatgagaggtaacccatgcaccggcaggaagttcaagggggacagaaggggcttgctccactct

SEQ ID NO: 31034 - DNA, 424 bp, Homo sapiens
ctactatagggcgaattggagctccaccgcggtggcggccgcccgggcaggtacttctattttttttttttttttttttttgtatttttagtagagacaagatttcactctgctagccaggatggtctcaatctcctgacctcgtgatccacccgcctcggcctgccaaagtgctgggattacaggtgtgagccaccacgcctggcctccagtatttttaaattaattttcttgctcaaaccagaattaagtttctcttaccctaactaagggaactttggctaagacaaaaaaacgacctgttacttaccttaagaaaaccaattttatttctgattattgcaaaagcacacaaaaaatatgctggttgtttagccctatatttctgcaaaaccaacatttaaagtatttgacaactttttaa

SEQ ID NO: 31035 - DNA, 440 bp, Homo sapiens
  misc_feature 303: n = A,T,C or G
ctatagggcaattgtgctccaccgcggtggcggccgaggtactttcaaatgagaatggagttcagttttaccatctttaaaccccatgtagggcaaagtggagtcacaactcagcttgaattataaatataattgttcttgtaatggtgaggagatctacctttgaggtttcccagagtcaagatgaaaatcatcttttcactctggagaaaaacagctccttactggactgaggctgtcagacgtagacttgggtcattgctggaagaaacatagaaagcagcacagctccgaggtcctttntcatcagatgtgtaaatatggccttctctcttcagagcagattgcctggcagtcatcatccctcctgtctgtctccagcccggctgctcatgcagtgtctcaagcttcttgcatttgctgtgttatgtggtttttga

SEQ ID NO: 31036 - DNA, 394 bp, Homo sapiens
tatagggcgaattggagctccaccgcggtggcggccgcccgggcaggtacagtggatatggtgagcactggttagagtctggatatattttgaaggggaactttactgaaggattacatgtgaggtgagagagaaaaagagtcagggaatataacacagtttggagcctaagcagctggaaggacggagttcccatttattttggtaaggaaagatggtttggggaaagagataagttttggacatgttatttttgaggtgcctattatacatgcaagatgcatgtcatgttgagggcagaggtctgaacaggatgtgtaaatgtgagacatcaccaagggagtgagtctacttgaaggaaagatctgggagtggaactggggtccctaacatt

SEQ ID NO: 31037 - DNA, 409 bp, Homo sapiens
tactatagggcgaattggagctccaccgcggtggcggccgcccgggcaggtacagtagtgcactcttggctcactgtagcctcgacctccggggctcaagtgatcctcctgccttggccccacaagtagtgggactataggcacacagcaccatgcccatctaagtttttgtattttatgtagagacaaggtttcaccatgttgcccaggctgatcttgagctcctgagctcaagtgatctgcccaccttggactcccaaaatgctgggattataggcgtaaaccaccatgcctggccttaaatcaactttagagtcaacatctcttatcactggagcttctggagaaactccatcacgtggtgctctctttcctgatgtgttgtgcccaaatagcttgttctcatcag

SEQ ID NO: 31038 - DNA, 336 bp, Homo sapiens
tacgactactatagggcgaattggagctccaccgcggtggcggccgaggtaccacaatgctagggctgaggtctccgggatcctctgggcctttttcatggttgaaaaatgacagtggcagcttcattccttgtgcccagttccagagaggaggaatgagaaaggagcaaggagaaaaggctgacatctatgggaagccaaactttttcaggaatcccctgctcaggtttgctcaggcttgtttgacatcttactggtaagagcaccattgtatggccagccctatattcaagggaggctgaaaactgtaattttacagctgaatcccgcgtacct

SEQ ID NO: 31039 - DNA, 249 bp, Homo sapiens
tacgactcactatagggcgaattggagctccaccgcggtggcggccgaggtaccctggcaaggtttgtcctgtcttggtagcagaaagaacttctcaaagtaagggcttcacactaggggagagttcaatggcccaacccagccatggccaccctgacaccatgccctgatgctagtccctgtggcctggcccacactgaaaatactgtggggacaacagaatggatttgcaagttaccactatctctc

SEQ ID NO: 31040 - DNA, 417 bp, Homo sapiens
cgcggcggcggggcgaggtactactggcttcccagtggttgggttgagtataagcccccaaatatgagtaaaagaagaaaaagttaattcaatcaccaagtcttgctcgcatattaaaaattggatagatgaatgttcaatcatatgttttggctttggccagccagacgaggtcaattattagatttgaactgcttagaattcttcaggcaagtcttgatggagcacttcttggacagttagaactttaccaggttcacaggagagctcagatgaagcgaacacctcatccacactggtttcctttggagacctttactgttgagaggtggttttcatagccgcaaaatgacaagtgcaagttgagtagatcagtgtttatcaaccaggtgccacattgtgccccaggagacattt

SEQ ID NO: 31041 - DNA, 464 bp, Homo sapiens
tggagctccaccgcggtggcggccgcccgggcaggtactttgagctgtggcatctcctgaatttcagtggctttgcttttattaagctctgcattagagagcaccgaaatgatggatatatttaaaagctgcatatttttagaaacagcaaaaatctagggcttgttccttggtgaaagaggtagggcagtggttagaacctcctggctgactgtgggaattgatttgctgctagaggagggtagattgggttttccaaagtctttttaagacccagaccatctgaaacaagggaagggccatggtagttgtttagtcgcctgtggtaaaatggttaataactatttccctctgagtggttcagtatattcttcattcagaatatgcagagcttccaaggtgttaggtttctaataatgtggtttttaaagtagtaagtccatgctgctcatatgactttcaat

SEQ ID NO: 31042 - DNA, 419 bp, Homo sapiens
ggtggcggccgaggtacaggaactggcttagccataggcactgaagacttgagttttccaagctcagagagaaaaacagtcctcaagcacacattaacccttcctgcaccaaaggtggggtgcagccttctcaactctggcttctcctctattccaggctcttttggtttctatcccctagaattgcattaacatttcttttccatattggctgtaaacattagaggtaaacccatgaaatggtgtttaaatggaaatcggtcctgcaggcttgtaaagtgcttttgtgctttctctcttactgctagagattcaactgctgtaatttcctcagaaaaactgactctctctttaattctcaaagctaatttggttataacataattctttcctttaaaaatcatatttttgtttgctct

SEQ ID NO: 31043 - DNA, 404 bp, Homo sapiens
ggcgaattgtagctccaccgcggtggcggccgaggtactcttgtgtatgtgcacatatatcatacatgtgtgtgcacatgggtgcgcatatatatgtttgcatgggcatgtgtgtgtatttgggaatgtgcatgatatgttcatagaactgggtaatcatgatcttgactagtttttttagctgtccagttttggacattaaatttgaggtgcctgtagaagaagagagagggggccgggcacagtggttcacacctgtaaagccagcactttgggaggccaaggtgggtggatcacgaggtcaggagtttgtgaccagcctgaccaacatggtgaaaccccatctctactaaaaatacaaaaattagcctggcgtggtggcacatgcctgtagtcctggctac

SEQ ID NO: 31044 - DNA, 431 bp, Homo sapiens
tatagggcgatattggagctccaccgcggtggcggccgaggtactgatctcctgttggcctgcttcatttgtcctgcagttgtcaatccagaacaatatggaataatttccgatgctcctattaatgaagtagcacgatttaatctgatgcaggtaggccgccttttgcagcagttagcaatgactggctctgaagagggagatccccgaacaaagagcagccttggaaagtttgacaaaagctgtgttgccgctttccttgatgttgtgattgggggccgtacagtggagacccctccattgtcttccgtcaatcttctggaaggattgagcagaactgtggtttatataacctacagtcagcttattactctggtgaattttatgaagagtgtgatgtctggggatcaactgagagaagatagaatggc

SEQ ID NO: 31045 - DNA, 483 bp, Homo sapiens
ctactatagggcgaattggagctccaccgcggtggcggccgcccgggcaggtacctaggggaatttctgagttcatgatatcgtaggtggtgtggaaacaagtcccagcataaacccacacagctggctgaatgaagttcaagtgaaggtcatgcagcatcaaagtatatgtgtgtcactgaaacttatggcagtggagtgagaataattttgaaattacttagattgtgagaaaatctggctgatgattagaagtgttgatataagaggtcagtttggagttccactcaaaattcatactaattttaatgttatggtattctaaactactagatgggtaaggggaagttataggattctgaacaataccattaagaattaggataggattttctactgtggtgtcacagaagaatcagagctagcaaattcataaaaagaaaatttgattccccaagcccagggtaaaaatccagagtgctg

SEQ ID NO: 31046 - DNA, 167 bp, Homo sapiens
cgactcactatagggcgaattggagctccaccgcggtggcggccgaggtaccttctcactagggttactgtgaaaattaagtgtatgtgtaaactgttcctcacaacccaagatattaaacactcagtgaatggtagcttacagcatcatttttattattaatagaa

SEQ ID NO: 31047 - DNA, 409 bp, Homo sapiens
actactatagggcgaattggagctccaccgcggtggcggccgaggtacacaaaccataaggtcagtaaatatcacaaagagagtatgcctgtgtaaccaccatgcaatctctgtttatcattgtaggtgatagccacctctgcccaagttggctaatacttgaaaaaaagtggcccagaactcacgtgctgcacattttctgaaattactcttgacttctgatttcatggcaactcttcttattttccagtgttgcttaaaattttgtcttatttttggtattcatttatttcagaggtctttaaggagacattaaaacaaacaaacaaacatgggttcattattaaacctggaatcaggttgtggatgaaactgcttaaggagaatataaaatgagtaagaaaaaata

SEQ ID NO: 31048 - DNA, 419 bp, Homo sapiens
  misc_feature 371, 392, 393, 410: n = A,T,C or G
actactatagggcaattgagctcccccgcggggccggccgaggtcccaggagggtattgatgtttgaggtccaaactgaaaacccatcacctccttcccactgctatagcagcgttagccctggggttcattatctagccagttcacaccttctaaagtggggctctgaaaatgtcttacttccctcacagacaaagcaattctcaagcctcctgagatcacccaccaaccagagcaactgctgtcacttggaggtgcagctgaattcttctaattgtgacacaaactcttgaaactgtaaatgctgaaagattaaatgaggttataacactcagaaggttttacaagtaaaagtaagtcaaatcaatagngtctttatttcatatctgtannatggtttagctctgcgnggaagtgta

SEQ ID NO: 31049 - DNA, 535 bp, Homo sapiens
ctatagggcgaattggagctccaccgcggtggcggccgaggtactcaaattggcttagatatccttgcctttaaaggctttgtatccgcaataactgctctctattgtccttgttaataaagtattattttcaccttattattactaatcttttctttgtaagtaaccacacctggttctatccaaaaaaaaaaaaaaagtgcctaagtatttgccctttgtggtaatacaatgcataatttagttaatctaggctatctttccgtgagaggtgattgtttctgtattatgaaatgtgttcacagtaaagcaaaatccacgccagatacctagaggcagacggagagccacttaccaagcacgaagctgcttcaaactaaccctgacgcgactgtatagccactcccacacacaaggtattactcatgccaacttagcctctgagttataaccgcacctttcttttacaaacatggccctttattaagttaacattacacacagccaggccgagagtcccacccccagaccccat

SEQ ID NO: 31050 - DNA, 371 bp, Homo sapiens
acgactcacttagggcgaatacgagctccaccgcggtggcggccgcccgggtaggtactgtcttgggggcgtttgggggctttccatgcccacgacaaagtgtaacatctggatcaggagacaggaaaccaaataacaggttctcctctcagccccaaatgagttataactgtaagcccgtgcatacaactttagagtttgcttagcagaactgcccctagcagttggcactcatacatagaaattactttatagagattttggctaaggcctgacggtgttcagagctcctgattgaggttgcgtaaacccaccgagtgtccaagaagcacaacagaacaggccctcacatattctaccactatactgca

SEQ ID NO: 31051 - DNA, 404 bp, Homo sapiens
attggagctccaccgcggtggcggccgaggtactttggcttttgtttctagaacaccattgagtatatgctcattaagatagtttgatgcaataaatccttattttacttgcctctattactgcattgtaaactgctgtctactttgtcttcttgaaatcctacaacctcccccagcccccacatttggcctatggaacattactttatcctgattttccccctaaccttctggcaatgcctctcagactccttccagaactacctttctctgttttccttttaatgatgacagtttatgcaattgtgtcttcaaacttataacgacccagacaatagtaataacagtcaacatttactgaattcttacttgggttaagtgctgttatatatgatattttaatc

SEQ ID NO: 31052 - DNA, 423 bp, Homo sapiens
actactatagggcgaattggagctccaccgcggtggcggccgcccgggcaggtacgggacttgtctccaggagacatgtctgggaagaagagctagactggagaatcatgagcatgttcaggtgaaaacatgtgagtggataagagcaagagggtgagaacacagaccaagggggccaagggacagactgtgttcagtatttgggtatggaacttgtttttgctacttgctagttctaagaccaggctcagactctaacttctctgtaatgtgggaataatgacagcacttaccttataagattttacaaagattaaaatatcatatataacagcacttaacacaagtaagaattcagtaaatgttgactgttattactattgtctgggtcgttataagtttgaagacacaattgcataaact

SEQ ID NO: 31053 - DNA, 438 bp, Homo sapiens
ctatagggcgaattggagctccaccgcggtggcggccgcccgggcaggtacattattcatacactgtaatggcgtaaaagaaccctagacacatggactcccttgctaataagtgcaccttcaaagcgatagtcattatttagcatttatcggaagaggctggccccagctctggtgaagggcagagaaggtgtgggtggcctcacgtgttctcaatgtcacaaaatgatagcattaaacagacccactccctcatggaaggcaatttgacgaccttctattgatattgcaacatgtgtctctggcagcagatctcaatccttatgtaagggatatgggaagacttcctccacttcatgtatatgctttccctaagcagatctggcagatgcaaatttatccatatcttttcatttccattgaagttttagtatccac

SEQ ID NO: 31054 - DNA, 437 bp, Homo sapiens
atagggcgaattggagcttcaccgcggtggcggccgaggtacagatttgctacatcatatagcattttttagaccatattttagatctttccatcctccaactaagatttacctttttatatgaagctttaattactttccgcaacacttttgtcaaaatctgaagtcttttaagaaccaagatgtttctgatgtttattttaatgttcagggattttggaggtgaggggctagaaacactgactcctgcccctgactcccgcccctgactcccgcatttattttcataaatgaaaatagtaaaataaattcattaagggtattatgtggagaatagaaacaagagtaaaggactgagggtatattagagaaaactatcataattttggcaagagataatggacatcgaagcttgagtgaaaataactgttagagaa

SEQ ID NO: 31055 - DNA, 325 bp, Homo sapiens
acgactcactatagggcgaattggagctccaccgcggtggcggccgaggtacgcgggggcctcagggacgggtcttttgaagtgcctggtgtgacccatcttccgtgcttgaaatcgacgtagtggaccctggctagcatatttttccctgccaagattattgcaaaaagaccatgtggtggttaatatcggaaagaatgtgtggttaatatcaggaagaacacgtgaaatggagaatttcagggctaacatttcttgttttgtttctgaaaacatcggcatgtcctaaaaagtgttgcctgtgcccatcatcttttaggcttgg

SEQ ID NO: 31056 - DNA, 453 bp, Homo sapiens
gactactatagggcgaattggagctccaccgcggtggcggccgcccgggcaggtacgggacttgtctccaggagacatgtctgggaagaagagctagactggagaatcatgagcatgttcaggtgaaaacatgtgagtggataagagcaagagggtgagaacacagaccaaggggctaagggacagactgtgttcagtatttgggtatggaacttgtttttgctacttgctagttctaagaccaggcccagactctaacttctctgtaatgtgggaataatgacagcacttaccttataagattttacaaagattaaaatatcatatataacagcacttaacacaagtaagaattcagtaaatgttgactgttattactattgtctgggtcgttataagtttgaagacacaattgcataaactgtcatcattaaaaggaaaacagagaaaagt

SEQ ID NO: 31057 - DNA, 431 bp, Homo sapiens
actactatagggcgaattggagctccaccgcggtggcggccgaggtaccaggcaaagtgttaggaacgttttatccattttctcttatgtgctaagcagtcccgctagctgcttcatcctggaaatatagatgggagactgaagtcaaggactccaactgtgtgtttaacatctcccttgactcccaggaacctccagtttggcatgtccaaaatgaaacacatgtctgtcttctatcaatatgttttgcccaacccctgcaacactcccacttccagaaaaatcacacaaacaaaaaaccacacacacaaccattgtgcctttcctctctcagggagtgccaagaaaccatctggttcatgccagaaacttgggagtcaaccttgcccccttctctgcttgccccccataaatctgccaccacaaatcct

SEQ ID NO: 31058 - DNA, 562 bp, Homo sapiens
aatacgactcactatagggcgaattggagctccaccgcggtggcggccgaggtaccaggctcagtggaagccaggaactggcaacttaatcctgttaatgagattttgggcaagtcgctcaatacccccttagcctgattttcctcatcagtcaagtggcaacaatcatttaccttccctgactcccagggtggttgggagaatcaatgaaatgatgcacatgaaaaagctttgcaaattactaagggctatctatgtataagcatatgtgtgtgtgcatccaaacatacacaacctaaacataccccaaaatgaacatcaaattacagagaaagactgaagtctgttaagcaaatttctgctcatcttttatgatccagttgaaatgtccctgcttctatttatttggctcagtgcctaaaataattagcttgaattttttttttaaaaaaagaatatagtcaaacaaaaggaattgcacttatggcagagtggtgatcactgaacagtgagcaatgagactgaccaaagaagaaagcagttttgtgttttctatcccatc

SEQ ID NO: 31059 - DNA, 444 bp, Homo sapiens
actactatagggcgaattggagctccaccgcggtggcggccgcccgggcaggtacatctggcaaggggcacttttactctgatgtcgggtgttttagggatatgagttcagtgaataagtagctagagggaggagctagttaggtctcgattttaggcaaatgctaaatctacctcattttccatacctgtcttttgattgggatagctaaagaatttataccagatgaaccaagcaagccaccttcttacgacattaaatttggtggaccaagcccccagtagaagcgctggggcccagcacggccaggctctcaccttttagagcagcacccccgactaatccagcgaatggaatctggctatgaaagcagtgagaggaacagcagcagccctgtcagcctggatgcagccctgcctgagagctcaaatgtctacaggtatt

SEQ ID NO: 31060 - DNA, 416 bp, Homo sapiens
ctatagggcgaattggagctccaccgcggtggcggccgcccgggcaggtacaagaaaaaatcaaacaatcacatcaaaaagtgggcgaaggatatgaacagacacttatcaaaagaagacatttatgcagccaacagacacatgaaaaaatgttcatcatcactggtcatcagagaaatgcaaatcaaaaccacaatccgggaggtcttgccaaagaccacccgggctttccgggcaatgtgctagagcttctgggaagcagtcgtggccctttggagattccacggcttcggatccctactgcaggatgctccactgtgtctgctggcctctggcgttttgctgaggggtaacctcggaatggctagaaacaagaacattgagatggcccaagtcgtgccccaggcattcccgca

SEQ ID NO: 31061 - DNA, 415 bp, Homo sapiens
attggagctccaccgcggtggcggccgcccgggcaggtacatgaaaggagattgagggcagggagctcacagaaccaagacagcaggacccaggattcagacctggaaaatttttatttcctggctggtttgtgtgccctcatgcatgttatttacagtgccatgttctttcacatgggaacactgacacaggtgaaatgggaggttccataggatgatagtgcaaaaacattaaagacaatcctagcagatgcagtgagttcaagggagagtccttgtggagtaacacgaaaggcccggtggatgagatgtatgaagatctaaatgcctgcagatagtgagctgtctgcaactaccacaaagcaaaatcatgggcgataactccccagggtaggatctggcctgagcatcccca

SEQ ID NO: 31062 - DNA, 444 bp, Homo sapiens
tactatagggcgaattggagctccaccgcggtggcggccgaggtacatttgttgggggcgtgacattaacatataaccacttagagtggacatgcagttagagaaaagtcaatgagctggaaccaagctgggaattccaacatgtagaagttaaacacaagaggaggagccagcaaaggaaacagaaacagagcttccagcaggtggggggcatttggaagaaaacgatgccatagaagccaagatgaaatagacatcaaggagaaggaagtagtcaattgttttgaatgctatgaagaaagataagaataggtaaatagtccttatatttgataacagaggtcactagtgatcttgatgaggggtttcaatagaatggtgggattatatacctccctggattcaactgaggtaaggaaggcatacagaatagagacaggcact

SEQ ID NO: 31063 - DNA, 443 bp, Homo sapiens
tacactactatagggcgaattggagctccaccgcggtggcggccgcccgggcaggtactgtttgttctccaaaatccagctttccgttgaaagtcaatgaaacatctctaaaatgcagacatacccaggttcattgggaacacagtcactgtgagtatacatgattatgtcctgctaaccctattgggaaagaatgctgggcttggccctagtaagtagacttgggttaaagttcacctccgccactaactagctgggaagttcaacttccctgagctgagtttgtcacgttagagaatattaataaatatgaaaattgtggagcagtcttaagtttaaaaggaactttcatggacattagctcattttgctgtgcccaccctgggaaggaagcaggacaggcaggcagtggcatccctgtcgtcaagcagcctgaggactgc

SEQ ID NO: 31064 - DNA, 276 bp, Homo sapiens
gtaatacgctactatagggcgaattggagctccaccgcggtggcggccgcccgggcaggtacccactccctcaattttctctaaagatctcatttcagacatttaaatgaatattatgctacacaacagggaaactcagatgtccatcccctccttattcattcaaacatttccactgccataatatggcagctgcaacgccaagaaagaagaaaggaaaaaagactaaaagaggtgaagaatgaaaaagacctcaaagaaatttttttttttaga

SEQ ID NO: 31065 - DNA, 411 bp, Homo sapiens
actactatagggcgaattggagctccaccgcggtgggcggccgcccgggcaggtacttcttggagtgccattttccttgtaacccttagattaattcagattgactgagttctgtgtcagtggaaattgccagaattacatcattgtgctttgcatctagtttcacttttccaaaagcctacacagatttcagatgtttagaaaatagctcttgttttccttctgggtaatctttttcatgtcaccactcttgtcagcatctgcactgggcaaatttcctaggacctcccttctgcttcttttaaaatacgaaaacaaaatcaatgtagcgcagcaagccagggaaagtctgctttgattgacttacgaccatagtttcccagcagttccttcaaaggtggcttcccaagt

SEQ ID NO: 31066 - DNA, 426 bp, Homo sapiens
gcgaattggagctccaccgcggtggcggccgaggtacaagaaacagaaatcaatgaggcttacttaagcaggaaaggaatctattggaagaatgtccaacagaattgatggggagcccgcagacacaaaatctcatatacgataaaaacttgcagacagggctacttctatcatcaaaaggtgtttcttaactttataacacgtgtgaatagccaaccttaggccaagcctggagggtaggtatataaaaggagtaaaggtcctgacagtaggaaaatggattgaattaaaattaaagtccgggtgtggtggctcatgcctataatccctgcactgtggaaggccaaggtgggtggatcacctgaggtcaggagttcgagaccagcctggctgacatggtgaaaccctgtctctagtaaaaataaa

SEQ ID NO: 31067 - DNA, 478 bp, Homo sapiens
ctactatagggcgaattggagctccaccgcggtggcggccgcccgggcaggtaccaggagggtattgatgtttgaggtccaaactgaaaacccatcacctccttcccactgctatagcagcgttagccctggggttcattatctagccagttcacaccttctaaagtggggctctgaaaatgtcttacttccctcacagacaaagcaattctcaagcctcctgagatcacccaccaaccagagcaactgctgtcacttggaggtgcagctgaattcttctaattgtgacacaaactcttgaaactgtaaatgctgaaagattaaatgaggttataacactcagaaggttttacaagtaaaagtaagtcaaatcaaataggtctttatttcatatctgtaatggtttagctctgcgggaagtgttagcagcttatatgaattatgaagaatttagaagacaatccctaaacacatgaaa

SEQ ID NO: 31068 - DNA, 214 bp, Homo sapiens
ggcgaataggtgctccaccgaggcggcggccgcccgggcaggtacatgggactacaggcacgccccaccatgcccagctcatttatgaatttttagtagagacagggtttcaccatgttggccaggatgatcttgatctcttgacctcatgatccgcccctcttggcctcccaaagatgctgggatcacaggccgtgagccaaccacaccctgg

SEQ ID NO: 31069 - DNA, 408 bp, Homo sapiens
actactatagggcgaattggagctccaccgcggtggcggccgcccgggcaggtactaatcatactgaccattatgagcagtcatttctggatttctccactgtccctttgctatttggaatgattttgggcttcactttctttattaggttgactgagctgctcttggttaaaaaacaaaatttaaactttaaagaaaatatcatatcagcatttaattaagtttattgcaaattgttgcaataaacctagaatgctttcaacagttttgcaggattttgttgtggttgaaatgttagtttcatttggtttacttttagctttaattttaattttaccataatatttcaccagatatttcataattccattttagatgaatgttcaatttcatgaaaagggataacat

SEQ ID NO: 31070 - DNA, 453 bp, Homo sapiens
atacgactactatagggcgaattggagctccaccgcggtggcggccgcccggggcaggtaccctacctgtaatatttgtattaataatatcttattagcattttaattagaaatttaatattaatgatttggaatcagtagttttcaacaattttaatagtgcaaatttatttgtagtatttgatggggagatatggtgttttgtgactatatttacaactggatgtatctgggaatatctcaaagtttctcccaaaaggaaaacatttctattacaaatatgtgacttgtgaaaataatttgtaattcttttcaatatatctcatttttttttttttttttgagacagagtcttgctctatcacccaggctggagtgcagtggggcgatcttggctcactgcaacctccgcctcctgggttcaagcaattctcctgcctccgcctcccgagt

SEQ ID NO: 31071 - DNA, 477 bp, Homo sapiens
tacgactcctatagggcgaattggagctccaccgcggtggcggccgaggtactttttttttttttttttttttttttttttttttctttcacgagtgtttatttgctttccaggaacttcagggaaaaaggttaattaatggagggaggaaagagggaggggttggcaaatcaaacacaggacttaaaagtcctagatctaaaccttgaaatccccaaatattttatgttataaaaagatgtcccactttcaaaatccagttctgtaaatagttttcaaaagtcgggggacttgcaaagatttaatttgcctgacaaaaattttcattggcattttctatatttcctagcgccaccctttatgatttttaatccctaaacatctaaattaatgtggacatctgcttctagcaaatatagtcagagcttccctgccactgccaatttgcaatcttaaaaccataggaataaaggaaga

SEQ ID NO: 31072 - DNA, 451 bp, Homo sapiens
ctactatagggcgaattggagctccaccgcggtggcggccgaggtacatttgttgggggcgtgacattaacatataaccacttagagtggacatgcagttagagaaaagtcaatgagctggaaccaagctgggaattccaacatgtagaagttaaacacaagaggaggagccagcaaaggaaacagaaacagagcttccagcaggtggggggcatttggaagaaaacgatgccatagaagccaagatgaaatagacatcaaggagaaggaagtagtcaattgttttgaatgctatgaagaaagataagaataggtaaatagtccttatatttgataacagaggtcactagtgatcttgatgaggggtttcaatagaatggtgggattatatacctccctggattcaactgaggtaaggaaggcatacagaatagagacaggcactataaac

SEQ ID NO: 31073 - DNA, 398 bp, Homo sapiens
tacgactcactatagggcgaattggagctccaccgcggtggcggccgcccgggcaggtaccacaggacacctggtgggtagtcctgggatggggtcctaggtctctggagcctcctttctctcccagtggtcatcccaggatgggccgaggattctacacgctgtcagaacatgtctctctggttgcacagaacaaggacgtctgtctcgttcttacaggagtggggaccatttcacttgtcaaactgcctttctcttagaagcttctcaacctcaggccacggagattttaaagtgctctttggcaccagcaggggattgattttctgagttgggttttgttttgggtgtcagattcaaatatttggtgtgccttctgagggaattttgatgtttgg

SEQ ID NO: 31074 - DNA, 416 bp, Homo sapiens
ctactatagggcgaattggagctccaccgcggtggcggccgcccgggcaggtactttttttttttttttttttttttttttgagacagggtttcaccgtgttagccaggatggtctcgatctcctgacctcttgatccgcccacctcggcctcccaaagtgctgggattacaggcgtgagccacccatccggcctaacgagacttatttttactcaactagatggcgttcattcatttgcttactcagctgtgccaggaattaagttgggcactgggaattccaaaaccaacaagacattctctgtcatcagggaactcacagcctagtatgagagataaacaaatgaacatgaaattataatccagtaacaaagaatgagtgttatggcagagggaatgtgtaagagcttggcag

SEQ ID NO: 31075 - DNA, 353 bp, Homo sapiens
tatagggcgaattggagctccaccgcggtggcggccgaggtactccagcctggatgacaaagtgacaccctgtctggtaaaataaattaccacgggcagataaagtgctcagtgagcccacactaatttgccacagaagggtggaagcaaattcaaggctgaaatctagctcttcatttcctgaaatcattcatgcccactctctcctggcatgaaatgctgataacctggtttcaattttaagcttaaatttacagcaaacagtgcaggtatctcagttcaatgccttggaacctcctctaaagatgattctactaacactcattttaaaagtgagtgcaaaataattttta

SEQ ID NO: 31076 - DNA, 447 bp, Homo sapiens
ctactatagggcgaattggagctccaccgcggtggcggccgaggtacaataatcttggaatattagatgccaatataagtggagcagtgtgtaattatttggaaagagaataaaagtataattcaataacttctatgcccagtcaagttgtcattcatgagattaagttcgcgagccaagacaacaaaaagacattttaaatatacaaccatttatgaattatacaactcaagcatgcttcctaaaagtggttgtgtcttatattccaaacaattgaaaaataaacaaaaataaagaactcgtatagggaagttatgaaatgataggagaagaaacacctgttttgcaagacagagacagagagaaacagagaactcctaatgttctttgttgaggccagaaaggactaacaggagctacttaagcaattaacattcacttattgaa

SEQ ID NO: 31077 - DNA, 410 bp, Homo sapiens
  misc_feature 335: n = A,T,C or G
tacgactactatagggcgaattggagctccaccgcggtggcggccgcccgggcaggtactctcacctgttttccgataagcacaaatgtgcacctgaaatttaagtttaggtttttgttgaacatattgcatgttgtaggtgggtaataagtgaatgtcattttaaaaacctagttaactgtatatatatattagcttgcactgcagtgtgttacttaggtatacagtgggctaaaaagtcaaagtaagctaaaatatgtgcaaagtatacattttattgtccctgacattaattactagaaattgcatggctgggtataaatcctacagtgggngtttatagagccaaaattactgagggatgctgggtgacctgttccgcatgcccaccatctctttctggctttaat

SEQ ID NO: 31078 - DNA, 426 bp, Homo sapiens
tactatagggcgaattggagctccaccgcggtggcggccgaggtacagaatttgatattaagataatttcctaatttaaaaactactctgccaactatggatactgaacaaaataaaagactatatgctctaaaccctaaaagttgtccatctaaattacagaacactatgtcgacaatgtgtaaccatagcaacattttcaactgtaatcaggtctaatcattgcaaatgtcatattgatctaaaagggtatgttttttcttccaacaacttactgacatttcacccatttcccaaaataagaacaatgaaaagaaatagctgacaattgttaagttgccttacatcattcataatgtgcacaggacatggagtcttacttatgaccaaatcacactttttgcgcaatgaaaactttccaatcat

SEQ ID NO: 31079 - DNA, 423 bp, Homo sapiens
actactatagggcgaattggagctccaccgcggtggcggccgaggtacgagtagagtcagtagcttctcttgtcttatcccaaaggagatggtgcctgctcctgaagctgatcctggaatttggttggatttattaactctgtgcccagagctggccttctgatgggcagacttgtgccgggcttgttattaagacagggttttatgtctctagtcgtttcattcccattttctgttctatttggccagtctccattttgtgggtcttacctctccatgctgactctagatatttgagagcaaggttaactaagaccacattttagttctagttcattgtgcctgacactcagttagaggttcaataaagaatgtatctacctgtccctaactgtgcagaactcacttctttgtaagcagtga

SEQ ID NO: 31080 - DNA, 422 bp, Homo sapiens
acgactactatagggcgaattggagctccaccgcggtggcggccgcccgggcaggtacgcggggagaatcctttgcgctctcggtgcccccctccacgcccaggagcgtgggaaccctgcttaagggctttactagggaaaacggtgctggttcactggggcgcgtttccgggaaggtgaataccggtgaaagttatgctgagggtgaggtaggctctgacgacgcacttgcaggttgaatactggcacatcatttacttgttactcccgtgtggtgagtgcacctgtgggttttgatgccggatcaaattcctggaaagaggcgcgcattaagactgcggattgctgagctgcgcgacactccgtatttttccaaaacgtatttgtaatattctttcaacctgtttgcataatgggacatc

SEQ ID NO: 31081 - DNA, 406 bp, Homo sapiens
atagggcggaattggagctccaccgcggtggcggccgaggtactattaaatttaatgagaggtaacccatgcaccggcaggaagttcaaggggacagaaggggcttgctccactctggagccctatctcctctcacctccttccttctagtttgacatgcgatcttgtctctctcttttataaagtgcttccaggcccttttgattaggatgctgtcctaaatccttcctaaagagaggttttggagccaccaacactgcttcactgtggaataaactttccttattaagattcttcattcactcataatcatctcctttttcctcactgctcattcatttatggagatagcacccatatcatagctacttggtcaaatcatgggtgatacttcccacttaggaga

SEQ ID NO: 31082 - DNA, 430 bp, Homo sapiens
gcgaattggagctccaccgcggtggcggccgccgggcaggtactgttcattcaatttttctgaatatttgaaaaattttaacataaaatcttgagaaaaagtaaactgtagatgctaatagcatacaaagtgcagtcagtgtggagaacagaagagaaagatgaattccaatgaaaaaaattcaccaggtttgtggaggagatgggattgagcagaaacttaacagatttgggccttttaggtggaggagacaatataggaaaggcacaaacctggggaaatgcacaatgtatgctgaccaagaagtggtctggcgggtagagtaaggctggaagagactctgggagaggaacatgagaggtcccagggctctgaaccagggcaaccaacagaaaaggaaggaccgactgggctggaatccaggaggagc

SEQ ID NO: 31083 - DNA, 312 bp, Homo sapiens
atacgactactatagggcgaattggagctccaccgcggtggcggccgcccggccaggtacaagagatatggggtggatacctggagaacgctgtgaccacactatcatattacaagacactgaatggcttgccacccattgggtgccaatgatcagttatttattggctagctccaaatgggacatattggctattttggcactaacttatggccgtggttacctccacagtggctaggacaatgttccctatgttatgcctgggcacaaggactagttatccagacctgtcaaaaccagcaaacctttttt

SEQ ID NO: 31084 - DNA, 446 bp, Homo sapiens
actactatagggcgaattggagctccaccgcggtggcggccgaggtacttttttttttttttttttttttttttggatttttagtagagacagggtttcaccgtgttagccaggatggtctcgatctcctgacctcttgatccgcccacctcggcctcccaaagtgctgggattacaggcgtgagccacccatccggcctaacgagacttatttttactcaactagatggcgttcattcatttgcttactcagctgtgccaggaattaagttgggcactgggaattccaaaaccaacaagacattctttgtcatcagggaactcacagcctagtatgagagataaacaaatgaacatgaaattataattcagtaacaaaaaatgagtgttgtggcaaagggaatgtgtaagagcttggccgggtatccagcagggatacctaacta

SEQ ID NO: 31085 - DNA, 466 bp, Homo sapiens
ggcgaattggagctccaccgcggtggcggccgcccggcaggtacagtaatctagtatagttagtgataactattcacttcataacatgttcttaatatttatatgaataaaatatagctccttttcaaaactgttttcaaaatataacttgtgcatttcttccaaattttaacaactgtattccaagtgataatatcttcagagttaaattgaaatattttgataaatatgataagcttatattttagctagacaccagagaatattcatgaataacttttctaaggaaagatcttaccctagagggaatattttgttaagaaagtgtcctctggctggacgtggtggctcacacctgtaatcccagcactataggaggccgaggcgggcggatcacctgaggtcaggagttcgagaccagcctggccaacatggtgaaaccccatctctactgaaaatacaaaaa

SEQ ID NO: 31086 - DNA, 429 bp, Homo sapiens
actactatagggcgaattggagctccaccgcggtggcggccgaggtacctcaattatctctcataacacacagggtcccatgttggccattgcctcagcacatagtcaggtagccagcctctctgaatgcctggtagccaggattaaaataaataccctaggtattatctgcatatctcagggtcaggatatatcccatgactaagcccacaatcacagtaaattctttgagccagaccacattttggactcacatttaatgtaaatccacatcactccaatcctgcatgatggcacaggtagatttttgggagctggacaataaacaactattgagtgcatccccacggaccccaaaattcaattttataagaagtatctcaaggcattaataagtgcatcaaagatggtcaatgtggcattatttgg

SEQ ID NO: 31087 - DNA, 566 bp, Homo sapiens
  misc_feature 311: n = A,T,C or G
agctccaccgcggtggcggccgcccgggcaggtactctgtgttccgcctgctcaagttctagacttctggtgtccatagcaacccagcagaaaacatctgcatagcctttgggctgacgtgagttaaacttgagcagtgaagcagcataagttttatggtgcaaggcacactacagatcctcccttacccctcacatctgatccctctgcctatgctcagagccactgctatttctacaaatctacaaggcccagactgaggtgatgaccgggccaatctctggaatagtgtcagacaattagatactctntcctgtcttcaggagcccatctggaataaagctacttatcaagtttcaaaaacaacagaaaagaaatgagattgaggtggaaaacaacccaagtgttcatcaacagatgaatggagatgcaaaatgtggtctctccatattacagaacatgattcagcctcgaacaagaaagcaatgttgatgcaagcgtcaacacagatgaaccatgaggatattatgctaagtgaaatgagccaatctcaaaaagcaattact

SEQ ID NO: 31088 - DNA, 459 bp, Homo sapiens
gcgaattggagctccaccgcggtggcggccgaggtaccctcattgtagccatgggaaaattgatgttcagtggggatcagtgaattaaatggggtcatacaagtataaaaattaaaaaaaaaaagacttcatgcccaatctcatatgatgtggaagaactgttagagagaccaacagggtagtgggttagagatttccagagtcttacattttctagaggaggtatttaatttcttctcactcatccagtgttgtatttaggaatttcctggcaacagaactcatgactttaatcccactagctattgcttattgtcctggtccaattgccaattacctgtgtcttggaagaagtgatttctaggttcaccattatggaagattcttattcagaaagtctggatagggcttatagcaagttatttatttttaaaagttccataggtgattctgataggc

SEQ ID NO: 31089 - DNA, 357 bp, Homo sapiens
agggcgaattggagctccaccgcggtggcggccgcccgggcaggtacacatttgacattgcataactaatttacttacttcacatttaaaaaacagatttgtgtatgtctgtgaaaaagacaatgtgttgatagtagaactataaggtagaaagttcctctttctccttctgatccttcccctgcccttttcctcaaatgtgactacaaactgttaacagtttgaagtcccctaagttttaaaatcaaatggaatgaaatggcatttaggaacttggaagagtggaaaccttttttccagacctatgctaccaactgagtttatattttcaggcagatatgatgaatttgctgtggg

SEQ ID NO: 31090 - DNA, 426 bp, Homo sapiens
gcgaattggagctccaccgcggtggcggccgcccgggcaggtacctgatttgaccaagtcttcacactttaccttgaatgatcactaaccacaaatattctccagtgaatctctttaaattaaaaaaaaagcactatagtagcccacatatgcaagatttatcctcctgaaggctgaaaactacctcttttccctttttatttaaaagtcactagtatatgtttcttccttgtaaactactcatttctaaaaagtcttatcagagttcctgaaacaggaggacaacaagtagagaaataagcaatttaataaacccagatgtgagcagatgttatgttcaggaatagtcttaagaagtggcttccatgcattcacttgacaagtattatcaagcaccttctctgtccaggcaaagagctaaccctc

SEQ ID NO: 31091 - DNA, 444 bp, Homo sapiens
gcgaattggagctccaccgcggtggcggccgaggtaccccctggctgattccaagcctgtctttggctgttgcgggaccatagaaaccttgaacatctggctgtgactcccatttggtattggcctgaacattccaccttgcaaaccttattctaaagctacctcaatttatggcagtgatttccctctgagaagcttcctggcaagatttttagttagatctgggttggttctaccctgcacagtaatctggcactgttcaggaatgctaaaactctgtatctcctctgcctgaccacattgtggtttacattgatgtgactccacccccagtgttaggggtagcctaagactctccaatggaaaatggagctccggtgagtagggtgggactgttgaaaagtggaaagttggcacttgtctacttatgttactttcctttct

SEQ ID NO: 31092 - DNA, 347 bp, Homo sapiens
gcgaattggagctccaccgcggtggcggccgcccgggcaggtactgggattataggcgtgagccaccgcgtctggcctctaacgagatatttctaaaggttaggccttcagtcaagaattttaaagctggatcttagaggttatctaaactaacctctccatttcatagataaggaaaggggagtcccaaaaaagcactggtttggacaagttcagaaagctaaacagtgactgtggatgtatgattctgtctcttaactcctaatccaaatgtcttctcactagataaggctgtgccttctacatttgaaggctcaaaccccatggatggatggagggaaggatgg

SEQ ID NO: 31093 - DNA, 442 bp, Homo sapiens
acgactcactatagggcgaattggagctccaccgcggtggcggccgaggtacaatggtgcgatctcagctcactgcaacctctgcctcctgggttcaagcgaactcctgcctcagtctctcaagtagctgggattacaagtgtgcaccaccacggccagctaattttttgtgttcttcgtagagacggggtttcaccatgttggtcaggctggtctcgaactcctgacctcaggtgatccacctgccacagcttcccaaagtgctggcaatacaaccgtgagccactgagcccggcccctttgtccaccttggttgaatgtcaggcgttatttgtctcctaccacattagaaacatcctgcagacaaagccctgagctgaatcttctttggggccctaacacccatctggacaggtaagaggacaggcagtgaatgtttaca

SEQ ID NO: 31094 - DNA, 350 bp, Homo sapiens
tacgactcactatagggcgaattggagctccaccgcggtggcggccgcccgggctggtactacgagggactagctgtgcaactctgggcacggtgcttaatctaggccttagttttcatatttgtaaaatgtggtcaattgataaagacctctctcatagagttgttacgaggattaagtaagataatacgtagaaagcatttagcacagtgtctaaaaatagtaagttcttaaaaactgcaacctgttattatcatccaacttacttgtgactacatccagatatttaaacacttggaagtaaagcaaaatataaatgtaacttttgaatcacaccaatagaaaaattt

SEQ ID NO: 31095 - DNA, 425 bp, Homo sapiens
ctatagggcgaattggagctccaccgcggtggcgggccgcccggccaggtactatagtccaagattgaaatctgtcttattaatcattttccccttctgtctcccctaattgccttactgtatggttcctaatgacttctagttattcttttgttttccttccattaacttaaaggatatgtgtatcctctttttatgtattcatagaagatacctaaaggagatattgtatacatatatataagatgttcatatgttcctaattttacaataattgttaaatgttatgtagatacataccctgtaatatgtatatgtaatatgtaatacagagaagtgtgatatacggggaaattacccatttagtaatcctttcaccagttggttttctgtctttctgtgctatgtctgtcttctctgaattc

SEQ ID NO: 31096 - DNA, 410 bp, Homo sapiens
cactactatagggcgaattggagctccaccgcggtggcggccgaggtacttttttttttttttttttttttttttttttttaagatgggatgttgcagtgttgtctgggctggagtataatggctattcacagatgtgatcatcacatattatagtatccaactccgagactcaagcaatcctctagcctcagcctttcgagtagctgggactacaggcatgtcaccatgcctggctcttacaattacacattgttattttttgactccacttaaaatagctgagattctcttgatcaaataaagccatcaattaaagggtttaaaaagccatacacttgtttttgggaggattaccccattttaagccatttaaaagagtaaccagaaaatttaagccaaagtgcccaa

SEQ ID NO: 31097 - DNA, 411 bp, Homo sapiens
actactatagggcaattgagctcaccgcgggggcggccgaggtactaaccttagctagtaagtaggaaggcttggaatcgaccccagctcttctggcttcaaagctcctatacatggtgccaggacatataatccagtcctcctatcttcccacccagtggctctttgctgttataatgtccatcatccctaccctgtctttccttctccaccttctacttaggctggattcagtcctaattatttaccaagcaacagtgatgatgaagctaataatcatcatacatgtttgtgtgtagcctagttcaacctttaattactgctctctccccagcacctagaatagtgcccagcccattattgggctgataaatatttgttgaataaatgaatacatgaatattattcgta

SEQ ID NO: 31098 - DNA, 468 bp, Homo sapiens
tatagggcgaattggagctccaccgcggtggcggccgcccgggcaggtacatgaaaggagattgagggcagggagctcacagaaccaagacagcaggacccaggattcagacctggaaaatttttatttcctggctggtttgtgtgccctcatgcatgttatttacagtgccatgttctttcacatgggaacactgacacaggtgaaatgggaggttccataggatgatagtgcaaaaacattaaagacaatcctagcagatgcagtgagttcaagggagagtccttgtggagtaacacgaaaggcctggtggatgagatgtatgaagatctaaatgcctgcagatagtgagctgtctgcaactaccacaaagcaaaatcatgggcgataactccccagggtaggatctggcctgagcatccccactgggagatgggaggtgatgggctctgtagtgcttagctgaat

SEQ ID NO: 31099 - DNA, 437 bp, Homo sapiens
tactatagggcgaattggagctccaccgcggtggcggccgaggtacttctagaatccacagctctgggagggctaccttaaattaacactggcagttctttgcaattagggtgccataaaagcagcacagttgactccaaaatggactgagttttggaaagatgtctgccagcaaaatcatatagactctcttgctgaagggatgaaaaattaataatgccttgaggtatattaatataaaaatatgtgaccaagcagtgtaattaattcccctttttcctcaaaatgtagcctttttttttgagatggagtttcactctgtcacccacgctggagtgcagtggtgcgatctcagctcactgcaacctcaacctcctgggttcaagcaattctcctgcctcagcctcccaaagtgctgggactacaggtgtgtgcca

SEQ ID NO: 31100 - DNA, 426 bp, Homo sapiens
tacactactatagggcgaattggagctccaccgcggtggcggccgaggtacttagtgtagatatttaaggctgatcatttggatggatcagacagaccatgtctcaaagcatgctggttgtatgagctaaggcaaataatgtcaaatttttagcactgacttgagggttcttgtgagagttaaaggagataagggaggccaggcccaggggctcaagcctgtaatcctagcactttgggagcccgaggcaggtgggtcacgaggtcaggagtttgagaccagcctggccaatatggtgaaaccccatctctactaaaaatacaaaaattagccagtcatggtggtgtgcgcctataatcccagctactcaggaagctgaagcaggagaatcactcaaacctggaaggaggaggatgcagtgagctg

SEQ ID NO: 31101 - DNA, 375 bp, Homo sapiens
gactactatagggcgaattggagctccaccgcggtggcggccgcccgggcaggtactgaccttatacaataaattgggtagttttccttctccctttattttctgaaagtttgtataagagtgttagttcatttgttggtgttccattgatataaatatatcttaaagttttcatagaatttaccagtgaccttttgagtattataaaatgtccttttttgcctcttatactctttgtcttgaagtctatgtggtagcattaatatgggcacgaatcagctttcttatgcttattatttacatagtttatcttttctgtcttctggctgtcttaaagatttttctttttctgtttagatttcccataatgttcca

SEQ ID NO: 31102 - DNA, 434 bp, Homo sapiens
ttagggcgaattggagctccaccgcggtggcggccgcccgggcaggtactactggcttcccagtggttgggttgagtataagcccccaaatatgagtaaaagaagaaaaagttaattcaatcaccaagtcttgctcgcatattaaaaattggatagatgaatgttcaatcatatgttttggctttggccagccagacgaggtcaatttttagatttgaactgcttagaattcttcaggcaagtcttgatggagcacttcttggatagttagaactttaccaggttcacaggagagctcagatgaagcgaacacctcatccacactggtttcctttggagacctttactgttgagaggtggttttcatagccgcaaaatgacaagtgcaagttgagtagatcagtgtttatcaaccaggtgccacattgtgcccc

SEQ ID NO: 31103 - DNA, 395 bp, Homo sapiens
ctactatagggcgaattggagctccaccgcggtggcggccgcccgggcaggtacagcattattagctggggctttcactgaaaaccccagggtctctttctattgtccccatatggttggagtcacaagagtgggagagatggccaagctctctgcagaggatcctggcagcagcctgaaccctcttgctacttccatcaaaggaaaaaaaaatcaaatatttacccccacgagcttataatattacagagaactccaccatcctgccctgcaaaatatcctgggatttgactaatactagagctgcttttctagtccttgagtgactaggaaggaagaaccaaaagcttgactcccctgcagcagtgagtctctggctttggtttgcccaggaa

SEQ ID NO: 31104 - DNA, 422 bp, Homo sapiens
atagggcgaattggagcttaccgcggtggcggccgcccgggcaggtaccaagaggagagagctgtccaaaagtggaagatatcgtttctggcttaaggtgcgatgaaacaaaacaggagacaccaaaaagaagtgcggaaaagctaggtctcagagtagggcggcaggctgaggagggccgcgctgaggaggaagtggatgggtgccagggggtgaactcacagggagaccctttagaaggggatgactgcctgatctgtttccatggactcttctatttttattaggattatccatttctcttcctacaagctcttttgctttttgtccacccttaagttataatgtatatactgtttaaaaacatttaagtgatacagaagtatatcaaggaaaaatgatgactattagtagtttggtaa

SEQ ID NO: 31105 - DNA, 272 bp, Homo sapiens
ctatagggcgaattggagctccaccgcggtggcggccgaggtacctgccctcaatggagctcacagtctagtgggggttgaaagacaggatatagacaataaaataaatatgtaaaatatttgtcatgttacattttgatatacaacatgaagaaaaattaagcaaggaagagagatagggagtaaagggtggagggttatatatattgataggaatggtctatggtgctagcatttgaggaaaggcttacagaaagacacttattgcttta

SEQ ID NO: 31106 - DNA, 209 bp, Homo sapiens
gcgcgtatacgactcactatagggcgaattggagctccaccgcggtggcggccgaggtactttctccattttaatcctggaaattaggcaaccttctgggttaaagcaagcgttctccgccactgactaacagtgagtgtataatggatctgtttccccacagatagccagctgtctgcattaattacaggactgcattgcatttctgg

SEQ ID NO: 31107 - DNA, 453 bp, Homo sapiens
atacgactcactatagggcgaattggagctccaccgcggtggcggccgcccgggcaggtactgggaccttcacactgcacaggggagcaagaacctcttctcttagcctctgctttgtgggattttccaaaatcctcctggcttcttttcccttcccttccttcttcccagagcaggggccagctttacctcagttggtagggccacacaccatggggtggagatggtcaaaggtcctctgcttggacaagttgctccctgtcttcattcctctggccaaggccagtgttaggtggggactggtgagctgtctggccccacagggctaagctttcctttaggtgggtttatcccacttctcaacagtctaacaaagaacagattccacaagcccacttcgtctcttgctgcaagctatgccttccgattctgccttcattagaaataagggtg

SEQ ID NO: 31108 - DNA, 419 bp, Homo sapiens
tatagggcgaattggagctccaccgcggtggcggccgcccgggcaggtacacctataaaatggaatgttaagtaacattaaaaattatgtggaaaattaaataaatgttcatgaaaaaaaaaactacggaactgtagcctggtctcacacagggcctttgccttgtttgcccagggtccaggttaccaaggttagggagagactgagcacaaagaccgtgaaccccttaccacttaaccctgatgcagggcaagggggcatcggctggactgagcgcagtgtgggtgggaggccttgcgttccatgagcctgatgctcaggagcttgtgagctgccggtgagtgtccctctatgggatgcagcctgagaagttttttccacagaggagtgtttaataacctacaggcttatccagcctt

SEQ ID NO: 31109 - DNA, 250 bp, Homo sapiens
gcgaattggagctccaccgcggtggcggccgaggtactcaggctttcaaagggttgaggaaaggtcttttgtttgaaggaaggagtatctgaacatgtttaaatgcaaagctgtatgtgccaggagtgtgaggctgtagctagatcaagtcatttatcaagggagaggtcctagggcacaggaaaaggggttcgtcttgggcaggacaggccctggcaagaaggtatggaagcgtgtgtgtgtgtgggtg

SEQ ID NO: 31110 - DNA, 471 bp, Homo sapiens
gtatacgactactatagggcgaattggagctccaccgcggtggcggccgaggtacctacctgcggtatctgatcagtttctgcctagtcagatgtgccctgttgctgagcctgcttgggtggggagcatgggaaaatggggcaagtgcttcatgagggagctgttctcagccgccccctctcccaactccccagctctctctccttgtcctgtctcctgtttctgggctctaatcctggtcaggcccaatgccccttgcctgtgatgctgggtctgcagttttgctcgccgtcctcgctttgccttcttgcccgccacttccagcattcctcctctgctcagcttctgagctggtgtcaggtttctacctgcctggccactgagcccacctgaagatgtctggccaattccttttagcctctgccttctcaccatgccagggatgcttattcatggtgggaccacaggtgg

SEQ ID NO: 31111 - DNA, 424 bp, Homo sapiens; identical to SEQ ID NO: 30688

SEQ ID NO: 31112 - DNA, 243 bp, Homo sapiens
tcactatagggcgaattggagctccaccgcggtggcggccgcccgggcaggtactttaggctgagaaataaatagaaggtgagaaaaaagaacagtctttatagtcagtaagagtgaaaagagaaagatggtagttggggaaagacagatggggagaaaggttggctggttgttaataaaacagtaaaggatgagcatgtattataaatgctggtgggaagaaaccttgtggcaaggagggtg

SEQ ID NO: 31113 - DNA, 209 bp, Homo sapiens
atagggcgaattggagctccaccgcggtggcggccgaggtacttgcccctttcaaagtatatcattttccaaattatcttatatttgtggagaatatagctgaatggcacataaactatcttgcttatatacttttagatcactgtcttttgtttgattgattttgtttggattttttaattcttaatgttttttgttttttatttatt

SEQ ID NO: 31114 - DNA, 418 bp, Homo sapiens
ggcgaattggagctccaccgcggtggcggccgcccgggcaggtactttgagaaggaaatactgggttgtaatcatggataaaatatgcaggggaggggaggagattatagatattaatatagagtttagggtggcattaggcaaggatgacatctgaatatctaacttccattttacattgccatgtaagtctttttgcccagtgggtttgggggacattgaggcagaactcctggaaaatagaaggaagtgaaaggtcactggtctctccaataatcttgatgggaaggactagacaacaccattagcaaaatgtgcctcttaaaaactcaagacacaagcattatcttcatctcactgaaataacagctacatcctttattaacatgagaaaatcgaaaagcttaagaaaattgtc

SEQ ID NO: 31115 - DNA, 432 bp, Homo sapiens
gactactatagggcgaattggagctccaccgcggtggcggccgcccgggcaggtgagagcaaagaaatgtgatgagccagctaagctgaccagacttgtctggcaacctgcatggagtataaaatgggagagcattttcacattttcatatttccccccttggtcattctctctgtggccagagcagaagtattatattttgggggtgcactgagaaagggttttgaggctgggcgcagtagctcatgcctgtaatcctagcactttgggagaccgaggcgggcagatcacctgaggctcaggagttcaagaccaacctcaacctggccaaaatggcaaaaccccatctccactaaaaatagaaaaaattagcagggtgtgagtggtgggcacccgatgctgagggaggagaattgcttgaacccaggaggc

SEQ ID NO: 31116 - DNA, 397 bp, Homo sapiens
acgactactatagggcgaattggagctccaccgcggtggcggccgcccgggcaggtacccactccctcaattttctctaaagatctcatttcagacatttaaatgaatattatgctacacaacagggaaactcagatgtccatcccctccttattcattcaaacatttccactgccataatatggcagctgcaacgccaagaaagaagaaaggaaaaaagactaaaagaggtgaagaatgaaaaagacctcaaagaaatttttttttaagaggctgggtcttactctgtcacctagggtggagtccagtggtaggatcatagttcattgtaaccttgaactcttgggctcaggcaatcctctcacctcagcctcccaagtagctgtgactacaggcc

SEQ ID NO: 31117 - DNA, 480 bp, Homo sapiens
actactatagggcgaattggagctccaccgcggtggcggccgaggtactggtagtttaaaatatctcaatatgaaatggctgaataaaatcatcacattttcattttatatcaatggttctgaaagaatgatgcaagaaaaatctctaaccttagtgagatgaattttgtaaagttcagtgaattccttccatgcacatttgaagccagtccaggttttttgacctaagtggcctcagtcatgttcagcacctaacgaacaaatcatctcctgtctccaatgtcattaacaactctatgggtgaatgaggatcactaactgtggagtaagaaggaagcaggcagcctgtttccaataacatgttgtgattcaaccacaatcaaatgttataaaactaatgtcttaaagttaatttgaccttgaaatgtctttgagttaagattagtcacaccctaatgtattaattcctcgaaaaatttt

SEQ ID NO: 31118 - DNA, 212 bp, Homo sapiens
tacgactactatagggcgaattggagctccaccgcggtggcggccgaggtacttcattcctttttgtgctgagtaatagtcagttataaggatacaccacgttttgtttatgcattcatcagttgatgaacatttgggttgttttcactttttggctattgtgactaatgctgctgtaagtattcttgtatgagtttttgtatagatgtgtg

SEQ ID NO: 31119 - DNA, 353 bp, Homo sapiens
tacgactcactatagggcgaattggagctccaccgcggtggcggccgcccgggcaggtacaaatattactataccaaggtgtagaggagtatgtctaagcctgtaatgatagcaggtggcaaggtggaggtagatggccttctgtggtagttcacggggaggaagacagtggatccaagcaaataagaaaggccacattttttttttaattttgcatctcaaggtattttagtcaaaattttttttttagttttccacagcaaacgattacgtaaaatataaacctaatgtattctttaggactaagtgtgccttttctctatatgctaagaggtgtaagtagagaatagacg

SEQ ID NO: 31120 - DNA, 392 bp, Homo sapiens
agggcgacattggagctcctccgcggtggcggccgcccgggcaggtacaagggttcccttttctccacatactcaccaccatttgttattgcctgtctttggatacaagccattttaactggaatgaaatgatatctcattgtagttttgatgtgcatttttctgatgatccagtgatgttgagcaccttttcatatgcctgtttgccatttgtatgtcttcttctgagaagtatctattcatatctttcacctattttttgatgagattattagattttttttcctgtagagttgtttaaactccttataattctggtgattaattccgatccctccactggctttcatttttctcttccccctccccactccacctacccatatgtaggg

SEQ ID NO: 31121 - DNA, 420 bp, Homo sapiens
tatagggcgaattggagctccaccgcggtggcggccgcccgggcaggtacaaaattatctttattcagaagatcacatagcagcatgttcataatcaaaaacattttaccttagcaataaacaccagtcatttatgcaagagcttcccagggttggtagatatttttattgcttcattttgctctagttaaagaaatggaaaagatgcttttaacttattatcaatcctacatcaggtgtcaagaaatgcaaagcattagaaagagagagggaaagagggatcttcaatattctctgtaaaggagcaaattctgacatggtcatctcagacaccctcttttaattccaaagtctaaccttacaaaagcagagaaaggccgggcacggtggctcatgcctgtaatccaagcactttgggag

SEQ ID NO: 31122 - DNA, 440 bp, Homo sapiens
tatagggcgaattggagctccaccgcggtggcggccgcccgggcaggtacatcagcgccacaccgcagggctgtccacggtgagctatgaggctggagatggttctggagcagtgaactgcagaggaaagaaggctgccctacccctgggccaccaatcactagcagtgtgacctccggcagcttcttctcctgccaaatggggatgtttgcttcactgacagaaacacagtgggtgaaccgggagtgagcggcccacttggctgaccacttaccaacatttcggcggggcctcgtgctgagacctctccccaccctgacggaacagtcagttggaaaacagccagtagttccattcccactaacatcttatagtgaccaataatactctaccataactgtcgaaaatcctaaaaactctttcaaccctgagattctact

SEQ ID NO: 31123 - DNA, 408 bp, Homo sapiens
actatagggcgaattggagctccaccgcggtggcggccgcccgggcaggtacacaggccaggcacagtggttcacacctgtaatcccaacactttgggaggctgaggcgggtggatcacaaggtcaggagatcgagaccatcctggccaacatggtgaaactctgtctctactaaaaaatacagaaatttatccagtcatggtggcacgttcctctagtcccagctactcgggaggctgaggcagaagaattacttcaacatgggatgtggaggttgcaatgagccgagatcggtccactgcactccagcctggtgacagagcgagaccccttctcataaataaaaatgttgtatgtgacagcttaccattttaaaaaaaagactgatggaagagagagaaagttggg

SEQ ID NO: 31124 - DNA, 415 bp, Homo sapiens
  misc_feature 323, 369: n = A,T,C or G
agggcgaattggagctccaccgcggtggcggccgaggtaccaacatttttctctacaaaaacttcccacatgctggatgcagtggctcactggaagcaacttgagagcctgaggtgagaggatgtcttgagcctgggaggttaaggctgcaatgagctatgatagcaccactgctctctagccggggtgatagagcaagaccctgtctcaaaaaaacaaaaacccaaaaaactcccacaaggtcaaaagattgtttattttaaacaagatcaacattctttgtttattatgaaaattacttgtttctccatagaaactgacgnaagtctgaacctttttatatatactattcactttttctaccgtggngaatctaaatgaatgacgtttgctatttaaatcttttgaggaaaga

SEQ ID NO: 31125 - DNA, 428 bp, Homo sapiens
actactatagggcgaattggagctccaccgcggtggcggccgcccgggcaggtacttttccactttgtcttctttcctgtcacacaccctatcctttcaggctgtgttgggatggacaaaagcagttctggagtcctaaggagaagatgagtgggatatgtttctgtgacctgcagtcattttaaagtttagctgttgctagctgactccatgtaagaataccttccaggaatttgatggctgtgcactctggcagtgcagctggcatggttatagggtgcttggccgaaggtttgcatagcaatatgaacgcatcctacgacacatctagccaacactggaagactgtgggtaatggacgagaaaccaagattgactttttgcaagtttttaaaaataatcttcttgtaactcacatgtgaaagaaa

SEQ ID NO: 31126 - DNA, 433 bp, Homo sapiens
tacactactatagggcgaattggagctccaccgcggtggcggccgaggtacttagcagctgtgtgacctagagcacagtgctttgagtttttgagtcttagcttctgtgtctataaaatggggttcacacaactcaccttacagggctgtgagattagattacacagaaaatatattttttggctgtgggggctgggaaggtgttgctgattagcatttgaaatcccatcctgtgggtgagaaaaccccaccttatgacttggtgggaaacaaagccaacctcccactgatgaagctgaaagtagcagaaccttgcttctactgcctcccttgcagctagaggcaggcacaggactagcctgtcaattggatgcaaatgctccaggccttgaatcacaacctggtgacttgcacccaagtctattactattga

SEQ ID NO: 31127 - DNA, 380 bp, Homo sapiens
cgcggtggcggccgcccgttcaggtacgcgggttaataacaaaagctctcgtgttacttttaaacaaggtaaaacttaaacagttttttcctccgtttctttttttatggaaataagaggcaagtgatagcaagtgggtaattcaatggcaggggcaactgaagcactgacctgttacaagagagacggaagcttctacttgagcagatacaaatactgtcatccgtggagatttgaaagaagtctttctatcactgggtagtttgagagctcattagtcttctttagaatgggtttaaacttggaaacatcaaagcaagttacaaggaaacttagttttacagtgttggcagcctaggcgccagaatttgttataaagt

SEQ ID NO: 31128 - DNA, 465 bp, Homo sapiens
cgtaatacgactcactatagggcgaattggagctccaccgcggtggcggccgaggtactatatgctagaaacttggctgaatgatttgacattatcctatttaatgttcatgacaatccaataacgtaaccactcatatctcccttttgtgcagataacaaactgaggcccagagaaatcaaatatgttgtcaaaatctacatcgttgaagagatgggtttcaaatccaggtcggcttggcccttgccacgacttcataatgaaattccatgggtgagtgttaccagtttctggtccatccttgcttatttcaagggtctcatcatcccatccactgtatcactttttttgttacaggctttactcttttctaccatggaaaagactaatgatatttttttctccataagcttggaaatattatcaatcaccataaaattcagccttcctctggtaactttggag

SEQ ID NO: 31129 - DNA, 417 bp, Homo sapiens
gactactatagggcgaattggagctccaccgcggtggcggccgcccgggcaggtacatatctgcaaggagacatatacaaggacgttcatgccatgggttagaaacaacctaaatatccaccaataatagaatagtccatctttagaaactctttagaaaaattaaaatatactaaatatatattaatttgcctaaatttcaatagcaatgttgagtaaagatggaaattacaaaatgataaaatgggaatactttatgtagtttgttgttgttgttggttttgttttgttttgtttttggattttttttggaaatgaaggcttgctctgtcacccaggctggagtgcagtggtgcaatctctgctcactgcaacctccacctgctgggttcaagcaattctacaggcgcatgctgc

SEQ ID NO: 31130 - DNA, 448 bp, Homo sapiens
cgactcactatagggcgaattggagctccaccgcggtggcggccgaggtacaataataaaactaagcttatgcctaaaatattctcactgagtgcctgtgaatccacgactattagcactgtggagcaatttctccttgcagaagagtgctaactctatccattaaagccttggaaattgccggtaaatatgtaaaaaatcaagtgcttaaatggatagcaattattggcaggacctaaactgatacaaaagtgttccactgtctcaatatcaaaagcccaagaatgccagattcccaaagtgagtcaaagtgcttggattgctttgcataaacatggttagccagaatcaacaccctgggattggagcttgaggtggaatttccaaatcctgcaaatgttatggctacagccccccagcaccccaatgctggacagcctaaggcatg

SEQ ID NO: 31131 - DNA, 400 bp, Homo sapiens
tacgactcactatagggcgaattggagctccaccgcggtggcggccgaggtacttcttgggagaaaagcagactcctctagaatcccacaatttataaggcagagaacaaaaccattgtttaacaaacaggaaaaaaaaaacctcacagaataaccatcactgaagctaatgaaggagaaagtttcaaggaggaggaggtaaacattgctgaaagttgagatgagggagagaaaaacaaatctgagattagacttttggacttggcatgtagaaaatcacgggtgacatcatttggaggattttcagagccattagggaaagaattcagattgttactgaaggtgaaggaataataaacaaaagcagactgttctccaaaggaatttttatccttataaa

SEQ ID NO: 31132 - DNA, 418 bp, Homo sapiens
  misc_feature 315: n = A,T,C or G
ctatagggcgaattggagctccaccgcggtggcggccgcccgggcaggtacatgccaccatgcctagctaagttttgtatttttagcagagacagggtttcaccatgttggccaggctggcctcgaactcctgaccttaggtgatccaccctcctaggtctctcaaagtgctggaattacggtgtgagccactgcgcccggcccttagtagcatcttttaatggaggtagagttgagatttcagtgactaacaactaaaggtattaaaggtaggggtttatatgatacatttgcattttagaaaactgatctaangcttcaatgtgaagaacagattgaaatggaaggggggagaagactagaaagcagaaacatttactcatttaaagtaattctggaccatgaaaacctgaaaaaa

SEQ ID NO: 31133 - DNA, 458 bp, Homo sapiens
ctactatagggcgaattggagctccaccgcggtggcggccgaggtacttgcaggtggtttggcctggaaaatctagatgagtggtttttaaatttagttgcttattagactcaagaaagaaatttaaaaaacaatactgattactgagaccagcttttctagattcttcattcagtaggagtaaggaaaggccaatgaatgtgtattgataaaaaggttcctggccgggtgcggtggctcacgcctgtaatcccagcactttgggaggccgaggcaggtggatcacctgaggtcaggagttcaagaccagcctggccaacatggtgaaaccccatctctactaaaaatagaaaaattagtcacgtgtggtggcaggggcctgtaatctcagctacttgggaggctgaggcaagagaattgctggaacctgggaggcagaggttgcagtgagccgaaat

SEQ ID NO: 31134 - DNA, 450 bp, Homo sapiens
gcgaattggagctccaccgcggtggcggccgaggtactgttttaactcatttatcttgtggtaaacttgtagcagccgccgtaggaagctaattcaccctcatccctcacattcacaccacaatctccttctcctcaccggcattccatctcctctgcctcccaagtcacagagccccaggtgccacaatggctgtggagtctgcggtgcaacctcattgcaaatatttgtatgctcggaagaaaaacacgagttaagcagtggtaacaagcagagtcccgggaagcagtggtaacaacgcatagtcccgggaagcagtggtaacaacgcagagtcccgggaagcagtggtaacaacgcagagtcccgggaagcagtggtaacaacgcagagtcccgggaagcagtggtaacaacgcagagtacctgcccgggcggccgctctagaacta

SEQ ID NO: 31135 - DNA, 384 bp, Homo sapiens
ggcggccgaggtaccttccttcttaaatccacattccacatgagttttttatctttttagatgtatatttgggaaggggctccttgctgacaatccttgaaaagtgcccagttctcaggacccagttgaaataatttccgcctggggctgggcgcggcggctcacgcctgtaatcccagcactttgggaggccaaggcgggcggatcacgaggtcaggagatcgaaaccatcctggccaacatggtgaaaccccgtctctactaaaaatacaaaaacttatccgggcgtggtgggcgggtgcctgtagtcccagctactccggaggcttatgcaggagaatggcgtgaacccgggaggcggagcttgcagtgagccgagatctt

SEQ ID NO: 31136 - DNA, 389 bp, Homo sapiens
  misc_feature 320: n = A,T,C or G
tacgactactatagggcgaattggagctccaccgcggtggcggccgaggtacaggcaacaaaagcaaaaatacacgaacgagatgccataaaactaagaagcttctctgcacagcaaaagaaacagtaatagattgaagagacaacccacaaatgggaagagaatgtttttaaaccatatctcaggtaagggggtcataccaattatatgtaaggaactcaacccagaaatgagaaaacaagcttactaaaaaataagtaaaggagttgaatagacattttctaaaaacagacatacaaaaggccaggatttttatcaanaaatgtttgataaaaaaacattcaacatttccttaattaatcaggagaaattagatgtccaaaaaccat

SEQ ID NO: 31137 - DNA, 362 bp, Homo sapiens
gcgaattggagctccaccgcggtggcggccgcccgggcaggtactgggattatagacgtgagccaccgcgtctggcctctaacgagatatttctaaaggttaggccttcagtcaagaattttaaagctggatcttagaggttatctaaactaacctctccatttcatagataaggaaagtgagtcccagaaaagcactggtttggacaagttcagaaagctaaacagtgactgtggatgtatgattctgtctcttaactcctaatccaaatgtcttctcactagataaggctgtgccttctacatttgaaggctcaaaccccatggatggatggagggaaggatgggtggagggatggatgg

SEQ ID NO: 31138 - DNA, 335 bp, Homo sapiens
ggcggccgcccgggcaggttcacagccaagcgcttaggctgcagctgtgatatggacccaagccccagctttcacagggttgatactacagccactcaaaacagggatgtcatgaggctgcagcatcttaaatatcttagaggaaaacattctttaaaatttctttaacaacaagcctaataaaatgaagaacattttgcaggggtaaggggttgatgttgaggaggaagataatatgttaggcattaacattggatttgttcataacaattattaatattcaaacacatgttaatttttaagatcgggggcagtaaactacttctgtaaaggac

SEQ ID NO: 31139 - DNA, 431 bp, Homo sapiens
tatagggcgaattggagctccaccgcggtggcggccgaggtacatactcccattccacagcttagtctaacatgcaaaaagggcatgattagagattgttggtcattaagaagaacaggaggaaacgttctggagccttggcactatgcctggggaagagaggatctcaacacccctcagccatctctgggccagaggaaagtcacctaggggttgtcctaaagagttccacgggagaagagattatgctgtctgatgaccccttactgttttctccagtatgtccctacttttttttgtccagctgagtttattaaacttgtcctgcttctgaggtcggtttcttttctaccatgtgaaggtttaaatctgctttactgtctttgctctcttttcttacttttcccagaattcctacacttactacataa

SEQ ID NO: 31140 - DNA, 436 bp, Homo sapiens
gaattggagctccaccgcggtggcggccgcccgggcaggtacggcttctatgtgtgaacaacacagaccactaagagatgtgacaaagctgttccatcagaggaaacatagtctgggggacaaatcctcccattcctgataggacaggagggagcggttggctggggaagacctgagtgagggagctttcttgaggacgggttttgtcggagtgtagttcatataccatgcacagcctgtcagcatacagcttgaatgaactcacgtgtgtaaccagatcaagaggcagaatattactagggtggcagttttgagtcccatgaaaacaaacacatttactctgtctagctccatctctagttaattctaatgcagtttaaatgctcacaaaatccttatttgaatggatgagtcagtggtttgaattgaatagttt

SEQ ID NO: 31141 - DNA, 453 bp, Homo sapiens
tacgactactatagggcgaattggagctccaccgcggtggcggccgaggtacctcagaatgataaatcagaatctctgaggaatgggcccaggcatcagtatttttcacacgaacaagcagaggtggatcctttaccttctcctaaaaaactgtcacaagggacaggtcacttggaaggcagtttaagagaaaaccaaaggaaaaatctggtgacacatgtaacactgtgattaatctattgcttacgatgttttatatgttgaaagtctggaattctgaatattttattatgtaagagatccagttctccaatgtcacagcctctataatttgaataataataaaggagcacaacaattcacttatgatacccaacagaagactgcaaggatatgctggggcacagagcccaattagggtttaataagacagggtttatgggtgaagcaatc

SEQ ID NO: 31142 - DNA, 443 bp, Homo sapiens
ctactatagggcgaattggagctccaccgcggtggcggccgcccgggcaggtacaatcttaaaagaatattagttacaagtaactaacaaaaagatttttaaaaggacactaaaattactttctacactattcaaacatctgatacgagctgtgcatcagttaaccactgctctatagcaaacttaccccaaactcagtggcttacaacaaccatggatgatttacacatctctacaggtcagccagtgggtgattcaggtaaccctggccgacctagacctgctcaggagacagcacacagctgacaggtcagatggcattggctggtctatgatgaaatcggcaagcacaaacctggccccctccactgggctagcctgggcacgatctcatggaggtggcggggtctgaaggtgcaagcccagtcctgtaaaaggatatc

SEQ ID NO: 31143 - DNA, 498 bp, Homo sapiens
actactatgggcgaattggagctccaccgcggtggcggccgaggtcatttgttgggggcgtgacattaacatataaccacttagagtggacatgcagttagagaaaagtcaatgagctggaaccaagctgggaattccaacatgtagaagttaaacacaagaggaggagccagcaaaggaccagaaacagagcttccagcagggtggggggcattttggaagaaaacgatgccatagaagccaagatgaaatagacatcaaggagaaggaagtagtcaattgttttgaatgctatgaagaaagataagaataggtaaatagtccttatatttgataacagaggtcactagtgatcttgatgaggggtttcaatagaatggtgggattatatacctccctggattcaactgaggtaaggaaggcatacagaatagagacaggcactataaacagctctcataattgcattctagcaattagcacactgtctgatgggga

SEQ ID NO: 31144 - DNA, 382 bp, Homo sapiens
actactatagggcaattgagctcaccgcggggccggccgcccggccgggtcctgggattacaggcgtgagccaccgcgtctggcctctaacgagatatttctaaaggttaggccttcagtcaagaattttaaagctggatcttagaggttatctaaactaacctctccatttcatagataaggaaagtgagtcccagaaaagcactggcttggacaagttcagaaagctaaacagtgactgtggatgtatgattctgtctcttaactcctaatccaaatgtcttctcactagataaggctgtgccttctacatttgaaggctcaaaccccatggatggatggagggaaggatgggtggagggatggatggatagatgggatg

SEQ ID NO: 31145 - DNA, 478 bp, Homo sapiens; identical to SEQ ID NO: 30781

SEQ ID NO: 31146 - DNA, 450 bp, Homo sapiens
gactcactatagggcgaattggagctccaccgcggtggcggccgaggtacagacgagggaacgtccagtctggcctgccaaagaagaaaagagtaagctcagatttgagaatgtaaaccctaacaaaaacaaaagctgctctcttgctgtgaagtcgctacagctgtcttcactggtcaagtgggtgattttgacatgttcaaacctggactgctttgtgatgaagggtttgattttcctctaactaggacaaggatgggacaaagacaatttggtagcttggtatctctaaagtcaggaggcaaggattacaaacagccggcctgtaacagcaacacagtctgcgcaccagccacaagaacacaggcatcttatctggctggtgacgcacagtaactgtgcggggcacagcagccagcaagcgggtcagacataggagagaccaacagg

SEQ ID NO: 31147 - DNA, 597 bp, Homo sapiens
gcgcgtaatacgactcactatagggcgaattggagctccaccgcggtggcggccgaggtacttcaatggtggaaagaggcatcaatgattaaccataatcatttctgatcatgaccaagtcacccctgagactagtaactgcaggtgctcacaaaaaaatatgcagctgtccttcctgccttcaggggatcattcatgaaagtaatttctcacctgaccaaaatgatcgcttaacatttattgcatcattgcccctgtttctgtagactactctaccgaagttttaatttgtcactagtttaaagggccaaaagatctgttttcttcagatattagagacacaaaccaagcatctcccactttcttggaattccttctcaaaaatgactaaagtctgagactgttttcttatttaatgtctattgaattctgttttacagaatttcaaaagagcaggttcttagcttacttttcaatggaacattttagccaggtagtataagtacctgcccgggcggccgctctagaactagtggatcccccgggctgcaggaattcgatatcaagcttatcgataccgtcgacctcgaggggggg

SEQ ID NO: 31148 - DNA, 441 bp, Homo sapiens
actactatagggcgaattggagctccaccgcggtggcggccgaggtacagttttgtaagcaagatgattgaaagatctactgagtgccgtggagtcacagagaggaacaactaccctcaggctatggagttcagtgaaggctgcctaaagagaggatgagttgtcagctgagacttacagaatgaaagaaatgtcctagttgtttagcttgactgtaaacaaatggggcttattacaggattctgtatgcatttttaagtctgatgtattttcctcaaaagatgaggatggtaaggatgatatggggggaagggcactaagcagaaggttctttattcttcttactgccctgtttctcccctgctgtcttatttataacctcttgtttaatgacaagaatttctattgaacaaattatttattttatataaatgtggataa

SEQ ID NO: 31149 - DNA, 440 bp, Homo sapiens
ctactatagggcgaattggagctccaccgcggtggcggccgcccgggcaggtactttttttttttttttttttttttttggagatggtgtctcactttgttgcctaggctggtctcacactcctggcctcaagctgatccttccacctcagcctcccaaagcactggggttgctggcgtgagtcaccatacccagctgaaaagtgatttcttataagccaagcaatcagcctctgcagagaagacaggaccctcagcacatatctagctctgtaattcctcaactcaagttgggcattactatcacccctacattaacatgttctcattaggaatatgaccaagaccaggacagagtcacaagagaaacagtcagtggatcatgtgacacatgagatttattggtccaataaggtgaactggtcaggaaccagatctgct

SEQ ID NO: 31150 - DNA, 405 bp, Homo sapiens
atacgactactatagggcgaattggagctccaccgcggtggcggccgaggtactttgttcttttactactcaatgagactgagagcctgctggattcactaagaccaggtgaacccagagggctctcggtctcattgactcaattgggtttgaatctcaattctgcaacctacgtggctttgggcaggtttcctcattttcaaaattatacaataatatttaccttttaaacttattgaaggattggaaagctgtaacacctagcatgctgtcgtggcataaggtgggggttaagtaaaaagtagctactattaacatttttgaaaagtgctccttcattttccctgctccctttcatactcttcatcctactttcctggtagttcatttcttcttagttggctg

SEQ ID NO: 31151 - DNA, 166 bp, Homo sapiens
gggcgaattggagctccaccgcggtggcggccgcccgggcaggtacctactaaacagcaaagaaaccatcctagaggaaacaaagagcctgactcagaagcgctcaacaagcagcaaattaagccagagcctaatttggtctgtggtctcttaactgtggagccaa

SEQ ID NO: 31152 - DNA, 569 bp, Homo sapiens
tacgactcactatagggcgaattggagctccaccgcggtggcggccgaggtacccaaattaccttgatttaaaccccagctcgcccatttattggccgtatgaccttggacaagttatagaatctctttgggtctgttgtaacatggtaataataatacctacctacctaacacacagggtggttgtagattaaaggagttgccacatgttggaagcatgcttatgctaacaggcatactcatgaagtatcagctatttaaattatcatcctccctcaacaggattctataaactggttccaagataaggtaacctgggataataaagttttctgatttggttagaaatacacctagaaaacttagaaaccaggcaaatgtgaaacataaagagtagatatctgggaacaaaaaagtatattataaaatgccaatactgtcaattcatataaaaggcatcttaatcaatctcccactccccacaaatggaaagcggaggatggtacccgggattatcattattattattttttaagagacagggtcttactagttgcccctgttgggct

SEQ ID NO: 31153 - DNA, 171 bp, Homo sapiens; identical to SEQ ID NO: 30990

SEQ ID NO: 31154 - DNA, 445 bp, Homo sapiens
tacgactactatagggcgaattggagctccaccgcggtggcggccgaggtaccttcttggctatgtctgccagcaggaacaaagaggcatccaaagcatgtcctttgggccatggcattgtctttttccttctaagtctaggatgggtgtgtctgctgaagctacatcattgtgtggaacctgagctgtggtccagctttccagcctctagtgagcagtaaggcacactgcaaggggaatgtggcagaggtgagtggatccacatggagtatttactacatccacttcattggattctacctggatcactgtgttggaggtggaaggccatctgtgatttgtggtgcttctaaaacattctaaggacgtgccctatttcagttaagacacacatttgatttctagctatgcaacctttacaactgacctgatacttcctgaactt

SEQ ID NO: 31155 - DNA, 502 bp, Homo sapiens
agctccaccgcggtggcggccgcccgggcaggtaccctacctgtaatatttgtattaataatatcttattagcattttaattagaaatttaatattaatgatttggaatcagtagttttcaacaattttaatagtgcaaatttatttgtagtatttgatggggagatatggtgttttgtgactatatttacaactggatgtatctgggaatatctcaaagtttctcccaaaaggaaaacatttctattacaaatatgtgacttgtgaaaataatttgtaattcttttcaatatatctcattttttttttttttttgagacagagtcttgctctatcacccaggctggagtgcagtggggcgatcttggctcactgcaacctccgcctcctgggttcaagcaattctcctgcctccgcctcccgagtagctgagattacaggcacccaccaccacgcctgtctaatttttgtatttttagtagagatggggtttcacgatgtt

SEQ ID NO: 31156 - DNA, 551 bp, Homo sapiens
cgcgtatacgactcactatagggcgaattggagctccaccgcggtggcggccgcccgggcaggtactgggaactctggcaggatccttgatgtcctcttaatctcttttaattttcataatactgtgatgcaggtatcattatcccccctctccactaccttgttttatcccagagggaagtaaagctcagagaggctaagacactttctccaggtgacagactctggaaggggcaaggttaggatttgattgtctgtcagattccattatgctgtgtgcctcaaatgcctggtgatcctatacgctaccatgggcactatgtggggcagtgccactaagctctgctgtgacctcgaggttacctctgaagtttatgagccactgccagaggctcagggtggatgatccaagatagctgggctagggtattaaaagggccctatcagaacaaagatcattcacttttgaagtctaatctctttgggttctagatgggaaggaaacatattaaaagtggatgaaggaaggaggtacctcggccgcccgggca

SEQ ID NO: 31157 - DNA, 569 bp, Homo sapiens
ctactatagggcgaattggagctccaccgcggtggcggccgaggtacaaaatatgagagaattcatttccagtaggcctacactacaataaattgacaaagaaaatttgtcaggccacagggtaataatatgagatggaagctcaaacctacaagaagaaaatatttataggaaatataaatatgtgggtaaatctttttttaattaatgtaagaatcaaaatattattttgtgggatttgtgatgtatgcagatgtaaaatatataacaaaatagcacaaacaataagggaaggcaagtggaattctacacaactgcaaagtttttacattttatgtgaagtgatatgacattaaatctaaatagactgaggataagataaagatgtgtggtataatacccagagaaaccactaaaaacaaatatccaaaagcagcagagctaagaagtcattgttggaattaaaataaaatactaaaaaatggattaacataaaagatggcgggaaagaaagaccagaaatgaaaaacagaaggtatcaatagaaaacaaattggaaaatagtaaac

SEQ ID NO: 31158 - DNA, 452 bp, Homo sapiens
ctactactatagggcgaattgtagctccaccgcggtggcggccgaggtactgtttttacagtcattttggattcctgctgtcttatacaccaaataagtagttaaagtgacacagttcatagaataaaatgaatgaaaacacagacatggaaatggaaggaaagtgcagagctgctttctaaatcaaccaaattaattaaatcctgaccacaaatactgaaatgcagagatgcaaagtcctttttgagtagcctggatcaattgtttcctaagagcagatgggcactactttagctgtgttgtctacaaagaaatccagttggcgagaaaatatttcatccacagaactatgattcacggggttagttcctagaggtatctgccccaaggccacctgggatgattaccaaagtcactttaaaccaagattctaagcctaatacccttgcccc

SEQ ID NO: 31159 - DNA, 358 bp, Homo sapiens
gtaatatactactatagggcgaatggtaacttccaccgcgggggcggccgcccgggcaggtacccggggggcatcacggacctacccaatatgtgatgtcacccctggtgggcccagctgtgtcatggagaaacttcagctgggcccagagattctgcagcgggaaaatccaaggcttatttatgccaggctgagtggatttggccagtcaggaagcttctgccggttagctggccacgatttcaactatttggctttgtcaggtggaaggaacagcatatttaagttcttttctgtggaaaacttagaaattgagtctgtgggaagcacctctaggacagaacatgttggatggtgg

SEQ ID NO: 31160 - DNA, 452 bp, Homo sapiens
cgactactatagggcgaattggagctccaccgcggtggcggccgaggtgcctcagaatgataaatcagaatctctgaggaatgggcccaggcatcagtatttttcacacgaacaagcagaggtggatcctttaccttctcctaaaaaactgtcacaagggacaggtcacttggaaggcagtttaagagagagcagaggagaaatctggtgacacatgtaacactgtgattaatctattgcttacgatgttttatatgttgaaagtctggaattctgaatattttattatgtaagagatccagttctccaatgtcacagcctctataatttgaataataataaaggagcacaacaattcacttatgatacccaacagaagactgcaaggatatgctggggcacagagcccaattagggtttaataagacagggtttatgggtgaagcaatcta

SEQ ID NO: 31161 - DNA, 175 bp, Homo sapiens
tacgactcactatagggcgaattggagctccaccgcggtggcggccgaggtacatgggactacaggcacgccccaccatgcccagctcatttttgtatttttagtagagacagggtttcaccatgttggccaggatgatcttgatctcttgacctcatgatccgcccctcttggc

SEQ ID NO: 31162 - DNA, 166 bp, Homo sapiens
  misc_feature 139, 151, 152, 159, 160: n = A,T,C or G
tatagggcgaattggagctccaccgcggtggcggccgaggtacgcggggatcaatgcagagtccctctgtgaatttacaacacccaacacccatgagttcagtccttaagaaggaaaattgagcaagtatttaattggnttggacatttgnncataaannagaggt

SEQ ID NO: 31163 - DNA, 468 bp, Homo sapiens
agggcgaattggagctccaccgcggtggcggccgcccgggcaggtaccctttatgatctagataaaccattgtgttcttctatagtttttccaactatatttgaataggtgaagttaatatgtttaatcataaaatgctctcagatgcttgcaaaaacaattactccatcagataagaacacatcaaaaatttggaaaatttaaaaaaagtcattccagctatatgcaaataacttttagtatatgcatctgaaaagctaccaaacgtaacaatgaaactctaaacttgtagtagaaaggtaaatgcactgtgatcagctttcacatcacttcagagtatattctaaaacttcttagattctacattatttatagagtgaactctaaattcaaacatttctcaggaacaaaacgactcccatccaattatttaattagggaagaagagatcccaaattttcttgctaa

SEQ ID NO: 31164 - DNA, 471 bp, Homo sapiens
actactatagggcgaattggagctccaccgcggtggcggccgaggtaccacccctttgaatacccacatgcaccgtggtccagaggagagagcctgaatccagagctgacagctgaggtttggatcctgtccccaccactcactcaccttgagaaggtgagcaatcttcctgtcctcacagcacatcacttagaggctcacttgcttcacatacacagcaaggacaatgatatccaccttagagtcagagtgcactattatttgacactgttgtaaccatgcctagcacaagatcgggccctaagaattcctattgtcgctaagaatttcctatgacaccttcacacttccagtctaccctggagagctctgggcagcctggatactccaagtatttggaatttttggccactactgaagcctggacttcaaagttgtgcccacaccattctgcagagaacgcctttcaaa

SEQ ID NO: 31165 - DNA, 359 bp, Homo sapiens
cgtaatacgactactatagggcgaattggagctcaccgcggtggcggccgaggtactctaaccatttttaaagagccatataacaggttagttaacaaaattaaacacaatagaaaatagtttattgttgtatccaacgaaactagttaaatatagcagagaagtagatgtcagtagacatttgaaatgtgtgttcagattagtagaataaacatatcagcaagatgcctagaagccaaggaaagatgcaggaaacttgttaagtcacatatctttgataaaaagtaagcaccaagctaactgaatcactctctaatttctggatttaagtagattatttaataggatcaggtaatgac

SEQ ID NO: 31166 - DNA, 315 bp, Homo sapiens
  misc_feature 256, 257, 273, 274, 293, 294: n = A,T,C or G
tacgactcactatagggcgaattggagctccaccgcggtggcggccgaggtactggggaaggcggctggaggaaatgtgagcaggtgcagcgccctgtcctgccctgcccctgcaggagtcctcattagtgaatggactgagagtggcctgggcagtgttctatctggacatacagatacattatttttagggcttaaaaacagtattgaatttggcaaatgggacccaccaagtttgaaatcacaatctctaaanncccaggagcattttcnnctgtggttccttgtggagnncagtttcctcttgttctgggt

SEQ ID NO: 31167 - DNA, 424 bp, Homo sapiens
gactactatagggcgaattggagctccaccgcggtggcggccgcccgggcaggtacaaaataaatttgctcattgggttagagtatggttattgattagggggctaagcatttagttactgcatggggcagccaataataaaatcacagccctgtgtatttacctccacagtgtgtgctgataagtgcaaaaggtttgtgcaaattcttttgaagttatactgtaaccatggtatatgtattgaaaacttggccattttaccccattcctatgaatgaaaactatttggtgaatcagaggatagtctgaattgggatatgaaggccagtataagtgtcagttagcaaagtcagctctagtttattattttttttttttcttttaaggcgtagcattactagaagtatagctttgggaaccttgt

SEQ ID NO: 31168 - DNA, 428 bp, Homo sapiens
actcactatagggcgaattggagctccaccgcggtggcggccgcccgggcaggtacagtagtatttaacctagacgtgaggaaggagtaggaaattttctggtgaatacagaagagcaaagaacagcaggtcagcaggaatgactaatgtttttctatgcatgtttaatggaatattcgtgtaggatattttgagtaggtaattggataatcagcatttgtaacttgcatcctagtagtctgactctcactaataagacttgtcaaagatccaagaatccgaaagtggatgataaatgtccatgtgtatcaccatccatgaccgaaaatcatcatccacagaacacagaattgggacagatgaacttaatagataaagatgaatatcggagttgttcctcttagggaatgatactctccatgacctgt

SEQ ID NO: 31169 - DNA, 437 bp, Homo sapiens
tacgactactatagggcgaattggagctccaccgcggtggcggccgcccgggcaggtacaatttcttattactgcatctaaaaatgaggacaacattctttaaatatcacgcttatataaaaacttgcagaaactcaatccacatgtcttaattagaagccaccataaagaaagacatttcattgttttaataacttatgttcagaaataaaactgctcttacttaagcactgcttagcagaaacgttaaaatcaagtctagagaaaaagtagaagatggtaatgttcctaagatacatgagaactgagtttggttacagttagagagaaacagaattttttccactcccaaaccagatctattgaatttacttggtttatttttgtatatatttggcatctaaagaatgaattgccttttagacaaaacccttctc

SEQ ID NO: 31170 - DNA, 478 bp, Homo sapiens
ctcactatagggcgaattggagctccaccgcggtggcggccgaggtacaatgtgattttcatcagtgtttatgtttttgaaaggaaaaaaaatggctgaagtattattttagtccatgtgcaaagcaaattctgttttgtctgttaaaaaaataaatgagcaataatctccaagaaatcatcttgaccagcattaatgactagtttggtagttaacagcccgaggcatagccagaggctattaaggctctgggggaaagaaaaggttggtagattgtggtttaccagtaattaactataggtatgaatcaaaacttcctaagaaaagagatttaagttactttggattatttaatgtgtatgcttatcttttcatacatccccctcccacaccttttctaataggaaaagaagatgaagccattatttcacaaaccaagttgaattggaaataattcacgtaatgaaacaggaaacac

SEQ ID NO: 31171 - DNA, 414 bp, Homo sapiens
gcgaattggagctccaccgcggtggcggccgaggtactgtgttgtaagagatgcaggttagcagaaaccctccacatgagatctgctttaagactgacccaagcctgaaacgctctctccctaagtgatccatgtccctgcagtaataccataaccactaagctaacacactcactgtaaaagtgttgcttctccatgaggcaccaagacttgatgaccatttgcagttctcattaactccactaagaccctaaaggctaaatgacaaccaagcctctgtcactctgcctgagtggatttaccacaaatatcaaatctgttcaatctattataagagctaaaaaggagaagcacatgaaatcacatttcattcttagctcttttatcttcccatttttcatttagacattgaat

SEQ ID NO: 31172 - DNA, 428 bp, Homo sapiens
atacgactactatagggcgaattggagctccaccgcggtggcggccgaggtacgcgggggggcggagcaatccacactgctgagcctgggggggtttggaattcttcggcgaagtggagcgggccgagagtgggtttcccgtccccgagccctccctcatctcggagatgccgcacttgtgagcgacagggcttcatttgaattttcgcacctcgcgagttgcggagcctgcatctctgaagctgcctcggtgaagagccacagcattattttttttctctttgggagagtagctgtctgggatttgagatcctatcttccctgcaaattaccaggttgcatcttcactgataggaatacatttcttcaccaaaggacatggatgaaaatgaaagcaaccagtctctgatgacaagcagccaatatcc

SEQ ID NO: 31173 - DNA, 393 bp, Homo sapiens
cgtatacgactcactatagggcgaattggagctccaccgcggtggcggccgaggtactgcccagatagaaccttctgcctctttggggtaaaattcgatttcaaagagagagaactgtggggtgagaaaggaagactgggacccaaggggccaaactagtgacaatgactgctgtcatgaagggtgacaaggacaatacctgctgagctcaaaccaccctttggacccagtgaagctcagatgttgcttccagtgcaggagtagttaagctcaactgttttacaatatccagttatttggcttgggtgtgatggctcacacccacactcctagcactttgggaggccaaggtgggtggattgcctgagctcaggagttcgagaccagcctggg

SEQ ID NO: 31174 - DNA, 407 bp, Homo sapiens
atacgactcactatagggcgaattggagctccaccgcggtggcggccgcccgggcaggtactacctcttccataggttgtgtcacccagttctgagatctttcaaagcactggaagagaaccgccaagttctcagctgtcagtgcaaactggtgtcactgagatatccattgtcctagctcatataatgtccaggtcagtgtctttctgttcctctgagccctgttttgacactagaatctttgccgtagctgcctgcggctccatctgccaaggagacgcccctaacccctctaaggtgacgttttccagcagcactgccagagaacagggtgaagggccctgcattccaggacccacaatagctctgtttttctttcctgtctctccatttccaggagaattgtt

SEQ ID NO: 31175 - DNA, 389 bp, Homo sapiens
tacgactcactatagggcgaattggagctccaccgcggtggcggccgcccgggcaggtactgggattataggcgtgagccaccgcgtctggcctctaacgagatatttctaaaggttaggccttcagtcaagaattttaaagctggatcttagaggttatctaaactaacctctccatttcatagataaggaaagtgagtcccagaaaagcactggtttggacaagttcagaaagctaaacagtgactgtggatgtatgattctgtctcttaactcctaatccaaatgtcttctcactagataaggctgtgccttctacatttgaaggctcaaaccccatggatggatggagggaaggatgggtggagggatggatggatagatggatg

SEQ ID NO: 31176 - DNA, 448 bp, Homo sapiens
actactatagggcgaattggagctccaccgcggtggcggccgccgggcaggtacctgaagcttgaattcctgaacttttttttttttttttttttgtatttttagtagagacagggtttcaccaaattgaccaggttggtctcgaactcctgacctaaagtgatccgcccaccttggccccgcaaagcgctgagattacagacctgaaccactgtgcctaacctccctgaacttctcaacattctgagttagtcactttccctttggtttaagccagctcgggttacttgcaaccctagttatacagccacttttctacaacacaaacaaaccacctagaataaaattcattttcctccttttttttttttttttttaatggagggtggtggaattcagagagcagaaatctgtcctgaccagagaagagttcttaacaggttccact

SEQ ID NO: 31177 - DNA, 451 bp, Homo sapiens
actactatagggcgaattggagctccaccgcggtggcggccgaggtactaaagtcagcaagacctaatgtctaatttacttatacctatgatgaaatctagtgccaaggatcatccatggccattgccccacttcaaatattcatgagcctccacaatccaaaatgcattaaatgtgggcaggttgccaataacacacaatcttcctaatgacagggagctttctcagatcaaaggagcaagatgttaaagacttcaaactaaactgtctttgtaagagacacccagaaaagaaatgccagatcccacaccctgtttcagttatgaaacatcaatgaaatagagaaaataataaacattcattcattcctctttggaactcatttttttgcaacaactttgcttctttcctttcttaccattgcactcaatcactaaggatgttatacact

SEQ ID NO: 31178 - DNA, 438 bp, Homo sapiens
tatagggcgaattggagctccaccgcggtggcggccgaggtaccatcaactagcgttcattatattgagaaactaatgaatggttggtctctactaaacaaacatcatgtgtttacagctaaatattgtatatccaaaatgtgaacaggaagatgaaaccaattgataaaggttcttacttcacattttccaagtatagtattaattcaaatttctgagaaaaatcaagagacatatatcacataagggcaataaatactaccatagaatttcatggtatggaagttcctacatacttatggttctgtccttcactctcttttttgaacacgtttgtggtagaaaaaaataaatacaaaaagaatcatttccaaaataattggatttgaattcttaaaaatagtttggtatttacttatgtgtttgttcatgaatgac

SEQ ID NO: 31179 - DNA, 353 bp, Homo sapiens
tacactactatagggcgaattggagctccaccgcggtggcggccgcccgggcaggtacttttttttttttttttttttttttttttcgagacggggtctccctatattgccaaagctggtgtcaaactcctgggctcaagtctctccttagcttcctaagtagctgagaccaaaggcacaggccaccgtgcctggctctacttctcaccttaactaaataaccatccacctgagaaataacatatacatgtaagcttaattcaaatattcaggttttgtgatcctcaaacgtgaatgatcagaatcacctagggagctttttgaaaaaattaaatcccccctctacatcagtt

SEQ ID NO: 31180 - DNA, 421 bp, Homo sapiens
attggagctccaccgcggtggcggccgcccgggcaggtacctggcttggacttgaaggagaaatgagagagcaactatccgcagtagaaggctgagcatttcaaatccctgtgaaacctagggttttgaaaacagtatgtttcggcaacagcaagtggttcagtgtgattggaaccttaaagggaacagtggaaagatgaggctgagcatttaaggaggtgccagattgccccaaaggcagtgttctcaatactaaactaatgttcttccaccataaatgagctccccctggcaacttctcatttctatcaatggaactttcgttcttcatatgtccaaaccctgaagtgccatcttcaggtctgcctcagcatttgtgatcagtgctcaagttttgtatcatttctatattcaaaacatt

SEQ ID NO: 31181 - DNA, 343 bp, Homo sapiens
gcgaattggagctccaccgcggtggcggccgaggtactgtcacccatggccctgataggaaacagatggcatattcaagctggataatttgaagaggattaaatgaaacaagtattcacaaataggtgggcagagtttagaaaatcaacaagagatattgtagtatcctgggctagcaacagagaggatgggaatattgccccatagacctgaagtgcaaagagaaggagtgctacctcaaaaagagagctttgtggagaaggctgcctgatagcagctgtagtcccaggtagagggtgagccaccacgcccggcggatatttcatagttttaaaagggactt

SEQ ID NO: 31182 - DNA, 428 bp, Homo sapiens
tacgactactatagggcgaattggagctccaccgcggtggcggccgaggtaccatactcttttggttgctgtaattctgtggtataatatgaagtcagaaaatataattcctcccaaagtgctgggactacaggcgtgagccagcgcgccaggccaagaatttctttccatctcctgtgtcattgctttggcagtggaaaacgcacgtggcctctaaagagtgggtcccaaggtcatgaaggcctgtggggtggagggcaaggtatctctttccaggctggaatggcagaagacgcggcggcagaggggctgcatgtcctcctcacagcaggcccctgaggacctttatcctcctgagccatgaatgtccctcaggagtgtctaaagcacccggtggggcagggggacccctataggccttaggagct

SEQ ID NO: 31183 - DNA, 450 bp, Homo sapiens
ttggagctccaccgcggtggcggccgcccgggcaggtacatcatcgggaattcatgattaagtgactaaatgatttgtttctaaaacagagatgtatgctgtctgtggcaagggctgggagctgggcaacagctgggcagggggcacatcgccttaaagcctcatgcaccaaagagccaaaccgtgaggctttctcagaaagcaaaatacagcgctcacactgcaggggtggcggcgcaggtgtggaaccctgtcttgatgcctaacgtgggggtcacagctatccgaaggcaggctccagagagcaccttgaccatttctgcttgttttctcccgtctatgccccagcctggcagtcactggcctctgatttaaagagtcgagtttgcgggtggtttgctaattatgacccaacgagcacttctggcttcggttggagtgagtggggtg

SEQ ID NO: 31184 - DNA, 428 bp, Homo sapiens
  misc_feature 413: n = A,T,C or G
actatagggcgaattggagctccaccgcggtggcggccgcccgggcaggtacgcgggagaataacaaaagcactcgtgttacttttaaacaaggtaaaacttaaacagttttttcctccgtttctttttttatggaaataagaggcaagtgatagcaagtgggtaattcaatggcagtggtaactgaagcactgacctgttacaagagagacggaagcttctacttgagcagatacaaatactgtcatccgtggagatttgaaagaagtctttctatcactgggtagtttgagagctcattagtcttctttagaatgggatttaaacttggaaacatcaaagcaagtttacaagggaaacttagttttactggtgttggcagaccttaggcgccaagaatttgttataaaagntgtctggaaagtggc

SEQ ID NO: 31185 - DNA, 474 bp, Homo sapiens
tacactactatagggcgaattggagctccaccgccggggccggtctgcccggccaggtccaaagcgcaaataggcaatttggttcaatatctcccaacttaaacccactgctttttcaacagaaatgttttttacatcaagtgttgcctctgttctcactctccctccttcttgatcttttaatctaaccctgtcttcttgacttctttctagcccctgccccattgccattggtttataggtcaaattgcttgagttaaatgcatagaagatgcaactatttcagacctcactttaaacaatgtggtaagtgttaagacagaataaaagataaaccaaaatattgtagaagatgattctaatggcatatccaggagctaacctgctctgcattgatgagtttagctatcataattccaaaggaacactatgattgagaacaaccaagagcactactaactccagcatcaccaa

SEQ ID NO: 31186 - DNA, 366 bp, Homo sapiens
gtatacgactcactatagggcgaattggagctccaccgcggtggcggccgaggtactttttaaatgacaaagagtaatttcaacaaaaccaaatgctgcagtgtggcactcagctataacagtgtattttctttatccaaataaacacaataaaagctttgctttgcattgttcattataaaaaactgaatttttcttttgcaactatttatttttaaataaggaagtaaaattctcaaaatgatacagttgctgctgcaaagtatgaataataagactgagggaggtaagagagaaaggactagtgcaagccctaacaaaagccctgtaccagatggaaaatgtttttggtgatctggctgctgc

SEQ ID NO: 31187 - DNA, 475 bp, Homo sapiens
atacactactatagggcgaattggagctccaccgcggtggcggccgcccgggcaggtactttggcttttgtttctagaacaccaatgagtatatgctcattaagatagtttgatgcaataaatccttattttacttgcctctattactgcattgtaaactgttgtctactttgtcttcttgaaatcctacacctcccccagcccccacatttggcctatggaacattactttatcctgattttccccctaaccttctggcaatgcctctcagactccttccagaactacttttctctgttttccttttaatgatgacagtttatgcaattgtgtcttcaaacttataacgacccacacaatagtaataacagtcaacatttactgaattcttacttgtgttaagtgctgttatatatgatattttaatctttgtaaaatcttataaggtaagtgctgtcattattcccacattac

SEQ ID NO: 31188 - DNA, 250 bp, Homo sapiens
atacgactcactatagggcgaattggagctccaccgcggtggcggccgcccgggcaggtacgattatggttgggcaagtttcctgcccagtggtgcttacattctaaaggaggcaggcagttagtaagcctgtaaacaagtaaataaacatggcttctttaaagacgtaacatttcaactgattctgaatgatcacagagaaccatcttatatccagggtaacggcatttcggtcagaaggacaactgca

SEQ ID NO: 31189 - DNA, 415 bp, Homo sapiens
gcgaattggagctccaccgcggtggcggccgaggtacatttgttgggggcgtgacattaacatataaccacttagagtggacatgcagttagagaaaagtcaatgagctggaaccaagctgggaattccaacatgtagaagttaaacacaagaggaggagccagcaaagggaaacagaaacagagcttccagcaggtggggggcatttggaagaaaacgatgccatagaagccaagatgaaatagacatcaaggagaaggaagtagtcaattgttttgaatgctatgaagaaagataagaataggtaaatagtccttattatttgataacagaggtcactagtgatcttgatgaggggtttcaataggaatggggggattatatacctccctggatttcaactgaggtaaggaag

SEQ ID NO: 31190 - DNA, 445 bp, Homo sapiens
actcacttagggcgaattggagctccaccgcggtggcggccgaggtacttttttttttaatttttttttttttttttatgtagaggtagggtcttgctatgttacccaggctgggcttgaactcctggccccaagcaatcctcctgtctctacctcccgacaagaaaacattttaaaattcacattatattctctagctttgtgctgaacctctgaaatataagatgaaacagaaactggccctgccttgaaggaatttacagtagtgtggggtgggaagcatgttcatgtagagatataaagagatataaagaattaagtgccaattggaagtgaagtttttcttcggagtaattaattctaactgcaggttaggcgtaaggggataaaggcttctcagagaaggtatcattttagctgactcttgaatcaggatttttagtag

SEQ ID NO: 31191 - DNA, 458 bp, Homo sapiens
gggcgaattggagctccaccgcggtggcggccgaggtactttcacttttgtgaataattttattttccaaccatggaagcatcatcgtgaggttgaaagaggatcattcttggaaaatacaattacttaacagttatgtgacctgggacaagttgagcctaaatgtcctcatcataaaatggaactaagtaaccctcataagaatgacgtagtgtatggacactgtttggcccagagtgggcagtgaaaaaattgtggccattctggaataatcttatagtctctatggtggggagatctgaaagccgttttctttccccttcccattttgtgtatgtatctgcctccactgatctgcacagggaagggaagtggttggtaactctctgggcactcaggatctctacacttggtagttgcccagcagcccatcactgtgtctttcacccctagggctc

SEQ ID NO: 31192 - DNA, 369 bp, Homo sapiens
tactatagggcgaattggagctccaccgcggtggcggccgaggtacctcagttggaaatgcagaaatcacctgcctactgcattgatctcgctgggagctgcagaccggagctgttcctattcagccatcttgccagcaggtatttctttatagcaacacaagaacagcctaatacaatttccagtatcaacgggctgttacaagttccccctaccccttcccagtgggatggagacagtggagtgtctaaactttcaacatcgtccagaagtaaagaggccactcgctccctcttccctctggtgtcaatggagagccatgtggtagaacagtgaatgaggacaactccttattcttttccaactagg

SEQ ID NO: 31193 - DNA, 410 bp, Homo sapiens
tactatagggcgaattggagctccaccgcggtggcggccgcccgggcaggtacctttatctctttacctcttcctttctttctacctgaaggttacagtaagtcagccatcatgtgactatgaagcagcaagcatttgccaaggcaggttaagcagaaagataaaaggaacctggggctttgatatcataaaggcaacaacattattgtcaactgtattaggagaaaaataaagtcttccattgattcaagctactgttttcagctttttattacaaatagctaaatattatttctaactgatataccatcagaaacttacctggacaactttctattaatgactgaaaaagcgtgtgtctttccagtttcctttactttggttagagttgaggactagactctggatat

SEQ ID NO: 31194 - DNA, 183 bp, Homo sapiens
tcactataggcattggagctccaccgcggtggcggccgaggtacagaggtggctcagacactgcctgccctctggagcatatagtccagtagagagggaggaggctgggcttagatggatatggagttagacaggactagctaatgcagtcaatgagggaaacacgagggtgcgaaatatgac

SEQ ID NO: 31195 - DNA, 462 bp, Homo sapiens
gcgtaatacgactcactatagggcgaattggagctccaccgcggtggcggccgcccgggcaggtacaggccaggtgagccaccgcgcccggcctacacagtttgcattttaaaagattactttgtatacccctagagaggttcccccccatggaattctatattgtctaactgttttctgatgacataaaatttctcctgagtctttggaaatcaattgaaaggaaggaaagaattgcaatggccattcagattcctctcaccatttggattgggtggttctgaccactttaccattttttatgttgattctgatcagaggaagatggctgaggattagtaaacagaaacctggataactgtaggtgggcctaggttaagagcaaggacagtagagccagaccacctgagtttgaatcctgcctacactgtctaatctctgtgcctcagtttcctcttctgt

SEQ ID NO: 31196 - DNA, 199 bp, Homo sapiens
tccaccgcggtggcggccgaggtaccggctgggcaatgaggggacagtgtttgctatcagacagctcactaatgtagaaaaaaagaaaagtggagtgggagactataaatgagaccacagggttaaattgcaatgcaagaggaaaacaataaaatacttttagaggctatttatgttttgcccacataaaatcccaaat

SEQ ID NO: 31197 - DNA, 412 bp, Homo sapiens
tacactactatagggcgaattggagctccaccgcggtggcggccgcccgggcaggtactatagtccaagattgaaatctgtcttattaatcattttccccttctgtctcccctaattgccttactgtatggctcctaatgacttctagttattcttttgttttccttccattaacttaaaggatatgtgtatcttctttttatgtattcatagaagatacctaaaggagatattgtatacatatatataagatgttcatatgttcctaattttaaaataattgttaaatgttatgtagatacataccctgtaatatgtatatgtaatatgtaatacagagaagtgcgatttacggggaaattacccatttattaatcctttcaccagttgggtttctgtctttctgtgctat

SEQ ID NO: 31198 - DNA, 430 bp, Homo sapiens; identical to SEQ ID NO: 30884

SEQ ID NO: 31199 - DNA, 339 bp, Homo sapiens
actactatagggcgaattggagctccaccgcggtggcggccgcccgggcaggtaccaggagggtattgatgtttgaggtccaaactgaaaacccatcacctccttcccactgctatagcagcgttagccctggggttcattatctagccagttcacaccttctaaagtggggctctgaaaatgtcttacttccctcacagacaaagcaattctcaagcctcctgagatcgcccaccaaccagagcaactgctgtcacttggaggtgcagctgaattcttctaattgtgacacaaactcttgaaactgtaaatgctgaaagattaaatgaggttataaca

SEQ ID NO: 31200 - DNA, 397 bp, Homo sapiens
  misc_feature 367: n = A,T,C or G
ctactatagggcgaattggagctccaccgcggtggcggccgcccgggcaggtaccattcttatctcagaatgctgtaaaccatcagtagaagcagtttagatttggactgcatggtaaaatgaaaagtaataaccctccaaccacaacctagtcagggtattaataattatatgtggcaggaaaacaaagaagaaaataatattgaaaaaatggagattccccaaccagtttcatatttgaaggatctgagttgtatttttattaaggaaattttttttctgaatactgtcttccaaaatgttaacattaaaatctgaatcagaggactctgaatggaaaagaagtttggatcactgacacctaggngctccgaagcgttgtgtggccacaatggaa

SEQ ID NO: 31201 - DNA, 448 bp, Homo sapiens
tacactactatagggcgaattggagctccaccgcggtggcggccgcccgggcaggtactcagctaagaagaggattgctttgggcataggaagcagaatgacgagttcagtcttcctcagtagttggagcacagttctcaaagcccatcaacactttggaatggatttgttgttttatttatgccatcaagggagagttgatatttgtgtattgctaaaaactactaaagtatgtcgatgcttaggtaggaacatacaaaccatatatcctctgggatctgcccaggtttctgtataaggcttgacctacgtaagatcctatgatgaagaccagaaaactttttttaaaagtaggtaaattaaaattaaaatcacgagtttgttcacatttgtcccataggttcctagtgcaaaaatgcagggagataaaagcaaacatttgaactca

SEQ ID NO: 31202 - DNA, 439 bp, Homo sapiens
gactactatagggcgaattggagctccaccgcggtggcggccgaggtacccaagtgacatgactaattacagtaaccatgaattcagtgcctggccatttatcctagcaatttcaagtctcaggaatctcttgcagcattaagaaaccagagagacaactatatgtttaacttctaccttctgtcccctgagaagtcactactcatcttgcttccctcaggatgaactttctgtttctatgtttaaaagtctgcaaaatagatttaaaaaacaaacaaaaaaagcagactcagtatgagatcaaaccttacgaatcattgtcaaggtcattttttacctcttctatacctagactactgggtgggatagtgcattcataaaattccagattcaatgctctcatttccatcgtgacaaaatgctactttatgaagaatta

SEQ ID NO: 31203 - DNA, 471 bp, Homo sapiens
taatacactactatagggcgaattggagctccaccgcggtggcggccgcccgggcaggtacttggatttccttcctttgttgactcaacttgagagctctcattgtttccagaagcactttgttgaggcttgcttttggccgctgcatctggaagcttagaggcaatattcctgggtgggagtaacatccgagttggatttgatgtgattaaactcaaagggggaggaggctgatcacggaaaacagatgtcaagcagagctgcacagtctctttcattgctttcatctgtgactccctgtcaagagctgctttctccagttcatttttggctacagctaatttttgttccagatcagtaagctgctgcgccttaaataataaatccttcttcccataacgaagctccttcagctgggcttggattttttttgactcttctgcgtgaatgccacagagcttgtttcctgac

SEQ ID NO: 31204 - DNA, 453 bp, Homo sapiens
gcgaattggagctccaccgcggtggcggccgcccggccaggtacttcagagctaagatagctctttgggttctaaattctgcgatcttctttttgatttctcttggagcaataatgaaggcaaaacatcaataaacataacaaactgggtaagggagaccattgagaaggactaaggacaccttcaaagttctgagtgagtttaaaaagaagaatgatgaaaactttgatagaaatatgaaaaaaagtataggaacttgtatggcttgaaacttcttaatgtttaggctaattatattgaagatgacagtggtcattgagaaaaacaaaatccccaaagcaattttggaataagggccaacatttaatacttaccatacaactattctaagtattttactatattcacttatagcaactctaaaaagcatgtagtattaacagagaaattgag

SEQ ID NO: 31205 - DNA, 436 bp, Homo sapiens
ggagctccaccgcggtggcggccgcccgggcaggtacttctctgctgaattaaatagaatccattgattttcatttaacttttacttaatgatttggtattgtcattatgagcataaattattataatgtaatgaataaaaataatataatacaaatatatgccctctaggttataaaacacttgaaggacagggccccagtatgttattcatcaatgtatccctactactgcaagcatcataataatggcttgcatacagtggtggtcacttatgaattataattaagtattgcattaaaatgctgaacgtgtatatctagctcatctccacctgaaagtcactgggaatatatacatgtgtgtatacacacatatacacctgtgtgtccatatgtaatatatgtccttaagtgtatatatacattatatatata

SEQ ID NO: 31206 - DNA, 416 bp, Homo sapiens
ctactatagggcgaattgtagctccaccgcggtggcggccgaggtacatttgttgggggcgtgacattaacatataaccacttagagtggacatgcagttagagaaaagtcaatgagctggaaccaagctgggaattccaacatgtagaagttaaacacaagaggaggagccagcaaaggaaacagaaacagagcttccagcaggtggggggcatttggaagaaaacgatgccatagaagccaagatgaaatagacatcaaggagaaggaagtagtcaattgttttgaatgctatgaagaaagataagaataggtaaatagtccttatatttgataacagaggtcactagtgatcttgatgaggggtttcaatagaatggtgggattatatacctccctggatttaactgaggtaa

SEQ ID NO: 31207 - DNA, 405 bp, Homo sapiens
agctccaccgcggtggcggccgcccgggcaggtacgcgggctccacataattgctgttctcagatatagagataagaagttttgatagcaagttttctgtttaatgtgtaataagcactttctctttttttaattctcataggtgaatcatctctaatcatgaacaagttaaaatgccctcattgtagctatgtagccaaatacagacgaacactaaaaaggcacttgctcattcacacaggagtgagatcatttagctgtgatatttgtggaaaactgtttactcgaagagaacatgtaaaaagacattccctggtaagtaactttaaatacagctgatctttgagataaactatatttatgtcagtgaagtttaaagggatttaaacagttaattgtgaattt

SEQ ID NO: 31208 - DNA, 405 bp, Homo sapiens
tacgactactatagggcgaattggagctccaccgcggtggcggccgcccgggcaggtacggttataagggaattgggaagtcttcgtcatgggagacgtatcagaattccggaggtgactttaacttcagattagattctagaatcagtttgcaaaatagagtcatttatgaatttgtattttgacaaaaagttcatcaacaccttttataatattctatgttgtggaaaaaagttaggagcaacctgactctgtatgtgatattatgacttcaaaggagcttggtttctctctctctctctctcagaggaaaattttagtgtgctcataacttaatatagacccttttcagacatttcggttggtttcctgcttctgatttaccaaataatgccacattgacca

SEQ ID NO: 31209 - DNA, 432 bp, Homo sapiens
tacgactactatagggcgaattggagctccaccgcggtggcggccgcccgggcaggtacacatagctcaggaactactgatgcactgccttccattttagtggcagtttgaatttaagaatttctagtttgtcttaagcttttctgtaatctctcacatatatattcttaatttcaactgataatttctttcttaatgtctaatatagcctatttgccctctgaacagcattgagatgctttgaaattttaatgcccaaaaagttggctttggtaaggtggtcttcatttctgcagtagaaccatggttgaggctaatggtcccatcagcattagcaggcccttggctagttgcacagtaaactgcatgtttcccactagtaaaagagataaccccaacagttttaggattaatgctgagttgtagtgttct

SEQ ID NO: 31210 - DNA, 185 bp, Homo sapiens
tatagggcgaattggagctccaccgcggtggcggccgcccgggcaggtacttttttttttttttttttttttttgtatttttagtagagacagggtttcaccgtgttagccaggatggtctcgatctcctgacctcttgatccgcccaccttggcctcccaaagtgctgggattacaggcgtgag

SEQ ID NO: 31211 - DNA, 406 bp, Homo sapiens
tacgactcactatagggcgaattggagctccaccgcggtggcggccgcccgggcaggtacggttgctatttatagccactatcataacatactgctgcctctaactcctggcctcaagcgatcctcccacctcagcctcctcggtagctgggactataagcacatgccatcacacctgaattaaggacactttttgttgttagtattaatgcattggttcagctgagcaaatatttaacaaaattctactaagcaccaggctttcttttctaatatacaggtattaatagtcattagcctgaggcacatataatacacagactatttgaatgaatcagactgatgatacaaagtataattgatgagagacatgtagtccaaccagaagattgaggacaatcatcct

SEQ ID NO: 31212 - DNA, 263 bp, Homo sapiens
  misc_feature 230: n = A,T,C or G
atcgggcgaattgtagctgcacagcgctggcggccgcccgggcaggttccgggccttgtgctaaacaccttagatgggttatctctgaacttcacatcagtcatatgaggtgggtaatatcattatctacattttacaagtatggaaactggggattactgaggttatttgccccaaggtaacacaggatggtagaattctggagccaagagttggaaaactgggttagntttgcttccagaaccccaatgaatcttagcatc

SEQ ID NO: 31213 - DNA, 411 bp, Homo sapiens
ctactatagggcgaattggagctccaccgcggtggcggccgaggtacacagagacacgatccacagttgtgtaggaataacttcctaaacatctttaggatctacctctttttcctgttcccactgttatttctttgtttcaggcccttaacatctctaatatacactagtatttctgtcttcacactgtttttttttctttacacagctcttttcatagcccctccattagcacacagattggaattgtgtctccttgttacccacagaataaaacccaatgttcttaatatgtagtcttaatatagactctataaatagcccctttgttaatctatcttgaattactcacttttaggtttcagctccctactgagaccccaactggctttaccttttgttccctcctgg

SEQ ID NO: 31214 - DNA, 215 bp, Homo sapiens
ctcatatagggcgaattggagctccaccgcggtggcggccgaggtacttgtccttcaattttgggaaatgctattatttgataatttctctttttgtattttctttgtttctctagattcttagttttcaattttgtctttcaaaccttgtatttaatttttatttctgctttcatatgtatatataatttgtcattctgaatgttcttttttta

SEQ ID NO: 31215 - DNA, 192 bp, Homo sapiens
cactatatggcgaattggagctccaccgcggtggcggccgaggtacgcgggcacccacacacatcttactagaccaaaaaagaaaacttgtcaagcaaataatctcccatttcttgggtcatttggagagataacacaggccaggttatatgtcctgaaagatgagaatgtgtgaagtccccagagagtctg

SEQ ID NO: 31216 - DNA, 645 bp, Homo sapiens
gcgcgcgtaatacgactcactatagggcgaattggagctccaccgcggtggcggccgcccgggcaggtacacacatataattcagctgtgatttttaaaaatgtgaacttcatactggcagtcacggatcctcatcatttctcagcttgatttattctctctctccaggcctggccgtctccaagtcatcctctacaaagcactcatgataccttttgtaaaccacaaatcagacgtcataactcagaattttcggtctgcttggggcacaagaccatttttgtatcctctgtgagctgaacaatgtctctgcacccttacactcaactggaacactctgcaactacagaaggccaaagaggcttccaagttctctcttctgggcctcttctcactcactctcttttctaaggtcggccgctctagaactagtggatcccccgggctgcaggaattcgatatcaagcttatcgataccgtcgacctcgagggggggcccggtacccagcttttgttccctttagtgagggttaattgcgcgcttggcgtaatcatggtcatagctgtttcctgtgtgaaattgttatccgctcacaattccacacaacatacgagccgggagcataaaatgtaaagcctggggtg

SEQ ID NO: 31217 - DNA, 499 bp, Homo sapiens
cgactcactatagcgactcactatacggcgaattggagctccaccgcggtggcggccgcccgggcaggtacaaaaattaagattttacaaaataacagatgcaagatctggcaaatgattaatttggggaaaccatgtcatttactacatccaagtaagtctagtatttccttgaaatttggaagacagaacaagttctgcggccctcgtgaacatttctcaacagggttacgggaaaactctgttatttgaatgtgtaggggacagggcgtggcaaaggtgccagtggaatttaatacagtcaagcaggaggcttcttttgaaaaatacccacgaggctgccagcggagttcaccaaggggctaaaggcagcaatcaaatgaaaaaaaaaaaaattaaaaaagtacctcggccgctctagaactagtggatcccccgggctgcaggaattcgatatcaagcttatcgataccgtcgacctcgagggggggcccggtac

SEQ ID NO: 31218 - DNA, 400 bp, Homo sapiens
tacactactatagggcgaattggagctccaccgcggtggcggccgaggtacaagaaaaaatcaaacaatcacatcaaaaagtgggcgaaggatatgaacagacacttatcaaaagaagacatttatgcagccaacagacacatgaaaaaatgttcatcatcactggtcatcagagaaatgcaaatcaaaaccacaatccgggaggtcttgccaaagaccacctgggctttccgggcaacgtgctagagcttctgggaagcagtcgtggccctttggagattccacggcttcggattcctactgcaggatgctccactgtgtctgccggcctctggcgttttgctgaggggtaacctcggaatggctagaaacaagaacactgagatggcccagtcgtgcc

SEQ ID NO: 31219 - DNA, 599 bp, Homo sapiens
actactatagggcgaattggagctccaccgcggtggcggccgcccgggcaggtacatctggcaaggggcacttttactctgatgtcgggtgttttagggatatgagttcagtgaataagtagctagagggaggagctagttaggtcttgattttaggcaaatgctaaatctacctcattttccatacctgtcttttgattgggatagctaaagaatttataccagatgaaccaagcaagccaccttcttacgacattaaatttggtggaccaagcccccagtagaagcgctggggcccagcacggccaggctctcaccttttagagcagcacccccgactaatccagcgaatggaatctggctatgaaagcagtgagaggaacagcagcagccctgtcagcctggatgcagccctgcctgagagctcaaatgtctacaggtattgtttggcctttgaacagcaacattgtctcttgcagcaatgtgagccacctacttggggctttcaggcatggctgagacaagtggagggatggcctttgctattatctctatgtgctctttcaacttcctataacaacagcaccctctgctggaag

SEQ ID NO: 31220 - DNA, 440 bp, Homo sapiens
tacgactactatagggcgaattggagctccaccgcggtggcggccgcccgggcaggtacagttgtagtttatctgcatagataatatcaaccaagttagacccaataaagagtaatatatagaatgactatttaaaatactatagggaaaagttggattttttttttttttaagctagattacccaaagttaaatttggccaaagtggatatcaattcctagacttgggttttaacttaaatggatttatttatggcctctaagacaatcattttattctcactgcattcatgaaataattcactaacacatttctcccagagttgctaatgcaatgctctttccctcagtggagtcatctgattgttttagcgcaggcactatcatctcaccatcagaatatataagaaatgtttgaccttcaattaaagttgcagaat

SEQ ID NO: 31221 - DNA, 414 bp, Homo sapiens
ccaccgcggtggcggccgcccgggcaggtacgcggaattacatcacatctatatgaaaaatcaatctgtttttttagttgctgaagcacttggagactccaaagtaaatcaaatctttacatcaattttccaggaaaagaaaatgataaaaatctttgtccttgaggttccacttgacagggtcaaaagcaattctttcattgcattataccataacacaaatgagaaaatgcaaagatttcagaattgctctatttcacatattagcttcttagtttgcctctgcagctgagcaagtgttattaggcacaagaaattttattgaattcttaaactggtctcgagaatttcgtgatggatggtttactcaatttaaaacagatcatctggtgaaattgctttcaggttaaaagg

SEQ ID NO: 31222 - DNA, 445 bp, Homo sapiens
ttggagctccaccgcggtggcggccgaggtacgcggggtaagtttctgatggtatatcagttagaaataatatttagctatttgtaataaaaagctgaaaacagtagcttgaatcaatggaagactttatctttctcctgatacagctgacaataatgttgttgcctttatgatatcaaagccccagttcctttatcttctactaaacctgccttggcaaatgcttgctgcttcatagtcacatgatggctgacttactgtaaccttcatgtagaaagaaaggaagaggtaaagagataaaggtacctgcccgggcggtcgaggtacaaagtccctgaggcaaaagcatgcttgctgtgttctaggaaaagcaaggaagacagcatgtctatagcattgggaggtggaaggataatatacagttggtgaggttagaggggaccaa

SEQ ID NO: 31223 - DNA, 471 bp, Homo sapiens
tacactactatagggcgaattggagctccaccgcggtggcggccgaggtacatggtgtttcttgtgccccaggagagagcctcccaatcaactctcctgttgatcattttcccttcttcagcactaatcatgaagctgtctccaaaatgagaccaaaacaaacaaacaaaatcagactcaacctaaaagccttttttgttttgttttgttttgtttttgagacagagcctcgctgttgtcgcccaggctggagtgcaaaggtgtgatgatttcggctcactgcaacctctgcctcccaggttccagcaattctcttgcctcagcctcccaagtagctgagattacgggcccctgccaccacacgtgactaatttttctatttttagtagagatggggtttcaccatgttggccaggctggtcttgaactcctgaccttaggtgatccacctgccttggcctcccaaagtgc

SEQ ID NO: 31224 - DNA, 379 bp, Homo sapiens
gcggccgcccggtcaggtatcaagattttttattgcgaatttaagtccatcaatacctggggaaacacaaaaacctggtgctgctggaaggctgctgcactgaaaagctgccactctatatggtgttggaggatgtggcccaggggacctgctcggctttctctggacctgtcggcgggatgtgatgactatggatggtcttctctatgatctcacagaaaaacaagtatatcacatcggaaagcaggtccttttggcgctggaattcctgcaggagaagcatttgttccatggggatgtggcagccaggaatattctgatgcaaagtgatctcactgctaagctctgtggattaggcctggcttatgaagtttacacc

SEQ ID NO: 31225 - DNA, 433 bp, Homo sapiens
gactactatagggcgaattggagctccaccgcggtggcggccgcccgggcaggtacggttgctatttatagccactatcataacatactgctgcctctaactcctggcctcaagcgatcctcccacctcagcctcctcggtagctgggactataagcacatgccatcacacctgaattaaggacactttttgttgttagtattaatgcattggttcagctgagcaaatatttaacaaaattctactaagcaccaggctttcttttctaatatacaggtattaatagtcattagcctgaggcacatataatacacagactatttgaatgaatcagactgatgatacaaagtataattgatgagagacatgtagtccaaccagaagattgaggacaatcatcctgatgtagattttcattgactttagtcttgga

SEQ ID NO: 31226 - DNA, 453 bp, Homo sapiens
actactatagggcgaattggagctccaccgcggtggcggccgaggtaccattcttatctcagaatgctgtaaaccatcagtagaagcagtttagatttggactgcatggtaaaatgaaaagtaataaccctccaaccacaacctagtcagggtattaataattatatgtagcaagaaaacaaagaagaaaataatattgaaaaaatggagattccccaaccagtttcatatttgaaggatctgagttgtatttttattaaggaaattttttttctgaatactgtcttccaaaatgttaacattaaaatctgaatcagaggactctgaatggaaaagaagtttgatcactgacacctagggctctgaagcgtgtgtggccacatggaaaagtcgaaggatgcgctgtcgaatctcctttgtcttcactccatagacaattgggttgagcacagg

SEQ ID NO: 31227 - DNA, 466 bp, Homo sapiens
tatagggcgaattggagctccaccgcggtggcggccgcccgggcaggtaccacatttgtgaatttatgccacagacttatttacgtagtgcactaaaattataaatagagataatgattgcagcatggtttagagtagtaaaggactggaaacaatctccatggcactgataaggcaagatgtagggaggagaaatggggagtgactgctcagatacagtgcctccttttgggggtgatgaaaatgttttggaacttgatagaggtgctagttgcacagctttgtgagttttctacatgtcacttaattgcacactgaaaaatgttaaatgtgggctggggacaatggctcatgcctgtaagcccagcatttttggaagccaaggtgggaggatctcttgaggctagcagttcaagaccagcctgagcaacatagtgagactgcatctctacaaaaatttaaaact

SEQ ID NO: 31228 - DNA, 448 bp, Homo sapiens
tacactactatagggcgaattggagctccaccgcggtggcggccgaggtaccctgagaacagcaataatgcacaaacattactattccaacagctgcattgaaacacccttggtaggattgggaaaaagatggattattgccatttggacactccaggactgtccattaatactcctgactaatggaagatgataaagattgggcaagaaaaatgactgcagcaaacgccttggcatcttcaacttgtcacctttagcaagaggcctcttcaacagttcttggactgtgtttggcagccagacactctcagaacggcaaggagacacagctaacatgatctttgcaatgcaacaaaacaagcgatcttgaggcgacagagtccaaaagatgacagaaaattcatccaactcctgaagcatgtgatgccaccagaaagccttggcaaca

SEQ ID NO: 31229 - DNA, 411 bp, Homo sapiens
ctatagggcgaattggagctccaccgcggtggcggccgaggtacaactattttcacatccaagaaaatttgaggagttctagggcaaatgtaaagagataacattccttgcatacctgaagagaagaaatatggacagactgagaaaatgatttttaaaatgacaaaataggctgggcagagtagctcacacctgtaatcccaacactttgggaggctgaggcaggcagattgcttaagctgagaagtttgtgactagcctgggcagcatagcgagatcccatctctacaaaaaaaaaccacaaaaattagctgggcatggtagtgcatgcctgtagtcccagctactctggaggctaaggtgagaggatcgcctgagcctggaaggtcaaggctgcagtgaactgtgatc

SEQ ID NO: 31230 - DNA, 423 bp, Homo sapiens
tatagggcgaattggagctccaccgcggtggcggccgaggtactatatgctagaaacttggctgaatgatttgacattatcctatttaatgttcatgacaatccaataacgtaaccactcatatctcccttttgtgcagataacaaactgaggcccagagaaatcaaatatgttgtcaaaatctacatcattgaagagatgggtttcaaatccaggtcggcttggcccttgccacgacttcataatgaaattccatgggtgagtgttaccagtttctggtccatccttgcttatttcaagggtctcatcatcccatccactgtatcactttttttgttacaggctttactcttttctaccatggaaaaagactaatggatatttttttcttcataaggcttggaaaatattatcaattcacca

SEQ ID NO: 31231 - DNA, 451 bp, Homo sapiens
gcgaattggagctccaccgcggtggcggccgcccgggcaggtacacccaaagaaaattaggaaaacttaaaaataagccagataatattcagtgataggacaccttttgttttaacattaccgtgttaaacatctatccctctattgtgggtatatgtccttgctctcacactactctgtgtttctcgaggtaagacagctagtattttattcctgaatagtgcctacactgagaatttatagaaaggacagcaaaattatttgaaacatgaaaaatgttttaaaatgaaaatagtagtccaccataacaagttctatcacagttaatataaattgagcaccccaatctaaaaattcaaaatccagaatgttccaaaatctgcagtttttggagcagtgacataacgccatgagcagaagattccacacttgatctcatatgacaagtcac

SEQ ID NO: 31232 - DNA, 425 bp, Homo sapiens
tacgactactatagggcgaattggagctccaccgcggtggcggccgaggtacagtatgccttaaatgtataggaccactgagttcaggaagaaaagcataggtattctgtaggtgaattacactaacaaaatcacaactgcagaatgtgatctgatacttttgttggacagtaaagctaatacattttatatacacagtcatacctttttttttgtaatgtgtttcgttaacgtaagcacacagtcatcacagactgagacaggactttgttagaccagatcttgtgagctaaatatttaagagcttaacatatataaatgattttaattggtattgggcgaaggaaacctaaaaatgcttaaattgacagatcttacaatttgcttactgaaaattcagaaagcttttatgaaaactttgtatt

SEQ ID NO: 31233 - DNA, 427 bp, Homo sapiens
gcgaattggagctccaccgcggtggcggccgaggtacagtatgccttaaatgtataggaccactgagttcaggaagaaaagcataggtattctgtaggtgaattacactaacaaaatcacaactgcagaatgtgatctgatacttttgttggacagtaaagctaatacattttatatacacagtcatacctttttttttgtaatgtgtttcgttaacgtaagcacacagtcatcacagactgagacaggactttgttagaccagatcttgtgagctaaatatttaagagcttaacatatataaatgattttaattggtattgggcgaaggaaacctaaaaatgcttaaattgacagatctttacaatttgcttactgaaaattcagaaagcttttatgaaaactttgtattttaaaatattttttgc

SEQ ID NO: 31234 - DNA, 438 bp, Homo sapiens
actactatagggcgaattggagctccaccgcggtggcggccgaggtacaagcagtgttctgagtagtgagacaagacctctctactaaggtcatcctttcaatagagcccctgcagggaatgagggggtgagccacacgtgtatctggggtaggcttggggtgtggtgattgtgcaacaacagtccaggcaaaatgaacagcaaggggacaagactggtggaccctcactgggccattggtggaacagcaaggaagctagtgtggctgggatggactgatgaggagtgtggtagaaatgaagtcaaagaggcaggatttaatccctgatttcccaagagagaagcaaagacacaggtgttaatttcaatcagtcctggaacccagactcaaacccaggtctcctggttcttcatgcacagacttgttcctgatgtctc

SEQ ID NO: 31235 - DNA, 444 bp, Homo sapiens
tacgactactatagggcgaattggagctccaccgcggtggcggccgaggtacctcaattatctctcataacacacagggtcccatgttggccattgcctcagcacatagtcaggtagccagcctctctgaatgcctggtagccaggattaaaataaataccctaggtattatctgcatatctcagggtcaggatatatcccatgactaagcccacaatcacagtaaattctttgagccagaccacattttggactcacatttaatgtaaatccacatcactccaatcctgcatgatggcacaggtagatttttgggagctggacaataaacaactattgagtgcatccccacggaccccaaaattcaattttataagaagtatctcaaggcattaataagtgcatcaaagatggtcaatgtggcattatttggtaaatcagaag

SEQ ID NO: 31236 - DNA, 422 bp, Homo sapiens
tacgactactatagggcgaattggagctccaccgcggtggcggccgcccgggcaggtacgaccttggctcactgcaacctctccctcccgggttcaagtgattctcgtgcctcagcctcttgagtagctgggattacaggcgcgtgccactgcgtccggctaatttttgtatttttagtagagatggggtttcaccatgttggccaggctgatctcaaactcctgacctcatgtggtccacccaccttggcctcccaaagtgctgggattacaggcgtgagccaccacgctcagcctacaagcaattttttaaaaactgacacctattactgataaaattctctgtttaaaatcctatttactattttaaagataagtattagtttttttttaaatacaataattctgttattgataaaatt

SEQ ID NO: 31237 - DNA, 360 bp, Homo sapiens
tacactactatatggtatatggcagaattggacctccaccgcggtggcggccgcccggccaggtactgaggtgggtctagaggattagtctgtgaattgcagcctggattctgcagttgtggggtctgcctggtgctgagttttactgtggtggactcagtgttgggatccagcggaaaatcctgtgcttactttcctctcttcctgccaagtggagagtatgtcttttcatgctctgctgcctggaattggaaaacaggtgatttggataatgttaaactgtccttcctatcctcttcaacgtatcttttattattattggggctacaaccatacactgtgatctttcatctggttttc

SEQ ID NO: 31238 - DNA, 461 bp, Homo sapiens
attggagctcaccgcggtggcggccgcccgggcaggtacgcgggtatacgcgcacatatatacgcacacacacgcacatacccctcaagaagcaattaaaccgttgatatgtaatcttccaattaaagtagcttgatgcccatcttaaactgtaaattgaggaaaataacatttgtggctgtaatagatgatttatgtagggctctagggcagtcggagtctacattttagccagccttgtaaacttgtgtatggaattcatagttgaacctatagagagctgaacccctctaaggtctttgagcagctaagtggcagctcatcttgtaattttaaggttaaacaaggatgtgtgatgtgtgcacatgcatctctctcctttagagacgttattcccagttgatgggctttactgaaaatcagcgaggccggtaaccggcttacccttgtgcacacgtggt

SEQ ID NO: 31239 - DNA, 355 bp, Homo sapiens
cactactatagggcgaattggagctccaccgcggtggcggccgaggtactttaaaataatagaccttacaaagttttctagacagacttcctgtgaagaacaaggagcagggggaaaggggaaggggtagaatttaccaatctgaatatttcagcaagggagaatgcatgagttttactataaaaccacactgaacattgcaacaatactaaattccatacatatataataatcactgagctataaggttgctgatgtatttgttcttgaaagtgaattagagttactttatgcagaatcagctagtttttatgtttcataattgtctttcccttttttgaactttttttttaag

SEQ ID NO: 31240 - DNA, 403 bp, Homo sapiens
cactatagggcgaattggagctccaccgcggtggcggccgcccgggcaggtactatgtgcccactctttcatagtcaactaaaaaaaagcagcttcaattctagctagttttccttttcctttcaaatagaaaaaagaaaggccagaagtcagcagtttctcttcccctgagtccctgtcctcatataaagatattttcccaagccccttctgaaaacttctgctgaaatatctatcagacaaaaacatattgcataagtcagacttaatagcaaaggaagctgaaacacaacttttttatctaagcactttactactacagcaaaaattcagaattctagtaggtaaaaaaaaggaatgggtaggataggatctttattagcaaccaaaaaagcctagatca

SEQ ID NO: 31241 - DNA, 598 bp, Homo sapiens
  misc_feature 472: n = A,T,C or G
agctccaccgcggtggcggccgcccggcaggtacaggaatttgtttaaaacctgagaataatacatcagatgttcttagatatgtttttatatcatttattgtagttttagaagctgtaaatcttccattactggtttctgcgttattagaaagctatagggaatttgggtggagaggacatctaccctccgccaccaagtgtaagaaagctgtgagggaatttgaatttatgtaatttcaaaggagacattcactttcagagaataactcattaggctcgaaatttaatagtttcagctactgaagaggctgaggtagaaggattgattgagcccaaagggtgacagtcaggtatgatgaggccactgctctccagcctgggtaagagagcaagactctgtctcaaacaaacaaacaaacaaacaaaaaagaaagtctatatatcttttaactgttatttatttatctatntataagcctgcagtggtttctggtgtgcataagaaaatgaacattagcctatggaaggcggaaatcaatagtcttgattttggagaccaccaagctgatctcctgaactgcaaagatagcatcatt

SEQ ID NO: 31242 - DNA, 396 bp, Homo sapiens
tatagggcgaattggagctccaccgcggtggcggccgcccgggcaggtaccctgagaacagcaataatgcacaaacattactattccaacagctgcattgaaacacccttggtaggattgggaaaaagatggattattgccatttggacactccaggactgtccattaatactcctgactaatggaagatgataaagattgggcaagaaaaatgactgcagcaaacgccttggcatcttcaacttgtcacctttagcaagaggcctcttcaacagttcttggactgtgtttggcagccaggcactctcagaacggcaaggagacacagctaacatgatctttgcaatgcaacaaaacaagcgatcttgaggcgacagagtccaaaagatgacagaa

SEQ ID NO: 31243 - DNA, 423 bp, Homo sapiens
  misc_feature 352, 384, 385: n = A,T,C or G
tactatagggcgaattggagctccaccgcggtggcggccgaggtacaataataaaactaagcttatgcctaaaatattctcactgagtgcctgtgaatccacgactattagcactgtggagcaatttctccttgcagaagagtgctaactctatccattaaagccttggaaattgccggtaaatatgtaaaaaatcaagtgcttaaatggatagcaattattggcaggacctaaactgatacaaaagtgttccactgtctcaatatcaaaagcccaagaatgccagattcccaaagtgagtcaaagtgcttggattgctttgcataaacatggtttagccagaaatcaacanccctgggtattgggagcttgaggggtggaatnnttccaaattcctgcaaatgtttattggctttacagccc

SEQ ID NO: 31244 - DNA, 433 bp, Homo sapiens
gcgaattggagctccaccgcggtggcggccgaggtacagatttgctacatcatatagcattttttagaccataatttagatctttccatcctccaactaagatttacctttttatatgaagctttaattactttccgcaacacttttgtcaaaatctgaagtcttttaagaacccaagatggttttggatgtttaattttaatgttcagggattttggaggtgaggggctagaaacactgactcctgcccctgactcccgcccctgactcccgcatttattttcataaatgaaaatagtaaaataaattcattaagggtattatgtggagaatagaaacaagagtaaaggactgagagtatattagagaaaactatcataattttggcaagagataatggacatcgaagcttgagtgaaaataactgctagag

SEQ ID NO: 31245 - DNA, 422 bp, Homo sapiens
atacgactactatagggctaattggagctccaccgcggtggcggccgaggtacaggttctttgaatgcagtatttattcacatagttttcattttctgtcctgacaaaaacttggtgatgtttgaatgattacagaacaaataggattgtggtttatgtttcctattatgcatatttggcagttgaattatgacattagattgagacatggtgagagggggcaggatacggggtaggaggaggggagcaagttacaaaaggccccagttccgggaagctgggctgagttgttctgtttaacttcttcttcctttattcctatggttttatgattgcaaattggcagtggcagggcagcctctgactttatttgctagaagcagatgtccacattaatttagattgtctaggggattaaaaat

SEQ ID NO: 31246 - DNA, 431 bp, Homo sapiens
ctatagggcgaattggagctccaccgcgggggcgggccgaggtcccactattttaacatccaaaaaaatttgaggagttctagggcaaatgtaaagagataacattccttgcatacctgaagagaagaaatatggacagactgagaaaatgatttttaaaatgacaaaataggctgggcagagtagctcacacctgtaatcccaacactttgggaggctgaggcaggcagattgcttaagctgagaagtttgtgactagcctgggcagcatagcgagatcccatctctacaaaaaaaaccacaaaaattagctgggcatggtagtgcatgcctgtagtcccagctactctggaggctaaggtgagaggatcgcttgagcctggaaggtcaaggctgcagtgaactgtgatcgtgcaactgcactccaggct

SEQ ID NO: 31247 - DNA, 413 bp, Homo sapiens
tatagggcgaattggagctccaccgcggtggcggccgaggtacaacccagaatatgtcccacagggggttatgtggggcacagtatatataacagggggatatgtgtggtccaggaggtgagagaagcagggagagaagcaattgttgcattcctttgcttctgctgggcgctctgtgatgctatatataaaataaggtaagtgtgcagttgagtgggtagggagaaaagtgaggcatcttaaggcctggtggagggtgactgatttcatcctgtctttgttatgtatctgagaagcaggtttataaccagtaactgtcagtgttcaatatttaacaaactccagttacacaggtaagaggtcagcagtagcttataggtctcacttatattatccacgtgcccaactgcagc

SEQ ID NO: 31248 - DNA, 414 bp, Homo sapiens
attggagctccaccgcggtggcggccgcccgggcaggtactttattttttttttttttttttccgagatggagtctcgctctgtcgcccagctggagtgcactggtgcaatcttggctcactgcaatctctgcctcctgggttcaagcgattttcctgccttagcctctcgagtagctgggactacaggcacgccccaccatgcccagcttatttttgtatttttagtagagacagggtttcaccatgttggccaggatgatcttgatctcttgacctcatgatccgcccctcttggcctcccaaagtgctgggatcacaggcgtgagccaccacgcctggccctctggttattctctttaaagaggagagaaaactttgagaggccaaaattatttaaataaatctttacctt

SEQ ID NO: 31249 - DNA, 215 bp, Homo sapiens
gcgtatacgactcactatagggcgaattggagctccaccgcggtggcggccgcccgggcaggtactttatagtttaggctggacattggaaaaaaaaaaagccagaacaacatgtaatagataatatgattggctgcacacttccagactgatgaatgatgaatgtgatggactattgtatggagcacatttttcagctaaggagggggaaaata

SEQ ID NO: 31250 - DNA, 527 bp, Homo sapiens
  misc_feature 23, 504: n = A,T,C or G
tacgactcactatagggcgaatnggagctccaccgcggtggcggccgcccgggcaggtacactctaaaagccaaaaacagcatgagctgaggcaatacagagcataagctggtatcaccaatgcatcctggaaataaaacctgtgctacctactatcttgggaatttcactgagagtatagcacattctaaatgaaaaaaagaaacgaaaaggaatggttataaattgtttaaatgtgtaaacaaacacaatagatgtaagttacaaaaatgttcagagtaacagaatgcactgataacatttaaattaaatataaagaaaagcagatctacttccaacaaatacatggatacatctttgtttcatacagcagatgcagaaatgtagcttctattttaaaaagtctgaatgtccataaactgttcccaagatttgtctttaacttatatattaaaggaaaatttcttctcttgcatattcagaaaaggtaaaggttattatatntagagagagggggagagagaaaa

SEQ ID NO: 31251 - DNA, 449 bp, Homo sapiens
atacactactatagggcgaattggagctccaccgcggtggcggccgaggtacatttgttgggggcgtgacattaacatataaccacttagagtggacatgcagttagagaaaagtcaatgagctggaaccaagctgggaattccaacatgtagaagttaaacacaagaggaggagccagcaaaggaaacagaaacagagcttccagcaggtggggggcatttggaagaaaacgatgccatagaagccaagatgaaatagacatcaaggagaaggaagtagtcaattgttttgaatgctatgaagaaagataagaataggtaaatagtccttatatttgataacagaggtcactagtgatcttgatgagggggtttcaatagaatggtggggattatatacctccctggattcaactgaggtaaggaaggcatacagaatagagacaggc

SEQ ID NO: 31252 - DNA, 457 bp, Homo sapiens
ggcgaattggagctccaccgcggtggcggccgaggtacaaaggagcatatcatttaaaaataaataaataaatatcacagggagagaaagcatacgcgctcacctgagtcttttctttgttttcaggttcctcattccacattcagtattagccagtatacccagacctccgtcttctatgtctacaatccttatttctacatctaactgtagaattcttgacctgttttgtcaagctgcctactgatagtctctatcaggataataacctgtctcaatcccacactggagacaaaataaattatcttctctactccaaaccaattcttttttgtggtcccaatctcaatttatcttctcaatcacccaaaaaagaagccatgagattgccttgaccacagctcctcccttaccagtatatgtagcctgttactaaagcctgttaattctactgcat

SEQ ID NO: 31253 - DNA, 458 bp, Homo sapiens
cactactatagggcgaattggagctccaccgcggtggcggccgcccgggccggtgctcagctaagaagaggattgcttcgggcatatgaagcagaatgacgagttcagtcttgctcagtagttggagcacagttttcaaagcccatcaacactttggaatggatttgttgttttatttatgccatcaagggagagttgatatttgtgtattgctaaaaactactaaagtatgtctatgcttacgtaggaacatacaaaccatatatcctctgggatctggccaggtttctgtataaggcttgacctacgtaagatcctatgatgaagaccagaaaactttttttaaaaggcggtaaagtaaaattaaaatcacgagtttgttcacatttgtcccataggttcctagtgcaaaaatgcagggtgatgaaagcaaacatttgaactcattgaagtgagag

SEQ ID NO: 31254 - DNA, 431 bp, Homo sapiens
actactatagggcgaattggagctccaccgcggtggcggccgcccgggcaggtaccatggacaataccatcagagtttccaaaaggctggttctcactcttctcctgccacatgctttccctcacacccctggtgtggaataaatgttaaggaaagctaagacacagttgggaggaggggacacaggcctttccactcaagcgcaaatacttgcaaaatgcctgggtgccaacaaaggaatttggcagagaacctgtatcagcggcagcggcgcatcaaaaaagaatgtctaccttacaaggtgaaagaaatggggggtccaaagatggttttgggtgggaaatctggcacattagacacggaatagcctgtggctgagattcatattatacaacatcctaataaaaaaattcaaatcaaccaaatttaag

SEQ ID NO: 31255 - DNA, 400 bp, Homo sapiens
gcggccgcccgggcaggttcttttttttttttttttttttggggagtgacaaggtttcaccatgttgtccaggctagtctcaaactcctgacctcaagtgatcctcctacctcagcctcccaaagtgctaggattacaggcatgagccaccacgcctagccctagttcaaccattttaattcctgtatagtattccattgtttgaatatattgcaagtttattcattctcatttagtctgtttctaaattttgttacaaacaattatgtaattaatattcttatacacacctcctattcataagagtttctttaatgatatgctcctatcaagctgtggggaatacacagctttatgagatggtagcacattgttctccaaagtagttaaaacaatttac

SEQ ID NO: 31256 - DNA, 459 bp, Homo sapiens
ctactatagggcgaattggagctccaccgcggtggcggccgcccgggcaggtacctaggggaatttctgagttcatgatatcgtaggtggtgtggaaacaagtcccagcataaacccacacagctggctgaatgaagttcaagtgaaggtcatgcagcatcaaagtagatgtgtgtcactgaaacttaatggcaggggagtgagaataattttgaaattacttagattgtgagaaaatctggctgatgattagaagtgttgatataagaggtcagtttggagttccactcaaaattcatactaattttaatgttatggtattctaaactactagatgggtaagggggaagttataggattctgaacaataccattaagaattaggataggattttctactgtggtgtcacagaagaatcagagctagcaaattcataaaaagaaaatttgattccccaa

SEQ ID NO: 31257 - DNA, 355 bp, Homo sapiens
atacgactactatagggcgaattggagctccaccgcggtggcggccgcccgggcaggtactgggaactctggcaggatccttgatgtcctcttaatctcttttaattttcataatactgtgatgcaggtatcattatcccccctctccactaccttgttttatcccagagggaagtaaagctcagagaggctaagacactttctccaggtgacagactctggaaggggcaaggttaggatttgattgtctgtcagattccattatgctgtgtgcctcaaatgcctggtgatcctatacgctaccatgggcactatgtggggcagtgccactaagctctgctgtgacctctagggt

SEQ ID NO: 31258 - DNA, 340 bp, Homo sapiens
gtaatacactactatagggcgaattggagctccaccgcggtggcggccgaggtacttgtccttcaattttgggaaatgctattatttgataatttctctttttgtattttctttgtttctctagattcttagttttcaattttgtctttcaaaccttgtatttaatttttatttctgctttcatatgtatatataatttgtcatctgaaatgttcttttttcataaccttacttatatttcatggatgcagtagcttacctctttgtgataatagttttaattgacaaataaaaattgtgtatattggctgggcttggtggctcacgcctgtaatcggag

SEQ ID NO: 31259 - DNA, 428 bp, Homo sapiens
cactactatagggcgaattggagctccaccgcggtggcggccgaggtacccagacctgcaagagttgtctcaaacaataacaacagtatacaaatgttaacccaatcttaattcagaacagcttaaatgtaataaggtaaccttggaaactatggcgagctctcaggtagaagctagaactctgtttcacgtgacagaagcagacagattgttaagaatctgttatgagtggagtcccatgccagggcttaccctggccaccacttactagcggaagccttgagcaaattctgcagccgttgtgagcgtcacagagtggtgattgtaaagattatataacattatctatggtcagtgtctccgcatctagcaccctaaagaaaatccaaatgccaactgtttttgtgacagggacaagcactgggtgc

SEQ ID NO: 31260 - DNA, 417 bp, Homo sapiens
cactactatagggcgaattggagctccaccgcggtggcggccgcccgggcaggtacaatccccagattttttcatgtgtagcttcttatcacatagggagtccaaacatcactttctctgtgagggctttctctccaaagcactgttctgcggtccaaccctaccactgtcactgtcaactcatacacaggcatacacatacacaacgcatacacatgatcactattcaaaatgaccattttccttatttattgtttatcatctacctctcccacctcgccacaccttccccccaaggcgaaggtaggcttcgtgaaatcttaaccttgcctgtcttattcactgctgtattctggtatagcgtctccaacatacttactgatgaataaatatctgtttaacaaataaactctctct

SEQ ID NO: 31261 - DNA, 392 bp, Homo sapiens
taatacgactactatagggcgaattggagctccaccgcggtggcggccgaggtactgtgaggcactctttccccactctcccacaaccctcagcttaacacaactgtggtgattgctttgtccgttttcccatgaggaccctgagatttcaacaaggttcagtaactcacacatcgacacttccagggagctgggttgccagggaactggcccaggtctttccctcctgggcccatcttgtccttaatctctgctgacattgatgggtttagttaccttgtcgtatttcttcagtgttttatgccatacagtctcccttgagtagatgttctgtataggggatatcacagcttcctgagagaactgtggttaagtccagcaggatgcctggg

SEQ ID NO: 31262 - DNA, 447 bp, Homo sapiens
tacgactcactatagggcgaattggagctccaccgcggtggcggccgaggtaccatactcttttggttgctataattctgtggtataatatgaagtcagaaaatataattcctccagttttatttatttatttatttttgcttaggatagtattatttcttatagtgaaagcattctatgttatttattattagtctaattttgtagttttacaatgctatcctcttttacaaagctatgatcaactcagtgtgtccagatcaggatcatttgcagctatttgcaaaagtagcaatattctggctgggcatggtggctcatgcttatattcccagcactttgggaggccaagacgggcagatcacctgaggtgatctggtcaacatggtgaaaccctgtctccaataaaaatacaaaaattagccggggatgatggcagatgcctgt

SEQ ID NO: 31263 - DNA, 419 bp, Homo sapiens
tacgactcactatagggcgaattggagctccaccgcggtggcggccgcccgggcaggtacccagtgtctcatttcaggccctcctcatctttattggaccattgcagcagtctcctaactgggcttaatgctctagtctctccttccttcagtgtgccctctacactgcagccagtttcaggaacactaattgagtcatccccctgtttaaaatcattcagtgaccaggtgctgtggctcacacctgtaaccccagaactttgggaggccgaggagggcaaatcgcatgagtccaggagttcaagaccagcctggtcaacatggcaaaccccatctctacaaaaaattagccaggcatggtggcatgcatctgtagtcccagccactcaggaggctgaaatgggaggatcacttgagct

SEQ ID NO: 31264 - DNA, 308 bp, Homo sapiens
tacgactcactatagggcgaattggagctccaccgcggtggcggccgcccgggcaggtaccctaggtgatgcctgttcttttgaaacagcagagattttattttaaaaatacgtttttgtgtttattacctaaaggagctattctgaaatttttatgtagaaaaatcttcttctgctccatccacagaagattttttatccatagatatttttgccatctcctttctcctctttcctttgttgtagatgatatgaaaagactgcttttttcaaaaattgtgtttttaaatttggggaatttttgccat

SEQ ID NO: 31265 - DNA, 535 bp, Homo sapiens
  misc_feature 189, 215, 426: n = A,T,C or G
ctactatagggcgaattggagctccaccgcggtggcggccgaggtacaaatatctatgagaagtcagattcagtggaaagtctgtgattatggttttgttttttaaatgaaattgaacatttaaactgcaaaacgtggggaatgaaaaagccatctgtcaggcactatatccacaaaagaatcacccancttaccaaataatccctgaatgtcanccactcttctttctattcatcatcctggtgttgtaaatggaatactcacaataaagctgccattagcagagtatccctgtgatctatccttaccaaccatgttgatctaaagttggaggtcactgtgattagaaaactcaagacaccaccccctgccccaccagggttgaaagggactgaaaagtagatttttaactgatgcaaagcttgngctcaggctctggaagtccccatggtagtggggctctgccctagtcccccaactctttctttcgagcttcacaggattttaatgtcatttgccctctctttatgacttt

SEQ ID NO: 31266 - DNA, 459 bp, Homo sapiens
atagggcgaattggagctccaccgcggtggcggccgcccgggcaggtaccagcttttgcactttcctcactgtaaagatgttgtatgggttacttaaccagttggggtttaatttccttggctgtatagtggacttagtgtcacatgcctacctcaggatttctgtgacaattaaatatgatattttaaggcttctaacttactggatctaaataaattattcctggaaaaaaaaagtttgctgtgtaataaagcacctaaacagtaatgaaaaagcaggtatagaactttaggtgttttgtcaccctccctcccccagtggtgtgtgtaggaaaactttgcttctttttgtaaatctgatgtctaatctcttctgactttacgttcaatcagttgattattttcattcagcagatgtgatcggtttgcagggttttcagtcaagtaggattgagaaaa

SEQ ID NO: 31267 - DNA, 483 bp, Homo sapiens
  misc_feature 183, 184, 198, 199, 224, 234, 274, 403: n = A,T,C or G
ctatagggcgaattggagctccaccgcggtggcggccgaggtacatgagatgggagctcgacacattttatttggagaataaaagaaaatatgccgtcatcaaactagagcgtgttggggggcatctggtttacagaactaagtcaaggagaagaactctcaagcaatggtgacatctgccanngctctgcaaagtgnnggccctgccttgtcacacaagtctnccttgggcanaatgttttctatgtagaattttagacacttttcctgtganctttctcaagggtcttttggtgacacatgcagcttgaagcttttgcaaggggctggagtctaatctcttcttgcccagcttggctgcaggagaagaagggagatatgttaggacttggctttgactgangtggtgtagcctgtggttgcaagggctgttgccaatgctttctggtggcatcacatgcttcaggagttggatgaattttc

SEQ ID NO: 31268 - DNA, 452 bp, Homo sapiens
cgactcactatagggcgaattggagctccaccgcggtggcggccgcccgggcaggtaccctttatgatctagataaaccattgtgttcttctatagtttttccaactatatttgaataggtgaagttaatatgtttaatcataaaatgctctcagatgcttgcaaaaacaattactccatcagataagaacacatcaaaaatttggaaaatttaaaaaaagtcattccagctatatgcaaataacttttagtatatgcatctgaaaagctaccaaacgtaacaatgaaactctaaacttgtagtagaaaggtaaatgcactgtgatcagctttcacatcacttcagagtatattctaaaacttcttagattctacattatttatagagtgaactctaaattcaaacatttctcaagaacaaaacgactcccatccaattatttaattaggga

SEQ ID NO: 31269 - DNA, 500 bp, Homo sapiens
tatacgactcactatagggcgaattggagctccaccgcggtggcggccggctgggtcccgcactcttgattcccttgcattcaatgccttaccactctacaactgtcttctaacagagctctattccttaatcaccagtgtaatctatccaccttctgcatccctgtcactgagtagctgggtgatctgggaaaaacaaatgctcagagttgtcttcccaaaacccagctgagctcccaacacaccttccaatccctctcagtttcttcagcaatcatcataccctaataccatgaaattcactatgcacaactctttcccctaactgcagcccaagaaaagctgaaaaactcaaaatcctgttatagcttcccactaacctcatctatatccacatctttccagacctctttcctgtcaggttcagaggatttttcctctgcttgctctttattctatccctagggagaccctctgcacctctgctcatccccgcgtac

SEQ ID NO: 31270 - DNA, 391 bp, Homo sapiens
actactatagggcgaattggagctccaccgcggtggcggccgaggtacttacgttgcctcgtgtcaccaaaattggtgtggctgctgtggtgcggggggctgcactgatggcaccccttcctgtcttcatcaagcagctgcccttctgccgctccaatatcctttcccattcctactgcctacaccaagatgtcatgaagctggcctgtgatgatatccgggtcaatgtcgtctatggccttatcgtcatcatctccgccattggcctggactcacttctcatctccttctcatatctgcttattcttaagactgtgttgggcttgacacgtgaagcccaggccaaggcatttggcacttgcgtctctcatgtgtgtgctgtgttcatatt

SEQ ID NO: 31271 - DNA, 177 bp, Homo sapiens
cgcgcgtaatacgactcactatagggcgaattggagctccaccgcggtggcggccgaggtactttttttttttttttttttttttggagatggagtcttcctctgtcgcccaggctggagtgtggtggtgtgatctcagctcactgctacctctgccttccgggtttcaagtgattc

SEQ ID NO: 31272 - DNA, 414 bp, Homo sapiens
ctactatagggcgaattggagctccaccgcggtggcggccgaggtacatttattacaaaggagtgaatattgatatattattaactaattttatagtttactttgtgttatgtattctatggactttaacatgtgtaatgacatgtatcccctattaccagtatcatacaggatagtttcacttccctaaaaatctttgatgttctacccactccttcctcgttccctctcctcactcctccctccctccatcttaagcccatggcaacccctgatctttttactgtctccatcgttttgccttttccagaatgccatgtagttggagtcatatagtatgtagccttttcaattgacttctttcacttaccagtgtgcatttaaggtttctccatgtctttttgtaatttgaga

SEQ ID NO: 31273 - DNA, 445 bp, Homo sapiens
ctatagggcgaattggagctccaccgcggtggcggccgaggtactgcttcaaaaggcatgtataactaagtcatatcaaaactaaaatgacaaatgggttattttcaacagaacactttgaaaggaaaaagaaaacaaacaagaactttaggatattctttttgaaggcaactgcatgatgctagattgtgtccacggactagatttctaaaaggccatctaaaatacatttttaaatacttattcctttcacaggtaatatcttacgaagtttgattatttttgaattgtcataatatggacttaatatgggaggaaggtagttccaaaatgacagaagtaatcgcttccacatcacttttgtttttctatttacatatacaaacacatttttctcttgtcacaatagtatctgaaacattaagaggtgctcataaatatttga

SEQ ID NO: 31274 - DNA, 409 bp, Homo sapiens
agcgcgcgtatacgactactatagggcgaattggagctccaccgcggtggcggccgcccgggcaggtacttttctcttcttggccaaattctcctcttatgggtatggagatgacatgctctaaatgctttgggagcaagcactcattagagaagacttttgatgtatccttatcttgttagtagtttaagcttgtcagatccttaaagaatgacaggcttaggaccatatcccctagacttaagaggattctcattgaccatttgttcagtgtccatcactgaatcacttaccaaatacagtcgacactctgtatccacaggttccacacccatagattcaaccaaatgctgattggacatattcaggaaaaaaatgcattaacactgcaacaataaaaaataataca

SEQ ID NO: 31275 - DNA, 469 bp, Homo sapiens
gcgtaatacgactcactatagggcgaattggagctccaccgcggtggcggccgaggtaccaggagggtattgatgtttgaggtccaaactgaaaacccatcacctccttcccactgctatagcagcgttagccctggggttcattatctagccagttcacaccttctaaagtggggctctgaaaatgtcttacttccctcacagacaaagcaattctcaagcctcctgagatcacccaccaaccagagcaactgctgtcacttggaggtgcagctgaattcttctaattgtgacacaaactcttgaaactgtaaatgctgaaagattaaatgaggttataacactcagaaggttttacaagtaaaagtaagtcaaatcaataggtctttatttcatatctgtaatggtttagctctgcgggaagtgttagcagctatatgaaataggaagaatttagaagacaatccct

SEQ ID NO: 31276 - DNA, 442 bp, Homo sapiens
tacgactactatagggcgaattggagctccaccgcggtggcggccgcccgggcaggtacacaaatcaaaggaataccatatttagcaccataggtgactaattaggcaaatgagcaagttttaagagtctggcccaatttttaaagtgtgtgtgtgtgtatcacaatctctctaatgctatatgtagtctaggcaatctggcaacagattcctaactattgttaggaaaatgcaagtatgatcctgttattgctactgctttcaacccagaggtaatgaggaaaagtccaagttccttaacatagacttcataggcctgcatgatttaggactggttatcaccaccacctcagagaaactcctgacctttaatcaaaatgtgccttgtggtaaactacttttaatttaagccatgattgcgatttataattccctatcttgt

SEQ ID NO: 31277 - DNA, 415 bp, Homo sapiens
tacgactcactatagggcgaattggagctccaccgcggtggcggccgaggtacgcggggacagagagaaggttaagagcaacaagatgggaggcagctgcatggaacctgtcccactgaggaagtaaaacagagttttactcttgttgcccaggctggagcgcaatggtgcgatctcggctcaccgcaatctctgcctcctgagttcaagcgaggagcaagtgagtagctgggacaacagccctacctgatggactggacttctgcctggattggagtttgatcatgcctccatatgggtgtttaccaggcgtatgcattgaacctgagtttgtctcttcaatacaaggaaaatctctgccgcttagtgattttccaagaaacatgagcttctgcctttcaatgaggaagatact

SEQ ID NO: 31278 - DNA, 443 bp, Homo sapiens
tacgactcactatagggcgaattggagctccaccgcggtggcggccgaggtacttttttttttttttttttttttttggatttttagtaaggacagggtttcaccatgttggccaggctcgtcttgaactcctgacctcatgatccacccgcctcggcctcccgaagtgctgggattacaggtgtgagccacgcatgccaggcctggccaagtttctgaagggctggcgggcatctctgcttcttcccgactttactgaaaatgtttccaacaattcatcactgagcatgaaactggctaactttgggaaagcgacagatttccttactttgaagggtgccactaagagtctcctgtcctaaggatttttaatcaagaattatttttataaaatatatttttaacacataaggagacagatgattgaatgttttttatttgag

SEQ ID NO: 31279 - DNA, 368 bp, Homo sapiens
atagggcgaattggagctccaccgcggtggcggccgcccgggcaggtactgggattacaggcgtgagccgccgcgtctggcctctaacgagatatttctaaaggttaggccttcagtcaagaattttaaagctggatcttagaggttatctaaactaacctctccatttcatagataaggaaagtgagtcccagaaaagcactggtttggacaagttcagaaagctaaacagtgactgtggatgtatgattctgtctcttaactcctaatccaaatgtcttctcactagataaggctgtgccttctacatttgaaggctcaaaccccatggatggatggagggaaggatgggtggagggatggatgga

SEQ ID NO: 31280 - DNA, 477 bp, Homo sapiens
actatagggcgaattggagctccaccgcggtggcggccgcccgggcaggtactactggcttcccagtggttgggttgagtataagcccccaaatatgagtaaaagaagaaaaagttaattcaatcaccaagtcttgctcgcatattaaaaattggatagatgaatgttcaatcatatgttttggctttggccagccagacgagggtcatttttagatttgaactgcttagaattcttcaggcaagtcttgatggagcacttcttggatagttagaactttaccaggttcacaggagagctcagatgaagcgaacacctcatccacactggtttcctttggagacctttactgttgagaggtggttttcatagccgcaaaatgacaagtgcaagttgagtagatcagtgtttatcaaccaggtgccacattgtgccccaggagacatttgacaatgatggggtgttactggcatctag

SEQ ID NO: 31281 - DNA, 461 bp, Homo sapiens
attggagctccaccgcggtggcggccgaggttctacttatagcttatctgtttcctaatgcatatagaaggcaaataaatggacaagcagcatttgagcatgagcgaaatactctgagactcactagccatgcttcatttggcagctttgtaagcatacaaatgttcatggctatgattttcatattccacaccttctaagaaaatttgttttatagtgctttgaaaaataaaaatattccttaaaacaaaccaacgaaccaacctacaattatccagtgccctttacccatagtttgacaatcactgtatccaggaaatctattttaatggttctcagttgtgcaaaagtgaaaggtcataatagcaagtttaatttcaacaagagaaaaatatcattttatgataactaggactgccccactgggaatagggatgtagaaccaaagttgaaacagcatt

SEQ ID NO: 31282 - DNA, 60 bp, Homo sapiens
ctatatggcgaattggagctccaccgcggtggcaggccgaggtaccccttcactagacta

SEQ ID NO: 31283 - DNA, 433 bp, Homo sapiens
tatagggcgaattggttctccaccgcggtggcggccgaggtactgtttttacagtcattttggattcctgctgtcttatacaccaaataagtagttaaagtgacacagttcatagaataaaatgaatgaaaacacagacatggaaatggaaggaaagtgcagagctgctttctaaatcaaccaaattaattaaatcctgaccacaaatactgaaatgcagagatgcaaagtcctttttgagtagcctggatcaattgtttcctaagagcagatgggcactactttagctgtgttgtctacaaagaaatccagttggcgagaaaatatttcatccacagaactatgattcacagggttagttcctagaggtatctgccccaaggccacctgggatgattaccagagtcactttaaaccaagattctaagcctaa

SEQ ID NO: 31284 - DNA, 474 bp, Homo sapiens
atagggcgaattggagctccaccgcggtggcggccgcccgggcaggtactatatggctaacttatttggggagcaaagctgacttaccataagtctatctcaaatagaaatgaaacactcaatttgtgaaatatgctgagttttaatgcgtgtgggggcagggtgaattaacatttgtgatgcaaggagaagagcaatctatacttaccactgtctatttgacattggggactactgctacactctaagtcattttaccttataacgcagagttgtaacacgctactctgagcagctcatgacatctgtttgaaatttaagttggtgccctaatatgggtttattataaagattttgatgctgcttttcagagatgggtaacctactttacccccctaagctaatgtttcccaaatacacccaaacccacagaaaggaaaactatttcttattaactcacagccaacattataa

SEQ ID NO: 31285 - DNA, 420 bp, Homo sapiens
acgactactatagggcgaattggagctccaccgcggtggcggccgcccgggcaggtccgggcaggtacatagaatatgagcacagcacacacatgagagacgcaagtgccaaatgccttggcctgggcttcacgtgtcaagcccaacacagtcttaagaataagcagatatgagaaggagatgagaagtgagtccaggccaatggcggagatgatgacgataaggccatagacgacattgacccggatatcatcacaggccagcttcatgacatcttggtgtaggcagtaggaatgggaaaggatattggagcggcagaagggcagctgcttgatgaagacaggaaggggtgccatcagtgcagccccccgcaccacagcagccacaccaattttggtgacacgaggcaacgtaagtacc

SEQ ID NO: 31286 - DNA, 339 bp, Homo sapiens
gcgtatacgactactatagggcgaattggagctccaccgcggtggcggccgcccgggcaggtaccactgcactccagccagggcgacaatgagactccgtctcaaaaaaaaagattattaatttaaaaatattttaagtgatcagctgttactctaccccaatctcattggagaataagattctactgcggttctaagtcattgtgtgctgagtaaagtggttaactagtgatttgaaagaatacaggagagagggtaggagagtgagtaacaggtggagcccctgttttctttatagcaaaaaagttaacatctctttgtttagtttagagagcactt

SEQ ID NO: 31287 - DNA, 447 bp, Homo sapiens
acgactcactatagggcgaattggagctccaccgcggtggcggccgcccgggcaggtactgggaccttcttggtctcacttactgctgcgtcccatgcacctaggcaagtctggcacattataaaccatcaataaacatttgtttaatgaacaaatgaaggaagaaacaggaggcacggggcacagaaagatgatacaactgcccctctatttaatccagtccactacccttactctgaatgcttcacatcacattgctcgtcttaattgttttcaaacaaacaagtccagacgcctgctcacaggggtccctagtgggctcctgctgtccagccttgctccacgtgaagatgccctcttcacagagcagtggatccccctctcctggttccagctctaggagtctcaccacaatcccaccagcaaaacctctatctcctgcctcaa

SEQ ID NO: 31288 - DNA, 392 bp, Homo sapiens
  misc_feature 373: n = A,T,C or G
gtatacgactcactatagggcgaattggagctccaccgcggtggcggccgaggtacgcggggaaaaaaagggtggggagtgccctttcttgaaggaatcccttaagtgcacgtctcccgttttcttttcacatcaatgcagagtccctctgtgaatttacaacacccaacacccatgagttcagtccttaagaaggaaaattgagcaagtatttaattggttggacattgcataaaagaggtccatatccaggctaactctagaaattatattctcaaacttagttggcctctttttcttctgtcagaggaccattcttagtggcactggggaaatcttggcacccagaagaattcaactgcgctcactgcanaaatacaatggcctacatt

SEQ ID NO: 31289 - DNA, 457 bp, Homo sapiens
ctactatagggcgaattggagctccaccgcggtggcggccgaggtaccctgagaacagcaataatgcacaaacattactattccaacagctgcattgaaacacccttggtaggattgggaaaaagatggattattagccatttggacactccaggactgtccattaatactcctgactaatggaagatgataaagattgggcaagaaaaatgactgcagcaaacgccttggcatcttcaacttgtcacctttagcaagaggcctcttcaacagttcttggactgtgtttggcagccaggcactctcagaacggcaaggagacacagctaacatgatctttgcaatgcaacaaaacaagcgatcttgaggcgacagagtccaaaagatgacagaaaattcatccaactcctgaagcatgtgatgccaccagaaagccttggcaacagcccttgcaacc

SEQ ID NO: 31290 - DNA, 444 bp, Homo sapiens
actactatagggcgaattggagctccaccgcggtggcggccgaggtactttttttttttttttttttttttttagtagacacggggtttcaccgtgttagtcaggatggtctcgatctcctgaccttgcgatctgcccgcctcggcctcccaaagtgttgggattacaggcgtgagccaccgtgcccagccccacctcaattttataatataattttctacacagagaacacagaaaatagttgtcttttgtttacaatagagaatcaacgttttttttttactacttatagtttagaactaaagtttcagcttcacaactattggtgatgctatgtaaatgtctcaaattactgaatttgtgaaaacctctcatgtttctttcacatgtgagttacaagaagattatttttaaaaacttgcaaaaagtcaatcttggtttctc

SEQ ID NO: 31291 - DNA, 431 bp, Homo sapiens
gcgaattggagctccaccgcggtggcggccgaggtacgcggggaaacagctaagatttctccataaagaaaaggaaaattaactctagttgcagagtgtaaaaaagtatttccaaagatagaaaatgtcaagcaaatatgtttctattgtaggttctgggaaatatcttgctgtagcatcccatgacagctttatagatatatacaatgtaatgagtagtaaacgagtaggaatatgcaaaggagctaccaattacataacccatattgattgggatattagaggtaagaacttaaataacttaatacttgataaaagtttcatttgatttagtatagctatattagagaaacggaaaagggattcaacagatgattttaaaagaattgggaaaaacaacccttattctcaaaattattttttactatttt

SEQ ID NO: 31292 - DNA, 418 bp, Homo sapiens
actactatagggcgaattggagctccaccgcggtggcggccgaggtacgggacttgtctccaggagacatgtctgggaagaagagctagactggagaaacatgagcatgttcaggtgaaaacatgtgagtggataagagcaagagggtgagaacacagaccaaggggctaagggacagactgtgttcagtatttgggtatggaacttgtttttgctacttgctagttctaagaccaggctcagactctaacttctctgtaatgtgggaataatgacagcacttaccttataagattttacaaagattaaaatatcatatataacagcacttaacacaagtaagaattcagtaaatgttgactgttattactattgtctgggtcgttataagtttgaagacacaattgcataaactgtt

SEQ ID NO: 31293 - DNA, 359 bp, Homo sapiens
cggcggccgcccgggcgggtactttggcttttgtttctagaacaccaatgagtatatgctcattaagatagtttgatgcaataaatccttattttacttgcctctattactgcattgtaaactgttgtctactttgtcttcttgaaatcctacacctcccccagcccccacatttggcctatggaacattactttatcctgattttccccctaaccttctggcaatgcctctcagactccttccagaactacttttctctgttttccttttaatgatgacagtttatgcaattgggtcttcaaacttataacgacccagacaatagtaataacagtcaacatttactgaattcttactt

SEQ ID NO: 31294 - DNA, 421 bp, Homo sapiens
  misc_feature 167: n = A,T,C or G
caccgcggtggcggccgaggtactttatatttttgcatataaacttgcagtatttgttcaaaaattaatagtttttgacattggcttttctgagaagagaaattgaaagtgtcacaaaataaaaaaagatgaaatgaagcatatataattgtcaattttttcaattntctagccaacagagaatcgaaggattctgttcaaatattagtaaaaattgaaaataaacttgtgcttatattttgtttgcaacacactagtcaatttaacctgtgactagttatctctaccgaaggtggatgtgtagtttctggttttaaaattcaagcaaactggaaaataatccatctaattatgctttctttcccaagaagttttttaatgatatgccagcttcctaatttggagacaaaagccttaattg

SEQ ID NO: 31295 - DNA, 427 bp, Homo sapiens
  misc_feature 322: n = A,T,C or G
gcgtaatacgactcactatagggcgaattggagctccaccgcggtggcggccgaggtacattccagctttgacctacttcccaagctgtatttgaattggcttttatagagagttaactgttggcaatatttttgcaatgtgagctttgctgcttaatcctgatactatttattctttaatgatgaattcactaaaaaaaattgagtgccagacagtgttgagaacaatagaaatgtggcagtgaacaaagtccctgccttcatgagcttaccttccagtaaatatgaataaaaatctttcccttactttacttagaaattntactttttttttttttttttttttttgagacggagtctcactctgtcacccaggctagagtgcacaatcttggcttgctgcaacctccacctcccaggttcatgc

SEQ ID NO: 31296 - DNA, 410 bp, Homo sapiens
agcgcgcgtaatacgactcactatagggcgaattggagctccaccgcggtggcggccgaggtactggttcatgtgtaactcatacatcccacaagcatctactgtgtgcagaatgtctcgtatgtgaaagacactgtgggcatataactgtggcttagatgggcttctaacccctgagaagataatatatcagcagaaaaaaaggaacatgtatatgaactgccatcacacaacctatccagaattccacaagaaaagtatggtcaaagagctaggaggtgttgaaggaaagattacctgcaggagaggcaatgcgagatgatagaagattctgagctatagagcgaggcggacccagatgggaatttcaggttttctcgggatgtgggaccctaaccaagcttcttata

SEQ ID NO: 31297 - DNA, 168 bp, Homo sapiens
gggcgaattggagctccaccgcggtggcggccgaggtacatcaaccctaacttattataaaagatcgttaaacctttgaaaggtcaatgtatatactgctatctatcacaggcgggcaccattcattatgtcctgtcagtggctctccactggccaacccttcaaggt

SEQ ID NO: 31298 - DNA, 190 bp, Homo sapiens
acgactcactatagggcgaattggagctccaccgcggtggcggccgaggtactaagttgccatttaagaacctcttcaggttccccgtctccttgagctatgaaagttttcatgaacacttcagttttaatggcatgccaaacattttgttccatgagcaacacaacagttttaaaaattgccattgagt

SEQ ID NO: 31299 - DNA, 434 bp, Homo sapiens
atagggcgaattggagctccaccgcggtggcggccgaggtacacttccatcccaccagctttgttgctgttgaaccgcccccaaattgttgcgcaccatccacaagctgagctgctgctacatcctatttcttggggccaagctgcagtggagatgctccacccacccctccaagttgcttttggccctgccccgtgaaggcttgagctgaaatggcactcagcctcctaaagaattggctccttggctgctcagggcagtcatgcacccccattcctgaatggaagcagcaccttgcctccaggaaatcagtgtcatggccaaacccaatcagttgcacatctcagggatgagatgacatggtattttacatcttaactaaacagagcactgactgagctgggtcacctcaccctacaggttgaataattgta

SEQ ID NO: 31300 - DNA, 395 bp, Homo sapiens
atacgactactatagggcgaattggagctccaccgcggtggcggccgaggtactctggcttcttctgaaatcagattccagctcctagtcaccataaagtatgcctgacccttactttatcattggaaactaggtattccagagcaagaaattcatgtattcattatttattatgcactgtatctgattcctaaattactcctttttttgcaaaaaaggaaaaaaaattatttttccatcacatgtgcactctcataaaactgaggttatatttttaaacactgtatgtattcaagaaaaatatatcatttataaacctcatgttttatatatttcatgaaattcagggtcctgtgcttgaactctgaccaggtgggaaatactgctcttataaa

SEQ ID NO: 31301 - DNA, 486 bp, Homo sapiens
tatacactactatagggcgaattggagcctccaccgcggtggcggccgcccgggcaggtacatgccttaactgggagttcaagctaattcttgatttctttctcaaaagacgatttaaatataaggcaaaaaaaaaaaaaaaatttccgatactgtaactaccttaactgtttgagtatatagaaatgagtatgttttatgagttaacaatgaatcatagaaggcaatttatgaagaactagaatgattctgtctagctgccttcagggatcagaaattcaaattaaacttctggcagacatttaaagaatgctagcatacaaaactgaatttaaaaaaacgcacacagttaacactcctcagtggagtttcaagaggaaatcatgaattaaaaaaacacacggcatgatacactgttgactgataccaactgggtgtggtcgatcccaggtgcacccaaacctgcgggaatggcagaaatacagc

SEQ ID NO: 31302 - DNA, 435 bp, Homo sapiens
actactatagggcgaattggagctccaccgcggtggcggccgcccgggcaggtacagtggcatgaccataacttgctgcagccttgaactccaggattcgagtgatcctcccacctgagcctccaagtcgctgggattacagacctgtgtcaccatgctcagctatttcacatcttttgatgtgatgtgacacaaagtatacaacatcacctatgggtgtccatgccaaaaacgggaaatgtttaacagtgagttattatatgtaacatccagcttacaggaatgataggaagagaggaactagtgaaatgatgccacaaggaagcacacagataaatccagaaagttagaaattctgtaggacaaatggcctggtctcttcaacaactgttgctgataatatgacaaaaaagagagtaagaagagcatgaggca

SEQ ID NO: 31303 - DNA, 407 bp, Homo sapiens
ctatagggcgaattggagctccaccgcggtggcggccgcccgggcaggtccgggcaggtacgatcttggctcactgcaacctctccctcccgggttcaagtgattctcgtgcctcagcctcttgagtagctgggattacaggcgcgtgccactgcgtccggctaatttttgtatttttagtagagatggggtttcaccatgttggccaggctgatctcaaactcctgacctcatgtggtccacccaccttggcctcccaaagtgctgggattacaggcgtgagccaccgcgctcagcctacaagcaattttttaaaaactgacacctattactgataaaattctctgtttaaaatcctatttactattttaaagataagtattagtttttttttaaatacaataatt

SEQ ID NO: 31304 - DNA, 411 bp, Homo sapiens
actactatagggcgaattggagctccaccgcgggggcgggccgaggtccctgaacaaatcccatcaaggacagattctcagtcttgaagaggcagcacagtaaaggggaaagatcatgagttttggggccaggttcccttggatattgtggggtccccacacttctggatgatgttggataactctttgagacttaggcttcacatctgtaaaatggaaatacttatttttcagagttgtcataaacactaaatgatttgacttatatcaacctaattcctactggctcattgaactcagctcagctgtcccctctgttcggatgccttccccagtggggccttattaggtatccctgctggataccctgccaagctcttacacattccctctgccataacacccattctt

SEQ ID NO: 31305 - DNA, 543 bp, Homo sapiens
  misc_feature 381: n = A,T,C or G
atacgactcactatagggcgaattggagctccaccgcggtggcggccgaggtacatctgaactttagaaatttacatttgagtaaacctcaaactccaaaatgtatccctcctccccaaaaagggacattttactgaaataaaatctgttgctggttgcttctggtatgttatgtcaaagttgttaaccggatacagcaaaggcagctgcattgtatttcagaattagtttgaggtagattttattgttataaagcaagacgcaattgaagccacactctgggaaaatagcagtaacacaaaacatagtaatttaggcagaattacttagccacagatgtccagagaggtataggaaaaggtccatatgcactttttgtangcaaacaagtcaaggttaaataaaagccctattttgagtcttaagctggatgtcaagaaattgcctcacaggtgaaacaggtccaaccacagaagaggctctgttgttacttgagtcactaaaccatttggatggaagccagtgcagccttctcctctttat

SEQ ID NO: 31306 - DNA, 455 bp, Homo sapiens
cgtaatacgactactatagggcgaattggagctccaccgcggtggcggccgaggtacagtggcgccatcttggctcactgcaacctccgcctcccaggttcaagcgattctcgtgccttagcctctcaagtagctgggattacaggcgcctgccaccacgcccagctaatttttgtattttagtagagacggggtttcaccatgttggccaggctgatcttgaactcctgacctcaagtgatccacccgcctcagcctcccaaagtgctgggattacaggcgtgagccactgcacccggccttcagtgaaaatcttttacatgtccaataatgtgttaaatgtgggatacaattgtgagcaaaatggatggttcctgccctcttaatactcattctgatggacatttatcacaagatagggaattataaatcgcaatcatggcttaaatgaaaag

SEQ ID NO: 31307 - DNA, 399 bp, Homo sapiens
gcgaattggagctccaccgcggtggcggccgaggtaccatactcttttggttgctataattctgtggtataatatgaagtcagaaaatataattcctgcagttttatttatttatttatttttgcttaggatagtattatttcttatagtgaaagcattctatgttatttattattagtctaattttgtagttttacaatgctatcctcttttacaaagctatgatcaactcagtgtgtccagatcaggatcatttgtagctatttgcaaaagtagcaatattctggctgggcatggtggctcatgcttatattcccagcactttgggaggccaagacaggcagatcacctgaggtgatctggtcaacatggtgaaaccctgtctccaataaaaataca

SEQ ID NO: 31308 - DNA, 398 bp, Homo sapiens
actcacttagggcgaattggagctccaccgcggtggcggccgaggtactttggcttttgtttctagaacaccaatgagtatatgctcattaagatagtttgatgcaataaatccttattttacttgcctctattactgcattgcaaactgttgtctactttgtcttcttgaaattcctacaccttccccagcccccacatttggcctatggaacattactttatcctgattttccccctaaccttctggcaatgcctctcagactccttccagaactacctttctctgttttccttttaatgatgacagtttatgcaattgtgtcttcaaacttataacgacccagacaatagtaataacagtcaacatttactgaattcttacttgtgttaagtgct

SEQ ID NO: 31309 - DNA, 452 bp, Homo sapiens
tacactactatagggcgaattggagctccaccgcggtggcggccgcccgggcaggtacctttgagaccagatgctgcttatccaacagcccttatctcctttcttgctagtagacatgactgaactttctagtctacacgactcaaaggataattcattaatctaagccactcctgatggatgatcttacttgctttgccaatgacaggagtgagatgacccatttctagcaaagccatgaggccgtatctgctggagcttccaggggaagacttccttgctttagaaggacacagaaaaatctgtctctcttttgccagacacggttctgtcagcatttccttcccagaattacagtagccatattgggaccatgaggcgaactggcgtgaggataaacatggaggatggcagagcaaaaaaatttcaagaaactgagtctttggtgttat

SEQ ID NO: 31310 - DNA, 274 bp, Homo sapiens
cactatagggcgaattggagctccaccgcggtggcggccgcccgggcaggtacttccccaccgcatctggagtctgtaattacatgtatatttggctgcttgaagtagtcatacaactcactgatgcactgttatgttttttagtcatttgattctctttgttttgggtagtttctactgatcttcatttcactagttctttattctttcccatgttaaaatctgttactccttatccagaaattattaccttttttatcccttaaaaaattac

SEQ ID NO: 31311 - DNA, 385 bp, Homo sapiens
actactatagggcgaattggagctccaccgcggtggcggccgcccgggcaggtactttttttttgtttttttatttttcctttagtgtgagtgtatatttcatgctacctaagttattaatttttttgtaatattagttatttttcaaatacctaagaattgcaaaacatttcccaggcacaaaagaaacatacaaacaaaactcagcagccttttcaactatgaacaagaaagaaagaaagaaagaaagaaagaaagaaaggggacatgcattctttcctatttacccagctcagatttcaaattcagcatgggtatttagcatctgtagaggatatgtataatcaggagtaaaatggttcatctctcaggctttgctgatcat

SEQ ID NO: 31312 - DNA, 439 bp, Homo sapiens
cactcacttagggcgaattggagctccaccgcggtggcggccgcccgggcaggtacaaagcgcaaataggcaatttggttcaatatctcccaacttaaacccactgctttttcaacagaaatgttttttacatcaagtgttgcctctgttctcactctccctccttcttgatcttttaatctaaccctgtcttcttgacttctttctagcccctgccccattgccattggtttataggtcaaattgcttgagttaaatgcatagaagatgcaactatttcagacctcactttaaacaatgtggtaagtgttaagacagaataaaagataaaccaaaatattgtagaagatgattctaatggcatatccaggagctaacctgctctgcattgatgagtttagctatcataattccaaaggaacactatgattgagaacaa

SEQ ID NO: 31313 - DNA, 294 bp, Homo sapiens
gagctccaccgcgggggcggccgcccgggtaggtactttggcttttgtttctagaacatcaatgagtatatgctcattaagatagattgatgcaataaatccttattgtacttgcctctattactgcattgtaaactgttgtctactttgtcttcttgaaatcctacacctgccccagcccccacatttggcctatggaacattactttatcctgattttccccctaaccttctggcaatgcctctcagacttccttccagaactacttttctctgtttttccttgtaatgatg

SEQ ID NO: 31314 - DNA, 72 bp, Homo sapiens
caggattctggccctgctgcctaaactgtgcgttcataaccaaatcattttcatatttctaacccttcaaaa

SEQ ID NO: 31315 - DNA, 424 bp, Homo sapiens
gcgaattggagctccaccgcggtggcggccgcccgggcaggtacctgaacaaatcccatcaaggacagattctcagtcttgaagaggcagcacggtaaaggggaaagatcatgagttttggggccaggttcccttggatattgtggggtccccacacttctggatgatgttggataactctttgagacttaggcttcacatctgtaaaatggaaatacttatttttcagagttgtcataaacactaaatgatttgacttatatcaacctaattcctactggctcattgaactcagctcagctgtcccctctgttcggatgccttccccagtggggcttagttaggtatccctgctggataccctgccaagctcttacacattccctctgccataacactcattctttgttactgaattataatt

SEQ ID NO: 31316 - DNA, 462 bp, Homo sapiens
cgactactatagggcgaattggagctccaccgcggtggcggccgaggtaccaatttaacatttaatcatcaaggagaactggatgacaaaggcaatgccaggcatgagtcgagtgtgtcccttaactttccaaatggtatttacttagagaaaaggaatttgtttactttcaacagatactacatctcaattgtcttgaccttcctcaacacattaattgtaaagtgattaatgaagtttgaatggaggctctgcttacaccaaaagacaactatacacctctgcaatgttttaattaacagctaacacttcaaattagtttgttgttgccacagtaattacctgattcaatgactgcatggaggaagcatttttatgagatatttttagtgcttggtccttgagtgttccattttgtttgtgaccagcacaggccttctgggaacagtctcagcccttaaa

SEQ ID NO: 31317 - DNA, 412 bp, Homo sapiens
gcgaattggagctccaccgcggtggcggccgcccgggcaggactgaggtgggtctagaggattagtctgtgaattgcagcctggattctgcagttgtggggtctgcctggtgctgagttttactgtggtggactcagtgttgggatccagcggaaaatcctgtgcttactttcctctcttcctgccaagtggagagtatgtcttttcatgctctgctgcctggaattggaaaagaggtgatttggataatgtaaaactgtccttcctatcctcttcaacgtatcttttattattattgtgctacaaccagacactgtgatctttcatctggttttcttagatgttgtaaagatattgtgtgcatggaccaggtatggtggctcatgcctgtaatcccatttttgggaggcca

SEQ ID NO: 31318 - DNA, 393 bp, Homo sapiens
actactatagggcgaattggagctccaccgcggtggcggccgcccgggcaggtactttaggctgagaaataaatagaaggtgagaaaaaagaacagtctttatagtcagtaagagtgaaaagagaaagatggtagttggggaaagacagatggggagaaaggttggctggttgctaataaaacagtagaggatgagcatgtattataaatgctggtgggaagaaaccttgtggcaaggagggtggtagtgttggagaagaaagagaggatatagtagaaagttaaagaggaactggaagcaggtgggatccaggacataggaaggggaagagccttgggcagaggtgagacatctgcaggagggaaaggaaactgagagaagggaaaggtgtg

SEQ ID NO: 31319 - DNA, 206 bp, Homo sapiens
gactcactatagggcgaattggagctccaccgcggtggcggccgaggtacagtttggggttactgccttgatttctgctaaggcaccagccatttggcccacgtgcattgaaaatggcaaataatatattattatgaaaataagtctgaaattgcagaccacctgaaatggtctcagggactcctaaggggcccagggaccacact

SEQ ID NO: 31320 - DNA, 400 bp, Homo sapiens
gactactatagggcgaattggagctccaccgcggtggcggccgcccgggcaggtacaaatctaaaacacaaacatcacctttacaaaacaaaattgttgattaataattatctttttcataactatctcataactttatgactacaggcccaccatttaacaactacaaccttcacataaactaacatgtgcttttaatgctgaccttagtttaaaaagcctgccagtatggaatgacattcaaataaaataaaaccaaatttaaaaagaacagaaatgcaaactcaacaatattcccatcttttgaatcctgacaatgtagaagtcaaattcataatcatcctaaaaaccaagggagtcatacgaccactgtatgtctcttcagtctaggaataatgca

SEQ ID NO: 31321 - DNA, 236 bp, Homo sapiens
actactatagggcgaattggagctccaccgcggtggcggccgcccgggcaggtactttaaaagttataatgctgatgaacaaaaaggtatgtaaaaactcaggatttaattaattagatatattttccaccattagaacatttctgctcagaggtcttattacaaagctacatttctgatagtctactacggtgcagcttctgccaaagccactcaatactaacctcttacatagc

SEQ ID NO: 31322 - DNA, 448 bp, Homo sapiens
tacgactcactatagggcgaattggagctccaccgcggtggcggccgcccgggcaggtgcacgccaccaggcctggctaatttttttttttttttttttatttttactagagacagggtttcaccatgtcagccaggctggtctcgaactcctgacctcaggtgatccacccaccttggccttccacagtgcagggattataggcatgagccaccacacccggactttaattttaattcaatccattttcctactgtcaggacctttactccttttatatacctaccctccaggcttggcctaaggttggctattcacacgtgttataaagttagaaagcacatttgatgatagaagtagccctgtctgcaagtttttatcgtatatgagattttgtgtctgcgggctccccatcaattctgttggacattcttccaatagattcctt

SEQ ID NO: 31323 - DNA, 410 bp, Homo sapiens
tactactactatagggcgaattggagctccaccgcggtggcggccgcccgggcaggtaccccaggcctctgtccagaatggagcttgacatctatgctaaaacctttcttaaggctccaattaactgcctaagagcactagcaaatctttgcagcagttcaacatctatttagaaatgccctttggtctccctgtttcagatacacatcatagcaggtgactttcactttcccaggactcaaaatggagactggggaatccttgtcagaataaacattaatggagggccgggtgcggtggctcacgcctgtaatcccagcactttgggaggctgaggtgggtggatcatgaggtcaggagatcgagaccatcctggctaacatggtgaaaccccatctctactaataata

SEQ ID NO: 31324 - DNA, 428 bp, Homo sapiens
gcggtggcggccgcccgggcaggtacagttaaatagtgcatcttaaatagtggggtgatattaaatggttatattctggaggctcatgcccacactgcctttgaagttcaggctgcccagccacattcaggcattgattcaggaaactcccttggcctttcagtaagagagagctcccttatgccagaactgctttgaaatagaatgtggcagagctgtaaagtgggtccaattctacaagtcagcacactctgtggattttccattgtgaatagttctcagatctatatcttcagaccctccaccaatagtatatttcagcccttaggtatctctcatctatagcattggaaaaaagcctcctaacaggcctccccaattccatacttgcctacgtaaaatatttcttacttgcacagtcagaatat

SEQ ID NO: 31325 - DNA, 324 bp, Homo sapiens
tggagctccaccgcggtggcggccgaggtacttttttttttttttttttttgctgaattgtttctgactaccattatgcaagtaggtgaggagatacatatacaggagtttctgagtgttctttcctaaaacttgtgcacattatgtttgtatttgaaatagaggcagtgtttaaaatgaacgtggctgtgctatacttcttgatttaagtgttacaacaaagattagattaaaggaacaacaaacagcatgttacaagaagcattccaattttccagtaagaactgagtcatgcaagatgagaccatacaggtttccacaatt

SEQ ID NO: 31326 - DNA, 413 bp, Homo sapiens
ctatagggcgaattggagctccaccgcggtggcggccgaggtacgttcatgtgataaactataagattgtataatgtcgtctttcttgtgggtaactttaataagctttttatgatatgtggattgttctcaattggcttattacagcctgcagccatggaatgttcctgatgctgacatcacagtgacaggcacacttgtagttgaggtgtttgttgggatatggatttttttttttttaagtaacaaaggtgcaccagcattcagctgtctgacagaacgatgtcttcattacaagcaaccatcactaaatcaactttaaaattatttgacaaaacaaaactaaaatggcttatttcaaactttctctcttatcaaagtccaaaacaaagtagtaacttaggaatttaacg

SEQ ID NO: 31327 - DNA, 424 bp, Homo sapiens
tatagggcgaattggagctccaccgcggtggcggccgcccgggcaggtacttttatctgacagaggcttcatttttctcaaatattcctttgaatcaaagacatccatcatattaaaaagagtaaaatcatttcagggaggattgctagaggatacagagggcagggatttagccttccaggtgacctctgctggggtcccaaggggtgggacagggtttttagtcactaatttaaaagtataaaaaggtttccaatgctttataagttaacaaacccatatcctgagaattcaaagaatactgaatggcaacattataaatagtaacatttgctattaaaaaaggcagtaagactctagctacctgaaaccaaaataagcagttaaggccgggcaccgtggctcactcctgtaatcccagcac

SEQ ID NO: 31328 - DNA, 233 bp, Homo sapiens
tagggcgaattggagctccaccgcggtggcggccgaggtaccttctgctgttccctgggtcttcaatgactcaatttcccaccagcagtatcctttaaagccatcctgcatcctgagacaagagattgacaattcattgataagtagtcttaattgtcactattacagggctgtaggtcctttggccagccatgcctttcagtcctaaatggtcttcaaggttgggctgtgtt

SEQ ID NO: 31329 - DNA, 415 bp, Homo sapiens
actatagggcgaattggagctccaccgcggtggcggccgaggtacgtttgacggtgtctacaaggcaccaccttatacctttctgaattcttaaaaggttgtgcagtttcaccctgggtttgatttttgctctgaaaccatttcttggctcaagaattgtttgatgtgtggagagattgggaatgagaaacaggtttatatttaacagtttattctttagctcatctctctctgctcacattttataggcagtgagcagaacccatgtgtcactttaagtggctgcctggaaatctctttagatagatcattgacttcattaggtgcatttccgcttcccactttactgcatatgttagtgttgctaaactctctgtcactgcccaacagggtccgccttgcctctatctcccac

SEQ ID NO: 31330 - DNA, 431 bp, Homo sapiens
tacgactactatagggcgaattggagctccaccgcggtggcggccgaggtaccaggagggtattgatgtttgaggtccaaactgaaaacccatcacctccttcccactgctatagcagtgttagccctggggttcattatctagccagttcacaccttctaaagtggggctctgaaaatgtcttacttccctcacagacaaagcaattctcaagcctcctgagatcacccaccaaccagagcaactgctgtcacttggaggtgcagctgaattcttctaattgtgacacaaactcttgaaactgtaaatgctgaaagattaaatgaggttataacactcaggaggttttacaagtaaaagtaagtcaaatcaataggtctttatttcatatctgtaatggtttagctctgcgggaagtgttagcagctata

SEQ ID NO: 31331 - DNA, 166 bp, Homo sapiens
acgactcactatagggcgaattggagctccaccgcggtggcggccgcccgggcaggtaccaagtattttatctcagtagaaagtcttgactgggtataattattaacttgaaaatgaccttttctctggctcgggtctcaaggtagacttagtcttcattctggga

SEQ ID NO: 31332 - DNA, 432 bp, Homo sapiens
ggcgaattggtgctccaccgcggtggcggctgaggtaccacaatgtctctggctaatttttttttcttttttttttttggtagagacacggtcttgctatgtcacccagactggtctcaaacttctggcctcaagcaatcctcccacgttggcctcccaaagtgctgaaatttcaagcctggacccactatgcctggccaaaagcttgtttttaatacagctccatttttaagtggaaatgattatttgtcctataaaagggagataatcctgttttatctgatgaaaatgcagagaatctaaaataatatttggaaatacgttgtataatcaagataagatggtagaaaggatgcttactttgaaagcatggaaagagagtgtctaagaacatggcaacatcttccactcaagtcacatggtaagaaggaa

SEQ ID NO: 31333 - DNA, 321 bp, Homo sapiens
  misc_feature 297: n = A,T,C or G
ggcgaattggagctccaccgcggtggcggccgaggtacacacatgagaactgaaatggcccaaacccagaaagaaagcccaactagatcctcagaagacgcttctagggacaataaccgatgaggaaaagatggcctccttgtgccaccgtctgttatgatttctctccattgggaccaaaaggccgttctttctaagcagacagcaaggtgaatgatgggccaaaatgagaccacaccttcatttggcattcttttgaacaattgtctttggggatccattgtgatgacatctggnctttattggaggaaagaaaatttc

SEQ ID NO: 31334 - DNA, 448 bp, Homo sapiens
tcactatagggcgaattggagctccaccgcggtggcggccgcccgggcaggtacatctgtaaagatcaggcctcaggccaaccaatgaattactctagagaaatgtagctgaagaaagcactgtagatctgccgggatagcctgctttgtggggaatgaatgacttttggacagatcgtgtaataataatgtaaatagtatgtttgaacgggcagaattcatgggatagtgtccaatcatgactttgtttttgcttttcattgttcccgtgaaatttattctctaggaacctttaaatctgactccagcacggtttgtgactcttcttaggagaatagaaaatcttaacaattgtcatatttgagaaaacatcatctcagtttagaaataggaatgtgtggccaggcgtggtggctcacgcctgtaatcccaacactttgggaggcct

SEQ ID NO: 31335 - DNA, 420 bp, Homo sapiens
actactatagggcgaattggagctccaccgcggtggcggccgcccgggcaggtacgatcttggctcgctgcaacctctccctcccgggttcaagtgattctcgtgcctcagcctcttgagtagctgggattacaggcgcgtgccactgcgtccggctaatttttgtatttttagtaaagatggggttttaccatgttggccaggctgatctcaaactcctgacctcatgtggtccacccaccttggcctcccaaagtgctgggattacaggcgtgagccaccgcgctcagcctacaagcaattttttaaaaactgacacctattactgataaaattctctgtttaaaatcctatttactattttaaagataagtattagttttttttaaatacaataattctgttattgataaaatttaa

SEQ ID NO: 31336 - DNA, 453 bp, Homo sapiens
actatagggcgaattggagctccaccgcggtggcggccgcccgggcaggacgcgggggagttacccagaactagcaacagtagtaagcctcattactcagttgtgagggggaaggtagactctttccagacctttgataaaggggctgctcaaaaaagccacgaccttgggcctctgctaaaaccatggctttaaagtaaggagggagcagatatataaaaaaccttatccctctttctaatctcttatgtcctgtgagtgtcacccattgagtaaacccaagtggaagtcagcaggaaagtagctgggatgatgcagtctttacagggtctctctgtcacccaggctgaagtgaaatggtgtgatctcggctcactgcaacctctgcctcctgggttcaagtgattctccagcctcagcctcccagatagataccagtaaagatgtcatctg

SEQ ID NO: 31337 - DNA, 367 bp, Homo sapiens
cgtaatacgactcactatagggcgaattggagctccaccgcggtggcggccgcccgggcaggtacaccccaccccatgtcattttaaagggcaatgtgacttgcaccaggaagcaaaagactgggagcactgctttccatcgctctgtggcatgatttctagtggtgcccttctcacccccagacacccccatgatgcaggaggtcccttcccctggctgctcctggaccaggccacagctcaggctgaaaccaggctgtctctgaaaatagaggacgtaggcagagaggtggctggattccttccgcgccaagcaggcacagtgccgccccctccttgaagaactctgcctattttccttttctcc

SEQ ID NO: 31338 - DNA, 203 bp, Homo sapiens
tatagggcgaattggagctccaccgcggtggcggccgaggtacggagtctcactctgtcgcccaggctggagtgcagtggcgccatcttggctcgcagcaacctctgcctccctggtttaggcaattctcctgcctcagcctcaagtagctgggattacaggtgtgtgccaccatgcccggctaattttttttagggaatttt

SEQ ID NO: 31339 - DNA, 406 bp, Homo sapiens
gactcactatagggcgaattggagctccaccgcggtggcggccgcccgggcaggtaccaaacacaattcctgctctcagggaaacatggataagacttaaacaagtgaaatgttaaatagccctgtgagacaggagggaatgcatatcaagcaagacagtgtggtcattgggttttgagggggaaaatgagggaaaggcctttgtgtgtgaggtagggtaaagtggatgaatttgaatcacattttgaaaggcattgcaggtgggatggatgagcagatgttcccaataggaacgcctgtagactgttcagaagaaattgcccaaatgagctagatgagaaggctgagggcagggctgcttttggctctgaggactatagatttatcctctaggtgatgaggggct

SEQ ID NO: 31340 - DNA, 448 bp, Homo sapiens
gaattgagctccaccgtgtggcggtcgatgaacgcgggggaaaattctgataattatactgcccttcccctttataggttttctgtaggagttaaaatacactttttcaattgcttgacataatgctcaacactggtaggggagctaaaaatgtcagctattgtcctatgtgccaaaaaaaaaaaccacacagacagaaacacacaccacacaaagacaccacattggagggaaaaggaagttaaagattagaaaagcagcaacatagtgtattcggtaggcaaatggtgaccacttagtgaattttcataattctttttttaatttacttctttaatactgcttacattttatcagtgtttatataattgagccatgttatttactttctgtaaatcagaaagaagggtggtattaaaacctgacctttaattttaaataaaaacaa

SEQ ID NO: 31341 - DNA, 577 bp, Homo sapiens
ctatagggcgaattggagctccaccgcggtggcggccgcccgggccggtacctatagaaatgccttcctcaggaaccccgccattgttaaacaagagtgagcgcctagtgggcagaaatgtagtgattgtggaacaaccttttccaagaaatcaagcctttgtagttaatcaggaatttgacagagaataagcctcacaaatgaagtgaatgtggccccatcagtaataaattatatcttgtatcttacagatattgtatcagaataaatcttctgataccagaaaggtgggaaaatctttagtaggaatcctccagccattatattccagagagctcatttagggctgaaacactgtggaggcagtggttgtggaggacatttctgtgagaagtcaaacctgttaaacaccattgaaatcatgttgggtagaaatgcagctgttatgaggaagtctttacctggagatgatatctcaattggtatcaaaagaattcttacaggaatatttatgaaagattgtgatggtgctattagcgctaaattgtgcctcgtgtgccaaagaaacatagacaac

SEQ ID NO: 31342 - DNA, 405 bp, Homo sapiens
ggcgaattggagctccaccgcggtggcggccgcccgggcaggtactggacttgcctaatttctaggcatggagttggggcttgtaacaatggtgggagatgggcagtgctttgggaatgtagctgaccactgcatgggtgctaactagcccagggatcttaaagaatttgtgtaggccatgaaggatccactccagccactgaatagtcatagaattgaatctaggacatcaccgtatgctactaccatgcagttttatcccttctaagaatccaaatgccctagtttaatttctaaatttttgttttgtttattttcactaaagcaacatgttagtggactgcggagggaagtgaatttcatggctggtcctcattttgatatcttttaataggatcatgaagc

SEQ ID NO: 31343 - DNA, 487 bp, Homo sapiens
ggtggcggccgcccgggcaggtatcttctatctaaatctcatttttattaatagtttcattttattaaatttcttgactcatgtttcatgcattaactggattcctcctcaaaggacgtgtgcacttgatccacatcatcgtaatgcctgtgccatcttaactacatttttctagcttgaaggtcaggattagggggaggaacaccttccgagttgtattaaccgggttggtgaggtggttcgtcatgatatccatcctgtgtttcaaaatcaagaaaaaatgaaaatctctttccacaagcagtagcagaagatattgtcagggcagggctgtcgcaagagtgtccacctgctgtgagctcatcacagataaccgtcacctctgctccatctccagcctactgttcagtctggagagctgagcaaagttaggagtggatgctggtcactgatgcaagcaaattcttccaaaaagagatttggaaag

SEQ ID NO: 31344 - DNA, 431 bp, Homo sapiens
cgactcactatagggcgaattggagctccaccgcggtggcggccgcccgggcaggtacccagcacaacctcacacagttatcaacccgggcagttggactctcgaatccatgcttgcgactgtgatgctacactgcccttttacccagcacttaacttcacacacagaggcacctcataaatatgtattaaataaaagattgatcacacattcctttttacaatcctgaaaaagtcatctccgtgtttggatgaggggaaatacaaaatcactcctctgggaatgaggcagcagaatgaaagaggttgttctgaaaaaacagagttttctggaaagaagtgttctttttcagacagcagtgcttgactctgaagaaaaatgccccatacatggttcacacaagtcctaatgtttttaatttttctgaatgc

SEQ ID NO: 31345 - DNA, 400 bp, Homo sapiens
cgcgtaatacgactcatatagggcgaattggagctccaccgcggtggcggccgcccgggcaggtacaggttctttgaatgcagtatttattcacatagttttcattttctgtcctgacaaaaacttggtgatgtttgaatggttacagaacaaataggattgtggtttatgtttcctattatgcatatttggcagttgaattatgacattagattgggacatggtgagagggggcaggatacggggtaggaggaggggagcaagttacaaaaggccccagttccgggaagctgggctgagttgttctgtttaacttcttcttcctttattcctatggttttatgattgcaaattggcagtggcagggcagctctgactatatttgctagaagcagatgtc

SEQ ID NO: 31346 - DNA, 586 bp, Homo sapiens
  misc_feature 449: n = A,T,C or G
gcgaattggagctccaccgcggtggcggccgcccggcaggtacaacaccaatgtagcctcaaaaaagaacacagcagagcaccgcaggggatccctttctgaacacagtcttctcccacttccctcagtcaccactcagtgtttatggtaatgacttcctcgattttctttcctgttgatcatttaagacaaaatacgtccctaagcagtatcacttggttttgtctgttttgaattttatttaaatggatcatgcttcctgaatttttttttttgttgttgttgttcgagacagagtcctgctctgtcgcccaggctggagtgcagtggcgtgatttcagctcactgcaacctccgcctcccgggttcaagcacttcttctgcctcagcctccctagtagctgggattacagatgcccaacaccatgcctgactaatttttgtatttntagtagagacaggttttcaccatgttggccaggctggttttgaactcttgacctcaggtgatccacctgcctttggcctcccaaagtgttaggattacaagtgtgagccaccgagcctggccaagatagtttaaaaa

SEQ ID NO: 31347 - DNA, 475 bp, Homo sapiens
actactatagggcgaattggagctccaccgcggtggcggccgcccgggcaggtaccccatatatgctggtggtttctaaacctaaattgttgtcccagcccattcctacttgcagctcggatgtgccttgctagcctggcttctctacctggcacctcacactcaggatgccaaaaaaagttctgttttctttccccgaaatcctgttctctgctgctgctccactgccacctgttttcttttcttttggttgctggttcccaccagccattcagattccagccggacacacgggattgtcctggactcctctgaattcctcatcctcttcccctggcccacatccagtgggaggacccccgtcctccctcgttcacctcctgatgacataaattcttgaccgtgggctctttgtatctcaccgaaacttctgcgcccgcatattccccaactggtctccttaacttcacttgtg

SEQ ID NO: 31348 - DNA, 445 bp, Homo sapiens
tacgactactatagggcgaattggagctccaccgcggtggcggccgaggtacagactttcattcaacaaatatttatgcatcagctacatgccaggatctgtaatagattctgggtgtgcagtagtgattactgcagaatgcagacatggtccctgcattcttgagagggagacagcaaccaaataaacaattacaaaaaagtatgtaactaattaacaagtgggagaagggagtgggattacacagcataagtggaaggaagggcccacttagagtggtcaaaggcttcttgaaggtaacatgtaagctgagacctgaagaaggatgcaaaagggccagcatgtaaggaacagagaataaacatcccagaaatagaaaataacacacaaaaacctaaagtcattaaagaacatgatcatctttcaagaactaacccttgagatc

SEQ ID NO: 31349 - DNA, 433 bp, Homo sapiens
actactatagggcgaattggagctccaccgcggtggcggccgaggtacacttagattgatttttttctaccagaagaaatttctatgtaaaatgcttaaaaacctgtcatcaatttgatttctgtagcattggatatagagtgtgagcttttaaggtttttaatgtgttgccaaatgttatttcccaaaaggcttcatcggtttcataccctgctggtgagctctgtcctgttttactagctttcagcatgtgtgtgtgtgtgtgtttgagatggggtcttgctctgtcacccaggctggagtgcagtggcgcaatctctgctcaccgcaacctccgcctaccccagttggagcaattgtcctgccttagcctctgagtagctggcattacagctgcctgccaccacacccaactaagttttgaatttttaat

SEQ ID NO: 31350 - DNA, 429 bp, Homo sapiens
agggcgaattggagctccaccgcggtggcggccgaggtacttcagggctctggatttcttttctgtaatgctgaagtctcaaagcttcacaggaaaaatttggaaaagtatgacagttctctgtctggcatctgcttcaatgtcatttctactagggatacccctgagcattctaatgcttataaattaccttacaatatagccaacaaagctttagctattgccaaactcatgtctcaatcgcctgaatatgagtctagtagtcacaattacagaagctttctagcaatctgcaagctctggagaaagtaaatttccaacccaaagaaaaaggatgccatcttccagaaaatactgcaaattacactcttattcaatgatcattgttttttttcctctaaaggttaaattgtctttccctaaaacctg

SEQ ID NO: 31351 - DNA, 326 bp, Homo sapiens
ctactatagggcgaattggagctccaccgcggtggcggccgcccgggcaggtactttaggctgagaaataaatagaaggtgagaaaaaagaacagtctttatagtcagtaacagtgaaaagagaaagatggtagttggggaaagacagatggggagaaaggttggctggttgttaataaaacagtataggatgagcatgtattataaatgctggtgggaagaaaccttgtggcaaggagggtggtagtgttggagaagaaagagaggatatagtagaaagttaaagaggaactggaagcaggtgggatccatgacataggaagggg

SEQ ID NO: 31352 - DNA, 397 bp, Homo sapiens
cgtaatacgactactatagggtcgattggagctccaccgcggtggcggccgcccgggcaggtacagtaaaacctgttgtaatgttggttactgaaaatggtctttagagctagtgttggtttaaatggagttttgtaattatttgagctgcaactagagtgacaattctccatttttagaatctgtgcctcttgtctggcagcacttttagttatttcctttctattgctttttgttccacactcaataagctttggttggtgtgtgctttatcagaccttcatgtttacttgccaaatgaatatggggttttgttactaaagttagtatttttaatctatttattttatttttctttctttagaaaactcagaatggactcgttttctagtcctga

SEQ ID NO: 31353 - DNA, 323 bp, Homo sapiens
tacgactactatagggcgaattggagctccaccgcggtggcggccgcccgggcaggtacatgaaaggagattgagggcagggagctcacagaaccaagacagcaggacccaggattcagacctggaaaatttttatttcctggctggtttgtgtgccctcatgcatgttatttacagtgccatgttctttcacatgggaacactgacacaagtggaaatgggaaggttccatagggatgataagtgcaaaaacattaaatgaacaatcctagcagtatgcagttgagttcaaggggaggagtccttgttggagtaaccacgaa

SEQ ID NO: 31354 - DNA, 412 bp, Homo sapiens
tactatagggcgaattggagctccaccgcggtggcggccgaggtactaacaaatgcagtagccaacaagattaccatgcaatcattaaggagaaccaaagtaagagagccactcaaaccagattttgaacgctactaaaattaaagtagttctttgatgaatatgaatgagtagggaaaggattctttgtgatagtgatacctctgtggtaagagaagggtggtatgtgagttttagtctacagattatggcaaattcagtgacaacaatcaaatggtctaagattgacagtagcacagttttactctgtgaaggtaatgttcagggacaaattccaagaaaactagaaaaccattctttacagactgaaatctttccctaaccattgttatttccactttttaagtcctca

SEQ ID NO: 31355 - DNA, 445 bp, Homo sapiens
tacgactcactatagggcgaattggagctccaccgcggtggcggccgcccgggcaggtaccctaggtgatgcctgttcttttgaaacagcagagattttattttaaaaatacgtttttgtgtttattacctaaaggagctattctgaaatttttatgtagaaaaatcttcttctgctccatccacagaagattttttatccatagatatttttgccatctcctttctcctctttcctttgttgtagatgatatgaaaagactgcttttttcaaaaattgtgtttttaaattggtgaatgttgccatgcctaaagtgatctctgagatatcctccttttgggtataaacatttctgttaaatgttgtaaagagctttctataatagacacagtagactgtatttaatttttttctcccttcttggtagatctcttttggttaaaag

SEQ ID NO: 31356 - DNA, 385 bp, Homo sapiens
  misc_feature 357: n = A,T,C or G
atagggcgaattggagctccaccgcggtggcggccgcccgggcaggtacctgaagcttgaattcctgaactttttttttttttttttttgtatttttagtagagacagggtttcaccaaattgaccaggttggtctcgaactcctgacctaaagtgatccgcccaccttggccccgcaaagcgctgagattacagacctgaaccactgtgcctaacctccctgaacttctcaacattctgagttagtcactttccctttggtttaagccagctcgggttacttgcaaccctagttatacagccacttttctacaacacaaacaaaccacctagaataaaattcattttcctcctttnttttttttttttttaatggaaggtgggg

SEQ ID NO: 31357 - DNA, 472 bp, Homo sapiens
ctactatagggcgaattggagctccaccgcggtggcggccgaggtacaccccaccatcttggtatcaggtccacctggatatgccgaatttcatctatctttattcatcttgagcagagcccctactatatgtaagaaatcaaaaatcttagccaggcacagtggctcatactgataatcccagcattttgggaggccgaggcaggcagatcacttgaggccaggagtttgagaccagccttgccaacatgtcgaaaccccatctctactaaaaatacaaaaaattagctggtcatagtggtgcacgcttgtaatcccagcttactcgggtggctgaggcacgagaattgcttgaaactggaaggcagaggttgcagtgggttgagatcatgccactgcacttcaggctgggtgacagaacaaggctctgtcttcataaaaataaacaaacttaaataagtacctgcccggg

SEQ ID NO: 31358 - DNA, 248 bp, Homo sapiens
  misc_feature 154: n = A,T,C or G
actcactatagggcgaattggagctccaccgcggtggcggccgaggtacccctgaacctaaaagttaaatttttaaagtgggtttagtatgacacatacacatacacacatttatggtttcaaattaaatgtttctggtctctacttagtgttncttttcaattttaaagttccccctaaaaactcacaaattttaaaaaaaggccaaaaaagcccaaaaaaaaagaagcaaaggatgttttttttaa

SEQ ID NO: 31359 - DNA, 410 bp, Homo sapiens
  misc_feature 351: n = A,T,C or G
actactatagggcgaattggagctccaccgcggtgggcggccgaggtacgcgggctgtttgttcactgtcatccactgagtgcttgcctcatgttctgctgagcacattccctgtgtgatttcttcttattctcaaaactgcatttggaataccttgttgttttaaagaggagggaacggaagcattgccatttgctcaagatctcacggctagtgggtaagagagcccactccagcaccaccactgcgtgtttgcattttcacagacatttggaggtgggatggagaatggatctgaggagacaagactggaggtggaaggaacagcatatttaagttctttttctgtgngaaaactcagaaatttgagtctgtggggaagcacctcgaggacagaacatgttgggatg

SEQ ID NO: 31360 - DNA, 391 bp, Homo sapiens
gcggtggcggccgcccggtcaggtactttttttttttttttttttttattttttggtagagatggggtttcactatgttggtcaggctcgtcttgaactcctgacctcaggtgatccacccgccttggcctcccaaagtgttggaattacaggcatgagccactgtgcccagcatacagagggttttgagtgcctttcagaaggacaggaaaccctggccacttaggggaaaatgggggagggagaaggctagaggctcaacacatgacatttggttctttcaaatttagggatttttccaaaactttacctccaagaagacagatggcctttctctaacatcgagagggaagacaatacccttcccaggtaattctgcaaaataattttt

SEQ ID NO: 31361 - DNA, 422 bp, Homo sapiens
ctactatagggcgaattggagctccaccgcggtggcggccgaggtacgcggggcagacagattacctcatttcagctcaataaaacatcaccaaattcccttaggcagaaaaagggtggggagtgccctttcttgaaggaatcccttaagtgcacgtctcccgttttcttttcacatcaatgcagagtccctctgtgaatttacaacacccaacacccatgagttcagtccttaagaaggaaaattgagcaagtatttaattggttggacattgcataaaagaggtccatatccaggctaactctagaaattttattctcaaacttagttggcctcttttttttctgtcagaggaccattcttagtggcactggggaaatcttggcacccagaagaattcaactgcgctcactgcaaaaata

SEQ ID NO: 31362 - DNA, 358 bp, Homo sapiens
atagggcgaattggagcttcaccgcggtggcggccgcccgggcaggtactgggattataggcgtgagccaccgcgtctggcctctaacgagatatttctaaaggttaggccttcagtcaagaattttaaagctggatcttagaggttatctaaactaacctctccatttcatagataaggaaagtgagtcccagaaaagcactggtttggacaagttcagaaagctaaacagtgactgtggatgtatgattctgtctcttaactcctaatccaaatgtcttctcactagataaggctgtgccttctacatttgaaggctcaaaccccatggatggatggagggaaggatgggtggagg

SEQ ID NO: 31363 - DNA, 408 bp, Homo sapiens
actactatagggcgaattggagctccaccgcggtggcggccgaggtacaaggggactgggaaatgtggggaggcttcccacaggaggtgaagctggagcagaggcctgaagggtgaaaagttggtatttacaggcaggcaaaggcaggcagtggaaaggagagttgatattctaggacaggaattctttcagcctaccttccagaaagattttcataaccacttggctctcactggtcagcatcccttaatcatagctagttacccaaattgtagcacataacttagaagtttgagatctctatcgtgctgtattattcatgcttatttttctaatgtttggctttattctctaagaagatgaagtcagtggtgcaaagtgagagcaattcctacctgtgtaatattg

SEQ ID NO: 31364 - DNA, 424 bp, Homo sapiens
acgactcactatagggcgaattggagctccaccgcggtggcggccgcccgggcaggtacactgacagagatcgaccactaaaatcttctgaggcgcatttatctttctctttgagagagaaaccccattttccttaagaaaaggcaaagctgttccagcacatgttttaaatgattcatattatctgacaatggaaagggtaattctctcccaggatttagggtataattctcagccatctgagaattctgtttatcccaccttgtctccttgctcagagaattacaattagatggaaacatctaatgtcaaggcatctgatagctccagcataggatactgtgactgctccagatagattttctccatgaaaaccaaagttgatggttaattaccatgtccccttctcattatggcactatca

SEQ ID NO: 31365 - DNA, 410 bp, Homo sapiens
tactatagggcgaattggagctccaccgcggtggcggccgcccgggcaggacagcagccggatctcagctcactgcaacctccaccccctgggctcaaccgatcctgccacttcagcctccagaggagctgggaccacagacacgcactaccaagtcaggctaagtttttggttttttttggtagagagggggtttcatcatgttgccaggccggtcttgaactcctgagctcaagcgatcctcaggctcccaacgtgctgggattataggcatgagccactgcacccagccaaattgcttcattttttattactccatacttcctacataagatacttcctacacctggccaaattgcttcattttttaaaaatatattttatttaatgtgagtctcacttctgttgcc

SEQ ID NO: 31366 - DNA, 405 bp, Homo sapiens
gtaatacgactcactatagggcgaattggagctccaccgcggtggcggccgaggtaccaggagggtattgatgtttgaggtccaaactgaaaacccatcacctccttcccactgctatagcagcgttagccctggggttcattatctagccagttcacaccttctaaagtggggctctgaaaatgtcttacttccctcacagacaaagcaattctcaagcctcctgagatcacccaccaaccagagcaactgctgtcacttggaggtgcagctgaattcttctaattgtgacacaaactcttgaaactgtaaatgctgaaagattaaatgaggttataacactcagaaggttttaccagtaaaagttagtcaaatcaataggtctttatttcatatctgtaatgg

SEQ ID NO: 31367 - DNA, 346 bp, Homo sapiens
atacgactactatagggcgaattggagctccaccgcggtggcggccgaggtacagagactaccattaatattgcagtgtgtgtcttttgtattaagttggtttctgaaaatatctctgacagatgctgctaggccaaagtgcctcccacagctgcagctctagagaaatccgcggtggatgttctcctctaacagttttctggtccctgtgacagtgcccactgcttcactactgctctcaggtggtgtgcttggtggcagtgccgtgggcatgggaggttgcggagggggctgggctatgcaaactgctgagccagaaccatccctgtggttggagcctgggacc

SEQ ID NO: 31368 - DNA, 464 bp, Homo sapiens
gcgaattggagctccaccgcggtggcggccgaggtaccctggcaaggtttgtcctgtcttggtagcagaaagaacttctcaaagtaagggcttcacactaggggagagttcaatggcccaacccagccatggccaccctgacaccatgccctgatgctagtccctgtggcctggcccacactgaaaatactgtggggacaaccaaaagggatttgcaagttaccactatctctcaccagctgtaagaccctgggcacattgttgatcctaagcctcagtttcctaatctgtaaaagggtgatattaattgttcttgctcacagaactgttatgagaattaacagaaatagcatattcagactatagcagagtgtctggcatgaaacagagactcaataaatacaggaacaatttggttattggaaacagtgaggcttggcatggtggctcacacctgtaatcct

SEQ ID NO: 31369 - DNA, 471 bp, Homo sapiens
atacgactactatagggcgaattggagctccaccgcggtggcggccgaggtactccagcctggatgacaaagtgacaccctgtccggtaaaataaattaccacgggcagataaagtgctcagcgagcccacactaatttgccacagaagggtggaagcaaattcaaggctgaaatctagctcttcatttcctgaaatcattcatgcccactctctcctggcatgaaatgctgataacctggtttcaattttaagcttaaatttacagcaaacagtgcaggtatctcagttcaatgccttggaacctcctctaaagatgattctactaacactcatttcagaagtgagtgcaaaataatttttacataaacaaccaagtaatcccacagcgcctgcatacctattataactcaaaaactaccctgcacacctgaacatgatgtttaaataccaagcccctggtatgtctgga

SEQ ID NO: 31370 - DNA, 239 bp, Homo sapiens
actcactatagggcgaattggagctccaccgcggtggcggccgcccgggcaggtacaataattagatcatggtatcaattcaaacaaagaaattgatgtcctgggaactggttatacaaatacattatttcttctctttgaaatgagtagaaggaaagggaactaataataaaatatcacattattgctctacccactaaaggcagccctgaaatttttacaaaaccagtctttcctgg

SEQ ID NO: 31371 - DNA, 415 bp, Homo sapiens
tatagggcgaattggagctccaccgcggtggcggccgcccgggcaggtacaaaaagcagggaccaagataaagcatcttgactcagtgagcttacaatctttgaaagctagggaggggagaagcacttagatcttatgctgcccccacgcaaccactatagcaggatgtcattcagcagaaagcactttcagattcatcaccacaggtgtgtggcagtggtgcttttttttttttttttctaaatccaatgatcaaggaaacatttacttgtaaatctttccgcctcttttccacatcactaaactgcatgactgcacttttacccaaataaaacctgtcttccctaaaccacaggtttagacctaggatttatgattagggaatctgataacaaaacactgatttttttgaaca

SEQ ID NO: 31372 - DNA, 422 bp, Homo sapiens
actcactatagggcgaattggagctccaccgcggtggcggccgaggtacaccagtttgaaccttagtattatcactaatgcaaatatgagcctaggctcaatttttccagttatgaaatggggctggcattattccgtgatgtgcatgttaagagaggggaaagctcacatttttgaggtcctcttgtgggttctattttgggtaggaactcacgctttgtttattcagcaatcattcctccagaaataaccttaatagcaacaagaaaaaagaataggtgttttttgagctctatctgccagtttctctatatatgaacattatatattgcaacataacactcacaatgcctttaaacatcatccccgttatacagattagaaaacagaattttcaagaaggtaggggacttgcccaggga

SEQ ID NO: 31373 - DNA, 175 bp, Homo sapiens
tatagggcgaattggagctccaccgcggtggcggccgcccgggcaggtacagaaagctactatttatgtaaaaagctaaaatataaaaaaggtatactcacacacatagagtttggtcacagtggctatccctggagagtgaaaatggtaggagggagacaaacatttcactaca

SEQ ID NO: 31374 - DNA, 466 bp, Homo sapiens
gcgaattggagctccaccgtggtggcggccgcccgggcaggtactctggctatctgggataaacagaaacaagatgctgggcaccagctgtctccagcaggcaggaaggagggggctgtgcgaggatggggatgtgagaaactaccaccaacaatggggtcaaggctacctgccccaacctccagtctccatcccacatgaaaaatttagggggaggcccctcaatgggatgtgcagaagtaaggcttgacaatgcaagggcagcggccctggggttccatgcagtcctctacatgatggtgccattgaaggcaacactctgatgcatgaactgctcccgtggttgaaagaggaacaggctcagaaaccagtactgcctgggtcccacattctggcaccacaactcactagccctgggcaaagcatcttctttcctgcaccttagtctctcttttataaaccaggg

SEQ ID NO: 31375 - DNA, 429 bp, Homo sapiens
ctactatagggcgaattggagctccaccgcggtggcggccgaggtacagttcagtagtgttaagtatattcatattgttgtccaacagatttctataactttttcatcacgcagcactgaatcgctatacccactaaacacaagttctccctcctacctcctctgggcccttgggaaccacctttctactttctatgattttgactactttagacacttcatatgagtggaatcatacagtatttgtccttttgtgacttttattgtatacttttatttcacttagcataatgtccttgaggtgcaaccacgttgtagtatgtgacaagttttccttctttattaaggctgtataatattccattgttaatttcattctttttaacggcaacatatttcattgtatgaaaggcctagtaactttttatt

SEQ ID NO: 31376 - DNA, 452 bp, Homo sapiens
gcgtatacgactcactatagggcgaattggagctccaccgcggtggcggccgaggtacaaattcaatcacatttattgggtaaatattgcactggctccaagagacagcaatgtaataagtcccaagcctactcctcctaacactctaatggaggtgggagacacccccgcaatcatccctaactcatacttaataaagatcagcagtgcacatggtgccagagattggcgccactgctgtaattatctccagggaacttgagtttctttatgaggggagtaatcagaagggttgttgaatgagtctcctgattttgagaagtcacttatttgagctttagtttccacatttgtcaaattaaattgctagagtcagtagatgatccccaagctctcttccagttctgagagtcatagaacatgcacattaacagagatggctgcagacaatg

SEQ ID NO: 31377 - DNA, 417 bp, Homo sapiens
ctactatagggcgaattggagctccaccgcggtggcggccgcccgggcaggtacaataaatgtttgataaatactggttgacttagtgacagaatgaatgaggacagttaggatctaaaataggatagagagcaccatggagaggcaggaagggcctgaaaggaaccactttcagctttatagttttccattagtctttaagttgaaggcaaagtagagggtatacatatatggttttgtcctctgcagttataagctttattaaatagaaatattgcccttgagctctctggcccaggacaaaactactgtatgtaattgaaaaacattttaaaatctaagtgacagaggaattttactctgtgaggatggttaatggagaaatcactacaatctaactaggaattttcccatcct

SEQ ID NO: 31378 - DNA, 345 bp, Homo sapiens
  misc_feature 180, 338: n = A,T,C or G
acgactcactatagggcgaattggagctccaccgcggtggcggccgaggtacgcgggaaaaaaagggtggggagtgccctttcttgaaggaatcccttaagtgcacgtctcccgttttcttttcacatcaatgcagagtccctctgtgaatttacaacacccaacacccatgagttcagntccttaagaaggaaaatttgagcaagtattttaattggtttggaacatttgcattaaacagaggtgccatatttccaggctaacctctagaaaatttttatgtctccaaactttagtttggccctcttttttcttcctgtcaagagggacccatcttncttagtg

SEQ ID NO: 31379 - DNA, 439 bp, Homo sapiens
ctactatagggcgaattggagctccaccgcggtggcggccgaggtacaatggcttcattattgccaacttggaataagaagtagcagaggctcaaaatagtaatgtgaatgctcaatgttacataataattcaatggcgaggccaagattgggattccaattctcacatttctagccactgctcttcttttacacaataaagatggggaaaaaacatttaagcaagtttgacaggagagtgccctctccaccaacaaaaattattgaggctcaaaagttcagggatttgcagagaccattcaaatgggaaagggcaagtctcttcaacatggtggtggaaaaactggatatccacatgcaaaagaatgaagttggacccttaccttataccatatacaaaaattaattcaaaatagattaaagatctaaacagaagatc

SEQ ID NO: 31380 - DNA, 443 bp, Homo sapiens
actactatagggcgaattggagctccaccgcggtggcggccgaggtacttgcccccaggcccagataatttatttaaaaactttttttgtagagacagggtctcactatgttgcccaggctggtctcaaactcctggcctcaaacaatcctctacctcaacccccctaagtgctggcattacaggcatcagctgccatgcctggctacaaatcttaatgttttccccatggctactttttctggcgttcttttctcaggtaatggaagtgggcagagaatgatcctttccctaggctccagtgtgttagaattaaagaaagaggaaagaaacacaatggcttgatggtcgaggacaggtttattttaaagaaaacaaaccccacagtggcttctggctgagttagatcagaggcatgctctcttacagactaagagtttttaa

SEQ ID NO: 31381 - DNA, 412 bp, Homo sapiens
tatagggcgaattggtagctccaccgcggtggcggccgaggtaccagttaagatctagcttctcggttacatttcctcctccatttacagtgacatttagcatactttgtttgtttgcccagtatgaaagccaccaatcttgaagcacataggcaacctgagctgcagtgtttaggagaataaggaaatggagacatcccgtgagcaccagctctgaagtaattcttataggcctgaaaaccaacttttccttcagaacggttctcctctgatagtgtaactgggacattctctgtatcttggctctccagagcaccatctttcaaggagggtctagaagattgttgagaccaaaccgaagactctgagaaggtacctgcccgggcggccgctctagaactagtggatcccc

SEQ ID NO: 31382 - DNA, 426 bp, Homo sapiens
ctactatagggcgaattggagctccaccgcggtggcggccgcccgggcaggtactgaatccctcaaacgagatgattccttccatgtgtttctttttgcctgctcattcccaaatttagtgacaagaacacccaacttttcaagccaaatagatatggatttgaatcccagattgaccacttatcagctaagtgattctagagttactgaacaaggcttcattttctcatcagaaatacagtaaccactttgaaaggctagtgtgaagattaacaataatatgcacaacgcatgcctgctatcagcattattattcattatgtgcctgacacattcttttttgatgttgctgctgtttgtaatatcactattaaatagcataagaaggatactctgtttctcactggcaaattggaagccggcaac

SEQ ID NO: 31383 - DNA, 416 bp, Homo sapiens
ctatagggcgaattggagctccaccgcggtggcggccgaggtactttgcatacagaaacatttttcatcacttactaagtgagaataggaccctggcctagggggaaaaacaaccacagacaaaccatacttccctgagaagcaggagcatagtgctggctagtgaattgctttcacaaaccgacctcataactctgtgccttagaaaaattagaaatgggaacatttggagatcacttgggaaaacttgaaattatgaatgttaatctgtgattgctaagggaacgtggtatttcctgcctattttggctgtagtttgtctctttctcttctaattcatttttaaaaactctgctagattaaattttgctaaaataaccgttttgcacctcctcatttcctggtttaaaaacatg

SEQ ID NO: 31384 - DNA, 430 bp, Homo sapiens
  misc_feature 77, 78: n = A,T,C or G
ctatagggcgaattggagctccaccgcggtggcggccgcccgggcaggtaccttccatgatgttgaggagagactcnntcctatcctcaccacaccagagagtaggtatgcaggttgccaccagtgttctcctccctacccactccctcacttttcttttcattggttcagtagaaggaggggctgtgcagtaagtctgccgcttgagcacagggacagccgtcactgcagtgctggtctcctgttcttggaggcacctcagtctccttgacctcttagacaccctcctacccccaaggtggggaaggagcaagcagaggcaaaatcccagccctccttgttaagactacagtgactttcctcctctcccttctccgtgtccgtaatgcatagctggaaggaagtgtctgggtgggtgatgccagtagct

SEQ ID NO: 31385 - DNA, 446 bp, Homo sapiens
gcgaattggagctccaccgcggtggcggccgcccgggcaggtactaaaaatacaaaaaattggccaggcatggtggcacatgcctgtaatctcagctactcaggaggctgaggcaggagaatcgcttgaacccaggaagcggaggtggcagtgagccgagatcgcgccattgcactccagactgggccaccaggagtgaaactccatgaaaaaaaaaccaaaaaacaaaaaaaaatgtgtatcttattacagttgagtccttttgtgagacgaacattcagtgtttgctagattattctaattagctacctttgtatggttaggttagcatggagctgaagataaatgtcccgtttgaaaaaatgacagcccttcagaaaactctggcagtttacagaagaaatacaaatggccaataggtatataaaagttcctaacaagtgaat

SEQ ID NO: 31386 - DNA, 465 bp, Homo sapiens
gcgcgtaatacgactcactatagggcgaattggagctccaccgcggtggcggccgcccgggcaggtaccctgagaacagcaataatgcacaaacattactattccaacagctgcattgaaacacccttggtaggattgggaaaaagatggattattgccatttggacactccaggactgtccattaatactcctgactaatggaagatgataaagattgggcaagaaaaatgactgcagcaaacgccttggcatcttcaacttgtcacctttagcaagaggcctcttcaacagttcttggactgtgtttggcagccaggcactctcagaacggcaaggagacacagctaacatgatctttgcaatgcaacaaaacaagcgatcttgaggcgacagagtccaaaagatgacagaaaattcatccaactcctgaagcatgtgatgccaccagaaagccttggcaaca

SEQ ID NO: 31387 - DNA, 316 bp, Homo sapiens
  misc_feature 293: n = A,T,C or G
tactatagggcgaattggagctccaccgcggtggcggccgcccgggcaggtacagtagtgcactcttggctcactgtagcctcgacctccggggctcaagtgatcctcctgccttagccccacaagtagtgggactataggcacacagcaccatgcccatctaagtttttgtattttatgtagagacaaggtttcaccatgttgcccaggcttgatcttgagctcctgagctcaagtgatctgcccaccttggactcccaaaatgctgggattataggcgtaaaccaccatgncctggcccttaaatccaacttta

SEQ ID NO: 31388 - DNA, 386 bp, Homo sapiens
atacgactactatagggcgaattggagctccaccgcggtggcggccgaggtacgatactacatcatgtgtggcttgagtaacagctggcatagttggacttttccttctttgtgccaccaactccatctttggataatattctttaatcttattgttctttatttacctttttttgtttgttttttgttttttttcttgaagagtgcaggcttctgaatctctgtcctcaaaccacctgaaattttctaaactttttctaattagagcattttagaattcttttttttttaagtaaagatgttgctgggtgtggtggctcaacctgtaatctcagcactttgggagtctgaggcaaacagatcaccaggtcaagagatccagacca

SEQ ID NO: 31389 - DNA, 465 bp, Homo sapiens
tacgactactatagggcgaattggagctccaccgcggtggcggccgaggtacttttttttttttttttttttttttttaaatagagatggggtctcactttgttgcccaggctggtcttgaactactgggatcaagcaatcttgctacctcggcctcccaaaatgctaggattacaggggatgaactactgtgcctggctaatcaactattttttgtcaatcaactctttgagttattgaagataacctgatatgaagattatccaaaaccatctacatgttctgatgcctgctccaagcatccagtgcaatcccctcccttctggagactgaattccctttttaaacagaagcaaagcatgcacagccatccccctgtttctaaccccccacagagcttattcctccaggtgaaagatgggaagctggatctcaatgtgaaaaactttgaaccattctgagaat

SEQ ID NO: 31390 - DNA, 421 bp, Homo sapiens
gcggccgcccgggcaggttcaagtcagtgcttttttggtttccctatgtcagaggctgcctccagatgtcccatatctctgcaaggacaaccaaccttgggcgacagagtgctcagaagcccagccaagtgagggaggagctcatccttcatctcactcaagccactgctggtgtttacatggcacatctgctgacacccgtgggaagaacacagaatggagttcctggggagggttaaaggggcctggccatccacagcagcagttctggctgtggctctactacaggtggctggagctaaattggcccttctgagcttcagtctcactgttgggaaaatggggagactgtgctgaatcacctcgtcactctttttccccacaaactttttgcacaaaaaagtgaggctggtttaactag

SEQ ID NO: 31391 - DNA, 401 bp, Homo sapiens
ggagctccaccgcggtggcggccgaggtactgtgttgtaagagatgcaggttagcagaaaccctccacatgagatctgctttaagactgacccaagcctgaaacgctctctccctaagtgatccatgtccctgcggtaataccataaccactaagctaacacactcactgtaaaagtgttgcttctccatgaagcaccaagacttgatgaccatttgcagttctcattaactccactaagaccctaaaggctaaatgacaaccaagcctctgtcactctgcctgagtggatttaccacaaatatcaaatctgttcaatctattataagagctaaaaaggagaagcacatgaaatcacatttcattcttagctcttttattttcccatttttcatttagaca

SEQ ID NO: 31392 - DNA, 401 bp, Homo sapiens
ggcgaattgtagctccaccgcgccggcggccgcccgggcaggttcccagaggacacagttgaaatgaggctcttttaggaaaaactaggctgtttaatatccatattgagtagctttgcaagttactttcacaaacttccctacagaattggttctaacagaactgttcaaggccaaggatttgttttttctgggtctgggggagtcatctttataattttaatattccattagaatgccttgacgctagaaggagggtccatctcaatcacatcaataaattgatcccaacctttataaaaataagcttggatagaaaggaaaatccgaagactaaggtagtctggtagaatactagaaggagacatcttttaagaggaggacaagaaaaggcatgaaaa

SEQ ID NO: 31393 - DNA, 424 bp, Homo sapiens
aattggagctccaccgcggtggcggccgaggtacttcatgtccatcatttctatttcacatttggatcttgctgggttgaaaaggatctgtcaatcttttgaattctttaacagtggtttcgatttcaacttggcctactgaaatcaaagccaagtgtctgcagagacagcgggctctttcatgactgtgaagggatgataaagggaaacctgtcattttacctcttataaatggaaaaaacagatgaatctggccttctcttgtttatccattctttcttttcattcctcacgtccttttgcttcacttcacaacccaggaattcctttccctaaaggggaaagtgtgatcatgggagacagtgtttcttgggggttcaggatgggatctctggagacaaactgtttgggttcaagtccagca

SEQ ID NO: 31394 - DNA, 414 bp, Homo sapiens
ggagctccaccgcggtggcggccgcccgggcaggtacaataattagatcatggtatcaattcaaacaaagaaattgatgtcctgggaactggttatacaaatacattatttcttctctttgaaatgagtagaaggaaagggaactaataataaaatatcacattattgcctacccactaaaggcagcctgaaattttacaaaacagtcttcctggggtcgtctcgatggtgagatataactgcctttcataatactagaagtactgagacagaagaagaggctgggacccatctggattggctgtaggtaaatttgtttgtgctgggggctgcgttgggactgcttgacgcaaaaacacaacattggtctgagtccgaggtgtcccatttgatattggggcctgggactggcct

SEQ ID NO: 31395 - DNA, 234 bp, Homo sapiens
atagggcgaattggagctccaccgcggtggcggccgaggtaccaagtggagagatgggcagctatagagctattttaagcaaaacaaagtttccctccaaaatgtccgcatcctaatctggaacctgagagcgcgttatgttatagggcatagaggaattgaggttgcagatggaattaaagttgctaattaagctaaccttaagatcagaagaggaacccttggattttctga

SEQ ID NO: 31396 - DNA, 441 bp, Homo sapiens
  misc_feature 303, 314: n = A,T,C or G
agctccaccgcggtggcggccgcccggcaggtacctttctatatttagattctatctttgtcaagcaagatgacttgtttgacagggctctggtttttcatctctgaaaagctactcatccacagagcttgggattgaggggagaggaaagggaggagatctgcttctctccccaactctgaacagatgggatcagaatagggcccttctacatccctagccaagatgcctgggccttggcagttgtcccaggacatagacaatggggtctgatggcagcttctcagacctggctttccctgngcaaggggctnttcctgaggctggcaatgccatttcttcagactcagaaaagggatttagggagagggaaatggtgactgcaatgaggcaactcttgacagcttaccctggaaaactatgacacagcttgtgggagcc

SEQ ID NO: 31397 - DNA, 452 bp, Homo sapiens
tactatagggcgaattggagctccaccgcggtggcggccgaggtacatgtcacccagtaattccctgcacagttaagattgcagcagaagaagccagggctgagactgggccctctgagtatctgctgtgggacacaggctagcatgcccatcacaccgacccagacaaatgcatgtatcttttgtgagacatagtgagtttgagggattctgtggcatatccaggtgatgtttacttactaggccactggaaatacaagaataaagcctatagtagatctttgagtgaacgatgtaaattttgaaatcatcaatatatgagagataggtaaaacagtataagcagaggagaccactagggaataaatgatagaatcagaagaatagaaagacattgcttaaggcaaaacaacttttagtggatagagagagaaaaagaaagctcaagaaag

SEQ ID NO: 31398 - DNA, 455 bp, Homo sapiens
ctactatagggcgaattggagctccaccgcggtggcggccgaggtacctctggaagtgtgggtgaagaaggcagctaaaataaggaaagctagttaaacctatttaaaagccagtcagatataatagtaaaattgtataattagtatactcagagataaaagatcacgtatccatgaagcaagaacagactactttaaaatagaaattcagggtgggcgcagtagctcatgcctgtagtcccagcactttgggaggccgaggcaggaggaacaaacacttcagctcagaagttcaagaccagcctggtcaaggtggcaagaccccgtctctacaaaaaaaagaaacaaagaaagaaaaatagtagggcatggtggtgcttacctgtggtcccagctacttaggaggctaaggtgggaggatcacttgaggacaagaagttgaggctgcagtgagc

SEQ ID NO: 31399 - DNA, 456 bp, Homo sapiens
atacgactactatagggcgaattggagctccaccgcggtggcggccgcccgggcaggtactaagattctatggtaactgcttgtatttaagtttttctcccacctgaaagagtataaagaaatgttggctctaggtttatctttttgctgattatatcatacactcattcatttaaaacatttttaacagtatacattggagcaccttattttctgccagacaccttttaaattcttcaggttcttcagtgaacaaaaagaccaaaattcctgctctggtgatgtttgtggaggcagagaaaaaacactacaggccaggtggggtggctcacgcctgtaatcccagcactttgggaggctgaggtgagtagatcacaaggtcaggaaatcaagagtatcgtggccaacatggtgaaaccccatctctgctaggaatacaaaaattagctgggcatg

SEQ ID NO: 31400 - DNA, 691 bp, Homo sapiens
ctcactatagggcgaattggagctccaccgcggtggcggccgaggtacatcagcgccacaccgcagggctgtccacggtgagctatgaggctggagatggttctggagcagtgaactgcagaggaaagaaggctgccctacccctgggccaccaatcactagcagtgtgacctccggcagcttcttctcctgccaaatggggatgtttgcttcactgacagaaacacagtgggtgaaccgggagtgagcggcccacttggctgaccacttaccagcatttcggcggggcctcgtgctgagacctctccccaccctgacggaacagtcagttggaaaacagccagtagttccattcccactaacatcttatagtgaccaataatactctaccataactgtcgaaaatcctaaaaactctttcaaccctgagattctacttctaagagttctgggccaggttcggtggctcacatctgtaatcccagcactttgggaggctgagatgggtggatcacctgaggtccggagttcgagctcagactgaccaacatggtgaaaccccgttttcactaaaaatacaaaaaattagctgggcatggtggcgggtgcctgtaatcccagctactcaggaggctgagacaggagaatcgcttgaatcagttgcagtgagctgagatcatgccactgcact

SEQ ID NO: 31401 - DNA, 437 bp, Homo sapiens
cactactatagggcgaattggagctccaccgcggtggcggccgaggtactgatgctattttcgtgcatatgtctagtgtatatgttttaaggcaaactttctttgtgtgttgggtgtgtatgtgacacgaatggggacagcatctgtatttctgagcatggattgatgtgtggtgtctgtatgtatcttggaatggaggagggagattgaagaagtctggttgtgagcagcagaaataatttccaaagttgagtgacatgactctaagatgcccagtttctcggcctggggtcagcctgggtgatagctcagtctgtcagaatgaaaggaaacacggtgcttccttgctccaccttttcacaggccagaccacacctttttcatcctgaacacaaggatttcaagggcttttgttacctcttcctacatttcctgcc

SEQ ID NO: 31402 - DNA, 445 bp, Homo sapiens
actactatagggcgaattggagctccaccgcggtggcggccgaggtactttttttttttttttttttttgagacagagtgttgccgtgtcacccaggctggagtgcagtagtgtgatcttggttcactgcaacctctgcctcccaggagaatggcgtgaacccgggaagcagagcttgcagtgagccgagattgtgccactgcagtccgcagtccagcctgggcgacagagcgagactccgtctcaacaaaaaaaaaaaaaaaaagatgaagggttttgtaaagatgttcactttaaaagagtgtttctttaaaaggtagttaacatattagtaacaaggaaattttagtaagacttaacccaaagaagtaataaaaaatttttattggaaacatttcccagtctatcttaattagcttttacctttaaagcccctgccctacat

SEQ ID NO: 31403 - DNA, 395 bp, Homo sapiens
  misc_feature 303, 313, 317, 318, 356: n = A,T,C or G
atacgactactatagggcgaattggagctccaccgcggtggcggccgaggtacattttacactgtcagctatgggttcagtcagatatgcccataaattcatttatgaagaagagctccctaaacttctaatgattttttcctggtggttttatttagctccaaaaacttatgtttttttttcttaaaaaaatcccataaaaatattcattatcaatacatcatattgatgatatcactcaagaaggagatgtctcactctaagcattattataaaaattcacaggccagtccacttttctangaaaaatatngccnnagtgatccttctagcctttttgcatttcctgggattantttaaaccaggcttgcctgagcaggcccttgacaacctg

SEQ ID NO: 31404 - DNA, 298 bp, Homo sapiens
atagggcgaattggagctccaccgcggtggcggccgcccgggcaggacacatacatgtccttactttacagggagactttcagcatatttgttagccaatgtagcacctcattgatacttcaaactaggaaataattatgctagcactttcatatctatgaaatgttttgtgcttaaactgaagttactgaatgtttataaacaaaaacaaaaagttcagtaaggggtgaagatcctattgagatgtcttaagcaattaagaatatgtctttgcagaacacttcaatttttttttttt

SEQ ID NO: 31405 - DNA, 181 bp, Homo sapiens
agggcgaattggagctccaccgcggtggcggccgcccgggcaggtactaagttcaggagacactgatttgtatattgaaaaataaagtattattgtctacaatggtagttgtgaaagttggcagctgattggaatcactgagggcattttttcaaatagtggtgcctgggtccgagccccc

SEQ ID NO: 31406 - DNA, 408 bp, Homo sapiens
tatagggcgaattggagctccaccgcggtggcggccgaggtacctgaacaaatcccatcaaggacagattctcagtcttgaagaggcagcacggtaaaggggaaagatcatgagttttggggccaggttcccttggatattgtggggtccccacacttctggatgatgttggataactctttgagacttaggctccacatctgtaaaatggaaatacttatttttcagagttgtcataaacactaaatgatttgacttatatcaacctaattcctactggctcattgaactcagctcagctgtcccctctgttcggatgccttccccagtgggtgcttagttaggtattccctgcttggataccactgccaagcttcttacacaattcccttctgccattaacactca

SEQ ID NO: 31407 - DNA, 448 bp, Homo sapiens
actactatagggcgaattggagctccaccgcggtggcggccgcccgggcaggtacatcattagaatcctacctcaaacatgcaatggtgggaaaagatttacaatttaaaatttaaatagtagttaagctaaatttattttggaataatttaggtttccctggataatttttccacgttcatctcaacattatataaattcattcacagtcactcaggatgagtaagtaatgcctccaaaacagcctggtcgtgggttcttctgagtccatctggcttctggctagaagactggaatgactcataaaaatgaagcaacctgaggtcacctactccaggtcttttaaacagaattgccaactgcttaccaggtggttccaatttccgagaatacttaaaataagggagaaactcattctagatacaccattttattttcatattgtctc

SEQ ID NO: 31408 - DNA, 564 bp, Homo sapiens
ccgaggtactctatggtctgttagtgtttctctgtgttttcctattgtgctgatgtgagcttgcactgcttttgtaattaaggataaattttatttatgcatttatgtatttatgtatgtatgtattaaaaaaataagggttgattaaaaatagttattaagtggagacacttaagaataatacacacttctctaaataaaacggaaaagcctacttgctgcttgcttgttgcaggtagaattgacccgatcccctgcagaaatccctgccctctcctctctgtcccaggaatgccacgctgcccttcacgctggcatgctgcctgtcggttctgtgctattccttagtgacctgtagattcattatctgtgtcgccacaaccttgtccttttagatttgcatatgcgttaagtccaatcattaaatccagtgatttttcaaaatagcaaaagtaggtgtataagtttccaacatgtgtataatttgaagctgaggaatgactaagaatgaaagaaactcagtttgttccactcagtgggctgcatgtgcctatggagtttcac

SEQ ID NO: 31409 - DNA, 321 bp, Homo sapiens
cgactactatagggcgatttggagctccaccgcggtggcggccgcccgggcaggtactacgtcaggtgctaaggttaagatagtattttccttcactgactcctcactccgagaatccattttacagcttcattggtttgggttattccaattttttgatgtgagtaaataaatgacttctatttgcccaaaataaagcttatataggccttataaccatgcaaatgtgtccattaagttggactcggaatgagtgaatgagtattactgccagtgtgtgtgtgtgtgtgtgtgtgtgtgtgtgtgagcctctgtctgttt

SEQ ID NO: 31410 - DNA, 374 bp, Homo sapiens
atacgactactatagggcgaattggagctccaccgcggtggcggccgaggtactgggattataggcgtgagccaccgcgtctggcctctaacgagatatttctaaaggttaggccttcagtcaagaattttaaagctggatcttagaggttatctaaactaacctctccatttcatagataaggaaagtgagtcccagaaaagcactggtttggacaagttcagaaagctaaacagtgactgtggatgtatgattctgtctcttaactcctaatccaaatgtcttctcactagataaggctgtgccttctacatttgaaggctcaaaccccatggatggatggagggaaggatgggttggagggaatggatgga

SEQ ID NO: 31411 - DNA, 232 bp, Homo sapiens
tactactattatagggcgaattggagctccaccgcggtggcggccgcccgggcaggtacatttgttgggggcgtgacattaacatataaccacttagagtggacatgcagttagagaaaagtcaatgagctggaaccaagctgggaattccaacatgtagaagttaaacacaagaggaggagccagcaaaggaaacagaaacagagcttccagcaggtggggggcatttgga

SEQ ID NO: 31412 - DNA, 418 bp, Homo sapiens
ggcgaattgtagctctcaccgcggcggcggccgaggtactatttttttttttttttttttttttttagagatggggtcttgctgttttgcccaggctgatcttgaactcctggcctgaagcaatcctcctgtataggcctcccaaaatgctgggattataggcatgagctactgcaccctgcctcttgtttttaagatagattcctcatgctaacagaataagctattagccacatttctacaaaggggattttaagtcaggtttattctctaaaaatgagaggcattaaaacaaagatagttctttaacaacaacaaactaataatttaaatttttttgctgtttactttatgaaaaggggagaatgtcaacatttaatttttatggctaatagtctatggaattaataataagaga

SEQ ID NO: 31413 - DNA, 417 bp, Homo sapiens
ctcactatagggcgaattggagctccaccgcggtggcggccgcccgggcaggtacgcggggaggctcctggggtggagtccaaatcactcattgtttgtgaaagctgagctcacagcaaaacaagccaccatgaagctgtcggtgtgtctcctgctggtcacgctggccctctgctgctacccagccaatgcccagttctgcccagctcttgtttctgagctgttagacttcttcttcattagtgaacctctgttcaagttaagtcttgccaaatttgatgcccctccggaagctgttgcagccaagttaggagtgaagagatgcacggatcagatgtcccttcagaaacgaagcctcattgcggaagtcctggtgaaaatattgaagaaatgtagtgtgtgacatgtaaaaacttt

SEQ ID NO: 31414 - DNA, 458 bp, Homo sapiens
atagggcgttttggagctccaccgcggtggcggccgcccgggcaggtacctcctttctgtgggttttcccttgactagaatacccttgccctagcttcttgtcccaccttgcctggatatgtggactactcattcttcacttccaggatgctcctacccaataaactgacagcagttgtgcctgttaaaccctctcacagcacatgaacctttctttcaaagcatttatacgagtttgtaattgtcattttggcctccatcattagatataagcttcacgaagaaagaaaccatttcattccacactgtcactgcagtgcctacacggtgcctacatcccaccaccgtaaccctggtgcctacatcccaccactgtaatcctggtgcctacccagtgcctacattccaccactgtaaccccagtgcctagcagggcacttggcatacatctaccactg

SEQ ID NO: 31415 - DNA, 465 bp, Homo sapiens
actactatagggcgaattggagctccaccgcggtggcggccgaggtacacaggccgggcacagtggttcacacctgtaatcccaacactttgggaggctgaggcgggtggatcacaaggtcaggagatcgagaccatcctggccaacatggtgaaactctgtctctactaaaaaatacagaaaattagccagtcatggtggcacgttcctctagtcccagctactcgggaggctgaggcagaagaattacttcaacatgggatgtggaggttgcagtgagccgagatcgcgccactgcactccagcctggtgacagagcgagaccccatcttaaaaaaaaaaaaaagttgtatgtgacagctaaccataataaaaaaaaaagaaagaaaaaaaagagagagaaagtagggacaacactaaatcattagtaatttgagcacatttcctccaaggcatatgctattt

SEQ ID NO: 31416 - DNA, 440 bp, Homo sapiens
ctactatagggcgaattggagctccaccgcggtggcggccgcccgggcaggtacgggacttgtctccaggagacatgtctgggaagaagagctagactggagaatcatgagcatgttcaggtgaaaacatgtgagtggataagagcaagagggtgagaacacagaccaaggggctaagggacagactgtgttcagtatttgggtatggaacttgtttttgctacttgctagttctaagaccaggctcagactctaacttctctgtaatgtgggaataatgatagcacttaccttataagattttacaaagattaaaatatcatatataacagcacttaacacaagtaagaattcagtaaatgttgactgttattactattgtctgggtcgttataagtttgaagacacaattgcataaactgtcatcattaaaaggaaaa

SEQ ID NO: 31417 - DNA, 279 bp, Homo sapiens
  misc_feature 41, 52, 53, 71, 128, 133, 138, 139, 161, 165, 177, 198, 204,205, 206, 208, 217, 222, 240, 242, 245, 263: n = A,T,C or G
ccaccacgagattgaaaagaaaaacagcaaggccaaaagancgaaagacganngagagggggccaacaccncacaaagaaggttgaaaaaaaaaagcgtttgcaggagcggcaccccctctaaaaaanaaaangaagnnggggagggaagaaagaacccanacanaagaaaaagganaaaggagcagggaaaaacccnacaccnnngnaaggcaccngaggnggagcgaggagagacccnancgnaggcagccccacaacaanaaacacaggggacgca

SEQ ID NO: 31418 - DNA, 253 bp, Homo sapiens
actatagggcgaattggagctccaccgcggtggcggccgacgtacacctaaactccaccgcagagcaagcaaacccaatctggcacacagcttttgggggtttcctctcctactatggcccctagccctgtgcccaggacatagtgaagggtcagtaaatgtttggctacattgatctgaaaaatcctcactaacactcctccagcacatgcacaggtctgttgaacaaacatatcccatagaacccaacgga

SEQ ID NO: 31419 - DNA, 221 bp, Homo sapiens
tatagggcgaattggagctccaccgcggtggcggccgcccgggcaggtacaggccaggtgagccaccgcgcccggcctacacagtttgcattttaaaagattactttgtatacccctagagaggttcccccccatggaattctatattgtctaactgttttctgatgacataaaatttcttcctgagttctttggaaattcaatttgaaagtgaatggaaa

SEQ ID NO: 31420 - DNA, 370 bp, Homo sapiens
acgactactatagggcgaattggagctccaccgcggtggcggccgaggtactgggattataggcgtgagccaccgcgtctggcctctaacgagatatttctaaaggttaggccttcagtcaagaattttaaagctggatcttagaggttatctaaactaacctctccatttcatagataaggaaagtgagtcccagaaaagcactggtttggacaagtacatagagctaaacagtgactgtggatgtatgattctgtctcttaaactcctaatccaaatgtcttctcactagataaggctgtgccttctacattagagggctcaaaccccatggatggatggagggaaggatgggtggagggatggatgg

SEQ ID NO: 31421 - DNA, 468 bp, Homo sapiens
ctactatagggcgaattggagctccaccgcggtggcggccgcccgggcaggtacttttttttttttttttttttttttttaattttttgtagagatggaggtcttggtcttgccattttgcccaggctggtctcaaactcctggcctcaagtgatcctctcgccttcgtcttccaaagtgttggatgggattacaggcgtgagccatcatgcctggcctacgcattaatatttaaactgtttttagttctgttggtcacttccataaagattaatatggttgtatctatagctcatgagataccagctttaagagctcttagttcccctttccttccaacttttatttaatttaattcttttagtggttaccttcgtaacattagatattatgttttcggccaacaaacagaatatcatatcaacagttttctggcagtccagcttccatgcctattttttccccgcg

SEQ ID NO: 31422 - DNA, 392 bp, Homo sapiens
  misc_feature 256, 271, 279, 280, 309, 310, 327, 328, 337, 344, 345, 360,362, 363: n = A,T,C or G
tatagggcgaattggagctccaccgcggtggcggccgaggtacaagaaaaaatcaaacaatcacatcaaaaagtgggcgaaggatatgaacagacacttatcaaaagaagacatttatgcagccaacagacacatgaaaaaatgttcatcatcactggtcatcagagaaatgcaaatcaaaaaccacaatccgggaggtcttgccaaagaccacctgggctttccgggcaacgtgctagagcttctgggaagcagntcgtggcccctttgngagattcnncacggcttcggattcctaccctgcagganntgctccactgttgtctnngccggcctnctggcgnnttttgcttgaggggntnnaacctcggaatgggctttagaaaacaaga

SEQ ID NO: 31423 - DNA, 395 bp, Homo sapiens
cgcggtggcggccgggcaggtacgcgggagaataacaaaagcactcgtgttacttttaaacaaggtaaaacttaaacagttttttcctccgtttctttttttatggaaataagaggcaagtgatagcaagtgggtaattcaatggcagtggtaactgaagcactgacctgttacaagagagacggaagcttctacttgagcagatacaaatactgtcatccgtggagatttgaaagaagtctttctatcactgggtagtttgagagctcattagtcttctttagaatgggtttaaacttggaaacatcaaagccagttacaaggaaacttaattttactgtgttggcagcctaagcgccagaattttgttattaaagtgtctgaaagtggcacag

SEQ ID NO: 31424 - DNA, 405 bp, Homo sapiens
actactatagggcgaattggagctccaccgcggtggcgccgcccgggcaggtacttgcccccaggcccagataatttatttaaaaactttttttgtagagacagggtctcactatggtgcccaggctggtctcaaactcctggcctcaaacaatcctctacctcaacccccctaagtgctggcattacaggcatcagctgccatgcctggctacaaatcttaacgttttccccatggcttctttttctggcgttcttttctcaggtaatggaagtgggcagagaatgatcctttccctaggctccagtgtgtaagaattaaagaaagaggaaagaaacacaatggcttgatggtcgaggacaggtttattttaaagaaaacaaacccaagagtggcttctggctg

SEQ ID NO: 31425 - DNA, 475 bp, Homo sapiens; identical to SEQ ID NO: 31187

SEQ ID NO: 31426 - DNA, 452 bp, Homo sapiens
actactatagggcgaattggagctccaccgcggtggcggccgaggtacgcggggacagtcacagttaacatcctcattctcaatcctacccatgatgcagacagattgcctcatttcagctcaataaaacatcaccaaattcccttaggcagaaaaagggtggggagtgccctttcttgaaggaatcccttaagtgcacgtctcccgttttcttttcacatcaatgcagagtccctctgtgaatttacaacacccaacacccatgagttcagtccttaagaaggaaaattgagcaagtatttaattggttggacattgcataaaagaggtccatatccaggctaactctagaaattttattctcaaacttagttggcctcttttttttctgtcagaggaccattcttagtggcactggggaaatcttggcacccagaagaattcaactgcgc

SEQ ID NO: 31427 - DNA, 444 bp, Homo sapiens
tacgactcactatagggcgaattggagctccaccgcggtggcggccgcccgggcaggtactctcaggctggccacagtgactcatgcctgtaattactgcactttgggaggccaaaggaggaggatcacttgagcccaggagttcgagaccagcctgggcaacatatagagaccatgtctctacaaaaaacacaaaaagtagccagatgtgatggaggctgagatgggaggatcatttgagcctggaagtcaaggctgcaataaattatgatcatgtcactgcactccagcctggatgacagagcaaagctctatcccaaaaaactctcaagacaaccacaaacatctcacaccatctatatatgatgaagtaatacatataaaccagttgtttaaaacaatttcaaaattttgggtaatctctgattgcctggattatttcca

SEQ ID NO: 31428 - DNA, 456 bp, Homo sapiens
cgactcactatagggcgaattggagctccaccgcggtggcggccgcccgggcaggtactggtttggagaacttagttctctagtatcatcttcatcatcctcagttacaaatgctgacagagcatctacaacctgtgacataccatccaaacaccaatcccaaaaatgtgctatcccaaggatataagacacggtccttgcaaactaggtaaagagacaggacttaaacaatgatgtaggccggacactgtggctcacacctataatcctaccacttttggagactgaggcaggaggatcacttgaggccaggaatttgagaccagcctgggcaacacagtgagacgccagctgtattaatccattcttacagtgctataaagaatcgctcaagactgggtaatttatcaaggaaagaggtttaattgactcacagttccacatggctggggaggc

SEQ ID NO: 31429 - DNA, 414 bp, Homo sapiens
tatacgactcctatagggcgaattggagctccaccgcggtggcggccgcccgggcaggtactggagggtagactgctataacaacttttggttttggatgggaataaacagaaaaagtctcatctccagttcatttctggggagggtcaggaggtggggggtgcttggctctactcccttcatatgattttcccttctttatctccaggatcttccccatttcacggagagacatggatgagaatgaaggctgctgagtgggacgggcttatggggccagttttgaagaggcctcataccttttggccacattccattggccagaactttgtcatatgactgcccctaacttcaaggaagactgggaaatgtagtcaagttgcctgtccgggtagaaaagggacccttttctgt

SEQ ID NO: 31430 - DNA, 464 bp, Homo sapiens
actatagggcgaattggagctccaccgcggtggcggccgaggtacttttttttttttgctccagctgtcaggacctgtttattgttgaaactggtcagactatcagtctatgggttaattttctccagcattatttagtagctccagaaggagaatggataaagtaggcattgaaataggcttaaactttggttctgctggtggattcaagaaaagggaaaaattggaagagttgagagaatgggcaagaaggaggtccaaacgctggagcataaacagagaaaaaagacagaagaaagagggggtgtggataaaaacaaagggagcaaaaaattgtagatcctgatgaggttgaggaatagtggttgtaaaaactagaaggataagagtttgtgatccaaaagcaggttgtaaatatttcagaaaagggacactttctgaagaaaacatggtctgggttggag

SEQ ID NO: 31431 - DNA, 201 bp, Homo sapiens
tcactatagggcgaattggagctccaccgcggtggcggccgaggtaccccaaatgaaatggctttaaaaagataaaggacagaaatcatgtgatttgctggaacaacttccagggcagcacagtctaaatatggccaggcagagtgcgccaggtccccagccatgaacaccaagggcttccaggcacgctggctcccttgg

SEQ ID NO: 31432 - DNA, 440 bp, Homo sapiens
atacactactatagggcgaattggagctccaccgcggtggcggccgaggtacctttaggtatttgaagaactgatgatatgtagctgtgactctgtttctgaaggttgagaacctcctttttctgaggacaattcgtgccccctttcaaattgtaattgtaatcacccaaagtgctgggattacaggcgtcagccaccgtgcctggccgttattttgtctttcattcatgatattggttaatctgtatttatcaagtttgttaattttttttttttttgagatagggtcttgctgtcacccaggcttaagtgcagtgatgtggtcatagctcactgtaacactccaacttcctgggtctcaggcaattcctcacacactaacactcctgagttagctgggtactacagggcgcacaccaatgtgtgcctgggctattaaa

SEQ ID NO: 31433 - DNA, 428 bp, Homo sapiens
tatcgggcgaattgtagctccaccgcggtggcggccgcccgggcaggtacccagaggacacagttgaaatgaggctcaattaggaaaaactaggctgtttaatatccatattgagtagctttgcaagttactttcacaaacttccctacagaattggttctaacagaactgttcaaggccaaagatttgttttttctggggtctgggggagtcatctttataattttaatattccattagaatgccttgacgctagaaggagggtccatctcaatcacatcaataaattgatcccaacctttataaaaataagcttggatagaaaggaaaatccgaagactaaggtagtctggtagaatactagaaggagacatcttttaagaggaggacaagaaaaggcatgaaaacagagaacatggtcctacaca

SEQ ID NO: 31434 - DNA, 420 bp, Homo sapiens; identical to SEQ ID NO: 31121

SEQ ID NO: 31435 - DNA, 414 bp, Homo sapiens
tacgactcactatagggcgaattggagctccaccgcggtggcggccgcccgggcaggtactctgctactgaacgatgaactttagggcctaggttacacctatccactttatctcctcagacctaattctatgccttatgatatacaagggctcaaataactagagtgtcatatatgaagagcaaatataaagcactcaaaaaagccaagcgctacctctttagaacttggaacactgctgtgatctttctccattatcagccatctgagaacatttggaatagaggggtttttccatgttggccacggattcacaaatctcccatcttttcctttcttggatttagttacatcttcttctagtctataatccagtttgaagcttttcctagaaaacctagaagaatcacttgc

SEQ ID NO: 31436 - DNA, 531 bp, Homo sapiens
atagggcgaatagcagctccaccgcggtggcggccgaggtactgtgaggcactctttccccactctcccacaaccctcagcttaacacaactgtggtgattgctttgtccgttttcccatgaggaccctgagatttcaacaaggttcagtaactcacacatcgacacttccagggagctgtgttgccaggaactggcccaggtctttccctcctgggcccatcttgtccttaatctctgctgacattgatgggtttagttaccttgtcgtgtttcttcagtgttttatgccatacagtctcccttgagtagatgttctgtataggggatatcacagcttcctggtgagaactgggttaagtccagcaggatgcccgggcttagtggcactggagttgtgggtggccttgagccccaagcagtcccctgagagccctttccgatggatgtttgagtcactgagtgtgttccttcttctttctggtcaggctgtcctggccgctgcacttacaattgcaccccatccccctac

SEQ ID NO: 31437 - DNA, 455 bp, Homo sapiens
cgactactatagggcgaattggagctccaccgcggtggcggccgcccgggcaggtacagtagctctagcatttcatcacaaagtgtcaggggagagaatagctttcacttttttgtcatccctctcactttctggcctgtctttacggatgctgtcttacagctgcttatccaaagataagtgggttgtggtgatactgattacagctgcttatcagaagataatgggttgtagtgatactgattagcctacggcataaattaagtaaaagggggaggaaaaacagttttgtcatgactcaggaggaagatgaggcacactgtcacttttgagctctgtgttttggcaggtctgccatgacccacgtgggaaataaagggctcccttccgcttgtgtttcaggactactcaccaggggattctccaccagggacaccgccagcgtccccaccgtc

SEQ ID NO: 31438 - DNA, 435 bp, Homo sapiens
ttggagctccaccgcggtggcggccgaggtactttaattttttttttttttttttaagcagagatggggtttcgccatgttgaccaggctggtcttgaactcctgacctaaggtgatccacctgcctcggcctcccaaagtgctgggattataggtttgagccaccacgcccagctgtgttatgttttaacacatgtgctatgtcgctaagtggttggaaatatgaaaatgagttgatgtgttcttataataagacatctgctttagtatacattattagcatgctcttccactttggaatttttattttatattttcacttaggcaaaaatactttcaaccattaaagtgggtataaaagcaacagttgcttttagaaatttactcttttcacttgctgggctggtttggtcacttgttagactataaaagtga

SEQ ID NO: 31439 - DNA, 464 bp, Homo sapiens
atacgactcactatagggcgaattggagctccaccgcggtggcggccgcccggccaggtacattttattcatccgtcgtttgggtcagggtctgcgggcagacacaggtagctactgccctgttgtgagaagcaatacctcaattggtgccccatgtgaggagagctgtgtgaggacagtcaggggtctgcagaaacagaccttccgcagtcggagcccctttgtaaggcaagctttgaaggaagtgtaaggaccgctttcatgaggaaagctgcaaaggaagcctgaggaatgcgacgggcccccgggaaacaaaggtgaagaaaaaccgcgtggtcaagtcagtgagtaactagtaagtcattggtgcccactcaaggttaccaagttctggggaaagttggttcaagctgagatttcattatgggacaacagttattagcacagcagaaacattatataaa

SEQ ID NO: 31440 - DNA, 429 bp, Homo sapiens
ctatagggcgaattggagctccaccgcggtggcggccgcccgggcatgtactcttctctcctcccccaaaagccctgtatgagtgtgtctctggctgcgcatatttaagtattaactgagataaagcatgagctcagcaggggctttctaatggctaatccacagtaacccatttaaaaaatcttttttttcccacaagaaaaagaactagtagggaaaggacattttggtggttgtttgaaagaagtgtcactcgggtatttgggggaggaagagtggtgtctcaccattgagttttttgtttggtggatgcctcttttccaggtccagttgctgaatccaggacatggagtggagacagggagtgggtacggaggtgccattaaagttctaagcaagttcagcagtgtttaaagaatttaaacccac

SEQ ID NO: 31441 - DNA, 307 bp, Homo sapiens
tatagggcgatttggagctccaccgcggtggcggccgcccgggcaggtacatgggactacaggcacgccccaccatgcccagctcatttttgtatttttagtagagacagggtttcaccatgttggccaggatgatcttgatctcttgacctcatgatccgcccgatcttggcctcccaaagtgctgggatcacaggcgtgagccatcacaacctggggccctctaatttaattcctctttaaaagagtagagtaaaaactattgatagggccaaaaattattttaagttaaaatctttttaccttt

SEQ ID NO: 31442 - DNA, 676 bp, Homo sapiens
gtaatacgactcactatagggcgaattggagctccaccgcggtggcggccgcccgggcaggtactttttttttttttttttgagacggagttttgctcatgttgcagtgagctgagatcatgccgctgcaccccagcctgggtgacagagcaagactgtatctcaagcaaacaaacgaacaacaacaacaaaaaacctctaagtaataagtctgtaactttacaccaaaggggatttttcttcagtaattctataggatttttgggttctttacattaagttgaatacaaacataacatgagttacaaaagattaaaacacagaagtaatattaaggagcaataaatgtcatatgaaatccctaagtggaaaataatagatattctattttaccattattttaaattagaaattatttacattaaattattttaaaacaattattaccactaccagtatgactcgactgcctatgatcagaaaggacagaaaaaagatgtctgaaacaactgctgatttagacttccattctttttgagttatattcctgctaatgatatgtgtttaacattatatgagtaagaactaaggaatttaatctaagaaatggaagttacaggtgcattaaaagaaattagtaggtgttttttcagcctaaaaaaaaaaggccttatga

SEQ ID NO: 31443 - DNA, 238 bp, Homo sapiens
tacgactcactatagggcgaattggagctccaccgcggtggcggccgcccgggcaggtacacacagtggcagggcagccggaaaggaggatgtggttttccttttccttttggaagaaaagggctcagtcagcctaattgtcccttgaagtgcttccaacttttcttttacgagctttaattggtatgtttgcatgcagcatctgggagtttctttaatatctacatttatgttggac

SEQ ID NO: 31444 - DNA, 422 bp, Homo sapiens
gcgcgtatacgactcactatagggcgaattggagctccaccgcggtggcggccgaggtacctcaggaggtctgcaagtgtgtggttaggtaaaaactgagctgtgcaaactcactgtatccaagctcttctcatgagagagcggaacaacctggcaagcttaaaggcaagtgttttcgttcttttaattaaaaagggctttgaccaaattttaccatttaaacttagccccagaaaccaaccagtcccgggtaagtgttcgttgcaaaatcttgcagttaacaaaaagaccattctgataagactacacgtttggtctccagtcctagcaagcgtcccattctctccacattcttatcaattgtagcttgacatgttatctccttggcacattccatagggaagccagcctctttctccatc

SEQ ID NO: 31445 - DNA, 429 bp, Homo sapiens
tacactactatagggcgaattggagctccaccgcggtggcggccgaggtacacttgaggaagcttgggctcagaggctttatgttaattccaacagtttttgcaacaggaggaggagaatatctgtccaggagccctaatcaagactcagcaggaagctggtggcttcctttccttccttcttttgcttccttcctgttcttcctgtgcttcctttcagtccttccttctacatatggggcccatcgcattcccactgactcagatgctgaggggccagactgaagggacagtggccattgcatcaagtcagagaacggatctgacccatctagtagaagcttattgttttggcagaagcacaagctcttagaggtgcagctgcagggtgtgacctattggggacattgagctcagtgaccatgggccc

SEQ ID NO: 31446 - DNA, 453 bp, Homo sapiens
tacgactactatagggcgaattggagctccaccgcggtggcggccgcccgggcaggtacacaaatcaaaggaataccatatttagcaccataggtgactaattaggcaaatgagcaagttttaagagtctggcccaatttttaaagtgtgtgtgtgtatcacaatctctctaatgctatatgtagtctaggcaatctggcaacagattcctaactattgttaggaaaatgcaagtatgatcctgttattgctactgctttcaacccagaggtaatgaggaaaagtccaagttccttaacatagacttcataggcctgcatgatttaggactggttatcaccaccacctcagagaaactcctgacctttaatcaaaatgtgccttgtggtaaactacttttcatttaagccatgattgcgatttataattccctatcttgtgataaatgtccat

SEQ ID NO: 31447 - DNA, 402 bp, Homo sapiens
  misc_feature 327, 328, 341: n = A,T,C or G
tactatagggcgaattgtagctccaccgcggtggcggccgcccgggcaggtacgcggggaaaaagggtggggagtgccctttcttgaaggaatcccttaagtgcacgtctcccgttttcttttcacatcaatgcagagtccctctgtgaatttacaacacccaacacccatgagttcagtccttaagaaggaaaattgagcaagtatttaattggttggacattgcataaaagaggtccatatccaggctaactctagaaattttattctcaaacttagttggcctctttttcttctgtcagaggaccattcttagtggcactgggnngaaatcttggcancccagaagaaaattcaactgcgcctcactttgcaaaaataccaatggggcctacattggat

SEQ ID NO: 31448 - DNA, 540 bp, Homo sapiens
gcgaattggagctccaccgcggtggcggccgggtactaaccttagctagtaagtaggaaggcttggaatcgaccccagctcttctggcttcaaagctcctatacatggtgccaggacatataatccagtcctcctatcttcccacccagtggctctttgctgttataatgtccatcatccctaccctgtctttccttctccaccttctacttaggctggattcagtcctaattatttaccaagcaacagtgatgatgaagctaataatcatcatacatgtttgtgtgtagcctagttcaacctttaattactgctctctccccagcacctagaatagtgcccagcccattattgggctgataaatatttgttgaataaatgaatacatgaatatattcgtatgccttttgcagacccctcttctcccccagtaggccttactcagaacaagaggagcggtagctaaattaggggaaggaatgccaagggctgaaaatcctctgggttggcaattgtaatcctgtggacattggtaatacc

SEQ ID NO: 31449 - DNA, 421 bp, Homo sapiens
cgactactatagggcgaattggagctccaccgcggtggcggccgaggtacagttttgtaagtaagatgattgaaagatctactgagtgccgtggagtcacagagaggaacaactaccctcaggctatggagttcagtgaaggctgcctaaagagaggatgagttgtcagctgagacttacagaatgaaagaaatgtcctagttgtttagcttgactgtaaacaaatggggcttattacaggattctgtatgcatttttaagtctgacgtatttttcctcaaaagatgaggatggtaaggatgatatggggggaagggcactaagcagaaggttccttattcttcttactgccctgtttctcccctgctgtcttatttataacctcttgtttaatgacaagaatttctatagaacaaattat

SEQ ID NO: 31450 - DNA, 445 bp, Homo sapiens
atagggaaatgggccctccccgcgggggggcccgcggtccaggtccggttgtaagtgcctgttagtaggtaattcagccgaccttttctgattctgctttgctgcctgatttcaaaagagttgccctatactggctttcagtcacagcttgatgtaaccactgcttgtttgcatgcatccccatcaattttcaattggcttctttttttttcttcttcaagttaggaagcaaaagaatcaggagcatttttatatgatcaaagatttatataaggccagctagaatcaagccaaatgaaattcagctggaagggatggtaaaaaggctcacagaacttgtggctgccatagaagtgagtgttctttaaattaaagagggttcagctagcagcggcaactctgactttgcattcatattgaagcaagctctccagccattctgggc

SEQ ID NO: 31451 - DNA, 460 bp, Homo sapiens
actactatagggcgaattggagctccaccgcggtggcggccgaggtactattgatgtttttttcagtatttcagtcaacctttctttctttccttctctccttctctctctctctctctccagcctgggcaacacagcaagactctgtctcaaaaagaaaagaatttccatcccctaaaatgtttccttgtgccctttgcagatgatctgtgcccacacgctatagtttgataccacctgtagtgaacacagcaatatgtgttcgcaaaatgaaaagggtgcaacatgtaaacaaaatggagaaaaggccaaaaagtcagtcagggaatggaggacttgaggtaggaaaacttgtgtgcaggccagcaaaggacgatggcaatgaaggcagagttgaatagcgcccagaggaatgtgggaggctgctgcatacacagaaagcagtgatcctcaatgggaa

SEQ ID NO: 31452 - DNA, 455 bp, Homo sapiens
tagggcgaattggagctccaccgcggtggcggccgaggtacaaatttgatcattttattatatctgaaacagactaaaggcaggttgactgtgaggggtggcaggaagcttttgggtgatagatggtgagtggtctgtagtgctggttattccatatagacttttgtcaaagctcatggaagtgtttgtttaaaatgggtaaatttattacatatgttatacttcactagtgaaatctttaaaaactatgctggtggcttcctgtcatcttctgaataaaccctgattcttctttttcaaggtaaacaagaacttctggtgtgccttccaccttttccatacctccccccatcctcacctctaacctctccacttcaaattgccatctgcacctcagttgcgagctgccccctactcgtgtgctcttgcctctgggtctaaagtctgcagcgccc

SEQ ID NO: 31453 - DNA, 372 bp, Homo sapiens
cgggggcggccgaggtactgcctgtccttctattcacagcacatgtggcagcaaaccccatattacagtgatacatccctgcatcccttataagaatatatataagctttgcttcctcattgaagcaacaagacatggtttctcactcgtccttatgttcctcatagctcatattatgctactgtgtttttagtaggaatggttgcatatggtcaaatgtatgtctgtgtgttcttatgtatgcatatatatttggatggctggcggatggctggctgggtgagtgcactgcttagtgatgcttctccaaagcagtttggaatatggtataactcagtcttttgttttctgaaattttggctctctcttgca

SEQ ID NO: 31454 - DNA, 427 bp, Homo sapiens
tacgactactatagggcgaattggagctccaccgcggtggcggccgaggtactgtgaggcactctttccccactctcccacaaccctcagcttaacacaactgtggtgattgctttgtccgttttcccatgaggaccctgagatttcaacaaggttcagtaactcacacatcgacacttccagggagctgtgttgccaggaactggcccaggtctttccctcctgggcccatcttgtccttaatctctgctgacattgatgggtttagttaccttgtcgtgtttcttcagtgttttatgccatacagtctcccttgagtagatgctctgtataggggatatcacagcttcctggtgagaactgggttaagtccagcaggatgcctgggcttagtggcactggagttgtggggtggccttgagcccca

SEQ ID NO: 31455 - DNA, 387 bp, Homo sapiens
tggcggccgcccgggcaggtatctgttcattcaatttttctgaatattttaaaaattttaacataaaatcttgagaaaaagtaaactgtagatgctaatagcatacaaagtgcagtcagtgtggagaacagaagagaaagatgaatttccaatgaagagattcagcaggtttgtggaggagatgggattgagcagaaacttaacagatttgggccttttaggtggaggagacaatataggaaaggcacaaacctggggaaatgcacaatgtatgctgaccaagaagtggtctggcgggtagagtaaggctggaagagactctgggagaggaacatgagaggtcccagggctctgaaccagggcaaccaacagaaaaggaaggacaga

SEQ ID NO: 31456 - DNA, 421 bp, Homo sapiens
tacactactatagggcgaattggagctccaccgcggtggcggccgaggtacacattaatccaatacagacaccaaaaaactcatctggtctgagtctacttccatctccggaagcacaggtggctgaccttaaatgggaccagctgtcactaggatgtttttgtgtcgaacccagcaacagaattagagagatgccagagttaacttgcactgaggatactttccagccaggtgtctggctggaaagtcacagagctacgcatctagcaagaatcaaagcctggcctgtgagaaccacgcacagtgtggactcaggtcagggacactgcatgatggacaagggctttctgaattcctgaattcaccaggaattatgtccttagtccacctttcccacacacagcaagggagggagttggtg

SEQ ID NO: 31457 - DNA, 450 bp, Homo sapiens
tacgactcactatagggcgaattggagctccaccgcggtggcggccgaggtacacccaagatactcaataaatgcttctcaggtggatgaagataaagcctctatcttttccacctctgcatactcagcatatagtaggagctcaataaaaagctggtgggaaaaaaaaataaaaaggaagacatgtaataagaatgacacgtattggccaggcgtgatggcgcacgcctgtaatcccagcacttttggaggccgagacgggcagatcacttgaggtcaggagttccagaccagtctggccaacatcgtgaaaccccatctctactaaaaatacaaaaattagacaggcgtggtggtgggtgcctgtaatctcagctactcgggaggcggaggcaggagaattgcttgaacccaggaggcggaggttgcagtgagccaagatcgccccac

SEQ ID NO: 31458 - DNA, 424 bp, Homo sapiens
ggcggccgaggtacgcggtctgtttgttcactgtcatccactgagtgttttgcctcatgttctgctgagcacattccctgtgtgatttcttcttattctcaaaactgcatttggaataccttgttgttttaaagaggagggaacggaagcattgccatttgctcaagatctcacggctagtgggtaagagagcccactccagcaccaccactgcgtgtttgcattttcacagacatttggaggtgggatggagaatggatctgaagagacaagactggaggtggaaggaacaacatatttaaattcttttctggggaaaactcagaaattgagtctgtgggaagcaccttgaggacagaacatgttggatggtggagcaccctttctatacgacttacaggacaacagatggggaattcatggc

SEQ ID NO: 31459 - DNA, 251 bp, Homo sapiens
tacgactcactatagggcgaattggagctccaccgcggtggcggccgcccgggcaggtacaagaaaaaatcaaacaatcacatcaaaaagtgggcgaaggatatgaacagacacttatcaaaagaagacatttatgcagccaacagacacatgaaaaaatgttcatcatcactggtcatcagagaaatgcaaattaaaacccacaattcctggaggtcttggccaaagaaccaccttgggcctttccgggc

SEQ ID NO: 31460 - DNA, 334 bp, Homo sapiens
  misc_feature 269, 288: n = A,T,C or G
cgactactatagggcgaattggagctccaccgcggtggcggccgcccgggcaggtacgcgggggccgttagctgtgtctcgatgcaaaagagaatttaaatttaaattctttttatttaaataaagatcattctattcttacattttcttttattagtcaatctgttcaaatgactgactttttattttattagtcaattttttaaaaaatcttccatttcaaaatatttgtctcctaaagcttatagaaaaaggcaggccaggcatangtagctcatgccctataantcccagcacttttgggagccccaagggttaggaggatttactttaa

SEQ ID NO: 31461 - DNA, 438 bp, Homo sapiens
  misc_feature 84: n = A,T,C or G
acactactatagggcgaattggagctccaccgcggtggcggccgcccgggcaggtacaccaattttgtttattcattcattcgntcggtgggatgcctgggttactcctaggccattttaaagtaggtcttcattattctcttagaaatatcttatttttctttaaggcctttatcacagattataattctaatatcaagttgtttcatatctcttttgttcaatattttgtttagtctctatctctcatcacactctcaacaaccccataagctccctgaggggaagggcatgtctgctttgctcctcactgtgtttactgccagcacctggcaacgtagtgggtatttaataagtaattgttgaatcactgaatgaaagaaaatcactaggccacctgaaggccccttgtctttagagtccactgtggaccatgta

SEQ ID NO: 31462 - DNA, 440 bp, Homo sapiens
acgactactatagggcgaattggagctccaccgcggtggcggccgaggtacgttcatctacctactttgcacttggatggaagtcctagattgggtcttaaaaggagggaacattctagaacccaccaacccttcctgatactgtcacaagatttttttcccttaattcttttaaaatcagggccacatttcaactccctgcccgctgccatttgatgatatttttgtttctctttaggtatcgtcctattttctttttctttaccactgacagcggcttatttcatatgaataatatattaaatacatatgcatttaaaatattgttttgatttgtttgcgaattgtttctcttaaagggtctatctggggaaatgagtaatttttcatatcctgttcttgcaggaagaattttaaatcgtttctccaaagacattgga

SEQ ID NO: 31463 - DNA, 413 bp, Homo sapiens
cgactactatagggcgaattggagctccaccgcggtggcggccgcccgggcaggtacaggggacaaacagaagaggagacatatgtatactctcaatgtgtttatatgcctttgtgagacatcgagtcatcactgtgaagtagctagaataacagatatgaatgcataaatatgggaagggaggtagcaaaggggaaagtttttgagaagggtgggtggtgatgaagaaaggctgaagtgttgccttgtaaaatggagacatattctcgggaagctaatattctaataaagcagaaaaaaagagcagcaatctaaaggtcccatccttgccttgttaggaaagctatccccatatcagctaagaacacaccaggcaaccagtttccactcaatgcaatctgaaaatcagcatt

SEQ ID NO: 31464 - DNA, 429 bp, Homo sapiens
gcgaattggagctccaccgcggtggcggccgaggtactaaaaattctatttaaaaaagatactgtgatattagtatcttaaacagccattatgtatcaaatatctgctattcacagacccctgacaaattattatttgtttagtcactgtaacaatgaaataacaccgaagcctgtcctgttttcagtatgctactttgcttctatatgcacataaagtgtattgaatatttgtccagacaaatgctataacctgtaacaaattaatataaaccagagaattgtatttatttgtatgaactagggctgtttctttgagtttactgggggaaagaacctgagtttcaatcagatacagatttataatttatgtaagagacacttgatcttggactagcatcccttctcagcctgagtttcttcatctgtg

SEQ ID NO: 31465 - DNA, 409 bp, Homo sapiens
actcactatagggacgaattggcagctccaccgcggtggcggccgcccgggcaggtacgatcttggctcactgcaacctctccctcccgggttcaagtgattctcgtgcctcagcctcttgagtagctgggattacaggcgcgtgccactgcgtccggctaatttttgtatttttagtaaagattgggggttttaccctgttggccaggctgatctaaaactcctgacctaatgtggtccacccaccttggcctcccaaagtgctgggattacaggcgtgagccaccacgctcagcctacaagcaattttttaaaaactgacacctattactgataaaattctctgtttaaaatcctatttactattttaaagaaaaagtattaattttttttaaatacaattaattct

SEQ ID NO: 31466 - DNA, 460 bp, Homo sapiens
actactatagggcgaattggagctccaccgcggtggcggccgcccgggcaggtactttcatcctccaatggcctcccattacatatggaataaaaccccaaacacttaccattgcctaaaaagccctacataatttgaaccatagctgcctctacgagatcattttctctcactcttgctttcttataccagtgcctcacaacttccctgcctccttgctgccctttattattgtggtaagaacacttgagatctaccctcttcacaaaattgtaaatgcacaatacagtattgttaactataggcatgatgttgcacagaagatctctacaacttattcatcttgcataactgaaactttattccttaaataggctaagcaaatgcccgtgtcatggcctttgccctttattctgttggaatactctggccttatatacaaatggctcactgcttactc

SEQ ID NO: 31467 - DNA, 406 bp, Homo sapiens
gactactatagggcgaattggagctccaccgcggtggcggccgaggtacagtagtgcactcttggctcactgtagcctcgacctccggggctcaagtgatcctcctgccttagccccacaagtagtgggactataggcacacagcaccatgcccatctaagtttttgtattttatgtagagacaaggtttcaccatgttgcccaggctgatcttgagctcctgagctcaagtgatctgcccaccttggactcccaaaatgctgggattataggcgtaaaccaccatgcctggccttaaatcaactttagagtcaaccatctcttatcactgggagctttctggagaaaacttccatcaacgtggtggctctctttcctgatgttgtttgtgcccaaattagcttgt

SEQ ID NO: 31468 - DNA, 348 bp, Homo sapiens
ttggagctccaccgcggtggcggccgaggtacagaccatgaagggtctgaacagctcatgagctgagtctgacaaattctgccaagtaacaagctaagttacaggcaagctacccaccctcttcaaggaccagtttcctagtttctataatggggtaacacctaccttataaattgtgaagaattaaatcatataatcatgtctgcctcgaactgggtggctcgtcaatgctctgctctgttccctcctcttccctctcctacatcaagcaagaacgtccgcacagacttgacctgggcacctcattattacaatgcatccctttgacatgattctttatgaaaaagg

SEQ ID NO: 31469 - DNA, 418 bp, Homo sapiens
ctatagggcgaattggagctccaccgcggtggcggccgcccgggcaggtacgcggggctctcgagtccgggccgcaagtcccagacgctgcccatggaggcgtccagcgagccgccgctggatgctaagtccgatgtcaccaaccagcttgtagattttcagtggaaactgggtatgggctgtgaagcttcaaacaccttgcagatctcttaagtatccttacgttgcagtgatgctaaaagtggcagatcattcaggccaagtaaagaccaagtgctttgaaatgacgattccacagtttcagaatttctacggacagttcaaggaaattgctgcagttattgaaacggtgtgaagacggattctttggttgataaattgctatcattctaaaggcatggacttcactttcggcaac

SEQ ID NO: 31470 - DNA, 521 bp, Homo sapiens
tacgactcactatagggcgaattggagctccaccgcggtggcggccgaggtacgtaaatcgtgccaaaaggaattggatgttgcatgccttcaatctgtttttgaattatttgtagatacaggcaacatctgttccactggacagagatatactacaagtgctaataacttggaaagacctgactttaaaagtttgtgcttgggagttaaatatttttaaacatatacattttgaagttctcttctacataaacttaaaaattttaaattgcaaaataataaagaaaatatttcacaaagtaaaccaaagtctgaaacttaaggaatttttttgaatctatttaattatgtgttaagtgtgcctactggcaaaatatattattgcagctccactctgttaaacatagatggggaggggagaagaagaactaagagacctatctgtaactatgtaaaaagaaattcatttggggcaaaagctgtgtagtcttgtgaggagatgaatataagtaaaactaaaa

SEQ ID NO: 31471 - DNA, 461 bp, Homo sapiens
ggagctccaccgcggtggcggccgcccgggcaggtactagagccagtaggtatctcagcaatcagaagactgtagatcctcaatatgtgttaaaatgagaataatgtagctcccaagaaaacataagatctaaaatgtaggctcattggccatattaaatttagaatattcagtggcactttgaaaatgccaaaatccttctctggccctagatatcaaattatttgttacatgggttatattcttctctggttgaattccatgactgaaaagattagatggcaaatgccagcgtatagcaaacatcatctgttgccaaatcataactgattcatttgtaactatgggcttcaaagaggaaggcaggtgaaggctctcattcatttgaaggcaagctctttgtgcctttttttcttttaaaatctgaattgcttacctgttcctgttccttacctgttcat

SEQ ID NO: 31472 - DNA, 348 bp, Homo sapiens
  misc_feature 313: n = A,T,C or G
gcgcgttatacgactcactatagggcgaattggagctccaccgcggtggcggccgcccgggcaggtacagcacacctgcagtaaggaggcagaagtgggcacaggagtgtgctgcctgatgaatgctcacttgcacataagctcatgcaaccagtgcccagatggaaacggggagcatgctgtctcccacccacgacatacttatggataacagtcgtgttgctggccactcagttctcaactccttactgtgccagcattggcctgtccacggcatccatgcattcccaaccctgttggcgccctcttggangaatctgttttgatgcataatttcatgatgttttt

SEQ ID NO: 31473 - DNA, 407 bp, Homo sapiens
tacgactcactatagggcgaattggagctccaccgcggtggcggccgaggtaccaagaaaattagccagccatggtgggacacgcctgtattcccagctacccgggaggctgagaggcaggagaattgcttgaacccgggaggcggggcttgcagtgagccaagatcccaccactgcactccagcctgggtgacagtgagactctgtgtcgaaaaaaaaaaaggcaactagtcacaaataatttgttttcttctattaaaaattttaagaccattattgaaattgagagtattattctcctaatccctttaattgatcagttaagagttcctagaacaacttgatattccgattaaaatctttgggttaagtcctaccttttgaaatagggataatgttttgaaata

SEQ ID NO: 31474 - DNA, 443 bp, Homo sapiens
tacgactcactatagggcgaattggagctccaccgcggtggcggccgcccgggcaggtacatgagatgggagctcgacacattttatttggagaataaaagaaaatatgccgtcatcaaactagagcgtgttggggggcatctggtttacagaactaagtcaaggagaagaactctcaagcaatggtgacatctgccagctctgcaaagtgggccctgccttgtcacacaagtctccttgggcaaatgttttctatgtagattttagacactttcctgtgactttctcaaggtcttttggtgacacatgcagcttgaagcttttgcaaggggctggagtctaatctcttcttgcccagcttggctgcaggagaagaagggagatatgttaggacttggctttgactgaggtggtgtagcctggggttgcaagggctgttgcca

SEQ ID NO: 31475 - DNA, 439 bp, Homo sapiens
tagggcgaattggagctccaccgcggtggcggccgcccgggcaggtactttatgatattctaccaataggacagatcccatttatagtattaaaatgtgaaaaaagtatatattactagctaataaaatttctaattatttcatccctgaacggtctgagaaaagaaggaaaaattcctaatatttttatttgctcatttgcaactttactggagtttaatctttagaaaaagaaattttaatttaatatcagaatacaatgtttaatatattcaagttaagtttttgacaacttgacagtttatttttaattcatgtgtttcagagaagtttttgttacctaggcttgggcttttaacataatatcaaatttttatatatggattttatatttttttactttaggaaaatgggttatagattgcacatctagcacaaa

SEQ ID NO: 31476 - DNA, 353 bp, Homo sapiens
tatacgggcgaattggagctccaccgcggtggcggccgcccgggcaggtactccagcctgacagcctgggcaacagagtgagaccctgtctaaaaaacagaaaagtaaagaaaaaaataaaataattaattaagatggctgagtgctggctggtgttgtctcctcagcaagacagaagctccctgagggccagcgcccaccctgatttattcctcctagtgtccttgggtccccagctgcctggcacagagctttggtccttggtgctcggtagaagtgtctggctgatgtataggagggagcctgagttacaatcccccctcccctgccactcagtcttcgtgtgacattgg

SEQ ID NO: 31477 - DNA, 380 bp, Homo sapiens
cgactcacttagggcgaattggagctccaccgcggtggcggccgaggtacctttttacattcccatcaacaatgcacagagactccaatttctgcacatcattaccaacactaaactttctgttttcctgatagtagccgtcctaatgtttgtggtttataatttgattaagatagcatatctgaatattttcttattttttccatctttgaaaattaaaatagactgaatttttgttacattgtctttaataactaagttgcttgcctttttactaagcagattttttttgaagggatttatgtgatagtctctgtctttttatcttgctggaagtttgatccactcaactgacagctttatttttctttcctcaaaag

SEQ ID NO: 31478 - DNA, 414 bp, Homo sapiens
ggcgaattgtagctccaccgcggtggcggccgcccgggcaggtacaaaaattagctgggcatagtggcacttgcctgtagtcccagctactcaggaggccaaaatgggaggatcacatgagcccagggaggtcgaggctgcagtgagctgagattgcaccactgcactccagtctgggtgacagagtgagaccctgtctcaataaagaaataaagaaatagaagacaaaatcgtggtgtaattattttgtccctccctatgcaatttacctcttctcatatactgtatattatttctcataggagtctaaatcagaggtcatatctctgctctttcaaaattcaaaacatcttgaaaacagccagatttccttctcaaaaagttacatgatttggccagatgtggtgactcata

SEQ ID NO: 31479 - DNA, 435 bp, Homo sapiens
atagggcgaatcggagctccaccgcggtggcggccgaggtacctacctgcggtatctgatcagtttctgcctagtcagatgtgccctgttgctgagtctgcttgggtggggagcataggaaaatggggcaagtgcttcatgagggagctgttctcagccgccccctctcccaactccccagctctctctccttgttctgtctcctgtttctgggctctaatcctggtcaggcccaatgccccttgcctgtgatgctgggtctgcagttttgctcgccgtcctcgctttgccttcttgcccgccacttccagcattcctcctctgctcagcttctgagctggtgtcaggtttctacctgcctggccactgagcccacctgaagatgtctggccaattccttttagcctctgccttctcaccatgccagggatgctt

SEQ ID NO: 31480 - DNA, 392 bp, Homo sapiens
  misc_feature 49: n = A,T,C or G
ggccgcccgggcaggtactgcatggacaggagttgcttacatctgatgngaggaaatccggagatgaatgttttgtttacctcatgggattgtggcattgttagccactcaatccaaccagattataatgtattaagaatttgaaacatcagccattgtggtttcacatacacagatgtatattattttgttagccaggtaatgacagtcattgtcaagtggaagatctaatcagactgaatattcattcatgccttgctttgtcaatagggaaaaaaatttcaaggacaatcggatattctctcatgactgaacctttctttccatctacctgaaggcgaggaaaggaggagggagggaggcttggacagcacatcctccccgattagatc

SEQ ID NO: 31481 - DNA, 385 bp, Homo sapiens
gtaatacactcactatagggcgaattggagctccaccgcggtggcggccgcccgggcaggtactttttttttttttttttttttttttgtatttttagtagagatggggtttcatcatgtcagccaggttggtcttgaactcctgacctcaggtgatccatccgccttggcctcccacagtgctggcattacgggtgtgagccaccgtgcctggactgataagcacaaattttagacagtggtcatccctgtgggagggggacagaggataaggatggacacccaaaggagtgaaaggtgtggtgagttatagactaggtagtgagggtccacacatatccactggatcttgagttaaactttaaatactttatgcatatccttt

SEQ ID NO: 31482 - DNA, 166 bp, Homo sapiens
agggcgaattggagctccaccgcggtggcggccgcccgggcaggtaccagctagctggaaaagcacctacaatgatctagtggatttggcatggatatggcctacagatctgtagtggggacggagaaagggacgtggtgtcagtgtgagctgtgtggaagctggg

SEQ ID NO: 31483 - DNA, 434 bp, Homo sapiens
cgactactatagggcgaattggagctccaccgcggtggcggccgaggtacttttttttttttttttttttttttttttttattttttttctggagtaaccagtgtgacataagatctgtttgtgttcccccattttacaaaagaaaatttaagtctgcaacttcccctaggcatctgcagcagagagtggatttgtcaacatgcaaagctgctgatctgcccctgcatgctgctccctgccctaagtgtgaggaggatgaactgccctcttttcacctgcacctccctggatggaacagagcatctccataatactttatgcagaagtatcacttttatttaacaccagaaaccccaggcaccaactttaaattttaaataaaggaaaatgtggaccacttgcaatgttacaaagcaaaaagaaacacaagagg

SEQ ID NO: 31484 - DNA, 411 bp, Homo sapiens
tacgactactatagggcgaattggagctccaccgcggtggcggccgcccgggcaggtacagcattattagctggggctttcactgaaaaccccagggtctctttctattgtccccatatggttggagtcacaagagtgggagagatggccaagctctctgcagaggatcctggcagcagcctgaaccctcttgctacttccatcaaaggaaaaaaaaaatcaaatatttacccccacgagcttataatattacagagaactccaccatcctgccctgcaaaatatcctgggatttgactaatactagagctgcttttctagtccttgagtgactaggaaggaagaaccaaaagcttgactcccctgcagcagtgagttctctggctttggtttgcacaggaaaccataggg

SEQ ID NO: 31485 - DNA, 367 bp, Homo sapiens
tacgactcacttagggcgaattggagctccaccgcggtggcggccgaggtacctgagaataatccatgacattttttcctccctagtccccatagccagtccatcaacacatcctattggttattacttaaataaattagatatattaaatatctataaaaatgtatcttgaatttttctactacattttggactgcccccatcctacttcaaacccatggtcaccttctcccatggtctatgaaggcagccgttaacccatctctttatttgcattgttacctgcttttcattaactctttgccacatccctatcctttttataatcctccagtggcttcccttgaacttaaaataaagtctgaag

SEQ ID NO: 31486 - DNA, 437 bp, Homo sapiens
aatacgactactatagggcgaattggagctccaccgcggtggcggccgcccgggcaggtacttctctgcagccttaaactcctgggctcaagcaatcctcccaccttagccctccaaatagctgggactacggacatgcaccattaaattaaaaaaaatatatatatatatacacacacacacacacacacatagtggagggggtctcactctgttgcccaggctggtctcaaatccttggccttaagctatcctcccaccttggcctcccaaagtgctgggattacaggtgtgagccactgtgcctggcctgataaggtgatatttgagcagagacatttaaaaagtgagagaagcagccatgtggttatctacagtccaatattccagcacaagggacagagggggaacatacttggtgtgtgtgagtaacatgg

SEQ ID NO: 31487 - DNA, 347 bp, Homo sapiens
cgaattggtgctccaccgaggtggcggccgcccgggcaggtactgggattataggcgttagccaccgcgtcatgcctctaacgagatatttctaaaggttaggccttcagtcaagaattttaaagctggatcttagaggttatctaaactaacctctccatttcatagatagggaaagtgagtcccagaaaagcactggtttggacaagttcagaaagctaaacagtgactgtggatgtatgattctgtctcttaactcctaatccaaatgtcttctcactagataaggctgtgccttctacattcgaaggctcaaaccccatggatggatggagggaaggatgggt

SEQ ID NO: 31488 - DNA, 425 bp, Homo sapiens
tacactactatagggcgaattggagctccaccgcggtggcggccgcccgggcaggtaccgggccttgtgccaaacaccttagatgggttatctctgaacttcacatcagtcatatgaggtgggtaatatcattatctacattttacaagtatggaaactggggattactgaggttatttgcccaaggtaacacagatggtagattctggagccagagttggaaactgggtagtttgctccagacccaatgatctagcatcctagatgtggtccattagggctctctcttttcatccgtttgtaaaagagaagttttcactttcttctcaaaccattgagaaacaacttggaactgggaagtgcaaagggaagaattctaaagaaagccgttttaaaaagggagaaagaacaagaaagcaggacac

SEQ ID NO: 31489 - DNA, 447 bp, Homo sapiens
atacgactactatagggcgaattggagctccaccgcggtggcggccgcccgggcaggtacacaattagtaaaattcaacctaaaaaaaactgtcgattttattgtatataaactatacctcaataaaaatagatagggtaaaaaaaatatgacactagaatttcattcccatccctttggccatgttcaggcagaggttgggcagtgtatcaatacacaaccataacgctaagagatgatctcctcaggtgcattgagggtgggaaagggcaaatgtgagaactaatggtaaccagcccatgtgccctagaacaaaaatggctcctgatccatgtttgatacgtgtcccataggtggctggccctctgctgcgatgcacaagcggcactatcggcttcgtgactcaacgcaaatgagagagaacactaagtcaatgaacccagggaa

SEQ ID NO: 31490 - DNA, 401 bp, Homo sapiens
ggcgaattggagctccaccgcggtggcggccgcccgggcaggtactgctgttagtggctgctagtaggttattcagccgacctcttctgattctgctttgctgcctgatttcaaaagagttgccctatactggctttcagtcacagcttgtaaccactgcttgtttgcatgcatccccatcattttcatatgggctctttttttttttcttcttcaagttaggaagcaaaagaatcaggagcatttttatatgataaaagatttatataaggccagctagaatcaagccaaatgaaattcagctggaggggatggtaaaaaggctcacagaacttgtggctgccagaaaaatcagtgttctttaaattaaagagggttcagctagcaacgggaactctgac

SEQ ID NO: 31491 - DNA, 414 bp, Homo sapiens
ttggagctccaccgcggtggcggccgaggtacctacctgcggtatctgatcagtttctgcctagtcagatgtgccctgttgctgagtctgcttgggtggggagcataggaaaatggggcaagtgcttcatgagggagctgttctcagccgccccctctcccaactccccagctctctctccttgttctgtctcctgtttctgggctctaatcctggtcaggcccaatgccccttgcctgtgatgctgggtctgcagttttgctcgccgtcctcgctttgccttcttgcccgccacttccagcattcctcctctgctcaacttctgagctggtgtcaggtttctacctgcctggccactgagcccacctgaagatgtctggccaattccttttaacctcttccttcttaccatgc

SEQ ID NO: 31492 - DNA, 465 bp, Homo sapiens
attggagctccaccgcggtggcggccgaggtacacttctaaataaacccctgggtcaaagaaattaaaaagaaaatgagaaaatattttaaactgaattataatgaaaacatagcatgtcagtatttgtgggatatacataaagcagtatctagaaacttacggctttgtagcttaaatgtttatattccataagaagaaacattacacaaaatccctatcaaaacattggcaaaaattaaatccactaacatatgtaaaaggataatatattatggtcaagtggcatttatccctggaatgcaaggctggtttatatttgaaaaaatcagttcatataattcttcatattaacagaatgaaggtgaaaaaccgtatgattatctcagggaccacaggaaaaagcatttgacaagatccaatgtgataaaaaaaaatctcagcaaactaggactagaggggatct

SEQ ID NO: 31493 - DNA, 604 bp, Homo sapiens
  misc_feature 58, 59: n = A,T,C or G
gtatcgactcactatagggcgaattggagctccaccgcggtggcggccgaggtacttnnttttttttttttttttttttaatagagacagggtttcaccatgttagccaggatggtctggatctcctctgacctcatgatccacccacctcagcctcccaaagtgctgggattacaggcgtgagccaccgcgcctggccgggtcaggctctttctaatctgtttaaaaccatatcacccagaaggtattcagtatatacttatttaaatgaattgaaagtcatatgagcagcatggacttactactttaaaaaccacattattagaaacctaacaccttggaagctctgcatattctgaatgaagaatatactaaaccactcagagggaaatagttattaaccattttaccacagacgactaaacaactaccatggcccttcccttgtttcagctggtctgggtcttaaaaagactttggaaaacccaatctaccctcctctagcagcaaatcaattcccacagtcagccaggaggttctaaccactgccctacctctttcaccaaggaacaagccctagatttttgctgtttctaaaaatatg

SEQ ID NO: 31494 - DNA, 422 bp, Homo sapiens
gcgaattggagctccaccgcggtggcggccgcccgggcaggtaccataatttagttattgctcagtggttgaacatttaggttgcctctagatttttctatttattagaaacattcagggtttctagatttttcagttttataaggaacattccagtgaacactttcgtggaagacttttgcaggaatttcaacacctaattttgttacaaccctaactttctccatttgttttgatgagtagtaaatttttattttgaaaaagtcttaaggcaaaataaatgtaatgcacttatatttcaaaaatataattgccatatactacctataaaataggagtatttcaggaaatcaaacaaaaacaatgatttttctcaagcataaagaactatgcctggtatgacctgctccttttgaattatt

SEQ ID NO: 31495 - DNA, 443 bp, Homo sapiens
attggagctccaccgcggtggcggccgaggtactttttttttttttttttttttttcgcaataattacttttattgtatactgcacaatataaacagcatgttgcaaagaaatatatatatttgtgtgctttgtgtatgatataaatccatttctgcaaaataaaatacaaaccgatttatcttacaaatatgaaactcaatgaaaaaacaaatcccaaaataatactatttatgtaaaatatagaagctaaacaataaattaataatacatacataaatagcaaaagagtaaagcatagtaaaaaataataagcacccaagtaaagaaaagaaataacgtaaaatttgggatggagtgatttctatgacggggaatagaaaagagatgtggccacgcatgagaatattcaggctcattggtaatgttctgtgtcttaggctt

SEQ ID NO: 31496 - DNA, 427 bp, Homo sapiens
ctactatagggcgaattggagctccaccgcggtggcggccgaggtacatttgttgggggcgtgacattaacatataaccacttagagtggacatgcagttagagaaaagtcaatgagctggaaccaagctgggaattccaacatgtagaagttaaacacaagaggaggagccagcaaaggaaacagaaacagagcttccagcaggtggggggcatttggaagaaaacgatgccatagaagccaagatgaaatagacatcaaggagaaggaagtagtcaattgttttgaatgctatgaagaaagataagaataggtaaatagtccttatatttgataacagaggtcaactactgatcttgatgagggggtttcaataagaatggtggggattatataccttccctgggattcaactgaagttaaggaa

SEQ ID NO: 31497 - DNA, 436 bp, Homo sapiens
tatacactactatagggcgaattggagctccaccgcggtggcggccgaggtacatgagatgggagctcgacacattttatttggagaataaaagaaaatatgccgtcatcaaactagagcgtgttgaggggcatctggtttacagaactaagtcaaggagaagaactctcaagcaatggtgacatctgccagctctgcaaaagtgggccctgccttgtcacacaagtctccttgggcaaatgttttctatgtagattttagacactttcctgtgactttctcaaggtcttttggtgacacgtgcagcttgaagcttttgcaaggggctggagtctaatctcttcttgcccagcttggctgcaggagaagaagggagatatgttaggacttggctttgactggggcggtgtagcctggggttgcaggggctgttgcc

SEQ ID NO: 31498 - DNA, 434 bp, Homo sapiens
actactatagggcgaattggagctccaccgcggtggcggccgcccgggcaggtacttttttgtctgttagtgtttctctgtgttttcctattgtgctgatgtgagcttgcactgcttttgtaattaaggataaattttatttatgcatttatgtatttatgtatgtatgtatttaaaaaaattaaaggttgtatataaaaatagttattaagtggagacacttaagaataatacacactcctctaaataaaacggaaaagcctacttgctgcttgcttgttgcaggtagaattgacccgatcccctgcagaaatccctgccccctcctctctgtcccaggaatgccacgctgcccttcacgctggcatgctgcctgtcggatctgtgctattccttagtgacctgtagattcattatctgtgtcgccacaacct

SEQ ID NO: 31499 - DNA, 382 bp, Homo sapiens
ctactatagggcgaattggagctccaccgcggtggcggccgaggtacatgcatccatggctcacctggggtcctacctgttacacagtaatgactcaagcagccaaggtcatggggggctgtagaggggggctgcactagctgctcaagttgatgttacagaacctgctcccgtctgagatccggactccacagccctgcatgagggccgctcctccatctcagcatcctcaacctggtagaaaccggtcaggtggtctcctaaccaaggctaaggcaggctcagtccctgagaaacctgtggggtattctttgagtcctggcaccactaaccaaggggtctcaagaggatacctgttagcaagcttgtccccagcgcctat

SEQ ID NO: 31500 - DNA, 430 bp, Homo sapiens
tatagggcgaattggagctccaccgcggtggcggccgaggtacattcactctgtgttttattaagttaaacattaacaacgtcaccataaaaagcatttgctagcataaatgctgatctaccataggaaaaaatattcacttttctttgttattggccaaaccactttaaactatatgttaaaaaaggcctttcaaagttaactttgtgaaaaaacatttgcaggtttcccattgcagaaggacatagcaatccaataaggactgagatatatactaaaatggtcatttcttgggggctactgagctacagatcccagaggagctcaggcttaaagtcatgaaatggcttccgtggaaccaggcctcaattttatcctgattaaatttactatatctgagaacacaggtggactgagtgggaggccaccc

SEQ ID NO: 31501 - DNA, 433 bp, Homo sapiens
acactactatagggcgaattggagctccaccgcggtggcggccgaggtacaccaccaggctctgagttggttaacaattcgctgagaagacagctctagaattgcttctgcctacgaagggtgaggatgggtatatataagagatttccaacctgacaaatccatttgggaaggctgaatttgcagtttgaggagggagtttgttcaaagagcatctgcatgaacattctgctggagcagcctgtgggccgaaatccacaaggctggcactttgaggttcaacttgattctacaggctctgcggtctcatcccaaagtcacagcccacacaactggcatttcccctggtggtttggattagacaacagtccccaagctctactttggaggcaagatttaaaaaaaaaaaaaaaaaaaatttgggggtgggggc

SEQ ID NO: 31502 - DNA, 422 bp, Homo sapiens
ctactatagggcgaattggagctccaccgcggtggcggccgcccgggcaggtactccctttccctgactcagtcttttattgatgaaggcagggatgggatggggagagctcacctggcaaagactccacacaggtgtgcagcacaccctgatggggccagaaaatgtcactgtgagccctaggggtgaaagacacagtgatgggctgctgggcaactaccaagtgtagagatcctgagtgcccagagagttaccaaccacttcccttccctgtgcagatcagtggaggcagatacatacacaaaatgggaaggggaaagaaaacggctttcagaactccccaccatagagactataagattattccagaatggccccaattttttcactgcccactctgggccaaacagtgtccatacact

SEQ ID NO: 31503 - DNA, 384 bp, Homo sapiens
atacgactcactatagggcgaattggagctccaccgcggtggcggccgaggtactgggattataggcgtgagccaccgcgtctggcctctaacgagatatttctaaaggttaggccttcagtcaagaattttaaagctggatcttagaggttatctaaactaacctctccatttcatagataggaaagtgagtcccagaaaagcactggtttggacaagttcagaaagctaaacagtgactgtggatgtatgattctgtctcttaactcctaatccaaatgtcttctcactagataaggctgtgccttctacatttgaaggctcaaaccccatggatggatggagggaaggatgggtggagggatggatggatagatggatgga

SEQ ID NO: 31504 - DNA, 446 bp, Homo sapiens
cgactactatagggcgaattggagctccaccgcggtggcggccgcccgggcaggtacgaaaaaaatcaagctactaagccaactgataatatagacgcaaaccaattgttaaagaacaggtccaaattggagcaccattaaccaacaatcagtgatgcataatgaggctattgaacaagtaagggctatttgcctcagggcctggggaaaaattcaggacccaggaacagctttccctattaattcaattagacaaggctttaaagagccatatcctgactttgtggcaagattacaagatgctgctcaaaagtctattacagatgacaatgcccgaaaagttattgtagaattaatggcctatgaaaatgcaaatccagaatgtcagtcggccataaagccattaaaaggaaaagttccagcaggagttgatgtaattacagaat

SEQ ID NO: 31505 - DNA, 466 bp, Homo sapiens
tacgactactatagggcgaattggagctccaccgcggtggcggccgcccgggcaggacccagaggacacagttgaaatgaggcacaattaggaaaaactaggctgtttaatatccatattgagtagctttgcaagttactttcacaaacttccctacagaattggttctaacagaactgttcaaggccaaggatttgtttgttctgggtctgggggagtcatctttataattttaatattccattagaatgccttgacgctagaaggagggtccatctcaatcacatcaataaattgatcccaacctttataaaaataagcttggatagaaaggaaaatccgaagactaaggtagtctggtagaatactagaaggagacatcttttaagaggaggacaagaaaaggcatgaaaacagagaacatggtcctacacaaggcaactggcttcagtgctaccctacaatt

SEQ ID NO: 31506 - DNA, 414 bp, Homo sapiens
gcgaattgttgctccaccgcggcggcggccgaggtactgtgttaatcactttacataaattatctcattttttcctcaagacaacccaaagaggaagtataatttttgcctgttactggtgaggacctcatgctcatagaggttaggcagcgtgttcgttaatacacaacttttttaatgaagggagggatgtcagcccacgtgagctgtctgcagagcctatgctctgatattgctccagctaccacttttaacatttagtgttctgacttactattataatggaagccctaccctatcttctgtgtatttgagaggatttgtttttttattcatatctaccaatgtctgtgaatgactctgacctcaatcctgtgtgtgtctggacctctactagaatgcatttggcatatg

SEQ ID NO: 31507 - DNA, 426 bp, Homo sapiens
actactatagggcgaattggagctccaccgcggtggcggccgcccgggcaggtacaagaactacaagtcctaaaacttctgtccaaaagagagtcaagaagcagctggacaaacttagggttaaggatgactttgttttgccctatcccttggctctatccttttgcttagcaagggctagcagtcaaatcttcctattgccctttctgagtagggaaacacccacatgcaataaacaatgtaaatacttcaggcatggacatttttaagttttcttcaaaaacgccttagcaaatcaatcattataatcaggcactttgaaaaacctcatttttgagtttttcctcaaatactatatttcactcaaaaatattaaggcggccaggcgtggtggctcatggctataatcccagcactttgggaggc

SEQ ID NO: 31508 - DNA, 424 bp, Homo sapiens
gactactatagggcgaattggagctccaccgcggtggcggccgcccgggcaggtacacctttttgaggcagcagcccagagctatgaggtatgctggttgtggaaacgctgtgaagctaatgagggttgaagccgtcattaggatctaatgaacactccgtttgattcagctgagcccagctgaccaccggaagcccagtcagtatcctgtgttcacgcccgatattgcttatgtaggagaaccaaatgaatctacttctgaggtttgaattttgaaggattctctgagagaggtaaaggaatctactagaaaaggacatgggaattttagtgccaggctgacctgaatttgaatttccgttccatctcttcctggttcctacttatactgtgcataagtaacttcctactaagttacgtcccc

SEQ ID NO: 31509 - DNA, 444 bp, Homo sapiens
ctatagggcgaattggagtcttccccgcgggggcggccgaggtacttctctactacttttacattttagaaaatagcaactcttataagggtgagtctctgtgccatttctaaattctaaatttgagtttgctgcagtgaagaataactactaattagaaaccaaatatagtgttctatcagttactaattttcataagggacgcttaatttacattctagcaatggccaaacctactgaatacacgagtttagaagtgaaaaccttaaataagtctaggattagactgtattcctaggaagaagtcacattaaaactaactctgactccaagtctaaagatattataaacctcagaacacttattttgcaaaatatattccaaaactctaagttgtccccaagcctgattccattaaataagtgccccttcttctgactatac

SEQ ID NO: 31510 - DNA, 500 bp, Homo sapiens; identical to SEQ ID NO: 31269

SEQ ID NO: 31511 - DNA, 436 bp, Homo sapiens
cgactactatagggcgaattggagctccaccgcggtggcggccgcccgggcaggtaccactcacacttcaaggagagatggaagaaactaagtcaagccgacaggagccatgtctttcaagcaagaaatacagctgccagagaacacaaatgcggactttatataagcgtaaagccagcagggtgtctgaggacatcaaatttcattgcttttgtctgtttactacaagatgtaaaaacagtcatttgccaccggggagatgtttcatgaattgaatgttataatttcataatcagatactatgactttaggggactaaatgaacttttcaggaagattattttttttcatcctgtgttcctagaacaggttctagttgtctttcaataagtgaatgttaattgcttaagtagctcctgttagtcctttctggcct

SEQ ID NO: 31512 - DNA, 456 bp, Homo sapiens
tacgactcactatagggcgaattggagctccaccgcggtggcggccgaggtacgcgggtgcttctacttattaagccatccatctacccatcctgctcacgtatgtgtcagacttttagtgcccactgcgtgtgtggctctgcactgtgttcttggggtctaacataatgtaggcaatctgaaggttactgtccaaggggggaaagcaaaaggaaatcacggtataagttttgctttctttaatagcagaaggggctacatcctactgtgggaatgcagaaaagggagtgataagctgccttcatagactgtgctttcattttttgcaaaagtaaatgtaatcaatatgaatttgtggaaagtgtagcatatattgccatgtgttatgactttgagcttattttaaaataaagatggatgcctgtttctgcctaacatgttagtcagtgttatcaa

SEQ ID NO: 31513 - DNA, 421 bp, Homo sapiens
cactactatagggcgaattggagctccaccgcggtggcggccgcccgggcaggtactgctgttagtggctgctagtaggttattcagccgacctcttctgattctgctttgctgcctgatttcaaaagagttgccctatactggctttcagtcacagcttgatgtaaccactgcttgtttgcatgcatccccatcattttcatatgggctcttttttttttcttcttcaagttaggaagcaaaagaatcaggagcatttttatatgataaaagatttatataaggccagctagaatcaagccaaatgaaattcagctggaagggatggtaaaaaggctcacagaacttgtggctgccagagaagtcagtggtctttaaattaaagagggtttcagctagcagcggcaactctgactttgca

SEQ ID NO: 31514 - DNA, 414 bp, Homo sapiens
ctactatagggcgaattggagctccaccgcggtggcggccgcccgggcaggtacaaagaaagacagacccaaactcctatcacagacccaaattcctatcactctctgattaaaggaatcctttgagtaaataggatttgaaaaccaaggctatgtctactcttggaatatgtcatgattttgtgaatttaaatcatattgactcttggtccttgtcttctcaaacaagcaatccagactttttgtgcatcactgggatatatcagtgaatgttagttttaagacattgcaaattaaaacctggttttagaattagtaactaattttatgggcattagattaacctgactatctaaagcatcagttgctcaaaatattttatccttaaataaaatgctatataaagatccacat

SEQ ID NO: 31515 - DNA, 385 bp, Homo sapiens
atacgactcactatagggcgaattggagctccaccgcggtggcggccgaggtactgcatggacaggagatgcttagatctgaggtgaggaaatccagagatgaatgttttgtttacctcatgggattgtggcattgttagccactcaatccaaccagattataatgtattaagaatttgaaacatcagccattgtggtttcacatacacagatgtatattattttgttagccaggtaatgacagtcattgtcaagtggaagatctaatcagactgaatattcattcatgccttgctttgtcaatagggaaaaaaatttcaaggacaatcggatattctctcagatgactgaacctttctttccatctacctgaaggcgaggaaag

SEQ ID NO: 31516 - DNA, 412 bp, Homo sapiens
ctactatagggcgaattggagctccaccgcggtggcggccgaggtacgcgggggtagctgggactacaggtgcccgccaccatgcctggctaattttttatattttttagtagagacagtgtttcaccgtgttagtcaggatggtctcgatcttctgacattgtgatccacccgcctcggcctcccaaagtgctaggattacaggcgtgagtcactgcactcagtcaggttttcaggtgctggttccatggctcttcctgagccgaaaataaggaaactccatagaccttgtccactggaactcgttcccatctaccctccactctatccagggtgatggatctctgcagtaagtggaagagttcttcatggcccccaaggttatatccatctagaacttcagcacgtaatt

SEQ ID NO: 31517 - DNA, 431 bp, Homo sapiens
tatacgactactatagggcgaattggagctccaccgcggtggcggccgaggtactttttttttttttttttttgtttgttttcaggcctatatggctgatgctcagtaagcagtgagatgagctgcaagatgagtcaggagccagctgatatcagacctttgcaggacacagaaagatctggattttatcctaaatacaaggagcgtccattaaagaattttaaacaaaaagaaaagaagggagcagacgcacacagcgagagtggaacgtgcacaaggccctcagagagagacagacatagacaaggagatgttccggtcctcctggcctgctgggtcccatgaggcctgtgtttcctttagtttttctttatgtctccattaaacttctttctctacttaagattctgttctttataaccaaaatatct

SEQ ID NO: 31518 - DNA, 447 bp, Homo sapiens
  misc_feature 381: n = A,T,C or G
cagctccaccgcggtggcggccgatgtactaatattcagtgtcttgaactttcatataataaaattactcgaattggtaagaacaatgaaatcttaatatttaaagatatatttctcataatttattgtgttttatttattcctttgtaggagtaggccccatcacaaatctgcatattttatttatgttatacttttaaaatttagattaaaaaaataaaattacttttaatgtctataaaaggaatatgctctcccaccactggcaactctgtagatcttagcagttagtatactcacttctctgtttcttttcctacaaccaatagtaatttgagctctatgggaatataacaacttgatattgtgccatgatatttntatggatcatctgcttcccaaatgcctcagcaattgctgtaactatttgctggtaaacctttttca

SEQ ID NO: 31519 - DNA, 738 bp, Homo sapiens
agctccaccgcggtggcggccgaggtacagctgaactaagttgggctaacaaggcagatgatgggctccaaactgtgctgcatctgtctttatggtggccctctttattacaccaagatccccagacacaacctgctggcccagaacactgcctgctgccaactagagcataacctgctcattctctccaccaccaagtgctttatgggccaggacacagcctcctgggcagtggtccttgaccttggaatctgaccttgacactgacatcactggaacattaggaaaaacccatgagccttggactccctagagaccagctaaatcagaattgctgcagtggtgctggggcattttccaatgacaaagtctctttctactcaagaaataaactcaattctgactgagtcagggtttcatgaatcaagcttcatgaatacttatcccaaattatttcacttatatgttgtaagatgttcccatttttgtgagttttatattattaactaagttaatgggaaatgaagtgtatctgttaaaacctaatcaatattaacttgttataaatattccgcaatctaaactgcttttacatcattgaaaagttataaaaattagcaaatctgatagcaccaattcaataaagcaatttaaaattacctagtagcacattctgtgaaactttgacaatatgatgttacttggctatgatataatcatgtacctgcccgggcggcc

SEQ ID NO: 31520 - DNA, 445 bp, Homo sapiens
agggcgaattggagctccaccgcggtggcggccgaggtacttgcaggtggtttggcctggaaaatctagatgagtggtttttaaatttagttgcttattagactcaagaaagaaatttaaaaaacaatactgattactgagaccagcttttctagattcttcattcagtaggagtaaggaaaggccaatgaatgtgtattgataaaaaggttcctggccgggtgcggtggctcacgcctgtaatcccagcactttgggaggccgaggcaggtggatcacctgaggtcaggagttcaagaccagcctggccaacatggtgaaaccccatctctactaaaaatagaaaaattagtcacgcgtggtggcaggggcctgtaatctcagctacttgggaggctgaggcaagagaattgctggaacctgggaggcagaggttgcagtgagc

SEQ ID NO: 31521 - DNA, 393 bp, Homo sapiens
attggagctccaccgcggtggcggccgaggtactgatttatgagatttagtaggtggaaggaaagcagagactaacttctgctatttcatctaccatgcagagggttatggggatatcttgttgctttgctttcagcactggcacaagtccagggcccatttgctagcagtgtgggtgttaagaggcaggatgtaaggtatcacctgtgctggtgaggaacacagtgaggagtgtatgatttgggagctgagagcagtagcagtggggtcagcagcttcctgattgggtggtcccaggatcaaagtggttagtgatccgctggcttccttgctggggtttgctttctaactgtggcaaagcactgtggttatggaactggccgtgacccaagg

SEQ ID NO: 31522 - DNA, 397 bp, Homo sapiens
agctccaccgcggtggcggccgaggtacacacttgcatgagggatggggctggtttacaggaatggaaccagcttggaaagaagacagaaggtgagaagtgaatacttgttggtatcatgtaagaacagagtgaagaaaaaggacaggccggcccttggttatttttaaatttcaggaaaatggattggccaaataatggggatcaaaaataaagggtgtttttattatgagccaagtgaaaattaaatttaagataggtatgttgatatggtttgattgtgtcctccaaagttcatgtgtaggaaactgaagcgccagtgcaacagtattgagaggtagaaactttaagaggtgatcagtgctgggtgcagtggctcacgcctgtaatcccagcac

SEQ ID NO: 31523 - DNA, 454 bp, Homo sapiens
tacgactactatagggcgaattggagctccaccgcggtggcggccgaggtacatgccaccatgcctagctaagttttgtatttttagcagagacagggtttcaccatgttggccgggctggcctcgaactcctgaccttaggtgatccaccctcctaggtctctcaaagtgctggaattacggtgtgagccactgcgcccggcccttagtagcatcttttaatggaggtagagttgagatttcagtgactaacaactaaaggtattaaaggtaggggtttatatgatacatttgcattttagaaaactgatctaagcttcaatgtgaagaacagattgaaatggaagggggagaagactagaagcagaaacattactcatttaagtaatctggaccatgaaactgaaaaaaagtatagggactccaaaagtcataaagaagtgaaagcaagatt

SEQ ID NO: 31524 - DNA, 443 bp, Homo sapiens
agggcgaattggagctccaccgcggtggcggccgcccgggcaggtacatgtggcaattgtttgccattccctttccatcattaaaagggccacaaggaaaacttagtaacggagtgtgaaatccaagcttttttacaaggaatcctgtgcaagagctcaggagctacttgttttccatatgtagttaatcctgtctgtgcaaagaggttgtcaatctgatcccagttctctgccaactcgtttttgtgattttgagcaaacccctttctaaagcacaagggatctatctactgtgggcctgagctctgggactcttcttctcagcaggctgttcactttggctcaagagtgcctccatccatgtagggtgactttgctaatttgcacaaagtcgccctatgggctagcagcgggcctatcccttcccgtttctgagcttcagt

SEQ ID NO: 31525 - DNA, 111 bp, Homo sapiens
  misc_feature 58, 59, 74, 75: n = A,T,C or G
tccaccgcggtggcggccgcccgggcaggtactctggtaagcttgttgttgtccaagnntgaagctcccttcannatgaagcgtgttggccagagagccattgtcaacagc

SEQ ID NO: 31526 - DNA, 413 bp, Homo sapiens
gcggccgaggtactcagtttactgagcatgttttattctactttataataacataagtcagtctacattttataaggacgtttacatattaggtagtataccttgtgtgcttgacgcaaatgtggccaatttagggtgatttagtggaaaatggaatcatctggtatagtaaacagcttttgttttctgttacagacataatgttaggaaaattgaaataaatacaaggggtagttatggtgaaccctgttaaactactgttttaaaaacagtgaatttcagaaaaatctcatctgttctgagtgatttcattcctttgagaagttaaactggctctttttaaaacaaatgcatccaggcgtgcctggttattgctttatttaaagctggaagcaaggctcctttcggttctt

SEQ ID NO: 31527 - DNA, 391 bp, Homo sapiens
gagctccaccgcggtggcggccgaggtaccatgtctatatgactatatgggcaacagaaattatcaacagcaacaggaaatcaaaagaacaggaaaggaagatgataaatttaactggggacatgctaaatctaagttcatgatgaaacatccaagggggactaatagccagaaacacaggatacaagctgggaaaatacgaatttgatttagaggggagaggcactagagctaatcattagattcatgagtatagatgaattcaaaatgtgaatgctcaaacagaaaagccaaggataccagtgaaggaatatttacatttaggttacaaggaaggaagaggaaggccaggcatggtggctcataccctcaatcccaccactttgggagg

SEQ ID NO: 31528 - DNA, 443 bp, Homo sapiens
cactactatagggcgaattggagctccaccgcggtggcggccgaggtacatttgttgggggcgtgacattaacatataaccacttagagtggacatgcagttagagaaaagtcaatgagctggaaccaagctgggaattccaacatgtagaagttaaacacaagaggaggagccagcaaaggaaacagaaacagagcttccagcaggtggggggcatttggaagaaaacgatgccatagaagccaagatgaaatagacatcaaggagaaggaagtagtcaattgttttgaatgctatgaagaaagataagaataggtaaatagtccttatatttgataacagaggtcactagtgatcttgatgaggggtttcaatagaatggtgggattatatacctccctggattcaactgaggtaaggaaggcatacagaatagagacagg

SEQ ID NO: 31529 - DNA, 445 bp, Homo sapiens
tactatagggcgaattggagctccaccgcggtggcggccgaggtacacgatgtccagtagacctactggatatgcaggcctgcagctcaggggagagctgggttaagaaccgccaaggcagtaatcatctgcatttagatggcgagtgaagccatgacaggggctgaaatggcccagcaagaataaatcaaaccatgagaaacacatacatttaagaataaggagatgtggtcaggcgcggtggctcacacctgtaatcccagcactttgggaggccgaggcgggtggatcacttgaggtcagtagtttgagaccagcctggacaacctagtgaaatcccgtctctgctaaaaatacagaacttagctgggtgtggtggtgcgtgcctatagtcccagctgcttgggaggctgaagcacaagaatcgcttgaacccgggaggtgg

SEQ ID NO: 31530 - DNA, 450 bp, Homo sapiens
cggtggcggccgcccgggcaggtactactgcaaccactagcagctaccatttatgaagcacttatgtgccagctactgtgaaagggactctctttaaattactttgcttacttctcacaaaaatcctgcaaagtattattttaaggaaacttaccagtgtagccattcagtatttgggatgaataataagaaactttttagaaccatttataaagcactctaggtcattctttgagaaatgctacaaactagggaaccaggagattagagatgggctcacgtcttgattttcagaaggaaaatgtagtggattgtgaatgctgtatcattaagcttgacatggattctatgcaaaattcaaaaggatttttttttttttaacaacttacttcttttccatagtcttaccagcactcactggttgcctgccatggattctttaagaacagt

SEQ ID NO: 31531 - DNA, 420 bp, Homo sapiens
actactatagggcgaattggagctccacccgcggtggcggccgcccgggcaggtacctcattcattccctctttgttcgggcctctctgcttttcgttaattttctcctggccaaccagccaactctggctccctgtggttataggaaattatccgtgcaatgaacttaatttagaaaaactctgctgcataaagaggtggcagaattattcttctcatagtccagtctatgttgactttcatgctacagcatttcaacagtcattgacatagaaatagatgcttaatttaaaatgtttttgcaaaagtcattggacgattgataaataaagccgaggttagactccaaataaagtgcttaaaaaagtaaaattctggcattcatcttccttatcccttaatgggggaaaaactctcatg

SEQ ID NO: 31532 - DNA, 467 bp, Homo sapiens
gcgaattggagctccaccgcggtggcggccgaggtacatcagcagtatgtaattatattgtgagaacaaggaatattgggcaaaaagcaagtggttaaaacatgcaaacaagcaagggcctgatcagaattttcatttattcagtccttaagaactgcagaatgctgaagtctcaaggggcccggttacaaggctattggaagtttcgtcacccctttaaaatgcccttaaatagcttttttgttttgttttttaaaaaattgttggcccggcgcggtggcttacgcctgtaatcccagcattttgggaggctgaggcaggcggatcacctgaagtcaggagttctagaccagcctggccaacatggtgaaaccccgtctctactaaaaatacaaaaattagccgggcgtggtggcacgcgcctgtaatcctagctactcgggaggctggggcagaagaatcacttg

SEQ ID NO: 31533 - DNA, 251 bp, Homo sapiens
cgactattatagggcgaattgcagctccaccgcggtggcggtttaggtacacagtgtttagcacacaagtgtttagtaaacatttccttttgataaatgcatgagcagacgttcagtctgaagtggagtcaggagtagtcatgtttctgcttgctgccgtgcacagggagcttggcctgcatgcatgaggcatttaattctcaaaacacttaatgatgggaggaggtccatgctctatggggaggtcagac

SEQ ID NO: 31534 - DNA, 460 bp, Homo sapiens
acgactactatagggcgaattggagctccaccgcggtggcggccgcccgggcaggtacttttttttttttttttttttttttttagtagggacagggtttagccatgttggtcaggctggtctcgaactcccgacctcaggcgatccgctcgcctcggcctcccaaagtgctgggattacaggcatgagccatcgtgcccaaccaatacatttgattttgatctatcagcaaagaggctccaaggtttagtatgtttccattttgtattcagggtttcatttgtgtgctaggtcgaacatctttctgtattcaagccgaagttagagatccaaattgctaaaggacttcagcaggccagagctcagtgaaaggaaggtccacagaagggccactaattagtaatgaatggctaaaagacaagggactttttttttttttttctttctgagatggagcttc

SEQ ID NO: 31535 - DNA, 429 bp, Homo sapiens
cactatagggcgaattggagctccaccgcggtggcggccgaggtactgggattacagtcctgagccaccacaccgggcccttcattgtgttttctaaaaacaatttctgatcacctggggattattacaacagatctaactttaggaaagtaagtattaaatttgaataagattatataatagggggatttaaattaaatgcctaacagagtttcatccaaaattttagaatgtgaattcaaggaactcttgacccttctgaagtaaattgatagcatttccacagtgttcacactaggatgtagctagccaactcacagctgcctgtcctcttttagcttccaatgaaaatgctttggaaaacatacacatagaaaaagaaattctcacagtaatacttaaacctaagaggctaagcaatcaggcttt

SEQ ID NO: 31536 - DNA, 377 bp, Homo sapiens
agggcgaattggagctccaccgcggtggcggccgcccgggcaggtactgtatctttaaattaaggagttttagttataatgaaattgatttgtagtctgttttgccgtaaacttgtttttctttaaattgttcttacagtgatatcttactatttttaactgtctggggtttctgatatggggatttcagcccctggttaatcagtcttgtccctacaagtccctgatgcagtatgtttatttgtgatgtttaaagaacatttcttggctgggcgctgcggcttgcgcctgtaatctcagtactttgggaggctgatgtgggttggatctccttgaggttgggagtttgagaccagcctgacaaaacatattgaaac

SEQ ID NO: 31537 - DNA, 428 bp, Homo sapiens
tactatagggcgaattggagctccaccgcggtggcggccgcccgggcaggtacatctgtctccttactctctatacctcctgaacacaaaaattttagtttattctcatttatatctccaaatcttaaattgtctgatcagaagtaaactaaaataaaaattaggttgttttccttttaagacttttcctgaaactaggttgatcaaaaaatacaaatgtttttccatgattattctcagtaagagtcagtaattcaggccaggtgcagtggctcaagcctgtaatctcagcattttgggaggctgaggcaggtggatcacgaggtcaggagttcaagattcaataattggcaaggtataagctccactagaggagaaaaaaaagtattatgctaaagatggactatttgggttccattttcactcta

SEQ ID NO: 31538 - DNA, 401 bp, Homo sapiens
ggccgaggtacttttttttttttttttttgtatttttagtcgagacagtgtttcaccgggttagccaggatgggctcggtctcctgacctcttgatccgcccacctcggcctcccaaagtgctgggattacaggcgtgagccacccatccggcctaacgagacttatttttactcaactagatggcggtcattcatttgcttactcagctgtgccaggaattaagttgggcactgggaattccaaaaccaacaagacattctctgtcatcagggaactcacagcctagtttgagagataaacaaatgaacatgaaattataattcagtaacaaagaatgagtgttatggcagagggaatgtgtaagagcttggcagggtatccagcagggatacctaacta

SEQ ID NO: 31539 - DNA, 427 bp, Homo sapiens
tacgactactatagggcgaattggagctccaccgcggtggcggccgaggtacatggcacagagtttatttaattcatcaaactcaacatataactttaaagtaatattgatattttaatatgctctgaattcagaggtaaagttgcaaagagggaaggcaagcattaaatgtgttttcaagtgagggtatctcttagtaacgtgcagtagaccgcaaatagttgctacctttttttaaaaaaagggaacttttataactcagtatttgaaaagtggtcatcagtttttcatattaattatggaagttgaggagcagctttagccacagttagaacttaagtttctggggaaattggagagttttgtttttattaagtggacagaaaccatatcccatccttatactctgatctgagtatagagaaac

SEQ ID NO: 31540 - DNA, 380 bp, Homo sapiens
tagggcgaattggagctccaccgcggtggcggccgaggtaccatactacccctttcagagtcatattgcacagtggatggatcatggcattccagagaacagagtgcttactgggaccagttacagaatcgtatggaatggacccttgtttagggaccccacaggctttcagtgaccgtccagatgaccaggcttcaatgggtgtcccgccccagctggaggcgatcagcccgatgggatactgcagagtgtcataaaggtgacgtccaaagagccagcacactgctgacatgtacctgcccgggcggccgaggtactttttttttttttttttttggttgttttttttttttttttttttttttttttttttttttttt

SEQ ID NO: 31541 - DNA, 457 bp, Homo sapiens
ctactatagggcgaattggagctccaccgcggtggcggccgcccgggcaggtacttgacctccacagcaagagcttgcacacattagactatctgaaacaaatgcttttttggaaactagtttcttcctacaactcaatgcctgtaggaattatgatgtgaacataatatttgtcactaaattagtttccttgtcttctgagttgaaagaggttacctaggatggcaaagttttggtagttctagactgaacattcttgattgtcaccttcctttagattgatttcctgtgacataatacctcacccctgccagtccgttcagcctgcctgcctccctgactctctccctccctgcctccctccctctctgtgcagctactgcttctggttgtagtcttttgtctctccacgttttgaattacctttgtcagccacctgcacttttcgtatagttgg

SEQ ID NO: 31542 - DNA, 345 bp, Homo sapiens
ggagctccaccgcggtggcggccgcccgggcaggtaccgtattattttagcttttattaggttacagattattctcaaatatctcattacctcttcaaaatcctatgtagttggcattgctgttatccccaatagacaaatgagaagtgacagtcttaaaggtgaactcatgttcaaacaacagaagaataatgggcctataagccatgtctcctgacacacagctgagtgatcttttcatgtcactatgttgctagtgtgcagcctaagtcccactagctggatatgaaaacagaaatagaatctgtgcgctctgattcttcaatccattgctttttttttttt

SEQ ID NO: 31543 - DNA, 417 bp, Homo sapiens
actactatagggcgaattggagctccaccgcgggggccggccgcccggccaggacccggggaaagtcctaagtaaaatactggcaaactaaatccagcagcacatcaaaaagcttatccaccacaatcaagtcggcttcatccctgggatgcaaagctcattcaacataccaaaatcaataaatgtaatccatcacatgaacagaaccaatgacaaaaaccacatgattatctcaatagatgcagaaaaggccttcgataaaattcagcaccccttcatgctaaaaactctcaataaactaggttttgatggaacatatctcaaagtaataagagctatttatgacaaacccacagccaatatcatactcagtgggcaaaaactgggagcattccctttgaaaaccggcacaagaca

SEQ ID NO: 31544 - DNA, 239 bp, Homo sapiens
ggcggccgaggtacacatgctgtgaacatagctcagtgcagcctcaaactcctggcctcaagcaatcctcccgccttagcctccccaaatgctgggattacaggcataagccaccgtgcctggcctaagaaaagctttttattgtaagtcaactaaccaaggagacaggtattccacgcttaaatatgtactccctgtcgttgggcattacgcggcagatccttttatttagaaaaggt

SEQ ID NO: 31545 - DNA, 357 bp, Homo sapiens
  misc_feature 141, 172, 200, 201, 216, 217, 244, 245, 270, 271, 285, 300: n = A,T,C or G
aggtactgggattataggcgtgagccaccgcgtctggcctctaacgagatatttctaaaggttaggccttcagtcaagaattttaaagctggatcttagaggttatctaaactaacctctccatttcatagataagaaagntgagtcccagaaaagcacctggtttggacanagttgcagaaagggctaaacagtgactnnggtggatgtatgatnntctgtctcttaaccctcctaatccaannatgtcttctcacttagatgaaggcnntgtgccttctacantttgaagggctcagnaaccccatggatggatggaagggaaaggatgggtggaagggaatggatggatagatg

SEQ ID NO: 31546 - DNA, 380 bp, Homo sapiens
ctatactggcggagtgggagctccaccgcgggggctggcggccgaggtactttgttcttttactactcaatgagactgagagcctgctggattcactaagaccaggtgaacccggagggctctcggtctcattgactcaattgggtttgaatctcaattctgcaacctacgtggctttgggcaggtttccttatttttaaaatttacaattatatttaccttttaaacttattgaaggattggaaagctgtaacacctagcatgctgtcgtggcataaggtgggggttaagtaaaaagtagctactattaacatttttgaaaaagtgcttcttcattttccctgctccctttcatactcttcatcctactttcctggtag

SEQ ID NO: 31547 - DNA, 404 bp, Homo sapiens
ctactatagggcgaattggagctccaccgcggtggcggccgaggtacttctgtaagctaatcataaaacggaataaaatttctcttggaaaatgcattcagagttccacccttgaatgcatgggggggcatgtcttttttacaatagccatttgccacaggagtgggaaattccacttttcctgatggatatctatgggagctgctcctccaaagtcctggaagtaagaatgtgacaaaataggggaaataaaggagagaaaagaggattgtaagccatcagcagtgcaaagttttccacccctccttctcctaactttcctgcttcacccaagtagcaactgtaagttcttccaataactaccatcacctgggtgagctaaaaagtgggaagagaagacaatg

SEQ ID NO: 31548 - DNA, 235 bp, Homo sapiens
actactatagggcgaattggagctccaccgcggtggcggccgaggtacttaacactatattgagattgttattttaactggaattctaagatttgtgaactgtaaatgaaaaacatactcattaaattttattttttcttgatactcaaaatcatatttataaaaaaaggatttttttttttttttttttttggaaatggaagtcctgcttttgtcaccccaggcttggagttgc

SEQ ID NO: 31549 - DNA, 429 bp, Homo sapiens
attggagctccaccgcggtggcggccgaggtacatttctcaagggtaaggactatgtcttatgtctttgaacacccttaaaggaacctaggctagtagttgacattgaatagtttctaagtaaactcttgccgactggaattgtatttacggcaaagctacttgcaaattacttgcattgagaccaaatgtaaacactagaggagccagacatggttttctttggacacatcttggacgtgcctgatgtcctccccacctgccttgggcatccctttatgataaaactttaattcagtcaaactggtatcactgcatgtttttaagagacttgcccactttctgaccaaattatccatctacccaaggttcttagtcagggtcggtgtcactctatcaaggggctatatggaaatagggagggtttggt

SEQ ID NO: 31550 - DNA, 416 bp, Homo sapiens
ggcgaatgtgagctccaccgccgtggcggccgcccgggcaggtactaaagcatatcatcagattgggggttccacttgttgttttcaatttaataaacacttattgagctgctacaggaactgtttttaatgcttttccaaaaaaagtgaccttctcaacatgatagaaaacatttccgaaaaactgatagctaaaactatacgcagtggagaaagattgaaggctttccccataagattaggaaaagacaaacacactaaaatcacacacagctagtgtatagttgtgtttcttacattaacaatgaacaatccaaaaaagaaattaaggagcaatttcacttacaataacatttgtattattccgttttcacactgctatgaataaatacctgaaactgggttgtttataaagg

SEQ ID NO: 31551 - DNA, 401 bp, Homo sapiens
gctccaccgcggtggcggccgcccgggcaggtacactctaaaagccaaaaacagcatgatctgaggcaatacagagcataagctggtatcaccaatgcatcctggaaataaaacctgtgctacctactatcttgggaatttcactgagagtatagaacattctaaatgaaaaaaagaaacgaaaaggaatggttataaattgtttaaatgtgtaaacaaacacaatagatgtaagttacaaaaatgttcagagtaacagaatgcactgataacatttaaattaaatataaagaaaagcaaatctacttccaacaaatacatggatacatctttgtttcatacagcagatgcagaaatgtagcttctattttaaaaagtctgaatgtccataaactgttccc

SEQ ID NO: 31552 - DNA, 405 bp, Homo sapiens
tacgactactatagggcgaattggagctccaccgcggtggcggccgcccgggcaggtacctcagactcccaagtctccatattctgtaaagtgctcctatgggtgttgatttattcagctgaaaaactgaaaatccattttaggattgagttgatcttcactgaggaaaaatatcaattttcagagctttgtctaggaccctgcaaagaacttaagaattcttaacagaggttcacgaatggtcccaaggagtccacaagtaccatgaaattgtatgtatacaagtgagagggagagaggatgagagcctctgagaatgtaaattttttggcatgaagatccataactttcctcagatccttatggggttctgtctttcccaaaccacaaagaatctgagctgag

SEQ ID NO: 31553 - DNA, 476 bp, Homo sapiens
atacactactatagggcgaattggagctccaccgcggtggcggccgaggtaccactgcactccagtcgggtgacagagcgagaccctgactaaacaaaaaataacaaaaaaggaggcaggggtttagaaaataccatgattgttaacaggaccatcagatttcattttttctaaaatattagatattgtcagtgtggtttttatataggtgctgattctgttctgctcgtcttcaagtaacaaatgcctgcagtggagatatcttattttgatgattaacaggaagcttttaagctttgaagaaagcaaacaacattttccatggacctttaagagctgggctaatatttttgcccacacagaactctaattcatttcagagtcaagggcaacaatagaatactttttcaaggaccttgcatttgttaatacaggttttcataatagaaagcaatttaaatattcagaactaacgt

SEQ ID NO: 31554 - DNA, 418 bp, Homo sapiens; identical to SEQ ID NO: 31114

SEQ ID NO: 31555 - DNA, 178 bp, Homo sapiens
tagggcgaattggagctccaccgcggtggcggccgcccgggcaggtacctcattcattccctctttgttcgggcctctctgcttttcgttaattttctcctggccaaccagccaactctggctccctgtggttataggaaattatccgtgcaatgaacttaatttacaaaactctgct

SEQ ID NO: 31556 - DNA, 431 bp, Homo sapiens
tactatagggcgaattggagctccaccgcggtggcggccgcccgggcaggtacatgagtctcttttttttaagaattttaattttcctagttccttatctttttaatgattattctttaagtggacatttaagacgtgagcttttaagagcagctgaaaattattggttgtttactatgggttttatccatttgtatactgttttttttttttaagctatcttcaaaatagccataggaggtagattccattattattttactctaaaaagagaaaactgagttttaaagtgttaaagtggcaggaccaagatgaagatacgaggtgaaagtaactaaaggttgttagcataacaattcaaccaaagatgcaatttgaaacaatatgtcctttggctgtcatgttctagacaatgagatggccagattgct

SEQ ID NO: 31557 - DNA, 459 bp, Homo sapiens
  misc_feature 354: n = A,T,C or G
cgcggtggcggccgcccgggcaggtactacatcttaaactagactgttatcaaataagctaataatactttacaaataaggacggtatttcaaacttcaggaaccatcgtttttaaatgattcatgtagtatttaatcacttggcggtcttcataatttaaccctgtcataaagggaacttttacaaagattaaaatagaatggttacaggggacacacaattgcaatctaagtgcgggatgtaggctattcaacagtatccagactttatctacaacatatatatatatatccacacataaatatgcgtagggaaaaagacttgtgggggtttgggggtggagctaaactatntgctgtgtaagagacataaactagaaagaagggcctgaataggacagatacaaatggaatcaattagctgggtgtggtggcgtttgcctgtagtcccagctactc

SEQ ID NO: 31558 - DNA, 428 bp, Homo sapiens
tggagctccagcgcggtggcggccgaggtaccaagcctagagagcactaaataaatgtcaattattatttttatccattctggcatttagaaataaaagttacaaaattcactattaaaaataccattgatacataccatattccagccacactggcctcttttctgtgacaaaatgccctttgcttcttttgccctcaacacctgatcctccctatgcttggaattttcccccaactcctgcacggccaactcattatggtccttaaatctcaagtccaatacctctcaattcaaatattccccctttagagagccttcattgagactgctatccccaaaagtctaactttcttataatcttgctttaattatgtcatagcttttacaaacatctgtaattgtcttatatacactggtatggagagc

SEQ ID NO: 31559 - DNA, 391 bp, Homo sapiens
gggcgaattggagctccaccgcggtggcggccgaggtacatcagcagtatgtaattatattgtgagaacaaggaatattgggcaaaaagcaagtggttaaaacatgcaaacaagcaagggcctgatcagaattttcatttattcagtccttaagaactgcagaatgctgaagtctcaaggggcccggttacaaggctattggaagtttcgtcaccctctaaaatgcccttaaatagcttttttgttttgttttttaaaaaattgttggcccggcgcggtggcttacgcctgtaatcccagcattttgggaggctgaggcaggcggatcacctgaagtcaggagttctagaccagcctggccaacatggtgaaaccccgtctttactaaaaa

SEQ ID NO: 31560 - DNA, 444 bp, Homo sapiens
tacgactactatagggcgaattggagctccaccgcggtggcggccgaggtactttttttttttttttttttttttttgtttggttttgttttgtttgtttgtttgtttgatgccgttatcaagtagagcagacctgggaagactggtgcatccttatttctgtcatcttagaaaataacatatataagaaaatatttatatctagggcagaagaaaattagagatatatttttttcctttcagcctcttctctcctccatttttactactgaaaaattatccaaaggcatgaaaatatttcatagaaatgtcttctgagttgtgagggaattcttgcccatttgaacaaatggaatagacatttgaaagcaaatcagaatgccccttactgcttggccaatgtgcaaggatttggagctgcttatctgtgctgccatgtcctta

SEQ ID NO: 31561 - DNA, 473 bp, Homo sapiens
actactatagggcgaattggagctccaccgcggtggcggccgaggtacttcaaatgggtcactgaatatcttcaaattgtatgtaaattttggaggggaagtggtatatgcagattttttttttctggaaagaagaccaatcacttttgccaaattctcaaacaggcccatatttctctcacacacatgcgtgcgcatgcgcacacgcgcgcgcacacacacacacacgttaagatgcgaagaatcactgtcataaaatgtcatatttctaatttctgtaaatggggagaattcctcaagcttatataaaagtgatgtaaataattcagttacaattataaaagaaatggtatcacagcaaatccctttggcaccccactgaaaatttctctctgatgtttaaaacaccatttctatgcttactcttacagctgtattaataatcagataaggggtttatttcttgtctattt

SEQ ID NO: 31562 - DNA, 483 bp, Homo sapiens
actcactatagggcgaattggagctccaccgcggtggcggccgcccgggcaggtactgtaaggcctctaactttgttgttcttaaagactgttttggctacctcttttggttttctatagagattttagaatctgtaaaaccattttctataaaaatgtcctgcaggtcttttgatcaagattgtgttgaatctatagatcaggatgagaaaaatcgagatgtcaacactatcaagttttccaattcatgaacgtctctccatttagttaggttttaaatttctctcaaagatgttttgtaattttcattatacaagtcttacacttctttggctacatttattcagtttttatgttttttatgtcagtttaaatggaattgctttttaaatctcattttccaattgtttattgttgataaatggaaacacaatagatttttggttattgacctttataagtttacttactgattctagtagt

SEQ ID NO: 31563 - DNA, 635 bp, Homo sapiens
tatagggcgaattggagctccaccgcggtggcggccgcccgggcaggtacaaagcaagaggagctatcagagtcatggagtaggtcagggcacttcaagttcatagaatctttacacgaaaggattattttagagctcatctacccactcatattgcagcagaaagaattgaagctctgggggataaatgacttattcaaggtcacagtgagccaaagctgagatttccagatcctaaccagcgttaaatttctaagctgcattttagcattccacttttcctcattttgcctattaaatcctccaaggcctagttcaggttctttctggtccagaaagtgcccccagtcttctccaattctacagagatgccttccttccctgatgctacagaatgtatcatctccatcactcattggcaccaataaataaaatgccctttgacatccaagagtcatgaaactttgagctggaagggtcattggatgtcatttaactcatatttcagtttcaaacttacataagtcagctcaccaaggtagctgaagttcctttggagaaaagctcttgtctaacaatcttgatgattggtatccctctctattcagcaccataacctgcataaacttcatatt

SEQ ID NO: 31564 - DNA, 407 bp, Homo sapiens
gcacctccgcggcggccgccgggcaggtaccttgaattagagcctgaaatgggggaaaagcagccataaaagacattctcagacaattggagactttcctgagttgtgataatggagttatgaatatgtaggagaatgtctacatagattttatgaagatgcatgtggcaacatatctgcagcttattccaaaaaaggtccaagaaaaaaaggaagggaaagaaaataggattacaggtgtgagccaccatgccaagcctcactgtttctaataaccaaattgttcctgtatttattgagtctctgtttcatgccagacactctgctatagtctgaatatgctatttctgttaattctcataacagttctgtgagcaagaacaattaatatcacccttttacagatt

SEQ ID NO: 31565 - DNA, 454 bp, Homo sapiens
atacgactactatagggcgaattggagctccaccgcggtggcggccgcccgggcaggtacatgccaccatgcctggctaagttttgtgtttttagcagagacagggtttcgccatgttggccgggctggcctcgaactcctgaccttaggtgatccaccctcctaggtctctcaaagtgctggaattacggtgtgagccactgcgcccggcccttagtagcatcttttaatggaggtagagttgagatttcagtgactaacaactaaaggtattaaaggtaggggtttatatgatacatttgcattttagaaaactgatctaagcttcaatgtgaagaacagattgaaatggaagggggagaagactagaagcagaaacattactcatttaagtaatctggaccatgaaactgaaaaaaagtatagggactccaaaagtcataaagaagtgaaa

SEQ ID NO: 31566 - DNA, 464 bp, Homo sapiens
tacactactatagggcgaattggagctccaccgcggtggcggccgaggtacgtcacaccaatggtctcagtgtggtccttaaaccagctgcagcagcatcacttttcccaggtgcccatcccagacctgctgatttggaaactgactatggagcccaggaagctgttttagcaagccccctaggcgattctgacgcagttgatgtttgagaaacactgcactatctcagactcttttaaatcagagatctggagtcaaattcaaactctactacatctcagctatgtgacctttggcaattgatacacctttctttcttttctttgcttttttttttttttgagacagagtcttgcactgttgcccaggctggagcacaatggcacgatcttggctcactgcaacctccacctgtcaggcgatcttggctcacggcaacctccacctctcaggttcaagcaatt

SEQ ID NO: 31567 - DNA, 326 bp, Homo sapiens
ttggagctccaccgcggtcggcggccgaggtatcttttacatactccatgtgttcccacctcgtgtcctaacaagaattgactgtgaatatcttatgcacacagttttcagctcctgctttgcttcagaagaatcagcagtctgttgtgcaaaacagttgaaggaactaccaggatttgtagacccatttagtggttgttgttgatgacagaggctgacctgtggaggaaatggtcggtgaagcactgggctaggagattgtggctgctgaaactgcatttcttgactttttctgcctcactctggcttagtcttaactgatggtg

SEQ ID NO: 31568 - DNA, 141 bp, Homo sapiens
agggcgaattggagctcttccgcggtggcggccggccgggcaggtactatatggacaccaacatgtagcagaaaatgattgcagcagtgaccaatctcattccaggggagaagttgcacagtgtccaataggtgcatacat

SEQ ID NO: 31569 - DNA, 483 bp, Homo sapiens
ctactatagggcgaattggagctccaccgcggtggcggccgcccgggcaggtacgcggggggccaagaaccaacaagggcagcacattgtgggtctgatgatttggtgcaagatggataactggacaggatatgccagaattatactttggatagtgactaaattcatgatcagggcaggtatggctctcagacttgtggactcagatatctaaattttcactcagaaatgttaatgttcacagacaatttacatcctctgaccagtgttttctcttcctagagttgaattgcctgagaagcccagttatactgaggttacttggtaagcctaactagagcatatattctttagatgtttaggacatcaaggcatcgagctaaaacagcctgatgtaaatgtcaacacaatagggattccactgccctcaaattaggataaataagtgtccttggctaggacctcctccccaactgtcataac

SEQ ID NO: 31570 - DNA, 416 bp, Homo sapiens; identical to SEQ ID NO: 31074

SEQ ID NO: 31571 - DNA, 369 bp, Homo sapiens
acgactcactatagggcgaattggagctccaccgcggtggcggccgcccggcaggtactgggattataggcgtgagccaccgcgtctggcctctaacgagatatttctaaaggttaggccttcagtcaagaattttaaagctggatcttagaggttatctaaactaacctctccatttcatagataaggaagtgagtcccagaaaagcactggtttgggcaagttcagaaagctaaacagtgactgtggatgtatgattctgtctcttaactcctaatccaaatgtcttctcactagataaggctgtgccttctacatttgaaggctcaaaccccatggatggatggagggaaggatgggtggagggat

SEQ ID NO: 31572 - DNA, 230 bp, Homo sapiens
actcactatagggcgaattggagctccaccgcggtggcggccgcccgggcaggtactgtcacgattcaacaacctcttaaaaaatacaatatatgcttaacaaggcttctgttgacctctttctggaagcctgatttctttcctccacttatgttaacagattaaaaatttaaaaaaaaaacataatttttttaagtaaacacaaattagggaattttggccccccaaaa

SEQ ID NO: 31573 - DNA, 447 bp, Homo sapiens
actactatagggcgaattggagctccaccgcggtggcggccgaggtacttgtgttgtcttcaggattagggaatgctgctttgatcatgttgaaaggaagatagaaaaaagattgaaaagctgggtctctaaggtaggaggtctgggatctgtttattctacttagttcaagttggaattgatgctgttaaacatgtgaaatgaccctaaactactcttcagggttaaggcaggtctgaggcagatggatgaattacgcaaatggactataatgtgtaatctgtgcatgtgtgtaacaataaaatacagttctatcaagattttggttgagaaaagttaatgataaaagggctgggctggaagactgggtcgaggaaggagagtgatacttaaggtttactcacatcttatctaggcaacttttctggtcttgatttgggctttaag

SEQ ID NO: 31574 - DNA, 444 bp, Homo sapiens
tacgactcactatagggcgaattggagctccaccgcggtggcggccgaggacactatttttttgctttggaagaaatgaatcctagttttggttcagaaactgtcaacagcattgtgcctcttctatgactactaaatttcaagcaaagagagctgagttgggggtaaaagcagggctattccccgccttcagacaatgctgtcccttatcagggcagactgctgtctggtttcctgtctccagctcgggcatgactgcttaagatgagaaacatggtctaagaaaggaacagagtggtcttgaaaatgagaatgctagcgaccaccataaccctcttccaactcactcccaagaggaattctgactagaatatcacatactagcaaactagatatcaattgttttaagattctagggatttgcttttttaaaaagctagaacc

SEQ ID NO: 31575 - DNA, 414 bp, Homo sapiens
cactactatagtggcaattggagctccaccgcggtggcggccgcccgggcaggtactttgcacatatcatagtggacttgtcctaggagaatcagaactctagccgaactcatgtaatccttaaagctcgtactgtgattattgattaaaagagaacagctgagacctttgacacttcagaggccagtggtctgtgcagtcagtctggcttctctaacagggaaaggcatgtaaggaaaaggaaatgagacagcctgggacacaagttcaagtatgaacaatactatcacatgttccatagtgcctatcaaacaagtgtatgtcgtcatattagtcgcctccttagcctctggccctcccataatactcaaagccatctggctatctgctcttatttgcaagtaatcaggaaaa

SEQ ID NO: 31576 - DNA, 545 bp, Homo sapiens
agctccaccgcggtggcggccgcccgggcaggtacatatattttaagtgaaagtgacaggaaagtggaatgagcacttatttttctttatcatttaaattattactttaacattttaatactttgaaattaattttgttatatagtagaatgtaaggtctactgaagtgtatcattttctaaatgacagcatttttcaataccattttaaacaaatgctttcttttaaggacactctaaagataatgtgcactacactagttttcgtagaactattcatgtgtaggcactcaccttgagaagtaggattttttttttacttaacgcttttgtctcttaaagtattattatatatagttaactgtaaaaacattgagatatattaaaaatattataggacaggtaatacatattcatggtagcaagtgaaataatacaaaggtttatgaataaaaagttactactctcctaggtagccaatgttaccagtcttgcatatccttctgctgctttttctctgctcatacaaacatgaacttactcatg

SEQ ID NO: 31577 - DNA, 398 bp, Homo sapiens
ctactatagggcgaattggagctccaccgcggtggcggccgaggtacatcagcgccacaccgcagggctgtccacggtgagctatgaggctggagatggttctggagcagtgaactgcagaggaaagaaggctgccctacccctgggccaccaatcactagcagtgtgacctccggcagcttcttctcctgccaaatggggatgtttgcttcactgacagaaacacagtgggtgaaccgggagtgagcggcccacttggctgaccacttaccaacatttcggcggggcctcgtgctgagacctctccccaccctgacggaacagtcagttggaaaacagccagtagttccattcccactaacatcttatagtgaccaataatactctaccataactgt

SEQ ID NO: 31578 - DNA, 533 bp, Homo sapiens
  misc_feature 80: n = A,T,C or G
ctcactatagggcgaattggagctccaccgcggtggcggccgcccgggcaggtacaaaaattctgttatgaatgacctgngtcattctccctgcctgactgacatcctggagtgtgtcattgaaaaccttcactttgctggcatcttcccaaatttctcagacaccctctctttgaacctggagcctcctggggaagtattaagagccaaccagctatgaaaacaatgtgctcttccctgtgctaagtgcctcttcttaggcagtaaaatgcttcagtggtatgaacatatggcatcaacatggcctctgaaaaccatgctgggtgtttaacaagcatggagggatgtggacaggctgtgatgagctctggaggcttacagaacaggacctcccctcccccaggagcagaggttcctcagggatcttgactccacatagaccaaggctatgtgggaaagagagctagtgccttgaagctattgcattttttttcctttaataaaacaccctgcagaccctgacatatgccaca

SEQ ID NO: 31579 - DNA, 445 bp, Homo sapiens
actactatagggcgaattggagctccaccgcggtggcggccgcccgggcaggtaccatttggaacttatttttatttaagttttagctcaaggttctccagaatctgggagttgagaaaatgccaatggaaataggaaatatgaaatatccaggatcaatggtagacttttcttcttactgtaacagtgctctggggcacatttcttaccttgctattttttggagaccaagaaaatattgcatctatgtccatccctacatagacctcacaaagcataggtcaaattctaataggcagccatgattctccaattttttgttcacaaataagtcgactgacttcctaattggagtcattgggggtaaggagcaacggacaatgtcagagaggaccacctcacaggtggacttgtgaggggctgggaaaagaaaagacatgttcat

SEQ ID NO: 31580 - DNA, 384 bp, Homo sapiens
tactatagggcgaattggagctccaccgcggtggcggccgcccgggcaggtacttatttctttttcttttttttttaactggtggatttctttaaatgatatatgtatacaatggagtagtgatataggctacaatatggatgcatctcaaaacattatgcttagtgaaagaagtctgatgcaatatcccacatatggtatgtttccacttacagtccagaaaaggcatatactaaattagcagttgcatgggtctgatgtgaaaacatggattgcctgcagatgggcacaagggatcttttgggggtgacaaaaatgttccaaaactaagttgtaatttttgcacaacttttatgtgtgtgtgtgtgtgtgtgtgtgtgtgtg

SEQ ID NO: 31581 - DNA, 428 bp, Homo sapiens
tacgactactatagggcgaattggagctccaccgcggtggcggccgcccgggcaggtacatttctgcattttctgaatttccacaagttgggtcagtctaaaggctcattcttcacactcccacaaactatttattactctatgccctttccaagcaaatcgagataggcagttatcaaagcagatgcattatttgggtccacctgaaaacaactggttctgcccccccctttctcccaatctgcaagcttctgttcatccctgtgaataaaaatgcagaatgacaaaaagtctgggtgacttacattattctccttatctcaacataaatgtgaaatctgggggtgtcagctagtcaatctccaggtcctcgtaaaagataatgtgcctggtggttttgttttgcttttcacaaacatggaaaaggg

SEQ ID NO: 31582 - DNA, 311 bp, Homo sapiens
ctactatcgggcgaattgtagctccaccgcggtggcggccgcccgggcaggtacatgggactacaggcacgccccaccattcccagctcatttttgtatttttagtagagacagggtttcaccatgttggccaggatgatcttgatctcttgacctcatgatccgcccctcttggcctcccaaagtgctgggatcacaggcgtgagccaccacacctggccctctatttattctctttaaagagagagaaaactatgagaagccaaaattattttaattaaaatcttaaccttaacacaagggaaaaaaat

SEQ ID NO: 31583 - DNA, 398 bp, Homo sapiens
tcactatcgggcgaattgttagctccaccgcggtggcggccgcccgggcaggtactttggcttttgtttctagaacaccaatgagtatatgctcattaagatagtttgatgcaataaatccttattttacttgcctctattactgcattgtaaactgttgtctactttgtcttcttgaaatcctacacctccctcagcccccacatttggcctatggaacattactttatcctgattttccccctaaccttctggcaatgcctctcagactccttccagaactacttttctctgttttccttttaatgatgacagtttatgcaattgtgtcttcaaacttataacgacccagacaatagtaataacagtcaacatttactggattcttacttgtgtta

SEQ ID NO: 31584 - DNA, 460 bp, Homo sapiens; identical to SEQ ID NO: 31534

SEQ ID NO: 31585 - DNA, 444 bp, Homo sapiens
tacgactactatagggcgaattggagctccaccgcggtggcggccgaggtacttctccagttgagcctctcatttctttcttaaatggctattgaattctgcctgttctcctgcatgggctttgactttgtccagctttgctacagattaacatcacaagggtttctgagttggttctcagccatcatcgtatcctgacttggcacactgtccttcttttacaaggcctttacacctccattctctttagaacaacaccttcattgtccacattcatttgtttacggatcctgttgggaacagctgctccttcatctttgctctaagagaaatttcttcaaacctctcttattttactatattatcctgaaattccttacatctttatcttattatctatttacctttatctccttgccatggtaaccaacacaaagtagcacc

SEQ ID NO: 31586 - DNA, 324 bp, Homo sapiens
ctactatagggcgaattggagctccaccgcggtggcggccgaggtacttcagttgaaaagttgaccaaagccaaaaaatgtctatctggtggtcagtagtttgataggttcaaggagttgaaagaagcctaggatggctgggacatgtagatcatagtgctaagagatggaaagcaccttgtgctatttggccgtttcagttgtgatgttttttaagtagagtgttgtgatcagaagggccctttagaaagattgtggctagaatatggagaacaaagaggagaccaccagagtggatgtgggaggccaatatgtaggttattc

SEQ ID NO: 31587 - DNA, 170 bp, Homo sapiens
ctcactatagggcgaattggagctccaccgcggtggcggccgcccgggcaggtacttttttttttttttttttttttttctttatgtttgagggggaatgctggaaattgtaatgggtatggagacatatcatataagtaatgctagggtgagtggtaggaagtttttta

SEQ ID NO: 31588 - DNA, 440 bp, Homo sapiens
atagggcgaattggagctccaccgcggtggcggccgaggtacttgagggcatcattaaaatcagccagtgttcagtgagagacttaatgatggatttaatagtattaaatgggcaaaaatgcccttggcctttacatgctcatttaaaaacatacaaaagagcagtaattcaggcagttatacttctctcaaagattttgctctaaatcacagatggcagcgggaggccacggctgtgtgctggctcacaccccactcactccaaccgaagccagaagtgctcgttgggtcataattagcaaaccacccgcaaactcgactctttaaatcagaggccagtgactgccaggctggggcatagacgggagaaaacaagcagaaatggtcaaggtgctctctggagcctgcctttcgatagctgtgacccccacgttaggcat

SEQ ID NO: 31589 - DNA, 358 bp, Homo sapiens
tatagggcgaattggagctccaccgcggtggcggccgcccgggcaggtactgggattataggcgtgagccaccgcgtctggcctctaacgagatatttctaaaggttaggccttcagtcaagaattttaaagctggatcttagaggttatctaaactaacctctccatttcatagataaggaaagtgagtcccagaaaagcactggtttggacaagttcagaaagctaaacagtgactgtggatgtatgattctgtctcttaactcctaatccaaatgtcttctcactagataaggctgtgccttctacatttgaaggctcaaaccccatggatggatggagggaaggatgggtggag

SEQ ID NO: 31590 - DNA, 389 bp, Homo sapiens; identical to SEQ ID NO: 31175

SEQ ID NO: 31591 - DNA, 469 bp, Homo sapiens
cactactatagggcgaattggagctccaccgcggtggcggccgaggtactttttttttttttttttttttttttttttttaatttttagtagagacagggtttcaccgtgttagccaggatggtctcgatctcctgaccttttgatccgcccaccttggcctcccaaagtgctgggattacaggcgtgagccacccatccggcctaacgagaacttattttacctcaactagatggcgttcattcatttgcttactcagctgtgccaggaattaagttgggcactgggaattccaaaaccaacaagacattttctgtcatcagggaactcacagcctattatgagagataaacaaatgaacatgaaattataattcagtaacaaagaatgagtgttatggcagagggaatgtgtaagagcttggcagggtatccagcagggattcctaactaagccccactggggaagg

SEQ ID NO: 31592 - DNA, 449 bp, Homo sapiens
ctatagggcgaattggagctccaccgcggtggcggccgcccgggcaggtacataaggggcccaatacaagcaagcataaataatcttgaaaataagagaaatctgagaatgcataattttttagttgatgataaacaatagttttagaacttaaaccataattttcagatgcttgaaaaaattctgatcatcttcaaccatggtatttacatgaaccacaaaaacatacaataacatacactctccaaataacaaattgcactcctacttactcctatttctctactcagtgcccatttcctcaaaaaacttttcccaattagcaccaatgaaggacaacactcagactaccctattctttaaacagacatgaatttgtccaatatacatatatgtatttcctggactattaggtcctaaaatactttagtaaagaaagcaatgacggg

SEQ ID NO: 31593 - DNA, 385 bp, Homo sapiens
acgactcactatagggcgaattggagctccaccgcggtggcggccgaggtacatccaaaatcatttcaccatataacctgtaaagactgcatcatcccagctactttcctgctgacttccacttgggtttactcaatgggtgacactcacaggacataagagattagaaagagggataaggttttttatatatctgctgcctccttacttaaagccatggttttagcagaggcccaaggtcgtggctttttttgagcagcccctttatcaaaggtgtggaaagagactaccttccccctcacaactgaataatgaggcttactactccccgcgtacctgcccgggcggccgctttagaactagtggatcccccgggctgcaagaa

SEQ ID NO: 31594 - DNA, 446 bp, Homo sapiens
tacactactatagggcgaatggaacctccaccgcggtggcggccgaggtacaggttctttgaatgcagtatttattcacatagttttcattttctgtcctgacaaaaacttggtgatgcttgaatgattacagaacaaataggattgtggtttatgtttcctattatgcatatttggcagttgaattatgacattagattgggacatggtgagagggggcaggatacggggtaggaggaggggagcaagttacaaaaggccccagttccgggaagctgggctgagttgttctgtttaacttcttcttcctttattcctatggttttatgattgcaaattggcagtggcagggcagctctgactatatttgctagaagcagatgtccacattaatttagatgtttagggattaaaaatcatagagggtggcgctaggaaatatagaa

SEQ ID NO: 31595 - DNA, 309 bp, Homo sapiens
tatagggcgaattggagctccaccgcggaggcggccgaggtactatatgctagaaacttggctgaatgatttgacattatcctatttaatgttcatgacaatccaataacgtaaccactcatatctcccttttgtgcagataacaaactgaggcccagagaaatcaaatatgttgtcaaaatctacatcggttgaagaagatgggtttcaaaatccaagggtcgggcttgggccctttgccacgaacttccataaatgaaaattccattgggtgagttgtttacacagtttttctggtaccaatccttg

SEQ ID NO: 31596 - DNA, 312 bp, Homo sapiens
tatagggcgaattggagctccaccgcggtggcggccgcccgggcaggtaccatactcttttggttgctataattctgtggtataatatgaagtcagaaaatataattcctccagttttatttatttatttatttttgcttaggatagtattatttcttatagtgaaagcattctatgttatttatttataagcccaattttgtagtttttacaatgctatcctcttttacaaagctatgatcaactcagtgtgtccagatcaggatcatttgtagctttttgcaaaagtagcactattccttgctgggcatg

SEQ ID NO: 31597 - DNA, 398 bp, Homo sapiens
atacgactcactatagggcgaattggagctccaccgcggtggcggccgaggtacaaagaaatgaagtaatgtcaaatatagaataatggtttctctggaggagactggaatgtgggtatgcaatcaacagcttctggactgtcactgtttcactgttttatttcttaaggtgaattattcattattctttatattcttttaaaatgttatataactttatagatcaattaactaatgtttggctccttttattttagagatctccagcattttaggttgcctcatcaatagttggcaaaaagaggccaggcacggtggctcacgcctataatcccaacactttgagaggccgaggcgggtggattactcaaggtcaggagttcgagaccaccctggcc

SEQ ID NO: 31598 - DNA, 413 bp, Homo sapiens
agcgcgcgtaatacgactcactatagggcgaattggagctccacgcggtggcggccgaggtacttgtaggttgtgatttttttttgtcaacctgattctgtctgttttttcttaggaactcatcaaaatttccagcctactgataacactccattattttctagcacagcagcactgttaggaaatttttcttaaatatgcacgtagtaaaagtatatatataatgtatatatacacttaaggacatatattacatatggacacacaggtgtatatgtgtgtatacacacatgtatatattcccagtgactttcaggtggagatgagctagatatacacgttcagcattttaatgcaatacttaattataattcataagtgaccaccactgtatgcaagccattattatgatg

SEQ ID NO: 31599 - DNA, 283 bp, Homo sapiens
ggagctccaccgcggtggcggccgaggtactgggattataggcgtgagccaccgcgtctggcctctaacgagatatttctaaaggttaggccttcagtcaagaattttaaagctggatcttagaggttatctaaactaacctctccatttcatagataaggaaagtgagtcccagaaaagcactggtttggacaagttcagaaagctaaacagtgactgtggatgtatgattctgtctcttaactcctaatccaaatgtcttctcactagataaggctgtgcc

SEQ ID NO: 31600 - DNA, 461 bp, Homo sapiens
gcgaattggagctccaccgcggtggcggccgaggtactggtctgtggcccaggggttggggaccactggattagtcaacaagagtagttgttcacttcttcatcctccctagagcactaattagcaagaaaattaaagaataaatttaacatttacccctggaggttcaaggacaagttagaagttaataccttaactttcagtttcactcaaatgtgcataaagctccattagtgctgctattggtttcactaactccatccacaattctcccgaaaacagaaaacctcatacaacaaagccaaacctgaaacacaatcaggtttccaccaggcagaagtatggtgactaagcctagtggcctcggcactgctggacactgaattgcaatggggtaagtgaagagttccaaagccaagggaagcctcccaacagcatagcttggaatggagtgatctgct

SEQ ID NO: 31601 - DNA, 443 bp, Homo sapiens
tacgactactatagggcgaattggagctccaccgcggtggcggccgcccgggcaggtacttttttttttttttttttttttccttctcttcttataagacatctgatttaaaaaaaaaagaataatagatttaagaagaaaaaaattagctaataatgacagcaggcttgtaatattatcataatgtcatttatcatagatatccttattctccagggcagcacttctcaaatccttgacagtatgacattttgggccagctaattccttagggagggacctttcctgaatattcaggccgttgagtggcctgcttggccttgacccgctcactgccagtagcacacctcccccaagcttcagcagcagaacacctccagtcacttagtggggactgggtaggtgggagacagaatcgcaccagttaagtgtctctgcggcag

SEQ ID NO: 31602 - DNA, 370 bp, Homo sapiens
atagggcgaattggagctccaccgcggtggcggccgcccgggcaggtacgatcttggctcactgcaacctctccctcccgggttcaagtgattctcgtgcctcagcctcttgagtagctgggattacaggcgcgtgccactgcgtccggctaatttttgtatttttagtagagatggggtttcaccatgttggccaggctgatctcaaactcctgacctcatgtggtccacccaccttggcctcccaaagtgctgggattacaggcgtgagccaccgcgctcagcctacaagcaattttttaaaaactgacacctattactgataaaattctctgtttaaaattcctatttactattttaaagataagta

SEQ ID NO: 31603 - DNA, 420 bp, Homo sapiens
gtaatacgactactatatgccactactatacggcgaattggagctccaccgcggtggcggccgaggtacgttcagacagatggtgccaggagtgtaaaataatttattgtctaaggaatttcaattttcagttagtggtaaggataatagaatctttaatttggtgcagattttcagaagattctgaaaaacaaaaaaagcccttaaaaattaagagttgtaaggattgaaatttgcagggaggtggatgactttatttttgagtgcattttaaatgaaaattgatgggttttttatgaggtcatgggaacttttgcatgaggtggatagaccagttggccacttcagggggctggcaggggaaccgctggttggtcatacccgcatcttggtgcaactgctttgctgccgtgggtacct

SEQ ID NO: 31604 - DNA, 395 bp, Homo sapiens
tacgactcactatagggcgaattggagctccaccgcggtggcggccgcccgggcaggtacccctcactgccactacgagtatcttagctcacattggtttaatcagtctttagtaaccccagggtgtctaaacatttccatgtctaaaggtgtctttaagaatgggaaaatagtcccccctgcctttcctcttcacacacacagtataccacttctgcagtgttgactctagacccatagccagcagggcatctgctgttaaacctggacgctgctggctgtggctgaaactgagttatctactggacagtgtgtttgtgtcttatagcaatatcagtagttgaatcatgggccatacttcaaatttcagactccctttcccttgtggttttgaa

SEQ ID NO: 31605 - DNA, 467 bp, Homo sapiens
tacactactatagggcgaattggagctccaccgcggtggcggccgaggtactttttttttttttttttttttttttttttttattttgagacggagtctcgctccttcgcccagcctggagtgcagtggcgtgatctcggctcactgcaagctccgcctcccgggttcgtgccattctcctgcctcaaccttcccgagtagctgggaccacaggcgccccccaccgcgcctagccaatattttgtatttttagtagagagagatgagtgtatataatgccgtaggaataggtaaaattacctagagagcccaagtctctaggaactccaactttagaagtcaggcagagggaaaaaggtgttccaaattttttttttttaaaaaagagagtatttcaaagtggaaataaataggttgaaactgttgagaggtctaattagatgagaactaaaacatcctttggattt

SEQ ID NO: 31606 - DNA, 620 bp, Homo sapiens
cgcgcgtaatacgactactatagggcgaattggagctccaccgcggtggcggccgaggtactatgtgtggttcacccactgtcttactctctaggaacactgaagtgatttgtttgcgtgccctgcagcacagtccttggtcccctctcaacatgccaccccacacgtttttgttacctgaaaattctatttgtatcactttctccaaaatggctaggtgcagcctaggtcagaattaatcgctccctttcccgagtttccacatcttattctttgacttatccaaatttctaccacttttgttattgctcctgcttacattctgtcccatattgaacatgtggtatatgccaggctctatgctttctctttattattttattgccttcttatgtaaccctacaaaatgttttttttttttcttataaagaaatggaagcttaaaggaggtgacattctctatgatttgcttggagtatgtttctgaactaaggctgctgtccatatccagcatgcggtacctgcccgggcggccgctctagaactagtggatcccccgggctgcaggaattcgatatcaagcttatcgataccgtcgacctcgagggggggcccggtac

SEQ ID NO: 31607 - DNA, 409 bp, Homo sapiens
tagggcgaattggagctccaccgcggtggcggccgcccgggcaggtacaaaaataaatttgacacagctcttgacctcaaggaatttacagtctgggactatttgacaggacttttatggtcccctttgtggttaagaaagcataaataggttttaaatatcatgtgcagaaacacatagcatgttcctacatgactcacaatttgagcaattatacagacataatccagtatcaaaaatggaataaaaaggaaagaatacagaatgagcttctccaattttcaatttccattgttaagttaggaagtcccaaactacatcagaaaaaaatttagaataaatgaattcactgataaagagaagagagaaaagaaagccaacacaagaaacttactctaagaaaaaagca

SEQ ID NO: 31608 - DNA, 409 bp, Homo sapiens
gtaatacgactcactatagggcgaattggagctccaccgcggtggcggccgaggtactactggcttcccagtggttgggttgagtataagcccccaaatatgagtaaaagaagaaaaagttaattcaatcaccaagtcttgctcgcatattaaaaattggatagatgaatgttcaatcatatgttttggctttggccagccagacgaggtcaatttttagatttgaactgcttagaattcttcaggcaagtcttgatggagcacttcttggacagttagaactttaccaggctcacaggagagctcagatgaagcgaacacctcatccacactggtttcctttggagacctttactgttgagaggtggttttcatagccgcaaaatgacaagtgcaagttgagtagatc

SEQ ID NO: 31609 - DNA, 400 bp, Homo sapiens
  misc_feature 339: n = A,T,C or G
tacgactactatagggcgaattggagctccaccgcggtggcggccgaggtacgcgggggggactacaggtgcccgccaccatgcctggctaattttttatattttttagtagagacagtgtttcaccgtgttagtcaggatggtctcgatcttctgacatcgtgatccacccgcctcggcctcccaaagtgctaggattacaggcgtgagtcactgcactcagtcaggttttcaggtgctggttccatggctcttcctgagccgaaaataaggaaactccatagaccttgtccactggaactcgttcccatctaccctccactctatccagggtgatgngatctctgcagtaagtgggaagagtttcttcatgggcccccaagggttatatccattctag

SEQ ID NO: 31610 - DNA, 419 bp, Homo sapiens
tacactactatagggcgaattggagctccaccgcggtggcggccgcccgggcaggtacactacgcaagataatactcttcaaaaagtgcaattactatgagctatgagctttatctcatctgctacttccagtttatacctttgttatttaataaccattgcttccctcactagttacttcaaactatatttcaaaatcaggggagagaaaacgatgacttgtgaaatcacctaacaaagtgaaaaatagactcaaagttttgattccatttatgtgtattcactggatttaagacctgcttaaaagccttagaaaaatgatttaaaatactgacctctgactatatgtgggctgttgcatcatcataaccacccaccatcatcaacttatattgaatagtaatttctgtgccagctat

SEQ ID NO: 31611 - DNA, 419 bp, Homo sapiens
atacgactcactatagggcgaattggagctccaccgcggtggcggccgaggtacgcggggattctcaatcctacccatgatgcagacagattacctcatttcagctcaataaaacatcaccaaattcccttaggcagaaaaagggtggggagtgccctttcttgaaggaatcccttaagtgcacgtctcccgttttcttttcacatcaatgcagagtccctctgtgaatttacaacacccaacacccatgagttcagtccttaagaaggaaaattgggcaagtatttaattggttggacattgcataaaagaggtccatatccaggctaactctagaaattttattctcaaacttagttggcctctttttcttctgtcagaggaccattcttagtggcactggggaaatcttggcaccc

SEQ ID NO: 31612 - DNA, 162 bp, Homo sapiens
aattggtatctccaccgcggtggcggccgaccgggcaggtacgctgggagtagtaagccacattactcatttgtgagggggaaggtagactctttccagacctttgataaaggggctgctcaaaaaagccacgaccttgggcctctgctaaaaccatggctt

SEQ ID NO: 31613 - DNA, 470 bp, Homo sapiens
tactatagggcgaattggagctccaccgcggtggcggccgaggtacgcgggatattaaaaatatgtaatcccagcactttgggaggccgaggtgggcggattgcaaggtcaggagttcgagaccagcctggccaatatgatggaaccctgtctctactaagaatacaaaaattagccagatatggtggcgcgcacctgtaatcccagctactccggaggctgaggcagaagaattgcttgaacccaggaggcggaggtttcagtgagctgagatcacgccactgcactccagcctgggcaacagagccatactccatctcaaaaagaaaaaaaaaaaggtatattcaggtccagtggattatatgttttcttgctactgaactgtatgagtttttttaaaaataaattttgggtattaaccccttatcagatatacagcttgtaaatatttttttcccagtctgtagttg

SEQ ID NO: 31614 - DNA, 411 bp, Homo sapiens
acgactactatagggcgaattggagctccaccgcggtggcggccgcccgggcaggtacaccattagaatcctacctcaaacatgcaatggtgggaaaagatttacaatttaaaatttaaatagtagttaagctaaatttattttggaataatttaggtttccctggataatttttccacgttcatctcaacattatataaattcattcacagtcactcaggatgagtaagtaatgcctccaaaacagcctggtcgtgggttcttctgagtccatctggcttctggctagaagcactggaatgactcataaaaatgaagcaacctggggtcaacctactccaggtcttttaaacagaattgccaactgcttaccaggtggttccaatttccgagaatacttaaaataaggga

SEQ ID NO: 31615 - DNA, 445 bp, Homo sapiens
atacgactactatagggcgaattggagctccaccgcggtggcggccgaggtacatgagtctcttttttttaagaattttaattttcctagttccttatctttttaatgattattctttaagtggacatttaagacatgagcttttaagagcagctgaaaattattggttgtttactatgggttttatccatttgtatactgtttttttttctcagctatcttcaaaatagccataggaggtagattccattactattttactctaaaaagagaaaactgagttttaaagtgttaaagtggcaggaccaagatgaagatacgaggtgaaagtaactaaaggttgttagcataacaattcaaccaaagatgcaattgaaacaatatgtctttgctgtcatgtctagacaatgagatggccagattgcaggcagcatatttgcagtga

SEQ ID NO: 31616 - DNA, 455 bp, Homo sapiens
gcgaattggagctccaccgcggtggcggccgcccgggcaggacccagaggacacagttgaaatgaggcacaattaggaaaaactaggctgtttaatatccatattgagtagctttgcaagttactttcacaaacttccctacagaattggttctaacagaactgttcaaggccaaggatttgttttttctgggtctgggggagtcatctttataattttaatattccattagaatgccttgacgctagaaggagggtccatctcaatcacatcaataaattgatcccaacctttataaaaataagcttggatagaaaggaaaatccgaagactaaggtagtctggtagaatactagaaggagacatcttttaagaggaggacaagaaaaggcatgaaaacagagaacatggtcctacacaaggcaactggcttcagtgctaccctacaattctta

SEQ ID NO: 31617 - DNA, 311 bp, Homo sapiens
tatagggcgaattggagctccaccgcggtggcggccgcccgggcaggtacagtggagacagcatgagcattagagtcagaatacttcatccaaattcaagtatttgtttagttataagggacagaaatcgaactcaaactagtttaacatgaaaggaattagttggctcagctggcacacagaatcccaaagggtgagataactgaaccaggagggtccactttgcaaaagggtcttttgtaggcaacaagggctttagctctcaaacttacttccctgttcagaaactgtaatatttctcttcccactga

SEQ ID NO: 31618 - DNA, 193 bp, Homo sapiens
agggcgaattggagctccaccgcggtggcggccgcccgggcaggtacatcattctgcatgattcacggactaggagtccctggtcaaaaacttcaaaaactaagtgatgggtcccaagttactcagtggcagaaacttgattcagtaacatgtcagcttgtgggcttgaaaagtcttaagcgtctctacttcc

SEQ ID NO: 31619 - DNA, 440 bp, Homo sapiens
actcacttagggcgaattggagctccaccgcggtggcggccgcccgggcaggtacacatccctgacctccagagcagacttagctgtcccttcctggcaccctctcggaaacactctcttctcttggcctccgtgattcttctatctccctaaccagtttttgtctctcttttgggacttctcttctaccagctctgaaagaaagttctgtccttgcttcaggtttctatcttcggcctgttgtccttcaacacactccccataagggaccccattctctccaagccttcgttcatcacccagatgctaatgagcccttaacctttatcctgacttctgtgaactctggatccgtttccagtgtcctacaggatttctccacctgaatgtcctcatgacacttccatctcagaatatacaacttgaactcattacttata

SEQ ID NO: 31620 - DNA, 318 bp, Homo sapiens
acgactcactatagggcgaattggagctccaccgcggtggcggccgaggtacttctccacccttcttacatttatttatgcctagcactgttactttccagaaatgaattaatacagctatcatcactgagtctcaattacttgatagatgacaggaacatcctctgatctctatgggatgagaaatgtaagctttattaccccttaattcctgctgttttgcaaccagagagtaagcaaaggctaaagtctgagggtgagaatgtaagaaaccctttgcctactatgttgtgtcggaaaaagtttagttggcattaa

SEQ ID NO: 31621 - DNA, 422 bp, Homo sapiens
tactatagggcgaattggagctccaccgcggtggcggccgaggtaccagggatcggcaaactttaaaggcccagacactaagtattttaggttttgcggccataaggtcttggtaacaactactcagctgtcactgtagctgaaagcagccacagatgcaatacatagacagatgagtgaggctgcattctaatgaaacatttataaaagtgggcagggctgggcgtggtgtctcatgcctgtaatcctagcactttgggaggcccaggcaggtggatcacctgaggtcaggagttcgagaccagcctggccaatatggtgaaaccctgtctctactaaaaatacaaaaatcagctgggtgtggtggggcgcacctgtaatcccagctatttgggaggctgaagcaggagaattgcttgaac

SEQ ID NO: 31622 - DNA, 185 bp, Homo sapiens
tatagggcgaattggagctccaccgcggtggcggccgaggtactgggtagcacagagatgagaaataatagaaacctttttgttcggttgtttcaagagctaacattgtcaaaagctcaattcctgttttatgtaaggttttggtttatattttctcaaagaagtgaagtgcagaaaatagaaaa

SEQ ID NO: 31623 - DNA, 448 bp, Homo sapiens
cgactactatagggcgaattggagctccaccgcggtggcggccgaggtacataataggatattatatattagaaataaatgactaaatacgtatatagcaacatggaataaacaaaagacatacagcactatgccatttatatatataaagtatatatacacagagatatgtgaaaccttgaaaaacagaggataatctgaaggatgtatgttaaaaattcaaaagtgggccgggcatggtggctaacacctgtaatccaagcaccttgggatcacaggcgtgagccactccacccagccacctcttttcaagttacccagcctcagtatttctttatagcaacacaaagaactaacccagccataaattaagaaatatgaacactttaggggtgggtggatcatgaggtcaggagttcgagaccagcccggccaacatggtgaaacc

SEQ ID NO: 31624 - DNA, 450 bp, Homo sapiens
tacgactcactatagggcgaattggagctccaccgcggtggcggccgaggtacattttacactgtcagctatgggttcagtcagatatgcccataaattcatttatgaagaagagctccctaaacttctaatgattttttcctggtggttttatttagctccaaaaacttatgtttttttttcttaaaaaaatcccataaaaatattcattatcaatacatcatattgatgatatcactcaagaaggagatgtctcactctaagcattattataaaaattcacaggcagtccacttttctagaaaaatatgccagtgatccttctagccttttgcatcctgggattattaaaccaggctgctgagcagccttgacacctgctctgtgaccaatgctccaggctgtttattttggcctataaactctcaaagttgatgggccctgccctca

SEQ ID NO: 31625 - DNA, 376 bp, Homo sapiens
cgactcactatagggcgaattggagctccaccgcggtggcggccgaggtacgtttgaaggtgtctacaaggcaccaccttagacctttctgaattcttaaaaggttgtgcagtttcaccctgggtttgatttttgctctgaaaccatttcttggctcaagaattgtttgatgtgtggagagattgggaatgagaaacaggtttatatttaacagtttattctttagctcatctctctctgctcacatcttataggcagtgagcagaacccaggtgtcactttaagtggctgcctggaaatctctttagatagatcattgagttcattaggtgcatttccgcttcccactttactgtagatgtcagtgttgctaaac

SEQ ID NO: 31626 - DNA, 374 bp, Homo sapiens
tagggcgaattggagctccaccgcggtggcggccgcccgggcaggtacattattcatacactgtaatggcgtaaaagaaccctagacacatggactcccttgctaataagtgcaccttcaaagcgatagtcattatttagcatttatcggaagaggctggccccagctctggtgaagggcagagaaggtgtgggtggcctcacgtgttctcaatgtcacaaaatgatagcattaaacagacccactccctcatggaaggcaatttgacgaccttctattgatattgcaacatgtgtctctggcagcagatctcaatccttatgtaagggatatgggaagacttcctccactttatgtatatgctttccctaagc

SEQ ID NO: 31627 - DNA, 437 bp, Homo sapiens
actactatagggcgaattggagctccaccgcggtggcggccgaggtactggatatttttgcatataaacttgcagtaatagttcaaaaattaatagtttttgacattggcttttctgagaagagaaattgaaagtgtcacaaaataaaaaaagatgaaatgaagcatatataattgtcaattttttcaattttctagccaacagagaatcgaaggattctgttcaaatattagtaaaaattgaaaataaacttgtgcttatattttgtttgcaacacactagttaatttaacctgtgactagttatctctaccgaaggtggatgtgtagtttctggttttaaaattcaagcaaactggaaaataatccatctaattatgctttctttcccaagaagttttttaatgatatgccagcttcctaatttggagacaaaag

SEQ ID NO: 31628 - DNA, 416 bp, Homo sapiens
ctataggcgaattggagctccaccgcggtggcggccgaggtacgcgggggatcgcttcctggtcctcgcctcctccgctgtctccctggagttcttgcaagtcggccaggatgtctcaggctgagtttgagaaagctgcagaggaggttaggcaccttaagaccaagccattggatgaggagatgctgttcatctatggccactacaaacaagcaactgtgggcgacataaatacagaacggcccgggatgttggacttcacgggcaaggccaagtgggatgcctggaatgagctgaaagggacttccaaggaagatgccatgaaagcttacatcaacaaagtagaagagctaaagaaaaaatacgggatatgagagactggatttggttactgtgccatgtgtttatcctaaact

SEQ ID NO: 31629 - DNA, 566 bp, Homo sapiens; identical to SEQ ID NO: 31087
  misc_feature 311: n = A,T,C or G

SEQ ID NO: 31630 - DNA, 329 bp, Homo sapiens
actactatagggcgaattggagctccatccgcggtggcggccgcccgggcaggtacaaggttacctgtttgttccagtatgtgtagggaggggctgggggttggggagagagaagggtggcaattagtcaatgacatttatgacccatttataaaatacaaatgaaataattggttacaaaatcatgacaagccttcacttgtcttttacaaacttgttctcaacacactgtgaaacttaatggacaccctttgtagaaagtgaggaacaacagccattctgaagagaccgattcaaagcgttcaacctgagactagctgtggtggcga

SEQ ID NO: 31631 - DNA, 453 bp, Homo sapiens
atacgactactatagggcgaattggagctccaccgcggtggcggccgcccgggcaggtacactgaaaatcggggctcgccaacttggattccaacagcacagaagtgaggagaagaagcacaatgaagcataatgtctggataatggctacaacaaccatccctgagaactgcctggtaatatcagggtgataggatgggcttccactctcctaaaacagccagcagttcttgtatttctaactagaaggcagaaaaaaagagacaatctacattaatcatgatttggggattattaccaaagtgaaaagaatctcatttccaatcaacttagaaagcttatcctactccattaagtgaaagaaagaaatatctctttctaaaataaagcatgtatccactttgccttggcataggacaggacacactgggcccaaaatagctccagtccttc

SEQ ID NO: 31632 - DNA, 591 bp, Homo sapiens
  misc_feature 384, 385, 386, 387, 392, 394, 396, 397: n = A,T,C or G
aatacgactcactatagggcgaattggagctccaccgcggtggcggccgcccgggcaggtactcagctgccagagttttcctggattactgactttactccctggatccagagagggtgttcccagtatctagtctctgcatcttgtcttctgccttagccttttgtcttgctccttaactaatatgattcttgaggtcctacatctgtccatcttagtggcaatgcctttacaccagaatgcctggtcagtgctaacttactaggacatctgcagagtggggagacgataaagatcagcaccatctagtctgccctgccctctctctgacttggatatcattcttagatcttctggtcagctctgttgctttattgcagccannnnaaaananannaaaaaaaaaaaaaaaaaaggtacctcggccgctctagaactagtggatcccccgggctgcaggaattcgatatcaagcttatcgataccgtcgacctcgagggggggcccggtacccagcttttgttccctttagtggagggttaattgcgcgcttggcgtaatcatggtcatagctgtttcctgggtgaaatt

SEQ ID NO: 31633 - DNA, 447 bp, Homo sapiens
tacgactcactatagggcgaattggagctccaccgcggtggcggccgaggtacttgggagtagaaggcaaagtgggagaggaaaccattgatacaatgaatgaaacaaacaaatgaaacacacatcaagcaagtcttacacatggtgctcactagaaactgggattcagagttgtattaccacagaagtgctatcatcctcctcttttctaggatcaccaaatatatttactaaaaaagcaagtttgtgaggcattgtatcttttctacttgcttggcattagacaggaaagataaaagggttccagaccacatttaaagggaactccctctgaagaagttaacaaactatgtttgtggcaaccatggggttaagtagctttttcactcaactgaaccccatgggaaatatcgactattcagtttcccctcactgctatgcttgtga

SEQ ID NO: 31634 - DNA, 468 bp, Homo sapiens
ctactatagggcgaattggagctccaccgcggtggcggccgcccgggcaggtactgggattacaggcgtgagccactgcgcccgaccatgctttgtcattttcacagccacgtggtgttgggaaggttgcttcctcatcctggccctctccatcccaaagcctgattagttaccggactgccttgaggctgtaactccagagggtggcgccgcttatgcccagcaggtgggatgtgccagagaaaggcatctcttactgccacggttttattttactgcaatttcatcctcacacatcgcacccattttacaggtgaagaaaccgaggggccccactgggggaagtggttttattcagtgactcagaattggtaagaaatgaatggcctcttaagacccacccagggctcttccttgtcagaacctgtcccctaggtcctgccagggctacgaggcaaggcgagtttt

SEQ ID NO: 31635 - DNA, 377 bp, Homo sapiens
  misc_feature 290: n = A,T,C or G
tacgactcactatagggcgaattggagctccaccgcggtggcggccgcccgggcaggtacctaacatttctctgctagaagccactttaaattattgttctttttaaaaggaaaatccaatatagttgaaagcttgtgctttataaatatgtgatgcttccctgcattatctgaaagagggagaaaaaccatgtcttgcttttttgggatttaacctgttttagctgatcacaaaatctttattaattgcatttattagctatatagcactccaaggtcttttgaaattntttttggttgcaaaaattctgatgaaaaaaatttaaattggtattattaatctttgtaaattttttgcaaaaaaagcatgttgaatt

SEQ ID NO: 31636 - DNA, 300 bp, Homo sapiens
tacgactactatagggcgaattggagctccaccgcggtggcggccgcccgggcaggtacaaatggttaagcagatccctcaaattctgctaaaacaagaggaaagataagaaaaccagaaatgtcgcctccatcctggccaatgtagaagagctaataggtgaatgacagcatatttttaatccataacggaatgttggtttcttttcttgtttaatggcttcctttctttaggagaacctgatatgagcaagcagaattctggaaggcaacatttttgagagccctgaagtgacaatgg

SEQ ID NO: 31637 - DNA, 445 bp, Homo sapiens
cgactactatagggcgaattggagctccaccgcggtggcggccgaggtacaaaaaattagccaggcgtggtggcaggcgcctgtagtcccagctactcaggagagtgaggaaggagaatggcgtgaacctgggaagcagagcttgcaatgagccgagatcgcgccactgcactccagcctgggtgacagagcaagactctgtctcaaaacataataataataataaaaggtgttagtgtaactgctgtgtggagaatgaattaggatggctgaaagagtgaacactgatttaccaaataggaagttctcacagtagttgaaacacaagttatggtggctaggactgggaggggactatgaagataaaaaaaagcggtctattttgaaatagaaggggatatgttttgaaaatagagaaacaaaagtgactatgaagtaggttgat

SEQ ID NO: 31638 - DNA, 333 bp, Homo sapiens
gcgtaatacgactactatagggcgaattggagctccaccgcggtggcggccgcccgggcaggtacatgtatgtgaggaaaaggaggtaaacaaggagttagaaagatgtgatgagaccaggtggtgatggactgaatataaagcaaagacatctggatttttaattctgtagggaatagctgaccaagtatatgattacatgtctgctttttaaacagctttgtgatttgaaatgctgggttgttattgtttttttttgtttttgtctttctttttaaaaaaaaaaaacatggctaactctgccaaccatacacaaatatgcatactggcatg

SEQ ID NO: 31639 - DNA, 278 bp, Homo sapiens
gcgaattgttagctccaccgcggtggcggccgaggtactaacaaatgcagtagccaacaagattaccatgcaatcattaaggagaaccaaagtaagagagccactcaaaccagattttgaacgctactaaaattaaagtagttctttgatgaatatgaatgagtagggaaaggattctttgtgatagtgatacctttgaggtaagggaagggtggtatgtgagtattagtctacagaattatggcaaaattcagtgacaaccaattaaatgtgtctaa

SEQ ID NO: 31640 - DNA, 340 bp, Homo sapiens
ctactatagggcgaattggagctccaccgcggtggcggccgaggtacctcttaattagccaagaataagtgccgtggaagaaggcaggatgactttttagaacccatttttagctcgaagatcactgagggagccatcaaatccatccacctgttcaatcaatattcagccagcaagtgggtgtcaaggtgagcagcttacagtgctgagcacactggaaacacaggtgtgtaagggacagccacggtctcaaattacattctgaaagggaatactaggtaagtgatcccaaacatgcaaatatcattccttggtcctgggatgtgggggaagcattttg

SEQ ID NO: 31641 - DNA, 425 bp, Homo sapiens
ctactatagggcgaattggagctccaccgcggtggcggccgcccgggcaggtactatgcacttcccatgctcctagggttaggaatagtttcaaacatgattggcagacataacaacggcaaatactcggactggggcataggactccagagtaggaaaaggacaaaagatttggcagcctgacacaggcaacctacccctctctccagcctctttatgaaactgtttgtttgccagtcctgccctaaggcagaagatgaattgaagatgctgtgcatgtttcctaagtccttgagcaatcatggtggtgacaattgccacaagggatatgaggccagtgccaccagagggtggtgccaagtgccacatcccttccgatccattcccctctgcatcctcggagcaccccagtttgcctttgatgt

SEQ ID NO: 31642 - DNA, 438 bp, Homo sapiens
gcgaattggagctccaccgcggtggcggccgcccgggcaggtacattacagagcatatgatctttcaaggttttgttccacatgtgttatgcatagtaactgctcatttctattaaaaatactcataaattgaatcacattacaaataagtgccatatacttaactgaacaatatacacacatacgcgttcctgataggtgatacaaaggcaagaaattctgagaaattctaagattgtgatctgtatcatttggatggtatatcaggagtggcagagggaggaacgttccctaagttcttcacttactggctcctgcacttaggtaggatcatgtcactagtgctggccaatgagcagaagtatggagtgccattcctggagtaagggaaacgtatgtgcaatactctaatttattttttgtcttccatcgatactg

SEQ ID NO: 31643 - DNA, 436 bp, Homo sapiens
gcgaattggagctccaccgcggtggcggccgcccgggcaggtaccattctcttttggttgctataattctgtggtataatatgaagtcagaaaatataattcctccagttttatttatttattcatttttgcttaggatagtattatttcttatagtgaaagcattctatgttatttattattagtctaattttgtagttttacaatgctatcctcttttacaaagctatgatcaactcagtgcgtccagatcaggatcatttgtagctatttgcaaaagtagcaatattctggctgggcatggtggctcatgcttatattcccagcactttgggaggccaagacaggcggatcacctgaggtcataggttcaagaccggcctggtcaacatggtgaaaccctgtctccaattaaaatacaaaaattagccgggga

SEQ ID NO: 31644 - DNA, 453 bp, Homo sapiens
gagctacaccgcggtggcggccgcccgggcaggtacaatccccagattttttcatgtgtatcttcttatcacatagggagtccaaacatcactttctctgtgagggctttctctccaaagcactgttctgcggtccaaccctaccactgtcactgtcaactcatacacaggcatacacattacacaacgcatacacatgatcactattcaaaatgaccattttccttatttattgtttatcatctacctctcccacctcgccacaccttccccccaaggcgaaggtaggcttcgtgaaatcttaaccttgcctgtcttattcactgctgtattctggtatagcgtctccaacatacttactgatgaataaatatctgtttaacaaataaactctctctcctctactgaaactattgttggcagtcaccaaggacctattcaaaacagaatctt

SEQ ID NO: 31645 - DNA, 450 bp, Homo sapiens
tacactactatagggcgaattggagctccaccgcggtgggcggccgcccgggcaggtacattgtgacaatttgatacatgcatacattgtgaaatgatcaaatcaggttcattaatatattcatcacctaatatatttgtcatttatttttggtgagagcatttgaaatccactattttatgacatcagtaagataacctaactagaagctcccaatactcaccaccaccctcccaaagatagccaaaacaataagtaagcaactacatttagaagaaaataactaagggaggatgttagaatacattaaaggtgtattacaaactctgtagtgtgcagaaacccaagatggccacatagacaacagaaggaaacaccttacctccaccaccctatccctacattaggatcagttggaaccagggggaaattctccttgcagggaaaagg

SEQ ID NO: 31646 - DNA, 518 bp, Homo sapiens
tactatagggcgaattggagctccaccgcggtggcggccgcccggacaggtacctgaagcttgaattcctgaacttttttttttttttttttgtatttttagtagagacagggtttcaccaaattgaccaggttggtctcgaactcctgacctaaagtgatccgcccaccttggcccgcaagcgctgagattacagacctgaaccactgtgcctaacctccctgaacttctcaacattctgagttagtcactttccctttggtttaagccagctcgggttacttgcaaccctagttatacagccacttttctacaacacaaacaaaccacctagaataaaattcattttcctcctttttttttttttttttttaatggaaggtggggaattcagagagcagaaatctgtcctgaccagagaagagttcttaacaggttccactggtatccaggcaagctaccctccagactcaaggtgtgaggcttacatagctgctcctcctcgctgaaacccatga

SEQ ID NO: 31647 - DNA, 412 bp, Homo sapiens
ggcgaattggagctccaccgcggtggcggccgcccgggcaggtacaaaaagcaaagaccccttctccatctctggattttaaaaactggaaaaggatgctgagaggattgagccaaagagccagtcctgggacagtcactgtggccagctagtggtgtgctttgtctggccacgctgggtcctgctgctcgctccaaaggggcaacatacttgatttgcagccctggcagaatcatatgattaaagtgtgggagggcggtggtgagggaagtatctccccaaaggaaagaaggggtatggaacaggtaaaattaacagatgtttacaaaattgtcttaattattttccccaaaatgcatagccagttttcccaatcctagtttttctctatttacttaaaatgccatcttta

SEQ ID NO: 31648 - DNA, 441 bp, Homo sapiens
cgactcactatagggcgaattggagctccaccgcggtggcggccgcccgggcaggtacgatcttggctcactgcaacctctccctcccgggttcaagtgattctcgtgcctcagcctcttgagtagctgggattacaggcgcgtgccactgcgtccggctaatttttgtatttttagtagagatggggtttcaccatgttggccaggctgatctcaaactcctgaccttatgtggtccacccaccttggcctcccaaagtgctgggattacaggcgtgagccaccgcgctcagcctacaagcaattttttaaaaactgacacctattactgataaaattctctgtttaaaatcctatttactattttaaagataagtattagttttttttttaaaatacaataattctgttattgataaaatttaaggcattttcattgcc

SEQ ID NO: 31649 - DNA, 294 bp, Homo sapiens
actactatagggcgaattggagctccaccgcggtggcggccgcccgggcaggtactgcatggacaggagatgcttagatctgaggtgaggaaatccagagatgaatgttttgtttacctcatgggattgtggcattgttagccactcaatccaaccagattataatgtattaagaatttgaaacatcagcccattgtgggttttacatacacagatgtatattattttgttagccaggtaatgaacagtcattgtcaagttggatagaatctaattcagacttgaataattcat

SEQ ID NO: 31650 - DNA, 458 bp, Homo sapiens
cactactatagggcgaattggagctccaccgcggtggcggccgaggtacgcgggagaataacaagcactctttggtatgggtagcagcagtttcagtgtcttcctgtggtctgtgaagaagagaaacttaacaacaagaagagggaaagggaaggtcgcctaaggagaagacacaggagtaatgagaagacacaggaggtagagcagcacttgctgactcagaagcattaacatgaaacttattccactgattgaaatctgtgatacttaatagctcttatgtctaatcatatcaatatgcagctggattgatacactcctgcaggtggttggggctccttcactgccatgtatgtcccttttgttgcagatatttcaagattcagcatcatttcagaccctgaaaaatccctgaaaattgaattctcaatagataatgcaactccacataatatctg

SEQ ID NO: 31651 - DNA, 433 bp, Homo sapiens
tagggcgaattggagctccaccgcggtggcggccgcccgggcaggtacccagtgtctcatttcaggccctcctcatctttattggaccattgcagcagtctcctaactgggcttaatgctctagtctctccttccttcagtgtgccctctacactgcagccagtttcaggaacactaattgagtcatccccctgtttaaaatcattcagtgaccaggtgctgtggctcacacctgtaaccccagaactttgggaggccgaggagggcaaatcgcatgagtccaggagttcaagaccagcctggtcaacatggcaaaccccatctctacaaaaaaattagccaggcatggtggcatgcacctgtagtcccagccactcaggaggctgaaatgggaggatcacttgagctggtgaggtggagattgctgtgagct

SEQ ID NO: 31652 - DNA, 374 bp, Homo sapiens
ggcgaattggagctccaccgcggtggcggccgaggtactaagttgccatttaagaacctcttcaggttccccgtctccttgagctatgaaagttttcatgaacacttcagttttaatggcatgccaaacattttgttccatgagcaacacaacagttttaaaaattgccattgagtgttttaatagaatttagccagttgtttttaaatatatttctatgagccaaggcttacaaaaatgtataaagaggaagtgcccagatataaagaagctttgaaatggttgctgttgcctccttaaaaatcatcattaaacaatctttcaaacagtcaagtgtttggctcaataatttaatcaaaatttgtaagaaagta

SEQ ID NO: 31653 - DNA, 450 bp, Homo sapiens
ctatagggcgaattggagctccaccgcggtggcggccgcccgggcaggtactttttttttttttttttttttttttttttttgtatttttagaagagatggggtttcaacatgttggccaggctggtctcgaactcctgacctcaagtgatccgcccaccttagcctcccaaagtgctgggattacaggcatgagccaccatgcctggcctgaaatttgtttttaaatactatattgccaattattgccataaaaaggaataatccttttacacatctatactgcattgcccaatatttaatgtattattcttcaagatgaaagaaatattatatttgaataaactgccttatcttcctgagtattttccaactcttttctgctaatgggttaaagagaaaagcccacagcattcaaaattaaaagtcttctaagcttatttgaaatcct

SEQ ID NO: 31654 - DNA, 359 bp, Homo sapiens
atgtttgaggtccaaactgaaaacccatcacctccttcccactgctatagcagcgttagccctggggttcattatctagccagttcacaccttctaaagtggggctctgaaaatgtcttacttccctcacagacaaagcaattctcaagcctcctgagatcacccaccaaccagagcaactgctgtcacttggaggtgcggctgaattcttctaattgtgacacaaactcttgaaactgtaaatgctgaaagattaaatgaggttataacactcagaaggttttacaagtaaaagtaagtcaaatcaataggtctttatttcatatctgtaatggtttagctctgcggggaagtgttag

SEQ ID NO: 31655 - DNA, 317 bp, Homo sapiens
  misc_feature 46, 47, 88, 302: n = A,T,C or G
cgtatacgactcactatagggcgaattggagctccaccgcggtggnncggccgcccgggcaggtaccaggattatagttagaatttancggactgggtaggaagactggatagaaatctaaagattgctgactcaaacacaatgtggtttctttgctttattgtcacagctctgaattcacaattattagttaaattcataggcactataactttagaaagcaccttccaaaccaagtttagtgatttattataattcttactttttagattgacttcagtgttatgagaatattgagaatntgctacatagtatca

SEQ ID NO: 31656 - DNA, 420 bp, Homo sapiens
ctcactatagggcgaattggagctccaccgcggtggcggccgcccgggcaggtactaaaaatacaaaaaattggccaggcatggtggcacatgcctgtaatctcagctactcaggaggctgaggcaggagaatcgcttgaacccaggaagcggaggtggcagtgagccgagatcgcgccattgcactccagactgggcaacaagagtgaaactccatgaaaaaaaaaccaaaaaacaaaaaaaaatgtgtatcttattacagttgagtccttttgtgagacgaacattcagtgtttgctagattattctaattagctacctttgtatggttaggttagcatggagctgaagataaatgtcccgtttgaaaaaatgacagcccttcagaaaactctggcagtttacagaagaaatacaaat

SEQ ID NO: 31657 - DNA, 397 bp, Homo sapiens
ctatacggcgaattttagctccaccgcggtggcggccgccccgggcaggtacactttatctgtctctttgcttctttcccaccctctttcccagctctctctctgtctctctcttgtaccctgacccttttttcttcctatgcatacttttttctttccctttttaatctctatatcttaatcctaccaatggccctctgagaatttattagccatgatagggattcttaggcctgagatttcttatcaaaaaatatttttaaagcattaaccgtgtgctgagccctgtgctggatactttacgagattcaaaaataagaccagtctcttctcttcagaagtttccagtagataaaggggtaacatcactatactatatgaaagagtttttagtgga

SEQ ID NO: 31658 - DNA, 431 bp, Homo sapiens
tacactactatagggcgaattggagctccaccgcggtggcggccgaggtactatatgctagaaacttggctgaatgatttgacattatcctatttaatgttcatggcaatccaataacgtaaccactcatatctcccttttgtgcagataacaaactgaggcccagagaaatcaaatatgttgtcaaaatctacatcgttgaagagatgggtttcaaatccaggtcggcttggcccttgccacgacttcataatgaaattccatgggtgagtgttaccagtctctggtccatccttgcttatttcaagggtctcatcatcccatccactgtatcactttttttgttacaggctttactcttttctaccatggaaaagactaatgatatttttttctccataagcttggaaatattatcaatcaccataaaa

SEQ ID NO: 31659 - DNA, 404 bp, Homo sapiens
ggccgaggtacgttcatctacctattttgcacttggatgtaagtcctatattgtgtcttaaaaggagggaacattctagaacccaccaacccttcctgatactgtcacaagatttttttcccttaattcttttaaaatcagggccacatttcaactccctgcccgctgccatttgatgatatttttgtttctctttaggtatcgtcctattttctttttctttaccactgacagcggcttatttcatatgaataatatattaaatacatatgcatttaaaatattgttttgatttgtttgcgaattgtttctcttaaagggtctatctggggaaatgagtaatttttcatatcctgttcttgcaggaagaattttaaatcgtttctccaaagacattggacact

SEQ ID NO: 31660 - DNA, 442 bp, Homo sapiens
cgactcactatagggcgaattggagctccaccgcggtggcggccgcccgggcaggtgggatatgggcagtgattatggcaggtgggataccgcaatgaatgtggcaggtgggatacggcagtgattatgacaggtgggatacagcagtaaatatgacaggtgggatacagcagtgattatggcaggtgggatacggcagtgattatgacaggtgggatacggcagtgattatgacaggtgggatacagcagtaaatatgacaggtgggatacagcagtgattatggcaggtgggatacggcagtgattatggcaggtgggatacggcagtgattatgacaggtgggatacggcagtgattatggcaggtgggatttggcagtgaatatgacaggtgagatacagcatgaatatgacaggtgtggttccagtccacaagagct

SEQ ID NO: 31661 - DNA, 190 bp, Homo sapiens
actcactatagggcgaattggagctccaccgcggtggcggccgcccgggcaggtacacatagctcaggaactactgatgcactgccttccattttagtggcagtttgaatttaagaatttctagtttgtcttaagcttttctgtaatctctcacatatatattcttaatttcaactgataatttctttct

SEQ ID NO: 31662 - DNA, 483 bp, Homo sapiens
  misc_feature 216: n = A,T,C or G
actcgcgtatacgactcactatagggcgaattggagctccaccgcggtggcggccgaggtacaaattgctgaggagaagcaggaaacctgtttccttagtggcttttatcccctcggcatgcgatggggctgatgtttctatgattgcctcagactttcacatttactagtagggctgagagagggctttagtgaggaaggagatattcagaatanaaacggttgagaaagctgagaagaccattgagttttgatcagttgtgaatagagtgcaaagccatggccaagctgtttttggaaacgctggccggcgtgtcttcagtggaaaaagcaaatcaaaatggagcgagagcaaaggggcgtcctcagtcctcaacctataatcactgtatggaatcggtcctggcagctgaacataggaagtcactggaacaagtgatagtgcagattggctttcaaacatcctcctggcttgagttttat

SEQ ID NO: 31663 - DNA, 474 bp, Homo sapiens
ctactatagggcgaattggagctccatcgcggtggcgggccgcccggccaggtacccttccatgatgttgaggagagactctcctatcctcaccacaccagagagtaggtatgcaggttgccaccagtgttctcctccctacccactccctcacttttcttttcattggttcagtagaaggaggggctgtgcagtaaggctgccgcttgagcacagggacagccgtcactgcagtgctggtctcctgttcttggaggcacctcagtctccttgacctcttagacaccctcctacccccaaggtggggaaggagcaagcagaggcaaaatcccagccctccttgttaagactacagtgactttcctcctctcccttctccgtgtccgtaatgcatagctggaaggaagtgtctgggtggtgatgccagtagctgtgctggtgccatgccaggtgctcttcatgagcaccaaagga

SEQ ID NO: 31664 - DNA, 437 bp, Homo sapiens
tatagggcgaattggagctccaccgcggtggcggccgaggtacgtgaaagcgctttgaagatcacaaacccatttagaaataggtgggttgctcttcctcaaatctttgaaagctgtctactactataaattcattcattcatatctttccctcattcctttcagttttttaaaaatgtattctatccaacttacatgtaagcactttgcaaacactcactcatttactatgaataacaatcctactatattcacaattatcatttccccgctttacagaagaggaaactgaggcacagagattagacagtgtaggcaggattcaaactcaggtggtctggctctactgtccttgctcttaacctaggcccacctacagttatccaggtttctgtttactaatcctcagccatcttcctctgatcagaatcaacata

SEQ ID NO: 31665 - DNA, 362 bp, Homo sapiens
ggcgaattggagctccaccgcggtggcggccgcccgggcaggtaccattcttatctcagaatgctgtaaaccatcagtagaagcagtttagatttggactgcatggtaaaatgaaaagtaataaccctccaaccacaacctagtcagggtattaataattatatgtagcaagaaaacaaagaagaaaataatattgaaaaaatggagattccccaaccagtttcatatttgaaggatctgagttgtatttttattaaggaaattttttttctgaatactgtcttccaaaatgttaacattaaaatctgaatcagaggactctgaatggaaaagaagtttgatcactgacacctagggctctg

SEQ ID NO: 31666 - DNA, 186 bp, Homo sapiens
gaattggagctccaccgcggtggcggccgcccgggcaggtacctaggagctttttgaccctgtgttgagatgcctaaacagcttcctgattgacctcctgatatttctgcaaatgtggactaagaggccaggattcctcaaggcccaggtgactcaggttattccaaaattatatttggaactacc

SEQ ID NO: 31667 - DNA, 292 bp, Homo sapiens
tacgactactatagggcgaattggagctccaccgcggtggcggccgaggtacaaccagaaccaacaattgtatttctctatagttattttaaaatagtaatcaatgctatgtatttgatgtatatgtttctaaattagaaatttcttttggctttgtgtttttttaatgtgcgttaaatatgtaaactgaacctgttccctaaaatgcattaaacttgaatgctgtgtctatccaatgccaaaattgctcaggaagaaaaagtgaataaattccagtcattcattctggatg

SEQ ID NO: 31668 - DNA, 415 bp, Homo sapiens
ctatagggcgaattggagctccaccgcggtggcggccggctgggtcccgcactcttgattcccttgcattcaatgccttaccactctacaactgtcttctaacagagctctattccttaatcaccagtgtaatctatccaccttctgcatccctgtcactgagtagctgggtgattctgggaaaaacaaatgctcagagttgtcttcccaaaacccagctgagctcccaacacaccttccaatccctctcagtttcttcagcaatcatcataccctaataccatgaaattcactatgcacaactctttcccctaactgcagcccaagaaaagctgaaaaactcaaaatcctgttatagcttcccactaacctcatctatatccacatctttccagacctctttcctgtcaggttc

SEQ ID NO: 31669 - DNA, 401 bp, Homo sapiens
ctatagggcgaattggagctccaccgcggtggcggccgcccgggcaggtacaggaacaaacgaaaatccaaacttaatggttttcttggaggaaagatgattctagttccttgcagttactaggaactcaggggagagttgccatgaagtaaattacacagaactaaaatctgtgttagataacaacagggagatgtcagtttgggactctcctccagggagcggaaggagtttaaacttactagaatgaaggcaattttgaagagtgaagggcacagatgagaaaatggagaacgggacctttggagaacctaagaataaggaaaaagagaagcgaaggaagccaaggcacagcggaaagttccaggttttaccctgagggaaagccacattccatcaca

SEQ ID NO: 31670 - DNA, 464 bp, Homo sapiens
ggcgaattggagctccaccgcggtggcggccgcccgggcaggtaccctaggtgatgcctgttcttttgaaacagcagagattttattttaaaaatacgtttttgtgtttattacctaaaggagctattctgaaatttttatgtagaaagatcttcttctgctccatccacagaagattttttatccatagatattttggccatctcctttctcctctttcctttgttgtagatgatatgaaaagactgcttttttcaaaaattgtgttattaaattggtgaatattgccatgcctaaagtgatctctgagatatcctccttatgggtataaacattactgtcacatgttgtaaagagctttctataatagacacagcacactggatttaattttcttctcccttcttggtagatctcttctggttaaatagaaaatgcgggacttgcctcctattatagaagct

SEQ ID NO: 31671 - DNA, 422 bp, Homo sapiens
tacgactcactatagggcgaattggagctccaccgcggtggcggccgcaccgacgacctgttggccggcggcgcgaacgacgagcagtccgaccggggcttccagggcggcggcaaccgccagtccggtcctgcggggaatggccagggcgagcgccaggccgaggcgggcgcagccagcgccgatggcgacgaatacgaccaggggacggcgcgcagccagtcctgatccccaggtcgcgcccggcgctggagggccgccactgttcatgaaaccgcgcacataccgacattcgtcgctttttgataactgagggcaagtttgtgtcaaaatgtggcaatgaaccatgagctttccaatacacccgcgctcacgcggtcctaccgcggccagtcccaggagcagcggcgcgccgagcgccg

SEQ ID NO: 31672 - DNA, 420 bp, Homo sapiens
cactactatagggcgaattggagctccaccgcggtggcggccgcccgggcaggtacattatctctggaccaggaacacaacacagcggaacaatgagtttagataccccacaaggtgggttctctggaggctgggtatgttgtagatgtggctcatagaatcacagagttaaagggcaactggaactcatctaaccaacttctcatccaagcagtttccctcctataacattatacatagccagtctcctaatatccatttacatactttgagtgacaggaagcctgccacttaatgaagtgatccatttcattttaataaagctcatttttatgtggtaaactgtttcaatatcccaggtaagcagtagcatttgcacagaccaagaaaaagcgtgaggattgcgttcagagtgccaac

SEQ ID NO: 31673 - DNA, 434 bp, Homo sapiens
cgactcactatagggcgaattggagctccaccgcggtggcggccgcccgggcaggtacgcgggggactctttccagacctttgataaaggggctgctcaaaaaagccacgaccttgggcctctgctaaaaccatggctttaagtaaggagggagcagatatataaaaatccttatccctctttctaatctcttatgtcctgtgagtgtcacccattgagtaaacccaagtgggagtcagcaggaaagtagctgggatgatgcagtctttacaggcacctacaatgaagtggtttgtttcttggctaaaaacaccagtttagagagagttcgtgcatacttcacgagctgactctgcaataatacactgcagatcttgctggaaggaacagcaaagataccagtaaagatgtcatctggccaatttgtgtgaaaa

SEQ ID NO: 31674 - DNA, 385 bp, Homo sapiens
gcgaattggagctccaccgcggtggcggccgaggtgctggacatgatgggagacactggaaagtcccaaacctagtttagggtgttaggggacttcctggaatcggggacatctaagctgagccctaaagtaggagacagtcagatgggagagagtaaaagaagaagacatttcaggccaaatgcctgaataccataccctggagtggtcaggttggttctctggtgggaacacgaagattctcctgatcttctcctccctactctcaacactctcaacattcgtagtttttaccttcactaaatactctttcctatattatagtgatgttacccctttatctactggaaacttctgaagagaagagactggtcttatttttgaa

SEQ ID NO: 31675 - DNA, 635 bp, Homo sapiens
cgtaatacgactcactatagggcgaattggagctccaccgcggtggcggccgcccgggcaggtacaatccccagattttttcatgtgtagcttcttatcacatagggagtccaaacatcactttctctgtgagggctttctctccaaagcactgttctgcggtccaaccctaccactgtcactgtcaactcatacacaggcatacacatacacaacgcatacacatgatcactattcaaaatgaccattttccttatttattgtttatcatctacctctcccacctcgccacaccttccccccaaggcgaaggtaggcttcgtgaaatcttaaccttgcctgtcttattcactgctgtattctggtatagcgtctccaacatacttactgatgaataaatatctgtttaacaaataaactctctctcctctactgaaactattgttggcagtcaccaaggacctattcaaaacagaatctttggccaggcactgtgggtcacgcctgtaatcccagcactttgggaggccgaagtgggcaaatcacttgaggtcgggagttcaagaccggcctgaccaacatggtgaaacctcgtctctactaaaaatacaaaattatctgggcatggtggcaca

SEQ ID NO: 31676 - DNA, 363 bp, Homo sapiens
agggcgaattggagctccaccgcggtggcggccgcccgggcaggtactgggattataggcgtgagccaccgcgtctggcctctaacgagatatttctaaaggttaggccttcagtcaagaattttaaggctggatcttagaggttatctaaactaacctctccatttcatagataaggaaagtgagtcccagaaaagcactggtttggacaagttcagaaagctaaacagtgactgtggatgtatgattctgtctcttaactcctaatccaaatgtcttctcactagataaggctgtgccttctacatttgaaggctcaaaccccatggatggatggagggaaggatgggtggagggatggat

SEQ ID NO: 31677 - DNA, 426 bp, Homo sapiens
cgtatatactatagggcgaattggagctccaccgcggtggcggccgcccgggcaggtacgcggggattgaaaaaataattgcttgttctctgtcagatgcacttcgtcttagtaacatgtgccatggggaagacgaccacaggccagatagtcaatctgttgtccaatgatgtgaacaagtttgatcaaggggacagtgttctaacacttcctgtgggcaggaccactgcaggcgattgcagtgactgccctactctggatggagataggaatatcgtgccttgctgggatggcagtttctaatcattctcctgcccttgcaaagctgtgttgggaagttgtaactcatcactgaggagtaaaactgcaactttcacggatgccacgatcaggaccatgaatgaagttataactggtataaggata

SEQ ID NO: 31678 - DNA, 427 bp, Homo sapiens
atacgactcactatagggcgaattggagctccaccgcggtggcggccgcccgggcaggtacattggatattcctaaggatacacatttttaactgtggagtgtaacaataggaactaacaataaataattgggttggcattaagttttatgggattcactttgactttaataattttttttgagacaggatcttgctttgtttgcctagaatttcttaattttcctttccttaataaatatgatatgaggagaaccttcttcattgcttatattggataatagtattaaagttagaaatagcctaagggaaatttacttgattttttttttcaaggaaatatactaaagaaaaagctgatataggatgcttttaaatttataaattgtttcctcataatcttaacagttataggaaatgaataaaga

SEQ ID NO: 31679 - DNA, 468 bp, Homo sapiens
ctatagggcgatttggagctccaccgcggtggcggccgaggtacctattttataccactcaatgaaatctccacctatccattgttccaagacaaacacactgtctttgttagtttctcatgcaaccttgtgcctcacataaatcaatgagaaacaaactacaacagggacttctgatataatgtgccctaaagaaaatttgtttctggcctgttttaataaaaattaaatagcttccttaaattgtgaatattttccattatagtgatattgtaggaacaccagaatttttttttttttgagacagtctcactcttatcgcccaggctggagtgcagtggcactatctcggttcactgcaacctccatgtcccaggctcaagcgattctcctgcctcagcctcccaagtgctgggactacagagtgagactcttgtctcaaaaaagaaaaataaaagaaaaagaaat

SEQ ID NO: 31680 - DNA, 481 bp, Homo sapiens
tatacactactatagggcgaattggagctccaccggcgggggcggccgaggtccttgaagaagacttagatctagaagcagctatgttagatgatcagacctcatacactgccacttggaagatgaggtgtggtcatggggttcagtttcagaaatgtgttctctctgttgatcgtttctggaggaagaaacatggggatgtgtttagaggggaggatatgccagctacttatcataggaagtctagaaaaggcagccatagtgaggtcactatttgaaaaggagtaagaaggaatgtattgggcaggaaagagtgtgcatagactcttctaggtgaatcaggtgagctgtgttctatctgcggagaactagtgatggtggggcagaccaggcatcttcccctccacttgtcataggggtctgagaagggaaacatggggcagaattgggaatcaatctgtaacactgcttttaaactaag

SEQ ID NO: 31681 - DNA, 450 bp, Homo sapiens
tacactactatagggcgaattggagctccaccgcggtggcggccgaggtactaggaactgagtaatttggaaataacattaaccactttcatataccacacacctatcttgttaagtccaaaatgtcagtagtaataaggcttaatcattaagattaagaatattgttatatgtttggaatatgctaaatttatatgctcttctttgaccaaattcagtgtcaaacaaatgtcaatcacgtatctgatttattccctggtcggcattactgaaagaaaaatgtttatttaaatcagcatgtttcaatttattttattatttttttatactttaagttctgggatatatgtgcagaacttgcaggtttgttacataggtatgcatgtgccatggtggtttgctacactcatcaacctatcactacgttaggtatttatcctaatgctatcc

SEQ ID NO: 31682 - DNA, 415 bp, Homo sapiens
atagggcgaattgtagctttcaccgcggtggcggccgcccgggcaggtaccccatatatgctggtggtttctaaacctattttgttgtcccagcccattcctacttgcagctcggatgtgccttgctagcctggcttctctacctggcacctcacactcaggatgccaaaaaaagttctgttttctttccccgaaatcctgttctctgctgctgctccactgccacctgttttcttttcttttggttgctggttcccaccagccattcagattccagccggacacacgggattgtcctggactcctctgaattcctcatcctcttcccctggcccacatccagtggggaggacccccgtcctccctcgttcacctcctgatgacataaattcttgaccgtgggctctttgtatct

SEQ ID NO: 31683 - DNA, 446 bp, Homo sapiens
ctactatagggcgaattggagctccaccgcggtggcggccgaggtactttttttttttttttttttttttttgaagagacagggtctcacaatgttgcccaggctggtatcaaactcctggcctctagtgatcctactgccttggcctcccgaagtgttgggatgacaggtgtgagcaaccacacctggccaataattttgtatttgacatgtatatataatatcatgttatacagatattacaactggctaaggggctgactccagatttgctcaacggtgtctaagaaggaaattaagtgaagcacacagaacaacaaagatactgtccagaagaattcagagaagacagacatagcacagaaagacagaaaaccaactggtgaaaggattactaaatgggtaatttccccgtatatcacacttctctgtattacatattacat

SEQ ID NO: 31684 - DNA, 445 bp, Homo sapiens
ctatagggcgaattggagctccaccgcggtggcggccgaggtaccacaaaaagataaaaaaagctaaacagataaatgctttcactaaaattagacaattcctaggaaagagatatataggaggctatttcctgggaggaaatttataccaccatttcagcctgctgtaaggtggagatggtagacagctaaattagggtcctctctataatattgactgatgatggggggtgtggtttcttacttggctgagtgccttgccaatcatttctgcacctgcggggcctggagattgctgatgtgcttcaggcataagcaaaccacatcaaaggctcagctcactggcatacctgacggtcaaggacagagacctgctctgaccaaggaataccccaatgagactggcctggaggatccaagccagttcggcaatgttttatggagt

SEQ ID NO: 31685 - DNA, 410 bp, Homo sapiens
  misc_feature 212: n = A,T,C or G
atacgactcactatagggcgaattggagctccaccgcggtggcggccgaggtacccccgaatctaaaataaaagcagaaattatatgaaaaaactggggtgggagttggaaggaactttagatatgtaataaatttgtttgaaaactgttaatttctcatgctttcattaaaaaataattttcctcaagaaaccccaaattctccacctcangaatgaaaagtgcatttgaatttcaagaaggtatgggcatgagaaccttgcagttttctaatttgtggagacaaaataatttttataacaccaaccagaggtttcctctacaaaccccttgtaattcctttctgagctctcttccttctagaatcttggggcatctgaaaaactcaaagctatgtaaacacaacatat

SEQ ID NO: 31686 - DNA, 182 bp, Homo sapiens
acgactcactatagggcgaattggagctccaccgcggtggcggccgaggtactaaccttagctagtaagtaggaaggcttggaatcgaccccagctcttctggcttcaaagctcctatacatggtgccaggacatataatccagtcctcctatcttcccacccagtggctctttgctgttat

SEQ ID NO: 31687 - DNA, 361 bp, Homo sapiens
actactatagggcgaattggagctccaccgcggtggcggccgcccgggcaggtacatgccaccatgcctagctaagttttgtatttttagcagagacagggtttcaccatgttggccgggctggcctcgagctcctgaccttgggtgatccaccctcctaggtctctcaaagtgctggaattacggtgtgagccactgcgcccggcccttagtagcatcttttaatggaggtagagttgagatttcagtgactaacaactaaaggtattaaaggtaggggtttatatgatacatttgcattttagaaaactgatctaagcttcaatgtgaagaacagattgaaatggaagggggagaagac

SEQ ID NO: 31688 - DNA, 617 bp, Homo sapiens
  misc_feature 463: n = A,T,C or G
gcgcgcgaatacgactcactatagggcgaattggagctccaccgcggtggcggccgcccgggcaggtactttttgttccctgctgtggatgcttcttggataggttgataagcaaagaagttcacgttggcgacaacacttccattaaagacgcgtgcagtaaatcctatgatgcaatctcctgcagcttaactagcagacccaagctggtctggcatgatctatgcaccagcttgcagaagcagtcagatgagtcactgtgtggccctccagggagaagcaagtccatactctaaaaaaaatataaatttttattctagaaaatacaaaaaaaaaaaacccgaccttgcctacaactaccttttgtttttaaaggaagtcatattccaggctctccctgtcccttcaaaaaagctcaaaactggacccaacaccaagtctctcccatgaacattcaggcggngtctgaggtggtgaggccagcaggtttgcctcgagagagtttgcttcaagtgaaactccataggcacatgcagcccactgagtggaacaaactgagtttctttcattcttagtcattactcagcttcaaattatacacatgttggaaacttata

SEQ ID NO: 31689 - DNA, 402 bp, Homo sapiens
gcgaattggagctccaccgcggtggcggccgcccgggcaggtaccacatttgtgaatttatgccacagacttatttacgtagtgcactaaaattataaatagagataatgattgcagcatggtttagagtagtaaaggactggaaacaatctccatggcactgataaggcaagatgtagggaggagaaatggggagtgactgctcagatacagtgcctccttttgggggtgatgaaaatgttttggaacttgatagaggtgctagttgcacagctttgtgagttttctacatgtcacttaattgcacactgaaaaatgttaaatgtgggctggggacaatggctcatgcctgtaagcccagcatttttggaagccaaggtgggaggatctcttgaggctagc

SEQ ID NO: 31690 - DNA, 196 bp, Homo sapiens
gcgaattggagttccaccgcggtggcggccgcccgggcaggtacaacatttaacctctaagccccacccccgaattccttgagcaatgactcatcttgtttctctgggcaccttggcttcatgagtcagtctcagatttgggtagagacgtagtcatttaaatcctctcctaggacagtctttgatagccaaaact

SEQ ID NO: 31691 - DNA, 415 bp, Homo sapiens
tacactactatagggcgaattggagctccaccgcggtggcggccgcccgggcaggtacaaatctaaaacacaaacatcacctttacaaaacaaaattgttgattaataattatctttttcataactatctcataactttatgactacaggcccaccatttaacaactacaaccttcacataaactaacatgtgcttttaatgctgaccttagtttaaaaagcctgccagtatggaatgacattcaaataaaataaaaccaaatttaaaaagaacagaaatgcaaactcaacaatattcccatcttttgaatcctgacaatgtagaagtcaaattcataatcatcctaaaaaccaaggggagtcatacgaccactgtatgtctctttcagtctaggaataatgcaaacagcaagaa

SEQ ID NO: 31692 - DNA, 447 bp, Homo sapiens
cgactactatagggcgaattggagctccaccgcggtggcggccgcccgggcaggtacaagcgattcccctgccctcctgagtagctgggattacaggcatgccatcacgcctggcttatttgtatttttagtagagatggggtttctccatgttggtcaggttagtctcgaactcccaacctcacgtgatccacccacctcagccttccaaagtgctgggattacaggtgtcagccaccacgcccagccccagaatacaaatttttaacatttagtataattagacagtcatggcattttaaggtcagagcttcttactcaaatgcagctcttttctgtaaggacaataaaatgttaatttttactcagttaacattctaaattagtgttttaaggtcatctcttttacttagaagacagttgttggccaagaaacgtttactgaac

SEQ ID NO: 31693 - DNA, 222 bp, Homo sapiens
  misc_feature 62, 66: n = A,T,C or G
gccgaggtacttagcagttttgtgacctagagtcagtgctttgagtatttgagccttagctnctgngtctataaaatggggtttacacaactcaccttacagggctgtaagattagattgcacagaaaatatattttttggctgtgggggctggaagtgttgctgattagcatttgaaaattccatcctgtgggtgagaaaaccccaccttatgacttggtg

SEQ ID NO: 31694 - DNA, 411 bp, Homo sapiens
acgactcactatagggcgaattggagctccaccgcggtggcggccgccatcttgggtcatcgatgagcctcgccctgtgcctggtcccgcttgtgagggaaggacattagaaaatgaattgatgtgttccttaaaggatgggcaggaaaacagatcctgttgtggatatttatttgaacgggatttccgattttgaaaaggaagttcccaaagtgagcctttaccaatggagaggaaaacagacgagaaaaatcttgatggctttacaaggcatgcaacaaacaaaatggaatactgtgatgacatgaggcagccaagctggggaggagataaccacggggcagagggtcaggattctggccctgctgcctaaactgtgcgttcataaccaaatcatttcatatttctaac

SEQ ID NO: 31695 - DNA, 433 bp, Homo sapiens
agggcgaattggagctccaccgcggtggcggccgcccgggcaggtacaatggaggaatacaaagagggacatgctgcagcctgtctaggttaaggtgtttgatgcttatgatgtggccagttgatgctggttctagaggcttgtccctgaaagcagctttcctctttatgtgtcccacttggatttctttgagctaaactttcatgaagacaggagaaatgcttacatcttaataacttcaagaggacattttggttggcaagagacattgggttgatgcaaaccattggttacttccgagtatggtaaggagtctgttgtgtggtgtgcaggtcccgtcactttgttcttcactgaaggattccctcttactgagaaatctataacattacctgctgcaacagctgtgcccttttgttttcctttggataat

SEQ ID NO: 31696 - DNA, 293 bp, Homo sapiens
ctccacggggcgggcgaggtactgagttcattcagatagaattaaacatgaagaaataaaacaaatagtttgacaagcagtgggggtcactaaacacaacattcctaagtaattcagttgtcagaagtgcagttcccaaatgcagttagtatctttagaggagttagaagttctgattatcaggctctgtagaattttttttcatcctgagagagatgagggtgatcccatgatagagcagagaaaacactcaagaggtggagttctagcctagctgtgccttttactagctc

SEQ ID NO: 31697 - DNA, 393 bp, Homo sapiens
agggcgaattggagctccaccgcggtggcggccgaggtacttttaaatgaaattcatataagttgatttatttctctttggcctttagatagcatttgagggttaggtaatgaagataatcactcaaagtttctgtagaaatctttattcttaccagttgttgggtttttattcatgaggaaaatatttcctcttaatgtctgattcatcatcctaccttttctggttgaataactattattctaattctggccaacatcaaacttgaacattgccatcattctggctggccttccttccttagtgcctcttctgttttgtttctttcagatattattgtcagtataattttaggatgatgaaataaaaatgttaatgctagagaggatgttt

SEQ ID NO: 31698 - DNA, 437 bp, Homo sapiens
ctcactatagggcgaattggagctccaccgcggtggcggccgaggtacggggaggaacagagtccctcctttacttctccattagaaagaatgagatggcaagacaatgaaacaggcaaagtgaacagagatgcaagacaaaattcaggtgagagagccagagcatcactcagccattccttacatgtaaaaacaggcacctataaatttgcagaaaggaagcgaagtctccataaagatgtttttaaagtgaagcttgaagttatttgggagacaatttcattgtttacaataaaaacttgccaaattcttttgggataaaggaaagcagagattcccgagcatggggaccaaatggaagcctcaaaagtgggaagaagacagagaagaccagggcagaatgcatctcttcctttctcttggctttcctggataag

SEQ ID NO: 31699 - DNA, 376 bp, Homo sapiens
tacgactactatagggcgaattggagctccaccgcggtggcggccgcccgggcaggtactaacatttgtagagaattttgtagtttacagagcactttttcctcattttattatttgtttttcacaaccatctggtgacattaaagggtagcagagaaatatggggaagtgggtgggggatgagactaatggcagagactgtgtgtgttaggaggagtggttgtcggagatacttaaagggatttgaatgcaacagttcattcatttgattgaacaaattgaaaattcataaatattctggaaccatcaaaagatttcaggtaaggaagcatcctgttctctttttggatgatcttaacatttttaaacttgagca

SEQ ID NO: 31700 - DNA, 445 bp, Homo sapiens
aattggagctccaccgcggtggcggccgaggtacctaaagtaggattcaagccctattagattttgagatcacattttaagagaaagaatacaaaattaggcacgaaagtgagtatttattcatgtagagaaaataaaacatagcaaaatatgaattttaaaaagttaacaaataccacacaaaattataaactgcagaaaaaagtaactatattggtgttttgtaaataacatgatcctctagagttttttcattttttaatccatttttggctatatattcttcaattgcctctgcacatgacttcaatttggtaatatcacacaactaattacacggtaaaattattttgggtaataaccccagtattgttctcttccagccctgcagtgaaagctgcccatcagactctgaggaggctgcataattaaactctactgtttc

SEQ ID NO: 31701 - DNA, 421 bp, Homo sapiens
ctcactatagggcgaattggagctccaccgcggtggcggccgaggtacaggttctttgaatgcagtatttattcacatagttttcattttctgtcctgacaaaaacttggtgatgcttgaatgattacagaacaaataggattgtggtttatgtttcctattatgcatatttggcagttgaattatgacattagattgggacatggtgagagggggcaggatactgggtaggaggaggggagcaagttacaaaaggccccagttccgggaagctgggctgagttgttctgtttaacttcttcttcctttattcctatggttttatgattgcaaattggcagtggcagggcaggctctgactatatttgctagaagcagatgtccacattaatttagatgtttagggatttaaaaatcataa

SEQ ID NO: 31702 - DNA, 426 bp, Homo sapiens
actactatagggcgaattggagctccaccgcggtggcggccgaggtacctttgggaccagatgctgcttatccaacagcccttatctcctttcttgctagtagacatgactgaactttctagtctacacgactcaaaggatcattcattaatctaagccactcctgatggatgatcttacttgctttgccaatgacaggagtgagatgacccatttctagcaaagccatgaggccgtatctgctggagcttccaggggaagacttccttgctttagaaggacacagaaaaatctgtctctcttttgccagacacggttctgtcagcatttccttcccagaattacagtagccatattgggaccatgaggcgaactggcctgaggataaacatggaggatggcagagcacaaaaatttcaagaaact

SEQ ID NO: 31703 - DNA, 192 bp, Homo sapiens
acgactcactatagggcgaattggagctccaccgcggtggcgggccgcccggccaggtcccagttgtaaaattaccaggaaccgccatgcctcaagatcgccctgttttctggcttcatcaatgactgcatgcagtgcaccaccctgtccactacgtgatgctgtaggattaagtctcacagtgggcggctg

SEQ ID NO: 31704 - DNA, 414 bp, Homo sapiens
tactatagggcgaattggagctccaccgcggtggcggccgaggtacgggacttgtctccaggagacatgtctgggaagaagagctagactggagaatcatgagcatgttcaggtgaaaacatgtgagtggataagagcaagagggtgagaacacagaccaaggggctaagggacagactgtgttcagtatttgggtatggaacttgtttttgctacttgctagttctaagaccaggctcagactctaacttctctgtaatgtgggaataatgacagcacttaccttataagattttacaaagattaaaatatcatatataacagcacttaacacgagtaagaattcagtaaatgttgaccgttattactattgtctgggtcgttataagttttgaagacacaattgcataaact

SEQ ID NO: 31705 - DNA, 391 bp, Homo sapiens
gggcggcggccgaggtacatgagatgggagctcgacacattttatttggagaataaaagaaaatatgccgtcatcaaactagagcgtgttggggggcatctggtttacagaactaagtcaaggagaagaactctcaagcaatggtgacatctgccagctctgcaaagtgggccctgccttgtcacacaagtctccttgggcaaatgttttctatgtagattttagacactttcctgtgactttctcaaggtcttttggtgacacatgcagcttgaagcttttgcaaggggctggagtctaatctcttcttgcccagcttggctgcaggagaagaagggagatatgttaggacttggctttgactgaggttggtgtagcctggggttgcaag

SEQ ID NO: 31706 - DNA, 425 bp, Homo sapiens
tactatagggcgaattggagctccaccgcggtggcggccgaggtacctggctggagtttggcttcatccagaagacaatgaggtcatcttgtttgagaagatgatgagtggctcagatgtcaaatctacagacaagcccacgctgtaaaactgtgtctgaacattttttctttttgagatggagtctcgctttgtcgcccaggctggagtgcagtggcacaatctctgctcactgcaagctcagcctctcgggttcacgccattctcctgcctcagcctccccagcagctgggactgcaggtgcacgccaccacgcctggctgattttttgtgtttttagtagagatggggtttcaccaagttagccagcttgggcccaatctcctgaccttgtgatctgctttgcttaacctcccagagtacct

SEQ ID NO: 31707 - DNA, 426 bp, Homo sapiens
ctactatagggcgaattggagctccaccgcggtggcggccgaggtacttaacactatattgagattgttattttaactggaattctaagatttgtgaactgtaaatgaaaaacatactcattaaattttattttttcttgatactcaaaatcatatttataaaaaaaggattttttttttttttttgaaatggagtcctgctctgtcacccaggctggagtgcagtggcacgatctcggctcactgcaagctccgcctcccgggttcacgccattctccttcctcagcctcctgagtagctgggactacaggcgcttgccaccacgcccggctaattttttgtatttttagtagagatggggtttcaccatgttagccaggatggttctcaatctcctgacctcgtgatctgcccacctaggcctc

SEQ ID NO: 31708 - DNA, 415 bp, Homo sapiens
ctactatagggcgaattggagctccaccgcggtggcggccgcccgggcaggtacctttagactagcatcagccatacagaatgcagtaaaatatgaggctggctatgtaggatgaagagtaattgcttgaccctaccttacagttattcttagtctcaaaaaagtgaaggtcttatcggtcctggcaagctactagtaagctagcaaaattacaactttttgtgctggatttagtaaaaaaatgtttaacttcttcttaggcaaagaaaaaaatccctacataaatgcacagacatctataatttataacagaaaggaaagaaatgattcagtgtgtttcatgcaaaatttttcaaaggcgtctaacgtctccatttaatagaagccataaaatactcctaaactgagatttcat

SEQ ID NO: 31709 - DNA, 450 bp, Homo sapiens
tatagggcgaattggagctccaccgcggtggcggccgaggtacattgcttctgttctctgtcactctgtttctgtgccagaagacacattgcttctcctcattctcttatgcagtgctgtttaagtggtggtccacaaattgttgctggatggtgatgagatcgattaggagtttatacctcaatgtaaattaatgcacttccttccttccttaagaatgtcttgccatgaaaatatcagcatgcctgtggatgtcattgatttaaatgagggcacaagttccgtatttccttgcagatgggtccagactgtttgcagactggccatggtccttgggccacactggaagaagaactgggctaagtattttttatgcctgtgatttaacttctccaataaaccgcagctcttgtaggatatgatggtcgctgtcaggcaaggactagattt

SEQ ID NO: 31710 - DNA, 434 bp, Homo sapiens
tacgactactatagggcgaattggagctccaccgcggtggcggccgaggtacgcgggattctcaatcctacccatgatgcagacagattgcctcatttcagctcaataaaacatcaccaaattcccttaggcagaaaaagggtggggagtgccctttcttgaaggaatcccttaagtgcacgtctcccgttttcttttcacatcaatgcagagtccctctgtgaatttacaacacccaacacccatgagttcagtccttaagaaggaaaattgagcaagtatttaattggttggacattgcataaaagaggtccatatccaggctaactctagaaattttattctcaaacttagttggcctctttttcttctgtcagaggaccattcttagtggcactggggaaatcttggcacccagaagaattcaactgcgc

SEQ ID NO: 31711 - DNA, 352 bp, Homo sapiens
tatagggcgaattggagctccaccgcggtggcggccgcccgggcaggacgcggggaaagtcctcagtaaaatactggcaaactaaatccagcagcacatcaaaaagcttatccaccacaatcaagtcggcttcatccctgggatgcaaagctcattcaacataccaaaatcaataaatggtaatcccataacatgaaacagaaaccaattgaccaaaaacccacatgatttatctcaattagattgcagaaaagggccttcgaataaaaattcaagcaccccctttcatgcctaaaaaacttctcaataaaacctaggttttttgattgggaacattattcttcaaagttaa

SEQ ID NO: 31712 - DNA, 414 bp, Homo sapiens
tactatagggcgaattggagctccaccgcggtggcggccgcccgggcaggtacagctaaactccaccgcagagcaagcaaacccaatctggcacacagcttttgggggtttcctctcctactatggcccctagccctgtgcccagacatagtgaagggtcagtaatgttggctacattgatctgcaaatctactacaccctcagccaagccagtctgttgaacaaacatcccccataaaacccaccggatctgccctaaagcccaaagagccttggccccccacctattgggaacatctttccaaaaataccaccactttcaaaggaactcccctgagaatgggggtgggaagtctaatgcatatattttgctctgctatgtgtgaagcatggtatatccactactttattcag

SEQ ID NO: 31713 - DNA, 471 bp, Homo sapiens
ctactatagggcgaattggagctccaccgcggtggcggccgcccgggcaggtacatcccagctgattcagtatctccttctctttgaaaactctcacagaaactgccctataacttctactgacatctcatctcaatggctagatcagtgctatataacaaaactttctgcagtgatagaaatgttctatatctgaactatccaagaaggtagcctactaacccacttatgactgtttagcatttaaaatgtcacttgtggaactgacaaaatcaacttttaattttacttgattttaataaatttaaatttaaatagatacatgtgtctagtggctaccacaataaatagtgcagggctagaccttaatcacatcactaccccatctgcaagaaaagctggaaaatgaaagtttggagctaaacacgttgctaccctccacaaaattatgtttttcttagtaaggaaaaa

SEQ ID NO: 31714 - DNA, 508 bp, Homo sapiens
tacgactcactatagggcgaattggagctccaccgcggtggcggccgcccggcaggtacttggttctcgtcctcagttctctttgcactctctctctctttacagatatatgaagtcaacttgccctcttctgatgccaccaatacttccagtgctaacctctcatgtaagtctgagacccttgtctaactgctccctaccttctccacctgcgggtctcattcaaccttcatttcaaaggttctaaaatggaactcattaatttcctactaaacttgtccctttgccagagcccttgggacctagctaatatcctctgccactccaggtcttgttggacccacgttccatcaaccagtcatttgttgtctgcttagtcctgatgtttatattgccttaattcttctcacatccatctccctccttcccatcctcatctcttacctaagccattaattaccatgtttatcccacctgcaaagtcctccattcattctattctaagcaa

SEQ ID NO: 31715 - DNA, 434 bp, Homo sapiens
atacgactactatagggcgaattggagctccaccgcggtggcggccgcccgggcaggtactgaaacaggaggctgatacaggacttgtgcttagctgactgagcagcccatgaagcagtgacccgtggttcttcctctatccctccctatactcaactcctctcaaagtcttttgttctatgtcattttctcccttcacttttctcatgccttctcctcctctgctctgcctctgctataagcctgtctgtgcaatccaggctcactgcaaggtcttcatgttgggacaccgagctactagggtttctcatctttgacagagaaaacggggatgattgacatatagcaactttaaactggggcctccccaaagtccaaatctgaatgtctttaaaaacaatgaagaatcaagttaatgagtcaagtctgtctaa

SEQ ID NO: 31716 - DNA, 452 bp, Homo sapiens
cgtaatacactactatagggcgaattggagctccaccgcggtggcggccgaggtactatggatccactcaaccagaatttctagggtctggataatttgcacattatcaagtctcctgggtgatcttatacaacccaagtttgagaagcatcaatataggtcataaggaattactaagctttaagcagatcaattttgtattttagggtgattattgtaatagcagtgtgaaagcagtgttaatctccccccagtctcttccatacagcctatttataatagcacacacacaaaattctgctatttacctgacaatttttacagcagtgtggaaagtaaaagaggagagtagaaaggtagaaggacaggtagggacagtaaagtgaaatgagaaaggaataaactaaggcagtgattatgagaaaagatggggctaaagtccagagacattt

SEQ ID NO: 31717 - DNA, 472 bp, Homo sapiens
tacgactcactatagggcgaattggagctccaccgcggtggcggccgaggtacacacttaatgggttttcaagaagatgggattgttttttcttggccatataatataaatgtataataaatttgctctctttgtaattaaaattaagagacagtagctcagctaggccttttaaatgtctatataacccaacaccaccataagtccagctcaattttttgtgacctgtttttctcatgggctagctcaaagatttttttttttaaggcagcagcaagatgaggttttaaaaaggctttgttagggcaattagacattttcatttttcaagctgattatagcatttatcacttacattgaaatttagtatttgcattttgcctctacgcttagaatgttacccaacaatatggtcaccacacaagttgattcacagggtgtgtttgcacatttctccagttttttgattaag

SEQ ID NO: 31718 - DNA, 370 bp, Homo sapiens
gcgaattggagctccaccgcggtggcggccgaggtactttaggctgagaaataaatagaaggtgagaaaaaagaacagtctttatagtcagtaagagtgaaaagagaaagatggtagttggggaaagacagatggggagaaaggttggctggttgttaataaaacagtagaggatgagcatgtattataaatgctggtgggaagaaaccttgtggcaaggagggtggtagtgttggagaagaaagagaggatatagtagaaagttaaagaggaactggaagcaggtgggatccaggacataggaaggggatagagccttgggcagaggtgagaacatctgcaggagggaagggaacttgatagaagggaa

SEQ ID NO: 31719 - DNA, 457 bp, Homo sapiens
ctatagggcgaattggtgctccaccgcggtcgccggccgaggtcctttttcttttgggtagttttttttaaatatggagttttagattgcattttaaaaattgcctattgttactacattcctaagctctttcaatatctcaaggatactgatacacctatggaatcccttgatatctccttgcagattcgcccctcctgttagctcctctcttccctatgttgccctcctgctttacgagactgattgctttccacatcactgcacagtggacattctggcattgactttcattgtcatcctgcgttggagaccatatatctctttttttcttagttaattccctcattttgcttatcacactgtcagtaactttgtataaaaggacaaattaaggttaaaattttttggagtttttttttttggccccagcttttctatatatatttttttcatg

SEQ ID NO: 31720 - DNA, 450 bp, Homo sapiens
ctatagggcgaattggagctccaccgcggtggcggccgaggtacaggttctttgaatgcagtatttattcacatagttttcattttctgtcctgacaaaaacttggtgatgtttgaatgattacagaacaaataggattgtggtttatgtttcctattatgcatatttggcagttgaattatgacattagaatggaaacatggtgagagggggcaggatacggggtaggaggaggggagcaagttacaaaaggccccagttccgggaagctgggctgagttgttctgtttaacttcttcttcctttattcctatggttttatgattgcaaattggcagtggcagggcagctctgactatatttgctagaagcagatgtccacattaatttagatgtctagggattaaaaatcatagagggtggcgctaggaaatatagaaaatgccaatg

SEQ ID NO: 31721 - DNA, 403 bp, Homo sapiens
cgactactatagggcgaattggagctccaccgcggtggcggccgaggtactatggatccactcaaccagaatttctagggtctggataatttgcacattatcaagtctcctgggtgatcttatacaacccaagtttgagaagcatcaatataggtcataaggaattactaagctttaagcagatcaattttgtattttagggtgattattgtaatagcagtgtgaaagcagtgttaatctccccccagtctcttccatacagcctatttataatagcacacacacaaaattctgctatttacctgacaatttttacagcagtgtggaaagtaaaagaggagagtagaaaggtagaaggacaggtagggacagtaaagtgaaatgagaaaggaataaactaagg

SEQ ID NO: 31722 - DNA, 409 bp, Homo sapiens
tatagggcgaattggagctccaccgcggtggcggccgaggtacgcgggcgagaaattttattctcaaacttagttggcctcttttttttctgtcagaggaccattcttagtggcactggggaaatcttggcacccagaagaattcaactgcgctcactgcaaaaataccatggcctacattggatttgtgaggaaaaaggagccctgtattgtgagctgtgctatgagaaattctttgcccctgaatgtggtcgatgccaaaggaagacccttggagaagtcatcaatgcgttgaaacaaacttggcatgtttcctgttttgtgtgtgtagcctgtggaaagcccattcggaacaatgtttttcacttggaggatggtgaaccctactgggagactgattattatgccc

SEQ ID NO: 31723 - DNA, 593 bp, Homo sapiens
gtatacgactcactatagggcgaattggagctccaccgcggtggcggccgcccgggcaggtactgacacaatatgaactggagtttagaaggagagggtctcattctgaatggtgaaatagaacaaataactggctactgaaaaatagagttggaaattgtatgtgattaggtgtgaatattttgggaaattagttctgaaataggccatcttcagaggaactgatgtcctttggaggcttattggtgaagggagagaaggaagtaaatgaaggtaagtgtcgtttaacaagatatcaaagaatccaaaaatatcctccataaaggtgtgtgatttttttaaaggaaatcgtgatttattttacaaataaagcactgtgctcctgaatgaaaaaaacagcccccctacacttgtccataagattgtttactattgtaacgtgaatagtttataccacatgtgaaaaaaaaatccacacaaatttactctcaaaacgtttctttgaacatacaaaaacacgctaggccaggtgcagtggccagttcctgtaatcccaacactggaaggcccaggcaagaggattgcttgagcct

SEQ ID NO: 31724 - DNA, 550 bp, Homo sapiens
gcgtaatacgactcactatagggcgaattggagctccaccgcggtggcggccgcccgggcaggtactttataatagtgatagatctgtttcattgtggatttttttttggttaatctttattactattcagtaatattatctgtgactagaattattcttctgtagaaaaaacatcatttgtgataagggatcaaatagtttttttgaaaaagactttttaaaaatttagttttaaaaaaatataacttaaaatgtgtagacatttaatgcttatctttctccatattcctgctgatctgatatgtatgttttaatttattcacttatcgaacatgtgttaatcatttagaggtgatggaggttcagagttggaaaggcatcatcatagtctagacaatgaaacccacataattaataatgtataacccaattattgttagtttagcaaataggatttcaagaagccagtgcatttctcgtgacatgttactggaaatcaaatacttccctcatgatggatatcctttctaacggccaggaacaagaaaa

SEQ ID NO: 31725 - DNA, 453 bp, Homo sapiens
attggagctccaccgcggtggcggccgcccgggcaggtacctttctatatttagattctatctttgtcaagcaagatgacttgtttgacagggctctggtttttcacctctgaaaagctactcatccacagagcttgggattgaggggagaggaaagggggaggagatctggcttctctctccaactctgaacagattgggatcagaataggccccttttacatccctagccaagatgcctgggccttggcagttgtcccaggacatagacaatggggtctgatggcagcttctcagacctggctttccctgggcaagaggcttttcctgaggctggcaatgccatttcttcagactcagaaaagggatttagggagggggaaatggggactgcaatgaggcaactcttgacagcttaccctggaaaactaggacacagcttgtgggagccca

SEQ ID NO: 31726 - DNA, 556 bp, Homo sapiens
gcgcgtaatacgactcactatagggcgaattggagctccaccgcggtggcggccgcccgggcaggtacatgagtctctttttttttaagaattttaattttcctagttccttatctttttaatgattattctttaagtggacatttaagacatgagcttttaagagcagctgaaaattattggtgtttactatgggttttatccatttgtatactgtttttttttctcagctatcttcaaaatagccataggaggtagattccattattattttactctaaaaagagaaaactgagttttaaagtgttaaagtggcaggaccaagatgaagatacgaggtgaaagtaactaaaggttgttagcataacaattcaaccaaagatgcaattgaaacaatatgtctttgctgtcatgtctagacaatgagatggccagattgcaggcagcatatttgcagtgactctccaaggcctgcaaggttagagctggtctaggtagatgtttgcagctggaagtgggaaaacatccaggcaagcagggggttaatcctggtatt

SEQ ID NO: 31727 - DNA, 611 bp, Homo sapiens
gcgtaatacgactcactatagggcgaattggagctccaccgcggtggcggccgcccgggcaggtaccatggtgccttatacctaccaggtatccagtaaacagcaatggctggttgactggttggttggtgtgtatcagaaggtgaggagacgggtcaaaagtcctccacttaaaaaaaaaacctttttattttggaatattagagttacaggacagctgcaaagataatgcaaaggtttcctatacagcctcacctccacctttgaaaattggtgatggtagaagaaaaataaccctgaaccagtgtgcccttgggcaggtcacaccaccttagcaggctccagttttatcactgaaagcaagataacagggttcgcctcactgtcttagtcagcttgaactgctataacaaaataccatagctgggcacggtggctcgcctcgcggcgcccgcgtacctcggccgctctagaactagtggatcccccgggctgcaagaattcgatatcaagcttatcgataccgtcgacctcgagggggggcccggtacccaacttttgttccctttagtgagggttaattgcgcgcttggcgtaatcatggtcatagc

SEQ ID NO: 31728 - DNA, 437 bp, Homo sapiens
cgactcactatagggcgaattggagctccaccgcggtggcggccgaggtactgaggtgggtctagaggattagtctgtgaattgcagcctggattctgcagttgtggggtctgcctggtgctgagttttactgtggtggactcagtgttgggatccagcggaaaatcctgtgcttactttcctctcttcctgccaagtggagagtatgtcttttcatgctctgctgcctggaattggaaaagaggtgatttggataatgtaaaactgcccttcctatcctcttcaacgtatcttttattattattgtgctacaaccagacactgtgatctttcatctggttttcttagatgttgtagagatattgtgtgcatggaccaggtatggtggctcatgcctgtaatcccattttgggaggccaaggcgggaggattgtttg

SEQ ID NO: 31729 - DNA, 365 bp, Homo sapiens
actatagggcgaattggagctccaccgcggtggcggccgcccgggcaggtacattttaatcccattagtagatatgtggtgactatcatttttctattttgcatatgctttatgtaagattatataactacagattttagtgacttaaggaaaagaaaagggaaaacactaaaagaaaggccttaaagtcagaagacctggttttaaattccagtccctccatgtgaggtcctcaatttcctcctttataaaacacagatgaaaatgagatgtccttcaagtctacagtggatctgaagggagggctattattttctgtgagacgaaaaagaatgtcactgacatggccatgaatccgcacaaaa

SEQ ID NO: 31730 - DNA, 454 bp, Homo sapiens
ctactatagggcgaattggagctccaccgcggtggcgggccgaggaactgttttttttttttttttttttttttggagacacagacacagtctccctctgtcgcccaggttggagtgcagtgccacagtcttgactcactgcaacctccacctcctgggttcaagcgattcttgtgcttcagcctcccaagtagctgggattacaggcatgcaccactgcgcccagcctgcttcacatttctttatgggatctttattttcagtgttgatgaattgcaagaggatgtgctcatgggcggggcccttccttcatcctcttctggggtgagctggttccaactgagccttacctgcctcagcaagggcctgctcttcctttccttgggttgctttcccagtcctggacttcacagacctgtcttctccctcctttcaactctgtttgcatatgttc

SEQ ID NO: 31731 - DNA, 293 bp, Homo sapiens
actactatagggcgaattggagctccaccgcggtggcggccgaggtacattttcttttgggtagtttttcttaaatatggagttttagattgcattttaaaaattgcctattgttactacattcctaagctctttcaatatctcaaggatactgatacacctatggaatcccttgatattctccttgcagattcgcccctcctgttagctcctctttttccctatgttgcccttctggcttttacgagactgattgcttttcacatcactgcacagtggacaattctggcatt

SEQ ID NO: 31732 - DNA, 401 bp, Homo sapiens
ctactatagggcgaattggagctccaccgcggtggcggccgcccgggcaggtacgtgccaccatgcctagctaatttctttcttatttttgatagacacagggtgtcactgtgttgctcaagctaatttcaaactgtttatctgaagcaatgtccctgcctcagcctctcaaagcggtggaattataggcatgagccagagctctattattctaagctgcgggctgaattagttggatacaatagtgatgactgtattcagggcaaagaagaaagtaattgcagaattattcaataaaattttatgaagggttctcatacagagatatcatgattaagagatggagaattatctttactattagtgaccttggcgtttttccaaggcttggaaaggcatct

SEQ ID NO: 31733 - DNA, 430 bp, Homo sapiens
ctactactatagggcgaattggagctccaccgcggtggcggccgcccgggcaggtaccacattgtttggatcgccatagctttggactaaacttccccattaaactttttcaaaacttgcctagtatattgtgcaggccgggcatggtggctcgcgcctgtgatcccagcactttgggaggccaaggtggatggatcgcctgagatcgggagttcgagaccagcctggatagcatggcgaaaccccatctctactaaaaatccaaaaaaaaaaaaaaaaaaaaaaaaattagctggctgtggtgataggaacctgtgatctcagctacttgggaggctgaggcagtgaacccgggaggcggaggttgcagtgagctgagatagcaccagcctgggcaacggagcgagactctgtctcaaaaaaacagaaa

SEQ ID NO: 31734 - DNA, 363 bp, Homo sapiens
gcgaattggagctccaccgcggtggcggccgaggtacaaaaggatccgctactgtgtgcctttctctagctagctcattttattcttgttatgcatttcccagacaatgcatgctgagggcctactatgcatgagacactgtcctaggaacagaggtggttccctggtggccctactacgtcattatcattgtggattttggattgcagaatattgaactgacacattttttgatggcacatgtcttgagggagagactgcagtagggcaggtgaatctttgccacctgtgcagaccctaatgtttgccacaatgttcgtatttggttgacagctgatcgtgagatttgtcctggacattcag

SEQ ID NO: 31735 - DNA, 387 bp, Homo sapiens
tacgactactatagggcgaattggagctccaccgcggtggcggccgaggtaccatactcttttggttgctataattctgtggtataatatgaagtcagaaaatataattcctccagttttatttatttatttatttttgcttaggatagtattatttcttatagtgaaagcattctatgttatttattattagtctaattttgtagttttacaatgctatcctcttttacaaagctatgatcaactcagtgtgtccagatcaggatcatttgtagctatttgcaaaagtagcaatattctggctgggcatggtggctcatgcttatattcccagcactttgggaggccaagacaggccagatcacctgaggtcaagaggttcaagat

SEQ ID NO: 31736 - DNA, 452 bp, Homo sapiens
actactatagggcgaattggagctccaccgcggtggcggccgaggtactagacctccctgtctcattctcattgaaacattttcttttggctttcataaacctttcagaccaatcttccctcctccttctacttgctccttaaatgtcaatgttttccagggttccattcctacattttgctcatttcttcatccaaccctcattcgctcttgactaaaatttgaccctctcagaatcaagaggagtttgagatcctctttgctacccacacttgttttcaaaccattacttcccctcatcttaaaaagccctctgggctgggcacagtggctcaacactttgggaggccaaggtggcagatcacttgaggccaggagtttgagacaagcctgggtgacagagcaagattctgtctcaaaaaaaaacaaaaacaaaaaacctttgtttcttt

SEQ ID NO: 31737 - DNA, 450 bp, Homo sapiens
atacgactactatagggcgaattggagctccaccgcggtggcggccgaggtaccttcctccttaaatccacattccacatgagtttgtcatctttttagatgtatatttgggaagttgctccttgctgacaatccttgaaaagtgcccagttctcaggacccagttgaaataatttccgcctggggctgggcgcggcggctcacgcctgtaatcccagcactttgggaggccaaggcgggcggatcacgaggtcaggagatcgaaaccatcctggccaacatggtgaaaccccgtctctactaaaaatacaaaaacttagccgggcgtggtgggcgggtgcctgtagtcccagctactcgggaggctgaggcaggagaatggcgtgaacccgggaggcggagcttgcagtgagcccagatctcgccactgcactccagcctgggcgacag

SEQ ID NO: 31738 - DNA, 420 bp, Homo sapiens
tggagctctaccgcggtggcggccgcccgggcaggtactttttttttttttttttttgtatttttagtagattcagggtttcaccgtgttagccaggatggtctcgatctcctgacctcttgatccgcccacctcggcctcccaaagtgctgggattacaggcgtgagccacccatccggcctaacgagacttatttttactcaactagatggcgttcattcatttgcttactcagctgtgccaggaattaagttgggcactgggaattccaaaaccaacaagacattctctgtcatcagggaactcacagcctagtatgagagataaacaaatgaacatgaaattataattcagtaacaaagaatgagtgctatggcagagggaatgtgtaagagcttggcagggtatccagcagggat

SEQ ID NO: 31739 - DNA, 452 bp, Homo sapiens
gcgaattggagctccaccgcggtggcggccgaggtaccggaattgacggaggcttttgtcattgtcgcgatctggaagcaggtggagggttatgggaaggatgtaagtcactggatatatcttcatatgcaccgcgaaaccatagaatacagctgcacacgcgacgagtcttttctttatcaagtagaggaccatcaggaccagggaggcgacaatagagtccgcattaccgcggctggatactgccataggcagggggttaagaagccaaaagacacagtagccacaagcctggcggcgccccagccccttcagcagcagcaggcggtataagaggaaagcggtgaggaggtcgcagctgatgaagagaaactttccaaagagctcgctgaggtagaagttgggagtgaggagccaacccagcagcggggtgtaacggtacctgcccgggc

SEQ ID NO: 31740 - DNA, 227 bp, Homo sapiens
gtaatacgactcactataaggcgaattggagctccaccgcggtggcggccgaggtacacaagtagaactgttaaaaccgtgtggcttccaactgctctaataactttaagattcacagtcttcaactttcttacagtggaagccatgggggcattgtcctgttgccttctctctcattcctcataatgagaaaagatgttaagcttcactgtacgtaagtcccagtg

SEQ ID NO: 31741 - DNA, 425 bp, Homo sapiens
cgactactatagggcgaattggagctccaccgcggtggcggccgcccgggcaggtacatatattagaacgatatttttatatgcaagaaaaccgagactgagagaggttaataaacgcgtttgaaagcacataactggtaagtggcagctcaggattcaagagggcccatgttctttctgctacataacactgctttaagtcctcattatccatgggattgaaaaagtgaaaaatagatcctttaaattactctccacactcctcccacccataaattttttttttttttttttgagatggagttttgctcttgttgcccagtctggagtgcaatgacacgatctcagctcactgcgaccttcacctcctggtttcacgcgattctcctgcttcagcctcccgagtagctgggattacaggtgcc

SEQ ID NO: 31742 - DNA, 372 bp, Homo sapiens
acgactcactatagggcgaattggagctccaccgcggtggcggccgaggtacctacctgcggtatctgatcagtttctgcctagtcagatgtgccctgttgctgagtctgcttgggtggggagcataggaaaatggggcaagtgcttcatgagggagctgttctcagccgccccctctcccaactccccagctctctctccttgttctgtctcctgtttctgggctctaatcctggtcaggcccaatgccccttgcctgtgatgctgggtctgcagttttgctcgccgtcctcgctttgccttcttgcccgccacttccagcattcctcctctgctcaacttctgagctggtgtcaggtttctacctgcctg

SEQ ID NO: 31743 - DNA, 217 bp, Homo sapiens
atacgatcactatagggcgaattggagctccaccgcggtggcggccgaggtacagtgacaacagtaaggccagaaatccagtttggaatcaatatgttgttttcaaaatgactgattataatcaaaatatttcataaaaattgattctaatgtagctaactaagattctagaggatgttaagaagtcttttttttcttttctttctttttttttttt

SEQ ID NO: 31744 - DNA, 447 bp, Homo sapiens
tagggcgaattggagctccaccgcggtggcggccgaggtaccgcagtgcctgagtcaggtatccatttgcattgtgaaaggagcctgaggtgtgaaacagttctgggttctttgcgcacccagctggctggcttcctgtgaactggctgcatttcagatttcattctctagccagaagctgaaaggcaggagccctttgaagagatacagggaagcaaagagggttatccagatgagaaggaagggaaagggggcgtgacaactccttggagggaatttccccagtgggaactgcctctggaggagcttacacagggcacatcaatgggaaaccacgtcctggtctgctcggaagccctggggggcctcttgcaacatgcaggcaggctccccaaactcaaccctctctctctaccagaagcgcatggactgggcctgcttccccct

SEQ ID NO: 31745 - DNA, 446 bp, Homo sapiens
gtaatacactactatagggcgaatggaacctccaccgcggtggcggccgcccgggcaggtacacacacacgtgcacaaatacacagctaaagagggggaattcatcaatggccttctgaaatacttcgcacaccaagaggaaagaagaggcagcccacagcaaggcaatgtatcttcctctgccttctctgaagtttgctcccaaatctgaaggctgaccttgaggagggccaacctcaaggctgtttgtgaaacccagggaggcattctgggggaaagacagggctcataattagtgttcagtgggttcctttcaaagtccaggccacagaggcagtgtggggccgggcactggttctgcccttttccccactgattgtaaacaaccgagcactgcgcgtagtgtcagaccagctgctgtaaagtctattaacttaatttcaaac

SEQ ID NO: 31746 - DNA, 389 bp, Homo sapiens
agggcaattggagctccccgcggtggcggccgcccgggcaggtacattatttgcctaattacctatgtcgttgagtcattgagaaaattaaatgaaatgatcagaactcatcttaatgacagaggagactctccaaacataatgcaaagaagatataatccactgataaataattttaaggtgacttttatttttttttaaccgggaagtatttgtggttttttcgaattggcatttgttaaataatacccacataaggggtttccttttacacatttaattatttgagggggggtaatagaacatatatcagaaatattggcgtggggctggatttgcattatatgtgatattttaccagaaggggaaagaaatgggatttttttttg

SEQ ID NO: 31747 - DNA, 179 bp, Homo sapiens
tatagggcgaattggagctccaccgcggtggcggccgaggtaccactgcactccagcctgggtgacagagtgagactccgtctccaaaaaaaactttgcttgtatattatttttgactcacagttaaattgaatagacagcccacacatgggaagagaatgtttttaaaccatatctca

SEQ ID NO: 31748 - DNA, 431 bp, Homo sapiens
cgtatacgactactatagggcgaattggagctccaccgcggtggcggccgcccgggcaggtacctaagatagagctgttagaatttagatagacattagatagacagtgaaaatattttagtctacagttgaaactgtaacaatattggtattgttctcaactacccctggtctagttaagggctttcaagtatgtgtttggacccagtattttcatgtccaccatctagatagtccttggtctatttcccaccccatgtgctttctggtgggatgatcacatctgcacctctagtccccaagctgttcctgagctctgtgtcctcactgtctccacatggagtgtccccttccacctcaaacttgacaagggattgtgttttccacaccaccctgctcctcctggattccagcccagtctgtccttcctt

SEQ ID NO: 31749 - DNA, 613 bp, Homo sapiens
gcgcgcgtaatacgactcactatagggcgaattggagctccaccgcggtggcggccgcccgggcaggtacagtgacgtgatcccggctcactgcaacctccgcctcccgggttcaagcgattcttctgcctcagtttcccgagtagctgggactacaggcatgtgccaccatgcccggctaattttttatttttagtagaggtaaggtttcatcatattgaccaggctggtctcgacctcctgacctcatatccacccaccttggcctcccaaagtgctgggattacaggtgtgagccaacgcacctggcctaaaaaaatagatttttaaagagctgttttaggcccacagcatctgattccattgtaagcctgattttcccagtctgctctgaagcggaaccaggtaactctaatatgacttttaaaataaatgcatgctaacaggcaaaaatagatgttgcttttgaagctaaaatttgtttcacgtctcccttctagactgaaagcttcacaagggcagggttgcaatctgttttagttacccctgaatccccagagttcacctgtgcctggcacacaagcactcagtatttgatgaatgaatcaaagta

SEQ ID NO: 31750 - DNA, 458 bp, Homo sapiens
ttggagctccaccgcggtggcggccgcccgggcaggtacttggaatacctctttcctctagaatacagtgatcctattccccaaagtgcaagctttcatgtggaagcatcctaagtgatcgtcctgggtgatgccatatttcactaaagtgggaaaagaagaggtgaactttgctctttcaacaaggcttgcactttatactttgggcagtgcatgggagaaggggggcccttagaggtgagcaggatcactgtagctagaggagaggtctcactgaaacagaacgcatctgtgactgtagcttgcatggagagcctagacagccaaccatggatttgcctttatgttttgaatggaaacatctatttcaattgggatagaaacctttacctatgtcatatctgtaagagaatttagcttatagatatgtagatacgtgtgtgtgttgctgggtgggg

SEQ ID NO: 31751 - DNA, 383 bp, Homo sapiens
gccgcccggccaggtcccgaaggaaggccaggtgcagtggctcacgcccagcactttgggaggctgaggtgggaggatcccttgaggccaggagttcaaggttacagtgagctatgatagtgccactgcactccagcctgggtgacagattttgtcttaaaaaaaaaaaaaaagttgatatgagttttattttctgtccgtttgaaatattttgtaatattccctgcattctctgtcgtctgccttttccacacaatgtcctttgctttcatgtttgttatcttctttttctgttcactcagaggtcatcaatttctttctttccgtccttaattggattatttttcttttggcctttgggcacagagtctgacctttggacc

SEQ ID NO: 31752 - DNA, 512 bp, Homo sapiens
gcgaattggagctccaccgcggtggcggccgaggtaccagccgctaagcatacaaagattcaaggttaaaaaaatcctctcttcattcaaaaagttcagcgtctagtaggatgaataaatgaatgaatgaataaaccaagtgaaacactgccaagtgctattgtttagatctaaccaagcctgcagagggaacagtggactctacctgggaagattaagaagatcttacccaagtggggacagggaacaaggtctcaaggtgtgagatgtcttccaggtgaagaagcgagagagggccattctaggcaaggagaaccccagagatgggtcaaacaagaggttggaagtaagtaggaaaaaatagtgaagggtgaaaagatatctgtcattttaaaatattaataaaagacagattatgttggattgagaaatgggtgacagtttaagatgtcgggcaggaagtgtacgctcctcttttaagaaacatgaagtgcctgtagtcccagctactc

SEQ ID NO: 31753 - DNA, 420 bp, Homo sapiens
agggcgaattggagctccaccgcggtggcggccgcccgggcaggtacatctggcaaggggcacttttactctgatgtcgggtgttttagggatatgagttcagtgaataagtagctagagggaggagctagttaggtcttgattttaggcaaatgctaaatctacctcattttccatacctgtcttttgattgggatagctaaagaatttataccagatgaaccaagcaagccaccttcttacgacattaaatttggtggaccaagcccccagtagaagcgctggggcccagcacggccaggctctcaccttttagagcagcacccccgactaatccagcgaatggaatctggctatgaaagcagtgagaggaacagcagcagccctgtcagcctggatgcatccctgcctgagagctca

SEQ ID NO: 31754 - DNA, 430 bp, Homo sapiens
ctatacgactactatagggcgaattggagctccaccgcggtggcggccgaggtactccttttataaaacttggagttgatgtaaaggcacagacaacacaagttaccttaataataaatgcacttttctttgtaattttgggtaattcagtgtgatttgtaattcttttaaaagacacacaatcacttgtatttttgcatggttctttttttcctaatttcccactatagtgaaatatctgtttttccttctctattgggtttggattggaatgatcaggtagaattaaatgtaaaataacaaaaggaaaatactttatagatcttctcaaaatactttgaagggtataatctctttaagatggctttattcatatttaagccaaaaacaaaaagcaaccaaaacactactgtttatacaaaaagcagct

SEQ ID NO: 31755 - DNA, 428 bp, Homo sapiens
tccaccgcggtggcggccgacgtacaaggcttcctggttttttccatatgcctgaaactgtacatcattaaacactggagagaaaaaggctattcacgtatctgcctagtccctgttgtgatttgcttttacaacccctgctcagaacatacacacatacacccattgaaaatctcccacgaaggagctacatcgcacagcaattagtgttactttaacacatttaatacaaccgttattcctccagccccggaacaactcatggtacgtctgtgaaccatgcatgtagggagcattgtagacactgcgtggttgaccctcatgatccactccaaatctctcccactgagtagaaacacaggtagaagcttgggggagttaattcatctgcttgccacctgaaaaataaatatatgacaaatgaatgg

SEQ ID NO: 31756 - DNA, 397 bp, Homo sapiens
gactcactatagggcgaattggagctccaccgcggtggcggccgaggtacgtgaaagcgctttgaagatcacaaacccatttagaaataggtgggttgctcttcctcaaatctttgaaagctgtctactactataaattcattcattcatatctttccctcattcctttcagttttttaaaaatgtattctatccaacttacatgtaagcactttgcaaacactcactcatttactatgaataacaatcctactatattcacaattatcatttccccgctttacagaagaggaaactgaggcacagagattagacagtgtaggcaggattcaaactcaggtggtctggctctactgtccttgctcttaacctaggcccacctacagttatccaggtt

SEQ ID NO: 31757 - DNA, 442 bp, Homo sapiens
cgactcactatagggcgaattggagctccaccgcggtggcggccgaggtaccaataattttatgccctcatcgagttactttaattgattttttattgatttattcaatcaatcaatcaacatgtttattaagtgcttattgtgttaaaggcaatgagtggaagtagctgaaaaatacccttaaacatatttgaactgccttgggccacattctatctcttgactgtcgtgggttctcaaaggtatggcatgtttctcataatgaagttaagtagattaagggatttctgttacagttaacttttagccttcagaagatttgactatgattaaatgggtgagcagtataaattctggaaggcagaactgcatagtaaagaataaaaactctggtatcagagacaactgggtttgagtcctcggtttgctatttggatgtaac

SEQ ID NO: 31758 - DNA, 455 bp, Homo sapiens; identical to SEQ ID NO: 31616

SEQ ID NO: 31759 - DNA, 430 bp, Homo sapiens
gcgaattggagctccaccgcggtggcggccgcccgggcaggtacaaatctaaaacacaaacattactctttacaaaacaaaattgttgattaataattatctttttcataactatctcataactttatgactacaggcccaccatttaacaactacaaccttcacataaactaacatgtgcttttaatgctgaccttagtttaaaaagcctgccagtatggaatgacattcaaataaaataaaaccaaatttaaaaagaacagaaatgcaaactcaacaatattcccatcttttgaatcctgacaatgtagaagtcaaattcataatcatcctaaaaaccaagggagtcatacgaccacagtatgtctctttagtctaggaataatgcaaacagcagaagttactcaatgaggctttacaggaaaggatc

SEQ ID NO: 31760 - DNA, 428 bp, Homo sapiens
ctactatagggcgaattgtagctccaccgcggtggcggccgaggtacctgctcccttcactgagtgcttcctgtgtgcctggcaccattgctcagggctttacatggacttactcatttcattttcactgcagcctagagcgtaagtaagtatttgctttatccccatcttatagatgaggcatttgattctcaaaaaggtttcatagcttgcccatgttctagcagctagtaaaaggagaagccagagttttcatttaggtgggagtcctcaacctgctttcttaactgctgtgatctgcactgtggcatgagagtttgtcttaatgtaaatgcacatgtaatagcattattcacattgcctgagactgtggaagctcctttggcaaccagatgccacaggggactcatttcatgcttttagaagac

SEQ ID NO: 31761 - DNA, 435 bp, Homo sapiens
tggcggccgaggtacaatgtcactaggctcacatttaaagatataaattataaccaaactccatacttgttcttgaagcaccctcagccagtgagggaccttctgtgtgatgagttttccctctctcaacacctatacacacacagacaccaaaagctcctggaccacccaaaaaacagtttgactctgaaagtcatctcaatagaggtgccactaacacttcatagcatggagaggcaagagtgacccacacacactccttgctgttagaaaagtgtgtcgcgtgtatgtgcgcatgcctgctcatttaggaagaaggtggcttcaaggaggagtagggagggaaaggcattgcaggcagagagaacagcaggcaccgcctaaggatgctgtgtcacatgagaggacaccgagtggtcagtgatggctagtgtg

SEQ ID NO: 31762 - DNA, 452 bp, Homo sapiens
tacgactactatagggcgaattggagctccaccgcggtggcggccgcccgggcaggtacctagctctgggccgttttgccatatttggtcagaagcgaccctgccagattcatctcaggggactccagtggattttctgcagccaatctgaattactccaaccatgtgctcttaatttattcgtattgtaaatcatggtcttcagattaggagagttaaaatgaaaccaaaacaaaaaagtatgcacatacatgcatgcacacacagacttctataaaacatctagggtccttctgtcactttctttgctgatcagggccctcagagatcatgagctaaatcctagattgtaattgtgcatttcagaaacttagagtgtgacaaatactgaacaaataaagagggatgaggaccttattgtattgagtatgagtcataaacctgggtgaaaa

SEQ ID NO: 31763 - DNA, 411 bp, Homo sapiens
  misc_feature 366: n = A,T,C or G
cgactactatagggcgaattggagctccaccgcggtggcggccgaggtactccagccagggcaagagagcgagaccctgtctcaataaataaataaataaataaataaataaataaataaataaaaacaaagttgattaagaaaggaagtataggccaggcacagtggctcacacctgtaatccttgcattttggaaggctgaggcaggaggatcactttaggcctggtgtgttcaagaccagcctggtcaacatagtgagacactgtctctaccaaaaaaaggaaggaagggacacatatcaaactgaaacaaaattagaaatgtaattatgttctaagtgcctccaagttcaaaacttattggnaatgttgagaggtgtggttacgaaattacgttagggaggacaaaa

SEQ ID NO: 31764 - DNA, 214 bp, Homo sapiens
ctatagggcgtattggagctccaccgcggtggcggccgcccgggcatgtacctggagaccattaactggaccaactttatagaaaaaaaaatacaacttatatttagtcttcctgaacagtgttagtatttctcagatgtgctggtttatcatttaggtattgggaaattgaaaaggaagaatacctattacttaagttttggggaaaattgaa

SEQ ID NO: 31765 - DNA, 412 bp, Homo sapiens
acactactatagggcgaattggagctccaccgcggtggcggccgcccgggcaggtacgcggggacataacagggatttttttttatgccttggggttctgtttctgattttctttctgtgtgtttctccattatgttgttgcatttttctctatttacgttatctccctttccctttttctttctgtccctccctccttcttcctctctattcttcccctccccttgtttttatgcctgattatgtggacacagacaaggattaaaacagggcacctgcccttgaggagtttacaatctgctgggctgaggatcaacacatgttcaaaaagagaggaaagaagtcaagggagatcatgccagatggacttaatttcaatgaagaacaggcatttccatggaaagagacaagt

SEQ ID NO: 31766 - DNA, 472 bp, Homo sapiens
atacgactcactatagggcgaattggagctccaccgcggtggcggccgaggtactgttcattcaatttttctgaatatttgaaaaattttaacataaaatcttgagaaaaagtaaactgtagatgctaatagcatacaaagtgcagtcagtgtggagaacagaagagaaagatgaattccaatgaagagattcagcaggtttgtggaggagatgggattgaacagaaacttaacagattgggccttttaggtggaggagacaatataggaaaggcacaaacctggggaaatgcacaatgtatgctgaccaagaagtggtctggcgggtagagtaaggctggaagagactctgggagaggaacatgagaggtcccagggctctgaaccagggcaaccaacagaaaaggaaggacagactgggctggaatccaggaggagcagggtggtgtggagacacaacccttgtcaagtt

SEQ ID NO: 31767 - DNA, 445 bp, Homo sapiens
ctatagggcgaattgtagctccaccgcggtggcggccgcccgggcaggtactttggcttttgtttctagaacaccattgagtatatgctcattaagatagtttgatgcaataaatccttattttacttgcctctattactgcattgtaaactgttgtctactttgtcttcttgaagtcctacacctcccccagcccccacatttggcctatggaacattactttatcctgattttccccctaaccttctggcaatgcctctcagactccttccagaactacttttctctgttttccttttaatgatgacagtttatgcaattgtgtcttcaaacttataacgacccagacaatagtaataacagtcaacatttactgaattcttacttgtgttaagtgctgttatatatgatattttaatctttgtaaaatcttataaggtaagt

SEQ ID NO: 31768 - DNA, 444 bp, Homo sapiens
tacgactactatagggcgaattggagctccaccgcggtggcggccgaggtacctcctaatttgctcaaagatgctgtccgtatgccaagcgtgctgccttgggatgacatcagctcagaggagctgccatttctaattttcccacaggtgccttagggtctagctgcagccctgcctagtttgggaagattccccataccctttcccactggtttgaaaagaaacatccaaggccgggcgtggtggctgacacctgtaatcccagcactttgggaggccatggggggcggatcacctgaggttgggacttcgagaccagcgtgaccaacattgcgaaatcccgtctctactaaaaatacaaaattagccgggcgtggtgatgcatgcctgtaatcccagctactctggaggctgaggcaagagaattgcttgaacctgggaggc

SEQ ID NO: 31769 - DNA, 297 bp, Homo sapiens
tacgactactatagggcgaattggagctccaccgcggtggcggccgaggtacctgtcagtgttcaatatttaacaaactccagttaaacaggtaagaggtcagcagtagcttataggccttggttctattatccatgtgcccaactgcagccatcgtgggctggtgttaaaattttcctttcaattgtcatttttctaataattgcattcagtgagaggagaagaaaaagttcaagggaatgacctggcctttcaccatcctacacaggattatgacttgatgacatggatatcata

SEQ ID NO: 31770 - DNA, 429 bp, Homo sapiens
tacactactatagggcgaattggagctccaccgcggtggcggccgcccgggcaggtacatcagaatttcagatctagagcctacatctctgcattatttttatgcaaaagatttgtgatctattaaatctattttgagttctgcccatgaagatatatattttaaataaatattcttcttttacattggagtatctcccagatcccccacaccaaaaagagaactgtgagatataccagttattaataccagttattaaatcaacaactgggccaggcatggtgtctcatgcctgtaatcccagcactttgggaggccgaggtgggcagatcacaaggtcaggagatcaagaccatcctggccaacatggtgaaaccccacctctactaaaaatacaaaaattagctgggcgtggtggcgtgtgcctgt

SEQ ID NO: 31771 - DNA, 390 bp, Homo sapiens
tatagggcgaattggagctccaccgcggtggcggccgaggtacatgagatgggagctcgacacattttatttggagaataaaagaaaatatgccgtcatcaaactagagcgtgttggggggcatctggtttacagaactaagtcaaggagaagaactctcaagcaatggtgacatctgccagctctgcaaagtgggccctgccttgtcacacaagtctccttgggcaaatgttttctatgtagattttagacactttcctgtgactttctcaaggtcttttggtgacacatgcagcttgaagcttttgcaaggggctggagtctaatctcttcttgcccagcttggctgcaggagaagaagggagatatgttaagacttggctttgactg

SEQ ID NO: 31772 - DNA, 415 bp, Homo sapiens
  misc_feature 172: n = A,T,C or G
atacgactcactatagggcgaattggagctccaccgcggtggcggccgaggtacctgacatgtggggcactcaatgaacatttatcagaggggagcatatcaaacagtattggggcagtgactgccaaagaacagactggatctacgggtggggaaaccaatagtggtggtngaagcacagttggtattgaaactgggtcatcattggcacacacacaaaaacaaaacaaaaaacacaggtgggcacggtggctcaagcctgcaatcccagcactttgggaggctgaggaggatggatcacctgacgttgagagttcgagaccagcctgatcaacaaccttgctaaaaatacaaaaaaaaattccccaggtatggtggcgcatgcctgtaatcccagctactcaggaggctgagg

SEQ ID NO: 31773 - DNA, 431 bp, Homo sapiens
tatacgactactatagggcgaataggagctccaccgcggtggcggccgcccgggcaggtacataaagacagatatatagattaatgaaataaaattccattaatatagaatatagagcacacaaataagctcatgagcttatacaagtcagtcaagtgatttttttacaagggtgccaagacactcacaggtgaaggaacaggctgaaagaaacagtgctatgtcaactggatagtcacatgcaaaggagtgaaggtggaccccctatatcacaccatattcaaaaattaactgaaaattgatcaaagacctaaatgtgagagctaaaactataaaacccttagaagaaaacacaggagtaaatctttgtgactttggattacacaacgatttcttagctatgtgataccaaaagcatgagtaaaaaaaga

SEQ ID NO: 31774 - DNA, 415 bp, Homo sapiens
tacgactactatagggcgaattggagctccaccgcggtggcggccgcccgggcaggtaccaggagggtattgatgtttgaggtccaaactgaaaacccatcacctccttcccactgctatagcagcgttagccctggggttcattatctagccagttcacaccttctaaagtggggctctgaaaatgtcttacttccctcacagacaaggcaattctcaagcctcctgagatcacccaccaaccagagcaactgctgtcacttggaggtgcagctgaattcttctaattgtgacacaaactcttgaaactgtaaatgctgaaagattaaatgaggttataacactcagaaggttttacaagtaaaagtaagtcaaatcaataggtctttatttcatatctgtaatggtttagctc

SEQ ID NO: 31775 - DNA, 427 bp, Homo sapiens
ctactatagggcgaattggagctccaccgcggtggcggccgaggtactttttttttttttttttttttttttttttttttatttttagtagagacagggtttcaccgtgttagccaggatggtctcgatctcctgacctcttgatccgcccacctcggcctcccaaagtgctgggattacaggcgtgagccacccattccggcctaacgagacttatttttactcaactagatggcgttcattcatttgcttactcagctgtgccaggaattaagttgggcactgggaattccaaaaccaacaagacattctctgtcatcagggaactcacagcctagtttgagagataaacaaatgaacatgaaattataattcagtaacaaagaatgagtgttatggcagagggaatgtgtaagagcttggcagg

SEQ ID NO: 31776 - DNA, 410 bp, Homo sapiens
ttggagcataccgcggaggccgccgaggtacactctacaagttgaagtggggcatttatggactgggatggcaggtcaggagtagcccaaggtatgcatgtgcaagaggaaaacttgataaactcaagtttatcaagaaattgttgatttcttgttcaactgttgatttgaaccaggcttctggttcaaagggccaggccatagctacagctgctctggtgggccaaaccaaaagcatcactgagtttgggcacttgaagtttcagacagctgggagtctccatagaaccggaagggaaaacacttccaaggatatgagcatgtcttgtccctgcctttgggccacccatgcacaccagctccacagcagctgaagcagagcagatccagaggaggctgtcggagggacc

SEQ ID NO: 31777 - DNA, 602 bp, Homo sapiens
  misc_feature 264, 277, 450, 492: n = A,T,C or G
tacgactactatagggcgaattggagctccaccgcggtggcggccgcccggcaggtactttttgtagagacagggttttgccgttgcccaggctggcctccaactccttgagctcaggtaatccgccccccttggcctcccaaagtgctaggattacaggtgtgagccaccacgaccagcatctccatgtgtcttctaccttttacatttatgtctttaatctacctaaaatgatctattgtatagagactgagataggcatcnaatttaatttttncatttgcataactaattgtgccagtataatttattgaaaaatccatcctttctctactgatctacaatactcccgctgtcatatatcaagtgtctacatatgtggttagtctgctgctgactctctattctgttccatgatttatttgcccagatttgtgccaatatgcactnttaaatgttcaagtcttaattgaagcttaagcaaaaaaattnttaataccttgattgaaatatttacaaataaaatcaaacttttaacatcactattttctaccagtaagattttaaagtttcttttaaaatcctatttaatatcattaaaa

SEQ ID NO: 31778 - DNA, 409 bp, Homo sapiens
atacgactcactatagggcgaattggagctccaccgcggtggcggccgcccgggcaggtacagaggagaaaaataataataacagtaatacctgacaggttgggagagattgtgctggtgtcacagagtctgtgacggcacttgtaagggagtgctgcataaatgagagtggctgctgttgttgtattattatttgttttacatggttataaaactttcctcaagccccgtttgaaaagagaaatcagtagttggcaaacaaattcgaagaacaatggtttctttctttttttcttttttttttttttttgggacagtcttgctctaaaatgcagtggcgggatcctggctcactgtaacctcacccttctggattcaaatggttctcctgtcttaaccttctgagtag

SEQ ID NO: 31779 - DNA, 441 bp, Homo sapiens
ctactatagggcgaattggagctccaccgcggtggcggccgaggtacctcaattatctctcataacacacagggtcccatgttggccattgcctcagcacatagtcaggtagccagcctctctgaatgcctggtagccaggattaaaataaataccctaggtattatctgcatatctcagggtcaggatatatcccatgactaagcccacaatcacagtaaattctttgagccagaccacattttggactcacatttaatgtaaatccacatcactccaatcctgcatgatggcacaggtagatttttgggagctggacaataaacaactattgagtgcatccccacggaccccaaaattcaattttataagaagtatctcaaggcattaataagtgcatcaaagatggtcaatgtggcattatttggtaaatcagaagca

SEQ ID NO: 31780 - DNA, 447 bp, Homo sapiens
ctactatagggcgaattggagctccaccgcggtggcggccgaggtacgacatgaggcaggggttaagttttatttttgtctccacataaacagccaccaccacttattgaaatggccaccctttctccagagctccatagcgctgcctctgtaatgcatcaagtgtccatttatgcctgggtctgttttggtctctgtatcctgcttcattcacctatttttcctctatttttctatctgctatttctatctatctatatttctatatttcatctatatttctattattcacttatctattttttatcttaataactgcagctttataataaatattgatagagcaagtctgaccaccacattcttttacaagagaaaattgtctattcttcgcctttggcatttcccttttcggggggtttggtcttgattttgaaccaaggtctt

SEQ ID NO: 31781 - DNA, 348 bp, Homo sapiens
ggagctccaccgcggtggcggccgcccgggcaggtacctaggggaatttctgagttcatgatatcgtaggtggtgtggaaacaagtcccagcataaacccacacagctggctgaatgaagttcaagtgaaggtcatgcagcatcaaagtagatgtgtgtcactgaaacttatggcagtggagtgagaataattttgaaattacttagattgtgagaaaatctggctgatgattagaagtgttgatataagaggtcagtttggagttccactcaaaattcatactaattttaatgttatggtattctaaactactagatgggtaaggggaagttttatgattctgaaca

SEQ ID NO: 31782 - DNA, 622 bp, Homo sapiens
ctcactatagggcgaattggagctccaccgcggtggcggccgaggtctatatgctagaaacttggctgaatgatttgacattatcctatttaatgttcatgacaatccaataacgtaaccactcatatctcccttttgtgcagataacaaactgaggcccagagaaatcaaatatgttgcaaaatctacatcgttgaagagatgggtttcaaatccaggtcggcttggcccttgccacgacttcataatgaaattccatgggtgagtgttaccagtttctggtccatccttgcttatttcaagggtctcatcatcccatccactgtatcactttttttgttacaggctttactcttttctaccatggaaaagactaatgatatttttttctccataagcttggaaatattatcaatcaccataaaattcagccttcctctggtaactttggagaccctcagagcttttcttatttccagagacaggcggtttggatgagaattattctcttttttcacacaaattggccagatgacatctttactggtatctgtaaagactgcatcaccccagctactttcctgctgacttccacttgggtttactcaatgggtgacactca

SEQ ID NO: 31783 - DNA, 415 bp, Homo sapiens
tactgtaaataaacaggagagaacggagaaaagtcatgactcaggggtcttcttctcacagggctgagtaatcacaggagctttggatgcaggcaggctggcgctctgatcctgactctttcaattacagactgtgttaccttggacaatttggctaagtccttatgcaaaaaaagtatgatgccatctacttaataggattgtgaggattaaatgagataattcatataaagcccatagcggaaggcctggcaggtagcaagggcccagcaaatgagagctattcacgttgccattaatgcatcatcatcgttacaattatcatcttttttttttacgttccaaagattcttccttctatctattatctcatcatatctcatctcatcatatcatatctcatcattttatccag

SEQ ID NO: 31784 - DNA, 299 bp, Homo sapiens
gcgtatacgactcacttagggcgaattggagctccaccgcggtggcggccgaggtacgaaatgttttggaaagacttgctaaaggtgagttctttcaaaaagtgtatgaaattagctgtggaagaaacaactacaaattatttggggaaaaactgaaaaatcaagaagtttatgttgatattactttaagggtgtttaagtctccattctacttggaaaatcacaaataatattattaaaattagagtgttactttaaatggaaagcttagggccagccacagtggctcatgcctgtaa

SEQ ID NO: 31785 - DNA, 332 bp, Homo sapiens
gcgaattggagctccaccgcggtggcggccgcccgggcaggtactagacaacagctgtttccctggtgtatgatggagccaacaccagtcaggggtatattattacatctgattatcagtcaggataaggtaggcaattctctggtaacaaaccatcctcaaatctcagtgcttatataggcactatttcttgctccactagatggttcatacttgctcacactacccatcatgggtcgttaggagatctctgcttatggtcactcaggaattcatctgacaaaggagccaccaccttgaatattatgggtcactgtgccttgagggactga

SEQ ID NO: 31786 - DNA, 174 bp, Homo sapiens
cactatagggcgaattggagctccaccgcggtggcggccgaggtaccaaggcccaatcaccccaaacagtgacaggaacataatttcctgttgggaccagttctcggaattttgcaccaacatgatcccatagttccacatctaacgttcccttttcaggaaaccaaggacagt

SEQ ID NO: 31787 - DNA, 436 bp, Homo sapiens
atagggcgaattggagcttcaccgcggtggcggccgcccgggcaggtaccttcaattccagtcacatggctcgacctatcctcaaacttcttaaatgtgtagctttcttcttcaatagtgagaagtcttgctcctattgtctttaatatatttatatgttttcttattctactttacaaaaccaatattttgatacacatgccataaccttctcagctttaacattgctagtcatctctaatcataccctcagatttgactctgaatggtccttgttgtctcttcagccccagttgtttctttggcactggccgtcctcctgacctctactgtctccttggccctcaccctgaaagtccttccagactcacttgcctctggctctataagatcctgggtatcaccagggcctctgctccctccatagaacccgtgt

SEQ ID NO: 31788 - DNA, 454 bp, Homo sapiens
gtacgactcactatagggcgaattggagctccaccgcggtggcggccgcccgggcaggtacttttttttttttttttttttttccttctcttcttataagacatctgatttaaaaaaaaaagaataatagatttaagaagaaaaaaattagctaataatgacagcaggcttgtaatattatcataatgtcatttatcatagatatccttattctccagggcagcacttctcaaatccttgacagtatgacattttgggccagctaattccttagggagggacctttcctgaatattcaggccgttgagtggcctgcttggccttgacccgctcactgccagtagcacacctcccccaggcttcagcagcagaacacctccagtcactcagtggggactgggtaggtgggagacagaatcgcaccagttaagtgtctctgcggcagggtgaacgg

SEQ ID NO: 31789 - DNA, 370 bp, Homo sapiens; identical to SEQ ID NO: 31420

SEQ ID NO: 31790 - DNA, 468 bp, Homo sapiens
actactatagggcgaattggagctccaccgcggtggcggccgcccgggcaggtactgggattacaggcgtgagccaccgcgtctggcctctaacgagatatttctaaaggttaggccttcagtcaagaattttaaagctggatcttagaggttatctaaactaacctctccatttcatagataaggaaagtgagtcccagaaaagcactggtttggacaagttcagaaagctaaacagtgactgtggatgtatgattctgtctcttaactcctaatccaaatgtcttctcactagataaggctgtgccttctacatttgaaggctcaaaccccatggatggatggagggaaggatgggtggagggattggatggattagatggatggatagaatgtgtactcattcattcagttttgcaagaaagattgagccaccttcccatcatacagtgtgctaattgctagaat

SEQ ID NO: 31791 - DNA, 425 bp, Homo sapiens
ctactatagggcgaattggagctccaccgcggtggcggccgaggtacagtaggtggggccctgattacggagcatcttgaaggctggactgtggtatcgatactttattctgtggtatgggatgctggcgagaactttgagctagggagatgtggggtttgagtggtgctgtgaacacataagggccaaaatatatatgtgtgggaccgactgggccccatagaccaggatgtgggttggcagatgcttcttgttatccagctgggagaccgtggctccatgtaggaaggtagggaaggcagggatgaatgtggagactgagaatgaatgtgggtgaatggggactgttgagaatgagtgtaatgtgtaatgttttgcaggcagaaagtttaaagagaaattctgcataggctcagtagtgtgac

SEQ ID NO: 31792 - DNA, 276 bp, Homo sapiens
cgcggtggcggccgcccgggcaggtacatgagatgggagctcgacacattttatttttagaataaaagaaaatatgccgtcatcaaactagagcgtgttggggggcatctggtttacagaactaagtcaaggagaagaactctcaagcaatggtgacatttgccagctctgcaaagtgggccctgccttgtcacacaagtctccttgggcaaatgttttctatgtagattttagacactttcctgtgactttctcaaggtctttttggtgacacat

SEQ ID NO: 31793 - DNA, 486 bp, Homo sapiens
actactatagggcgaattggagctccaccgcggtggcggccgaggtactcaaggagagagtttcaggagtgcagccatcaacactcaagattccatgaaactttcagcctaactgatggtcccactgattactcactcagaacaaaacatatttcaccaaatatcactttcaggacttcattcctgatccttctggggtagaaggtgcaaaaacctggtttgtattagagacattaggaatatttcaataaggccaacagatttccatgctgaagggcacaagaaatggaagagctaatcccattccctttggagttcagtttagatagtttaattgtcataatcctatttgttaaacaggtttccttccctaaatccatagtatacccttgttttttaaatcccatgtgtcaagtaagaacccaaaggagccttgctttcagctttaaaataagcaataaccaggcacgcctggatgcatttgtt

SEQ ID NO: 31794 - DNA, 401 bp, Homo sapiens
tacactactatagggcgaattggagctccaccgcggtggcggccgaggtactttaatttttttttttttttaagcagagatggggtttcaccatgttgaccaggctggtcttgaactcctgacctaaggtgatccacctgcctcggcctcccaaagtgctgggattataggtttgagccaccacgcccagctgtgttatgttttaacacatgtgctatgtcgctaagtggttggaaatatgaaaatgagttgatgtgttcttataataagacatctgctttagtatacattattagcatgctcttccactttggaatttttattttatattttcacttaggcaaaaatacttttcaccattaaagtgggtataaaagcaacagttgcttttagaaatttac

SEQ ID NO: 31795 - DNA, 431 bp, Homo sapiens
gcgaattggagctccaccgcggtggcggccgaggtacggaagatacggcagtgagcaaaaccaatcatgttccttgtcctcatggggcttacagtggggggagaaaattataagcaaaaagaaaatacaaagaaatacaacacagaaagcacaggcatgaggaaggagggcacggttctgggaaggcttcttggccgaagcaaccagacagcaaaacaggcttggccaggacagacatgggcctgttatccagctggctaacggtggagctacaagtgccttcgcctccagaatcatggaggtgggtaatgagccatttaccctccagtgaagcccatcctaaaattaagtgctctctaactaaacaaagagttgtttacttttttctataaagaaaacagaggctccacctgttactcactctcctacct

SEQ ID NO: 31796 - DNA, 185 bp, Homo sapiens
atacgactcctatagggcgaattggagctccaccgcggtggcggccgcggtaccctggagccttgagcaacgttcttttgcattatgccaggaagaactgctggcaaatgtaagtgggcttagaattcatgactgcagtcagcagcagttgtgtaaatctagggagagactggtatttgacacct

SEQ ID NO: 31797 - DNA, 406 bp, Homo sapiens
ctactatagggcgaattggagctccaccgcggtggcggccgcccgggcaggtaccactgcactccagccagggcgacaatgagactccgtctcaaaaaaaaagattattaatttaaaaatattttaagtgatcagctgttactctaccccaatctcattggagaataagattctactgcggttctaagtcattgtgtgctgagtaaagtggttaactagtgatttgaaagaatacaggagagagggtaggagagtgagtaacaggtggagcctctgttttctttatagaaaaaagtaaacaactctttgtttagttagagagcacttaattttaggatgggcttcactggagggtaaatggctcattacccacctccatgattctggaggcgaaggcacttgtagc

SEQ ID NO: 31798 - DNA, 341 bp, Homo sapiens
gcggtggcggccgaggtactgggattataggcgtgagccaccgcgtctggcctctaacgagatatttctaaaggttaggccttcagtcaagaattttaaagctggatcttagaggttatctaaactaacctctccatttcatagataaggaaagtgagtcccaaaaaaagcactggtttggacaagttcagaaagctaaacagtgactgtggatgtatgattctgtctcttaactcctaatccaaatgtcttctcactagataaggctgtgccttctacatttgaaggctcaaaccccatggatgggtggagggaaggatgggtggagggattgggatgga

SEQ ID NO: 31799 - DNA, 453 bp, Homo sapiens
cgactactatagggcgaattggagctccaccgcggtggcggccgaggtacagttaattgatcaattttaaggagaaactgttttcttgtaaaatgtttctaagcccaaaaattatttgatcgcaaaatgttcgtattgaaatataagtgcctaatttcaaaaaggaagctctttagcaacaaagttgtttccttttttttccaatttaagatatttccatctctatttcaaatgcttgcttctaaaaaaaagtttagtgaaataagaggataaattttatgtttttattgattcgaatgacattttcccttggatgaattatgaaatgtctggttaactttagcattagtgaagcttgaatagattttaatattaagcaagtgtttagttgcttgacatgatcagtttacactattgcagagccttaattaaagttttattaaactgtgtaaa

SEQ ID NO: 31800 - DNA, 365 bp, Homo sapiens
gcgaattggagctccaccgcggtggcggccgcccgggcaggtactactggcttcccagtggttgggttgagtataagcccccaaatatgagtaaaagaagaaaaagttaattcaatcaccaagtcttgctcgcatattaaaaattggatagatgaatgttcaatcatatgttttggctttggccagccagacgaggtcaatttttagatttgaactgcttagaattcttcaggcaagtcttgatggagcacttcttggatagttagaactttaccaggttcacaggagagctcaaatgaagcgaacacctcatccacactggtttcctttggagacctttactgttgagaggtggttttcatatc

SEQ ID NO: 31801 - DNA, 430 bp, Homo sapiens
actactatagggcgaattggagctccaccgcggtggcggccgcccgggcaggtacttttttttttttttttgagacggagtctcgctctgtcgcccaggctagagtgcagtggcgcgatctcggctcacttcaagctccgcctcccgggttcacgccattctcctgccccagcctcccgaatagctgggactacaggcgcctgccaccgcgcccggctaattttttttgtatttttagtatagaccttgcttttttatccattctggtaatcttttccttttattcagtgtgtcttgttccattaacattcaatgaagttattgatatgattagattcaggctctatttactttttggtttctatttgttccttctgttttttgttcctcctttcctgctttcttttggattaaatgatccaaaatgatt

SEQ ID NO: 31802 - DNA, 399 bp, Homo sapiens
cgtatacgactcactatagggcgaattggagctccaccgcggtggcggccgaggtactattaaatttaatgagaggtaacccatgcaccggcaggaagttcaaggggacagaaggggcttgctccactctggagccctatctcctctcacctccttccttctagtttgacatgcgatcttgtctctctcttttataaagtgcttgcaggcccttttgattaggatgctgtcctaaatccttgctaaagagaggttttggagccaccaacactgcttcactgtggaataaactttccttattaagattcttcattcactcatactcatctcctttgatcctcactgctcattcatttatggagatacgcacccatatcatagctacttggtcaaatcatg

SEQ ID NO: 31803 - DNA, 400 bp, Homo sapiens
ctcactatagggcgaattggagctccaccgcggtggcggccgaggtacatttaaaagtctatcttatatatttgttatgcaaatcaatagatatgtatcaggtaaactagaaattctagttagaaaaaatcctttttgtgtcttggtttttgaagatacttaaaaggtgaaaggaatttctgattaccattttaacatgtttagatatgggctttttagtttcaatagaaacatcttttcctagattatcttgctggtattaagttgttaaattttgctacgctttattttgaagttttactgtcttgtaaaactccatatttttacatagttttactgtcttgtaaaattccctatttcttaggttgatagaaatggcaaaacaagttaacttgcttaa

SEQ ID NO: 31804 - DNA, 430 bp, Homo sapiens
ggcgaattggagctccaccgcggtggcggccgaggtacaaactggaggtagggaatgggcaggaacactagctacattaaaaataatttcattaaacttatacagaaaacattattaatatacttaggattcccagagtaacttatttccctttccagtattggtatatcaataataataatattttatttactttatcgtggtatttcatattaaaaatactttttaaagcatgactaaataaacacatgtatatgtttatgaacataaacactactgaaacaaaagtttcagaaaacgtttttcttactgcactctgatattttttatcatatttctttttttttttaaatgctagtaataactcactaaatagattttatcatggagttatcaaatactaccttaggttatgtgatacttagtaaat

SEQ ID NO: 31805 - DNA, 412 bp, Homo sapiens
tacgactcactatagggcgaattggagctccaccgcggtggcggccgaggtactggacttgcctaatttctaggcatggagttggggcttgtaacaatggtgggagatgggcagtgctttgggaatgtagctgaccactgcatgggtgctaactagcccagggatcttaaagaatttgtgtaggccatgaggatccactccagccactgaatagtcatagaattgaatctaggacatcaccgtatgctactaccatgcagttttatcccttctaagaatccaaatgccctagtttaatttctaaatttttgttttgtttattttcactaaagcaacatgttagtggactgcggagggaagtgaattcatggctggtcctcatcttgatatcttttaataggatcatgaggct

SEQ ID NO: 31806 - DNA, 561 bp, Homo sapiens
acgactcactatagggcgaattggagctccaccgcggtggcggccgaggtacttttttttttttttttttttttgtatttttagtagagacagggtttcaccgtgttagccaggatggtctcgatctcctgacctcttgatccgcccacctcggcctcccaaagtgctgggattacaggcgtgagccacccatccggcctaacgagacttatttttactcaactagatggcgttcattcatttgcttactcagctgtgccaggaattaagttgggcactgggaattccaaaaccaacaagacattctctgtcatcagggaactcacagcctagtatgagagataaacaaatgaacatgaaattataattcagtaacaaagaatgagtgttatggcagagggaatgtgtaagagcttggcagggtatccagcagggatacctaactaagccccactggggaaggcatccgaacagaggggacagctgagctgagttcaatgagccagtaggaattaggttgatataagtcaaatcatttagtggttatgacaactctgaaaa

SEQ ID NO: 31807 - DNA, 419 bp, Homo sapiens
cactactatagggcgaattggagctccaccgcggtggcggccgaggtactttggcttttgtttctagaacaccaatgagtatatgctcattaagatagtttgatgcaataaatccttattttacttgcctctattactgcattgtaaactgttgtctactttgtcttcttgaaatcctacacctcccccagcccccacatttggcctatggaacattactttatcctgattttccccctaaccttctggcaatgcctctcagactccttccagaactacttttctctgttttccttttaatgatgacagtttatgcaattgtgtcttcaaacttataacgacccagacaatagtaataacagtcaacatttactgaattcttacttgtgttaagtgctgttatatatgatattttaatc

SEQ ID NO: 31808 - DNA, 459 bp, Homo sapiens
tacgactactatagggcgaattggagctccaccgcggtggcggccgcccgggcaggtacacgccaccacaccagctgatttttttttattttgtgtggagtcagggtctcgccatgttgtccaggctggtctcaaactcttgggttcaagtgatcctcccaccttcgccccacaaagtgctggaattacaggcatgagccactgcacctggccatgttgtcttctttttcattacccacctcttaatcctacacatgcacatgtctagatagtatacagagataaacgtgtataaaacaacacaaatagaaaaagtatgcatatgtataagggatctacaaaaacagaaaagtcagaaaacccaaattaagagcacagtgtggctcacaggctaatccctgcagaggcagctttgggtttcagaaccaagtgaagctgcctatatgttcaaccaactga

SEQ ID NO: 31809 - DNA, 460 bp, Homo sapiens
tacgactactatagggcgaattggagctccaccgcggtggcggccgaggtacttttttttttttttttttgtatttttagtagagacagggtttcaccgtgttagccaggatggtctcgatctcctgacctcttgatccgcccacctcggcctcccaaagtgctgggattacaggcgtgagccacccatccggcctaacgagacttatttttactcaactagatggcgttcattcatttgcttactcagctgtgccaggaattaagttgggcactgggaattccaaaaccaacaagacattctctgtcatcagggaactcacagcctagtatgtgagataaacaaatgaacatgaaattataatttcagtaacaaagaatgagtgttatggcagagggaatgtggtaagagcttggcaggggtatccagcagggatacctaactaagccccactggggaa

SEQ ID NO: 31810 - DNA, 353 bp, Homo sapiens
tatagggcgaattggagctccaccgcggtggcggccgaggtacagaccatgtcagaattcctagtcttttacttctaaattttattacatcgtgtgaaatttagaaaaatataagctgtttattttcttgatcaagataggtgaagaaatacagaaaagaaagaaataatgaaagcaaaccccaactttcagatttggacacacctttgctaaaaactatcaacattttccccttgaaattctgagtggaaagatatgtgcttccctaagtcaggagctgtatatgcactccccaccccgaaacattttttgggcaaatggaatcattaaaggaatgagaggtatctactctt

SEQ ID NO: 31811 - DNA, 444 bp, Homo sapiens
actactatagggcgaattggagctccaccgcggtggcggccgcccgggcaggtaccttcaattccagtccaaagccacatggctcaacctagcctcaaactttttaaatttgccgctttcttcttcaatagtgagaaatcttgctcctattgtctttaatatatttatatattttcttattctactttataaaaccagtgttttgatacacacggcataaccttcccagctttaacattgctagtcatctgtaaccataccctcagatttgactctgaatggcccttgttgtctcctcagccccagttgtttctttggcactgccaccctcctgacctctactgtctccttggccctgaccctgaaagtccttccagactcacttggttctggctctgtaagaccctgggtatcaccagggcctctgctccctccatagaaccc

SEQ ID NO: 31812 - DNA, 392 bp, Homo sapiens
cgactcactatagggcgaattggagctccaccgcggtggcggccgaggtacggaagatacggcagtgagcaaaaccaatcatgttccttgtcctgatggggcttacagtggggggagaaaattataagcaaaatgaaaatgcaaagaaatacatcacagaaagcacaggcatgaggtaacgagggcacggttctgggaaggcttcttggccgaagcaaccagacagcaaaacaggcttggccaggacagacatgggcctgttatccagctggctaacggtggagctacaagtgccttcgccttcataatcatgagaggtgggttaatgtagccatttaccactccaggagaaggcccaatcctaaaattataagtgctgctcttaactaaac

SEQ ID NO: 31813 - DNA, 426 bp, Homo sapiens
gactactatagggcgaattggagctccaccgcggtggcggccgaggtactaagttgccatttaagaacctcttcaggttccccgtctccttgagctatgaaagttttcatgaacacttcagttttaatggcatgccaaacattttgttccatgagcaacgcaacagttttaaaaattgccattgagtgtttcaatagaatttagccagttgtttttaaatatatttctatgagccaaggcttacaaaaatgtataaagaggaagtgcccagatataaagaagctttgaaatggttgctgttgcctccttaaaaatcatcattaaacaatctttcaaacagccagtgtttggctcattaatttaatcaaaatttgtaagaaagtagctagaatgaacaaaaggatgacatgggctttgaacagaaga

SEQ ID NO: 31814 - DNA, 419 bp, Homo sapiens
cgactcacttagggcgaattggagctccaccgcggtggcggccgaggtacctacctgcggtatctgatcagtttctgcctagtcagatgtgccctgttgctgagcctgcttgggtggggagcatgggaaaatggggcaagtgcttcatgagggagctgttctcagccgccccctctcccaactccccagctctctctccttgttctgtctcctgtttctgggctctaatcctggtcaggcccaatgccccttgcctgtgatgctgggtctgcagttttgctcgccgtcctcgctttgccttcttgcccgccacttccagcattcctcctctgctcagcttctgagctggtgtcaggtttctacctgcctggccactgagcccacctgaagatgtctggccaattccttttagcctctgc

SEQ ID NO: 31815 - DNA, 445 bp, Homo sapiens
gactcactatagggcgaattggagctccaccgcggtggcggccgcccgggcaggtacaatgaaaggtaaaagtaatgctctcagaggaaatgtttccattctagttctatttggaagtccttgggacaatttgtgttttgattatatttagaaatcttcagtattttgtcttggccaggtgtagttgctcaggcttgtaatcgcagcactttgggaggctaaggcgggtggattacctgaggtcaggagtttgaatcaccctggccaaaatggtgaaaccctgtctctactaaaaatacagaaattagctggatgtggtggtgggtgcctgtagtccaagctacttaggaagctgaagcaagagaatcgcttggacctaggaggcgaaggttgcagtgagtcttgattgcgccactgcactccagcctggtgacaaagagaaact

SEQ ID NO: 31816 - DNA, 491 bp, Homo sapiens
ttaacactcactatagggcgaattggagctccaccgcggtggcggccgcccgggcaggtacatcactgaagcattggttcttcaagctcacttggaagccactgcaaatctcaggcttctccagaaatctcttctgcaactgtcctgatatgtagcatttaagtgagaggtttgcaaagggccactttaaagctgcagtgaatcttatgtctgctcatgcatatggctgcatctgcctctgggaaattatgatctttccttggcacttgtggtcatcttgtaaaaatgagatgtatcctccaccccaaatttgatttgaatatcaagactaatgatatcccaattgcagggtattcaagagagtattaaaaggtttgttacataattgagactttttggagagagcatggcatgctttccaagcaatatccaaaaaatttgctttgaaggagaatagagacttgtttggcttttattgtggttaggaggta

SEQ ID NO: 31817 - DNA, 430 bp, Homo sapiens
cgactcactatagggcgaattggagctccaccgcggtggcggccgaggtaccttctgctgttccctgggtcttcaatgactcaatttcccaccagcagtatcctttaaagccatcctgcatcctgagacaagagattgacaattcattgataagtagtcttaattgtcactattacagggctgtaggtccttttgccagccatgcctttcagtcctaaatggtcttcaaggttgggctgtgttgtccaagagctgaggaccttacatttattgttccaatatttattggctataatgatttctgtggagcagtcagctgtcagaaaattttgtctcctttgtaggtaacctgtcattggtctttggatttttttatagtctccctttgtatctggtgtaatttagtttcaatctgttgtgcctacgtgta

SEQ ID NO: 31818 - DNA, 438 bp, Homo sapiens
cactactatagggcgaattggagctccaccgcggtggcggccgcccgggcaggtacttttttttttttttttttttgtaaagacggggtctggctttgttgccctggctggtcgcgaattcccggactcaagcaacctttctgcctcggcctcccaaaatgctaggattataggcataagccactgtgcctgtccaaaactttatttttaatgacaaaacctattttcctatagctctgcttggaatgctgtatttatcctaagcaccagttttggccctagctggcctgtatacagctttaggtaggctcttgatctagttttgctataggcagggtagatctcagtatttcatattttacttgtggcagagacagtgttaacctttctctcatggatagcggattcattgagacagattttaactaagagctatga

SEQ ID NO: 31819 - DNA, 171 bp, Homo sapiens
atagggcgaattggagctccaccgcggtggcggccgaggtacctcattttgtcccttgactttagtgtagtggtgctctctgcttttcgttaattttctcctggccaaccagccaactctggctccctgtggttataggaaattatccgtgcaatgaacttaatttagaaa

SEQ ID NO: 31820 - DNA, 575 bp, Homo sapiens
tacgactcactatagggcgaattggagctccaccgcggtggcggccgcccgggcaggtacgcgggcgtctgctaattttttgctttctctaaagcgcttctgctcactgccatatggtaaattcctcagtgaattattcagggtcttgtcctgatgcaaaagacactttaaaaaaaagcagaacattccttatccctcttggaaaaagaaataacaaataattaaggccacagcgctcagggacccaagtttattggcaataaaaggtagctgtgctgacaacgctaccaattaatctgccaaaagcgagctcagtggtgttgccataaagatcatgtgttggaaaacaggactggagacatccagggatctatataaagcatagacaacagtcttagcgatcatggggcagcaatgtgggcaccctaccttcagcagatatggtagcggtctgcgttctttctgtaacaaaactcctcactacgtggagaacccctcaatcccaagtcagctgtacctcggccgctctagaactagtggatcccccgggctgcaggaattcgatatcaagctta

SEQ ID NO: 31821 - DNA, 322 bp, Homo sapiens
attggagctcaccgcggtggcggccgtccacaaatgtctgcagctacgatggaccctcagctgctggacaggaaagaggatcaagctaagaaggcccagagtgtgcaagcagagagagggtgtggacagaaaaccttgccttctccagggctagtggcgaaagctatctcaggctggctcaagtggagagaaaaaagcatgagatcaagcaatggacagctggggaagggctggcttttatttcctcagctcccaagctcagtccctggcactgggccgttgcctttgtaggtccctctgcgcccaggtcttgctatggggg

SEQ ID NO: 31822 - DNA, 466 bp, Homo sapiens
actactatagggcgaattggagctccaccgcggtggcggccgcccgggcaggtacatggcatcaggtgtgatcagatggtgtccatctggctttaggctttgccgctgaagattttaattcagtagtcagagtctcctctttgttccttctctcttctcatgacttctgcaggtggatatgctgggtgacaagaagagcatttgcagggtttctggttctagtgccttcattcttcccaccctggtaattgagttttctcttcaaccctgatctgggtagcccctttagctgctctaaagaaggaagtgagaacttctccacttgctgggagggtatcatctctgggggacaagggcaagacgcccagcttgcctgatccctttgatgccttctttccagtttgtctaagggctccagcgatctgagagttggtaagaaatctttgtgactactggcatctacaga

SEQ ID NO: 31823 - DNA, 211 bp, Homo sapiens
tgatggcgcgcgtatacgactcactatagggcgaattggagctccaccgcggtggcggccgaggtacctgggtgacgtttacgttctgggatttcgggagatgcggttttctgcacgccaggggccaagcctgagacgtatatggacggcagggataggagctctctccgcgccacaaacgcccttgctcatacctgggtttccttgattt

SEQ ID NO: 31824 - DNA, 564 bp, Homo sapiens
actatagggcgaattggagctccaccgcggtggcggccgaggtacgcgggatactatgactaattatttttgttattattaccacttgtattgcatatatcagctcagtatgaatttatccactacttgctgaataatccctgaatgaagagacaatatagtgcaatatttgacaatgtgtgctctaaatcacactttgttttaatcaagctcactcagtatttattagctgagggatgtcagcaagtaatttaaccagtctgatgctcaatttttctcatttgtaaaattgtgatgttaatcctaattataatatgggattgttgagaatcatgtattttgaaagaatccaaaacatttttaatcagtaatcaatcaaataaaaaactagagcctggccgggcgcagtggctcacgcctgtaatcccagcactttgggaggccgaggcgggtggatcacgaggtcaggagatcgagaccatcctggctaacatggcgaaacccccgtttctactaaaaaaaaatacaaaaaattcgccgggcgtggtggcgggtgcccgtagt

SEQ ID NO: 31825 - DNA, 451 bp, Homo sapiens
ctactatagggcgaattggagctccaccgcggtggcggccgaggtacgacaatggaaagtttttaaacaagcaaatgtcactatcaaattcctgttttagaaagataattctgagaaggcacatcctgagacagcctggggccaagatgctgtggcgtaaacagatcgctgagcgatgataaggtcctgaatccaaagggcattggtagaaaccaaaggtgaagggacacattcaagaagcttttcccaaagagaatgcctgggtgaccaattagataaagtagatgaaggaaacagaagaaacaaagatgattccacagtttgttcttggacaggagggtagatggcaaagtcattaactgagaaagtgaagataggaaaaaaagagcaggtttggcagagaatgtgacaccctcagtttggacctgctgaattctgagtatgttggaga

SEQ ID NO: 31826 - DNA, 433 bp, Homo sapiens
cgactcactatagggcgaattggagctccaccgcggtggcggccgaggtactgatctaaccaagatattttgtttttctcatccaccagtcactttctcagtcctttctgtatcccttgcaatttgaacaaagcttggtgaatagtgtgcacacaaaaagcacactaggtgaaagacagatacataaaaagggtaaagtcaggatattttaacaaacctatcaagctctaaatataagcctccttggtagttttctctttaaccctctctccactgttggatgaaatttgctgcattcaattccagttcccaccccaacttccttcttaacacaaggtcagggttaagccttcggtgctttaatccagaggaaaattacttattttaaaaagcagtgaaaaacaccgcattcctttggcacaggatgaagacc

SEQ ID NO: 31827 - DNA, 395 bp, Homo sapiens
gcgtaatacgactcactatagggcgaattggagctccaccgcggtggcggccgaggtacgcgggggagccagcgatgggtccaccttgcctttgttgttgttgttgtttttgtttcttgttttggtgactgagtgaagggacttgaccctggttctcccagcttgagcaggagcgtcactgcggtgatcagggaagctgcctggaccagctggcctggggcagccaccaccccattctctcgcccctcttgagaatccagcctgtggacccaggtgtgtcagcctgcagtcagaccacagtctgtctcgggctggtgctgggggtggcagaaagggggtcctgacgcaacccctgctcccccgagtctctcagtctcctggggaagagatgacag

SEQ ID NO: 31828 - DNA, 463 bp, Homo sapiens
tatagggcgaattggagctccaccgcggtggcggccgcgctctccgatgcccagccctcctggaaccacctcgcctgtgacgtaggtggagcgcgcactgcctccgggcccgtctttctcaattgggaccggaaaacgttgtcgctcatcctatgacgcgaaagtaaccgagactatcaggatccggagacggaaatgtccgaaggccgcagtacctcggccgctctagaactagtggatcccccgggctgcaggaattcgatatcaagcttatcgataccgtcgacctcgagggggggcccggtacccagcttttgttccctttagtgagggttaattgcgcgcttggcgtaatcatggtcatagctgtttcctgtgtgaaattgttatccgctcacaattccacacaacatacgagccgggagcataaagtgtaaagcctggggtgcctaatgagtgagct

SEQ ID NO: 31829 - DNA, 242 bp, Homo sapiens
gcgtatacgactcactatagggcgaattggagctccaccgcggtggcggccggggctcaggctccttgcagattcctaaccagcataatgctggagccgggagccaccaacctgcagtcttcagaatggccgtgttggacactgatttggatcacattcttccatcttctgttcttcctccattctgggctaagttagtagtgggatcggttgccattgtgtgttttgcacgcagctatgat

SEQ ID NO: 31830 - DNA, 532 bp, Homo sapiens
tacgactcactatagggcgaattggagctccaccgcggtggcggccgaagcccgcttttaagtgagctcagcatattataaaggaatgaaagcaattagagcgtggactctaaaggtaggtgagacttgctgttccacttagaaacatataaacataggaaactaaggactcgatggggacatcaatagtaggatggcttttaagagggctgaagtgtgtaaatatacacattaagctttgcagcaactctgtgccaaatcgaagttgttgcagacctgtaattttagtttggtaaaggataactgtagttattttttaaataaaatgattcattagaattctttggttctatcatgataatttagcaagtttgtctctttcagaaagaaaagtttaagtggggttaatgggtaccttggccgctctagaactagtggatcccccgggctgcacgaattggatattaagcttatggataccgtcgacctagaaggggggcccggtacccagcttttgctccctttagtgagg

SEQ ID NO: 31831 - DNA, 478 bp, Homo sapiens
actactatagggcgaattggagctccaccgcggtggcggccgcccgggcaggtacaggccctcatgttctctggacacagcatggatggtgaatgttctcgtggtgtgagacagaatggagtcaaggagaaaccaagtataggcacagggtgggtgagactttgtttccgctaagaaggtcatgctggagccctccatcacctcaaccacctccccactggcaacaccagactccaatttgatttcaacaggatcaggaccatacttcacatccaggaagatggggtcgctcctctggctcagaagggcatctcgagcttcacattggtaagtccctgagtcctcccgctggacaatgagaatggtgaggatcttgccatccgtggacagctgcatgcgctcatggaacacaatggagaggttgttggaaacccagtggatggtaatgttgacgtccttagtggtgcagtagaaggtc

SEQ ID NO: 31832 - DNA, 493 bp, Homo sapiens
atacgactcactatagggcgaattggagctccaccgcggtggcggccgaaaccagcttttaagtgagctcagcatattataaaggaatgaaagcaattagagcgtggactctaaaggtaggtgagacttgctgttccacttagaaacatataaacataggaaactaaggactcgatggggacatcaatagtaggatggcttttaagagggctgaagtgtgtaaatatacacattaagctttgcagcaactctgtgccaaatcgaagttgttgcagacctggaatattagtttggtaaaggataactgtagttattttttaaataaaatgattcattagaattctttggttctctcatgataatttagcaagtttgtctctttcagaaagaaaagtttaagtggggttaatgggtactactcgattgtcaacgtcaaggagtcgcaggtcgcctggttctaggaataatgggggaagtatgtaggagttgaaga

SEQ ID NO: 31833 - DNA, 405 bp, Homo sapiens
gcgtaatacgactcactatagggcgaattggagctccaccgcggtggcggccgaggtacatcaataagtgactggttaaatacgttactccacctacaaataatgcaatgttgtgtggccataaaaaaaaagaataaagtagatatttagttgcagatatagaatgagctctacaatatattaagaggctgaacaacgtgctgtttacagaaaatatgctctagttgtatataaaggaaaaaggatttaaattcacatttaaacttggtaacacattgaaaaattgcagaaaggtaaataaaaaaatccaaagctaggccaggcagagtggcttatgcctgtaatcccagcactttgggaggccaaggcgggcagttcacaaggtcaggagatagagaccattct

SEQ ID NO: 31834 - DNA, 377 bp, Homo sapiens
tacgactactatagggcgaattggagctccaccgcggtggcggccgacgtcggatgacatgttaccatgacacaaaacgacaatgaccacggcaccacaccaagaatcatctacctctattacaaccagacatttgcactcaaataaggaggtgctgccgtatacttatccgttgctggaggcagcatgaatgggaaccagacacagctgggaaagcaatcggtttaacagagcgccaaccctgtacctcggccgctctagaactagtggatcccccgggctgcaggaattcgatatcaagcttatcgataccgtcgacctcgagggggggcccggtacccagcttttgttccctttagtgagggttaattgcgcgc

SEQ ID NO: 31835 - DNA, 650 bp, Homo sapiens
gtatacgactcactatagggcgaattggagctccaccgcggtggcggccgtccacaaatgtctgcagctacgatggaccctcagctgctggacaggaaagaggatcaagctaagaaggcccagagtgtgcaagcagagagagggtgtggacagaaaaccttgccttctccagggctagtggcgaaagctatctcaggctggctcaagtggagagaaaaaagcatgagatcaagcaatggacagctggggaagggctggcttttatttcctcagctcccaagctcagtccctggcactgggccgttgcctttgtaggtccctctgtgcccaggtcttgctatgggggttgtttcttggcattaaggtctcagttcaaacgccaccgtctccaagaagccctcactggtcaccctatctaaagtaaccctcactcctaaggacaaacctgttttttcttcctagcatagaccactctctgaaatcaccttgttctcccagtcatctgctgcccttggctgttgcgccagctataacatggcactctgccttgcccactgctttgtccccaagacccagccctgtacctcggccgctctagaactagtggatcccccgggctgcaagaattcgatatcaagcttatcgatacc

SEQ ID NO: 31836 - DNA, 435 bp, Homo sapiens
gcgaattggagctccaccgcggtggcggccgaggtacgggacttgtctccaggagacatgtctgggaagaagagctagactggagaatcatgagcatgttcaggtgaaaacatgtgagtggataagagcaagagggtgagaacacagaccaaggggctaagggacagactgtgttcagtatttggggttgggaactggtttttgctacttgctagttctaagaccaggctcagactctaacttctctgtaatgtgggaataatgacagcacttaccttataagattttacaaagattaaaatatcatatataacagtcacttaacacaagtaagaattcagtaaatgttgactgttattactattgtctgggtcgttataagtttgaagacacaattgcataaactgtcatcattaaaaggaaaacagagaaaag

SEQ ID NO: 31837 - DNA, 469 bp, Homo sapiens
  misc_feature 449, 450: n = A,T,C or G
agggcgaattggagctccaccgcggtggcggccgcccgggcaggtaccctggagccttgagcaacgttcttttgcattatgccaggaagaactgctggcaaatgtaagtgggcttagaattcatgactgcagtcagcagcagttgtgtaaatctagggagagactggtatttgacacctgcaagtcctcaaggttaacagaagtctcaaaaagcccaagccccagaattttgaaaaatacatgggtttcacccccaacctaattcaatgtcaccaagaaaaacttgtaagttccaataaggacaaaccaatagtttaagtctgcaaaaatattttccatatagaattttagaagtattatttaacctctttaattctctgcttttcaatatcaaatttgttttttgaagccctttttctttgggttaaaagtttaccgaaatgcctttnntttcaaaagtaagtcttta

SEQ ID NO: 31838 - DNA, 380 bp, Homo sapiens
tagggcgaattggagctccaccgcggtggcggccgcccgggcaggtacccaaattaactaaccttaaatgcaagacttagcagcaggtattatccatgttgaaccacagagttgtggttataggatgatctatccaggttgaaaaagaattctggccagcagtttgaagaagtgaaaatcaagattaggcacagaggcagagggtggtggggccacagggcggggaaggattccaatccatgagactgcagaaggggaagtgagcagcctctacccatacagactagggtctcatggatgccactggagagcattccagtctcactggatattggtagttcactaacttgtgtcagtcatgattgtgacctctgatatat

SEQ ID NO: 31839 - DNA, 369 bp, Homo sapiens
agggcgaattggagctccaccgcggtggcggccgcccgggcaggtacgcggggagggcatttaacttcaaggtaagacccattccaggacggcagagatcatgtctgtcttgcgtatccctgtgtgaattttgcctgacatgttgcaaacactccgtatggaagtcttgagggtcttctgccccagtcagaaaacctctgggagaacagttatccccagacctcagacgctcgacggatacatgagaagctttctttgatggattcgatgtcaggatctccatgtgaacttccacttagaggtgtcatgctatggggcctcagcgtcaccacatcgtttggacgtctgaccagtttcctgactttgaga

SEQ ID NO: 31840 - DNA, 397 bp, Homo sapiens
gactcactatagggcgaattggagctccaccgcggtggcggccgcccgggcaggtacaatcacgcagtagtcagagcaggagtatgaggaagagcaagaacctcccaaagttgaaagcaaaccaaaggtcccccttaaaagtgccccaccacccatgaacttcactgatttactcaggctggctgagaaaaagcagtttgaaccagtggaaatcaaggtagtgaagaaatcagaagagcgacctatgaccgcagaagaacttagggagcgagaattccttgaacgaaagcataggagaaaaaaacttgagacagatggaaaactacctccaactgtgtccaaaaaggcaccctctcagaaagaaagtgtgggcacaaaacttatcaaaggttctgga

SEQ ID NO: 31841 - DNA, 473 bp, Homo sapiens
tacactactatagggcgaattggagctccaccgcggtggcggccgacgtcggatgacatgttaccatgacacaaaacgacaatgaccacggcaccacaccaagaatcatctacctctattacaaccagacatttgcactcaaataaggaggtgctgccgtatacttatccgttgctggaggcagcatgaatgggaaccagacacagctggaaagcaatcgggtaacagagcgccaaccctgtacctcggccgctctagaactagtggatcccccgggctgcaggaattcgatatcaagcttatcgataccgtcgacctcgagggggggcccggtacccagcttttgttccctttagtgagggttaattgcgcgcttggcgtaatcatggtcatagctgtttcctgtgtgaaattgttatccgctcacaattccacacaacatacgagccgggagcataaagtgtaaagcctgg

SEQ ID NO: 31842 - DNA, 432 bp, Homo sapiens
ttgagctccccgcggtggcggccgaggtacttttttttttttttttttttttttggagacagtgtctagctctgtagctcaggctggaatgccgtggtgcggttatggcttactgaagccttgaatttatgggctcgagtgatctcgcctcagcctcctgagtagctgggactacaggcacataccaccacgtctggctaattttaaaatgttgttttaaagacaaggagtcaactttgttgcccaggctggtctcaaactcctgggctcaagctgtcctcctaccttagcctcccaaagtgctgggattacatatgagaatcactgtgcctgtcctgtcctgtcattctttaaacaaaatttcattgaatgcacatcttattatacaaagactataatttcctgaccagttgctacttcacatagatttaa

SEQ ID NO: 31843 - DNA, 442 bp, Homo sapiens
cactatagggcgaattggatctccaccgcggtggcggccgcccgggcaggtacctccaagaagcttacaggatggaaccagggaaggttttggacactccacatcactcaaagttccactggctcgatccctgcagattagtgaagaactactgagcagaaaccaattgtccacagctgccagccttgggccatctggattacagaatcatggacaacacttaatattatccagggaagcctcttgggcaaaaccacattacgagttcaacctcagccgtatgaagttcaggggaaatggtgcactcagcaacatcagtgaccttccttttcttgcagaaaactctgcctttccaaaaatggcacttcaagcaaaacaagatggaaaaaaggatgtgagtcattcatctcctgtagatttaaagataccacaagttcgagga

SEQ ID NO: 31844 - DNA, 385 bp, Homo sapiens
agggcgaattggagctccacgcggtggcggccgacgtcggatgacatgttaccatgacacaaaacgacaatgaccacggcaccacaccaagaatcatctacctctattacaaccagacatttgcactcaaataaggaggtgctgccgtatacttatccgttgctggagacagcatgaatgggaaccagacacagctggaaagcaatcgggtaacagagcgccaaccctgtacctcggccgctctagaactagtggatcccccgggctgcaggaattcgatatcaagcttatcgataccgtcgacctcgagggggggcccggtacccagcttttgttccctttagtgagggttaattgcgcgcttggcgtaatcatggtcatagct

SEQ ID NO: 31845 - DNA, 495 bp, Homo sapiens
tacgactcactatagggcgaattggagctccaccgcggtggcggccgaggtacttttagtagagatggggtttcaccatgttggccaggctggtcttgaactcctgacctcaggtgatccactcgcctcggcctcccaaagtgctgggattataggcatgcgccaccatgcccggccgaggtacagggttggcgctctgttacccgattgctttccagctgggtcttggttcccattcatgctgcctccagcaacggataagtatacggcagcacctccttatttgagtgcaaatgtccggttgtaatagaggtagatgattcttggtgtggtgccgtggtcattgtcgttttgtgtcatggtaacatgtcatccgacgtcggccgctctagaactagtggatcccccgggctgcaggaattcgatatcaagcttatcgataccgtcgacctcgagggggggcccggtacccagcttttgttccctttagtgagg

SEQ ID NO: 31846 - DNA, 401 bp, Homo sapiens
gcgtatacgactcactatagggcgaattggagctccaccgcggtggcggccgaggtacactgaagtaggaaggagggacagaaatagcaagtcttaggaaatgcctgggtataaaataaggagaaaaattacacttaatagcatatcataataactgcatttaaaggtgggaggagagtcaacatgtagtaagtgttatttgatttaagtatttctattgctaaatttaagtgtagttaaaatttcatagtttactttctttacataatgcactatccgcatcattgaaaatttctgtgaatatgtttctaataacattataatttttcaatgtgtagatatttcataatttgcataaacaatgccatgatattgaaatcagttacttacaatgccaaggg

SEQ ID NO: 31847 - DNA, 213 bp, Homo sapiens
cgcgaaacgactcactattaggcgaaatggagccccaccggggggggcggccgataaggcagccaccggaagcacccgggcggccgcggaaatgctggtggtctgcatcaccaccggatcaacttcgacaaataccacccaggctactttgggaaagttggtatgaagcataaccacttaaagaggaaccagagcttctgcccaactgtcaac

SEQ ID NO: 31848 - DNA, 586 bp, Homo sapiens
tacgactcactatagggcgaattggagctccaccgcggtggcggccgccgggcgctgactcctgtgagacgcagccgaggcgagcagaacccgaggggaagggatgcagaccagagccgagagctactaagttcctggcctcccccgagtgagtgactggcgatggacggagagcaggacttcccttcctgcattcagaatgtgtgtgcaggtcattattcatcaacacatgtcaagataaaacatacagagctcttcttggaagggctgggtttggtccatctcaaatgacacttttgtcacctccataaattccaagatggaatgtcagtccactggggttgttatagacggctaggctagactaggcagtccggggcggggaggggagttaagtaggtaagtgttcttccttccacgaggctgtcttgttgaggtcatttctgcctgagtgtgacacagtcctctgtaaatatacctgtaaggaacgttttccttgcaagatacaacaggtctccgtttttttcccgatttcaacacgtgtgttctgagtgtgaactcggtcacagaaaggggcccccgcgta

SEQ ID NO: 31849 - DNA, 397 bp, Homo sapiens
gactcactatagggcgaattggagctccaccgcggtggcggccgaggtacacaataaacacacaattttatctttcaattcaaaaataatgtttaatgaaattaagaaatgaaagaaaaacagtctgatgaaagattacatttgattatgaagaaagtaaatgacctactgtcgttcactatgacctatccgataaaacggtctgctttttcttgttgctgttcttaacttagggtgtattgcctcttgtttccttttcttaaacaatttttcattttcactctatattcagtgtgctggagttgcaaatttgtcatgtagccatactgttcatttatttatttatttttttttgagacggagtctcgctctgtcacccaggctggagtgcagtggc

SEQ ID NO: 31850 - DNA, 396 bp, Homo sapiens
ctactatagggcgaattggagctccacgcggtggcggccgcccgggcaggtaccattctggcctgctctacgttgccatttttaatccaacttgttaattctgcctttagactctcttcatatttcctagcatccatctttttaatgactaatttattgttaaaatgaatgaagttttctgggcacagttcctgggcccgaggccaacttttccaaatttgaaacatggcatcatacagctggatgctttctcgaggtgaaagggtaagatcaggagggaatccatacctttcaatatgatctgttgttagtgcagcacatgggtgaaaatgatcaaaatgaatgtcaccatgttttattgaacatacatgcttctctagatcattatacctctct

SEQ ID NO: 31851 - DNA, 506 bp, Homo sapiens
gcgaataggagctccaccgcggtggcggccgcccgggcaggtaccatcaaaagaatatattccaagaaggttagcatctaactgaaggaaacttaggtgtgacactgagagacttcatagcaggagatgaaagctttgaaggaaggcattctgctagaggggcagcaaactccagcctgagagccaagtgcagtctgccacctgttttggtatgactggtgaggaaagaaaggggaaaatgattttatacttttaaatggaaaaaaaaattaaaagatacttcataacatgtaaaattgtatgaaattcaaatttcagtgtgcagaagttaagtttaaggattgtttaggtattggctgtctacggctgcttcccactacaatggcagaattgattagttgtgatggagactgtatggcccacaaagccaaaaatatgtacctcggccgctctagaactagtggatcccccgggctgcaggaattcgatatcaagcttatcgatac

SEQ ID NO: 31852 - DNA, 251 bp, Homo sapiens
cgactcactatagggcgaattggagctccaccgcggtggcggccgcccgggcaggtacaagctcagtttctatgattatgtccatcagctcatccatgaaatcaagtcccagatggcagttctgcagaagtgcccatcctccgttcgccatggtctgctgcaagagcttccgagcatggacttcctggccctggcccatggacacataacgggtttctatttttaatctcttccccaaggcaatgatggaa

SEQ ID NO: 31853 - DNA, 472 bp, Homo sapiens
gactcactatagggcgaattggagctccaccgcggtggcggccgaggtacctgcggtagtagcctggctttgctctgacggcgatctcgcggcccgagagccttttatagacagctccttcagtgtctctgtttccaaaccgcaaccgagaagagacagacggagaaaagagagttacttttccaggttgcttttcccggggatgtgaaggatacagaaatgactgtgaatcaacccatatcatcaaggagctgataatctagtggaagagttagacgtgtgcatacttcactatgatatgaggcagtctctgagcttatattctctgtggaagatgtgacatatccaggcggaacatcatgatgcagggaaacacatgtcacagaatgtcgttccacccgggacgagggtgttcccgaggacgaggaggacatggagccagaccctcagcaccatcctttaggccccaaaa

SEQ ID NO: 31854 - DNA, 437 bp, Homo sapiens
ctactatagggcgaataggagctccaccgcggtggcggccgaggtacagggttggcgctctgttgcccgattgctttccagctgtgtctggttcccattcatgctgcctccagcaacggataagtatacggcagcacctccttatttgagtgcaaatgtctggttgtaatagaggtagatgattcttggtgtggtgccatggtcattgtcgttttgtgtcatggtaacatgtcatccgacgtcggccgctctagaactagtggatcccccgggctgcaggaattcgatatcaagcttatcgataccgtcgacctcgagggggggcccggtacccagcttttgttccctttagtgagggttaattgcgcgcttggcgtaatcatggtcatagctgtttcctgtgtgaaattgttatccgctcacaattccacacaaca

SEQ ID NO: 31855 - DNA, 386 bp, Homo sapiens
actatagggcgaattggagctccaccgcggtggcggccgcccgggcaggacgtttaacgtcggcccggcgcgcgcgtccgggaggttgcccgtaggccgctaactggtggttcccagtccccgccgactcggcctctttcttctgcggccaccagatcgcgggatatcggagacttcgaacaatccgctggagtcctttacagtttaaaaacagaggaccggccgctctagaactagtggatcccccgggctgcaggaattcgatatcaagcttatcgataccgtcgacctcgagggggggcccggtacccagcttttgttccctttagtgagggttaattgcgcgcttggcgtaatcatggtcatagctgtttcctgtgtgaaat

SEQ ID NO: 31856 - DNA, 475 bp, Homo sapiens
gcgaattggagctccaccgcggtggcggccgaggtactttttttttttttttttttttttttggaaatgaacaaatatttatttatcttttataacaagtaaggcattgttgcttaaaggaagacaaacaaacttaaaagattccgttgacaatgcattttttcatttgttcggcacaatgcttttggcataattggagatgtgacagcaaactttccaggacattcagtcttcggcggcagcacttagggcagatgactggccgctcaaattctctatcttgtttcaggacagtggaaaagcttatagatgaggccaaagcaccaggtaggtggaaggttcttgtatcggttcgaaccccgacagcgcgccaacagacaacacgaggcagtggggagcaacatgctgttttaatgagcgcctgggtacaggcgtgctgaggctgaaaatggcattagcccccgggtacctgccc

SEQ ID NO: 31857 - DNA, 450 bp, Homo sapiens
gcgaattggagctccaccgcggtggcggccgaggtacgcgggggcccctttctgtgaccgagttcacactcagaacacacgtgttgaaatcgggaaaaaaacggagacctgttgtatcttgcaaggaaaacgttccttacaggtatatttacagaggactgtgtcgcactcaggcagaaatgacctcaacaagacagcctcgtggaaggaagaacacttacctacttaactcccctccccgccccggactgcctagtctagcctagccgtctataacaaccccagtggactgacattccatcttggaatttatggaggtgacaaaagtgacatttgagatggaccaaacccagccctttcaagaagagctctgtatgttttatcttgacatgtgttgatgaataatgacctgcacacacattctgaatgcaggaagggaagtcctgctct

SEQ ID NO: 31858 - DNA, 203 bp, Homo sapiens
ctactatagggcgaattggagctccaccggggtggcggccgaaaccagcttttaagtgagctcagcatattataaaggaatgaaagcaattagagcgtggactctaaaggtaggtgagacttgctgttccacttagaaacatagaaacataggaaactaaggactcgatggggacatcaatagtaggatggcttttaagaggg

SEQ ID NO: 31859 - DNA, 653 bp, Homo sapiens
  misc_feature 53: n = A,T,C or G
actcactatagggcgaattggagctccaccgcggtggcggccgaggtactttntttttttttttttttttttttggggggggttgggaattattacaatacacatcatagacaaatgaaaatagttaattattttactttgtatgagagagaagatttatcccatataagattcatttcaagatgtgtcccaacataggttgtttgaagactttaagatttacaaaaatatttttgcgtgtctacagcaaagatggcgaaggactaagctataataagtgataatggagggccccttagtagaaaagacttgcactcaattctcaacaaatttaatttatcaagttcttaggctatgaaccatatttcccctaccactaaagtgagaaaaactatgttaactagtagggttaaccacattaaattaatcaacctgtgtaaagtgactctcatataatagtgtctatgatgtggtccactaaattttctgtaaaatttttcagttctttaagtcaccgtatcagtgatgccttactaccatagaacataaataatgttggctctttttgcgtaagtaatctatgaggtgtctattcaggtaatacagaaaggcttcttgtatctaaatattctatgcactgctacatgctatac

SEQ ID NO: 31860 - DNA, 453 bp, Homo sapiens
atacactactatagggcgaattggagctccaccgcggtggcggccgaggtacctctttttctatgctgaaaagttatgtaaaaaatccctaagctttgttggatagtctgtcatcaccccagttgctcccaaatcaaaagctcttttgtattcttgttcttcatttaatacccaaatatacacttgaatgcctcgagcagttaggtggtcaaacaaagctttcctcattagtaagagatcagaaagccagatgagaaacttttgacttctggacatggtgtgtggttcttttagcttcagtataatagaaggcattgggatttcaaaaaactgttctcgaatgggcacaaagggcaagaggccagtgaagaaaaggccaagaatgagcaggacacgttgtaaactgaagagtataggaatatctgaattcttttcgtagcacttttctacaat

SEQ ID NO: 31861 - DNA, 646 bp, Homo sapiens
  misc_feature 225: n = A,T,C or G
ctcactatagggcgaattggagctccaccgcggtggcggccgcccgggcaggtactgggagagtgaacgaccacattaagaactgggcaatgaccagcctgggcaacatggtgagaccctatctttacaaaaacaacagtaaaaaaaaatgagccaggtatgggggcacaaacttgtatttctagctactctggaggctgaagcaggagaattgcttcaactcangaggtggaagttgtagtgagccaagatcatgccactgcactccagtctgggcgacagagtgggaccctgtctcaatgaaataaaataagataaacatgagaacaatagaaaactgaaggacaacaaaaggaggtaaggagataagggggtagaggctgaaaaacttcctactgaggactatgttccactgaggactactgaggactatgttcaatactagtattgacaatatcaatagaagccttagcatcacacaatagacccttgtaacctacacatgtactcaagatatacttgatatatgtagttattggaagaagggctttaacacatgcttctcaagtgaaagaatggaaaagacagacaaaaggaaagaaggaaggaaaggatggaaggacatatttagaatagcagggtcatg

SEQ ID NO: 31862 - DNA, 478 bp, Homo sapiens
ctatagggcaattgagctccccgcggtggcggccgaggtacagggttggcgctctgttacccgattgctttccagctgtgtctggttcccattcatgctgcctccagcaacggataagtatacggcagcacctccttatttgagtgcaaatgtctggttgtaatagaggtagatgattcttggtgtggtgccgtggtcattgtcgttttgtgtcatggtaacatgtcatccgacgtcggccgctctagaactagtggatcccccgggctgcaggaattcgatatcaagcttatcgataccgtcgacctcgagggggggcccggtacccagcttttgttccctttagtgagggttaattgcgcgcttggcgtaatcatggtcatagctgtttcctgtgtgaaattgttatccgctcacaattccacacaacatacgagccgggagcataaagtgtaaagcctggggtgcctaatgagtg

SEQ ID NO: 31863 - DNA, 384 bp, Homo sapiens
actatagggcgaattggagctccaccgcggtggcggccgcccgggcaggtacttttttttttttttttttttttttggagatgggagtctcactatgttgcctaggctagtctcgaattccccagctcaagcgatcctcctgcctcagcctcctgagcagctgggactacaggcacgccccaccatgcccagcccttaaactattttggattaggtttctattacttgcagccaaaagttctgaattaacaaagggcctcaccctggctcttccttggtatatattactatggggatgggatgaccgaggtcccatagaaatctcaactgatccattcttcccatctatttttccaggtctcatgaaaagttgccattttccct

SEQ ID NO: 31864 - DNA, 468 bp, Homo sapiens
cactactatagggcgaattggagctccaccgcggtggcggccgaggtacagggttggcgctctgttacccgattgctttccagctgtgtctggttcccattcatgctgcctccagcaacggataagtatacggcagcacctccttatttgagtgcaaatgtctggttgtaatagaggtagatgattcttggtgtggtgccgtggtcattgtcgttttgtgtcatggtaacatgtcatccgacgtcggccgctctagaactagtggatcccccgggctgcaggaattcgatatcaagcttatcgataccgtcgacctcgagggggggcccggtacccagcttttgttccctttagtgagggttaattgcgcgcttggcgtaatcatggtcatagctgtttcctgtgtgaaattgttatccgctcacaattccacacaacatacgagccgggagcataaagtgtaaagcc

SEQ ID NO: 31865 - DNA, 496 bp, Homo sapiens
  misc_feature 237: n = A,T,C or G
gactcactatagggcgaattggagctccaccgcggtggcggccgaggtacccacagcattggctgttcttcataggagactcagagaagacttcataggagactcattattgtttactggacatcaggtgctatattgtatagcattcacattccacaggtgaggaaacaggctcagaggaataagtggcatgccaagatcattgagtatatcagtagcagaataggattcagactntgttaggcctaactccaaagccctggcttttttttttgagatggaatcttactctgtcaccgggctggagtgcagtggcatgatctcagctcactgcaatctctgcctcctgggttcaagtgattcccctgccttagcctcctgagtagctgggactacaggcatgcaccaccacgcccagctaatttttgtatttttagtagaagggaggtttcaccgggttggccaggatggtctcaatctcttgaccttgtgatct

SEQ ID NO: 31866 - DNA, 471 bp, Homo sapiens
tggagctccaccgcggtggcggccgcccgggcaggtacccaaattaactaaccttaaatgcaagacttagcagcaggtatcatccatgttgaaccacagagttgtggttataggatgatctatccaggttgaaaaagaattctggccagcagtttgaagaagtgaaaatcaagattaggcacagaggcagagggtggtggggccacagggcggggaaggattccaatccatgagactgcagaaggggaagtgagcagcctctacccatacagactagggtctcatggatgccactggagagcattccagtctcactggatattggtagttcactaacttgtgtcagtcatgattgtgacctctgatatattgctatatttggttttcatttatacaaaagctgcgtctctccttgatcccagtgttttgttggtcttttgtgcatccaggaaagtaaggcttgaggaaaag

SEQ ID NO: 31867 - DNA, 383 bp, Homo sapiens
gagcttaccgcggaggcggccgcccgggcaggtactgtgttctcaccgtcgcggaggtttgtggatattggataaagcttcactttgatgggtattctgattgctatgacttctgggtgaatgcagacgctctggatatccacccagttgggtggtgtgagaaaaccggccacaaacttcaatcctccaaaagggtataaagaagaagaattcaattggcagacctatcttaagacatgtaaagctcaagctgctcctaagtcattatttgaaaatcagaatataacaggtgcatcccagtcgcggcttttcgaggttggtaatgaagtctttgaggcagttacgacaaaaaaggaattcccttcattcattctgtggttgct

SEQ ID NO: 31868 - DNA, 483 bp, Homo sapiens
gtatacgactactatagggcgaattggagctccaccgcggtggcggccgcgctctccgatgcccagccctcctggaaccacctcgcctgtgacgtaggtggagcgcgcactgcctccgggcccgtctttctcaattgggaccggaaaacgttgtcgctcatcctatgacgcgaaagtaccgagactatcaggatccggagacggaaatgtccgaaggccgcagtacctcggccgctctagaactagtggatcccccgggctgcaggaattcgatatcaagcttatcgataccgtcgacctcgagggggggcccggtacccagcttttgttccctttagtgagggttaattgcgcgcttggcgtaatcatggtcatagctgtttcctgtgtgaaattggtattcggtaacaattccacacaacatacgagccgggagcataaaatggaaaggctggggtgcctaatgagtgagctaacttacat

SEQ ID NO: 31869 - DNA, 610 bp, Homo sapiens
ctactatagggcgaattggagctccaccgcggtggcggccgaggtacccattaaccccacttaaacttttctttctgaaagagacaaacttgctaaattatcatgagagaaccaaagaattctaatgaatcattttatttaaaaaataactacagttatcctttaccaaactaaaattccaggtctgcaacaacttcgatttggcacagagttgctgcaaagcttaatgtgtatatttacacacttcagccctcttaaaagccatcctactattgatgtccccatcgagtccttagtttcctatgtttctatgtttctaagtggaacagcaagtctcacctacctttagagtccacgctctaattgctttcattcctttataatatgctgagctcacttaaaagctggtttcggccgctctagaactagtggatcccccgggctgcaggaattcgatatcaagcttatcgataccgtcgacctcgagggggggcccggtacccagcttttgttccctttagtgagggttaattgcgcgcttggcgtaatcatggtcatagctgtttcctgtgtgaaattgttatccgctcacaattccacacaacatacg

SEQ ID NO: 31870 - DNA, 341 bp, Homo sapiens
gggcgaattggagctccccgcggtggcggccgcccgggcaggtactttttttttttttttttttttttttttggagtagaatattgattgtcctatatcccattttcttgaagagattctggcttctaatatatgttcctaaaaaaaaatttatcgtctagtagtgatgtcttcatgtttcacccagctgtctcataggcatgactaagcatctatttcatcacctggctctggatgcctcctctctttaccatttgggaaaggcatttgctgattccttttgatatacctgaagtattgatgctagagaaatcacttccaatataaacagcatcgtttgc

SEQ ID NO: 31871 - DNA, 333 bp, Homo sapiens
cactatagggcgaattggagctccaccgcggaggcggccgcccgggcaggtactaaactaagccgtcaactaccagcaagcagaatgaaaaacagggacagatcagcatccaattagtatgtctaagtttttaaacaggaaaagggttgaggggaatcagtaaaactggaaactcatacttcacaattttgcaaatcttactgattaaaaggacggaaattgtgtgctttatcaaatcttgctgtgaagtgcacagtttcattttgtgaggtcctgtataacaattcgtcctgggctggcccacttttcaaaatgcaatgttgaaaaatcttg

SEQ ID NO: 31872 - DNA, 559 bp, Homo sapiens
gactactatagggcgaattggagctccaccgcggtggcggccgcccgggcaggtacacgtataagccaccacacccagcccttaacatgctttcgtagctttccattacccttagaatcaagactctattgaggcaaatgcaccatgacttgcctcaagcccagcactttcctattcttgccaggcctccagcttttcctgagccctcgcctctccctcacctccctccagctacataagccttctttcagttcctcatctttcccttttagtgatcttatggaatcaaatatttatttgcttattttttcaatgtctgtctctactagctaaaggcagtggaaagtttgttccacacagcttacctagcatttgacagagcctctggtatgtcgcaggcacttaaataaaataaatataactgatgaaaaagctccttttccccaagtcctctctcttcatctaaaatggacccttggcggctgagaggctggagcacgcagagcaggctggttagactgtccctggaggcttgctcttgccactcagcagctatagg

SEQ ID NO: 31873 - DNA, 472 bp, Homo sapiens
atacgactcactatagggcgaattggagctccaccgcggtggcggccgaggtacttttttttttaattttaattttagtagcctgtctttattgaatcctagttgtctttccttaatgcctcttcacatttgaaccactgtcaaccttctcagacataaattttagccactccccttcccccacaaaagaatctaagaaaagatacacttgctgtctgtttttgttagtttacatattcagttgactacagcttaccgtttttcaacttctgagaaattagttcttaattttggaaaatgtagtaattcagttaatacatctctaactttttttttatggaaattttctgacataccaaaagcagaataaggccaggggcggtggctcacacctgtaatctcagcactttaggaggccaggcgaatcacgtgaggccaggagttagagaccagcctggccaacatggtaaaa

SEQ ID NO: 31874 - DNA, 192 bp, Homo sapiens
actatagggcgaattggagctccaccgcggtggcggccgttaaacatgtgtcactgggcaggcggtgcctctaatactggtgatgctagaggtgatgtttttggtaaacaggcggggtaagatttgccgagttccttttactttttttaacctttccttatgaggcatgcctgtgtttgggttgacaggtga

SEQ ID NO: 31875 - DNA, 283 bp, Homo sapiens
tactatagggcgaattggagctccaccgcggtggcggccgcccgggcaggtacgcggggagctgacctgtggttcatttattcccagttaggtgaagaggcactctcaggggaaagaaaatacagtggtctagtccaatgctgctgtagcctgataactggacttcaagttttcattcaggatgctcttattgaccaaaaactaattgtcaagtccacaatctcaacaaggggactgttttggagaagtcttacttgaagggatctattaagatgggagttct

SEQ ID NO: 31876 - DNA, 445 bp, Homo sapiens
ctactatagggcgaattggagctccaccgcggtggcggccgagatgctgaccggcggcgtgggcatcggcttctgggtgtgggacgagtggaacaacctgaacgtagcgaacatcatcatcgccatcgtcgtcatcggcgtggtggggctgctgctcgaacaggcgctggtggcgctggcgcgggcgctgacgcacgaacaagtggctaactgattaaggagcgcgatcatggaagaccttcaaaccaggttcatcgacatcaccggcgtggagatggcgtttcatacgaagaagggcgtgttccaggcactgcagggggtcgacctggcggtgcgcaagggggagttcattacgctgatcgggcactcggggtgcggcaagtcgaccttgctgaacctgattgctggcttgttgaaaccgacggcgggcgtgctgttgtgtgcc

SEQ ID NO: 31877 - DNA, 432 bp, Homo sapiens
gggcgaattggagctccaccgcggtggcggccgaggtaccagtggccagaggacctgctcaaacctgaccttattctgctgctcactgtgagtactgaggagaggttgcagaggctgcagggccggggcatggagaagaccaggaaagaagcagaacttgaggccaacagtgtgtttcgtcaaaaggtagaaatgtcctaccagcggatggagaatcctggctgccatgtggttgatgccagcccctccagagaaaaggtcctgcagacggtattaagcctaatccagaatagttctagtgaaccgtagttactctggccaggtgccacgtctaactagattagatgttgtgtgaaacatctacatgcaccattggttatgcggtgttcccaaatttctgttctacaagcatgttgtgtggcagaaaactgg

SEQ ID NO: 31878 - DNA, 609 bp, Homo sapiens
ggcgaattggagctccaccgctgtggcggccgcccggcaggtacgcgggtatttcctactggattttgctttcactggtgtttagaaaataaacttgatttctctaggagcactcctttggttagagggatgcaagaaggagaggtgaaggtggcgtgtggtggctcatgcctgtatccacactttggggaggccgaggcaggcggatcacttgaggccagcagtttgagaccagcctggccaacatgatgaaaccccatctctactaaaaatacaaaaaattagctgggcatggtggcaggcacctgtaatcccagttacttgggaggctgaggcaggagaattgcttgaacccaggaggtggaggttgcagtgagctgagattgtgccactgcacttcagcctgggcgacagagtgactctgtcaaaaaggaaaggcaaaaaccggaccctggagctctgtgggccctgattgcaggcccctccctgtgtgatgagggatgagtcagcttggggagccacttggccagcctgcatgcctggtcatcaggaggttgagaaaagccttgaaagttgtgaagcactgagcagatacaagtgtttgttaat

SEQ ID NO: 31879 - DNA, 205 bp, Homo sapiens
acgactcactatagggcgaattggagctccaccgcggtggcggccgctctagaactagtggatcccccgggctgcaggaattcgatatcaagcttatcgataccgtcgacctcgagggggggcccggtacccagcttttgttccctttagtgagggttaattgcgcgcttggcgtaatcatggtcatagctgtttcctgtgtgaa

SEQ ID NO: 31880 - DNA, 604 bp, Homo sapiens
atatcggcgaatgagttcaccgggggcggcgccggcaggtgcgcggcaggtaggttttagactcctatgctttaattttatgtaatttccttgtctcttaaataaccataataaaacaacagttttgatataggacagtaaagagccctttgatatactactggttttgaatgtgtatagagacctcatatatactcttcagccattaagaaattgtagtaatattttgctcccaaattgtggagtctgtaaattttctcaataacatcatctttatgaaaatccacagaggccagggatggagtaggaacagaactaagtttcaaaggcaaatggtgatctgggcttgaggaagtaacagtgaggtcagagggaagaagggaaggagagagggatggccagcagacccaagtgcagagttcagaggggtagggaacaaagggagacatggggaaagactggatgtggccacagcagcagtgtactgcaggccgagtcgcaccatggctgggtggatcacagaggatgggatactcataaactgggtcagagagttttgtctgctgtacctcggccgctctagaactagtggatcccccgggct

SEQ ID NO: 31881 - DNA, 398 bp, Homo sapiens
attggagctccaccgcggtggcggccgacgcaccaggtacatcagacaaggaagtcccacggcactgagagctgaattgtgggctctcattatgaatatttacagccaacctgaggatgtcttgtattatgagcagctcaagaccaatgtgatctacatgacctttggggacagtctaatctataaagatgtgaagttgacagcaagcaatgatgattattattttgtatttgaagattatttatatcaggtattactttggttttcccgggatacatctgtgttgagtcactttgcattcaacaagtgcctcgccaccaaaatcatacataagatgaaaactaagactggaagaatatgctgtcttttacccaccaaatggtgttatcccttttcat

SEQ ID NO: 31882 - DNA, 385 bp, Homo sapiens
agggcgaattggagctccaccgcggtggcggccgcccgggcaggtacgcggggggagactgaggcaggagaatcacttgaacccgggaggcggaggttgcagtaagtggagatcgcgccactgcactccagcctgggcgacacagtgggagtctgtctcaaaaaaaagaaaaaaaaaagctactgagaaggagccaccattttgctttaaaatagtgggtttttttcctttttaatgaacactggagctgaggatgcagattacatgagttatttaataagttgattcaagagagagagggtatattagaaatggtaagatgatttggtgggcaaaaatgctttctataatttgaatatgggtttaatttaattattaactatag

SEQ ID NO: 31883 - DNA, 441 bp, Homo sapiens
actactatagggcgaattggagctccaccgcggtggcggccgcccgggcaggtacgcggggggtattaaaatgttctttcagttagggccaaagggcatttaacttcaaggtaagacccattccaggacggcagagatcatgtctgtcttgcgtatccctgtgtgaattttgcctgacatgttgcaaacactccgtatggaagtcttgaaggtcctcctgccccagtcagagaacctctgggagaacagttatccccagacctcagacgctcgacggatacatgagaagctttctttgatggattcgatgtcaggatctccatgtgaacttccacttagaggtgtcatgctatggctctctctgttgaaaactgaaaacctgtgtggtggatggcaccagtcctgttgaatggtgcaaacgtcccctgcacaaaagcacta

SEQ ID NO: 31884 - DNA, 199 bp, Homo sapiens
ctatagggcgaattggagctccaccgcggtggcggccgaggtacgacaatggaaagtttttaaacaagcaaatgtcactatcaaattcctgttttagaaagataattctgagaaggcacatcctgagacagcctggggccaagatgctgtggcgtaaacagatcgctgagcgatgataaggtcctgaatccaaagggca

SEQ ID NO: 31885 - DNA, 336 bp, Homo sapiens
tccaccgcggtggcggccgcccgggcaggtacccactccctgctataaacccaaagagaaacttccagtcgaggccaagttgccatgggttcaaacaagctcaagagctagaagaaggagctgctgtgtcagaggagccctcgttcatcccagaggcctggttcggcctggcacaggtcacctgtgggtgtgggggaccccaggggggcgaaataggtcaaggtggccagggtggctcctgtctttctctcagtccgtggctgacctgcctattgacgagtgtgaaggggcccaagcccagcatcccagcgtgccctgtttattgcagggcccatg

SEQ ID NO: 31886 - DNA, 128 bp, Homo sapiens
tttgggcttctatttcgaccgcgatgatgtggctctggaaggcgtgagccacttcttccgcgaactggccgaggagaagcgcgagggctacgagcgtctcctgaagatgcaaaaccagcgtggcggcc

SEQ ID NO: 31887 - DNA, 636 bp, Homo sapiens
gtatacgactactatagggcgaattggagctccaccgcggtggcggccgcccgggcaggtacataattgttcaaagcagttttatttacaacaaaaatccgtatacaacaaaaagcttcaaccaacaatggtgaatggttaaaaaatattatggtgcatacatccatgaaatcctagttagctgtaaaaaaggaatgaaatattgacatacacaataatctggatggatctcaagagtgttgtgctaagtaaaaagtgtctccaaaggtcatgaatggtttatttcatttacacagaatttcagaaatgacaaatttattgaaatggagaactaatttatggttgccctgggtgaggacaccactggactggaagcagagggatggctgagcccacgaggttagtgtgagggagatcctcacagtagtgcaacagttctgcactttgactgcgttgatggtgataggaacccatatttaagatgaaataacacagccccatgtgcacacactgtacctcggccgctctagaactagtggatcccccgggctgcaggaattcgatatcaagcttatcgataccgtcgacctcgagggggggcccggtacccagcttttgttccctttagtgagggtt

SEQ ID NO: 31888 - DNA, 440 bp, Homo sapiens
gactactatagggcgaattggagctccaccgcggtggcggccgaggtacaggccctcatgttctctggacacagtatggatggtgaatgttctcgtggtgtgagacagaatggagtcaaggagaaaccaagtataggcacagggtgggtgagactttgtttccgctaagaaggtcatgctggagccctccatcaccttaaccaccttcccaactggcaacaccagactccaatttgatttcaacaggatcaggaccatacttcacatccaggaagatggggtcgctcctctggctcagaagggcatctcgagcttcacattggtaagtccctgagtcctcccgctggacaatgagaatggtgaggatcttgccatccttggacagctgcatgcgctcatggaacacaatggagaggttgttggaaacccagtggatggta

SEQ ID NO: 31889 - DNA, 479 bp, Homo sapiens
ctactatagggcgaattggagctccaccgcggtggcggccgcccgggcaggtacgcgggggcgcgacgttcggttcgctgtgtgtgtcgccggctccttgagggtccatgtgatttttacgccagtgctgctgaactgtgcagggtagggagctggcacagtccgattaattgtccttgggtcgaggtgtctcgtcggaccctttggggcgtacatgaaaaattaaggcagaggtcactgaaattatttctaataccaattccaaaatagtgactcttggacaatagtgcaattatatggaattatggctggttataagcctgtagctattcagacatatcctatacttggtgaaaaaatcacccaagatacactgtacctcggccgctctagaactagtggatcccccgggctgcaggaattcgatatcaagcttatcgataccgtcgacctcgagggggggcccggtacccagcttt

SEQ ID NO: 31890 - DNA, 525 bp, Homo sapiens
atagggcgaattggagctccaccgcggtggcggccgcccgggcaggtacaaaagaaatgagtatcctagaaattgattataatattgatgtctcaaattttatgtaagttacacataaatataaaatcccaaaaacatgcacctaccaaaacaggtggagaaaagagtgttttcaacaaatgatgctggaacaactgcacatccatatgcaataaaaggaagctggacacagactttaccctcttttaaaaaaaactgacccaaaaatggaacacagacctaaatgtaaaatgcaaaactatgaaactcctagaagataacacaggagagaatctaagggaccttgagtttggcaatgactttttagatacaacaccaaagacacaatccatgaaagaaataagaagtaacctggacctcacctattagaatggccaaaacccagagcactaacaccagcatatgctgaggaggatgtggagcaacaggagctcccattcactgcaggtgggaatgcaaaatggc

SEQ ID NO: 31891 - DNA, 590 bp, Homo sapiens
gactcactatagggcgaattggagctccaccgcggtggcggccgcctcctttcacggtaaagtgagaactgtggtctgggtgtgctcagcgggcacaggcctgtggttttgctccccagtgccctgcctctcacagacctgcttgcttagacatccccccaccccaggaggctgaggctgattccaggtgaccctttgggatgcttggaagcgctcgcggtgatttaaacagaattaaccagcagaaacaatcctttgcggaggtgcaaaagggcagcgaggaaaaggctagagcacacctcagattggacccagatgactaggacctgccagccgcagcagagggattgggatacaacagagacctaagaagcatcagtacctgcccgggcggccgctctagaactagtggatcccccgggctgcaggaattccatatcaagcttatcgataccggcgacctcgagggggggcccggtgcccagcttgtgttccctctagtgagggttaattgcgcgcttggcgtaatcatggtcatagctgcttcctgtgagaaattgttatccgctcacaattccacacaacatacg

SEQ ID NO: 31892 - DNA, 474 bp, Homo sapiens
tatagggcgaatgagctccccgcggtggcggccgaggtactttcgtgctgccgccggggagtgacaaagagcatgcgggtggggcgggcactactggcatctgggtgggcactccaaggcttggcatagctatgatccagaaaaaccaggtccagctcccgttcatgcactgaaagctggaagagcagcgaggtgcccatgccttgagctgaagtctggaagtccctctccccaccccggtgggccatgtcagtggaggggcagaaagtcagagcatgggtatctgcatgctagtcacccgcggtcttacggccgctctagaactagtggatcccccgggctgcaggaattcgatatcaagcttatcgataccgtcgacctcgagggggggcccggtacccagcttttgttccctttagtgagggttaattgcgcgcttggcgtaatcatggtcatagctgtttcctgtgtgaa

SEQ ID NO: 31893 - DNA, 458 bp, Homo sapiens
tacgactactatagggcgaattggagctccaccgcggtggcggccgaggtacttccatcccctcatctgtggtagtagtgaaggctaggtgagtaagcgtgggctgttctacccaccagaagtccaggagctgttgtatacctcatttctaactcgtgaccgagtgacttgctttaactttctcgaaatcctacagagttgccaaagtctgcccctcccttctcagtcattgttaaactctggcctatagcatcatgggacctgtagcctagggtgggaccccctaaagcctctgaatgtcgctgcttaaaagctactgcaaactgagggcaaattgcaatcttctattcctttttgttgcaaggggtcttcacaggtcttttaacatctgctttccctgccaccctgcctttagggggctggccagctatccacacccctaacccaccctgtgtttt

SEQ ID NO: 31894 - DNA, 636 bp, Homo sapiens
ctactatagggcgaattggagctccaccgcggtggcggccgcccggcaggtacgcgggcgcacgcacatacacaggatttacacattcagagtagaaaatctcaacgttaagcagtgaccatttcttggtaatcacatctatgtttatttcagcaaagcaataaaaaaaatttgatgtttttgtacaagcatttcaaaatcaatcaatttgaccaggagaaaaaccattctgaccaaacaaggattctgagtctttaatttgatggtagctctgtcatgtgtgttagataattaatgttaacaacacaggtttctaggctatcaagtcttttggaacgctgaagtgatccactttttattctgttaccctccctccctctatgctgcctgtatgattttgaaatccagtcctttcttcggagcatctggcataaatctccatcagacatgaagaagaaggggcgaattctatggtctgcatgggaacagcctgacagctgcctgtttaatcccttgacaatgcaaaaatttcttcaaggagggaatctcacttaacatgcaaacagagaggcccaacacatttggtcccgttccatattagtgatattaattagaatggtataaaactgcattttt

SEQ ID NO: 31895 - DNA, 473 bp, Homo sapiens; identical to SEQ ID NO: 31841

SEQ ID NO: 31896 - DNA, 495 bp, Homo sapiens
cggtggcggccgtctcctcagaggacggaaagacgatgccggcctcacgcttcaccgccacggccgccgcctagagtagcactcgtcgacccgaacagtcaccgtctctcattcccccgcgtacctgcccgggcggccgctctagaactagtggatcccccgggctgcaggaattcgatatcaagcttatcgataccgtcgacctcgagggggggcccggtacccagcttttgttccctttagtgagggttaattgcgcgcttggcgtaatcatggtcatagctgtttcctgtgtgaaattgttatccgctcacaattccacacaacatacgagccgggagcataaagtgtaaagcctggggtgcctaatgagtgagctaactcacattaattgcgttgcgctcactgcccgctttccagtcgggaaacctgtcgtgccagctgcattaatgaatcggccaacgcgcggggagaggcggtttgcgtattgggcgc

SEQ ID NO: 31897 - DNA, 493 bp, Homo sapiens
ggagctccaccgcggtggcggccgcccgggcaggtacgtatcaattcatggctaaggtgaacagctcggaagtatgttaagctgcagaaaacaaccagcttcaatattagaatatagcactgacaatctacttagacacataagcattaatagttgcctatcactgttgatggaatgttaggcttactcttaatttttctacatatagaagacaatgtggacactttattaaaaccatcttacagataagtttccctggtctgcctgttggttgtttctcatgcttatatagctatatttcattaaaaatcaaaaatcaataacaaaggcctatgtgccagctgtagggaatgagtgagtggctaggggtgtgaggatagctcagagactatttcaaacaacaggaaaccttcaacttccctggtgctctttaaataatagaaaagttaataggaaaaaatccagtggcgcaagatttgtagaataattttga

SEQ ID NO: 31898 - DNA, 486 bp, Homo sapiens
tatagggcgaattggagctccaccgcggtggcggccgaggtacttgactcttccccttaagtttgattccatttcctaacattatccttgcctcttgcttctcagcaactagtcttctaaattagaacttacacacaatgaccagatatgaccctgcaacagagcatgcccttctgcattgagcatgcaatcatgtatcacaggtataagaccccttgaacagacatggttttggtgattctgtgtaggacttattgcttttacccaagaagatgatcaggcatcctaagtagatcaaaaagttttctggagctcttgaatgtgtataggcaagaaagattcagcaacctgttgccttatatgaggcaaactatcttctcatattttcttttgaattcaggatttcaaggttggggaaggaaggtcgggcgcggtggctcacgcctgtaatcccagcactttgggaagcccaggcgggcggatcac

SEQ ID NO: 31899 - DNA, 504 bp, Homo sapiens
gcgaatgggagctccaccgcggtggcggccgaggtactttcgtgctgccgccggggagtgacaaagagcatgcgggtggggcgggcactactggcatctgggtgggcactccaaggcttggcatagctatgatccagaaaaaccaggtccagctcccgttcatgcactgaaagctggaagagcagcgaggtgcccatgcgtcgagctgaagtctggaagtccctctccccaccccggtgggccatgtcagtggaggggcagaaagtcagagcatgggtatctgcatgctagtcacccgcggtcttacggccgctctagaactagtggatcccccgggctgcaggaattcgatatcaagcttatcgataccgtcgacctcgagggggggcccggtacccagcttttgttccctttagtgagggttaattgcgcgcttggcgtaatcatggtcatagctgtttcctgtgtgaaattgttatccgctcacaattccacacaacatac

SEQ ID NO: 31900 - DNA, 455 bp, Homo sapiens
gggcgaattggagctccaccgcggtggcggccgcccccgccagtgttctggggctgacagagatttgaattctcccaggtatgcagttcttggttcttgaggtcccgcccagtgagggttctcctagctggggcctccggccgctctagaactagtggatcccccgggctgcaggaattcgatatcaagcttatcgataccgtcgacctcgagggggggcccggtacccaacttttgttccctttagtgagggttaattgcgcgcttggcgtaatcatggtcatagctgtttcctgtgtgaaattgttatccgctcacaattccacacaacatacgagccgggagcataaagtgtaaagcctggggtgcctaatgagtgagctaactcacattaattgcgttgcgctcactgcccgctttccaatcgggaaacctgtcgtgccagctgcattaat

SEQ ID NO: 31901 - DNA, 388 bp, Homo sapiens
ctactataggtcgaatgggaactccaccgcggtggcggccgcccgggcaggtacgctggcatttattctgactgtttcaagtcagagcaaatactcctggaatgaccctctcctgtttcctgagtttgagccgatcctatttggcactgcagacagtgagaagtggatgtttgaggacagatgggaggtgcaaagtggagacaagtattggttctttcttccactatgagactagcagggcccagttctcttagctattgtctctattttgtagattaggaaatttcaagtttagagaagttgagttaactcaccgaaggtctcggggcttggtgggaagagggacggaaaattaaattcaggtctgtgtgtctccaccaccatgttc

SEQ ID NO: 31902 - DNA, 514 bp, Homo sapiens
actcactatagggcgaattggagctccaccgcggtggcggccgcccgggcaggtacgcgggagagctacaggttagatattaacagaatcttactctagagtaaaatcactagtaaaaaaaaaaagaaagaaagaaagaaagaaaaagaaaatgccaaagcatttaaataatcctatcacgtaaactgacaacaaaaaatggtatctggattcatgtagcagcatttaaaattcagttgtggccaggtgtgtggctcacccctgtaatctgaatgctttggcaggttgaggcaggaggattgcttgagcccaggagttcaagaccagcctgggcaacatagtgagaccctgtctctatttttaaaaaataaaggccaggtgcggtggctgacgcctgtaatcccagcacattgggaagccaaggtgggcagatcacgaggccaggagttcgagatcagcctgaccaacatggtgaaaccctgtctctactaaaaacacaaaaattagctgggtg

SEQ ID NO: 31903 - DNA, 444 bp, Homo sapiens
atagggcgaattggagctccaccgcggtggcggccgcccgggcaggtacccaaattaactaaccttaaatgcaagacttagcagcaggtattatccatgttgaaccacagagttgtggttataggatgatctatccaggttgaaaaagaattctggccagcagtttgaagaagtgaaaatcaagattaggcacaaaagcagagggtggtggggccacagggcggggaaggattccaatccatgagactgcagaaggggaagtgagcagcctctacccatacagactagggtctcatggatgccactggagagcattccagtctcactggatattggtagttcactaacttgtgtcagtcatgattgtgacctctgatatattgctatatttggttttcatttatacaaaagctgcgtctctccttgatcccagtgttttgttgg

SEQ ID NO: 31904 - DNA, 203 bp, Homo sapiens
tatagggcgaattggagctccaccgcggtggcggccgaggtacttttattctttaagaatatagtctttagccaggtgcagtggtgtgtgcctgtggtctcagctatttgagaggctgaggtgagaggatcacttgagttcaggagttcaagaccagcctgggcaacatagcaggtccctggctcaaaaaaaaaaaggttccc

SEQ ID NO: 31905 - DNA, 389 bp, Homo sapiens
gactactatagggcgaattggagctccaccgcggtggcggccgaggtactagataaaggaaagagcaaaacaaagtgcaggatcgagagaaaatcgattgcttgaaaaactgggtattttacttgctgcaagtcccgactgtgtcagccgatgagtttaacactatgacagcacagtcctcacctgcctgctcgctgctgtaatccccacactgttgtgtgccctatagcacctggcacacgggaagcgctcaagagatgtgtgtgaatgaaggagccacatcttgacttgcgacgcggagcagtaagctgcagttatttggtagcggtggaagaataaattctacctcctgcttgcctcgctgcagtggggatgagggagaggggact

SEQ ID NO: 31906 - DNA, 102 bp, Homo sapiens
ctactatagggcgaattggagctccaccgcggtggcggccgaggtaccgataccccacatgcaggcttcaatcctaacttttgagatgatacttgccacaaa

SEQ ID NO: 31907 - DNA, 664 bp, Homo sapiens
gactcactatagggcgaattggagctccaccgcggtggcggccgaggtacttttttttttaattttaattttagtagcctgtctttattgaatcctagttgtctttccttaatgcctcttcacatttgaaccactgtcaaccttctcagacataaattttagccactccccttccccacaaaagaatctaagaaaagatacacttgctgtctgtttttgttagtttacatattcagttgactacagcttaccgtttttcaacttctgagaaattagttcttaattttggaaaatgtagtaattcagttaatacatctctaactttttttttatggaaattttctgacataccaaaagcagaataaggccaggggcggtggctcacacctgtaatctcagcactttaggaggccaggcgaatcacgtgaggccaggagttagagaccagcctggccaacatggtaaaaccggtctctacttaaaatacaaaattagagagcatggtggctcaggcccatgatcccagctacccgggaggctgagacacgagaattgcttgaacctaggaggcagagtcttgcctggcagaacaagactcaggggaaaaaaaaagaatttagtgttcatgctaaaaagatatcctggacatattaattacatggag

SEQ ID NO: 31908 - DNA, 474 bp, Homo sapiens
gcgaattggagctccaccgcggtggcggccgcccgggcaggtacgcggggggtattaaaatgttctttcagttagggccaaagggcatttaacttcaaggtaagacccattccaggacggcagagatcatgtctgtcttgcgtatccctgtgtgaattttgcctgacatgttgcaaacactccgtatggaagtcttgaagggccttctggccaagtcagaaaacctttgggagaacagttatccccagacctcagacgctcgacggatacatgagaagctttctttgatggattcgatgtcaggatctccatgtgaacttccacttagaggtgtcatgctatggggcctcagcgtcaccacatcgtttggacgtctgaccagtttcctgactttgagagtctcttactttaaacatgagggatcagccctagaaaggaaaggaaagacacacgcaagagtctgcctctgactcc

SEQ ID NO: 31909 - DNA, 467 bp, Homo sapiens
gactcactatagggcgaattggagctccaccgcggtggcggccgcccgggcaggtaccagcgggctgtcctctaacagcgacggctgcacgctgggcacgctgggcacgctggcgggatgcacgggcctttgtcctgctgcctctgaggtagcagagtcggcacagggtggactgaggggcgtctcgcttttctgtccaccctctgagacagcagggacaggttcatttggcttctccaggtgcagcagcttgagtttgctctttggccctgatgctccagtctggttcttaatcttcttctcatagtccaggagttggcccagaaaattgaagtttggagatatagtaggtcttttttctttcacaaatctgtaagcttcatctaaagacatgtccatcctcttcatgatgtaggcgatagcgatggtggcggagcgggagatcccagctaaacagtgcactagaa

SEQ ID NO: 31910 - DNA, 467 bp, Homo sapiens
ctactatagggcgaattggagctccaccgcggtggcggccgaggtacgcgggaaagagatgaaaaacagagaagaatcttaaaatcagtcaggaggacaaatcatctttaaaagataaattaacagttgacttccccataccaacagaaggtgttagactaatagtgttaatgtcttgaaataaaatcattaccaacctagaatttcatatccaatccaaatattcctcaacataaaaggtaataaacttacctgtatattatgttaaaattataatccacgtaacaagaagaattaattcaacagactttagaacatggtgttttgactatacgttcttagcaggatatactctaaggatgaaatggaagtccaaagacctcttaaaatttattcagtggcatgattgttagtaataatattggtattttatattggaattattgtatgcatacttatgataaata

SEQ ID NO: 31911 - DNA, 537 bp, Homo sapiens
cgaattggagctccaccgcggtggcggccgaaatcagcttttaagtgagctcagcatattataaaggaatgaaagcaattagagcgtggactctaaaggtaggtgagacttgctgttccacttagaaacatagaaacataggaaactaaggactcgatggggacatcaatagtaggatggcttttaagagggctgaagtgtgtaaatatacacattaagctttgcagcaactctgtgccaaatcgaagttgttgcagacctggaattttagtttggtaaaggataactgtagttattttttaaataaaatgattcattagaattctttggttctctcatgataatttagcaagtttgtctctttcagaaagaaaagtttaagtggggataatgggtacctcggccgctctagaactagtggatccaccgggctgcaggaattcgatatcaagcttatcgataccgtcgacctcgagggggggcccggtacccagcttttgttccctttagtgagggttaattgcgcgcttggcgtaa

SEQ ID NO: 31912 - DNA, 381 bp, Homo sapiens
  misc_feature 352: n = A,T,C or G
ttggagctccaccgcggtggcggccgtccacaaatgtctgcagctacgatggaccctcagctgctggacaggaaagaggatcaagctaagaaggcccagagtgtgcaagcagagagagggtgtggacagaaaaccttgccttctccagggctagtggcgaaagctatctcaggctggctcaagtggagagaaaaaagcatgagatcaagcaatggacagctggggaagggctggcttttatttcctcagctcccaagctcagtccctggcactgggccgttgcctttgtaggtccctctgtgcccaggtcttgctatgggggttgtttcttggcattaaggtctcagttcanacgccaccgtctccaagaagccctcactg

SEQ ID NO: 31913 - DNA, 424 bp, Homo sapiens
gcggccgaggtcccttcctaactggtctccttgcctctgttcttactctatttttcacacagcagtcggagtgatttttacttattctcctgttccagtggattctcattacactaagaagtaaatccaaactttatctgcatgtcagcgaattgtttatttttattttattttatttttaaaatagagatgggatcttgctatgttgctcaggggtcttgaattcctaggctgaagcaatccacccatctcagcctttatttatttttattaaattttcctttatctgtcataatctgtttgagtgctaaaaaaataaataaaataaaaaaatttggccggacacggaggctcacgcttgtaatcccagaactttgggaggctgaggtgggcggatcacctgaggtcaggagttcgagaccag

SEQ ID NO: 31914 - DNA, 526 bp, Homo sapiens
acgactcactatagggcgaattggagctccaccgcggtggcggccgaggtacctatttactggtttatatccccattgcttcctccttcaaactctataccatggttcacaaaatcctgcattccattattcccaaattaatccatattattctttgcctcttcaaagaacatttctttaccaactcttaacagctgaaactagattttccccaagccctgggctttccttgtgccttgtgggtgatggttccttacagcacttgcccactgcctggggcagatactgcgttcatcaggactgcatttttgccagagaggagtgaaaaaagaaaaaaagagcttagggttttgacaaggacatccctgcaacaatacatgatgtacctgcccgggcggccgctctagaactagtggatcccccgggctgcaggaattcgatatcaagcttatcgataccgtcgacctcgagggggggcccggtacccagcttttgttccctttagtgagggttaattgcgcgcttg

SEQ ID NO: 31915 - DNA, 471 bp, Homo sapiens
atagggcgaattggagctccaccgcggtggcggccgcccgggcaggtacaattataactgtttttgtatattgggttattttttcagaagtaggccagtagctctaacaggagcctctttagcctgaattcatccaagtagtgcagtgttgcactagttgtccctcgggacatgctccccaatacgtaactcacttgcaggttgcaactggacacttactggtagtcagaaatagctattgcatggagcttaaaatgaacttgatcttcgtgaaagatgagtctgcagctaagagactttactgtatatcatagtgttttttttgttttgttttgtttttgtttttgtgacggagtctcactctttcacccaggctggagtgcaatggcgagatcttgactcactgcaacctccgccccctaggttcaagcaattcttctgtctcaccctcctgagtagctgggattacag

SEQ ID NO: 31916 - DNA, 455 bp, Homo sapiens
gcgaattggagctccaccgcggtggcggccgaggtacacacacctatggtgcccacaggtccagctaggaataaatgcacaaagagctccaccatctgagattaccactcaacttttaaagacaaattcttatttcatccctccaaagataaacatcacatggaaaaatgtttcacatcaattctttattatgccagtgaaggatgcctttcttcaggagatgcaacatggagaaagttttaaaggcaggcagtgaagagaaggacaagacgtctcaacccagctccttagatggagaataagtctgcccatccccacacacacatgcagtgggaatgccagccgctgcctgttcctcggtataatctcacctgtgcttcaagcctgattattaacaaccttagctcagatcatgaggccgagcctaattttccgacgttgcactccaggtcact

SEQ ID NO: 31917 - DNA, 305 bp, Homo sapiens
actactatagggcgaattggagctccaccgcggtggcggccgcccgggcaggtacccggctgtgcggtatcggggggaatacaaggacaatgccctgctggctcagctaatccaggacaagctcgatgcctataaagctgatgatccaacaatgggggagggcccagacaagggcacgctgcccaggctcctgaatcctggattcgagggctttgaacccccagcttccccctggggcctccatggaaatgacttttcaggctatgagttatgatctgctgcctatcgaaaatgaatgtatacaa

SEQ ID NO: 31918 - DNA, 479 bp, Homo sapiens
tacgactcactatagggcgaattggagctccaccgcggtggcggccgaggtacccattaaccccacttaaacttttctttctgaaagagacaaacttgctaaattatcatgagagaaccaaagaattctaatgaatcattttatttaaaaaataactacagttatcctttaccaaactaaaattccaggtctgcaacaacttcgatttggcacagagttgctgcaaagcttaatgtgtatatttacacacttcagccctcttaaaagccatcctactattgatgtccccatcgagtccttagtttcctatgtttctatgtttctaagtggaacagcaagtctcacctacctttagagtccacgctctaattgctttcattcctttataatatgctgagctcacttaaaagctggtttcggccgctctagaactagtggatcccccgggctgcaggaattcgatatcaagcttatcgata

SEQ ID NO: 31919 - DNA, 487 bp, Homo sapiens
actactatagggcgaattggagctccaccgcggtggcggccgtccacaaatgtctgcagctacgatggaccctcagctgctggacaggaaagaggatcaagctaagaaggcccagagtgtgcaagcagagagagggtgtggacagaaaaccttgccttctccagggctagtggcgaaagctatctcaggctggctcaagtggagagaaaaaagcatgagatcaagcaatggacagctggggaaggggctggctttaatttcctcagctcccaagctcagtccctggcactgggccgttgcctttgtaggtccctctgtgcccaggtcttgctatgggggtttgtttcttggcattaaggtctcagttcaaacgccaccgtctccaagaagccctcactgggtaccctatctaaagtaaccctcactcctaaggacaaacctgttttttcttcctagcatagaccactctctgaaatcaccttggtct

SEQ ID NO: 31920 - DNA, 479 bp, Homo sapiens; identical to SEQ ID NO: 31918

SEQ ID NO: 31921 - DNA, 454 bp, Homo sapiens
ggagctccaccgcggtggcggccgaggtacacagaaagggaggtgtcaacaaaagaagataagcccatacagtgcacacctcagaaagccaagccaatgcgggcagctgctgacctggggagggagaagatcctcaggccaccagtagaaaaatggaagagacaggatgacaaagacttaagagaaaaacgttgttttatttgtggaagagaagggcacattaaaaaggaatgcccacagtttaaaggctcttcaggtagcctttccagtaaatatatgactcagggaaaagcctcagcgaagaggacccagcaggaatcatgagggaaggaaaatgcagcactctaaatggccactcaggcgttcctattcactcggaaaattaggttcatttcacaggacacagcagtgtagatcaggcttcaacttaacatttaagggaaatgtcagattt

SEQ ID NO: 31922 - DNA, 567 bp, Homo sapiens
tatacgactcactatagggcgaattggagctccaccgcggtggcggccgaggtacctccccgtggagctcacacccttttagaggagatacaataaaagccaggatggggcagagcagtggggaagaaggggaggtaatgttgaaccacctgcccatggttacagaggcagcaggcctgggactcccgacgcttccctcctgccttatacctgatctaagaaggccctgctgggcacacagtagatgctcagcaaatgttcggttgaagggctggagcctcacaaaaccctactgatgcaaacaggctcagcgaggctgagtgacttgcccaagatcctaagaggtggtggaggaatcgcctttcacaaaaaagaacaagcgcttcggagccgccgcccccgcgtacctgcccgggcggccgctctagaactagtggatcccccgggctgcaggaattcgatatcaagcttatcgataccgtcgacctcgagggggggcccggtacccaacttttggttcctttagtgagggttaattgcgcgcttggcgtaatcatggtcatagct

SEQ ID NO: 31923 - DNA, 452 bp, Homo sapiens
ctactatagggcgaattggagctccaccgcggtggcggccgaaaccagcttttaagtgagctcagcatattataaaggaatgaaagcaattagagcgtggactctaaaggtaggtgagacttgctgttccacttagaaacatagaaacataggaaactaaggactcgatggggacatcaatagtaggatggcttttaagagggctgaagtgtgtaaatatacacattaagctttgcagcaactctgtgccaaatcgaagttgttgcagacctggaattttagtttggtaaaggataactgtagttattttttaaataaaatgattcattagaattctttggttctctcatgataatttagcaagtttgtctctttcagaaagaaaagtttaagtggggttaatgggtacctcggccgctctagaactagtggatcccccgggctgcaggaat

SEQ ID NO: 31924 - DNA, 89 bp, Homo sapiens
gcatcactactatagggcgaattggagctccaccgcggtggcggccgcccgggcaggtactttttttttttttttttttttttttttta

SEQ ID NO: 31925 - DNA, 483 bp, Homo sapiens
gactactatagggcgaattggagctccaccgcggtggcggccgaggtactgttttagtagcttacttgtgttttttaaagttcatttctccacccacaggatagctccatatcttccagcaccactaatgagtaagtattagggccaagctggtatctgcagagtgctgactggccaagagtctgcctgtgactcatgcgttaggctgtccagcattggggtgctggggggctgtagccataacatttgcaggatttggaaattccacctcaagctccaatcccagggtgttgattctggctaaccatgtttatgcaaagcaatccaagcactttgactcactttgggaatctggcattcttgggcttttgatattgagacagtggaacacttttgtatcagtttaggtcctgccaataattgctatccatttaagcacttgattttttacatatttaccagcaatttccaaggctttaatgg

SEQ ID NO: 31926 - DNA, 381 bp, Homo sapiens
tatagggcgaattggagctccaccgcggtggcggccgaggtacctaacaaagggcactgtccaaaccgagctggtgccacacaactccctcaggtgtgcaccacgggcagttcacccacagccccttgcatgcgtgtggacatgcccacgtgacgtgccaacgtgcccatgtgccgattccagacaccggcctgccggcggcccccccacctacaccccgggccactgtttccgtcacgctaatcctatcacctggggatgaagagatcatacagtgtgcaccccttgaaaccagcttcttcactcgccatcatgctgccgagatcacccagggtgtggcagggacccagcgttcatgcctgttgctgaggaggacaccga

SEQ ID NO: 31927 - DNA, 538 bp, Homo sapiens
ctcactatagggcgaattggagctccaccgcggtggcggccgcccgggcaggtacacaaaaccaggactgtctgagtgtaaagcctgccgtctttcactaagttacactggggctgagtgattgccctgccactcaggtgtctttgctgtggaggaattaacgggtctgaagactgaagctgggaagaagcagcagggaagactgatctgagctttcagggaaaagagtgaagttggactttaaggtttttatattgtcaagacaatttacaaacacaggaagagaaagaatgacaaagaggagaactcctagctggaaagaagagaaaaaaaaattggatgcaagtgactgcatttatatatcttgagaatttaaataatcagcaacagttagaggtgcaaatgcaacagaagctaaaagaaacttagtatctggaatagttgacaagataaaaccccaaaatctgagagctgcaatcaaagagccatcttctctactaaattgaattagctcagttatatagcgcttctcaacaat

SEQ ID NO: 31928 - DNA, 461 bp, Homo sapiens
agggcgaattggagctccaccgcggtggcggccgcccgggcaggtacatatgcattgagcacctgtgtgccagtcagccgagctatcacattgcacaattctaagaagcaccattcatgtctcatcatatttctatgctctgggagttgcctttcacatagaatatgtgtgattgttatccctagaattgtgcagtgaggcaattggctaggtgctgtgctgctttttctttctttcttttttttttaagagacggagtcttgctgtgttgcccagtctggagtgcagtggtggcatgatcttgcctcactgtaacctctgcctcctgggttcaagctgttctcatgccccattctcccttgtagctgggattacaggcttacaccatcgcacttggcaaatttgtgtatttttagtagagacaggaattcaagacagccaggctggtcttgaactcctga

SEQ ID NO: 31929 - DNA, 437 bp, Homo sapiens
gctccaccccggtggcggccgacgtacatttccctgctgagggatttccaggacaagtgtctccacactctacaaaggcagtcaactacatgacacattccgcttctgcctggtcaccaacttgacgatggactccgtgttggtcactgtcaaggcattgatctcctgcaatttggaccccaacctggtggagcaagtctttctagataagaccctgaatgcctcattccattggctgggctccacctaccagttggtggacatccatgtgacagaaatggagccatcagtttatcaaccaacaagcagctccagcacccagcacttctacctgaatttcaccatcaccaacctaccatattcccaggacaaagcccagccaggcaccaccaattaccagaggaacaaagggaatattgaggatgctctcaaccaac

SEQ ID NO: 31930 - DNA, 452 bp, Homo sapiens
actactatagggcgaattggagctccaccgcggtggcggccgcccgggctggtaccgcaaacccagtcaatgaagggagcatgctgggaaaatcagagtgatgaattgtgagagcagcagatgaatcaaatactggtgacctacctctgtgtttccaggtgtggatatggtcaaaagccaagttcatcaataggaaattcctaatgcaggaactttaccagcgctttctagatggagatcacggccctgtggctcgagatgacgaccctttctgggatcctgtcgaggtcgtccgcttgggctcagctcacatctggctccagtcgctggcctactgcatgaagctgacactggagctgggcgactgggatgttcctttctttgactgtgtctctccccattacagaaggctgcaccgagctgagctgctctcagctgggcctcatggtcac

SEQ ID NO: 31931 - DNA, 440 bp, Homo sapiens
tacgactcactatagggcgaattggagctccaccgcggtggcggccgcccgggcaggtacccaaattaactaaccttaaatgcaagacttagcagcaggtattatccatgttgaaccacagagttgtggttataggatgatctatccaggttgaaaaagaattctggccagcagtttgaagaagtgaaaatcaagattaggcacagaggcagagggtgggtggggccacagggcggggaaggattccaatccatgagactgcagaaggggaagtgagcagcctctacccatacagactagggtctcatggatgccactggagagcattccagtctcactggatattggtagttcactaacttgtgtcagtcatgattgtgacctctgatatattgctatatttggtttttatttatacaaaagctgcgtctctccttgat

SEQ ID NO: 31932 - DNA, 447 bp, Homo sapiens
acgactcactatagggcgaattggagctccaccgcggtggcggccgaggtactatggcttatttctgacagaatgaaacttttgtatcaaaggagcttcagctaaagttgaatgtttttctttctcagtttttatggccttattaaacatgtttagctagccaaagcttcctcctcctcaccatgctcagtgttagcatggtggtgaggctataaagaggcaccacaggaaggagcctgcacttcccccatgggatttaaaaaagaaccaatttgggccatgcttggtgcatctagcataatcttgggacaaatccacatgattcaggtcaaagttttggagttaattctcccattattatttgctcctttccaaagccttaatgtgaaattcagtcagggtctggccatggtggcaggtgtccctacactctttcattcagagaag

SEQ ID NO: 31933 - DNA, 388 bp, Homo sapiens
agggcgaattggagctccacgcggtggcggccgcccgggcaggtacctggggtctcagggttgctctgggcctgatcatccactcagatctgtaaggaggatttgcaggatccatttagaaagatcctcccttacttccacaagcatggcctttggctcttaaatacctgtgctggggttttgtaattatagaaacaacaggaaccaaaactcattaatgttgagctacaaaccagagggaagcttctttctcaaaacagggctcaggcctagaaaaatctagttttctgaaatcgctagccagcaacagcactgagatggccatcccagaaacaaggccaacacagaagcacccataaaggctgctggaggttgggacaaagagatc

SEQ ID NO: 31934 - DNA, 403 bp, Homo sapiens
gcgtatacgactcactatagggcgaattggagctccaccgcggtggcggccgggcaaaggagaaagaagatccaggccctcatggtgctgggaaccctcagtggcaggcaggcaggcggcaggcagagcgcgctctccgggcggtctgaaggaccgcgggaatgtccccgcgtacctcggccgctctagaactagtggatcccccgggctgcaggaattcgatatcaagcttatcgataccgtcgacctcgagggggggcccggtacccagcttttgttccctttagtgagggttaattgcgcgcttggcgtaatcatggtcatagctgtttcctgtgtgaaattgttatccgctcacaattccacacaacatacgagccgggagcataaagtgtaaagcctg

SEQ ID NO: 31935 - DNA, 285 bp, Homo sapiens
ctcactatagggcgaattggagctccaccgcggtggcggccgaggtacctgcggtagtagcctggctttgctctgacggcgatctcgcggcccgagagccttttatagacagctccttcagcgtctctgtttccaaaccgcaaccgagaagagacagacggagaaaagagagttacttttccaggttgcttttcccggggatgtgaaggatacagaaatgactgtgaatcaacccatatcatcgaggagctgataatctagtggaagagttagacgtgtgcatac

SEQ ID NO: 31936 - DNA, 389 bp, Homo sapiens
gactcactatagggcgaattggagctccaccgcggtggcggccgcccgggcaggtacgcgggggccattctcctgcctcagcctcctgagtagctgggactacaggtgcccgccaccatgcctggctaattttttatattttttagtagagacagtgtttcaccgtgttagtcaggatggtctcgatcttctgacatcgtgatccacccgcctcggcctcccaaagtgctaggattacaggcgtgagtcactgcactcagtcaggttttcaggtgctggttccatggctcttcctgagccgaaaataaggaaactccatagaccttgtccactggaactcgttcccatctaccctccactctatccagggtgatggatctctgcagtaa

SEQ ID NO: 31937 - DNA, 379 bp, Homo sapiens
ggcgaattggagctccaccgcggtggcggcaacatgatgaaaccccgtatctactaaaaatacaaacattagctgggtgtggtggcatgtggctgtaatcccagctactcgggaggctgaggcaggacaatcgcttgaacccgggaggcagaggttgcagtgagccgagatggcaactactggcacctgcaaccctgagcaacagagtgaaactccatctcaaaaaaaaaaaaaattctaagtgtttatgcacctactaacaaatatctgaaacaaatcctggtataacccgtaaataaacaattcttatggtatagcacaaaatttgcaatttattagcccagcgaatcttcaacaccttttctcattaacttaatgg

SEQ ID NO: 31938 - DNA, 458 bp, Homo sapiens
ctactatagggcgaattggagctccaccgcggtggcggccgcccgggcaggtacgacctgtctcaggaacggtgccatgtgtgtgactaggactgcaaagcagcttgtgttcgtgggggaaatgacaggcacaggaaggaaaagctgagaacactgaaacggttcctaatcgtgcagtggggaaaggagggcgactgccgcgcagagtggcacgttggctggaagaggggattgatcagcagtgctggcaggaacagcataggcttgtcgtgtgatctaacagaagaggcagcaatctggaggcgccccagatcagagaagagacatcaagccccaggagaaatggatttcctttctccccacccatcagctgggtaggaagcccgaaggagcctttcatggaactatgggaagggctcctttgacgcagaggggatgaactggaagcaagatgctgg

SEQ ID NO: 31939 - DNA, 465 bp, Homo sapiens
ctactatagggcgaattggagctccaccgcggtggcggccgacgtgcccggggcgggacaggccaggcctcacaaccaagagccccgggaagagctgcatgcacacggctggagagaggctctgcacccgagcacagtctgctgcgactcctcatagacccggaaaactgattagaaggcagaggtgagtttctgagggtggctgtgcacaaaattcagagtcaggaatcagcatctttcaaattcaagcacttccagttaggagagacaatgaagaaagaaaagggaccattcccaacagcaacaaaaattgtaaatttctaggagcaaacggcgggcacatctatacctgttatagagggtctgaggcctgactgaggaccacagaccatcaacaagcccggtctgtcctgggcgtaacgaggtgccgtcccttgtgctggccggctgccacagcggggccaa

SEQ ID NO: 31940 - DNA, 432 bp, Homo sapiens
cgactcactatagggcgaattggagctccaccgcggtggcggccgcccgggcaggtacataattggagatgaataatgattctcttagataaagaaacttgtccacccacctctaccacaaatgaaaatcctttttcttatagaactttttggccaagcaaaggctcatgatatctgtaatatctgtgatagagaagcagtgaggatagttcttattccacagtccagcatgaaattctagaatgatgattggccttttctgttcactttcactctcttggagggaaggaggaatgtgaataattgaaaaacgagttacaactcaaacaaaacacatatgaatttggctttgctctgtggtgaatcccacaactcgatagtgccctccactcttttctgtctatccttaactcaaacctctgtctagttgac

SEQ ID NO: 31941 - DNA, 389 bp, Homo sapiens
ctactatagggcgaattggagctccaccgcggtggcggccgaggtactagataaaggaaagagcaaaacaaagtgcaggatcgagagaaaatcgattgcttgaaaaactgggtattttacttgctgcaagtcccgactgtgtcagctgatgagtttaacactatgacagcacagtcctcacctgcctgctcgctgctgtaatccccacactgttgtgtgccctatagtacctggcacacgggaagcgctcaagagatgtgtgtgaatgaaggagccacatcttgacttgcgacgcggagcagtaagctgcagttatttggtagcggtggaagaataaattctacctcctgcttgcctcgctgcagtggggatgagggagaggggactca

SEQ ID NO: 31942 - DNA, 468 bp, Homo sapiens
tacgactcactatagggcgaattggagctccaccgcggtggcggccgcccgggcaggtactttgcctcccaaattcacttttgtgcaaaacatgcacataacacacaaatatgaatatatgaagtattaatttgctcatcttctggctcctttcccgcaaaagccctttttatttaggaaaccacatattttactcattcctttctgaccataccgttagctagaagcttagaacagcttctagtcacaccttcaaaccttcgggtcacactgtcaaacctcagtggtttatcatttcacagcagcacactgctcttcctgccccagactaaaatgaaggatgtctggaaaaacccctagcatgcagggaagatggtctgaatcacttcactgggaggactaacctcacccatacaagttgccatctccttttttatttgttctaaagcctaacttttatcccactgc

SEQ ID NO: 31943 - DNA, 458 bp, Homo sapiens
cactactatagggcgaattggagctccaccgcggtggcggccgaggtactgttttagtagcttacttgtgttttttaaagttcatttctccacccacaggatagctccatatcttccagcaccactaatgagtaagtattagggccaagctggtatctgcagagtgctgactggccaagagtctgcctgtgactcatgccttaggctgtccagcattggggtgctggggggctgtagccataacatttgcaggatttggaaattccacctcaagctccaatcccagggtgttgattctggctaaccatgtttatgcaaagcaatccaagcactttgactcactttgggaatctggcattcttgggcttttgatattgagacagtggaacacttttgtatcagtttaggtcctgccaataattgctatccatttaagcacttgattttttacatattta

SEQ ID NO: 31944 - DNA, 397 bp, Homo sapiens
gtatacgactcactatagggcgaattggagctccaccgcggtggcggccgcccgggcaggtacgcggggagcggcggcggctccgaagcgcttgttcttttttgtgaaaggcgattcctccaccacctcttaggatcttgggcaagtcactcagcctcgctgagcctgtttgcatcagtagggttttgtgaggctccagcccttcaacagaacatttgctgagcatctactgtgtgcccagcagggccttcttagatcaggtataaggcaggagggaagcgtcgggagtcccaggcctgctgcctctgtaaccatgggcaggtggttcaacattacctccccttcttccccactgctctgccccatcctggcttttattgtatctcctctaaaaggg

SEQ ID NO: 31945 - DNA, 393 bp, Homo sapiens
tatagggcgaattggagctccaccgcggtggcggccgaaaccagcttttaagtgagctcagcatattataaaggaatgaaagcaattagagcgtggactctaaaggtaggtgagacttgctgttccacttagaaacatagaaacataggaaactaaggactcgatggggacatcaatagtaggatggcttttaagagggctgaagtgtgtaaatatacacattaagctttgcagcaactctgtgccaaatcgaagttgttgcagacctggaattttagtttggtaaaggataactgtagttattttttaaataaaatgattcattagaattctttggttctctcatgataatttagcaagtttgtctctttcagaaagaaaagtttaagtggg

SEQ ID NO: 31946 - DNA, 585 bp, Homo sapiens
gactactatagggcgaattggagctccaccgcggtggcggccgaggtacagcctttctcacatggtagtctaagggctcctgtaatccaagcactttgggaggccaaggcgggtggaccacttgagctcaggagttcaagaccagcctgggtaacatagtgagaccccttctctgttggcagtaattccctctacacagcaggtgctctggcagctctctggagacgaggaaggagaacttaggaagatggtcttggcttacacaccaccttgctgccagggctcttgcaaagacaggcttcaccaaccaccagcccacagttggcccgtccccaggggctgcacactagccttatggaaagttcctcgagttccctgtgcgtcagcttctgcctggacgctggctactgttgtcggctctgtgaacaggcacacagggtttcctccgggtgtgggatggggctgcccgggatgggggttggggatgctggagcagtgggagatgtcccctgcctatctcccccgtacctgcccgggcggccgctctagaactagtggatcccccgggctgcaagaattcgatat

SEQ ID NO: 31947 - DNA, 458 bp, Homo sapiens
actactatagggcgaattggagctccaccgcggtggcggccgcgctctccgatgcccagccctcctggaaccacctcgcctgtgacgtaggtggagcgcgcactgcctccgggcccgtctttctcaattgggaccggaaaacgttgtcgctcatcctatgacgcgaaagtaaccgagactatcaggatccggagacggaaatgtccgaaggccgcagtacctcggccgctctagaactagtggatcccccgggctgcaggaattcgatatcaagcttatcgataccgtcgacctcgagggggggcccggtacccagcttttgttccctttagtgagggttaattgcgcgcttggcgtaatcatggtcatagctgtttcctgtgtgaaattgttatccgctcacaattccacacaacatacgagccgggagcataaagtggaaagcctggggtgcctaa

SEQ ID NO: 31948 - DNA, 397 bp, Homo sapiens
gactcactatagggcgaattggagctccaccgcggtggcggccgaggtactgggattacaggcgtgagccaccgttcccggcctaagcgtgttttaaaattatatactgaagcccctatggagacatagaatatggccattgtcacagcaagctcccaaatgcacctgcccagtcacatcttgcctttactcccctggaggctaccactcttctgatattattattttttcactatagactaatttcaactgttctgggacttcacgcaagcagaatcataaactctcagaaaactgaactctcctctctggcttcttccactcagctcaaagtttctgagattcacccgtgctgctgtgtgtgtccacagtccgttcattttcactgcggggcagg

SEQ ID NO: 31949 - DNA, 478 bp, Homo sapiens
ctactatagggcgaattggagctccaccgcggtggcggccgaggtacctgccaccacacccagctaatttttgtatgtttagtagagacagggtttcaccatgttggccaggctggtcttgagctcctgacctcaagtgatccacctgcctccgcctcccaaagtgctgggattacaggtgtgagccaccaaggagtaattattattaaaaggtaaccagcagcagtcagtttatagataaaggacctatactcattctcagcaccttgcccaaagtaggcattcaaactcaagtgtagccaaggtctgcactagatactaggaaacaacaaacgtgactgtacctgcccgggcggccgctctagaactagtggatcccccgggctgcaggaattcgatatcaagcttatcgataccggcgacctcgagggggggcccggtacccagcttgtgttccctttagtgagggttaattgcg

SEQ ID NO: 31950 - DNA, 461 bp, Homo sapiens
atacactactatagggcgaattggagctccaccgcggtggcggccggtcgcctacctgccttccacttccccggccgcagagcagttcgctgccggctcggttcgccgccaacctcacctccccgcgtacccgcccgggcggccgctctagaactagtggatcccccgggctgcaggaattcgatatcaagcttatcgataccgtcgacctcgagggggggcccggtacccagcttttgttccctttagtgagggttaattgcgcgcttggcgtaatcatggtcatagctgtttcctgtgtgaaattgttatccgctcacaattccacacaacatacgagccgggagcataaagtgtaaagcctggggtgcctaatgagtgagctaactcacattaattgcgttgcgctcactgcccgctttccagtcgggaaacctgtcgtgccagctgcattaatgaat

SEQ ID NO: 31951 - DNA, 446 bp, Homo sapiens
ctactatagggcgaattggagctccaccgcggtggcggccgaggtacccattaaccccacttaaacttttctttctgaaagagacaaacttgctaaattatcatgagagaaccaaagaattctaatgaatcattttatttaaaaaataactacagttatcctttaccaaactaaaattccaggtctgcaacaacttcgatttggcacagagttgctgcaaagcttaatgtgtatatttacacacttcagccctcttaaaagccatcctactattgatgtccccatcgagtccttagtttcctatgtttctatgtttctaagtggaacagcaagtctcacctacctttagagtccacgctctaattgctttcattcctttataatatgctgagctcacttaaaagctggtttcggccgctctagaactagtggatcccccgggctgg

SEQ ID NO: 31952 - DNA, 395 bp, Homo sapiens
ctactatagggcgaattggagctccaccgcggtggcggccgcccgggcaggtactgtattcttcactgttacacacttagagttaaagacagtttcattgaagagtgttgttgatgagggagtaaaaaatatttattgaatttcaacctgtgactacacaactttaatctgtatgatgaaatgggaagtatgtataaaacacttctgctgtgaactttgtttttttttcttgatattaacatgggtgaagacaaaacaaggatttatttgcctttgcgggccttgattttcctaagatggaactccaactctttggcctttagcacatagccatctgctcggccacactgtacaggccttgaagcgattcacgcaagaagcttgccctgctggaa

SEQ ID NO: 31953 - DNA, 447 bp, Homo sapiens
actactatagggcgaattggagctccaccgcggtggcggccgcccgggcaggtacatattgctatgttggatgatttggagcatgcagaggcagatacagtagtagaatcagctttctgcctccatcttttactccgctccctgtcgctctttaactcagcagtttttctctctcagtctcccaacttgtgtgagtgttttatattctacataaattgagggtggagggcaacttctggttgtgttgaatgaggagattggcagaattgacaaaagcaaaatgaaacaatctcagcattctggaaaaactgagcaggggcatacaacaatctgagaagtatttatgcctgtaactgctgaatttcaggtgagaacagtgagactgtatggcatttggcctggagctattcctatgccctctcccatctgtttggtaaagaggttctg

SEQ ID NO: 31954 - DNA, 692 bp, Homo sapiens
gcgtatacgactcactatagggcgaattggagctccaccgcggtggcggccgaggtacgcggggttcgagagagaggagaggcccagggcagacactctaggagaaaaacttgagtggtataagtggagttttaatttttattctgtgaatgtagtgaataatacatgcaaattagaaacgtgaaagtaaaatggaagtaaaactttccatttggaagcctgttggatgttgagcaggtctgccaggagttagaagaccattccggaagagctgactccagcctgtccatgcacggctacaatgtttaggattgggaggagacagctctggaagcagagcgtcactcgagttttaacgcaaagactgaagggagaggaggaagccaagcgggctcttttggatgcgaggcataactacttatttgcaattgtggcttcctgtttggacctgaacaaaaccgaagtggaggatgccattcttgaagggaatcagattgaaagaattgatcaactttttgctgttggaggtctccgacacctcatgttttactatcaagatgtggaggaagcagaaacaggacaacttggctctctaggaggggtaaatcttgtttctggaaagattaaaaaacctaaggtgttcgtgaccgagggaaacgatgtggctcttactggggtatgtgtgttcttca

SEQ ID NO: 31955 - DNA, 394 bp, Homo sapiens
gactcactatagggcgaattggagctccaccgcggtggcggccgaggtacccaaattaactaaccttaaatgcaagacttagcagcaggtattatccatgttgaaccacagagttgtggttataggatgatctatccaggttgaaaaagaattctggccagcagtttgaagaagtgaaaatcaagattaggcacagaggcagagggtggtggggccacagggcggggaaggattccaatccatgagactgcagaaggggaagtgagcagcctctacccatacagactagggtctcatggatgccactggagagcattccagtctcactggatattggtagttcactaacttgtgtcagtcatgattgtgacctctgatatattgctatatttgg

SEQ ID NO: 31956 - DNA, 437 bp, Homo sapiens
gcgaattggagctccaccgcggtggcggccgaggtactcaggcttgcaacataatggccatttttccccctttggttcctggtgctaattaaacacagcacaacccaatactctaaaagtgatttcaaatataagggaggaaggctattagaactgggcaagcctcagggactttagtctgatgcttccgttttgcaaattgaagcccagagaggtaaagtgaccagcccaaagtcactcagccaactcatggcagaacaggactatcatccactcccaatccagtgctctttcttttcacttcacagtgaatccccaactcatttgtcattcacaaaatcatttcacagaaagagtatgggtcacagctgcaaggataagagatctctgttattaaatacacagcacatcatcactctcacatttcagaaactgta

SEQ ID NO: 31957 - DNA, 428 bp, Homo sapiens
ctcactatagggcgaattggagctccaccgcggtggcggccgcccgggcaggtactaggtaacattgtttcgactatgtgtgttgtattaataatatgtatctcatgttatccagactggtgactggacatggttgaaagagttttatcaaagactcattgatcagaagtggcagaggaagaaaaagagcaaagagcactggtatcaaaaggcaattctttccaagtttttatattacagtatcaatggtgatggagccgctcagcctgtctcatccaccgcagaacagcaggaatcgtccagttcagatcagacaaatgattcggaaggggcttcatggcctgctcccttcgaaatgccttctttagtttctgaagatcccagtgctttcagtcaggggaagtgagcctcttgaacccttatacata

SEQ ID NO: 31958 - DNA, 317 bp, Homo sapiens
atacgactactatagggcgaattggagctccaccgcggtggcggccgaaaccagcttttaagtgagctcagcatattataaaggaatgaaagcaattagagcgtggactctaaaggtaggtgagacttgctgttccacttagaaacatagaaacataggaaactaaggactcgatggggacatcaatagtaggatggcttttaagagggctgaagtgtgtaaatatacacattaagctttgcagcaactctgtgccaaatcgaagttgttgcagacctggaattttagtttggtaaaggataactgttgttattttt

SEQ ID NO: 31959 - DNA, 610 bp, Homo sapiens; identical to SEQ ID NO: 31869

SEQ ID NO: 31960 - DNA, 458 bp, Homo sapiens; identical to SEQ ID NO: 31947

SEQ ID NO: 31961 - DNA, 207 bp, Homo sapiens
gtatacgactcactatagggcgaattggagctccaccgcggtggcggccgcccgggcaggtacgcggggcattttgtagagaaacaagcggagttaaccgaagagggggtcgaggagagccggagtcggggacccaggagtttcctgtgtccagcgctgccggagccgcctgaggtgccatgtttcagaacagagtaagacccctgg

SEQ ID NO: 31962 - DNA, 317 bp, Homo sapiens
cgcgtatacgactatatagggcgaattggagctccaccgcggtggcggccgaggtacgcgggatgttatttattacttctgataaataggcttgcttcatctgaatgcaaagtaatatataacctggaatttttaaagttttttttgtttttggcacgagagtatcacaggaaattcaaaggtttaactgcgtaagaaacaactgcaaaacccgtggctaaaaacaattaaagaattattaggttaatgatgtggggttggaaaatttttctgggaatctgcttggaccttttgcctttgctgcttgttggcctttg

SEQ ID NO: 31963 - DNA, 402 bp, Homo sapiens
gactcactatagggcgaattggagctccaccgcggtggcggccggccggggacctcccagtctgcggccatgaacgcgagcagcgagggcgagagcttcgcgggctcggtgcaaattccaggtggcacaacggtgctggtggagctgactcccgacatccatatctgcggcatctgcaagcagcagtttaacaacctggatgcctttgtagctcacaagcaaagtggctgccagctgacaggcacatccgcagcagcccccagcacggtccagtttgtatcggaggaaacagtgcctgccacccagactcagaccaccaccagaaccatcacctcggagacccagacaatcacagatggagcctcactctgttgcagtgggccgagattgtgtcactgcact

SEQ ID NO: 31964 - DNA, 353 bp, Homo sapiens
gcgaattgcaactccaccgtggtggcgggcggcggacgaggtacatatgtccagtagacctactggatatgcaggcctgcagctcaggggagagctgggttaagaaccggcaaggcagtaatcatctgcatttagatggcgagtaaagccatgacaggggctgaaatggcccagcaagaataaatcaaaccatgagaaacacatacatttaagactaaggagatgtggtcaggcgcggtggctcacacctgtaatcccagcactttgggaggccgaggcgggtggatcacttgaggtcagtagtttgagaccagcctgggcaacctagtgaaatgccgtctctgctaaaaata

SEQ ID NO: 31965 - DNA, 486 bp, Homo sapiens
tatacactactatagggcgaattggagctccaccgcggtggcggccgcccgggctggtacaatcacgcagagtcagagcaggagtatgaggaagagcaagaacctcccaaagttgaaagcaaaccaaaggtcccccttaaaagtgccccaccacccatgaacttcactgatttactcaggctggctgagaaaaagcagtttgaaccagtggaaatcaaggtagtgaagaaatcagaagagcgacctatgaccgcagaagaacttagggagcgagaattccttgaacgaaagcataggagaaaaaaacttgagacagatggaaaactacctccaactgtgtccaaaaaggcaccctctcagaaagaaagtgtgggcacaaaacttagcaaaggttctggagacaggcatccttcttccaaaggaatgccccttcctcatgctgagaagaaatcaagacccagcatggccaatgagaaacacctcgct

SEQ ID NO: 31966 - DNA, 530 bp, Homo sapiens
  misc_feature 36, 37, 38, 42: n = A,T,C or G
agctccaccgcggtggcggccgcccggcaggtactnnntaanaaatgttcattcttgttgtaatgaacaaatatttatttatcttttataacaagtaaggcaatgttgcttaaaggaagacaaacaaacataaaagattccgttgacaatgcattttttcatctgtcggcaatgcttttgtcataatggagatgtgacagcaaactttccaggacattcagtcttcggcggcagcacttaaggcagatgactggccgctcagattctctatcttgtttcaggacagtggaaaagcttatagatgaggccaaagcaccaggtaggtggaaggttcttgtatcggttcgaaccccgacagcgcgccaacagacaacacgagggcattggggagcaacatgctgttttaatgagcgcctgggtgcaggcgtgctgaggctgaaaatggcatcagcccccgcgtacctcggccgctctagaactagtggatcccccgggctgcaggaattcgatatcaagcttatcgataccgt

SEQ ID NO: 31967 - DNA, 373 bp, Homo sapiens
gactcactatagggcgaattggagctccaccgcggtggcggccgcccgggcaggtacttttttttttttttttttttttttttttgaggaaatatttgcttttaaacatttgattttcatcaatctttggatgatttgactttattgtcaatatctagtaaatttgccaaaatattttttttattccttgctccttttatccaactaaaaactgggcaggtagaattttctgttttcctaaacaggaaggaggcaaagctggtttcaccttgtcgtctaactgtaagcacataaaggaaatattggtccaaaatattgcttgagcaaagttctataaattcattagactcaagaaattaattcaagaaactag

SEQ ID NO: 31968 - DNA, 318 bp, Homo sapiens
atacgactcactatagggcgaattggagctccaccgcggtggcggccgaggtacctgaacaaatcccatcaaggacagattctcagtcttgaagaggcagcacggtaaaggggaaagatcatgagttttggggccaggttcccttggatattgtggggtccccacacttctggatgatgttggataactctttgagaacttaagtctaaaaattttgtaaattggaaatactttatttttcagagttgtcataaacactaaatgatttgacttattatcaacctaattcctactggctcattgaactcagctcagctg

SEQ ID NO: 31969 - DNA, 468 bp, Homo sapiens
acgactcactatagggcgaattggagctccaccgcggtggcggccgacgtcggatgacatgttaccatgacacaaaacgacaatgaccacggcaccacaccaagaatcatctacctctattacaaccagacatttgcactcaaataaggaggtgctgccgtatacttatccgttgctggaggcagcatgaatgggaaccagacacagcttggaaagcaatcgggtaacagagcgccaaccctgtacctgcccgggcggccgctctagaactagtggatcccccgggctgcaggaattcgatatcaagcttatcgataccgtcgacctcgagggggggcccggtacccagcttttgttccctttagtgagggttaattgcgcgcttggcgtaatcatggtcatagctgtttcctgtgtgaaattgttatccgctcacaattccacacaacatacgagccgggagcataa

SEQ ID NO: 31970 - DNA, 192 bp, Homo sapiens
atagggcgaattggagctccaccgcggtggcggccgacgtcggatgacatgttaccatgacacaaaacgacaatgaccacggcaccacaccaagaatcatctacctctattacaaccagacatttgcactcaaataaggaggtgctgccgtatacttatccgttgctggaggcagcatgaatgggaaccaga

SEQ ID NO: 31971 - DNA, 455 bp, Homo sapiens
gactcactatagggcgaattggagctccaccgcggtggcggccgaaaccagcttttaagtgagctcagcatattataaaggaatgaaagcaattagagcgtggactctaaaggtaggtgagacttgctgttccacttagaaacatagaaacataggaaactaaggactcgatggggacatcaatagtaggatggcttttaagagggctgaagtgtgtaaatatacacattaagctttgcagcaactctgtgccaaatcgaagttgttgcaggcctggaattttagtttggtaaaggataactgtagttattttttaaataaaatgattcattagaattctttggttctctcatgataatttagcaagtttgtctctttcagaaagaaaagtttaagtggggttaatgggtacctcggccgctctagaactagtggatcccccgggctgcaggaat

SEQ ID NO: 31972 - DNA, 121 bp, Homo sapiens
  misc_feature 63, 65, 67, 81, 103, 104: n = A,T,C or G
actacttagggcgaatgagctccacgggtggcggcgagtacagactggggttgttaacatagntntnccattggggtttgnccccttgcagccccttcatggnntgggggtgccctggttt

SEQ ID NO: 31973 - DNA, 453 bp, Homo sapiens
gcgaattggagctccaccgcggtggcggccgaaaccagcttttaagtgagctcagcatattataaaggaatgaaagcaattagagcgtggactctaaaggtaggtgagacttgctgttccacttagaaacatagaaacataggaaactaaggactcgatggggacatcaatagtaggatggcttttaagagggctgaagtgtgtaaatatacacattaagctttgcagcaactctgtgccaaatcgaagttgttgcagacctggaattttagtttggtaaaggataactgtagttattttttaaataaaatgattcattagaattctttggttctctcatgataatttagcaagtttgtctctttcagaaagaaaagtttaagtggggttaatgggtacctcggccgttctagaactagtggatcccccgggctgcaggaattcgatattcaa

SEQ ID NO: 31974 - DNA, 405 bp, Homo sapiens
cgcgcgtaatacgactcactatagggcgaattggagctccaccgcggtggcggccgcccgggcaggtacgtctgacacagacaataaaaactgcacaagccagaatgcaaaacttcagtgagtggcggaaggaacatttctgcatttgacaagaaacataagcttttttttttctttttttaaatggcggaacaaaaggttaaaaaacagaaaagcaacaagaacaaagcagacccttacatttgacaaagcgcacttcacttggctccatgatctatttcttagaaagactaaacaaaagtcaagtcctacggtgtcgcgaggggtcagagggtttcaccctgtaacgtccggcccttttggtcccccttggggcagcatccctttcccaggtgtgtgctggac

SEQ ID NO: 31975 - DNA, 368 bp, Homo sapiens
tatagggcgaattggagctccaccgcggtggcggccgaggtactagataaaggaaagagcaaaacaaagtgcaggatcgagagaaaatcgattgcttgaaaaactgggtattttacttgctgcaagtcccgactgtgtcagctgatgagtttaacactatgacagcacagtcctcacctgcctgctcgctgctgtaatccccacactggttgtgtgccctatagcacctggcacacgggaagcgctcaagagatgtgtgtgaatgaaggagccacatcttgacttgcgacgcggagcagtaagctgcagttatttggtagcggtggaagaataaattctacctcctgcttgcctcgctgcagtgggga

SEQ ID NO: 31976 - DNA, 633 bp, Homo sapiens
acgactcactatagggcgaattggagctccaccgcggtggcggccgcccgggcaggtactgcatcagctagaataatggagcatatatagcatcacaaagcgtgattgcaacacagcatctaaagatgaggctcaaggatgtgataccgtgtctaccacagatgaatgagtagtgcccatgacagcaaaataacatacctgggaagtccagactaatatctgataaaggatactgctgtcattactaagcatattgaatttggctgaacgctgacatatgagtggaaaacgaccatgaaatgtcatccaccaatcctggatctggggagctctggaggtggagagagaacttttaagatgcattaatgttatgtaagcaacatacgatggtatctggaacttaacaggagtccataattgctgccagaattattagcatagaattcggttttaaacattgactaaattgaatgggcgaggtgggggaggcatggcgccagttaaatagccaggagaggctggactggggacagaaaagtgtgcttgactgcacaagaaatcagagataatggtacctcggccgctctagaactagtggaacccccgggctgcaggaattcgatatcaagctta

SEQ ID NO: 31977 - DNA, 388 bp, Homo sapiens; identical to SEQ ID NO: 31933

SEQ ID NO: 31978 - DNA, 185 bp, Homo sapiens
atactactcactatagggcgaattggagctccaccgcggtggcggccgcccgggcaggtacataattggagatgaataatgattctcttagataaagaaacttgtccacccacctctaccacaaatgaaaatcctttttcttataggactttttggccaagcaaaggctcatgatatctgtaata

SEQ ID NO: 31979 - DNA, 449 bp, Homo sapiens
ggagctccaccgcggtggcggccgaggtacaccattaaccccacttaaacttttctttctgaaagagacaaacttgctaaattatcatgagagaaccaaagaattctaatgaatcattttatttaaaaaataactacagttatcctttaccaaactaaaattccaggtctgcaacaactttgatttgggacagagttgctgcaaagcttaatgtgtatatttacacacttcagccctcttaaaagccatcctactattgatgtccccatcgagtccttagtttcctatgtttctatgtttctaagtggaacagcaagtctcacctacctttagagtccacgctctaattgctttcattcctttataatatgctgagctcacttaaaagctggtttcggccgctctagaactagtggatcccccgggctgcaggaattcgatatcaagct

SEQ ID NO: 31980 - DNA, 347 bp, Homo sapiens
gcgaattggagctccaccgcggtggcggccgaggtacaagccaggtttccttctcagctcaggagagggacttcttcctgcggatcttgggcttcttcaccggtcgcagataagggttatcgatgatgttctcctccccattccggctacccgacaaggaggggttctgctgcaggacagaggtgttctccttctcggctccagaatcctccatgctgatatgaagagcaaggttctctgtgtctgtctgatcatcctgctccgaggaatctgtctcttccatttgttgcatctgcagttcagacggaagaagagctgtcatgtacgggattggtgaaaggtctggc

SEQ ID NO: 31981 - DNA, 610 bp, Homo sapiens; identical to SEQ ID NO: 31869

SEQ ID NO: 31982 - DNA, 445 bp, Homo sapiens
ccgcccgggcaggtactggttgtgctagctggattattaggcaagaaagttatataacaagaaataaaagattgggaggctgaggcggttgatcacctgaggctaggagttcaagaccagcctggccaacatagtgaaaccctgtctctactaaaaatacaaaaattagccaggcatgaaggcaccgtgcctgtagtcccagcttcttggaggctgggcaggagaatcccttgaacctgggaggtggaggttgtggtgagccaagattgtgccactgcactccagcctgggtgacaagaccaagactccatctcaaaaaaaaaaaaaaaggaaaaagaaaagtacctcggccgctctagaactagtggatcccccgggctgcaggaattcgatatcaagcttatcgataccgtcgacctcgagggggggcccggtacccagcttt

SEQ ID NO: 31983 - DNA, 82 bp, Homo sapiens
gggcgattggactccaccgcggtggcggccgtcatggtgtgcgcctgtaatcccagctaccaaagagatcactggacccggg

SEQ ID NO: 31984 - DNA, 400 bp, Homo sapiens
gactcactatagggcgaattggagctccaccgcggtggcggccgcccgggcaggtactaaactaagccgtcaactaccagcaagcagaatgaaaaacagggacagatcagcatccaattagtatgtctaagtttttaaacaggaaaagggttgaggggaatcagtaaaactggaaactcatacttcacattttgcaatctcactgataaaaggaggaaatgtgtgtttatcaaacttgctgtgagtgcacagttcatttggagtcctgtaaacaatcgcctggctgcccactttcaaatgcatgtgaaaatcttggagattcagagcatcatattcagcaagcaaggtcattctagtgatgcccttaacaagtttcaaaagctcatagagatcttcaacc

SEQ ID NO: 31985 - DNA, 307 bp, Homo sapiens
ctatagggcgaattggagctccaccgcggtggcggccgcccgggcaggtacccgggtatcctgtcttacggtgtttattcgtggttatctattgacagtgaataacttgaacaagtatttcttgaagatttgcattttatttttctaaaaagcatggttccgaccgggcgcggtggctcacgcctgtaataccggcactttggaaggccgaggcgggcagatcacaaggccaggagaccgagaccatcctggccaacatggtgaaaccccgtctctactaaaaatataaaaattagactgggcgcgg

SEQ ID NO: 31986 - DNA, 717 bp, Homo sapiens
gtatacgactcactatagggcgaattggagctccaccgcggtggcggccgcccgggcaggtacaagatgagacagaattagaggatgaaaatcaagaaggcatgactgtgcacagttctgttcacagcaataacctcaactctatgccagctgctgaaaagggtaaagacacattaaaatcagcttatgatgatacagaaaatgacctaaaaggagcagctattcatatctcaaaaggaatgctccacgaagaaaagcctggagagcagattttggaaggtggctcagagagtgaatctgcacagaaagctgcagggaatcaaatgaatgacagaaagattcaacaggaatccctgggtagtgcaccactcatgggagatgaccaccctaacgcatccagagacagtgtggagggagacgctttggtaaatggggccaaactgcacacgctttcagtggagcatcaacgcgaggaattgaaagaggaattagttcttaaaactcaaaaccaacctagattctcctctccagatgagattgatttgcccagagaactggaagacgaggttcccattctgggaagaaatcttccctggcaacaagaaagagatgtggctgccacagccagtaagcaaatgagtgagaagataaggctctctgagggagaagccaaagaggactccttggatgaagagttttttcatcacaaggcaatgc

SEQ ID NO: 31987 - DNA, 306 bp, Homo sapiens
ctactatagggcgaattggagctccaccgcggtggcggccgaggtacttagaattttgtggccagatcattttgttggaaaatgggaaaatctgtgaaaatggaactcacagtgagttaatgcagaaaaaggggaaatatgcccaacttatccagaagatgcacaaggaagccacttcggacatgttgcaggacacagcaaagataggcagagaagccaaaggtagaaaagtcagggcttctggccacctccctgggaagaagtctctcaacggaaaatgtctgttgccggaagcattccagctca

SEQ ID NO: 31988 - DNA, 630 bp, Homo sapiens
tcactatagggcgaattggagctccaccgcggtggcggccgaggtactagataaaggaaagagcaagacaaagtgcaggatcgagagaaaatcgattgcttgaaaaactgggtattttacttgctgcaagtcccgactgtgtcagctgatgagtttaacactatgacagcacagtcctcgcctgcctgctcgctgctgtaatccccacactgttgtgtgccctatagcacctggcacacgggaagcgctcaagagatgtgtgtgaatgaaggagccacatcttgacttgcgacgcggagcagtaagctgcagttatttggtagcggtggaagaataaattctacctcctgcttgcctcgctgcagtggggatgagggagaggggactcagccagatgctgaattccccagacagctgacaggttcccaatttccaggaccagctgttcaggagcatcccggacgagagccaggcacatttgagacttggatccaactaaagaccgccgcagattcttctgcagcaatgtcggtgttagaagaaaatcggccgctctagaactagtggatcccccgggctgcaggaattcgatatcaagcttatcgataccgtcgaccttgagggggggcc

SEQ ID NO: 31989 - DNA, 465 bp, Homo sapiens
actactatagggcgaattggagctccaccgcggtggcggccgcccgggcaggtaccatcttttacaaatcatgcttcttcttctgcactcattctactttgatccaactgaaccgttcataggcaggtccgggttttatcatccccatttacacataagaaaactgaggcctggaggctgggcgcagtggctcacgccttgcaatcccaacactttgggaggccaaggagggcggatcataaggtcaggagatcgagaccatcctggctaacatggtgaaaccccatctctactaaaaatacaaaaaattagccgggtgtggtggcgggcgcctgtagtcccagctactcaggaggctgaggcaggagaatagcatgaacctgggaggcggagcttgcagtgagccgagattgcgccactgcactccagcctgggtgacagagcgagactccatcagctgccaag

SEQ ID NO: 31990 - DNA, 455 bp, Homo sapiens
ctactatagggcgaattggagctccaccgcggtggcggccgaaaccagcttttaagtgagctcagcatattataaaggaatgaaagcaattagagcgtggactctaaaggtaggtgagacttgctgttccacttagaaacatagaaacataggaaactaaggactcgatggggacatcaatagtaggatggcttttaagagggctgaagtgtgtaaatatacacattaagctttgcagcaactctgtgccaaatcgaagttgttgcagacctggaattttagtttggtaaaggataattgtagttattttttaaataaaatgattcattagaattctttggttctctcatgataatttagcaagtttgtctctttcagaaagaaaagtttaagtggggttaatgggtacctcggccgctctagaactagtggatcccccgggctgcaggaattcg

SEQ ID NO: 31991 - DNA, 235 bp, Homo sapiens
gcgcgcgtatacgacttactatagggcgaattggagctccaccgcggtggcggccgcccgggcaggtactcttcaaattggtaaattttatttgtctagtaaattatatctctgtaagtcctattttaaaataaactgtaaagaaacctattaagttggtaacagcgattagctttgaatagtgaaattatggtcgatttctttacttttctaaccttcttcttgcattttttcc

SEQ ID NO: 31992 - DNA, 334 bp, Homo sapiens
gagctccccgcggtggcggccgaggtacgcgggggagccagcgatgggtccaccttgcctttgttgttgttgttgattttgtttcttgttttggtgactgagtgaagggacttgaccctggttctcccagcttgagcaggagcgtcactgcggtgatcagggaagctgcctggaccagctggcctggggcagccaccaccccattctctcgcccctcttgagaatccagcctgtggacccaggtgtgtcagcctgcagtcagaccacagtctggctcgggctggggctgggggtggcagaaagggggtcctgacgcagcccctgctcccccgag

SEQ ID NO: 31993 - DNA, 237 bp, Homo sapiens
tagggcgaattggagctccccgcggtggcggccgcccgggcaggtacgcggggatatagacagagttgagatcaggaaatagctgtttggtgtttcttggggttgtcttcttacagttcaggagacccttcctaaagccggtcttttctcacttccagtcattcctgtattccatcaaccacacaatctgcttgcggttggatagcattgaagccaaattgcaagccctggaggcta

SEQ ID NO: 31994 - DNA, 472 bp, Homo sapiens
tatagggcgaattggagctccaccgcggtggcggccgcccgggcaggtacaatcacgcagagtcagagcaggagtatgaggaagagcaagaacctcccaaagttgaaagcaaaccaaaggtcccccttaaaagtgccccaccacccatgaacttcactgatttactcaggctggctgagaaaaagcagtttgaaccagtggaaatcaaggtagtgaagaaatcagaagagcgacctatgaccgcagaagaacttagggagcgagaattccttgaacgaaagcataggagaaaaaaacttgagacagatggaaaactacctccaactgtgtccaaaaaggcaccctctcagaaagaaagtgtgggcacaaaacttagcaaaggttctggagacaggcatccttcttccaaaggaatgccccttcctcatgctgagaagaaatcaagacccagcatggccaatgagaaacacct

SEQ ID NO: 31995 - DNA, 398 bp, Homo sapiens
atacgactcactatagggcgaattggagctccaccgcggtggcggccgaggtacttcggggaaagattgcatttgaacagaggagtgtctagaaacagacatctgttgttttggcagcagcattcatttcctgtctttgataaccagatccaggggcctccagggaaactaactcctccctaggctccagggaggcagtgcctcaagcctcacaccccgctggcaacagaaaccgcttgatggatgtgtgcacgacccctaagaactaatgagctacatcgagtcttcagcaaagacttccaggacaaagatgacaagcttctccacctatacttggggaaagagaatcaggctagcacccactttacagccacaaggagagaagttttgagaactca

SEQ ID NO: 31996 - DNA, 445 bp, Homo sapiens
tactatagggcgaattggagctccaccgcggtggcggccgaggtacagggctgggtcctggggacaaagcagtgggcaaggcagagtgccatgttatagctggcgcaacagccaagggcagcagatgactgggagaacaaggtgatttcagagagtggtctatgctaggaagaaaaaacaggtttgtccttaggagtgagggttactttagatagggtgaccagtgagggcttcttggagacggtggcgtttgaactgagaccttaatgccaagaaacaacccccatagcaagacctgggcacagagggacctacaaaggcaacggcccagtgccagggactgagcttgggagctgaggaaataaaagccagcccttccccagctgtccattgcttgatctcatgcttttttctctccacttgagccagcctgagatagctttcg

SEQ ID NO: 31997 - DNA, 91 bp, Homo sapiens
tacgactcactctaatgcgaatagtatctggcgcattggagctccaccgcgggggcggcacagaaacatgtgtcagtgatgactcaggggg

SEQ ID NO: 31998 - DNA, 558 bp, Homo sapiens
  misc_feature 172, 304, 316, 323: n = A,T,C or G
agctccaccgcggtggcggccgaggtcaacaccgtgcccagctaattttttctattttttgcagagatgaggcctcaccatgtctgcctcagcctcccaaagtgctggaatcacaggcatgaaccaccacacccagccctactgtattttagaactttgttcttgaaaagcnagtcaagttccctgtaagtgcataatatattctcattttcaatgagaacagaagatggtttgtaaaagctatttttaagtgtccctatttgcccagtaattcctcttctagaaatctatgagaataattcanaatatagcccanaacacanaggcattaagtgttcagcaaaacactgagaatctaaataaccaatataaagagattggttaggccgtgcagcgtgctcacgcctgtaatcccggcactttaggaggccgaggcgggcagattacctgaggtcaggagcttgagaccagtctggccaacatggtgaaaccccgtctctagtaaaaatacaaaaattagccaggcgtgatggcatgtgcctgtagtcccagctactc

SEQ ID NO: 31999 - DNA, 384 bp, Homo sapiens
tagggcgaattggagctccccgcggtggcggccgaggtacatagtgtttataatattgtaataatatattttacctgtggtatgtgggcatgtttactgccactggcctagaggagacacggacctggagaccgttttaatgggggtttttgcctctgtgcctgttcaagagacttgcagggctaggtagagggcctttgggatgttaaggtgactgcagctgatgccaagatggactctgcaatgggcatacctgggggctcgttccctgtccccagaggaagccccctctccttctccatgggcatgactctccttcgaggccaccacgtttatctcacaatgatgtgttttgcttgactttccctttgcgctgtctcgtgg

SEQ ID NO: 32000 - DNA, 401 bp, Homo sapiens
gcgtatacgactcactatagggcgaattggagctccaccgcggtggcggccgcccgggcaggtacaggagtctggagttggcacccgtaatctacagagggaggcccatcaggacttcggtcttgatctcagtgggctccatcctcgtccctaaccagcctcatataggcagcagggctgcagtggcagtgatgtttatggaaggacccattattcccaaacacatctttggggaattaccttaccgttagagaaatgggacttctaggtgtctggaattggaacatggggaatttgagagcatagacgatctctgcctctgacctcccccttttctggggaaatgtgttcttggtcctcagcctgctggtgcagcccctcccaggaatccctgccagtgt

SEQ ID NO: 32001 - DNA, 421 bp, Homo sapiens
ctactatagggcgaattggagctccaccgcggtggcggccgaggtacgcgggggcccctttctgtgaccgagttcacactcagaacacacgtgttgaaatcgggaaaaaaacggagacctgttgtatcttgcaaggaaaacgttccttacaggtatatttacagaggactgtgtcgcactcaggcagaaatgacctcaacaagacagcctcgtggaaggaagaacacttacctacttaactcccctccccgccccggactgcctagtctagcctagccgtctataacaaccccagtggactgacattccatcttggaatttatggaggtgacaaaagtgtcatttgagatggaccaaacccagccctttcaagaagagctcttgatgttttatcttgacatgtgtttgatgaataatgacc

SEQ ID NO: 32002 - DNA, 443 bp, Homo sapiens
ctactatagggcgaattggagctccaccgcggtggcggccgaggtactagataaaggaaagagcaaaacaaagtgcaggatcgagagaaaatcgattgcttgaaaaactgggtattttacttgctgcaagtcccgactgtgtcagctgatgagtttaacactatgacagcacagtcctcacctgcctgctcgctgctgtaatccccaccactgttgtgtgccctatagcacctgcacacgggaagcgctcaagagatgtgtgtgaatgaaggagccacatcttgacttgcgacgcggagcagtaagctgcagttatttggtagcggtggaagaataaattctacctcctgcttgcctcgctgcagtggggatgagggagtaggggcactcagccagatgctgaattccccagacagctgacaggttcccaatttccaagacca

SEQ ID NO: 32003 - DNA, 412 bp, Homo sapiens
cgcgcgtaatacgactcactatagggcgaattggagctccaccgcggtggcggccgaggtacttttttttttttttttttttttggagactgagtctcactccagcctgggtgacagagcaagaccctgtctcaaaaaaaaaaaaaaaaaaaaaaaaaatggaagttgtggtcacaatgcccaggcttctttgttatagtggcacgctgggttacttgccacacacagatcactcctcccagggctgctggcacacactgattgtggggagttcaagaggccttttccccttgagggtgtggctgtccccctttcaggcgtgtggcgtcattcatggaggaagtgctggctctacgtaacacacgcacagtggcactaggacctgcgtgcctggccctcagtgggtagggcg

SEQ ID NO: 32004 - DNA, 473 bp, Homo sapiens; identical to SEQ ID NO: 31841

SEQ ID NO: 32005 - DNA, 374 bp, Homo sapiens
tagggcgaattggagctccacgcggtggcggccgtttgctcaacaattatccaatgtctactttacaatactttcgctgttctgttttaagctttttgtgaaaatcagccttgccatcctcagtcatttctacatagtgaaaggcaaccgcaaggaagcggcaaggatagcagctgaattttatggagtaacccaaggacaaggttcctgggcagatcgatcaccactacatgaagcagcaagtcaaggtcgccttcttgctctgagaacattattatcacagggttataatgtaaatgcagtaaccttagaccatgtcaccccattgcacgaagcctgccttggagatcacgtggcatgtgccagaactctgc

SEQ ID NO: 32006 - DNA, 496 bp, Homo sapiens
gactactatagggcgaattggagctccaccgcggtggcggccgcccgggcaggtacaaaaacatcaggaccctgtaggagcatctctctgatggcccgatgagcttctcctcttttctaatccagcatctcttagatttgtaaaggaagccagtgtctgcagagctgaatatgcaatgtcacagcagaggtctaatggacccaccacctaacacactcctgcctcttttccgtggcacttctgtctcactttgaataaactgcctcaaaactgaaacccggaaaaacctgacaacactgtatatacaactggcctggtaggttacaaaagaagttcacaacagaggcaacctggtgccacggaggtctggatgctgatcgagagcaagcagaggcgtgcgcgggggaggaaagagtgtgaatacgctcatgagccttaatacaagaagctttacgggaggctggtgaaattctggaaaccactgagacaactgtct

SEQ ID NO: 32007 - DNA, 191 bp, Homo sapiens
gctcaccgcggtggcggccgcccgggcagatacaaaataatcttttgtttttgttcccttcaagattctcttttactctttttgttccttatgccatcactccaccacaaccatactacagacttcgcaactgctgtctcagcctttgaaacacctaaacttcaacatgctttgatttccgcctattacgc

SEQ ID NO: 32008 - DNA, 384 bp, Homo sapiens
tagggcgaattggagctccaccgcggtggcggccgaggtactgttgttgactcgcataatgcgagagatgttgcggaaacgagccaaggagccgtaggatcccagcatgtctgcggcaatcaccactccgccctcgaacttaacgccgaggactgaggtcccggtcaccatggggttctgggtccgcgtgattggacctctgtaaagtgcagacgccggatccatgaaggaatcgggagtggatggaatgcggtaaaactgtcctggggccggaccccccgcccaaagtccggaccgcgaccccaaaaacgcttccatcttagtcacggtagcagaaaaaaaaaaaaaaaaaaagaaaagtacctgcccgggcggccgctctag

SEQ ID NO: 32009 - DNA, 428 bp, Homo sapiens
actataaggcgaattggagctccaccgcggtggcggtatcagctcactcaaaggcggtaatacggttatccacagaatcaggggataacgcaggaaagaacatgtgagcaaaaggccagcaaaaggccaggaaccgtaaaaaggccgcgttgctggcgtttttccataggctccgcccccctgacgagcattacaaaaatcgacgctcaagtcagaggtggctaaaacccgacaggactataaagataccaggcgtttccccctggaagctccctcgtgcgctctcctgttccgaccctgccgcttaccggatacctgtccgcctttctccctttgggaagcgtggcgctttctcatagctcacgctgtaggtatctcagttcggtgtaagtcgttcgctccaagctgggctgtgtgcacaaaccccc

SEQ ID NO: 32010 - DNA, 467 bp, Homo sapiens
gcgaattggagctccaccgcggtggcctaagatgtatgagcacataaacttcttcccctacctaatgttaaatcttttctatggtggctgtgctcagaagctacctgctcctgcctatccccaaagccctgcttcaccaaaaagagaaataccagattagctacctgcaccatcccagcaacctgtcccttctcccctcactcctcaccccttttcccagaccctggtctctcttttcagcacccaggagaccagtgtccctgggccatttctgcctgtcttccaggacagtagtcctggcagaggcagaagaagggtcagatggcagagctgctgggctgggctcccacaagctgtgtcctagttttccagggtaagctgtcaagagttgcctcattgcagtccccatttccctctccctaaatcccttttctgagtctgaagaaatggcattgccagcctcagga

SEQ ID NO: 32011 - DNA, 503 bp, Homo sapiens
gcgtaatacgactcactatagggcgaattggagctccaccgcggtggcggctgaggtactttttttttttttttttttttttgggatttttagtagagacggggtttcactgtgttaaccaggatggtctcgatctcctgacctcgtgatccgcccgcctcggcctcccaaagtgctgggactacaggcgtgagccaccacgcccggcccaaaagcatttactgttaaggctgcctcatttttcagctttgttgtagttgagattctgatgttcacctaacaaagtccctgacaaaacagacttccttcaatccaggtcataatttgaaacgttatacaataatgagatttaagtgatgaatggaaagaaaagaaggagactgaaaagatatcagaaatttctatttgtttttagattcagaaaaatataattacaggccaacatgggtctgacagaaaggaaggacgtcagcagttacttgaatgtaaccccttcccagcat

SEQ ID NO: 32012 - DNA, 447 bp, Homo sapiens
ctactatagggcgaattggagctccaccgcggtggcggccgcccgggcaggtactttttttttttttttttttttttttttttggtagagatgggacttcctacgttgctcaggctcgtcttgaactcctgagttcaagtgatccacccaccttggcctttcaaagtgctgagattacaggtgtgagccaccacacctggccaaaataataaaaattttaattcaggtaaaaaaaaaaaaaaaaggaaaagtgtaaatgtgttcatccaacaaagcctttctttcacacatatgaaatataaatagatccatttaaatacgatatccagttgaaccagccctgaagggctttctgaattggacatgttctgtcgctaccagtggggcttcctggaagctggcccaaagctggtccttgtccacgcagaggatctgaaagcaccctgt

SEQ ID NO: 32013 - DNA, 473 bp, Homo sapiens
agggcgaattggagctctaccgcggtggcggccgacgtcggatgacatgttaccatgacacaaaacgacaatgaccacggcaccacaccaaggatcatctacctctattacaaccagacatttgcactcaaataaggaggtgctgccgtatacttatccgttgctggaggcagcatgaatgggaaccagacacagctggaaagcaatcgggtaacagagcgccaaccctgcacctcggccgctctagaactagtggatcccccgggctgcaggaattcgatatcaagcttatcgataccgtcgacctcgagggggggcccggtacccagcttttgttccctttagtgagggttaattgcgcgcttggcgtaatcatggtcatagctgtttcctgtgtgaaattgttatccgctcacaattccacacaacatacgagccgggagcataaagtggtaagcctggggtgcctaatg

SEQ ID NO: 32014 - DNA, 73 bp, Homo sapiens
tcactatagggcgaattggagctccaccgcggtggcggccgaggtacgggttgcccctggcttggcactgcag

SEQ ID NO: 32015 - DNA, 467 bp, Homo sapiens
ggcgaattggagctgcaccggggtggcggccgcccgggcaggtacaatagcgtgatctcggctcactgcaacctccacctcctgggttcaagcagttctcctgcctcagcctcctgagtagctgggactacaggcacatgccatcacgcctggctaatttttgtatttttactagagacggggtttcaccatgttggcaaactggtctcaagctcctgacctcaggtaatctgcccgcctcggcctcctaaagtgccgggattacaggcgtgagcacgctgcacggcctaaccaatctctttatattggttatttagattctcagtgttttgctgaacacttaatgcctttgtgttttgggctatattttgaattattctcatagatttctagaagaggaattactgggctaataggggcacttaaaaatagcttttacaaaccatcttctgttctcattgaaaatg

SEQ ID NO: 32016 - DNA, 351 bp, Homo sapiens
gatttcttgtgcagtcaagcacacttttctgtccccattccagcctctcctggccatttaactggcgccatgcctcccccacctcgcccattcaatttagtcaatgtttaaaaccgaattctatgctaataattctgacaggcaattatggactcctgttaagttccagataccatcctatgttgcttacctaacattaatgcattttaaaagttctaactccaaccccaaagctccccatatccagggctgcttggatgaccatttcatggtccatttccactcagctgtcagccatcacccaaattcaagatgcttagaaaagacctccggatgttttcttagatatta

SEQ ID NO: 32017 - DNA, 453 bp, Homo sapiens
tacgcggggagagcaaagacagttgcttacatgatgcagagcttatctactgtagagctgggaagcagaaggatttgtagtttctttttaaagtgattccttccttttccctttcatttttcactgtgggtgttattatcctgacaatttgtcatacatttcctgtctttaaaaaataactgtatactaagcaaaactcaggtcttaaaaataaatatgaatttagattccatacatcgattaattgaggaaacacagatcttccagatgcaacaatcatcaattaagtcacgcggcgacatggtggcccctgcctcaccccccagggatacctgtaatacctgcttcccacttcatgggctacaatctcatgctgctcacaatttctgtgctcactcatataacaccaacaaatgggatatttgtgaagaacttcgcctgcgggagcttgaa

SEQ ID NO: 32018 - DNA, 394 bp, Homo sapiens
atggggcgaagaggagctccaccgcggtggcggccgaggtacaaacaaagcaaaaagtaggaatcatgatcttaatattggacaaattagaatacaagccaaaaagcaataaccgttagataaagaagaattcttcataatgatgaaatagaaacattcatagaatagaaattacaggagaaacggacagtcacttaaagtttaaaactttaagacaaactttaattgacctatttgagtccacaaaaagccaagaagtatctgaaatggtgggataaatcttcttgtccttaaacttttgtgggtcggtgtgtaggaagattggagtgctactatgctggctacacgggctgatggtgcaggacttacagatcgctaagttttatacgacaag

SEQ ID NO: 32019 - DNA, 470 bp, Homo sapiens
gcgaattggagctccaccgcggtggcggccgaggtacaagagaaattaagataaatctgtcatcatgttgggcaatttcaacaccctttctcaagtggtaagtcaagcagcacaaaaactcagcaaggtcaagatttgaataatgttaacagtagagctttatctactgaataaatgtaaaattccccatccaataattagtccactttcttccaaaatgcatgtggaagatgcataaacttgattatgcactaagcaagtgttaacaattttcaaaaactatgcattgtaaaaattacattatctaaccacaatgcaattaagtcaggtgtctataataaaaaggattaaaagacaaaaacacacaccacttccaaatactgtatagaaaacacactttcaatgatgaaaattataatggaaattaaagacactctgataatgaaaacatgatgaattaaaacctgtca

SEQ ID NO: 32020 - DNA, 594 bp, Homo sapiens
gactactatacggcgaattggagctccaccgcggtggcggccgcccgggcaggtaccagcacttttcaaacctacttatatatacaattcaccaggaatcttgttaaattcaaattctgggttgggggttgggggaagcaagagtctgcatttctaacaacctcatctgtgacgcagatgctgacagtcagcagctcactcttttaagtagcaaagttctagtccgccctagaaaatgatggaaagtggtagcaaccctcagaagaaagcagaatttatcctcagacaattaggctaatgaggaatctagagattatcaactactggtttagaaacaactgcttcttttatgatttcattatttttttatttttaaagaagaaagtcaacgaaatcacctgatctcaggttttgctagtcaatatattaatactattaacttgaaactgtaatacatatcccccaatatggcctttcccacatcaagaaactatttattaatacaaatacccccaaatatctccagtatagattcaatctgaacatacactcttaaaatattcgtcagtatatttgtgcttcttcctatatgga

SEQ ID NO: 32021 - DNA, 88 bp, Homo sapiens
gggcgaattggagctccaccgcggtggcggccgcccgggcaggtacgaactggagggcttgtgtgttagcttctgaattggtcaattg

SEQ ID NO: 32022 - DNA, 452 bp, Homo sapiens
tacactactatagggcgaattggagctccaccgcggtggcggccgcccgggcaggtacaataataaaactaagcttatgcctaaaatattctcactgagtgtctgtgaatccacgactattagcactgtggagcaatttctccttgcagaagagtgctaactctatccattaaagccttggaaattgctggtaaatatgtaaaaaatcaagtgcttaaatggatagcaattattggcaggacctaaactgatacaaaagtgttccactgtctcaatatcaaaagcccaagaatgccagattcccaaagtgagtcaaagtgcttggattgctttgcataaacatggttagccagaatcaacaccctgggattggagcttgaggtggaatttccaaatcctgcaaatgttatggctacagccccccagcaccccaatgctggacagcctaacgc

SEQ ID NO: 32023 - DNA, 471 bp, Homo sapiens
tatagggcgaattggagttccaccgcggtggcggccgaggtacagatgggggtttacccttgtgggccaggctggtcttgatttcctgacctcagatgatccacccgcctcagcctctcaaagtgttgagattacaggcttgagccattgcgccagccctacctttgttttcttaatagtaggaaaaatatgcctttatttctgttatgatttttcagagaggtagagataatagatgcaaactcttggaaggaaagctgtacctgcccgggcggccgctctagaactagtggatcccccgggctgcaggaattcgatatcaagcttatcgataccgtcgacctcgagggggggcccggtacccagcttttgttccctttagtgagggttaattgcgcgcttggcgtaatcatggtcatagctgtttcctgtgtgaaattgttatccgctcacaattccacacaacatacg

SEQ ID NO: 32024 - DNA, 477 bp, Homo sapiens
ctactatagggcgaattggagctccaccgcggtggcggccgcccgggcaggtacccttttgcacgcaccacccatctctgaatgaagaaccaaagattgtcagagttttgatgtcccaccaggcgaagagcaacacttttcactgacaatcaggacagagcagatggatatagaataacaatctggaatccaaggactgagatgcattgacagcaagacaagtaacgtcaaataacaactgaaaagagaagctagggtagacctattaaaagagagagccagcaaacaggaccaaaatgctggatgaggagtctaaaaagaacagaagaaacaaaaaagatcaggagttactaaaatttgactgtcagttttacaatggagacagacaatttaaagaaggaagcagtttttctgagtgtggcattacttgtgcacgttgagtgtcatatatatagagagagagaaagagagagagtg

SEQ ID NO: 32025 - DNA, 613 bp, Homo sapiens
gactactatagggcgaattggagctccaccgcggtggcggccgaggtacacatagtgacattgcaaagggagactttggggtcgggcggatatcttaggatcaactctggctaggtcgcagaagacaggacttgttcccacagacaccagaaggtggaagttttgtcttcctgataacttgctcttcggtatcttggtttggttcactgggtgtttaatgagaatgtcttaccaacgtgctatgtcgtcgttcatcctgacaacattaaacatcagtatagaaaatactggaaagaacaaaagaaaaaaagaaccagggaggtgatcttgccacccccaattcttttcagtaacatccttgttagcacatcttcgccttggcgattgtaaactccaaactgaattcttaggttgttggcagcctggtaaagtggaaagagcagtggcctggaagtcaggaaccttgcatccagtcttagctcttcagaggagctgtgcatgatcaattttcaggacctcagttttcttgtcgtaaaccagatcttatggttcatggtttaataccacagtacctgcccgggcggccgctctagaactagtggatcccccgggc

SEQ ID NO: 32026 - DNA, 487 bp, Homo sapiens
tatagggcgaattggagctccaccgcggtggcggccgcccgggcaggtacaatcatttgaataaataatgctcagtcatctgactgcaagtcttcattacacatgagctatagaaaatagtcactgacagatcaagtttagtagcttcaaaacaaattacgcagaacgatttctatagaatccttcaagtggtttcttcagaggtgatctgaatttcatcttaccgggcattgcacaattttcctttttcatttagtgggcatttctcttgggtcaatattcactttatgtctttctaattcagcaaataaaggctcagatccaaaatggctttgctgtttgtctagcatgttaacagagcaataattacccgcgtacgcgggcattgatttcttcctgggggcctctctcaaggatgaggttttgaagattatgccagtgcagaagcagacccgtgccggccagcgcaccaggttcaaggcatttg

SEQ ID NO: 32027 - DNA, 647 bp, Homo sapiens
gtatacgactcactatagggcgaattggagctccaccgcggtggcggccgcccgggcaggtacaaattcgtggccagtggagagcccggcctggcagcacccctcaggcttcgccgctgccttgtgtgcatcccaagcaatctttgtcagcatccccatggccacaaaacttccagcaactacatatttgatggtggattttgtaaaccaagaccagagccttccgtttaccattatggactttatcttgtaatatgggctgattcattcagacttttagagatcttctggggttttgattttgcccttcaatgtattagtattccactcattctctgtgtcaccttctttttctttttgaaaattagaattacgtatttcccatctctgtggctcggttatttttcataattcctagagatcatccaaaagatttcccaatcacctccacaaattctttccattttctttactatgaaaatattctcataccatctcctcataggtttgatttgttctttttgatttgaaaaatgttagttctgaaggccgagaagttcaacatcaaggtgccaccggattcggtgcctggtgagggccctctgcttcatacagggcaccttcttgctgcattctcacatggtgga

SEQ ID NO: 32028 - DNA, 566 bp, Homo sapiens
gagctccaccgcggtggcggccgcccgggcaggtacaaaataaccttttgtttttgttcccttcaagattctcttttactctttttgttccttatgccatcactccaccacaaccatactacagacttcgcaactgctgtctcagcctttgaaacacctaaacttcaacatgctgagattacgcctattacgctaatgaatttctacaggaacgaacaaacgaaaaggaagtaatgcaccacctcctgtttctcagccatcaccacctgccaggtgcttcccagagcagttccctgctgccacggggctcctgcaggagctcctccctgctaggcatgtcctcaacccctagtcatcaagtctagctcagcctctgcatttcagctcaacgtctaatttcccagcgtagattccaggcagccgccctgtgtcatgtgctcttaacatcctctgcttttctatctcatcttccttcttgacaagttcaaagtcatgaggactggatagagctccatcaaagcagggaatgttgattctatacactggagctgagtgggcagtctggc

SEQ ID NO: 32029 - DNA, 610 bp, Homo sapiens; identical to SEQ ID NO: 31869

SEQ ID NO: 32030 - DNA, 400 bp, Homo sapiens
cgaattggagctccaccgcggtggcggccgaaatcagcttttaagtgagctcagcatattataaaggaatgaaagcaattagagcgtggactctaaaggtaggtgagacttgctgttccacttagaaacatagaaacataggaaactaaggactcgatggggacatcaatagtaggatggcttttaagagggctgaagtgtgtaaatatacacattaagctttgcagcaactctgtgccaaatcgaagttgttgcagacctggaattttagttttggtaaaggataactgtagttattttttaaataaaatgattcaattagaattctttggttctctcatgataatttagcaagtttgtctctttcagaaagaaaaggtttaagtggggttaatgggta

SEQ ID NO: 32031 - DNA, 473 bp, Homo sapiens; identical to SEQ ID NO: 31841

SEQ ID NO: 32032 - DNA, 479 bp, Homo sapiens
ggcggcggccgaccgggcaggtacagggtcggcgctctgttacccgattgctttccagctgtgtctggttcccattcatgctgcctccagcaacggataagtatacggcagcacctccttatttgagtgcaaatgtctggttgtaatagaggtagatgattcttggtgtggtgccgtggtcattgtcgttttgtgtcatggtaacatgtcatccgacgtcggccgtccacaaatgtctgcagctacgatggaccctcagctgctggacaggaaagaggatcaagctaagaaggcccagagtgtgcaagcagagagagggtgtggacagaaaaccttgccttctccagggctagtggcgaaagctatctcaggctggctcaagtggagagaaaaaagcatgagatcaagcaatggacagctggggaagggctggcttttatttcctcaactcccaagctcagtccctggcactgggccgt

SEQ ID NO: 32033 - DNA, 397 bp, Homo sapiens
agggcgaattggagctccccgcggtggcggccgaggtactagataaaggaaagagcaaaacaaagtgcaggatcgagagaaaatcgattgcttgaaaaactgggtattttacttgctgcaagtcccgactgtgtcagctgatgagtttaacactatgacagcacagtcctcacctgcctgctcgctgctgtaatccccacactgttgtgtgccctatagcacctggcacacgggaagcgctcaagagatgtgtgtgaatgaaggagccacatcttgacttgcgacgcggagcagtaagctgcagttatttggtagcggtggaagaataaattctacctcctgcttgcctcgctgcagtggggatgaggggggaggggactcagccagatgctgaatt

SEQ ID NO: 32034 - DNA, 304 bp, Homo sapiens
tagggcgaattggagctccaccgcggtggcggccgcccgggcaggtacgcgggcatttattctgcctgtttcaagtcagagcaaatactcctggaatgaccctctcctgtttcctgagtttgagccgatcctatttggcactgcagacagtgagaagtggatgtttgaggacagatgggaggtgcaaagtggagacaagtattggtgccaccttccactatgagactagcagggcccagttctcttagctattgtctcttattttgtagattaggaaatttcaagtttagagaagttgagttaa

SEQ ID NO: 32035 - DNA, 448 bp, Homo sapiens
actactatagggcgaattggagctccccgcggtggcggccgaggtactttttttttttttttgagaaggagtctcgctctgtcacccaagctggagtgcagtggcacaatcttggctcactgcaagctctgcctccctcccgggttcacgccattctcctgcctcagcctccggagtagctggaactacaggcgcccgccaccacaccccaggttaatttttttttgaatttttaagagagacggggtttcactgtgttagccaggatagtctcgatctcctgacctcgtgatccacccgcctctgcctcccaaagtgctggaattacaggcgtgagccaccgcgcccagcctcaagtgtctattttgatgttcattcactttttcattataaggaagtaaattacttagcacaagagaaaaacttttttttttttgcaatctaaaga

SEQ ID NO: 32036 - DNA, 515 bp, Homo sapiens
  misc_feature 226: n = A,T,C or G
actactatagggcgaattggagctccaccgcggtggcggccgcggtacgcgggattttgggttatatctctcttactacttatttctcactcgcttcaaatgttgggtggggaagaagggtgctatttgttgagccccccgaaagacctcctaatagagggtctccacttctccagagagattgccacccatttcctcacttacttgtttgcctctttgatacctngttgttctataggtcttttcgcctgttggtgttttgaaatgtagagggaaggactttcacttccaagaaagagtagaagacagcatcacgcaatgcaacgctgcaacaaatagagaaaagacaaacacatcaggaacacattgtgaagatcttagggagctgtggatgcaatgaagcctagataaactgagatatgagagataaagcgataaagaggcagagacccaccaggcattcagtaaaacatctaggagaaactcggctgaggaacaagaatagtaaaccgtga

SEQ ID NO: 32037 - DNA, 479 bp, Homo sapiens
ctactatagggcgaattggagctccaccgcggtggcggccgcccgggcaggtacgcgggggcgcgacgttcggttcgctgtgtgtgtcgccggctccttgagggtccatgtgatttttacgccagtgctgctgaactgtgcagggtagggagctggcacagtccgattaattgtccttgggtcgaggtgtctcgtcggaccctttggggcttagtggagaattaaggcagagtcactgtaattatttctaataccaattccaaaatagtgactcttggacaatagtgcaattatatggaattatggctggttataagcctgtagctattcagacatatcctatacttggtgaaaaaatcacccaagatacactgtacctcggccgctctagaactagtggatcccccgggctgcaggaattcgatatcaagcttatcgataccgtcgacctcgagggggggcccggtacccagcttttg

SEQ ID NO: 32038 - DNA, 391 bp, Homo sapiens
atacgactcactatagggcgaattggagctccaccgcggtggcggccgaggtacctccccgtggaactcacacccttttagaggagatacaataaaagccaggatggggcagagcagtggggaagaaggggaggtaatgttgaaccacctgcccatggttacagaggcagcaggcctgggactcccgacgcttccctcctgccttatacctgatctaagaaggccctgctgggcacacagtagatgctcagcaaatgttcggttgaagggctggagcctcacaaaaccctactgatgcaaacaggctcagcgaggctgagtgacttgcccaagatcctaagaggtggtggaggaatcgcctttcacaaaaaagaacaagcgcttcggagcc

SEQ ID NO: 32039 - DNA, 609 bp, Homo sapiens
gcgaatcggagctccaccgcggtggcggccgtccacaaatgtctgcagctacgatggaccctcagctgctggacaggaaagaggatcaagctaagaaggcccagagtgtgcaagcagagagagggtgtggacagaaaaccttgccttctccagggctagtggcgaaagctatctcaggctggctcaagtggagagaaaaaagcatgagatcaagcaatggacagctggggaagggctggcttttatttcctcagctcccaagctcagtccctggcactgggccgttgcctttgtaggtccctctgtgcccaggtcttgctatgggggttgtttcttggcattaaggtctcagttcaaacgccaccgtctccaagaagccctcactggtcaccctatctaaagtaaccctcactcctaaggacaaacctgttttttcttcctagcatagaccactctctgaaatcaccttgttctcccagtcatctgctgcccttggctgttgcgccagctataacatggcactctgccttgcccactgctttgtccccaggacccagccctgtacctgcccgggcggccgctctagaactagtggatcccccgggctgc

SEQ ID NO: 32040 - DNA, 458 bp, Homo sapiens
gctccaccgcggtggcggccgaggtacttactgtgcctcttccatgtgatttggaaggtgaggagacaggaatggtccacagagggagagagtgccaggccaagtcctctcatagccacccgccccctccacagaaggggacagcaagagaagagagaggcatggtgaggttccttttgcaaataacccaaaatatttccaggattcaagaccagcccatggttttaggcctctgctgtttattctctgagttctcagaaatgcaaaaagtgtagtttagccccagaggcctcaagaaaaagattggggtgcccccaaatgtgtcaaatacagagggaaacacacagagcttagggaaagggcaactgagaatgacaagactgataggaattgcttggcagctgaagccacatctctggggcagaggagcagacctgggaacacctgaggtggcacct

SEQ ID NO: 32041 - DNA, 477 bp, Homo sapiens
tacgactactatagggcgaattggagctccaccgcggtggcggccgaggtacctgaactgtcatcattcctactgtgtttgatagtgaccagtaggacaaagccacgtgccgacttcctggctgcttcacctttgcatagctgggttgcagctgcgaacctcattctgactgtgaactaagcaagctttgaggaggcaggagattcccgggggtccctgtgacatattgcattaagatcgtggcacttgcttttttgtctttcacatcggctgtcttgcaaggagcttgacatttccaaattccattgctctgtttggggaagacttaggacagcactccaggaaacagatgacaatttacagacagttgtctcagtggtttccagaatctcaccagcctcccgtatagcttcttgtattgaggctcatgagcgtattcacactctttccttccccgcgcacgcctttgcttgctct

SEQ ID NO: 32042 - DNA, 335 bp, Homo sapiens
tacgactcactatagggcgaattggagctccaccgcggtggcggccgaggtacagggctgggtcctggggacaaagcagtgggcaaggcagagtgccatgttatagctggcgcaacagccaagggcagcagatgactgggagaacaaggtgatttcagagagtggtctatgctaggaagaaaaaacaggtttgtccttaggagtgagggttactttagatagggtgaccagtggagggctttttggaaacgggggcgttggacctgaaaccttattgccagaaaccaacccccatagcaggacctgggcacagagggacctacaaaggcaacggc

SEQ ID NO: 32043 - DNA, 572 bp, Homo sapiens
ctactatagggcgaattggagctccaccgcggtggcggccgatgtactgtcagacagaacaataataaaataacaacagagatttttttcttatagaaatttcagccgagttatttgaaccaattctccccatgaaaacgaccaaagctctaatttaaatattctaaatgtctccttaacagtgtcaaatagctgacaaaattgtaggaaactcccaggccaaagcctatggtgaggggaaacagagaaacaagaggagaggagaagctgcttctgcccggcgtcctttgccaagccaggcaagcctggccttcagttttagcagctttgaggggccagaagttaaggcccagtgctgaccaaaggagggaagtctagcaggataccttctccacataagctgggattccagaggtctatacagcctaaggacaatggtgaactagaaataaaaccacctcactttccacctgtacctgcccgggcggccgctctagaaactagtggatcccccgggctgcaggaattcgatatcaagcttatcgataccgtcgacctcgagggggggcccg

SEQ ID NO: 32044 - DNA, 408 bp, Homo sapiens
gactactatagggcgaattggagctccaccgcggtggcggccgcccgggcaggtacttttttttttttttttttttttttggaaatgaacaaatatttatttatcttttataacaagtaaggcaatgttgcttaaaggaagacaaacaaacataaaagattccgttgacaatgcattttttcatctgttcggcacaatgcttttgtcataatggagatgtgacagcaaactttccaggacattcagtcttcggcggcagcacttagggcagatgactggccgcttatagatgaggccaaagcaccaggtaggtggaaggttcttgtatcggttcgaaccccgacagcgcgccaacagacaacacgaggcagtggggagcaacatgctgttttaatgagcgcctgggtg

SEQ ID NO: 32045 - DNA, 444 bp, Homo sapiens
actactatagggcgaattggagctccaccgcggtggcggccgcccgggcaggtacaataataaaactaagcttatgcctaaaatattctcactgagtgtctgtgaatccacgactattagcactgtggagcaatttctccttgcagaagagtgctaactctatccattaaagccttggaaattgctggtaaatatgtaaaaaatcaagtgcttaaatggatagcaattattggcaggacctaaactgatacaaaagtgttccactgtctcaatatcaaaagcccaagaatgccagattcccaaagtgagtcaaagtgcttggattgctttgcataaacatggttagccagaatcaacaccctgggattggagcttgaggtggaatttccaaatcctgcaaatgttatggctacagccccccagcaccccaatgctggacagcct

SEQ ID NO: 32046 - DNA, 621 bp, Homo sapiens
gcgaatcggagctccaccgcggtggcggccgaggtacatgtcctccctgaggtgggcggaatagggcacagccacaagcccgatgccacgggagggagaggcctcagccgcctggaagtggcagccctggttctgggttgcctcatccctctcatcctgtcagtaggacaccagcattaaatgttcaaggtccagccttggtccagggccgtttgccatccagtgagaacagccggcacgtgacagctactcacttactcagtctcttgtctcaccttgcgcatctctacatgtattcctagagtccagaggggaggtgaggttaaaacctgagtaatggaaaagcttttagagtataaacacatttacgttgcagttagctatagacatcccattgtgttatcttttaaaaggcccttgacatcttgcgttttaatatttctcttaaccctattctcagggaagatggaatttaattgtaaggaaaagaggagaacttcatactcacaatgaaatagtgattatgaaaatacagtggtcctgtaattaaagctatgctctttcttcttagtctaggggctctgctactttatccattgatttttaacatggttcccacca

SEQ ID NO: 32047 - DNA, 370 bp, Homo sapiens
ttggagctccaccgcggtggcggccgaggtacatttagcaaacaataaaattgatacctcaattatattttatattcagttgttggacagaacaaccctggccacagccctcaccaggctcacagctcaggacactgcctgccctccttgctctagattttcggaccatcagccgaccaaagaattgtgatatggcagagcatgagaaaattagctggcccaatctcagcacttagaatgatgggaaaataagccaaagaattgtgagagtagaactaaaagtgcacaagacagcactggagatggaaaggccatagcaattatagacaaaccacaatgataaaggaacagaagaagccatgtggaaggg

SEQ ID NO: 32048 - DNA, 474 bp, Homo sapiens
tatagggcgaattggagctccaccgcggtggcggccgcccgggcaggtacccaaattaactaaccttaaatgcaagacttagcagcaggtattatccatgttgaaccacagagttgtggttataggatgatctatccaggttgaaaaagaattctggccagcagtttgaagaagtgaaaatcaagattaggcacagaggcagagggtggtggggccacagggcggggaaggattccaatccatgagactgcagaaggggaagtgagcagcctctacccatacagactagggtctcatggatgccactggagagcattccagtctcactggatattggtagttcactaacttgtgtcagtcatgattgtgacctctgatatattgctatatttggttttcatttatacaaaagctgcgtctctccttgatcccagtgttttgttggtcttttgtgcatccaggaaagtaaggctt

SEQ ID NO: 32049 - DNA, 362 bp, Homo sapiens
cactactatagggcgaattggagctccaccgcggtggcggccgcccgggcaggtacctaaccataccctctttggactgcagaaaactgatggcaacatctcggggagtggctgcccaccaaagaggaccctgagaaagaaaagagcataacctgggaaatgggctacatgggggcaagggacatggtgagcgggcaaagttgagatggtgggtttccttgagtggaatggtctttcaaaactaacaacatactgtgtagttgtctaacatgctgatggaggaacactgctgggccctgaaatcctagctttgaatccattttttcccttttagtattgggagtaggagggaagaaaatgac

SEQ ID NO: 32050 - DNA, 487 bp, Homo sapiens
actactatagggcgaattggagctccaccgcggtggcggccgcccgggcaggtacatggcatcaggtgtgatcagatggtgtccatctggctttaggctttgccgctgaagattttaattcagtagtcagagtctcctctttgttccttctctcttctcatgacttctgcaggtggatatgctgggtgacaagaagagcatttgcagggtttcttggttctagggccttcattcttcccaccctggtaattgagttttctcttcaaccctgatctgggtagcccctttagctgctctaaagaaggaagtgagaacttctccacttgctgggagggtatcatctctgggggacaagggcaagacgcccagcttgcctgatccctttgatgccttctttccagtttgtctaagggctccagcgatctgagagttggtaagaaatctttgggactactggcatctacagatagatgtcagagctgttggc

SEQ ID NO: 32051 - DNA, 474 bp, Homo sapiens
actactatagggcgaattggagctccaccgcggtggcggccgaggtacatcatctctctggaccaggattctgtggtgaagctggagaattggacagatgcatcacgggtggatggcgttgttttagaaaaagtgcatgaggatgagttccgctatcgaatgtaccagactcaggtctcagacgcagggctgtaccgctgcatggagacagcctggtctcctgtcaggggcagcctttggcgagaagcagcaaccagtctctccaatcctattgagatagacttccaaacctcaggtcctatatttaatgcttctgtgcattcagacacaccatcagtaattcggggagatctgatcaaattgttctgtatcatcactgtcgagggagcagcactggatccacatgtcatggcctttgatgtgtcctggtttgcggtgcactcttttggcctggacaaggctcctgtgctcctg

SEQ ID NO: 32052 - DNA, 596 bp, Homo sapiens
aattggagctccaccgcggtggcggccgcccgggcaggtacccgagagacccggcggtggggaagtcacttcctcccgaagacgctgtttcctagcaaccgccctccgcctctgttattagcccctcctcctcgctcggtccaggaccggctctgcgggcgccgccaggcccagaccaagctactatcagaagttgaattctaataattagctattttataaaggtaacgagaaaaaatacactatgtctgatgaagtttttagcaccactttggcatatacaaagagtccaaaagttaccaaaagaactactttccaggatgagctaataagagcaattacagctcgctcagccagacaaaggagttctgaatactcagatgactttgacagtgatgagattgtttctttaggtgatttttctgacacttcagcggatgaaaattcagttaataaaaaaatgaatgactttcatatatcagatgatgaagaaaagaatccttcaaaactatggtttttgaaaaccaataaatcaaacggtaacataaccaaagatgagccagtgtgtgccatcaaaaaatgaagaggaaatggca

SEQ ID NO: 32053 - DNA, 349 bp, Homo sapiens
  misc_feature 322: n = A,T,C or G
gagctcacgggtggcggcgaggtacctctaggcagattctgaaagattatcttacaattcctgttagctgttcgaaggaacctggggttgtgagatttaaaaaattattaaaaagcaaatgaataacagtaatgaaaaacaaactcatgtagctaggtttagtagtttgcattaattgaaagaaaagagggtgaacaagcattaaaacaagcagaaaccaccctcagcagtcatctgtaagaacacagtgattttaaaatggccaaataaaagtggggacctggaagagtgattactcatctctgtgcccatgacccctcanggcataagaagtctgcacacctgtctg

SEQ ID NO: 32054 - DNA, 416 bp, Homo sapiens
tcactatagggcgaattggagctccaccgcggtggcggccgaggtacgcggggagccggagaccagcctacagccgcctgcatctgtatccagcgccaggtcccgccagtcccagctgcgcgcgccccccagtcccgcacccgttcggcccaggctaagttagccctcaccatggccggttcaatagggagggcaaccatagtggcatcaaattaccctgccggtttcggaatttaaactttcaatctttctggcttggccgggattgctgtccttgccattggactatggctccgattcgactctcagaccaagagcatcttcgagcaagaaactaataataataattccagcttctacacaggtgaggggacgggggaaggcttcaatgaattcagaccctgggctccaacaaa

SEQ ID NO: 32055 - DNA, 441 bp, Homo sapiens
attggagctccaccgcggtggcggccgaggtaccactgtaacagtaatatggaaatgccacaaatactcttcagtaggggattggttaaatgtcactttccttataaaataaaattatacaattgttttaaaaaaacacacatacctccttatatattaatagagaatgatctcagggtaaattgttgcaaaaaaagcaaagtataaaacagtgtgggccaggcacggtggctcacgcctgtaatcttagcactttgggaggccgaggtgggcagatcacctgaggtcgggagttcaagaccagcctgaccaacatagggaaacttggtctctactaaaaatacaaaattagccaggcgtggtggcacatgcctgtaatcccagctactcgggaggctgaggcaggagaatcgcttgaactcgggagatggaggttgtggt

SEQ ID NO: 32056 - DNA, 481 bp, Homo sapiens
ggcgcgcgtatacgactcactatagggcgaattggagctccaccgcggtggcggccgggcgcagtggctcacgcctgtaatcccagcactttggaaggccaaggcgggcggatcacaaggtcaggagatcgagaccatcctggctaacacagtgaaaccctgtctctactaaaaatacaataatagtgtattgcacatttttaaactgaaagtaaatttaaaatgtgcttctcacaaaaaataagtatttgaaatgatggattagcttgatgtaattacttcatattgttcataaatcagaacatcactctactctataaatatatgcaattataaattgtcaatttaaaataaaataaaaaataaaaaattgtaaaattgttactaacatgagttacagctgtcaatcatactagtctataacattttttagctatgtggtacctcggccgctctagaactagtggatcccccgggctgc

SEQ ID NO: 32057 - DNA, 453 bp, Homo sapiens
ctactatagggcgaattggagctccaccgcggtggcggccgcccgggcaggtacacaatatgagggggatcaactcctctctctttgccaatagcacattgggaacaatgtgtggcaggcagcgtcccagcattaacataacgcttttttcactgtctgcaatacgagacacctcgtatcctaaacgactatctgctgacattcgacaaaaagagagtagtgcttggtggaatgcaggagacaatttcctattaggtttatcaaaatgaactgtctttttacttgatagagaagaaggtggcattccttctctttctctcctggggaatgaatttggggaattctctttaggaatagtggaatcagcttcatctgatattgaaagatggatgtctgtgttttttcccttgtctgaactatttacatctggatgctgtccactgtcctcagagt

SEQ ID NO: 32058 - DNA, 437 bp, Homo sapiens
tacgactactatagggcgaattggagctccaccgcggtggcggccgcccgggcaggtacagggagttgtaggtgagcagccgttccggcagtgagtatcccagtccatgcttctgggtcagtggggaacgcagcacaggccccagctgccgagggtctcctgccagcaccagctgccctcctggatcacctgtttcctttacttccatcagccctgctatagctaccagactctcaggctccatgcagtggccagcctcatcgatgaagatgtgtgtgaagtgatcaatgggaaactgggccgagaccaacctgccggcagtgatgagggtggtaattaagacccggtattcctgcagcttcttcttggcgggaaatacatactcccccttctttgcgtcccagttgcagcagggcttgatgtcctcaggtacctcg

SEQ ID NO: 32059 - DNA, 478 bp, Homo sapiens
cgactcactatagggcgaattggagctccaccgcggtggcggccgcccgggcaggtacatccaaaatcatttcagcatataacctgtaaagactgcatcatcccagctactttcctgctgacttccacttgggtttactcaatgggtgacactcacaggacataagagattagaaagagggataaggttttttatatatctgctccctccttacttaaagccatggttttagcagaggcccaaggtcccccatttccaccccaaccctgcacactgagcaaaggcagcagatcccaaacccaccccacccgcgtacctcggccgctctagaactagtggatcccccgggctgcaggaattcgatatcaagcttatcgataccgtcgacctcgagggggggcccggtacccagcttttgttccctttagtgagggttaattgcgcgcttggcgtaatcatggtcatagctgtttcctgt

SEQ ID NO: 32060 - DNA, 419 bp, Homo sapiens
agggcgaattggagctccaccgcggtggcggccgaggtacttctgggtaaactggagaagagcttcaactctgttcacctgcttgcaggtgggtttgctgagttctctcgttgtttccctggcctctgtgaaggaaaatccactctagtccctacctgcatttctcagccttgcttacctgttgccaacattgggccaacccgaattcttcccaatctttatcttggctgccagcgagatgtcctcaacaaggagctgatgcagcacaatgggattggttatgtgttaaatgccagcaatacctgtccaaagcctgactttatccccgagtctcatttcctgcgtgtgcctgtgaatgacagcttttgtgaaaaaaattttgccgaggttggacaaatcattagatttcattgataaag

SEQ ID NO: 32061 - DNA, 410 bp, Homo sapiens
atacgactcactatagggcgaattggagctccaccgcggtggcggccgcccgggcaggtaccctgagaacagcaataatgcacaaacattactattccaacagctgcattgaaacacccttggtaggattgggaaaaagatggattattgccatttggacactccaggactgtccattaatactcctgactaatggaagatgataaagattgggcaagaaaaatgactgcagcaaacgcctaggcatcttcaacttgtcacctttagcaagaggcctcttcaacagttcttggactgtgtttggcagccaggcactctcataacggcaaggagacacagctaacatgatctttgcaatgcaacaaaacaagcgatctttaggcgacagagtccaaaagatgacagaaaat

SEQ ID NO: 32062 - DNA, 455 bp, Homo sapiens
actactatagggcgaattggagctccaccgcggtggcggccgcccgggcaggtacagtgaaaagagccaaggctgtgtgaccccctcatcacttagccaggcgtatggtcctggtttctgaggctgccagaaagcatcttagcaatttgtgtttggatggtccatgcctgactattctaggctggaggttcctaaagagtaacaagaggaagagaaacaagaatctctgacacttgttgagaatagagcacagtcccatttgtttgaaaagagacaccaggcagccatgtttatgtgccagaaatgcattccacctcaaggaggacttaatttatggacccgtgtgtgccaggctgagctgggcaaggatctttctcaggacaaactctgccatgcagctaaaagcctggaaactaaaggatttcatgtagtaaactatcttccaacccctgtag

SEQ ID NO: 32063 - DNA, 459 bp, Homo sapiens
tatagggcgaattggagctccaccgcggtggcggccgtccacaaatgtctgcagctacgatggaccctcagctgctggacaggaaagaggatcaagctaagaaggcccagagtgtgcaagcagagagagggtgtggacagaaaaccttgccttctccagggctagtggcgaaagctatctcaggctggctcaagtggagagaaaaaagcatgagatcaagcaatggacagctggggaagggctggcttttatttcctcagctcccaagctcagtccctggcactgggccgttgcctttgtaggtccctctgtgcccaggtcttgctatgggggttgtttcttggcattaaggacttagttgaaacgccaccgtcttcaagaagccctcactggtcaccctatctaaagtaaccctcactcctaaggacaaacctgtttttttttcctagcatagaccac

SEQ ID NO: 32064 - DNA, 212 bp, Homo sapiens
acgactcactatagggcgaattggagctccaccgcggtggcggccgcccgggcaggtacccagcaagaggtttgcaaagaggagttattcagtgaagacggggtttcaccatcttggctaggctggtcttgaattcctgacctcgtgatccacccgcctgggcctcccaaagtgctgggattacatgcgtgagccaccgggcccagccttaa

SEQ ID NO: 32065 - DNA, 587 bp, Homo sapiens
gactactatagggcgaattggagctccaccgcggtggcggccgaggtacttgacttttccccttaagtttgattccatttcctaacattatccttccctcttcctcctcagcaactagtcttctaaattagaacttaaacacaatgaccagatatgaccctgcaacagagcatgcccttctgcattgagcatgcaatcatgtatcacaggtataagaccccttgaacagacatggttttggtgattctgtgtaggacttattgcttttacccaagaagatgatcaggcatcctaagtagatcaaaaagttttctggagctcttgaatgtgtataggcaagaaagattaagcaacctgttgccttatatgaggcaaactatcttctcatattttctttcgaattcaggatttcaaggttggggaaggaaggccgggcgcggtggctcacgcctgtaatcccagcactttgggaggccgaggcgggcggatcacgaggtcaggagatcgagaccatcccggctaaaacggtgaaaccccgtctctactaaaaatacaaaaaattagcccggcgtagtggcgggcgcctg

SEQ ID NO: 32066 - DNA, 479 bp, Homo sapiens
actactatagggcgaattggagctccaccgcggtggcggccgcccgggcaggtacatagtttgatgattctctcatcctgcttctggctagtaggcccctttagatgagttgctatttttcactatccacagagtcaaggtcaaatctcatggctgtgaattttaaatgatgagatccccacaggtggtgtcgggcaaagcaccctctaaacttactgacttgtagtataaaacttagcaagctgtaagtcctgcaccatgagcccctgaagccagcatcgtagcactccaatcttcctacacaccgacccacaaaagtttaaggacaagaagatttatcccaccatttcagatacttcttggctttttgtggactgaaataggtcaattaaagtttgtcttaaagttttaaactttaagtgactgtccgtttctcctgtaatttctattttatgaatgtttctattttatcattatga

SEQ ID NO: 32067 - DNA, 187 bp, Homo sapiens
gcgaattggagctcctttgcggtggcggccgcccgggcaggtactttttttttttttttttttttgagtctgccagtgaccttcaggcatgggctctgatggaagcctggtggtgataaggtcatccacagatctcattatgctgtgagctacagccgacgtgattataaaattctgaggtggaatt

SEQ ID NO: 32068 - DNA, 469 bp, Homo sapiens
ctactatagggcgaattggagctccaccgcggtggcggccgaaaccagcttttaagtgagctcagcatattataaaggaatgaaagcaattagagcgtggactctaaaggtaggtgagacttgctgttccacttagaaacatagaaacataggaaactaaggactcgatggggacatcaatagtaggatggcttttaagagggctgaagtgtgtaaatatacacattaagctttgcagcaactctgtgccaaatcgaagttgttgcagacctggaattttagtttggtaaaggataactgtagttattttttaaataaaatgattcattagaattctttggttctctcatgataatttagcaagtttgtctctttcagaaagaaaagtttaagtggggttaatgggtacctcggccgctctagaactagtggatcccccgggctgcaggaattcgatatcaagcttatc

SEQ ID NO: 32069 - DNA, 443 bp, Homo sapiens
cgactcactatagggcgaattggagctccaccgcggtggcggccgaggtactttttttttttttttttaaagacagagtcttgctctgtcacccaggctggagtgcagtgagccgagatcgcgccatgcacaccagcctgggtgatagagcgagactccatctccaaaaaaaaacaaaaagagagagagaataggggaagactaagcaggaaggctgtgtctcccttccccacactgtattccaaccagacagctcccttctattttatatgttgggctagtatgaaaaacaattctgctaggaaaaaaaaaatttttttagaagtttgaaagctagtgatttgacccaagttcctcattttacagctggggaaactaaggcctagagagaggcaagtgatatttgtttcatggcagggctgggcttgaaatcctgcttttct

SEQ ID NO: 32070 - DNA, 400 bp, Homo sapiens
gcgtatacgactcactatagggcgaattggagctccaccgcggtggcggccgcccgggcaggtaccaactgaagcagcacaatattctggcatctgttggagaagatgaagagggcatcaaccccttggttaagatctggaacctggagaagagagatggtggcaatccactctgcactcgaatcttccctgctattccaggaacagagccaactgttgtatcttgtttgactgtccatgaaaatctcaactttatggccattggtttcacagatggcagtgttacattgaacaaaggagacatcacccgggaccggcatagcaagacccagattttgcacaagggcaactatcctgtaactggattggcctttcgccaagcaggaaagaccactcactt

SEQ ID NO: 32071 - DNA, 423 bp, Homo sapiens
gtatacgactcactatagggcgaattggagctccaccgcggtggcggccgaggtacccaaattaactaaccttaaatgcaagacttagcagcaggtattatccatgttgaaccacagagttgtggttataggatgatctatccaggttgaaaaagaattctggccagcagtttgaagaagtgaaaatcaagattaggcacagaggcagagggtggtggggccacagggcggggaaggattccaatccatgagactgcagaaggggaagtgagcagcctctacccatacagactagggtctcatggatgccactggagagcattccagtctcactggatattggtagttcactaacttgtgtcagtcatgattgtgacctctgatatattgctatatttggttttcatttatacaaaagctgcg

SEQ ID NO: 32072 - DNA, 614 bp, Homo sapiens
  misc_feature 492, 530, 550: n = A,T,C or G
atacgactcactatagggcgaattggagctccaccgcggtggcggccgcccgggcaggtacgcgggaggaatgccatgttgatccaaggtgccgtttccctaaacctgtgtgtttgtggggcgctcatgaggcccctctctcctggtaaaaacccaaacgacccaggagagaaagatgtgcgtggcctgccagcgcactccacagaatctgtgaagtcaactggacagcagggaagaacagaagagaaggatggtgggctcgggaacgaggagaccctctgcgacctgcaagcccaggagtgccccgatcaggccgggcacaggaagaacatgtgtgccctccggattctgaagactgtcagctggctcaccatgagagtcaggaagggcttcgaggactggtattcgggctactttgggacagcctctctatttacaaaatcgaatgtttgtagcctttattttctgggctttgtttgcatacagcagctntgtcatccccttcattcacctcccagaaatcgtcaatntgtataacttatcggagcanaacgacgttttccctctgacgtcaattatagcaatagttcacatctttggaaaagtgatcctgg

SEQ ID NO: 32073 - DNA, 402 bp, Homo sapiens
ggagctccaccgcggtggcggccgaggtacgtattaccaaagaaaccaaaaactgcctttgactaaggggggtgttgaaagagaacttaaccttattaggaaaccctgacaaaatgatggaagactattgccttattttgcactatttgtgaatcatcttacactgcatttttttatgaatgctttattcaaaaggcagttcgctttacggtgaaaaagccttccaagattcaaagcagattcctctggtcttatattatatccttcttaaaaaccagagttcttaagtaacagtatattgaatggcatcacaaaacattttcatccttaatggatttctttaacaagtggttaaaaaaagtgtccaatcagccgggcgcagtggcttacacctgtaatccc

SEQ ID NO: 32074 - DNA, 393 bp, Homo sapiens
gtatacgactcactatagggcgaattggagctccaccgcggtggcggccgcccgggcaggtaccattttagcaaacaacaacaacaacaacagaaactggatttctttttggtttaaactccatttgattgtctgtatcaatgatcacaggaaatgattaaatgtcgtgcatttaatgtaatttgggttatgaagctcatttgggttatgctcttcacttttctctgtaaaattacaacatgcagtatgcactttcccacgacagaattgtttatgtgttattatggcgtctttgcagacttgtaactttatcctagaacctcagtggtatgacccgctagcatgcatacttcatgggtctgtcattatagggcctttcaaatatcacctatc

SEQ ID NO: 32075 - DNA, 213 bp, Homo sapiens
tagggcgaattggagctccaccgcggtggcggccgaggtactttgttaacctgggtccctgaatgagaggacatagagaatacagccaatctgaaaaaatctgacccttttaggctgggcacggtggctcacgccagtaatcccagcactctgagaggccaaggtaggtggatcacttgacgtcaggaatttgagaccagcctggccaacacg

SEQ ID NO: 32076 - DNA, 449 bp, Homo sapiens
ggcgagcgaattggagctccaccgcggtggcggccgaggtacgcatttcctaagaatccagtagactccttcagacactgctcggataactgatagacagataaaaaatacagagattaccaaaattagtctgtaaactccatgaagaaagaaccgacaaccattttattccctgatgttatccccagtgggaaatgcataaccttggcgtgtaacactgacaagttatggaacagaacatattttaataatctgctatatcaaattgtaagagagtatcaaaaaatcatagctattttaatattaaataccaggcaaatgggtgtccccataagatctattctttttttttttattgagatggagtcttgctctttgacccagacttgagtgcagtggtacaaggtagtgggttcgctgcctgcccacccccaaatgccacacgccgt

SEQ ID NO: 32077 - DNA, 438 bp, Homo sapiens
gcgaattggagctccaccgcggtggcggccgcccgggcaggtaccagcgggctgtcctctaacagcgacggctgcacgctgggcacgctgggcacgctggcgggatgcacgggcctttgtcctgctgcctctgaggtagcagagtcggcacagggtggactgaggggcgtctcgcttttctgtccaccctctgagacagcagggacaggttcatttggcttctccaggtgcagcagcttgagtttgctctttggccctgatgctccagtctggttcttaatcttcttctcatagtccaggagttggcccagaaaattgaagtttggagatatagtaggtcttttttctttcacaaatctgtaagcttcatctaaagacatgtccatcctcttcatgatgtaggcgatagcgatggtggcggagcgggagatcccagct

SEQ ID NO: 32078 - DNA, 386 bp, Homo sapiens
gactactatagggcgaattggagctccccgcggtggcggccgaggtactaagagctggtccaggctcagccccaagtgtgccagctgcttcttagacgtggctccatttactcctcaccgcagaccttcctacagttccgtgggtgggaagtgctcagtgggtctcctcgctgggctgaatcaggggggcgcggagctgcgttgcttctggaggctccagaggaggatgggtttctgttctggactgttggtggacttcacttccttggagctgtgggactgagatcccccttcctggctggctgtctcagccaggggcctctctgcagcctgcacatgacctccgctcagggccagcgtcggggcatggaattctgttcacgttg

SEQ ID NO: 32079 - DNA, 472 bp, Homo sapiens; identical to SEQ ID NO: 31994

SEQ ID NO: 32080 - DNA, 392 bp, Homo sapiens
gactcactatagggcgaattggagctccacgcggtggcggccgaaaccagcttttaagtgagctcagcatattataaaggaatgaaagcaattagagcgtggactctaaaggtaggtgagacttgctgttccacttagaaacatagaaacataggaaactaaggactcgatggggacatcaatagtaggatggcttttaagagggctgaagtgtgtaaatatacacattaagctttgcagcaactctgtgccaaatcgaagttgttgcagacctggaattttagtttggtaaaggataactgtagttattttttaaataaaatgattcattagaattctttggttctctcatgataatttagcaagtttgtctctttcagaaagaaaagttt

SEQ ID NO: 32081 - DNA, 451 bp, Homo sapiens
tacactactatagggcgaattggagctccaccgcggtggcggccgaaaccagcttttaagtgagctcagcatattataaaggaatgaaagcaattagagcgtggactctaaaggtaggtgagacttgctgttccacttagaaacatagaaacataggaaactaaggactcgatggggacatcaatagtaggatggcttttaagagggctgaagtgtgtaaatatacacattaagctttgcagcaactctgtgccaaatcgaagttgttgcagacctggaattttagtttggtaaaggataactgtagttattttttaaataaaatgattcattagaattctttggttctctcatgataatttagcaagtttgtctctttcagaaagaaaagtttaagtggggttaatgggtacctcggccgctctagaactagtggatcccccgggctgca

SEQ ID NO: 32082 - DNA, 440 bp, Homo sapiens
gggcgaattggagctacaccgagctggcggccgaggtacgagtttcgtggcagcgcctccgctctgctagcccggggcccgggtcggcctaacgtcacttggctcggctgactcagatgacccggtttctagtgacgaagcaaaagtggggctttttcccttttctagtctgaagctctcaggaggaaagaaaaaaaaaagtctgtattctccagtctcccggggttgaactttgggtcaggaatcaggagggaggaagcaaagagcaggaggggcgcgagactgggccgcagcccgcgctcggaaggtggcgtgtacctgcccgggcggccgctctagaactagtggatcccccgggctgcaggaattcgatatcaagcttatcgattccgtcgacctcgagggggggcccggtacccagcttttgttccctttagtga

SEQ ID NO: 32083 - DNA, 432 bp, Homo sapiens
atagggcgaattggagctccaccgcggtggcggccgaggtacatatcagaggcattattgccacagtgaaacacaggaaatgacagacactttcggtgagaagacaatgacttagaaaagcagagcagagtggggacagatcacctgaggtcaggagttcaagaccagcctggccaacgtggtgaaaccctgtcttaactaataatacagaaaattagctgggcattgtggcgggcacctgtaatcccagctgctcgggagactgagacaggagaattgcttgaacccgggaggctgaggttgcagtgagccgagactgtgccactgcactccagcctgggtgacacagtaagactccgtcccacaaaaaaaataatagactaaaggttcctgcccgggcggccgctctagaactagtggatcccccgggct

SEQ ID NO: 32084 - DNA, 384 bp, Homo sapiens
actatagggcgaattggagctccaccgcggtggcggccgaggtacactgctgctgatagcaccaaaaggaggcttctttctctcaagccaatccttgatgtatcttcggacaatctgtccaatgatgagaggaaccacaacagtcataaaaagctgagaaaaaatagatgtgaaaggcacagaagaagatgaaccaagaaaaagcagcaggagcaggggtgttataacgatgcccaaaaaacttccaaaggctgaattaaatattgcagctgcctcatttccaccaactgccttggttaaaatcactgcagaagacacaggcggaggcatgcaacctactgtctgcaaaccttttaaaagccattcgttgatgggtgtgattga

SEQ ID NO: 32085 - DNA, 407 bp, Homo sapiens
ctatacggcgaattggagctccaccgcggtggcggccgggcgcagtggctcacgcctgtaatcccagcactttggaaggccaaggcgggcggatcacaaggtcaggagatcgagaccatcctggctaacacagtgaaaccctgtctctactaaaaatacaataatagtgtattgcacatttttaaactgaaagtaaatttaaaatgtgcttctcacaaaaaataagtatttgaaatgatggattagcttgatgtaattacttcatattgttcataaatcagaacatcactctactctataaatatatgccaattataaattgtcaatttaaaataaaattaaaaaataaaaaattgtaaaattgttactaacatgagttacagctgtcaatcatactagtctataac

SEQ ID NO: 32086 - DNA, 387 bp, Homo sapiens
actactatagggcgaattggagctccaccgcggtggcggccgaggtacgcgggacccggaagcctgagcatcgcatcaccaaacactgcctttattcctatccataacccaggtagtttcccaggctctcctgttgctaccacggaccccatcacaaaatctgcatcccaagtggtaggactcaatcaaatggtgcctcaaattgagggaaacacagggacagtccctcagcctaccaatgtgaaggtagttcttccagcagctggcctctcagctgctcagccaccagcttcctaccccttaccaggctctccccttgctgccggcgtgttacccagccagaactccagtgtgctcagcacagcagcaacttctccccagccagcg

SEQ ID NO: 32087 - DNA, 452 bp, Homo sapiens; identical to SEQ ID NO: 31923

SEQ ID NO: 32088 - DNA, 441 bp, Homo sapiens
ctcaccgggggcggcgaaaccgctttaagtgagctcagcatattataaaggaatgaaagcaattagagcgtggactctaaaggtaggtgagacttgctgttccacttagaaacatagaaacataggaaactaaggactcgatggggacatcaatagtaggatggcttttaagagggctgaagtgtgtaaatttacacattaagctttgcagcaactctgtgccaaatcgaagttgttgcagacctggaattttagtttggtaaaggataactgtggttattttttaaataaaatgattcattagaattctttggttctctcatgataatttagcaagtttgtctctttcagaaagaaaagtttaagtggggttaatgggtacctcggccgctctagaactagtggatcccccgggctgcaggaattcgatatcaagcttat

SEQ ID NO: 32089 - DNA, 398 bp, Homo sapiens
gactcactatagggcgaattggagctccaccgcggtggcggccgaggtactgattgctcactgaaagactcagcacccccaatggtgcgcggaagccaggcgggcgattacaatccaattacctattgtcgactcagcccacacaagcttttctcctcctcttgcagggcatggggccaggctccactcccaaatgagactggccccctccacggttcagggtaacagaagggcctgtaggccctggtgaactgaatccagcacaggcctcccctgtaacacaacaggactgagcagaaccaaacacttcttccaactgactctgctccctgccctcaccatctcaaactctgattcccactccactcttcgaggtttctctcagctttttgacctgg

SEQ ID NO: 32090 - DNA, 406 bp, Homo sapiens
gcgtatacgactcactatagggcgaattggagctccacgcggtggcggccgaggtactttttttttttttttttttttttgaaacatttgaaacaaatttattgatatagtttttttaagttaagttttacatctaacatttaaaatgatagaactaggtatagctggaaacaatgcctgtttattttcttacacagagaatgaattctttcttcccttaaaacagtgttgggtaatgttccagaaaagtaattacaggccagttagtaaatataccctgagatagtagaatgccagatagcaacagctatatgcctgccactactggttaatcagctacagaacagactgattttttgacttaatatggcatagggactccattaaggacagaatctgcatctta

SEQ ID NO: 32091 - DNA, 459 bp, Homo sapiens
tacactactatagggcgaattggagctccaccgcggtggcggccgcgctctccgatgcccagccctcctggaaccacctcgcctgtgacgtaggtggagcgcgcactgcctccgggcccgtctttctcaattgggaccggaaaacgttgtcgctcatcctatgacgcgaaagtaaccgagactatcaggatccggagacggaaatgtccgaaggccgcagtacctcggccgctctagaactagtggatcccccgggctgcaggaattcgatatcaagcttatcgataccgtcgacctcgagggggggcccggtacccagcttttgttccctttagtgagggttaattgcgcgcttggcgtaatcatggtataagctgtttcctgtgtgaaattgttatccgctcacaattccacacaacatacgagccgggagcataaagtgtaaagcctggggtgcct

SEQ ID NO: 32092 - DNA, 466 bp, Homo sapiens
attggagctccaccgcggtggcggccgaggtactagataaaggaaagagcaaaacaaagtgcaggatcgagagaaaatcgattgcttgaaaaactgggtattttacttgctgcaagtcccgactgtgtcagctgatgagtttaacactatgacagcacagtcctcacctgcctgctcgctgctgtaatccccacactgttgtgtgccctatagcacctggcacacgggaagcgctcaagagatgtgtgtgaatgaaggagccacatcttgacttgcgacgcggagcagtaagctgcagttatttggtagcggtggaagaataaattctacctcctgcttgcctcgctgcagtggggatgagggggaggggactcacccagatgctgtattccccagacagctgacatgttcccaattaccacgaccagctgttcaggaacatcccggacgagagccaggcacattt

SEQ ID NO: 32093 - DNA, 457 bp, Homo sapiens
gactactatagggcgaattggagctccaccgcggtggcggccgattttcttctaacaccgacattgctgcagaagaatctgcggcggtctttagttggatccaagtctcaaatgtgcctggccctcgtccgggatgctcctgaacagctggtcctggaaattgggaacctgtcagctgtctggggaattcagcatctggctgagtcccctctccctcatccccactgcagcgaggcaagcaggaggtagaatttattcttccaccgctaccaaataactgcagcttactgctccgcgtcgcaagtcaagatgtggctccttcattcacacacatctcttgagcgcttcccgtgtgccaggtgctatagggcacacaacagtgtggggattacagcagcgagcaggcaggtgaggactgtgctgtcatagtgttaaactcatcagctgacacagtcgg

SEQ ID NO: 32094 - DNA, 567 bp, Homo sapiens
accgcgctcggatccactagtaacggccgccagtgtgctggaattcggcttcgagcggccgcccgggcaggtacatggcatcaggtgtgatcagatggtgtccatctggctttaggctttgccgctgaagattttaattcagtagtcagagtctcctctttgttccttctctcttctcatgacttctgcaggtggatatgctgggtgacaagaagagcatttgcagggtttctggttctagtgccttcattcttcccaccctggtaattgagttttctcttcaaccctgatctgggtagcccctttagctgctctaaagaaggaagtgagaacttctccacttgctgggagggtatcatctctgggggacaagggcaagacgcccagcttgcctgatccctttgatgccttctttccagtttgtctaagggctccagcgatctgagagttggtaagaaatctttgtgactactggcatctacagatagatgtcagagctgttggcctgctaaccttcttggtggtgggggctcttaacagagaatctgtgaacatgcccaaaagaag

SEQ ID NO: 32095 - DNA, 553 bp, Homo sapiens
ctatagggcgaattggagctccaccgcggtggcggccgcccgggcaggtactacatgagccagaataattgagcattttaacacagaatagtatttcaaagagctcaaagatgaagccgaggtttgatacctggctaccaggtgaatgatagtgcccctgacagaaaagaacatacagggaaaatccaagctaatatctaaaaaaagatacggaggtcttttctaagcatcttgaatttgggtgatggctgacagctgagtggaaatggaccatgaaatggtcatccaagcagccctggatctggggagctttggggttggagttagaacttttaaaatgcattaatgttaggtaagcaacataggatggtatctggaacttaacaggagtccataattgctgtcagaattattagcatagaattcggttttaaacattgactaaattgaatgggcgaggtgggggaggcatggcgccagttaaatagccaggagaggctggactggggacagaaaagtgtgcttgactgcacaagaaatcagagataatggt

SEQ ID NO: 32096 - DNA, 190 bp, Homo sapiens
aactcactatagggcgaattggagctccaccgcggtggcggccgaggtactctcagccatagccagtgcccgtccaagggctgcttttacttcattcactagggccacctgggcatctgtgccactccctgcagcagccaggcttgcgaggaacaggcgggccaaggcaggggtgtccttgtcttctgca

SEQ ID NO: 32097 - DNA, 427 bp, Homo sapiens
actactatagggcaattgagctccccgcggtggcggccgcccgggcaggtactgtggtattaaaccatgaaccataagatctggtttacgacaagaaaactgaggtcctgaaaattgatcatgcacagctcttctgaagagctaagactggatgcaaggttcctgacttccaggccactgctctttccactttaccaggctgccaacaacctaagaatttcagttttggagtttacaattcgccaaggcgaaagatgtgctaacaaggatgttactgaaaagaattgggggtggcaagatcacctccctggttctttttttcttttgttctttccagtatttttctatacctgatggtttaatggttgtcagggatgaaccgacgacattagcacgtttggtaagacatttctcatttaaaacaccc

SEQ ID NO: 32098 - DNA, 431 bp, Homo sapiens
gcgaattggagctccaccgcggtggcggccgaggtacccattaaccccacttaaacttttctttctgaaagagacaaacttgctaaattatcatgagagaaccaaagaattctaatgaatcattttatttaaaaaataactacagttatcctttaccaaactaaaattccaggtctgcaacaacttcgatttggcacagagttgccgcaaagcttaatgtgtatatttacacacttcagccctcttaaaagccatcctactattgatgtccccatcgagtccttagtttcctatgtttctatgtttctaagtggaacagcaagtctcacctacctttagagtccacgctctaattgctttcattcctttataatatgctgagctcacttaaaagctggtttcggccgctctagaactagttggatcccccg

SEQ ID NO: 32099 - DNA, 331 bp, Homo sapiens
tagggcgaattggacttccaccgcggtggcggccgcccgggcaggtacgcggtgagagaatgcaccctcgcagctctgcctgaataaacattaccaagactacaaggtgcctagcactctgccagaatcatgtgaatttcagaggaaaatactcgttcacacatctcaaggaacgcacaggctcgtgagggagcattcttgccaatgcacatggtaaatgcccaatcgatgtttccggaatgtcataaactgacaactacttcaggccttaacgcagtaggataaggatgataaagaaactcatttcaaattaactaaacaagtgcaaaag

SEQ ID NO: 32100 - DNA, 400 bp, Homo sapiens
gactcactatagggcgaattggagctccaccgcggtggcggccgcccgggcaggtacaccgcataggaaggactctcttactagatgagctagatattcaagaactctttatgagatcgtctcagactggtgactggacatggttgaaagagttttatcaaagactcattgatcagaagtggcagaggaagaaaaagagcaaagagcactggtatcaaaaggcaattctttccaagtttttatattacagtatcaatggtgatggagccgctcagcctgtctcatccaccgcagaacagcaggaatcgtccagttcagatcagacaaatgattcggaaggggcttcatggcctgctcccttcgaaatgccttcttcagtttctgaagatcccagtgcttc

SEQ ID NO: 32101 - DNA, 70 bp, Homo sapiens
gtaatacactactatagggcgaattggagctccaccgcggtggcggccgcccgggcaggtacctgatgcg

SEQ ID NO: 32102 - DNA, 599 bp, Homo sapiens
  misc_feature 519: n = A,T,C or G
cgactcactatagggcgaattggagctccaccgcggtggcggccgcccgggcaggtacgcgggacttgcttatggctctaaccactatcttcatttccttcaagcgttacgactgtaacatgcctcttttctctactgttctttagaaaaccacattctggccagtggctctgtccggattcctaggtcatgcttcttgaatcggggggtctacagatcgcgcccgtcttcatccaggatgccggcaactacacctgctatgcggccaacacagagggctccctgaatgcatcggccacgctcactgtgtggagtaaggagcagccctcgcacgtcggccttctgttagccacggtttaatcatcacgtcatcgtgtgctttggggatgtcagcatgcccttgggcttgctaatttaatcaaaagagaatgattatttttacaactaatttatagaaatctgttgagaaattaaattttcaatgtctaaaagaatacctagaaaatgtattcagagatntaataagggtattgcaggagagacgaaagattgactttggtaagtcagtggagatattacacaaaactagctcaaatcac

SEQ ID NO: 32103 - DNA, 463 bp, Homo sapiens
tacactactatagggcgaattggagctccaccgcggtggcggccgggagaagggccttccaaccctgagctctgtgagaggaaatctcatcagcagcaaaccctcacatgtgacctggaaaaaaggaggtatcttttaatagacaatgtctggatctttagtgagggtgatttagatataatatgtccgtttactttcaaaagggaaaaagtatgggtcactcagaaattcctgctgtagcttagatcatcgatcaagttcacagcgagtccgtaatttccaaaattcagacagtttcatcttagccaaaacatagtgtctgcagtgtgggaacgctgaagacagccggcccaacaccctgctcagggaatcccaaagcctccctgcgatcaggagaaggaagcctagatttctaggttagtgcagcccactagcaagagaattaagtctcggtgtcaagctc

SEQ ID NO: 32104 - DNA, 668 bp, Homo sapiens
gtaatacgactcactatagggcgaattggagctccaccgcggtggcggccgcccgggcaggtacagattagtgtgcacagagatctctgtagaaagagtagctgccctttctcagggcagatgatgctttgagaacatactttggccattacccccagctttgaggaaaatgggctttggatgattattttatgttttagggacccccaacctcaggcaattcctacctcttcacctgaccctgcccccacttgccataaaacttagctaagttttgttttgtttttcagcgttaatgtaaaggggcagcagtgccaaaatataatcagagataaagcttaggtcaaagttcatagagttcccatgaactatatgactggccacacaggatcttttgtatttaaggattctgagattttgcttgagcaggattagataaggctgttctttaaatgtctgaaatggaacagatttcaaaaaaaaaccccacaatctagggtgggaacaaggaaggaaagatgtgaataggctgatgggcaaaaaaccaatttacccatcagttccagccttctctcaagagaggcaaagaaaggagatacagtggagacatctgtgaagttttctccactggaaaactgctactatctgtttttatatttctggtaaaa

SEQ ID NO: 32105 - DNA, 404 bp, Homo sapiens
atacgactcactatagggcgaattggagctccaccgcggtggcggccgaggtacgcggggagctctagtccaggaggctgagacttcgagagggacttagagaaggcagacgcatcccgaactcgctggaggacaaggctcagctcttgccaggccaaattgagacatgtctgacacaagcgagagtggtgcaggtctaactcgcttccaggctgaagcttcagaaaaggacagtagctcgatgatgcagactctgttgacagtgacccagaatgtggaggtcccagagacaccgaaggcctcaaaggcactggaggtctcagaggatgtgaaggtctcaaaagcctctggggtctcaaaggccacagaggtctcaaagaccccagaggctcgggaggcacctg

SEQ ID NO: 32106 - DNA, 184 bp, Homo sapiens
gactgactatagggcgaattggagctccaccgcggtggcggccgaggtactactcttttccttatatgatatatgaagaaacagaggctcagagaagttaggcactcactctgagtaaaatgccaggagcagacccacgtggtgaggaactgaggcctcttaccaagagccatgggagtgaacc

SEQ ID NO: 32107 - DNA, 579 bp, Homo sapiens
gcgaattggagctccaccgcggtggcggccgcccgggcaggtacaaactcgggcctcactttttttctgggacagctgtttgccctgtgttacagaatgcatgtgaggactagatatttaaacatatgatgcctggccacagagaaggtatttgtaattggattctcctggacagcccagcctctgaagttctagaattaggtgcctcctttgcccaaaggctatcagctattggaggggagggtggcagtatgtccctcactgggtagctgtgaacactaactgacttcaccagtgtaaagtgcctggcacagggcctggcacagaggaagccagagtcaatgttgtctagtatcactttggaaggagaataagtctatgaaatgcattaaactcagcagggaaagtcctaaggagtagtttctccaggggccacagaagaccctttgggtctctatgagaggccccaaggcaacacagggcagagaggtctttccggtgagggctgttcaagtacctcggccgctctagaactagtggatcccccgggctgcaggaattcgatatcaagcttatcga

SEQ ID NO: 32108 - DNA, 205 bp, Homo sapiens
actcactatagggcgaattggagctccccccgcggtgggcggccgaggtacttttgcttggattctttaagagggtgggggtcgggagaggcttggcagcataaaggcaggccgctctgggctgaccgtgctcctgacctggatgcagaactgtggaagttgcccctcctttgttctgcttcctgcttcccttctttttagcccg

SEQ ID NO: 32109 - DNA, 444 bp, Homo sapiens
ctcactatagggcgaattggagctccaccgcggtggcggccgaggtactactgctgtcccacatgctctccaggatcctgaagaaaacttctgtcaatggctccatccatttcctggctcctttttgtgaaaacagggtgactatccattagtcaacacccattgggaggctgaggcagcagaatcgcttgaacccgggcagcggagattgcagtgagcagagattgcaccattgaactccagcctgggcgatgagtgaaattccatctcttccagggtggtgcctcctttccttccctgctggtttcttggcacaaggattctggaagactcaggctgtttctcgttccatacaaaatggctgaccaagtccattactgggagctctgcccatccagaagttttcctctcgctcggaatacagccactgaaggaggtaaaaga

SEQ ID NO: 32110 - DNA, 615 bp, Homo sapiens
acgactcactatagggcgaattggagctccaccgaggtggcgggcggcatcttgcgtcatcgatgagcctcgccctgtgcctggtcccgcttgtgagggaaggacattagaaaatgaattgatgtgttccttaaaggatgggcaggaaaacagatcctgttgtggatatttatttgaacgggattacagatttgaaatgaagtcacaaagtgagcattaccaatgagaggaaaacagacgagaaaatcttgatggcttcacaagacatgcaacaaacaaaatggaatactgtgatgacatgaggcagccaagctggggaggagataaccacggggcagagggtcaggattctggccctgctgcctaaactgtgcgttcataaccaaatcatttcatatttctaaccctcaaaacaaagctgttgtaatatctgatctctacggttccttctgggcccaacattctccatatatccagccacactcatttttaatatttagttcccagatctgtacctcggccgctctagaactagtggatcccccgggctgcaggaattcgatatcaagcttatcgataccgtcgacctcgagggggggcccggtacccagcttt

SEQ ID NO: 32111 - DNA, 396 bp, Homo sapiens
gactcactatagggcgaattggagctccaccgcggtggcggccgcccgggcaggtaccccccgaatggccttgtgcctccaaaagcctcacgctgcaactttgctgctcctgtctgttgcccagagaggcctcacacaggcctcagaaatgtttcttgtcacacaaagcttttggtagccgattccaagcgagggatttaatccttacatttttgcccatttggctccaaggaaggcttattagacctgtttttttgttgttgttgtttttttttcttaaaaacaaaatgaatgaatgaatgaaaagagaagcaatggtgagccctctcctgctggggcgccctgggtgggccttgcccgtcctgcagcagagaaatcagtcagcagcgaagagct

SEQ ID NO: 32112 - DNA, 211 bp, Homo sapiens
tcactatagggcgaattggagctccaccgcggtggcggccgggcatttctcccagggatctctgtgcttccttttgtgcttcctgtgtgtgtggatatttaaaggggctggaaatgtgcaaaaacatgtcactacttagacattatattgtcatcttgctgtttctagtgatgttaattatttccatttcagcaagatgtgtggccctcag

SEQ ID NO: 32113 - DNA, 530 bp, Homo sapiens
acgactcactatagggcgaattggagctccaccgcggtggcggccgcccgggcaggtacataagatttatagatttgatgattgatgatagatagatgatatagttacataatagctaaactagataaccgatgcacaacagagaaataacagatgatatacatagataataaatgatcggtattcatagataagagatagattagctgggtgcagtggctcacgcctgtcatcccagcattttgggaggccaaggcaggcggatcatgagttcaggagttcaagaccagcctggccaacatggtgcaatcttgtctctactaaagatacaaaaaattagctggacatggtagtgtgcacctgtaatcccagctactcgggaagctgaggcaggagaagcgcttcaaccagggaggtggaggttgcagtgagccaagatcacagcattgggctccagccttggagacagggcaagactccatctcacttgataaggtcacgttgagtcccagtgcatctcgtaatacctc

SEQ ID NO: 32114 - DNA, 438 bp, Homo sapiens
tacgactcactatagggcgaattggagctccaccgcggtggcggccgcccgggcaggtacttttggtgattctaaggtggatccagggttgagaaccactactgtaattttatctggtcattgccaccaacttgactgaatcctctctcttccccacccccaatctattttaaacagcctgtgtcttcccaaggctatagtttcccaagttttcgaatttctgtctatatttcttccaaagtagatttggggaaggaggcagaaaccctggtaatttaccatgttggcaggaactagaattctccctcatgttgtttgtcttcacaggaggtctcagcatgaaacagcagcagtggtgtgggatgactgccaaaatgggcaccgtgttgtcaggggtcttcaccatcatggccgtagacatgtatctcatctttgaac

SEQ ID NO: 32115 - DNA, 616 bp, Homo sapiens
acgactactatagggcgaattggagctccaccgcggtggcggccgcccggcaggtaccacttgggattcctggggtgtattgatatgcggagccagcagggctggcgatactttcaccagcctctttctgactctgtctccatgtcccaaggccacagaggggacgaggcagagagcagaccgggggcactggccctcagaggaacttttggctgcattgttagcacagggccactccaaagaggacagatctattttaggacatagagcagtcaagcccccaaatgtacctcggccgctctagaactagtggatcccccgggctgcaggaattcgatatcaagcttatcgataccgtcgacctcgagggggggcccggtacccagcttttgttccctttagtgagggttaattgcgcgcttggcgtaatcatggtcatagctgtttcctgtgtgaaattgttatccgctcacaattccacacaacatacgagccgggagcataaagtgtaaagcctggggtgcctaatgagtgagctaactcacattaattgcgttgcgctcactgcccgctttccagtcgggaaacctgtcgtgccagctgcattaatgaatcg

SEQ ID NO: 32116 - DNA, 410 bp, Homo sapiens
attggagctccaccgcggtggcggccgcccgggcaggtactcattactcctttgagggaggtctgaggggtgttgtcacctgtgcctcttgtgtccagctaagaaccgggcgccgcgagaggtctgggagggcctgagcccaggggaactgccattcctgagtcagcatgcccagggctgctaatgaaatccagatgttagacagaaaacaatcatcgcccccacccatctggcagctcgggtttcttggagattgcaaaaaaaaaaaaaaaaaaaaagtacctcggccgctctagaactagtggatcccccgggctgcaggaattcgatatcaagcttatcgataccgtcgacctcgagggggggcccggtacccagcttttgttccctttagtgagggttaattgcgc

SEQ ID NO: 32117 - DNA, 571 bp, Homo sapiens
acgactcactatagggcgaattggagctccaccgcggtggcggccgcccgggcaggtacagagctactgtcttcatcttttattgagagccaaaccaggtcttatctaaatgacaaaaaatattacagctaacaaaagcaaaagtggtgcttttatcaaggaaaccaatatttaaaggttaatttagatagatatataaccggaaagacatttattagcatgctgaaaataacactgatgacactcagaatacacctggtctcttactttatttaacagagaaccatggcatccaggtaaccagttccaacttttcctaccattgattttatggttttctaaacaattatctttttccctaagtgggctagaaactctttcatttgaaagacctgagtttaatggcacctataaataggctcatataaaaatgtagtaaattgcaacaaatacattggcaccacaggaagtaagctctggagttagatgtgaacataataatattgctgtcaccaaaaagggggagaactctactggcagaaaatgtcccttagcatcctttgagatgtac

SEQ ID NO: 32118 - DNA, 398 bp, Homo sapiens
atacgactcactatagggcgaattggagctccaccgcggtggcggccgcccgggcaggtacttttttttttttttttttttggtagagatgggtttttgccgtgttatccaggctggtctcacaagctcaagaagatccacctccctccgcctcccaaagtgctgggatcacagacatgagccactgcactcagccaattttcacgaaggtttaattttagttaggaaaaaatgaaatcacaaggaagcaaaaaaataaagaaggtaattacattttgtgaaatgtggttaatggaacaatggagatataagaggtggagaaaatcaagatatagttaaagaaatgacaaggttcactaataggttcaatgggacgagtgaaagagggttaatggaag

SEQ ID NO: 32119 - DNA, 367 bp, Homo sapiens
gcggtggcgggcgttgcggcgcgcgcggtccatcgcatggcgcaggcggtcgcgcagcaggcgccggttcaggaggcccgtcagctggtcgcgctggaagccgtcggcgccgtccagcggcgcgcgcgcgtccgtcagcggcgcggccagggccctggcgacttcggccgctctagaactagtggatcccccgggctgcaggaattcgatatcaagcttatcgataccgtcgacctcgagggggggcccggtacccagcttttgttccctttagtgagggttaattgcgcgcttggcgtaatcatggtcatagctgtttcctgtgtgaaattgttatccgctcacaattccacacaacatacgagct

SEQ ID NO: 32120 - DNA, 452 bp, Homo sapiens
cgactactatagggcgaattggagctccaccgcggtggcggccgttgtttttctccacatcatagccggcggcagccaacgcttttttcagagcagccagagaaactccgctacgctctttagaggcggccacagccttggtgatgagctctgacaccgggggaccggacgccttacgaggcgtacctgcccgggcgggcggttttaaaactagtggaatcccccggctgcaggaattcgatatcaagcttatcgataccgtcgacctcgagggggggcccggtacccagcttttgttccctttagtgagggttaattgcgcgcttggcgtaatcatggtcatagctgtttcctgtgtgaaattgttatccgctcacaattccacacaacatacgagccgggagcataaagtgtaaagcctggggtgcctaatgagtgagctaactcacatt

SEQ ID NO: 32121 - DNA, 447 bp, Homo sapiens
agctccaccgcggtggcggccgcccgggcaggtactttttttttttttttttcttttttgggggagagacaaggtcaccctatgttgtccaggctggtctcaaactcctgagctcaagggatccccctgcctcagcctcccaaaacgttgggattacaggctgagtcaccatgcctggcttaaattaacttttaggttcaataaatcccaataaaaatcccagcagactttttttttttgtggaaattgacacgtagattctaaaatttaaatggaaatgaaaggactaaaaagaacaaaagacaaacttgaaaaataggaatttggaggacttcagttaccaaatatcaaggtattacaaagctacggttatttaaaaagtaaaagcaacagcatggtattggtgcaagcataaaaaaatagagaaagaaaaacagttttataccc

SEQ ID NO: 32122 - DNA, 586 bp, Homo sapiens
gcgcgtaatacgactcactatagggcgaattggagctccaccgcggtggcggccgatgagaagaagaaggggcccaaagtcaccgtcaaggtgtattttgacctacgaattggagatgaagatgtaggccgggtgatctttggtctcttcggaaagactgttccaaaaacagtggataattttgtggccttagctacaggagagaaaggatttggctacaaaaacagcaaattccatcgtgtaatcaaggacttcatgatccagggcggagacttcaccaggggagatggcacaggaggaaagagcatctacggtgagcgcttccccgatgagaacttcaaactgaagcactacgggcctggctgggtgagcatggccaacgcaggcaaagacaccaacggcccccagttcttcatcacgacagtcaagacagcctggctagatggcaagcatgtggtgtttggcaaagttctagagggcatggaggtggtgcggaaggtggagagcaccaagacaggcagccgggataaacccctgaaggatgtgatcatcgcagactgcggcaagatcgaagtggagaagccct

SEQ ID NO: 32123 - DNA, 294 bp, Homo sapiens
actactatagggcgaattggagctccaccgcggtggcggccgaggtaccagtgcgaatcatcgggctatccaggtccgagatcctagtctcctgtcggctctgaggaggatggatccttctgcggatacatgggacctcttctcacctttaatatcattatggataaacaggttttacatttatttggggctttgctgttagcatttagccctttggatttgtgtccagatttgtcatcaaagaccgcagggcaaagaaacttaacaggaaaaaatcttgtttccaaaaagcag

SEQ ID NO: 32124 - DNA, 277 bp, Homo sapiens
ctcactatagggcgaattggagctccaccggcggtgggcggccgcccgggcaggtacattagaataaccttttcaaaaatatgcaatttctgtccttgaagcctagggagtgggatgcagccacattaagactcatgattaagcaccttattgtgttaatcatgatataaagagccttgtataacaccaaaagccgtagatcgcgcccactgcacttttagcactgtggtgacaagaagtgcggatttcctgtcccgctcgccgcccaaaaaaaaaa

SEQ ID NO: 32125 - DNA, 443 bp, Homo sapiens
actactatagggcgaattggagctccaccgcggtggcggccgcccgggcaggactttatagtttaggctggacattggaaaaaaaaaaagccagaacaacatgtaatagataatatgattggctgcacacttccagactgatgaatgatgaatgtgatggactattgtatggagcacatcttcagcaagagggggaaatactcatcatttttggccagcagttgtttgatcaccaaacatcatgccagaatactcagcaaaccttcttagctcttgagaagtcaaagtccgggggaatttattcctggcaattttaattggaccccttatgtgagagcagcggctacccagctggggtggtggagcgaacccgtcactagtggacatgcagtggcagagctcctggtaatcaccactacagtcaagctgcagtctctgtcacc

SEQ ID NO: 32126 - DNA, 579 bp, Homo sapiens
acgactcactatagggcgaattggagctccaccgcggtggcggccgaggtacaaaagaaatggctctcacttcctggattggcaccagacatcctaccagctgcaattacatcattttttatctatcttctgcttttactttgtgtagggtagggatggggacttacaaatgggccaaagacacttcaacctcaaaaccaaagagaaatccctgcttgcagagatacaaagaaagtaactctccctcttatgaaaagcaaccaggaactctactccagttatgagggccactgatggtgtgggagagctatcaagaagattcttcatagacgtggtgcaaagacagtgagaacccgggaaatcacattcatgggacacttgctcttaccgtcatcaccctctattctatctcaactttggccccatcaaatctaatgataaacaaaagaaggtaattacatgtagaaaatcaaagtgaatgggaatgtggtggtgtgaacatcccgcgtacctgcccgggcggccgctctagaactagtggatcccccgggctgcaagaattcgatatcaagcttatcg

SEQ ID NO: 32127 - DNA, 565 bp, Homo sapiens
  misc_feature 13, 472, 473, 474, 475, 476, 478, 480, 481, 487, 488, 490: n = A,T,C or G
acgactactatanggcgaattggagctccaccgcggtggcggccgaggtacgcgggatcactcaatttctctgaggacacagataggatggggtgtctgtgttatttgtgggatacagagatgaaagaggggtgggatccacactgagagagtggagagtgacatgtgctggacactgtccatgaagcactgagcagaagctggaggcacaacgcaccagacactcacagcaaggatggagctgaaaacataacccactctgtcctggaggcactgggaagcctagagaaggctgtgagccaaggagggagggtcttcctttggcatgggatggggatgaagtaaggagagggactggaccccctggaagctgattcactatggggggaggtgtattgaagtcctccagacaaccctcagatttgatgatttcctagtagaactcacagaaataaagagctgttatactgcnnnnnananncaaaanncnaaaagtacctgcccgggcggccgctctagaactagtggatcccccgggctgcaggaattcgatatcaagcttatc

SEQ ID NO: 32128 - DNA, 426 bp, Homo sapiens
ctatagggcgaattggagctccaccgcggtggcggccgcccgggcaggtacagggagttgtaggtgagcagccgctccagcagcgagtatcccagtccatgcttctgggtcaggggagaacgcaccacaggccccagctgccgagggtctcctgccagcaccagctgccctcctggatcacctgttccctttacttccatcagccctgctatagctaccagactctcaggctccatgcagtggccagcctcatcgatgaagatgtgtgtgaagtgatcaatgggaaactgggccgagaccaacctgccggcagtgatgagggtggcaattaagacccggtattcctgcagcttcttcttggcgggaaatacatactcccccttctttgcgtcccagttgcagcagggcttgatgtcctcaagtacc

SEQ ID NO: 32129 - DNA, 105 bp, Homo sapiens
gagctctaccgcggaggcggccgcccgggcaggtacatgggactacaggcacgccccaccatgcccatctcatttttgtatttttagtagagacagggttttcac

SEQ ID NO: 32130 - DNA, 462 bp, Homo sapiens
tacactactatagggcgaattggagctccaccgcggtggcggccgcatcctgactaccaggatccatgagcttaaacaggccaaaatgagcacagtcatggataccgttggccggaggcttcgggactccctgggccgaactgtggacctggggctgacaggcaaccatggagttgtgcaccccagtcttgcggacagtgccaacaagtttgaggagaacacctactgcttcggccgctctagaactagtggatcccccgggctgcaggaattcgatatcaagcttatcgataccgtcgacctcgagggggggcccggtacccagcttttgttccctttagtgagggttaattgcgcgcttggcgtaatcatggtcatagctgtttcctgtgtgaaattgttatccgctcacaattccacacaacatacgagccgggagcataaagtgtaaagcctggggtg

SEQ ID NO: 32131 - DNA, 462 bp, Homo sapiens
actactatagggcgaattggagctccaccgcggtggcggccgaggtacatagtcttcaagtttcaaaaatctcttcctataatttgattccaaatgcttagcaaaatcaaagtcacagtctcaaatttgaatgtatgtccccagcgtcattcctagtatcacattttatactaatcagaaaatcaaaagccacactaagtaatgtaaagagagaggaattaataccaggacttggttacacggtattgtcaagctgaaggaggaaaaatggaatgctgagctcacacacagataaatgtctgcaggaagcaactcacctgctaagtctgttggcacagaagggaacaggtgggctttatgaaacaaaagagcacagaggagggcgctgtgatgctggagcttaaacttacatagctggtgcttatctcttggagggagagttttttcctgctgatgctgaaa

SEQ ID NO: 32132 - DNA, 405 bp, Homo sapiens
acgactcactatagggcgaattggagctccaccgcggtggcggccgaggtacttacgttgcctcgtgtcaccaaaattggtgtggctgctgtggtgcggggggctgcactgatggcaccccttcctgtcttcatcaagcagctgcccttctgccgctccaatatcctttcccattcctactgcctacaccaagatgtcatgaagctggcctgtgatgatatccgggtcaatgtcgtctatggccttatcgtcatcatctccgccattagcctggactcacttctcatctccttctcatatctgcttattcttaagactgtgttgggcttgacacgtgaagcccaggccaaggcatttggcacttgcgtctctcatgtgtgtgctgtgttcatattctatgtacct

SEQ ID NO: 32133 - DNA, 424 bp, Homo sapiens
ctactatagggcgaattggagctccaccgcggtggcggccgcccgggcaggtacgggggacctccttcagtggctgtattccgagcgagaggaaaacttctggatgggcagagctcccagtaatggacttggtcagccattttgtatggaacgagaaacagcctgagactactactgctattcagtcttccagaatccttgtgccaagaaaccagcagggaaggaaaggaggcaccaccctggaagagatggaatttcactcatcgcccaggctggagttcaatggtgcaatctctgctcactgcaatctccgctgcccgggttcaagcgattctgctgcctcagcctcccaagagccaggaaatggatggagccattgacagaagttttcttcaggatcctggagagcatgtgggacagcagt

SEQ ID NO: 32134 - DNA, 397 bp, Homo sapiens
tacgactcactatagggcgaattggagctccaccgcggtggcggccgaggtaccgaacgctgacaaatgaagttcacttcattcaacaactcaaagcggcactcagacttaacgcggccataaacgcggcggaaactacagtgcccacgatgcaccgcgccagccccggccgctctagaactagtggatcccccgggctgcaggaattcgatatcaagcttatcgataccgtcgacctcgagggggggcccggtacccagcttttgttccctttagtgagggttaattgcgcgcttggcgtaatcatggtcatagctgtttcctgtgtgaaattgttatccgctcacaattccacacaacatacgagccgggagcataaagtgtaaagcctggggtg

SEQ ID NO: 32135 - DNA, 446 bp, Homo sapiens
ctactatagggcgaattggagctccaccgcggtggcggccgaggtacgccaaaggatccgatttgcatagcggagctccagctgttgtgggaagagaggaccagccggcaacttttatccagctctaaactttatttcctcccagaagacactccccagggcagaaatagcgaccatggcgaggatgaagtcattgctgtttccgaaaaggtgattgtgaagcttgaagacctggtcaagtgggtacgcgggataccaagtttatataatttgaaaaaaaaaaaaaaaaagtacctgcccgggcggccgttctagaactagcggatcccccgggctgcaggaattcgatatcaagcttatcgataccgtcgacctctagggggggcccggtacccaggcttttgttccctttagtgagggttaattgcgcgcttggcgtaatcatg

SEQ ID NO: 32136 - DNA, 410 bp, Homo sapiens
actactatagggcgaattggagctccaccgcggtggcggccgcccgggcaggtacgtttgctcatacacgcacatccaaaagcctgtgcctcattcctggccatgggtgaggacttggtctgtcacggctgatgaggactcccacaaccggccaagttatgtcttattatacacccccagaaagagagaaagctgccttctggaggactgattccacatgctatattcagctgagttgatttctgtgtctatttcaacccataacctgaagaatgatcaccttattccttattcattaattttcttgattaatagggaaacttgggaatagctataaagtaaaacttgggtggaacctggggccctggcatcacacaagtgtgattaggatggtcaaggtcatcaggagt

SEQ ID NO: 32137 - DNA, 432 bp, Homo sapiens
attggagctccaccgcggtggcggccgcccgggcaggtactgcttaaaaggcatgtataactaagtcatatcaaaactaaaatgacaaatgggttattttcaacagaacactttgaaaggaaaaagaaaacaaacaagaactttaggatattctttttgaaggcaactgcatgatgctagattgtgtccacggactagatttctaaaaggccatctaaaatacatttttaaatacttattcctttcacaggtaatatcttacgaagtttgattatttttgaattgtcataatatggacttaatatgggaggaaggtagttccaaaatgacagaagtaatcgcttccacatcacttttgtttttctatttacatatacaaacacatttttctcttgtcacaatagtatctgaaacattaagaggtgctcataa

SEQ ID NO: 32138 - DNA, 461 bp, Homo sapiens
tactatagggcgaattggagctccaccgcggtggcggccgaggtaccattctctaactccgtgtgtgatgaaaacgcctccttttctgaccttcaaagtcccctgtagagaccatgcatgctctaagccttagggagtgagaccaacacccatccctgcccagccaacagtggccggggcttgtcttatgtttccatctgttttctttcgtggcattcaatttcatttttttccttttcattttcatgttattttcattattggcaaagaaaatcaaaatgtttatagccaaataacaaatgtgccatgtaaaagtaagtctggacttaagagtttaaaatttttaaacatcagtttccaagtttatatcatattaatacatttcagtggataatttatttaaaaaaaaaactatgccttaatatcccttatttgcaatattcagtatcaaattagagcat

SEQ ID NO: 32139 - DNA, 215 bp, Homo sapiens
tatagggcgaattggagctccaccgcggtggcggccgaggtactttcacttttgtgaataattttattttccaaccatggaagcatcatcgtgaggttgaaagaggatcattcttggaaaatacaattacttaacagttatgtgacctgggacaagttgaagcctaaatgtcctcatccataaaatggaaacttaagtaaaccctcataaggaat

SEQ ID NO: 32140 - DNA, 677 bp, Homo sapiens
tacgacttactatgactcactatagggcgaattggagctccaccgcggtggcggccgaggtacacctgaagccggccctgattttcataattctcactcaggttattcatggccattaaggctttttccttaatgtgtggatcagttttgttgatcatgtttgcaataattgggaggcctcccaatttgcggattgtctcttgattgcatgaataattggcattgttgctcagagtgagcaaagctacctgttggatgaaaggatcatcagatttctgaagcaaggcaaggaccttcctgagatcgcggacacccagaatctcatcaatttcataaggaaaggggcgcttctgcatggcaacgggtcttcttcccctccctctgcgctgggtctcgggctcagagtctgaatctgactctgtgtcagtccacccggactccccttcctcagaatcagggacctctgccaggaaagcctgtccgccattagcagaggctgcagcagctgctgcagccccatctccaggacggaagcccatccccagttcgtctacttcaactttgcttttcttgcccttgcccttgcccccattccgggacctggttacacccttgcctccacctttgggtaccttcccgggcggccgctctagaactagtggatcccccgggctgca

SEQ ID NO: 32141 - DNA, 317 bp, Homo sapiens
ctactatagggcgaattggagctccaccgcggtggcggccgcccgggcaggtacttttttatttcagatccatataattgaactattttgtctagtttttcctacctttcttctccacacttctgctaaagggatccttctaaaacccaagtataatgaccccgcgtacttcttgcccttgtagaatttcctgaggttttctttttggagtctgggttaataacatgtgagaacacgggcaatggattttcggacgactcggatcttatagagctttggaggccgcaccgtcctgtcacttttgggcgacgcgcatc

SEQ ID NO: 32142 - DNA, 477 bp, Homo sapiens
ctactatagggcgaattggagctccaccgcggtggcggccgggcatttctcccagggatctctgtgcttccttttgtgcttcctgtgtgtgtggatatttaaaggggctggaaatgtgcaaaaacatgtcactacttagacattatattgtcatcttgctgtttttagtgatgttaattatctccatttcagcagatgtgtggcctcagatggtaaagtcagcagcctttcttatttctcacctctgtatcatcaggtccttcccaccatgcagatcttcctggtctccctcggctgcagccacacaaatctcccctctgtttttctgatgccagcttctcggcacttgctatttctccccgcgtacctcggccgctctagaactagtggatcccccgggctgcaggaattcgatatcaagcttatcgataccgtcgacctcgagggggggcccggtacccagcttttgttcccttt

SEQ ID NO: 32143 - DNA, 239 bp, Homo sapiens
tctctacgactaactatagggcgaattggagctccaccgcggtggcggccgcccgggcaggtacgcgggggttctcttaaaaggcagtgtgggaagacacttgacagagtgttttgagaaagaagtggtgggacgtcactgtctgtggaaaatttcaaggaaaactgaaggatcattgagtatgaacagtgtggtcagaatttgagtacactcttgattgttttcaagtgagcttttaa

SEQ ID NO: 32144 - DNA, 444 bp, Homo sapiens
actactatagggcgaattggagctccaccgcggtggcggccgaggtaccatggacttcaaagattgggaacaggtgggaattgccttaaaacaagtttgtaaggaaggaaaatttatccccctaacagcctggtcaaactgggctatagttaaagcagcctcggaaccgtttcaatcggaaaatgaggcttatcctccagcagaaagaatttctgcagaggaaggtggtgatgctgctgaaggaggagaggatagtgaagaagattttgaggaaaatacagacaaacctggagatgagttaatttcttttgaggagcacgtgggaccttcagctgctcctaaaatagagaagccatatatgccaagatgtttaaaacaaagaagggccttgaggagcagtcggctccttattgggatcatccggagtggccgtctccaattaaa

SEQ ID NO: 32145 - DNA, 486 bp, Homo sapiens
tacactactatagggcgaattggagctccaccgcggtggcggccgaagccactgcaatgacgccggcattggcggcgccgaagaaagcctgctcgaccggatcggtgagggtggtgccgccgctgatcgagaagttgatcacgtggacgccgtcagcgacggccttctcgatggccgccacgctgtcgccaacgtagcagctgttgcgccggccgctctagaactagtggatcccccgggctgcaggaattcgatatcaagcttatcgataccgtcgacctcgagggggggcccggtacccagcttttgttccctttagtgagggttaattgcgcgcttggcgtaatcatggtcatagctgtttcctgtgtgaaattgttatccgctcacaattccacacaacatacgagccgggagcataaagtgtaaagcctggggtgcctaatgagtgagctaactcacattaattgcgttgcgctcactgcc

SEQ ID NO: 32146 - DNA, 712 bp, Homo sapiens
gactcactatagggcgaattggagctccaccgcggtggcggccgcccgggcaggtacgcgggatcaaaatgttaagtcaaatctgtaatactttggctaaaattcataaagtaagccctagagaaaatacttgaccaccaaatttttgcccaactatcatcacctcccttcccccgcctctgttcttgccttttgacatctacatggaagacaagttctttacagcaaatggtaagaggcaggtgacctggtgtgtttgctgtgttgtagttcattgcctgtggcttgggactccttttttaatggagagactagctgtgcaggtgtgtgttggatagggataaagtgctcacccctgccctctctacagtagttggtggtagatttctctctcattttgcctcataatcactttcgagtgcatgtatttacctaagggctgtagctctgtgggatgctaccagcatattggactgacagaaattgattaccttgccactccaacctacgtacctcggccgctctagaactagtggatcccccgggctgcaggaattcgatatcaagcttatcgataccgtcgacctcgagggggggcccggtacccagcttttgttccctttagtgagggttaattgcgcgcttggcgtaatcatggtcatagctgtttcctgtgtgaaattgttatccgctcacaattccacacaacata

SEQ ID NO: 32147 - DNA, 300 bp, Homo sapiens
gcgaattggagctccaccgcggtggcggccgcccgggcaggtacaaactcgggcctcactttttttctgggacagctgtttgccctgtgttacagaatgcatgtgaggactagatatttaaacatatgatgcctggccacagagaaggtatttgtaattggattcttctggaccagccccaacctttgaagttctagaattaggtgccccctttgcccaaaggctatcagctattggaggggagggtggcagtatgtccctcactgggtagcctgtgaacactaactgacttcaccagtg

SEQ ID NO: 32148 - DNA, 449 bp, Homo sapiens
tacgactcactatagggcgaattggagctccaccgcggtggcggccgaggtacgcgggggaaacaaatcaaatgtttgttctcaaattcttactctgtcatttattattctccatgtttttgtaactgcttccttggagatatttaaacataaatatatacagagagggtgaagatggaggagtgctttttacagttcacagttggcttttttcatgtgtgacaggtttttgctgtgttgcccaggctggagtgcaatgccacaatcttggctcactgcagcctcaacttcccgggctcaatcgatcccccacctcagcctcccgagtagcaaggactacaggcgcacaccaccacacctagctaatttttgtatcttttgtagagacagggtttcaccatgttgtccaggctggtcttgaactcttgggctcaattggtcctagcacc

SEQ ID NO: 32149 - DNA, 355 bp, Homo sapiens
ggcgaattggagctccaccgcggtggcggccgaggtacgcgggggagcccacaggtttcccagtcgagtctgaggctgtgatgggaggatggtgctgagacctttggaacaggcattggaaggactgccgtggccacacaaggaagccaggtatgtgatgacatcaaccgacgcctggcaactgctgcagggacagtgggctggaggaaagttgtcaatacctgtaaagaagagaatggctttactggtgcaagagctttcaggccaccggtgggacgcagcagatgacatccaccgttccctcatggttgaccatgtgactgaggtcagtccagtggatggtaggagttaaaag

SEQ ID NO: 32150 - DNA, 433 bp, Homo sapiens
gggcgaattggagctccaccgcggtggcggccgaggtacgcgggtgactaccagcatccatactaatctgggagatccagggatgtgccttgttatggaggggactgtgactcctttaagacctagaccatcacttgggagatttgttttggtctctgggtggattgtggatggtagacagatcacaggccagcatgacctggctttggccttgctggttatagaatttctattctgcagagctaagagtgcaaactaggaccaacattaccaagaggacagaagctatctggggatcctggctggcagtgctcaacttacagctcaagcctgtgataacaggagaggtggagtgtgttttgtgcttcattgtgcatgtgtttcaagcagaaactagacttgagggcttaaatagaaaacatcttaaacaatc

SEQ ID NO: 32151 - DNA, 407 bp, Homo sapiens
atacgactcactatagggcgaattggagctccaccgcggtggcggccgcccgggcaggtacctgcaggcctcctacacctacctctctctgggcttctatttcgaccgcgatgatgtggctctggaaggcgtgagccacttcttccgcgaactggccgaggagaagcgcgagggctacgagcgtctcctgaagatgcaaaaccagcgtggcggccgctctagaactagtggatcccccgggctgcaggaattcgatatcaagcttatcgataccgtcgacctcgagggggggcccggtacccagcttttgttccctttagtgagggttaattgcgcgcttggcgtaatcatggtcatagctgtttcctgtgtgaaattgtatccgctcacaattccacacaacatac

SEQ ID NO: 32152 - DNA, 450 bp, Homo sapiens
tagggcgaattggagctccaccgcggtggcggccgaggtacgcggggcttgggaagatggcggctgtgtcggtgtatgctccaccagttggaggcttctcttttgataactgccgcaggaatgccgtcttggaagccgattttgcaaagaggggatacaagcttccaaaggtccggaaaactggcacgaccatcgcttgggggggcctataaggatggcatagttcttggagcagatacaagagcaactgaagggatggttgttgctgacaagaactgttcaaaaatacacttcatatctcctaatatttattgttgaggtgctgggacagctgcagacacagacatgacaacccatctcattttttccaacctggagctccactccctctccactgaccggtttcccagaattgtgacagccaatcggatgctgaaacagatgcttttc

SEQ ID NO: 32153 - DNA, 571 bp, Homo sapiens
  misc_feature 17: n = A,T,C or G
cgaattgggccctctanatgcatgctcgagcggccgccagtgtgatggatatctgcagaattcggcttagcgtggtcgcggccgaggtacaagcttttttttttttttttttttttttgacagtataacagctctttatttctgtgagttctactaggaaatcatcaaatctgagggttgtctggaggacttcaatacacctccccccatagtgaatcagcttccagggggtccagtccctctccttacttcatccccatcccatgccaaaggaagaccctccctccttggctcacagccttctctaggcttcccagtgcctccaggacagagtgggttatgttttcagctccatccttgctgtgagtgtctggtgcgttgtgcctccagcttctgctcagtgcttcatggacagtgtccagcacatgtcactctccactctctcagtgtggatcccacccctctttcatctctgtacctgcccgggcggccgctcgaaagccgaattccagcacactggcggccgttactagtggatccgagctcggtaccaagcttggcgtaatcatgg

SEQ ID NO: 32154 - DNA, 420 bp, Homo sapiens
gggcgaattggagctccaccgcggtggcggccgcccgggcaggtacgcggggagcggaggtgcgtctgtggtgtcagacacctgtgtctcagctctgtcttcctcgggctggctcctgcggatccttcctgggccagaaccgtgcctctaggccacctcccccaagccaccaagcccccgcggtgggccagccttggcccagtgtcacgcaggacagaaatgaccaacagataactgaggacaatggacctgcctgggcatagacttccttaaggtaagtccattttaaaccaacgatttctcgatgacattatttctccgtcgatgttggcagaaatgccagcattgggaaggtaaactaaagagaggtagggaagttgttcaagttaggcctttgtgatgaaatcaccaaggttttgg

SEQ ID NO: 32155 - DNA, 316 bp, Homo sapiens
attggagctccaccgcggtggcggccgcccgggcaggtactttcaataaagagaccaatattatttataaaagtagctaaataaataaaagtttctgaaatttatagccaaaagcatacgttcaaaaaataacatttcttcctgattagaagagcccgcgtactttttttttttttttttttttttttttttggagggtttaatgtttcatgactggtaacagattagtttctaggggatccttggagaacctgttctgactttagaagcacttcctgtggacaatggagggccctgccttatctttcttaggctt

SEQ ID NO: 32156 - DNA, 257 bp, Homo sapiens
aatacgactactatagggcgaattggagctccaccgcggtggcggccgcccgggcaggtacgcgggccccagacatcaaccaaaaactgtatctatcctatttggtgcttagttcattattacacatctagggaaggaacagtaaaattgtaatgctcatggtttaagcatagcatattctcagtgtaggaagaaaaaagaacaactgtgcatttgttttggcacaggaccttttggaaggtaaagagcataccatg

SEQ ID NO: 32157 - DNA, 458 bp, Homo sapiens
tacactactatagggcgaattggagctccaccgcggtggcggccgcccgggcaggtacttttttttttttttttttttttttttcgaaaagatggggtttctccatgttggtcagggtggtcttgaactcccaacctaaggtgatccgcccgcctcaccctcccaaagtgctgggattacaggcgtgagccaccatgcctggcttaaagagataaataattaagggatccttaaaagaaatggaacagtttgtaagaaagataaatttcaaactttttgctaggagggaaaactattagggctacatactctataattctagaaccatttccttcaaaatgcttctgggtgaccttttcaaattaaatttttaaaaatacagtaaaagatagcagtgtcagttgtttgtgggtgaaaatataaacccaacactggatataatacagatcaaaaaattt

SEQ ID NO: 32158 - DNA, 364 bp, Homo sapiens
tacactcactatagggcgaattggagctccaccgcggtggcggccgaggtacgcggggaagaacaatgtgaactatcaaaccagcaggacctattactataaatgagagggaggaaggaccaaggatgcttcttatgtaactgccttctattcctgggtgactggttgcacagtctccttagagaatcccggaacagagagaatatataccttccactggaagaatctcaaacagcgctgcttactcaggatcagtggcaccagccaactcaactttgggacaaacccagccaagtgaccaggacactttagtgcaaagagctgagcacattccatcagggaaaccaactccaatgtgcgccca

SEQ ID NO: 32159 - DNA, 436 bp, Homo sapiens
ctatagggcgaattggagctccaccgcggtggcggccgaggtacttttgcttggattctttaagagggtgggggtcgggggaggcttggcagcataaaggcaggccgctctgggctgaccgtgctcctgacctggatgcagaactgtggaagttgccctccttgttctgcttcctgctccctcttttagcccgtgtgtccaggggagaggatgggtgttccgggagcacaaggccatggcacagccagcagccttctggcagttcctgaaggacagcaagtttgacagagatattaccccagctggggctagagcagaggaacagttggttgtgtgctgccatttgacagtatcctaattcctgacccactgtgagcattaacagcccaaatacatatcttctagacagtctggtgcttaaagaaacctctgccag

SEQ ID NO: 32160 - DNA, 506 bp, Homo sapiens
ggtactactgctgtcccacatgctctccatgatcctgaagaaaacttctgtcaatggctccatccatttcctggctcttgggaggctgaggcagcagaatcgcttgaacccgggcagcggagattgcagtgagcagagatgaccattgaactccagcctgggcgatgagtgaaattccatctcaggctgtttctcgttccatacaaaatggctgaccaagtccattactgggagctctgcccatccagaagttttcctctcgctcggaatacagccactgaaggaggtaaaagatatctacaagtagaactttgatattattacttcttctactgaacttcatatatattattgcaattgcctattttctccttaaattcttccttcccgcgtacctcggccgctctagaactagtggatcccccgggctgcaggaattcgatatcaagcttatcgataccgtcgacctcgagggggggcccggtacccagcttttgttcccttta

SEQ ID NO: 32161 - DNA, 369 bp, Homo sapiens
gtatacgactcactatagggcgaattggagctccaccgcggtggcggccgaggtacttttttttttttttttttttttttttgggatttttttttttctttttttttttttttttttagccacactggtttttgttaagacctcatcagtcctgggtgcttgccctcaattcctccatagctatgttagcatatttaatatcttttgctattaatccttaactagttaatccttaaagggctagttaatccttaactagtcccttcattttgtgcattatcttccagtattctccttctctttttttacttcttccctgctacccatgtgctcttggtgggtagttaccaacatatacagaatctgctt

SEQ ID NO: 32162 - DNA, 450 bp, Homo sapiens
actactatagggcgaattggagctccaccgcggtggcggccgcccgggcaggtacttttttggatacaattttcatagaaaacagcaaacaacagttttataggaaaatctactgctctccacacttctttgtatttagaagagtcttgatgcttctaatcaggcacccagaattccccaaatactgacaaatcaagcgtagtctatgaggatctggctcttgtccccacagtcagtcctcatggggcggtgggcagggatcatgaggtttactccccctctgatatcaggagaaatgtcacagactttgggggaagggagcaaggatcacttggtaaaccggggctctcaagtggaccttgttagtggaaacgactctcaagtcacccaggggcaaggacggttccctgctggcctccggcctgcttggcctgggtcacctgaacactc

SEQ ID NO: 32163 - DNA, 540 bp, Homo sapiens
gtatacgactactatagggcgaattggagctccaccgcggtggcggccgcccgggcaggtactttttttttttttttttttttttggagagacaaggtcaccctatgttgtccaggctggtctcaaactcctgagctcaagggatcccccagcctcagcctcccaaaacgttgggattacaggcatgagtcaccatgcctggcttaaattaacttttaggttcaataaatcccaataaaaatcccagcagactttttttttttgtggaaattgacacgtagattctaaaatttaaatggaaatgaaaggactaaaaagaacaaaagacaaacttgaaaaataggaatttggaggacttcagttaccaaatatcagggtattacaaagctacggttatttaaaaagtaaaagcaacagcatggtattggtgcaagcataaaaaaatagagaaagaaaaacagttttataccccgcgtacctcggccgctctagaactagtggatcccccgggctgcaggaattcgatatcaagcttatcga

SEQ ID NO: 32164 - DNA, 431 bp, Homo sapiens
ctactatagggcgaattggagctccaccgcggtggcggccgcaatattggccaggtcttcgtcggcgaaacgcggtggggcgacggcggcggcaaccggctcctgcagcggcggacggtggccggtcagggccgaatggcatagcagggccagttcattcagatcggcgggaatacgcgcgaccaggcagccttgcgcacgcagggtgcggatagtggcgctggagcaaaagcggtacagcacaacgaccgcagccacgccgcttgcctcgcgcgcggcggcaatggccggcatcacccgttcatcgagttcggactgctcgatcaccagcacgtcggcgcctgtatcacgcggtaactcctgcgccatcgcaaggccagcgctgtggccgcgcacatccagtccaagggcgctctgccccatggcggcaa

SEQ ID NO: 32165 - DNA, 67 bp, Homo sapiens
ctatagggcgaattggagctccaccgcggtggcggccgaggtacggccagccacttaacccattggc

SEQ ID NO: 32166 - DNA, 382 bp, Homo sapiens
agggcgaattggagctccaccgcggtggcggccgaggtaccatggacttcaaagattgggaacaggtgggaattgccttaaaacaagtttgtaaggaaggaaaatttatccccctaacagcctggtcaaactgggctatagttaaagcagcctcggaaccgtttcaatcggaaaatgaggcttatcctccagcagaaagaatttctgcagaggaaggtggtgatgctgctgaaggaggagaggatagtgaagaggattttgaggaaaatacagacaaacctggagatgagttaatttcttttgaggagcacgtgggaccttcagctgctcctaaaatagagaagccatatatgccaagatgtttaaaacaaagaagggcctt

SEQ ID NO: 32167 - DNA, 259 bp, Homo sapiens
  misc_feature 223, 224, 241, 242: n = A,T,C or G
gagctccaccgcggtggcggccgcccggcaggtactataagctcctacctagaagacataatactgaataccgaagcgaatactgcagaagaacaagccagggcagaaatagagaagatggctgagaaaatcaatgacattgcttatgaaatggaaagccgccgaacctatcttcagtcagaggagattgggttgctgagttggtttattagttttctggatnncccagtaggtgcaaaannatactttgtcaaagaaa

SEQ ID NO: 32168 - DNA, 442 bp, Homo sapiens
ctactatagggcgaattggagctccaccgcggtggcggccgaggtacacatttgacttactgcacagtatattgatcattttaatgggaaactttagctttctactttttatttttgttttttcactttctatgccattatttttgtattctttttcttagtgtgagctctaaaatcaatgttcttgaaaaagaaattattttgcagaagttggggaatcatgtttgttgaatatgtataaaatagaaacataggctgggcgcggtggctcacgcctgtaatccctacactttgggaggctgaggcaggtggatcacctgaggtccagagtttgagaccagtctggccaacatgatgaaaccccatctctactaaaaatacaaaacattggctgggattacaggtgtgagccgcagcgcccggccaaaaaaaggaattttta

SEQ ID NO: 32169 - DNA, 475 bp, Homo sapiens
aatacgactcactatagggcgaattggagctccaccgcggtggcggccgaggtactttgggaggccgagacgggcggatcacgaggtcaggagatcgagaccatcctggctaacacggtgaaaccctgtctctactaaaaaaaaataaaaaataaaaaataaaaacatttctgggcatggcggcggaggcctgcagtcccagctactcgggaggctgaggcaggagaatcgcttgaattcgggaggcggaagttgcggtgagccgagattgcgccactgcactccagcctgggcggcagagccagactctgtctcaaaaaaaaaaaagaaaagaaaaaagaaaaagccactccaggctcactgcatcaggatttgcactgcaacagcatgcccagggcacagtcatgtttgagaaatacggaggacctctgaagtgcttgattctgtgaactcacactgctgtaagcagacttgt

SEQ ID NO: 32170 - DNA, 172 bp, Homo sapiens
cactataaggcgaataggagctccaccgcggtggcggccgcccggccaggtacacaataggatatggggatatacaatgaggaatcaaacagagaagtagctctgctctcagagaatttatattttagggggagaagacacaaaataattaaaattaataaataaaacatat

SEQ ID NO: 32171 - DNA, 619 bp, Homo sapiens
gcgaattggagctccaccgcggtggcggccgaggtacgccaaaggatccgatttgcatagcggagctccagctgttgtgggaagagaggaccagccggcaacttttatccagctctaaactttatttcctcccagaagacactccccagggccagaaatagcgaccatggcgaggatgaagtcattgctgtttccgaaaaggtgattgtgaagcttgaagacctggtcaagtgggtacgcgggataccaagtttatataatttgaaaaaaaaaaaaaaaaaagtacctgcccgggcggccgctctagaactagtggatcccccgggctgcaggaattcgatatcaagcttatcgataccgtcgacctcgagggggggcccggtacccagcttttgttccctttaagtgagggttaattgcgcgcttggcgtaatcatggtcatagctgtttcctgtgtgaaattgttatccgctcacaattccacacaacatacgagccgggagcataaagtgtaaagcctggggtgcctaatgagtgagctaactcacattaattgcgttgcgctcactgcccgctttccagtcgggaaacctgtcgtgccagctgcattaatgaatc

SEQ ID NO: 32172 - DNA, 461 bp, Homo sapiens
agctccaccgcggtggcggccgaggtactggggtgagatgatctgaagggtgtttccaatgagaatgacacaaataccaaggactggagaagcccttggaacaattgataaagcttcccacatttttttttttttgagatggagtctcactctgtcacccaggctgatgcaatcgcatgatctcggctcactgcaacctctgcctcctggaatcaaggaattctcctgcctcagcctcctgagtagctgggattacaggctcccaccacacctggctaatttagtatttttagtagagacagggtttcaccatgttggtcaggctggtctcgaactcctgacctcaggtgatccacctgcttccgcctcccaaagtgctgggattacaggcatgagccactgcgcctggtcaatttcccacattttcttaagattaatgtttggcctacaaaagctcaacc

SEQ ID NO: 32173 - DNA, 410 bp, Homo sapiens
gcgaattggagctccaccgcggtggcggcgctcttccgcttcctcgctcactgactcgctgcgctcggtcgttcggctgcggcgagcggtatcagctcactcaaaggcggtaatacggttatccacagaatcaggggataacgcaggaaagaacatgtgagcaaaaggccagcaaaaggccaggaacccgtaaaaggccgcgttggctggcgtttttccttaggctccgcccccctgtacgagcattacaaaaaatcgacgctcaagtcagaggtggccaaaacccgacaggactataaagataccaggccgtttccccctggaagcttccctcgtgcgctctcctgttccgaccctgccgcttaccggataccctgtccgcctttctcccttcgggaagcggggcgctt

SEQ ID NO: 32174 - DNA, 382 bp, Homo sapiens
ggcgaattggagctccaccgcggtggcggccgcccgggcaggtacagagcagagaaagccttaaacagcaataaaatgcagatgctgttgtccctgaaaaaatcactttctttctagaacagtcaaggcttatttcacctcagcccctggttgtatgatactaatacgctctgatactccagggaagcaaccagtgactgagatttgaggattaaaatcaaagcacaatgaactatcatttggctgccccaggcccactaaatccagacagcaaagtgttctcaccattctgagacaccttcggctacacatttctccagccaaaaacctaggaagatgtccggctgacagatgcgcctgttacatgattcagagaagacag

SEQ ID NO: 32175 - DNA, 290 bp, Homo sapiens
gtgggcggccgcccgggcaggtacagtagtgcactcttggctcactgtagcctcgacctccggggctcaagtgatcctcctgccttagccccacaagtagtgggactataggcacacagcaccatgcccatctaagtttttgtattttatgtagagacaaagtttcaccatgttgcccaggctgaatcttgagcctccctgagccttaagtgatctgcccaacccttgagactccccaaaaacgcctgggaattaataggcgtaaaaccatccatgcccctgggccttaa

SEQ ID NO: 32176 - DNA, 427 bp, Homo sapiens
gagctccaccgcggtggcggccgaggtacttctctattttttttttttcaatttctggcatttaaaaatgaagaaaaaggaaaaaaattcaggacaattgaccctttgaccaaaatgctaagatgaaaatatagacaatagaaagaaatccccaaatgatcaagctgtgagaattaccaaagaaggactaaataacagcaatgattgatgttaatattaacaagaagatagacaaaaaatgcataaaagattggataattctgtcagagaattggaattttaaaaaatcaaataaaaattttagaagttaaaaacatagtaactaaagttaaaaacaaatgggttttatagcataattgacatgcaccaacggttagtgaattggaagacaggttagttaaaaaaattcaaatatatccaaaatgaa

SEQ ID NO: 32177 - DNA, 473 bp, Homo sapiens
atacgactactatagggcgaattggagctccaccgcggtggcggccgaggtactttgggaggccgagacgggcggatcacgaggtcaggagatcgagaccatcctggctaacacggcgaaaccctgtctctactaaaaaaaaataaaaaataaaaaataaaaacatttctgggcatggcggcggaggcctgcagtcccagctactctggaggctgaggcaggagaatcgcttgaattcgggaggcggaagttgcggtgagccgagattgcgccactgcactccagcctgggcggcaaagccagactctgtctcaaaaaaaaatatgaacagaaaaaagaaaaagccactccaggctcactgcatcaggatttgcactgcaacagcatgcccagggcacagtcatgtttgagaaatacggaggacctctgaagtgcttgattctgtgaactcacactgctgtaagcagacttgt

SEQ ID NO: 32178 - DNA, 465 bp, Homo sapiens
agggcgaattggagctccaccgcggtggcggccgaggtacagttgccatggctgggccctgtagacaattgctaagcctttctggtgccactatccttgcccatatcttttcatactgccttcataccatggatctgaacttttgcaagaataccaggattaaccccctgcttgcctggatgttttcccactttcagctgcaaacatctacctagaccagctctaaccttgcaggccttggagagtcactgcaaatatgctgcctgcaatctggccatctcattgtctagacatgacagcaaagacatattgtttcaattgcatctttggttgaattgttatgctaacaacctttagttactttcacctcgtatcttcatcttggtcctgccactttaacactttaaaactcagttttctctttttagagtaaaataataatggaatctacctcctatggctatt

SEQ ID NO: 32179 - DNA, 46 bp, Homo sapiens
actcactatagggcgaattggagctccaccgcggtggcgggcgtgg

SEQ ID NO: 32180 - DNA, 180 bp, Homo sapiens
actatagggcgaattggagctccaccgcggtggcggccgcccgggaaggacgcggggattcccaggaggcctcagaccccgtcacctgagatgagagctggatcccggagaagctcaggtctgacccagcattcattgctgtaggaagggctcgtctagactccaagggagccgggtgcg

SEQ ID NO: 32181 - DNA, 395 bp, Homo sapiens
  misc_feature 327, 334: n = A,T,C or G
cactactatagggcgaattggagctccaccgcggtggcggccgcccgggcaggtacgcgggggacgcggaacccggcgcggcggcggcacgatggtcatggcgtatttcgtcgagaatttttggggggaaaaaaatagtggctttgatgtcctctaccataatatgaaacatggacagatatcaacaaaagaactagcagattttgtaagggaacgagctaccatagaggaggcatactccaggtcaatgacaaaactagcaaaatctgcaagcaattattcacaacttggaacatttgcaccagtatggtgatgtattcaaaacantctacangagaaattacgccaaattgtcactttggatcattgttagaaaaattaccaagaattaataa

SEQ ID NO: 32182 - DNA, 396 bp, Homo sapiens
acgactcactatagggcgaattggagctccaccgcggtggcggccgaggtacagcatcctggagtggtgtcaagggaaagaaacatgctgcttctgccacagacggaccatgcatgggaagaaactatttgagaatggctctccaaggggctggtcggccttgtctgcccactccctctacctttctttgttctgtttctttctcttcagtgttggtccattttccttttttcactgttgcgtgttagcacatcattactcttatctccatatatttggatgtttcctgcattatggtgagcttcagtaggtcttggatgagttagttgttctcattccaaaatgtaaatttctggtgtttagtaggtgctcagtaaagcttgagaaagatgaaag

SEQ ID NO: 32183 - DNA, 449 bp, Homo sapiens
tacactactatagggcgaattggagctccaccgcggtggcggccgcccgggcaggtactttaacaagtaaaactaagttggttataatgtgacaaaaatacaagcaataataatagcaaaattatccaataggaaccatgcagagagttttatattataactcatgtcccctttcctgcaatgttattaacttctatccccattttccacatcaaggaaattaagtttggagacacagagtgacttacctaagtcacaggtctggtaggtggagagtttctctcactccagggaccacaatctacaaaataaacttgcatattctacaaaatatttgttaccattggaagtaggtaggcagagtgttactagcattaaattatggcaggaataaaaagaaagggtggtgggctggtcttgcttctgcagtttaagggggatccctgcgc

SEQ ID NO: 32184 - DNA, 433 bp, Homo sapiens
ggagctccaccgcggtggcggccgaggtacgcgggtgactaccagcatccatactaatctgggagatccagggatgtgccttgttatggaggggactgtgactcctttaagacctagaccatcacttgggagatttgttttggtctctgggtggattgtggatggtagacagatcacaggccagcatgacctgtctttggccttgctggttatagaatctctattctgcagagctaagagtgcaaactaggaccaacattaccaagaggacagaagctatctggggatcctggctggcagtgctcaacttacagctcaagcctgtgataacaggagaggtggagtgtgttttgtgcttcattgtgcatgtgtttcaagcagaaactagacttgagggcttaaatagaaaacatctcaaacaatccatgaaatg

SEQ ID NO: 32185 - DNA, 405 bp, Homo sapiens
gactcactatagggcgaattggagctccaccgcggtggcggccgcccgggcaggtactggtgctacaccatgcgctcgtggttcctgagggcacaattcattcattcgtgaaacagggcaaatttgagattcagacctccaaggctccaagctacattgctttattggaggcggccactccggatgatcccaatgaggagccgactgctcctcaaggcccttctttgttttaaacatcttggcatatatggcttctctattttaggagcagctgaaggtcccacgtgctcctcaaaagaaattaactcatctccaggtttgtctgtattttcctcaaaatcttcttcactatcctctcctccttcagcagcatcaccaccttcctctgcagaaattctttctgct

SEQ ID NO: 32186 - DNA, 376 bp, Homo sapiens
gcgaattggagctccaccgcggtggcggccgcccgggcaggtactgcaatgggcactgaaggagactgtggaggtcatttaaaaatagtccctgaactctccaaagtgggattataagtgcaaaaacagtgcccaggatgagtaggaaagccacattacagattgaaagaaggaagaagttgcatgcgatctggggacaggcaaatgtgcagggagtaggggacatggcaatggactacagaattaggaattttggtaggtaggagtaggtagacatgggataattgaagaattccaggtggaaataataaaatataaaagaaatgggaaaggaggcattttgaggggagagtgagttgtttgtccacagggactg

SEQ ID NO: 32187 - DNA, 414 bp, Homo sapiens
cgcgtatacgactcactatagggcgaattggagctccaccgcggtggcggccgccacgctggttttgcatcttcaggagacgctcgtagccctcgcgcttctcctcggccagttcgcggaagaagtggctcacgccttccagagccacatcatcgcggtcgaaatagaagcccagagagaggtaggtgtaggaggcctgcaggtacctcggccgctctagaactagtggatcccccgggctgcaggaattcgatatcaagcttatcgataccgtcgacctcgagggggggcccggtacccagcttttgttccctttagtgagggttaattgcgcgcttggcgtaatcatggtcatagctgtttcctgtgtgaaattgttatccgctcacaattccacacaacatacgagccggg

SEQ ID NO: 32188 - DNA, 446 bp, Homo sapiens
tacgactcactatagggcgaattggagctccaccgcggtggcggccgaggtacttttgcttggattctttaagagggtgggggtcgggagaggcttggcagcataaaggcaggccgctctgggctgaccgtgctcctgacctggatgcagaactgtggaagttgccctccttgttctgcttcctgctccctcttttagcccgtgtgtccaggggagaggatgggtgttccgggagcacaaggccatggcacagccagcagccttctggcagttcctgaaggacagcaagtttgacagagatattaccccagctggggctagagcagaggaacagttggttgtgtgctgccatttgacagtatcctaattcctgacccactgtgagcattaacagcccaaatacatatcttctagacagtctggtgctcaaagaaacctctgccaga

SEQ ID NO: 32189 - DNA, 467 bp, Homo sapiens
acgactcactatagggcgaattggagctccaccgcggtggcggccgcccgggcaggtactcatacaataagaccctatacaagcatttaagtaacgatgcaatacaatatttaccaaactgacgacatgtccatgttatattgctaagctacaaaaaaaagtcatataatacatactctaagattccctttttaaaataaatataaacatggcccatatacaaaagaataggaagataaatatatcactgcatggtattatagattactattttcttcttttcatttatgtatatcgtctccattttcacagtgaatatatacctattagtaagagaaaatccaatgaatatcttttttctttttttttgagatggaatctcactggctgcccaggctggagttgcagagccgtgatctcagctcactgcagcctccacctcccaagttcacgcgattctcctgcct

SEQ ID NO: 32190 - DNA, 449 bp, Homo sapiens
tactactcactatagggcgaattggagctccaccgcggtggcggccgaggtacatgactccaggaaagtgattctcacccctctgagccccagttcccccacctctggcagggagataataatacctaactcacaaggttgttgagagggttggaaacaaagcctgcagagaacctaacacatgatatacgtttaacaaagggcatccatctaagacattcaaccagcatcggcatttgcaacaagtcaacctttacttttcaggatttcatttggggaaaaattaaacattcaccagcatatttttgtatagtgtttaagaacatgaagttagattattcaaacctcaccttataagttctgtgcatttttcctcttttatgtctctgctccctcactataaaagtagaacaagagtgcttaccttgcatggttgttgtgcatgtgaa

SEQ ID NO: 32191 - DNA, 449 bp, Homo sapiens
tacgactcactatagggcgaattggagctccaccgcggtggcggccgcccgggcaggtacattttggattagaattgaagtatcagtctgttgtttcttcatttcttctttttctatgctctgtttacaatttcagctactccagaagctcagattttccctattccaagctatgagatgtgatgccacatttggaattgccttcttgatatccccttctgagaatgcattgcctgctttttaactcattatattcaaaactaagttcatcatcattctctccttacaccagttctgaccctgactttgccatttttccttactaagtacgcgggggttttttttcttgctgcagcaacgcgagtgggagcaccaggatctggggctcgggacgagactgcacggattgttttaagaaaatggcatacaaaccagacatgggggaaatc

SEQ ID NO: 32192 - DNA, 410 bp, Homo sapiens
gactcacttagggcgaattggagctccaccgcggtggcggccgcgcaggtattcctcgacgatcacgcgccggccatgcttgcgcgcgaactcgaaggcgcgcgccacggcgtcaggggagacgcagtcgacggtcacgcccttgccctggttggcgtccagcggcttgatcgccaccggccggccgctctagaactagtggatcccccgggctgcaggaattcgatatcaagcttatcgataccgtcgacctcgagggggggcccggtacccagcttttgttccctttagtgagggttaattgcgcgcttggcgtaatcatggtcatagctgtttcctgtgtgaaattgttatccgctcacaattccacacaacatacgagccgggagcataaagtgtaaagcctgggg

SEQ ID NO: 32193 - DNA, 645 bp, Homo sapiens
gactactataaggcgaattggagctccaccgcggtggcggccgaggtacttgaaaagaagcccggcctctgagcagtcactcattcctggtaaagcccctcgaagtctgcagacttcatggctggcagaaagtcacaactggtgttttgctgtgtcagtggcctgggagaaaaccagcagctgatgaggctggagaccactacataagatgctatcatcatccccgacatggcgagtgatacgaagcccaaaccacagaggatgcagagcagtgagaagccacccacagagatgaccaatccttccaatattatgacccccagcagagcagccagggtggtaagcaccacgatgagcaggaagaatccaacaggaacggccgctctagaactagtggatcccccgggctgcaggaattcgatatcaagcttatcgataccgtcgacctcgagggggggcccggtacccagcttttgttccctttagtgagggttaattgcgcgcttggcgtaatcatggtcatagctgtttcctgtgtgaaattgttatccgctcacaattccacacaacatacgagccgggagcataaagtgtaaagcctggggtgcctaatgagtgagctaactcacattaattgcgttgcgc

SEQ ID NO: 32194 - DNA, 433 bp, Homo sapiens
tacactactatagggcgaattggagctccaccgcggtggcggccgaggtacttttgcttggattctttaagagggtgggggtcgggggaggcttggcaacataaaggcaggccgctctgggctgaccgtgctcctgacctggatgcagaactgtggaagttgccctccttgttctgcttcctgctccctcttttagcccgtgtgtccaggggagaggatgggtgttccgggagcacaaggccatggcacagccagcagccttctggcagttcctgaaggacagcaagtttgacagagatattaccccagctggggctagagcagaggaaccgttggttgtgtgctgccatttgacaggattctaattcctggcccactgtgagcattaacagcccaaatacatatcttctagacagtctggtgctcaaagaaa

SEQ ID NO: 32195 - DNA, 284 bp, Homo sapiens
actcactatagggcgaattggagctccaccgcggtggcggccgcccgggcaggtacctaataaatatttttggcatatgtgaatgaatgagtgagtgaataaataatcagattagttgatgaaagattctaagggaagattaggtaatgtgattataagagaaagatcctgaagaatgcttgggaatggatcctttactcatacatgaattttgttcatcaaccttatattgtagggatcacagttcattttggtaaaaatattgggtccatttgaaaaattta

SEQ ID NO: 32196 - DNA, 438 bp, Homo sapiens
tatagggcgaattggagctccaccgcggtggcggccgaggtacgcgggggaaacaaatcaaatgtttgttctcaaattcttactctgtcatttattattctccatgtttttgtaactgcttccttggagatatttaaacataaatatatacagagagggtgaagatggaggagtgctttttacagttcacagttgtctttttcatgtgtgacaggtttttgctgtgttgcccaggctggagtgcaatgccacaatcttggctcactgcagcctcaacttcccgggctcaatcgatcccccacctcagcctcccgagtagcaaggactacaggcgcacaccaccacacctagctaatttttgtatcttttgtagagacagggtttcaccatgttgtccaggctggtcttgaactcttgggctcaattggtcctagcacc

SEQ ID NO: 32197 - DNA, 453 bp, Homo sapiens
agggcgaattggagctccaccgcggtggcggccgcccgggcaggtacttttttttaaatacttagtatatagactggggctgggcgcggtggcgcatgcctgtaatcccagcactttgggaggctgaggcaggccgatcacttgaggtcaggagttagagaccagcctggccaacatggcgaaacccccgtctttactaaaaatagagacacgtcactgcactccagcctgggtgacagagtgagactccatctcaaataaataaatacttagtgtatgataaaagctagaataaacatactgttttaagtagaattctgaaacaacttcaaattcatttaaacatacatcaattgacagttaagcaagctaagcttaagcaagttaacttgttttgccatttctatcaacctaagaaatagggaattttacaagacagtaaaactatgtaaa

SEQ ID NO: 32198 - DNA, 655 bp, Homo sapiens
cgcgcgtaatacgactcactatagggcgaattggagctccaccgcggtggcggccgaggtacagtagtgcactcttggctcactgtagcctcgacctccggggctcaagtgatcctcctgccttagccccacaagtagtgggactataggcacacagcaccatgcccatctaagtttttgtattttatgtagagacaaggtttcaccatgttgcccaggctgatcttgagctcctgagctcaagtgatctgcccaccttggactcccaaaatgctgggattataggcgtaaaccaccatgcctggccttaaatcaactttagagtcaacatctcttatcactggagcttctggagaaactccatcacgtggtgctctctttcctgatgtgttgtgcccaaatagcttgttctcatcagatgacttcccgcgtacctgcccgggcggccgctctagaactagtggatcccccgggctgcaggaattcgatatcaagcttatcgataccgtcgacctcgagggggggcccggtacccagcttttgttccctttagtgaaggttaattgcgcgcttggcgtaatcatggtcatagctgtttcctgtgtgaaattgttatccgctcacaattccacacaacatacgagccgggagcata

SEQ ID NO: 32199 - DNA, 415 bp, Homo sapiens
actactatagggcgaattggagctccaccgcggtggcggccgcccgggcaggtactagattccagttccccctctcacagctcccctaggtttctgctcgtaagatgacaaagttgtgactgtatgctgacatgattattttattaatgattgctgctcagctgaactgtcagctctgaaagaacagtgacatgtggtctttccattgtatcatcttcactgaaaggaaataaataaacaaatgaagagttctaatatatttggcttaaaatcatattacttcaggccaggcacggtggctcatgcctataatcccagcactttgggaggccgaggcgggtggatcgtctgaggtcagaagttcgagaccagcctggccaacatggtgaaaccctgtctctattaaaaatacaaa

SEQ ID NO: 32200 - DNA, 695 bp, Homo sapiens
atacgactcactatagggcgaattggagctccaccgcggtggcggccgcccgggcaggtactctatttcagatttcctcaaagctgggcagttgttagcgagaatgaccaatttcgctttgccttgtctgatcatcttcagagtctgcttgtaccactgcgaggcgactgtttatacatgaaagcatccatgatgaggttgtaaacagacttaaaaaggcctatgcacagatccgagttgggaacccatgggaccctaatgttctctatgggccactccacaccaagcaggcagtgagcatgtttcttggagcagtggaagaagcaaagaaagaaggtggcacagtggtctatgggggcaaggttatggatcgccctggaaattatgtagaaccgacaattgtgacaggtcttggccacgatgcgtccattgcacacacagagacttttgctccgattctctatgtctttaaattcaagaatgaagaagaggtctttgcatggaataatgaagtaaaacagggactttcaagtagcatctttaccaaagatctgggcagaatctttcgctggcttggacctaaaggatcagactgtggcattgtaaatgtcaacattccaacaagtggggctgaaattggaggtgcctttggaggagaaaagcccactggtggtggcagggagtctggcagtgat

SEQ ID NO: 32201 - DNA, 450 bp, Homo sapiens
actactatagggcgaattggagctccaccgcggtggcggccgcccgggcaggtacgggggagggtagagtgagaagcaccagcaggcagtaacagccaacccttagccattgctaagggcagagaactggtggagcctttctcttactcccaggacttcagcacctaagacagcttcaaaacaaaccagaacagttatgtttctggggagcacgactgggtcgagaggcacataaatggacaccataaataaggcccagctccttgtgctcctgactcttctcagtgcgctttttttacagactttggcatggcctttttacagggcaccttctgctctcaggttgggtgacagaataccctttgagggagcaaatgaacctgatcaagtttcattaaaagaagacattgacatgttgcaaaatgcattatctgaaaatgacacacccta

SEQ ID NO: 32202 - DNA, 285 bp, Homo sapiens
tcactatagggcgaattggagctccaccgcggtggcggccgcccgggcaggtacagtagtgcactcttggctcactgtagcctcgacctccggggctcaagtgatcctcctgccttagccccacaagtagtgggactataggcacacaccaccatgcccatctaagtttttgtattttatgtagagacaaggtttcaaccatgtttgcccaggcctgatcctttgacactcctgagcctcaaagtgaatctgacccaccttcggaactcctcaaaaattgctggg

SEQ ID NO: 32203 - DNA, 422 bp, Homo sapiens
cactactatagggcgaattggagctccaccgcggtgggcggccgaggtactttattttttttttttttttttttagtagagacggggtttcactgtgttaaccaggatggtctcgatctcctgacctcgtgatccgcccgcctcggcctcccaaagtgctgggactacaggcgtgagccaccacgcccggcccaaaagcatttactgttaaggctgcctcatttttcagctttgttgtagttgagattctgatgttcacctaacaaagtccctgacaaaacagacttccttcaatccaggtcataatttgaaacgttatacaataatgagatttaagtgatgaatggaaagaaaagaaggagactgaaaagatatcacaaatttctatttgtttttagattcagaaaaatataattacaggc

SEQ ID NO: 32204 - DNA, 467 bp, Homo sapiens
atacactactatagggcgaattggagctccaccgcggtggcggccgaggtacgcggggagggtagagtgagaagcaccagcaggcagtaacagccaacccttggccattgctaagggcagagaactggtggagcctttctcttactcccaggacttcagcacctaagacagctccaaaacataccagaacagtcagcttccggggagcacaactgggcgagaggcacaaaaatggacaccacaaataaggcccagctccttgtgctcctgactcttctcagtgtgctcttcttacatacttcggcatggcctctttacagggcaccttctgctctcaggttgggtgacagaataccctttgagggagcaaatgaacctgatcaagtttcattaaaagaagacattgacatgttgcaaaatgcattagctgaaaatgacacaccctattatgatgtatccagaaatgc

SEQ ID NO: 32205 - DNA, 684 bp, Homo sapiens
gactcactatagggcgaattggagctccaccgcggtggcggccggggacccgagccgaaaagttatcgtcagaatgtcgggcaaagaccgaattgaaatctttccctcgcgaatggcacagaccatcatgaaggctcgtttaaagggagcacagacaggtcgaaacctctgaagaaaaaatctgatgccttaactcttcgatttcgacagatcctaaagaagataatagagactaaaatgttgatgggcgaagtgatgagagaagctgccttttcactagctgaagccaagttcacagcaggtgacttcagcactacagttatccaaaatgtcaataaagcgcaagtgaagattcgagcgaagaaagataatgtagcaggtgttactttgccagtatttgaacattaccatgaaggaactgacagttatgaactgactggtttagccagaggtggggaacagttggctaaattaaagaggaattatgccaaagcagtggaactactggtggaactagcttctctgcagacttcttttgttactttggatgaagctattaagataaccaacaggcgtgtaaatgccattgaacatgtcatcattccccggattgaacgtacctcggccgctctagaactagtggatcccccgggctgcaggaattcgatatcaagcttatcgata

SEQ ID NO: 32206 - DNA, 414 bp, Homo sapiens
  misc_feature 127, 151: n = A,T,C or G
aggtggtctcttagctgggccttaaagataagaaagacttgttcaacaaggaaaaggattttccaaggagtgggaatggcctaggtaaaagtgcagaggtggctgggctacttgaagggaacagcangaagctggtggggctagagctcangcaggagcaaaagtgaggaaaagggtgagcacacgtggcaggtggtgtgggccagcttccagcagctttggctgctaaggggccgggactctattcattgggcggtggggatgcttataggtgcccaagaagtgcaacaatgctgcctgtctgtttgggaagcctctggccattacaacaacagccatgcaggaagctgaagagccaggtggcaacatgaagtgagggttcaaaaagtgcccatggaggcatggaggaagaca

SEQ ID NO: 32207 - DNA, 477 bp, Homo sapiens
actacttagggcgaattggagctccaccgcggtggcggccgcccgggcaggtacgcgggtctgaacaaaatagatgatttgatgcaagagatcacagagcaacaggatatcgcccaagaaatctcagaagcattttctcaacgggttggctttggtgatgactttgatgaggatgagttgatggcagaacttgaagaattggaacaggaggaattaaataagaagatgacaaatatccgccttccaaatgtgccttcctcttctctcccagcacagccaaatagaaaaccaggcatgtcgtccactgcacgtcgatcccgagcagcatcttcccagagggcagaagaagaggatgatgatatcaaacaattggcagcttgggctacctaaactaaaacacatttttgatacctaaattaatgagctatagataaaatataaaaaatgtttttaccaagttcagaagttaacaaagac

SEQ ID NO: 32208 - DNA, 663 bp, Homo sapiens
tcactatagggcgaattggagctccaccgcggtggcggccgcccgggcaggtactcccaagggaacgctgtccacctctatgaacttctgaagaaaatgactggcaaacctgaacccaaggttgtttattttggtgacagcatgcattcagatattttcccagctcgtcactatagtaattgggagacagtcctcatcctggaagaactcagaggggatgaaggcacgaggagtcaggggcctgaggagtcagagcctctagagaagaaaggaaaatatgagggaccaaaagcaaaacctttaaatacttcatctaaaaaatggggctctttttttattgattcagttttgggactggaaaatacagaagaccccttggtttatacatggtcttgtaagagaatcagtacctcggccgctctagaactagtggatcccccgggctgcaggaattcgatatcaagcttatcgataccgtcgacctcgagggggggcccggtacccagcttttgttccctttagtgagggttaattgcgcgcttggcgtaatcatggtcatagctgtttcctgtgtgaaattgttatccgctcacaattccacacaacatacgagccgggagcataaagtgtaaagcctggggtgcctaatgagtgagctaactc

SEQ ID NO: 32209 - DNA, 565 bp, Homo sapiens
gactactatagggcgaattggagctccaccgcggtggcggccgaggtacgcggtggaaacaaatcaaatgtttgttctcaaattcttactctgtcatttattattctccatgtttttgtaactgcttccttggagatatttaaacataaatatatacagagagggtgaagatggaggaggctttttacagtacagttgtctttttcatgtgtgacaggtttttgctgtgttgcccaggctggagtgcaatgccacaatcttggctcactgcagcctcaacttcccgggctcaatcgatcccccacctcagcctcccgagtagcaaggactacaggcgcacaccaccacacctagctaatttttgtatcttttgtagagacagggtttcaccatgttgtccaggctggtcttgaactcttgggctcaattggtcctagcacctcagcctcctaggtgctgggattacaggtgtgagccgctgtgttcagccaatacttcttaacgttttacttttcacttttaaaaattaactctttttatgaaaaaagtagaattttttaaagag

SEQ ID NO: 32210 - DNA, 451 bp, Homo sapiens
tacgactactatagggcaattgagctcaccgcgggggcggccgaggtccattggtggggggcgtgacattaacatataaccacttagagtggacatgcagttagagaaaagtcaatgagctggaaccaagctgggaattccaacatgtagaagttaaacacaagaggaggagccagcaaaggaaacagaaacagagcttccagcaggtggggggcatttggaagaaaacgatgccatagaggccaagatgaaatagacatcaaggagaaggaagtagtcaattgttttgaatgctatgaagaaagataagaataggtaaatagtccttatatttgataacagaggtcactagtgatcttgatgaggggtttcaatagaatggtgggattatatacctccctggattcaactgaggtaaggaaggcatacagaatagagacaggcactataa

SEQ ID NO: 32211 - DNA, 241 bp, Homo sapiens
acgactactatagggcgaattggagctccaccgcggtggcggccgcccgggcaggttcgccgggctttaaccctttgccttgaaatttggaagggacctggaaaaaaaaggagggggaaagactgccaaagaggaaaagaaaagaaaaggaagaaaacattagaaagaaaaaggaaggaaaacggtataaagagagatcaattacccacccttaaatagctagattggggggggagggggg

SEQ ID NO: 32212 - DNA, 641 bp, Homo sapiens
acgactcactatagggcgaattggagctccaccgcggtggcggccgcccgggcaggtactcgggggagagagatgagggcagggaccactctgcaaagacgagcccagggcgcagcagcgagccccctcctagtccttctcttctccgtgggtgatgatgtgcaccaggttcttgtagtccaagttgccagtcacgtcaggggggaaggcggcgaacatctggtcaacctcctccttggaaaacctctccgcctgcgtggtcagcatttcccgaacgtaatcagccttcagcacccctttgccttcagggtcaaacactttgaatgcgttgagaatggtttcctcagggtccgctcccttaagtttctccccaaacattgtgaggaacacagtaaagttaattggacccggagcctccttgatcatttcatcaatttcttcatttttcacgttcactcgcccaagggcagcaaaggtgtctctcagatcgttcttgtcgatgaagccatccctgttctggtccatgatagtgaaggcctccttaaattcctggatttgggtctgttcgaacatggagaacacgttggagttggcgcccccggctctcttctttgctttcttaggtgccatggtggaaagga

SEQ ID NO: 32213 - DNA, 488 bp, Homo sapiens
ctactatagggcgaattggagctccaccgcggtggcggccgaggtacagtggcacacacctgtagtcccagctacttgggaggctgaggtgggaggaaggcttgagcccaggagtttgagtccaggctgggcaagatagcgagacctcatctctaaaaaaataaaataaaataaaataaataaataaaacaagccttttaatagtctggatcatatagaagattaatattatgatggattgcacattaatgtctcaaaggacaccccccgccaaaatcaccctactaaaaatcacactgggtttctaatcttggggtttagaaattttcttcttatgctttaaaaactcattttacttcctttatcctctgattttttgggaagacagagggtgcttcttcttggactcttgagtcctggacactaaattcctccctcagttctagtgcccaggctaagcagagacactaaatcccttacttcctctc

SEQ ID NO: 32214 - DNA, 343 bp, Homo sapiens
ccaccgcggtggcggccgcccgggcaggtacttttttttggtcttgatccatgtggcccattagactctacattaatttttattttccacttcttgaatatacaatgatatatcaagatcgagtgttggagagtaattagtattgcttctaattctaagggatacagaggctgacagataccccccttctatatctgaagttcatagcggctttgtctatagcgtcttgctgctaatgttgcatagcaaatgtctaacaaaatatcccaaacttccaaacacactaggaaagattaaaggcctttgtaagtagagttgcattctgggtaatgagaaactgtga

SEQ ID NO: 32215 - DNA, 693 bp, Homo sapiens
  misc_feature 365: n = A,T,C or G
tacgactcactatagggcgaattggagctccaccgcggtggcggccgcccgggcaggtacgtttgctcatacacgcacatccaaaagcctgtgcctcattcctggccatgggtgaggacttggtctgtcacggctgatgaggactcccacaaccggccaagttatgtcttattatacacccccagaaagagagaaagctgccttctggaggactgattccacatgctatattcagctgagttgatttctgtgtctatttcaacccataacctgaagaatgatcaccttattccttattcattaattttcttgattaatagggaaacttgggaatagctataaagtaaaacttgggtggaacctgnggccctggcatcacacaagtgtgattaggatggtcaaggtcatcaggagtacctcggccgctctagaactagtggatcccccgggctgcaggaattcgatatcaagcttatcgataccgtcgacctcgagggggggcccggtacccagcttttgttccctttagtgagggttaattgcgcgcttggcgtaatcatggtcatagctgtttcctgtgtgaaattgttatccgctcacaattccacacaacatacgagccgggagcataaaatgtaaagccctgggtgcctaatgagtgagctaactcacattaattgcgttgcgctcact

SEQ ID NO: 32216 - DNA, 446 bp, Homo sapiens
gtcgagcggccgcccgggcaggtacgcggcgggttacattgaatgtcaatgttatttgttctgcacgtaaactttgtttccttctgaaaaaataacatgtaagtcattaagttatctaaaaacacaaaaagtaattagttgaaattctaaattaccagatgaaataatgttttattgctacataatcaatgtagcaatatcatttgtgaaaaattcactgaaaagtttttgagctgcaatttaaagcacaattaattagcagtcaagacaatatgataaaacttagccaatgaaggtaatcattatgagactttggttatggcttttttaaacttaggccttagatttctcaaatatgaaataaatgtttttcttcatgatattgagattatttccagctatgtctttctagccttcaaaatagcccaatgatctctaattttttc

SEQ ID NO: 32217 - DNA, 455 bp, Homo sapiens
ctactatagggcgaattggagctccaccgcggtggcggccgaggtacccaaaccctccaatccccaacgcggtctcaagttcagactgggctccagcttctgtccacagccacccccacattttctttttgtatttgtctgccaacttcagaagaacttccagataagaatttctgcctgcagctccagtatcaaggatatggggcagcacagccacaacacagagctggtgctcctcacacgtcctcttggcaatgtcctcgttgataatctcaagcagctcaggaggtggggcgttatcccccgcgtacctgcccgggcggccgctctagaactagtggatcccccgggctgcaggaattcgatatcaagcttatcgataccgtcgacctcgagggggggcccggtacccagcttttgttccctttagtgagggttaattgcgcgcttggcgt

SEQ ID NO: 32218 - DNA, 450 bp, Homo sapiens
attggagctccaccgcggtggcggccgaggtaccaagaggaagacagttgtccctggtttcaagctatcattcaaaactttgggattcaggactcctctgaatcaaaaatcatggaattctagatacagaggaatacagataggttatctaattcaaatcactcaatttacagatgaaaaacctggataccttgaatgaattcactcaactaaatatgtttgacttgttagaaaaacccaaaaaaagttctttaattacagtccatatgttagtttttcttctccaatgtttgtcattacttaactgtatgtgaatcagtaagactagcatgtcacaatgatgtaatttctttctttaatatgccgttgatgttgaactttttttctttccaggaagagagttctcaaccaagaaatgttaacttttgtcaacagcttccatatttgaac

SEQ ID NO: 32219 - DNA, 625 bp, Homo sapiens
acgactactatagggcgaattggagctccaccgcggtggcggccgcccgggcaggtactccaggaggcccgtgtatttaatgaaactcccatcaaccctcggaaatgtgcccacatcctcaccaagattctttatctcataaaccagggggagcacctggggaccacggaagcgaccgaggccttctttgccatgaccaagctctttcagtccaatgatcccacactccgtcggatgtgctacttgaccatcaaggagatgtcttacattgcagaggatgtcatcattgtcaccagcagcctaacaaaaggcatgactgggaaagaagacaactaccgggcccggccgctctagaactagtggatcccccgggctgcaggaattcgatatcaagcttatcgataccgtcgacctcgagggggggcccggtacccagcttttgttccctttagtgagggttaattgcgcgcttggcgtaatcatggtcatagctgtttcctgtgtgaaattgttatccgctcacaattccacacaacatacgagccgggagcataaagtgtaaagcctggggtgcctaatgagtgagctaactcacattaattgcgttgcgctcactgcccgcttt

SEQ ID NO: 32220 - DNA, 601 bp, Homo sapiens
  misc_feature 391, 534: n = A,T,C or G
cgcgcaattaaccctcactaaagggaacaaaagctgggtaccgggccccccctcgagagtacttctagaattaattaacgcgggttgactttaatagatactaacagttttccaaagtggttacaccagctcttttaccatctccaccttgctcaccaggagagtacgagcgtcttccttgctccacattcagaccagctttgtgttggtttggtttgtcagtctttcaagttttatccattctgtgaggtgtgtacaggtattgcattttgagtttaatttgcatttgtctggtgactaatgaggttgagacatttgtctatctcctgtgaagtgtctgttcaaatctcattttctgttggattatctttacctcgatatgtataataanatttaaaaaccacttatgatttcctcttctctaaattttttaaattcttcacttgttaaaggtagtgtttttgtctactcattatcaaagatgaaaattttatctcacctatctctagaattctcttcctctacctcaaaatntgtgttagttataattattccagattttgtcttaaaattttaagtaatacacttaaacttttgcttt

SEQ ID NO: 32221 - DNA, 444 bp, Homo sapiens
gccagcgcgcaattaaccctactaaagggaacaaaagctgggtaccgggccccccctcgagagtacttctagaattaattaacgcgggcattgtgtgcagaagacctggactggaatctaacactgtgagtactccccaggatccgtgttcctctctttagcccaggcatgcagttacattacattttccaaccttccttggcattagctacgatcacgtgactgcattctggccagtggaatgtgtgtggaagtgatgtgggccaattccaggcctggcctataaaaatcccccactttttgttctctttctccatccaccatctgcatggagagctcccagcactagagggagaaaaagccaccagagggaaggagcctgggtccctgaatcactgtgtagactacctgccaaacatacaccctgaattgttatggcaataa

SEQ ID NO: 32222 - DNA, 428 bp, Homo sapiens
agcgcgcattaccctactaaagggaacaaaagctgggtaccgggccccccctcgagagtacttctagaattaattaacgcgggggcgctaggacctggagggctagtcggcgggctgcgcgtccggccgctagctgagctggaggccaccggccagagccgaccccaggagtgagagagacaggggcgtgcgtgagttccggcggcctgcaccgggcaaaccccgtaccttcccagcatcggctcagcaacccacgtgcatccaggccggtcaatgtcattgagtcacctccgcgccttggccaccctggagtcccgagaatccgaagttccagacaaatgcccaaactacattcctgcatgttcgaaagcgtaaattgcaaagcacaaatccagttgtagattgtggccgggagcagtggctcacgc

SEQ ID NO: 32223 - DNA, 409 bp, Homo sapiens
aggtccccggcccccccctcaaaagtccttctagaattatttaacgcgggggttttaaaaaaagaaaagaaagcgccttcaaggccatctgtttctctgctactaccctttttggaaagacaaatctccttcccctccctgtcctccttccttctacattcccctagggctgtgtacctctctctcagcgtgccctgcctcggtgcctctgtggcagggccaggtctgacttcccagatgagcttgctctcctaagctgcatcattgcatgactctcctctttcctaacctccctcactcctccagctcccttctgctggtgaatgacatctcttcacgccacacagtcacaggacggctgctccaccaccggcatcacatctcctttccaggcaggaagaagaggaag

SEQ ID NO: 32224 - DNA, 486 bp, Homo sapiens
atacgactactatagggcgaattggagctccaccgcggtggcggccgcttttttttttttttttttttttttttttttagatggagtcttactccgtcacccaggctggagtgtggtggtgtgatctcagctcacagcaacctgacctcaggtgattcacccgcctttgtctcccaaagtgctgggattacaggcgtgagccactgcgcccgcgcgtcttttgaatttttttaaactgaagtttaattgcctttgagtttgatcattcactatttggcatttgtatttcttttgttaattatctgctcaagctctaatttcataatggaaatttaatggattaacatataacacccactatcacccgccttaattaattctagaagtactctcgagggggggcccggtacccagcttttgttccctttagtgagggttaattgcgcgcttggcgtaatcatggtcatacctgtttcctgggtgaaa

SEQ ID NO: 32225 - DNA, 557 bp, Homo sapiens
  misc_feature 181, 204: n = A,T,C or G
gcgcgtatacgactactatagggcgaattggagctccaccgcggtggcggccgcttttttttttttttttttttttttttttttgaagcgacggggtcttcctatgttgcccagactggtcttgaactcctgggctcaagcgatcctcccatgttggtctcccaaaatgctgggattacanggcgtgagccaccattgcccagnccagatgtaacatatttttaaagtcagtccgtagggttgaatttacctgtcatttctaatttgtcgacattaaaaacatcctagatgtgtttcttggcacacttgcctgatcgtttccataaggtcagttcctaaaaatggaatcattgtgccagggtttgtacatttaaaatattgatccattttgccagactgccatccagcagggctctagcaatttacacatttaaggaggcacttaccctcatatgcccactttgtacttacatggccctgagagtgacagcctccttaaattttgcatccttccttctccccatcttactccaagccctgctaaggaaatggcaaag

SEQ ID NO: 32226 - DNA, 407 bp, Homo sapiens
gcaattaccctactaaagggaacaaaagctgggtaccgggccccccctcgagagtacttctagaattaattaacgcgggttgactttaatagatactaacagttttccaaagtggttacaccagctcttttaccatctccaccttgctcaccaggagagtacgagcgtcttccttgctccacattcagaccagctttgtgttggtttggtttgtcagtctttcaagttttatccattctgtgaggtgtgtacaggtattgcattttgagtttaatttgcatttgtctggtgactaatgaggttgagacatttgtctatctcctgtgaagtgtctgttcaaatctcattttctgttggattatctttacctcgatatgtataataaattttaaaaaccacttatgatt

SEQ ID NO: 32227 - DNA, 607 bp, Homo sapiens
cactatagggcgaattggagctccaccgcggtggcggccgcttttttttttttttttttttttttgaggtggagtcttgctctgtcaccaggctggagtgcagtggtgcaatcttggctcactgcaaccttcccctcctggctgagttaacttaggagagcttcctggagagggcacctttgaagataggaaggatttcatgaagtctttactaggccactagagtagaagcagtgggagacttcctggagaagagctcatggaaagaaaaacctaccgctggccctttgggaactgctttgggcctctttagtcctaggctcacacgccccttagaaacaaagtaagaataaagccagggataatacagtgagtggccaagaacacagactctggagccagactacctgggtttgaatcccagttaccagccatgtgactttgatcaagttgcttaacctttgtgtgcttcagtttcctcatctgtaaaataaggggatggtaattgtgacttcccagaactatggtggagagcaaatgggttaagagtgtgccgctgtaaactgtaaagtgctgggctttcattgggaagtattacctttcattg

SEQ ID NO: 32228 - DNA, 593 bp, Homo sapiens
acgactcactatagggcgaattggagctccaccgcggtggcggccgctttttttttttttttttttttttttttggaagaatcaacagactctatatttgatcacaaagcaaaagtttaagtgtattacttaaaattttaagacaaaatctggaataattataactaacacaaattttgaggtagaggaagagaattctagagataggtgagataaaattttcatctttgataatgagtagacaaaaacactacctttaacaagtgaagaatttaaaaaatttagagaagaggaaatcataagtggtttttaaaatttattatacatatcgaggtaaagataatccaacagaaaatgagatttgaacagacacttcacaggagatagacaaatgtctcaacctcattagtcaccagacaaatgcaaattaaactcaaaatgcaatacctgtacacacctcacagaatggataaaacttgaaagactgacaaaccaaaccaacacaaagctggtctgaatgtggagcaaggaagacgctcgtactctcctggtgagcaaggtggagatggtaaaagagctggtgtaaccacttt

SEQ ID NO: 32229 - DNA, 527 bp, Homo sapiens
ggcgaattggagctccaccgcggtggcggccgcttttttttttttttttttgagatggagtcttggtctgtcgcccaggctggagtgcaatggtgcagtctcagctcactgaaacctctgcctcccgggttcaagtgattctcctgcctcagcctaccgagtagctgggattacaggggcctaccaccatgcctggctaatgtttgtatttttagtagagatggggcttcaccatgttggccatgctggtctcgaagtgctgacctcgtgatctgtccgcctcggcctcccaaagtgctgggattataggcgtgagccactgctcccggccacaatctacaactggatttgtgctttgcaatttacgctttcgaacatgcaggaatgtagtttgggcatttgtctggaacttcggattctcgggactccagggtggccaaggcgcggaggtgactcaatgacattgaccggcctggatgcacgtgggttgctgagccgatgctgggaaaggacggggtttgcccggt

SEQ ID NO: 32230 - DNA, 400 bp, Homo sapiens
ccagcgcgcataaccctactaaagggaacaaaagctgggtaccgggccccccctcgagagtacttctagaattaattaaatgtgaaaagcaaatttgaaagcatcttagtctgtaaaactacttcatgtataaaaaataaacatttgacagaactctcagagcaaagctatctgagggattctttaaagcttccaatttatcaaattacctttttttttttggtcggcagggggaagtagtctcactctgttgcccagggtggagtgcaatggcaggatctcagctcactgcaacctttgtctcccaggttcaagtgattctcccacttcaacctcccgagtatctgggactactggcatacaccaccacacccggctaattttttgtattttttagtag

SEQ ID NO: 32231 - DNA, 379 bp, Homo sapiens
ccctactaaagggaaaaaagctgggtaccgggcccgccctcgagagtacttctagaattaattaaggcgggcacccagggatcgcaggtggccgaatactgcaggtggcttttgaaggcatcgatgcacactttgagggcctgccttggctcctgcaccccaccacagttcgtgtttccttccttttattctttccacccagaaaggtgacaaatccaagccctggatgtgaggggggtccacaagagtaattctggagagatggggtcaggtgaggaatggttatagacccagggagccaagtcacgggacctgagtgaccccatggctgacctaccgagacctccaatcgccagcatcgggtaggcccacacgtgtg

SEQ ID NO: 32232 - DNA, 431 bp, Homo sapiens
actactatagggcgaattggagctccaccgcggtggcggccgcttttttttttttttttttgagatggagtcttggtctgtcgcccaggctggagtgcaatggtgcagtctcagctcactgaaacctctgcctcccgggttcaagtgattctcctgcctcagcctaccgagtagctgggattacaggggcctaccaccatgcctggctaatgtttgtatttttagtagagatggggcttcaccatgttggccatgctggtctcgaagtgctgacctcgtgatctgtccgcctcggcctcccaaagtgctgggattataggcgtgagccactgctcccggccacaatctacaactggatttgtgctttgcaatttacgctttcgaacatgcaggaatgtagtttgggcatttgtctggaacttcggattctc

SEQ ID NO: 32233 - DNA, 437 bp, Homo sapiens
gcgcgcataaccctactaaagggaacaaaagctgggtaccgggccccccctcgagagtacttctagaattaattaacgcggggaggattgagaaaagccaagtcctcagcaaatacaacttaacatagagaagaaaccaataaatacacacacaaaagtcagatattaagcccactgcacattcactgccaagaatgctcaggccctgggtctagtaaccaaaacatggcactcactgtgggcctttcactctgtgggtacagccccagctctgccatttccaggatcatgctattaccagtgactatctcctaaagggattgtggggaaagccaaaatacaaaaaaaagggcaatagagttccaagtctgttgctttattcagcacataaagaaacagcaatattgaaatagctctccccaaagaaagactatgaa

SEQ ID NO: 32234 - DNA, 366 bp, Homo sapiens
tatagggcgaattggagttccaccgcggtggcggccgcttttttttttttttttttttttttttttttgaaggattacttatggaggttttattatttttatttatttttgagactgagtcttgctctgtcatcaggctggagtgcagtggctcactgcaacctccgcctcccaggttcaagcaattcttctgccctaacccctcctagtagctgggataacaggtgtcccccaccatgccccaattaatttttgtatttttggtacagacagggtttcaccatgttggccaggatggtctcgatctcgttgaccttgtgatccgcctgcctcggcctcccaaagtgctgggattacaggcgtgag

SEQ ID NO: 32235 - DNA, 526 bp, Homo sapiens
cccctcgagagtacttctagaattaattaaggcgggtgatcacaaggtcaagagttcaagaccatcctggctaacatggtgaaaccccgtctctataaaaatacaaaaagttggccgggcgtggtggcgggcgcctgtagtccagttactcgggaggctgaggcaggagaatggcgtgaacccgggaggcggagcttgcagtgatccgagatcacgccactgcacgccatcctaggcaacagagcgagactccatctcaaaaaacaaacaaacaaaaagttaaattccagtgatacagagactgccactgggaatttttagttttctgttattctttttttttccaaaaccaaggatacctaagaaagaatatttaagcagcctaagccaggcgtggtggctcacgcctgtaatagcactttgggaggccgaggctggcagatcacttgagatcaggagttgacaccagcctggccaacatggcgaaaacccgtctataccaaaaatacaaaaattagccaggtgt

SEQ ID NO: 32236 - DNA, 503 bp, Homo sapiens
gtaatacgactactatagggcgaattggagctccaccgcggtggcggccgctttttttttttttttttttttttttttttttacatttaactctgatttattggggggtaaagcatgttatagtgttccagcttcactttttttctgaatggctatccagttgtcccaagatcatttgttgaataattcattttcccccatttgaaatgacaccttttcgtatactaaagtcccaagtctcttagttataaaacagtaataaacccttgaaacaggcattttcctaaaatacattttgtttaagtaagacagttttcccccgcgttaattaattctagaagtactctcgagggggggcccggtacccagcttttgttccctttagtgagggttaattgcgcgcttggcgtaatcatggtcatagctgtttcctgtgtgaaattgttatccgctcacaattccacacaacatacgagccggaagcataaagtgtaaagcctggg

SEQ ID NO: 32237 - DNA, 427 bp, Homo sapiens
gcgcgcattaaccctactaaagggaacaaaagctgggtaccgggccccccctcgagagtacttctagaattaattaacgcggggaggattgagaaaagccaagtcctgggaatacaacttacataaaagaaaccataatcacacacaaaagtcagaattagcccactgcacattactgccagaatgctcaggccctgggtctagtaaccaaaacatggcactcactgtgggcctttcactctgtgggtacagccccagctctgccatttccaggatcatgctattaccagtgactatctcctaaagggattgtggggaaagccaaaatacaaaaaaaagggcaatagagttccaagtctgttgctttattcagcacataaagaaacagcaatattgaaatagctcttcccaaagaaagactatgaat

SEQ ID NO: 32238 - DNA, 449 bp, Homo sapiens
gcgcgcaattaaccctcactaaagggaacaaaagctgggtaccgggccccccctcgagagtacttctagaattaattaaggcgggggaagggatagcatgatattcatatacagacttgaaacaaagaaaaatcacagaatacataggttttctatataaataagctgtcatattttttctttctttgctagcaaatataccttcttaaaaatgtttgattatcaattcacccaagaatttcttttagacttcctctataaaaggacattactatttatatttccccaatgcaatgtaattcatttaaaaatactgtgaagtctgactatgagtcaggcattatattttgttttaggatgaataagggaactcaaaaaacgaaggcaaataaagatgaatagttagatggataagcatgctgcaaagtcgataagggtacaatgaacac

SEQ ID NO: 32239 - DNA, 503 bp, Homo sapiens; identical to SEQ ID NO: 32236

SEQ ID NO: 32240 - DNA, 503 bp, Homo sapiens; identical to SEQ ID NO: 32236

SEQ ID NO: 32241 - DNA, 332 bp, Homo sapiens
gcgcgcataaccctcactaaagggaacaaaagctgggtaccgggccccccctcgagagtacttctagaattaattaaggcgggggcaagatttgtccttcctgcggctgcgaacccaccgcgggtttgcgtatttcccttgattcctggaggacagagctgggatggacttgacccaagactcagggatgacgaaagggaaataaacagagtaacgtttaagaaaaaaagaaacacaaaaaaataaaaaaaaaacaatggaaaaaaaaaaaataaaaaaaaaaaaaaaaaaggcggccgccaccgcgggggagctccaattcgccctatagg

SEQ ID NO: 32242 - DNA, 634 bp, Homo sapiens
acgactcactatagggcgaattggagctccaccgcggtggcggccgctttttttttttttttttttttttggggatgctcaacctataatacccaaaggctctatttcagtagaatttattggtttgctgattatagcagtgacatagttgcattctagagaccttagaaaatgcagaaaatttcaagaaaaacatttaaattgtgctcatagtgaaactgagaggtgaccactcttaatattttgtggcataagcattccagtcttttatctttctcaaagtttcacataaactttctcaaaggccattaaatacttttccatagcctgattttttgtgaccacatagtatcctattatattgataataccataatttacctaacccatttttatatatttggattttttccaattcatcattattatgaataatggtgtatctcagtggttattactttgcactgcatttcttatgaaagtattgagtaaaaggaagtaaagccctctcagagtgttttgtaggctgtcacatttcactccataatgtcctagtgtttgttgccaccagtgatatatgaaggtacccactgaaatgtcacacctttttggttttcctttttaaaataaaaaa

SEQ ID NO: 32243 - DNA, 593 bp, Homo sapiens; identical to SEQ ID NO: 32228

SEQ ID NO: 32244 - DNA, 449 bp, Homo sapiens
gccagcgcgcaattaaccctactaaagggaacaaaagctgggtaccgggccccccctcgagagtacttctagaattaattaacgcgggttgactttaatagatactaacagtttgccaaagtggttacaccagctcttttaccatctccaccttgctcaccaggagagtacgagcgtcttccttgctccacattcagaccagctttgtgttggtttggtttgtcagtctttcaagttttatccattctgtgaggtgtgtacaggtattgcattttgagtttaatttgcatttgtctggtgactaatgaggttgagacatttgtctatctcctgtgaagtgtctgttcaaatctcattttctgttggattatctttacctcgatatgtataataaattttaaaaaccacttatgatttcctcttctctaaattttttaaattcttcactt

SEQ ID NO: 32245 - DNA, 387 bp, Homo sapiens
acgactcctatagggcgaattggagctccaccgcggtggcggccgcttttttttttttttttttttttttttgggaaggagtttcactcctgttgccaaggctggagtgcaatggcgcaattaggctcactgcaacctcctcttcccgggctcaagtgattctcctgcctcagcctcccgagtagctgggattacaggtacccaccaccatgcccagctaattttttgtatttttaatagagatggggtttcaccatgttggccaggctggtcttgaactcctgaccttaggtgatccacctgcctcggcctcccaaagtgctgggattacaggtgtgagccatggtacccagccttcctcagcatttctgtctgtccccacacaca

SEQ ID NO: 32246 - DNA, 614 bp, Homo sapiens
  misc_feature 236: n = A,T,C or G
agctccaccgcggtggcggccgctgttttggttttttttttttttttacttgaattgttgttatagtgcttccgttatttatttttattttttttattatactttaagttggagggggcatgtgcacaacgtgcaggtttgctacatatgtatacatgtgccatgttggtggctgactcattaactcgtcatttatattaggtatatatacgtgttcattgtacccttatcgactntgcagcatgcttatccatctaactattcatctttatttgccttcgttttttgagttcccttattcatcctaaaacaaaatataatgcctgactcatagtcagacttcacagtatttttaaatgaattacattgcattggggaaatataaatagtaatgtccttttatagaggaagtctaaaagaaattcttgggtgaattgataatcaaacatttttaagaaggtatatttgctagcaaagaaagaaaaaatatgacagcttatttatatagaaaacctatgtattctgtgatttttctttggttcaagtctgtatatgaatatcatgctatcccttcccccgccttaattaattctagaagtactctcgaggggggg

SEQ ID NO: 32247 - DNA, 487 bp, Homo sapiens
gactactatagggcgaattggagctccaccgcggtggcggccgcttttttttttttttttttttttttgggatgctcaacctataatacccaaaggctctatttcagtagaatttattggtttgctgattatagcagtgacatagttgcattctagagaccttagaaaatgcagaaaatttcaagaaaaacatttaaattgtgctcatagtgaaactgagaggtgaccactcttaatattttgtggcataagcattccagtcttttatctttctcaaagtttcacataaactttctcaaaggccattaaatacttttccatagcctgattttttgtgaccacatagtatcctattatattgataataccataatttacctaacccatttttatatatttggattttttccaattcatcattattatgaataatggtgtatctcagtggttattactttgcactgcatttcttatgaaagtattgagt

SEQ ID NO: 32248 - DNA, 417 bp, Homo sapiens
caaaagctgggtaccgggccccccctcgagagtacttctagaattaattaatccacccttgaaccagtctacctccagaattcctggtacatgagataataacatttcctttgtttaagtcacttttagttggattttctgttatttccaaccaaaagcattcaattgatagaagtgatgaagtaagactggacagcatttatccacccacatatttgtaaaactatgcctgtctgaccagacgtggtggctcatgcctgtaatcccagcactttgggaggctgctgcaggaggattgcttgaggccaggagttcaagaccagcctgggaaacatagcaagaccttatctctagaataaataaataacaataaaaattttaaaactatgcctctcagacctaaactaggcccataga

SEQ ID NO: 32249 - DNA, 557 bp, Homo sapiens
  misc_feature 166, 205, 244, 250, 251, 271, 297: n = A,T,C or G
agctgggtaccgggccccccctcgagagtacttctagaattaattaacgcgggttgactttaatagatactaacagttttccaaagtggttacaccagctcttttaccatctccaccttgctcaccaggagagtacgagcgtcttccttgctccacattcagaccncagctttgtgttggtttggtttgtcacgtctttcaagtntttatcccattctgtgagggtgtgtaccaggtattgcanttttgnnagtttaatttgcattttgtnctggtgacctaatgaggttgagacantttgtctatctcctgtgaagtgtctgttcaaatctcattttctgttggattatctttacctcgatatgtataataaattttaaaaaccacttatgatttcctcttctctaaattttttaaattcttcacttgttaaaggtagtgtttttgtctactcattatcaaagatgaaaattttatctcacctatctctagaattctcttcctctacctcaaaatttgtgttagttataattattccagattttgtcttaaaattt

SEQ ID NO: 32250 - DNA, 435 bp, Homo sapiens
ccctcactaaagggaacaaaagctgggtaccgggccccccctcgagagtacttctagaattaattaacgcgggttatctaaaattagatacttaatgtatctttcagaaaatcagataaaatgccctttggatggacccctgtctaaatgggcacagtaagaaatgttatattcaacttgtaaaagatttggttttattaaaattcatatttgaactccccaataaaccaataatttatattctatattttgttacaagttataatggttccagctgggcgtgatggctcacgcctgtaatcccagcactttgggaggccgaggcgggcgtcacctgaagtcagtgagaccctgtctctactaaaaatacaaaaattagctagggcgtggtggcaggtgcctgtaatcccagctactcgggaggttgaggagaag

SEQ ID NO: 32251 - DNA, 427 bp, Homo sapiens
acaaaacctgggtaccgggcccccccttgagagtacttctattaattaattaacgcttgttaaaactgtcttacttaaacaaaatgtattttaggaaaatgcctgtttcaagggtttattactgttttataactaagagacttgggactttagtatacgaaaaggtgtcatttcaaatgggggaaaatgaattattcaacaaatgatcttgggacaactggatagccattcagaaaaaaagtgaagctggaacactataacatgctttaccccacaataaatcagagttaaatgtaaaaaaaaaaaaaaaaaaaaaaaaaaaaaaaagcggccgccaccgcggtggagctccaattcgccctatagtgagtcgtattacgcgcgctcactggccgtcgttttacaacgtcgtgactgggaaaaccct

SEQ ID NO: 32252 - DNA, 487 bp, Homo sapiens
ctactatagggcgaattggagctccaccgcggtggcggccgcttttttttttttttttttttttttttttttaaagcaaaactcccgacagccgagccccgttcggtgccttttcttttttttttctttaatggagtgaaatctactttgctcaggaagcctgcaaatcacattttcaggccaaacgaggcagtattttaaaaggggtctcctggggcaggattaggaaggctttccactccactcacgcattttcagtgtaggcgaatcgtaaaacggagggcagaacgaaaatgagcggatctgggagtgcaggctgcgcttcgtccccccgcgttaattaattctagaagtactctcgagggggggcccggtacccagcttttgttccctttagtgagggttaattgcgcgcttggcgtaatcatggtcatagctgtttcctgtgtgaaattgttatccgcttacaattccacacaacatacga

SEQ ID NO: 32253 - DNA, 461 bp, Homo sapiens
atacgactactatagggcgaattggagctccaccgcggtggcggccgcttttttttttttttttttttttttttgagacaagatcttgtcctgtcacccaggctggaatactggggtgcaatcatagctcactgcagcctcaaacttctgggctcaagtgatcctcccacctcagcctcctgagtagctgggaatgcaggcacataccaccatacctggctaattaaaaaaattttttttaatctcactgtattactgaagctggtctggaactcctggccttgaacgatcatctcagcctccccaaactctgggattacaggcatgaaccattacacctggcttgaagagaagaggttcttaatattgaagaagtccatttatctgtttttgttttttttcccctcatgtattgggtttttgggattgaatctaagagattgttgcttaactcaagacca

SEQ ID NO: 32254 - DNA, 215 bp, Homo sapiens
agcgcgcgtaatacactactatagggcgaattggagctccaccgcggtggcggccgctttttttttttttttttttattatatttgaaaaaacaaccgaccttttaatggcataattcttgccaaaattaattatgtacattttaaaagggcaaacaggcccttcttaacattcttttgcattcccaccaataaaggcgagccatttattttgat

SEQ ID NO: 32255 - DNA, 491 bp, Homo sapiens
agggcgaattggagctccaccgcggtggcggccgcttttttttttttttttttttttttttttggagacagggttttgacatgttggtcaggctggtcatgaactcctggcctcaagtgatccacctacctcggcctcccaaagtgctgggattacaggtgtgagccaccgcgcccaaccctgtgtttattcttaggtctgtactacgctttatgcctcagtttccacagttaaaacacgttattttattcctcacgttataggagcaatttgtattcataaacttggccttcaccttcaacttctgaagattttaatacagcgcaaatgatttggggtctgtgaattcagttttatttatttggctccttcctttaaggagtcaggctaatgcaagaaaatccaataattagatcttttggatttcaaataactggaagaggaagtggtgtttatctaatggtttaggcataatgcgtgttttttcccgt

SEQ ID NO: 32256 - DNA, 503 bp, Homo sapiens; identical to SEQ ID NO: 32236

SEQ ID NO: 32257 - DNA, 431 bp, Homo sapiens
ccagcgcgcaattaaccctactaaagggaacaaaagctgggtaccgggccccccctcgagagtacttctagaattaattaacgcgggattttctttggtcttatgccaatatttgcaatcagctagtatgatgttttcttattttagtttattgccagtgtgatttagtgcttcattcatcattaattatctttataattttgtctttgaattttccttgtaaaaagagactggtcttactttttttatagtccttactaacaaggacactgtaagacttgtgagttggtgtggactatgccatcagatatatccatcttgttatcccaaagttagatccagttaaggccagctgtgggtagaaggtcaaagtagatgacgggcgaaggataatttttaaaaggacttttgctaaagaagtagatgtatct

SEQ ID NO: 32258 - DNA, 641 bp, Homo sapiens
cactatagggcgaattggagctccaccgcggtggcggccgcttttttttttttttttttttttttttgagagacaaacatgggccacatttttaagacaaacatggaccacaaccatgctgagagaacttagagtgaagtttacatggctatctttcttagtattagaaattttacctgataaacatcaaacatacgaccaacatagcatataaagcagctctacagatattttcctactgcccaaaatatcatataatgcacatgtaggtcacatgtgagtaggcaagagattctggaacacagaagcaagacaacaggatcacagcaatttcagtatgctctgcttgttataggaaatccccagaacattctccaattactgaacaaaaaaagcaataaaactcagatttgtctgcctggggagaaataaacagaaatagaaagtgaatagcaaaacaaagctatctggtgaaaagacattcttacttggaaggagttaagattttgccccttccatgggtgtacttagtgaggcaagcgtcaagcggcctgacagcccgtggcacactgtctacagctgatgtcaatggtacacatatagccagtgtgaagcaacttaaaataggccctccttgagct

SEQ ID NO: 32259 - DNA, 402 bp, Homo sapiens
actactatagggcgaattggagctccaccgcggtggcggccgcttttttttttttttttttttttttgaggtggagtcttgctctgtcaccaggctggagtgcagtggtgcaatcttggctcactgcaaccttcccctcctggctgagttaacttaggagagcttcctggagagggcaggctttgaagataggaaggatttcatgaagtctttactaggccactagagtagaagcagtgggagacttcctggagaagagctcatggaaagaaaaacctaccgctggccctttgggaactgctttgggcctctttagtcctaggctcacacgccccttagaaacaaagtaagaataaagccagggataatacagtgagtggccaagaacacagactctggagc

SEQ ID NO: 32260 - DNA, 491 bp, Homo sapiens; identical to SEQ ID NO: 32255

SEQ ID NO: 32261 - DNA, 507 bp, Homo sapiens
ccctcactaaagggaacaaaagctgggtaccgggccccccctcgagagtacttctagaattaattaacgcgggatatacatattgtcatgctatgttctctaacttgatatcaacagcgtatctctgacatgatataaaatcatgtgcttatgacatgcattaaaaggagaaggctgatctaatatcctaggtctaatggatccactagcagatatacacggctaggtacacacactgggatatctaggtacatgcccatagttcatatacagactttctaaaatcatcgtatttaaaagcagaaaagtgccgggcacagtggctcacatctgtaatcccaatactatgggaggctgacgtggtcgaatcacctgaagtcgcgagctcaagaccagcctggccaacatggtgaaaccccgtctctactaaaaatatgaaaaacagccaggcatggtggcaggtgcctgtaatcccagctactcaggaggccgaggcaggagaatcac

SEQ ID NO: 32262 - DNA, 296 bp, Homo sapiens
gctggttaccgccccccctcagagactcttagatatataacgcgggggaaaactgtcttacttaaacaaaatgtattttaggaaaatgcctgtttcaagggtttattactgttttataactaagagacttgcgactctatatacgactaggtgtcatttcaaatgggggaaaatgaattatccaacaaatgatcttgggacaactggatagccattcagataaaaagtgaagctggaacactataacatgctttaccccacaataaatcagagttaaatgtaggaaaaccaaaaaa

SEQ ID NO: 32263 - DNA, 669 bp, Homo sapiens
gcgtaatacgactactatagggcgaattggagctccaccgcggtggcggccgcttttttttttttttttttttttttttttggaccagagaggccccaaactagcagcctgtcctcctcagtagccccagcatcccttcatcattttgttgcccttctatgggcctagtttaggtctgagaggcatagttttaaaatttttattgttatttatttattctagagataaggtcttgctatgtttcccaggctggtcttgaactcctggcctcaagcaatcctcctgcagcagcctcccaaagtgctgggattacaggcatgagccaccacgtctggtcagacaggcatagttttacaaatatgtgggtggataaatgctgtccagtcttacttcatcacttctatcaattgaatgcttttggttggaaataacagaaaatccaactaaaagtgacttaaacaaaggaaatgttattatctcatgtaccaggaattctggaggtagactggttcaagggtggattaattaattctagaagtactctcgagggggggcccggtacccagcttttgttccctttagtgagggttaattgcgcgcttggcgtaatcatggtcatagctgtttcctgtgtgaaattgttatccgctcacaattccacacaacata

SEQ ID NO: 32264 - DNA, 403 bp, Homo sapiens
gcgtaatacgactcactatagggcgaattggagctccaccgcggtggcggccgcttttttttttttttttttttttttgggatgctcaacctataatacccaaaggctctatttcagtagaatttattggtttgctgattatagcagcgacatagttgcattctagagaccttagaaaatgcagaaaatttcaagaaaaacatttaaattgtgctcatagtgaaactgagaggtgaccactcttaatattttgtggcataagcattccagtcttttatctttctcaaagtgtcacataaactttctcaaaggccattaaatacttttccatagcctgattttttgtgaccacatagtgtcctattatattgataataccataatttacctaacccatttttat

SEQ ID NO: 32265 - DNA, 411 bp, Homo sapiens
  misc_feature 8: n = A,T,C or G
ccgctcgnttttttttttttttttttttttttttttaccttaaacatatattccttggggggtaaagcatgttatagtgtttcagcttcactttttttctgaatggctatccagttgtcccaagatcatttgttgaataattcattttcccccatttgaaatgacaccttttcgtatactaaagtcccaagtctcttagttataaaacagtaataaacccttgaaacaggcattttcctaaaatacattttgtttaagtaagacagttttcccccgcgttaattaattctagaagtactctcgagggggggcccggtacccagcttttgttccctttagtgagggttaattgcgcgcttggcgtaatcatggccatagctgtttcctgtgtgaaattgttatccgctcaca

SEQ ID NO: 32266 - DNA, 400 bp, Homo sapiens; identical to SEQ ID NO: 32230

SEQ ID NO: 32267 - DNA, 440 bp, Homo sapiens
accctactaaagggaacaaaagctgggtaccgggccccccctcgagagtacttctagaattaattaacgcgggcgtctccctgccaggccttgggctctgcagaggtgcccactgaaagcttgtcctgtgccctctacacctcagaggggttcagagccaagctccaggacccctgctgtcaaaaagtgttccctgggaacaagtgcagggaacagtcctgcaagcaagggactgcttgccctgctttcggacagccttctgagagccagtgaaggccagcagctgggctgaacactacatcatcctcagaaccaccctgcacagccggtgtgctccccgccatcgacaggaaaaacgggcccttagaggcacaggcaacttgctcggggttaggtgcagcgggtggcagagtcagaatgtgaggacagttgggccactc

SEQ ID NO: 32268 - DNA, 489 bp, Homo sapiens
atgacccagcgcgcaattaaccctactaaagggaacaaaagctgggtaccgggccccccctcgagagtacttctagaattaattaacgcggggaagataattagtggcaaacagagaataaattctctctcagtagtgtgtacttgacgttaatgccgatgataattcatctgatctacagaatattcactttaatagagagagagagttgaatgacgaggaaatagatactaaagccaatatagtcttgataccaaaataaaattaaaatgagaaactaacatgataggttcaaggccttttgggagcctgttttctttgccagatttcacattcttacagcttcatggtctttttcttctaacaaattaatcagctgagagaagctgtctttcagtgcatccatgtcatccagtgagcagggctgtagaatccagcgttttccacgtgcaagtggttcaagttcaaaatattttttgatctcttgta

SEQ ID NO: 32269 - DNA, 430 bp, Homo sapiens
attaaccctcactaaagggaacaaaagctgggtaccgggccccccctcgagagtacttctagaattaattaacgcgggtcccggactcaagcctgactaatgtttttactttttgtggggacaggggtctccctatgttgcccaagctgttctcaaactcttgggcttaagcaatcctcccaccttggcctctcaaggtgctaggattacaaatatgaaccactctgcccagcctctaaacactgttttaaatacaaagaaatagttcttgtttctgcatgtcatagctttgtaagtttacctttttctattttatctaatattgatgtatacataggagaaagggtacttcagaacatgaattttagagcaatctaccaagtctcatgattacaatagttgaaaatttggaaaaattgtctacccagaa

SEQ ID NO: 32270 - DNA, 400 bp, Homo sapiens
cgcgcaattaaccctgcgctaaagggaacaaaagctgggtaccgggccccccctcgagagtacttctagaattaattaacgcggggaagataattagtggcaaacagagaataaattctctctcagtagtgtgtacttgacgttaatgccgatgataattcatctgatctacagaatattcactttaatagagagatgagagtctgaaatgaccagaggaaaatagatactaaagccaatatagtcttgataccaaaataaaattaaaatgagaaactaacatgataggttcaaggccttttgggagcctgttttctttgccagatttcacattcttacagcttcatggtctttttcttctaacaaattaatcagctgagagaagctgtctttcagtgca

SEQ ID NO: 32271 - DNA, 393 bp, Homo sapiens
gggcgaattggagctccaccgcggtggcggccgctttttttttttttttttttttttttacttgaattgtagttatagtgcttccgttatttatttttattttttttattatactttaagttttagggtacatgtgcacaactgtgccggtttgctacatatgtatacatgtgccatgttggtgcgctgcactcattaactcgtcatttatattaggcctatatacgtgttcattggacccttatcgactttgcaggatgcttatccatctaactattcatctttatttgccttcgttttttgaggtcccttattcatcctaaaacaaaatataatgcctgactcatagtcagacttcacagtatttctaaatgaattacattgcattgggga

SEQ ID NO: 32272 - DNA, 437 bp, Homo sapiens
gcgcaatcaaccctcacttttgggaacaaaagctgggtaccgggccccccctcgagagtacttctagaattaattaaatgataatcatattgggcattcatatgtgctaaacaccattctaagtgctgaggcactatgatgaatatgacagacagatacctgttcccagagagtttataatgttgaggtaaagagccacataaaagacaattgtgttatcacttatgaagggctttgggatcaatgaggagggatgcctaacacagacaaaaattcaaagaagcctgcatagaagaggtatcatttaggttgaaatgtgagagaaaaacagcattgtagggagaattccgggcattgtagggagaattctgggcaatgggaacagcatgtgcagagacctagaggcatgagggagggcaagtatgtttgaagatggc

SEQ ID NO: 32273 - DNA, 582 bp, Homo sapiens
  misc_feature 49: n = A,T,C or G
gcgcgcattaaccctcactaaagggaacaaaagctgggtaccgggcccnccctcgagagtacttctagaattaattaacgcgggggaaaaaaaaaaagaaaagaaagcgccttcaaggccatctgtttctctgctactaccctttttggaaagacaaatctccttcccctccctgtcctccttcttctacattcccctagggctgtgtacctctctctcagcgtgccctgcctcggtgcctctgtggcagggccaggtctgacttcccagatgagcttgctctcctaagctgcatcattgcatgactctcctctttcctaacctccctcactcctccagctcccttctgctggtgaatgacatctcttcacgccacacagtcacaggacggctgctccaccaccggcatcacatctcctttccaggcaggaagaagaggaaggaggaagagacaggacaaaggtggtctttcttccagtaaagctttgactttttatctagaaaacattatctctgagcttttcacctacatttccttggccagacctgggtcacgtggtcacctctaattgagaagatgag

SEQ ID NO: 32274 - DNA, 554 bp, Homo sapiens
gcgtaatacgactcactatagggcgaattggagctccacgcggtggcggccgctttttttttttttttttttttttttacttgaattgttgttatagtgcttccgttatttatttttattttttttattatactttaagttttagggtacatgtgcacaacgtgcaggtttgctacatatgtatacatgtgccatgttggtgtgctgcactcattaactcgtcatttatattaggtatatatacgtgttcattgtacccttatcgactttgcagcatgcttatccatctaactattcatctttatttgccttcgttttttgagttcccttattcatcctaaaacaaaatataatgcctgactcatagtcagacttcacagtatgtttaaatgaattacattgcattggggaaatataaatagtaatgtccttttatagaggaagtctaaaagaaattcttgggtgagttgataatcaaacatttttaagaaggtatattttgctagcaaagaaagaaaaaatatgacagcttatttatatagagaacctatgta

SEQ ID NO: 32275 - DNA, 489 bp, Homo sapiens
ccagcgcgcaattaaccctactaaagggaacaaaagctgggtaccgggccccccctcgagagtacttctagaattaattaacgcgggatcctcccaccacacacacagcagcaggcggtgaggacaggcctcatgcagggagacagggagcggccagacagcctggcactcctctgactgctcagggctgggccctgggacggggctcccgcctcctgaagctggggtcctcaccccagcatctgaggatcgcttctgccaagcaaaccccacacaagctttgcctcctccggaaatgtccctgaagcacacatggagtcagggagagggccagagccaaatccctcacaatgaccaaccaccagggaggaggctccgccagcccaacagcaagactccgcccaggcagcagggacacagtaagcgtttcaggaaggaagcaaggagcaagtcctgtatggctctgctcaccaacacgagatgtcctga

SEQ ID NO: 32276 - DNA, 619 bp, Homo sapiens
cgtaatacgactcactatagggcgaattggagctccaccgcggtggcggccgctttttttttttttttttttttttttttttaagagggagtcttactccgtcacccaggctggagtgtggtggtgtgatctcagctcacagcaacctgacctcaggtgattcacccgcctctgtctcccaaagtgctgggattacaggcgtgagccactgcgcccggcgtctttgaattttttaaactgaagtttaattgcctttgagtttgatcattcactatttgtcatttgtatttcttttgttaattatctgctcaagctctaatttcataatggaaatttaatggattaacatataacacccactatcacccgccttaattaattctagaagtactctcgagggggggcccggtacccagcttttgttccctttagtgagggttaattgcgcgcttggcgtaatcatggtcatagctgtttcctgtgtgaaattgttatccgctcacaattccacacaacatacgagccggaagcataaagtgtaaagcctggggtgcctaatgagtgagctaactcacattaattgcgttgcgctcactgcccggtttccagtcgggaaacc

SEQ ID NO: 32277 - DNA, 464 bp, Homo sapiens
  misc_feature 191: n = A,T,C or G
acgactactatagggcgaattggagctccaccgcggtggcggccgcttttttttttttttttttttttttgggatgctcaacctataatacccaaaggctctatttcagtagaatttattggtttgctgattatagcagtgacatagttgcattctagagaccttagaaaatgcagaaaatttcaagaaancatttaaattgtgctcatagtgaaactgagaggtgaccactcttaatattttgtggcataagcattccagtcttttatctttctcaaagtttcacataaactttctcaaaggccattaaatacttttccatagcctgattttttgtgaccacatagtatcctattatattgataataccataatttacctaacccatttttatatatttggattttttccaattcatcattattatgaataatggtgtatctcagtggttattactttgcact

SEQ ID NO: 32278 - DNA, 416 bp, Homo sapiens
cgggcccccccttgatttgtcttctagatctaattcacgcggggttataaacaaaaagaaaagaaagcgccttcaaggccttctgtttctctgctactaccctttttggaaagacaaatctccttcccctccctgtcctccttccttctacattcccctagggctgtgtacctctctctcagcgtgccctgcctcggtgcctctgtggcagggccaggtctgacttcccagatgagcttgctctcctaagctgcatcattgcatgactctcctctttcctaacctccctcactcctccagctcccttctgctggtgaatgacatctcttcacgccacacagtcacaggacggctgctccaccaccggcatcacatctcctttccaggcaggaagaagaggaaggaggaagagacag

SEQ ID NO: 32279 - DNA, 430 bp, Homo sapiens
ccagcgcgcataaccctactaaagggaaaaaagctgggtaccgggccccccctcgagagtacttctagaattaattaaatgaaatcatattgggcattcatatgtgctaaacaccattctaagtgctgaggcactatgatgaatatgacagacagatacctgttcccagagagtttataatgttgaggtaaagagccacataaaagacaattgtgttatcacttatgaagggctttgggatcaatgaggagggatgcctaacacagacaaaaattcaaagaagcctgcatagaagaggtatcatttaggttgaaatgtgagagaaaaacagcattgtagggagaattccgggcattgtagggagaattctgggcaatgggaacagcatgtgcagagacctagaggcatgagggagggcaagtatgtttga

SEQ ID NO: 32280 - DNA, 669 bp, Homo sapiens; identical to SEQ ID NO: 32263

SEQ ID NO: 32281 - DNA, 483 bp, Homo sapiens
cgtaatacgactcactatagggcgaattggagctccaccgcggtggcggccgctttttttttttttttttttttttttggaaatatgcccacccatttcaggttgagccacggataaggagggcttagctcatgtctcctgtgggaattgaggcatctcaggaaacagtatagagttggtacagttagaatgagaagaagcctggggaaagaaaccaagagtgagaaatgcgtggctattttgacttagctggagcaaccctctcataacaggctgggaagtggacccgcgttaattaacgcgggggaaattgatgaacaaacaaaggtcatagtaaaagacagacttttggggataaaaacagaaactccaagtactgtatcaacaaatgcaagtacaccacaatcagtgagcagtgtggttcattatctggcaatggcactctttcaaatagagcagggcattgagcggcgttttctgaaa

SEQ ID NO: 32282 - DNA, 434 bp, Homo sapiens
gcgcgcattaaccctcactaaagggaacaaaagctgggtaccgggccccccctcgagagtacttctagaattaattaacgcgggcattgtgtgcagaagacctggactggaatctaacactgtgagtactccccaggatccgtgttcctctctttagcccaggcatgcagttacattacattttccaaccttccttgcagttagctacgatcacgtgactgcattctggccagtggaatgtgtgtggaagtgatgtgggccaattccaggcctggcctataaaaatcccccactttttgttctctttctccatccaccatctgcatggagagctcccagcactagagggagaaaaagccaccagagggaaggagcctgggtccctgaatcactgtgtagactacctgccaaacatacaccctgaattgttatgg

SEQ ID NO: 32283 - DNA, 461 bp, Homo sapiens
cccagcgcgcattaccctactaaagggaacaaaagctgggtaccgggccccccctcgagagtacttctagaattaattaaggcgggcgcctgtaatctcagctactttggaggccgaggcaggagaattgctagaacccaggaggcagaggttgcagtgagctgagatcgcgccactgcactccagcctgggagacagaatgagactccatctccaaaaaaaaaagaaagaaagaaagaaagaaagaaagaaggctctattttgatactgggagcctaaactgaatgattctggagaaattcacagatggggctgaggctcaccttcatgacagctgtatcaaaggcctaaatttctaaggctcagaaatcactacaataagcctatcaacagcatgtgatactctccaagcattttgcaaccttaacatttccatcctttacagtactttgatatcctca

SEQ ID NO: 32284 - DNA, 520 bp, Homo sapiens
tagggcgaattggagctccccgcggtggcggccgcttttttttttttttttttttttttttttttttacattaaacctctgatttattgcgggggtaaagcatgttatacgtgttccagcttcactttttttctgaatggctatccagttgtcccaagatcatttgttgaataattcattttcccccatttgaaatgacaccttttcgtatactaaagtcccaagtctcttagttataaaacagtaataaacccttgaaacaggcattttcctaaaatacattttgtttaagtaagacagttttcccccgcgttaattaattctagaagtactctcgagggggggcccggtacccagcttttgttccctttagtgagggttaattgcgcgcttggcgtaatcatggacatagctgtttcctgtgtgaaattgttatccgctcacaatttcccacaacatacgagcccgaagcataaagtgtaaaagcctggggtgcctaatgagtgagctaactcacatt

SEQ ID NO: 32285 - DNA, 446 bp, Homo sapiens
cgccagcgcgcaattaaccctactaaagggaacaaaagctgggtaccgggccccccctcgagagtacttctagaattaattaacgcggggaagataattagtggcaaacagagaataaattctctctcagtagtgtgtacttgacgttaatgccgatgataattcatctgatctacagaatattcactttaatagagagatgagagtctgaaatgaccagaggaaaatagatactaaagccaatatagtcttgataccaaaataaaattaaaatgagaaactaacatgataggttcaaggccttttgggagcctgttttctttgccagatttcacattcttacagcttcatggtctttttcttctaacaaattaatcagctgagagaagctgtctttcagtgcatccatgtcatccaatgagcagggctgtagaatccagcgtttt

SEQ ID NO: 32286 - DNA, 572 bp, Homo sapiens
  misc_feature 471: n = A,T,C or G
acgcgggggaaaaaaaaatttataagaaagcgccttcaaggccatctgtttctttgctactacccttttgggaaagacaaatctccttccctccctgtcctccttctttacattcccctagggctgtgtacctctctctaagcgtgccctgcctcggtgcctctgtggcagggccaggtctgacttcccagatgagcttgctctcctaagctgcatcattgcatgactctcctctttcctaacctccctcactcctccagctcccttctgctggtgaatgacatctcttcacgccacacagtcacaggacggctgctccaccaccggcatcacatctcctttccaggcaggaagaagaggaaggaggaagagacaggacaaaggtggtctttcttccagtaaagctttgactttctatctagaaaacattatctctgagcttttcacctacatttccttggccagacctgngtcacgtggtcacctctaattgagaagatgagtatttcagagggacacatttttgttccctcccaaatcagggctgtgttaggaagaaagcgggaatgggt

SEQ ID NO: 32287 - DNA, 412 bp, Homo sapiens
gccgcttttttttttttttttttttttttttttttttacatttaacatatatttattggggggtaaagcatgttatagtgttccagcttcactttttttctgaatggctatccagttgtcccaagatcatttgttgaataattcattttcccccatttgaaatgacaccttttcgtatactaaagtcccaagtctcttagttataaaacagtaataaacccttgaaacaggcattttcctaaaatacattttgtttaagtaagacagttttcccccgcgttaattaattctagaagtactttcgagggggggcccggtacccagcttttgttccctttagtgagggttaattgcgcgcttggcgtaatcatggtcatagctgtttcctgtgtgaaattgttatccgctcaca

SEQ ID NO: 32288 - DNA, 485 bp, Homo sapiens
ccctactaaagggaacaaaagctgggtaccgggccccccctcgagagtacttctagaattaattaacgcgggggaaaaaaaaaaagaaaagaaagcgccttcaaggccatctgtttctctgctactaccctttttggaaagacaaatctccttcccctccctgtcctccttccttctacattcccctagggctgtggacctctttttcaacgtgccctgcctcggtgcctttgtggcagggccaggtctgacttcccagatgagcttgctctcctaagctgcatcattgcatgactctcctctttcctaacctccctcactcctccagctcccttctgctggtgaatgacatctcttcacgccacacagtcacaggacggctgctccaccaccggcatcacatctcctttccaggcaggaagaacaggaaggaggaagagacaggacaaaggtggtctttcttccagtaaagctttgacttttta

SEQ ID NO: 32289 - DNA, 394 bp, Homo sapiens
ccctactaaagggaacaaaagctgggtaccgggccccccctcgagagtacttctagaattaattaacgcgggggaaaaaaaaaaagaaaagaaagcgccttcaaggccatctgtttctctgctactaccctttttggaaagacaaatctccttcccctccctgtcctccttccttctacattcccctaagggctgtgtacctttctctcagcgtgccctgcctcggtgcctctgtggcagggccaggtctgacttcccagatgagcttgctctcctaagctgcatcattgcatgactctcctctttcctaacctccctcactcctccagctcccttctgctggtgaatgacatctcttcacgccacacagtcacaggacggctgctccaccacc

SEQ ID NO: 32290 - DNA, 444 bp, Homo sapiens
ccctactaaagggaacaaaagctgggtaccgggccccccctcgagagtacttctagaattaattaacgcgggggaaaaaaaaaaagaaaagaaagcgccttcaaggccatctgtttctctgctactaccctttttggaaagacaaatctccttcccctccctgtcctccttccttctacattcccctagggctgtgtacctctctctcagcgtgccctgcctcggtgcctctgtggcagggccaggtctgacttcccagatgagcttgctctcctaagctgcatcattgcatgactctcctctttcctaacctccctcactcctccagctcccttctgctggtgaatgacatctcttcacgccacacagtcacaggacggctgctccaccaccggcatcacatctcctttccaggcaggaagaagaggaaggaggaagagacag

SEQ ID NO: 32291 - DNA, 582 bp, Homo sapiens
ctatagggcgaatcggagctccaccgcggtggcggccgcttttttttttttttttttttttttttttttagatggagtcttactccgtcacccaggctggagtgtggtggtgtgatctcagctcacagcaacctgacctcaggtgattcacccgcctctgtctcccaaagtgctgggattacaggcgtgagccactgcgcccggctgtctttgaattttttaaactgaagtttaattgcctttgagtttgatcattcactatttggcatttgtatttcttttgttaattatctgctcaagctctaatttcataatggaaatttaatggattaacatataacacccactatcacccgccttaattaattctagaagtactctcgagggggggcccggtacccagcttttgttccctttagtgagggttaattgcgcgcttggcgtaatcatggtcatagctgtttcctgtgggaaatgttatccgctcacaattccacacaacatacgagccggaagcataaagtgtaaagcctggggtgcctaatgagtgagctaactcacattaattgcgttgcgctcact

SEQ ID NO: 32292 - DNA, 411 bp, Homo sapiens
gccccccctcgagtgtatttctagaaataattctcgcgggttaattatcaacgaaaagaaagcgccttcaaggccatctgtttctctgctactaccctttttggaaagacaaatctccttcccctccctgtcctccttccttctacattcccctagggctgtgtacctctctctcagcgtgccctgcctcggtgcctctgtggcagggccaggtctgacttcccagatgagcttgctctcctaagctgcatcattgcatgactctcctctttcctaacctccctcactcctccagctcccttctgctggtgaatgacatctcttcacgccacacagtcacaggacggctgctccaccaccggcatcacatctcctttccaggcaggaagaagaggaaggaggaagagacag

SEQ ID NO: 32293 - DNA, 345 bp, Homo sapiens
caaaagctgggtaccgggccccccctcgagagtacttctagaattaattaacgcgggatcctcccaccacacacacagcatcaggcggtgaggacaggcctcatgcagggagacagggagcggccagacagcctggcactcctctgactgctcagggcttggccctgggaacgggcctcccgcctccatgaggctgtggtccttaccccagcatcttgaggatcgcttctgccaagcaaaccccacacaagctttgcctcctccggaaatgtccctgaagcacacatggagtcagggagagggccagagccaaatccctcacaatgaccaaccaccagggaggag

SEQ ID NO: 32294 - DNA, 433 bp, Homo sapiens
ctcctaaagggataaaagctgggtaccgggccccccctcgagagttcttctagaattaattaacgcgggggatttaaaaaaagaaaagaaagcgccttcaaggccatctgtttctctgctactaccctttttggaaagacaaatctccttcccctccctgtcctccttccttctacattcccctagggctgtgtacctctctctcagcgtgccctgcctcggtgcctctgtggcagggccaggtctgacttcccagatgagcttgctctcctaagctgcatcattgcatgactctcctctttcctaacctccctcactcctccagctcccttctgctggtgaatgacatctcttcacgccacacagtcacaggacggctgctccaccaccgtcatcacatctcctttccaggcaggaagaagaggaaggagga

SEQ ID NO: 32295 - DNA, 442 bp, Homo sapiens
ctactatagggcgaattggagctccaccgcggtggcggccgctttttttttttttttttttttttttttttggaggaaggcacctacaaaacgaaagtgcctagggcttacaaaagtcatatgtagcctttacaaatattagctcagtcattttcagaaaggtttttccaattatcattttaaagatgaggaaactggaagctcagggaggctaggaaacttatccaaagcctcttaagaggctatgttagtcagactgggctaacagctgtaacaaccccagaatttaaatggcttaacacattaggagtttatttgttattgccataacaattcagggtgtatgtttggcaggtagtctacacagggattcagggacccaggctccttccctctgggggctttttctccctctagggctgggagctctccatgcagatgg

SEQ ID NO: 32296 - DNA, 459 bp, Homo sapiens
acccagccgcataaccctactaaagggaacaaaagctgggtaccgggccccccctcgagagtacttctagaattaattaacgcgggcaacctacatgtatatgaagacagtgtttaatctctctttgtcattcctatttatgaatggggatagcaactaaaacctcatgagctgagtattaaagaaggttatatgaattttctaatagctccctaatagcatggtggctcacatatgtaagcccaacactttgggaggccgagatgggtggacggcttcagcctaggaattagagaccctcattaaaaaaaaattaaagaaacaaaaccaaaaacatatgctgatcacttgagcccagagtttgagacaagcctgggcaacacagggagaccttcctctacaaaaaaaatacgaaaattagtggtgcatgcctgtaatcctagctattcaggagactga

SEQ ID NO: 32297 - DNA, 429 bp, Homo sapiens
gcaattaaccctcacttagggaacaaaagctgggtaccgggccccccctcgagagtacttctagaattaattaacgctggggaaaaaaaaaaagaaaagaaagcgccttcaaggccatctgtttctctgctactaccctttttggaaagacaaatctccttcccctccctgtcctccttccttctacattcccctagggctgtgtacctctctctcagcgtgccctgcctcggtgcctctgtggcagggccaggtctgacttcccagatgagcttgctctcctaagctgcatcattgcatgactctcctctttcctaacctccctcactcctccagctcccttctgctggtgaatgacatctcttcacgccacacagtcacaggacggctgctccaccaccggcatcacatctcctttccaggcaggaa

SEQ ID NO: 32298 - DNA, 596 bp, Homo sapiens
agggaacaaaagctgggtaccgggccccccctcgagagtacttctagaattaattaacgcgggggcgctaggacctggagggctagtcggcgggctgcgcgtccggccgctagctgagctggaggccaccggccagagccgaccccaggagtgagagagacaggggcgtgcgtgagttccggcggcctgcaccgggcaaaccccgtaccttcccagcatcggctcagcaacccacgtgcatccaggccggtcaatgtcattgagtcacctccgcgccttggccaccctggagtcccgagaatccgaagttccagacaaatgcccaaactacattcctgcatgttcgaaagcgtaaattgcaaagcacaaatccagttgtagattgtggccgggagcagtggctcacgcctataatcccagcactttgggaggccgaggcggacagatcacgaagtcagcacttcgagaccagcatggccaacatggtgaagccccatctctactaaaaatacaaacattagccaggcatggtggtaggcccctgtaatcccagctactcggtaggctgaggcaggagaatcacttgaacccgggag

SEQ ID NO: 32299 - DNA, 621 bp, Homo sapiens
gcgtaatacgactcactatagggcgaattggagctccccgcggtggcggccgcttttttttttttttttttttttttttttttttacatttaactctgatttattggggggtaaagcatgttatagtgttccagcttcactttttttctgaatggctatccagttgtcccaagatcatttgttgaataattcattttcccccatttgaaatgacaccttttcgtatactaaagtcccaagtctcttagttataaaacagtaataaacccttgaaacaggcattttcctaaaatacattttgtttaagtaagacagttttcccccgcgttaattaattctagaagtactctcgagggggggcccggtacccagcttttgttccctttagtgagggttaattgcgcgcttggcgtaatcatggtcatagctgtttcctgtgtgaaattgttatccgctcacaattccacacaacatacgagccggaagcataaagtgtaaagcctggggtgcctaatgagtgagctaactcacattaattgcgttgcgctcactgcccgctttccagtcgggaaacctgtcgtgccagctgcattaatgaatcggccaacgcgcggggagagg

SEQ ID NO: 32300 - DNA, 601 bp, Homo sapiens; identical to SEQ ID NO: 32220
  misc_feature 391, 534: n = A,T,C or G

SEQ ID NO: 32301 - DNA, 491 bp, Homo sapiens
ccctactaaagggaacaaagctgggtaccgggccccccctcgagagtacttctagaattaattaacgcgggggaaaaaaaaaaagaaaagaaagcgccttcaaggccatctgtttctctgctactaccctttttggaaagacaaatctccttcccctccctgtcctccttccttctacattcccctagggctgtgtacctctctctcagcgtgccctgcctcggtgcctctgtggcagggccaggtctgacttcccagatgagcttgctctcctaagctgcatcattgcatgactctcctctttcctaacctccctcactcctccagctcccttctgctggtgaatgacatctcttcacgccacacagtcacaggacggctgctccaccaccggcatcacatctcctttccaggcaggaagaagaggaaggaggaagagacaggacaaaggtggtctttcttccagtaaagctttgactttttatctagaa

SEQ ID NO: 32302 - DNA, 606 bp, Homo sapiens
tacgactcactatagggcgaattggagctccaccgcggtggcggccgcttttttttttttttttttttttttttttgggaggaaggcacctacaaaacgaaagtgcctagggcttacaaaagtcatatgtagcctttacaaatattagctcagtcattttcagaaaggtttttccaattatatttagagatgaggaaactgaagctcagggaggctaggaaacttatccaaagcctcttaagaggctatgttagtcagactgggctaacagctgtaacaaccccagaatttaaatggcttaacacattaggagtttatttgttattgccataacaattcagggtgtatgtttggcaggtagtctacacagtgattcagggacccaggctccttccctctggtggctttttctccctctagtgctgggagctctccatgcagatggtggatggagaaagagaacaaaaagtgggggatttttataggccaggcctggaattggcccacatcacttccacacacattccactggccagaatgcagtcacgtgatcgtagctaactgcaaggaaggttggaaaatgtaatgtaactgcatgcctgggct

SEQ ID NO: 32303 - DNA, 412 bp, Homo sapiens
ctcactatagggcgaattggagctccaccgcggtggcggccgctttttttttttttttttttttttttttttgagacagggtctcactctgtcacccaggctggagtgcagtggcgcaatctcagctcactgcagcctctgcctcccaggttcaagcggttctcctgcctcagtctcccgagtagctgggattacaccaccacacctggctaatttttgtatttttggtatagacgggttttcgccatgttggccaggctggtgtcaactcctgatctcaagtgatctgccagcctcggcctcccaaagtgctattacaggcgtgagccaccacgcctggcttaagctgcttaaatattctttcttaggtatccttggttttggaaaaaaaaagaatcacagaaaactaaaa

SEQ ID NO: 32304 - DNA, 443 bp, Homo sapiens
ccctactaaagggaacaaaagctgggtaccgggccccccctcgagagtacttctagaattaattaaggcgggtgatagtgggtgttatatgttaatccattaaatttccattatgaaattagagcttgagcagataattaacaaaagaaatacaaatgacaaatagtgaatgatcaaactcaaaggcaattaaacttcagtttaaaaaattcaaagacgccgggcgcagtggctcacgcctgtaatcccagcactttgggagacagaggcgggtgaatcacctgaggtcaggttgctgtgagctgagatcacaccaccacactccagcctgggtgacggagtaagactccatctaaaaaaaaaaaaaaaaaaaaaaaaaaaaaagcggccgccaccgcggtggagctccaattcgccctatagtgagtcgtattacgcgcgct

SEQ ID NO: 32305 - DNA, 431 bp, Homo sapiens
ccctactaaagggaacaaaagctgggtaccgggccccccctcgagagtacttctagaattaattaacgcgggcgtctccctgccaggccttgggctctgcagaggtgcccactgaaagcttgtcctgtgccctctacacctcagaggggttcagagccaagctccaggacccctgctgtcaaaaagtgttccctgggaacaagtgcagggaacagtcctgcaagcaagggactgcttgccctgctttcggacagccttctgagagccagtgaaggccagcagctgggctgaacactacatcatcctcagaaccaccctgcacagccggtgtgctccccgccatcgacaggaaaaacgggcccttagaggcacaggcaacttgctcggggttaggtgcagcgggtggcagagtcagaatgtgaggacagttg

SEQ ID NO: 32306 - DNA, 455 bp, Homo sapiens
actactatagggcgattggagctccccgcgggggcggccgctttttttttttttttttttttttttttttgggagtctcgctcttttgcccaggctggagagtgcaatggtgccatctcagctcactacatccctgattcaagtgattctcctgcctaagcctcctgagtagctgggattacaggcacttgccatcatgcctggctaatttttgtatttttgtagagacggggtttcaccatgttggccagtctggtcttgaactcttgacctcaggcgatccatccacctcggcttcccaaagtgctggaattataggcgtgagccaccgcacccagccttctgggtgtattttcttatgatgtagaatgagtgataaagcaccataggagtcacctagtgttgccttttccatttttgagttgataaatggaggtctcagtctctgttaatta

SEQ ID NO: 32307 - DNA, 423 bp, Homo sapiens
tacgactcactatagggcgaattggagctccaccgcggtggcggccgcttttttttttttttttttttttttgggatgctcaacctataatacccaaaggctctatttcagtagaatttattggtttgctgattatagcagtgacatagttgcattctagagaccttagaaaatgcagaaaatttcaagaaaaacatttaaattgtgctcatagtgaaactgagaggtgaccactcttaatattttgtggcataagcattccagtcttttatctttctcaaagtttcacataaactttctcaaaggccattaaatacttttccatagcctgattttttgtgaccacatagtatcctattatattgataataccataatttacctaacccatttttatatatttggattttttccaattcatca

SEQ ID NO: 32308 - DNA, 438 bp, Homo sapiens
ccctcactaaagggaacaaaagctgggtaccgggccccccctcgagagtacttctagaattaattaatccacccttgaaccagtctacctccagaattcctggtgcgtgagataataacatttcctttgtttaagtcacttttagttggattttctgttatttccaaccaaaagcattcaattgatagaagtgatgaagtaagactggacagcatttatccacccacatatttgtaaaactatgcctgtctgaccagacgtggtggctcatgcctgtaatcccagcactttgggaggctgctgcaggaggattgcttgaggccaggagttcaagaccagcctgggaaacatagcaggaccttatctctagaataaataaataacaataaaaattttaaaactatgcctctcagacctaaactaggcccatagaagggc

SEQ ID NO: 32309 - DNA, 444 bp, Homo sapiens
cccagcgcgcaattaaccctcactaaagggaacaaaagctgggtaccgggccccccctcgagagtacttctagaattaattaaggcgggtggatcaactgtggtcaggagtttgagatcagccaggccaacctggtgaaaccccgtctctactaaaaatacaaaaattagctgggcgtgatggtgggcgcctgtaatcccagctacttgggaggctgaggcaggagaatcacttgaacccgggaggcggaggttgcagtgagccgagatcgcaccattgcactccagtctgggcaacagagtgagattccgtctcaaaaaaaaaaaaaaaaaaaaaaaaaaaaaaggcggccgccaccgcggtggagctccaattcgccctatagtgagtcgtattacgcgcgctcactggccggtcttttacaaccgtcgtgactggggaaaa

SEQ ID NO: 32310 - DNA, 510 bp, Homo sapiens
gcgaattggagctccaccgcggtggcggccgcttttttttttttttttttttttttttttttagatggagtcttactccgtcacccaggctggagtgtggtggtgtgatctcagctcacagcaacctgacctcaggtgattcacccgcctctgtctcccaaagtgctgggattacaggcgtgagccactgcgcccggcgtctttgaattttttaaactgaagtttaattgcctttgagtttgatcattcactatttgtcatttgtatttcttttgttaattatctgctcaagctctaatttcataatggaaatttaatggattaacatataacacccactatcacccgccttaattaattctagaagtactctcgagggggggcccggtacccagcttttgttccctttagtgagggttaattgcgcgcttggcgtaatcatggtcatagctgtttcctgtgtgaaattgttatccgctcacaattccacacaacatacgagccggaagc

SEQ ID NO: 32311 - DNA, 419 bp, Homo sapiens
accctactaaagggaacataagctgggtaccgggccccccctcgagagtacttctagaattaattaacgcgggggaaaaataaaaagaaaagaaagcgccttcaaggccatctgtttctctgctactaccctttttggaaagacaaatctacttcccctccctgtcctccttccttctacattcccctagggctgtgtacctctctctcagcgtgccctgcctcgatgcctctgtggcagggccaggtctgacttcccagatgagcttgctctcctaagctgcatcattgcatgactctcctctttcctaacctccctcactcctccagctcccttctgctggtgaatgacatcttttcacgccacacagtcacaggacggctgctccaccaccggcatcacatctcctttccaggcag

SEQ ID NO: 32312 - DNA, 667 bp, Homo sapiens
gcgtatacgactactatagggcgaattggagctccaccgcggtggcggccgcttttttttttttttttttttttttttttggaagaatcaacagactctatatttgatcacaaagcaaaagtttaagtgtattacttaaaattttaagacaaaatctggaataattataactaacacaaattttgaggtagaggaagagaattctagagataggtgagataaaattttcatctttgataatgagtagacaaaaacactacctttaacaagtgaagaatttaaaaaatttagagaagaggaaatcataagtggtttttaaaatttattatacatatcgaggtaaagataatccaacagaaaatgagatttgaacagacacttcacaggagatagacaaatgtctcaacctcattagtcaccagacaaatgcaaattaaactcaaaatgcaatacctgtacacacctcacagaatggataaaacttgaaagactgacaaaccaaaccaacacaaagctggtctgaatgtggagcaaggaagacgctcgtactctcctggtgagcaaggtggagatggtaaaagagctggtgtaaccactttggaaaactgttagtatctattaaagtcaacccgcgttaattaattctagaagtactctcgaggggggg

SEQ ID NO: 32313 - DNA, 418 bp, Homo sapiens
ccctactaaagggaacaaaagctgggtaccgggccccccctcgagagtacttctagaattaattaacgcgggggcgctaggacctggagggctagtcggcgggctgcgcgtccggccgctagctgagctggaggccaccggccagagccgaccccaggagtgagagagacaggggcgtgcgtgagttccggcggcctgcaccgggcaaaccccgtaccttcccagcatcggctcagcaacccacgtgcatccaggccggtcaatgtcattgagtcacctccgcgccttggccaccctggagtcccgagaatccgaagttccagacaaatgcccaaactacattcctgcatgttcgaaagcgtaaattgcaaagcacaaatccagttggagattgtggccgggagcagtggctcacgcc

SEQ ID NO: 32314 - DNA, 487 bp, Homo sapiens
  misc_feature 310, 311: n = A,T,C or G
ccctactaaagggaacaaaagctgggtaccgggccccccctcgagagtacttctagaattaattaacgcgggggaaaactgtcttacttaaacaaaatgtattttaggaaaatgcctgtttcaagggtttattactgttttataactaagagacttgggactttagtatacgaaaaggtgtcatttcaaatgggggaaaatgaattattcaaacaaatgatcttgggacaactggatagccattcagaaaaaaagtgaagctggaacactataacatgctttaccccacaataaatcagagttaaatgtnnaaaaaaaaaaaaaaaaaaaaaaaaaaaaaggcggccgccaccgcggtggagctccaattcgccctatagtgagtcgtattacgcgcgctcactggccgtcgttttacaacgtcgtgactgggaaaaccctggcgttacccaacttaatcgccttgcagcacatccccctttcgcca

SEQ ID NO: 32315 - DNA, 445 bp, Homo sapiens
  misc_feature 360: n = A,T,C or G
accctactatagtgaacaaaagctgggtaccgggccccccctcgagagtacttctagaattaattaacgcggggaaagcggtggacactgcagagtgggcatccagccactgctacttccatgctgggatgagcagccagtgtagaataaaccctgtgtgcagtgaaacagtcagtgtgcagtatcctatggtgcatctaaacgtatgtacttgctgcaaatgcacatctacaaggacactcacgactattttcattcttgataccaccttcttatgacttgacaaagaaaattcaagcttttggctgagggtagtggctcgcacctgtaatcccagcactttgagaggccgaggtgggntgggtcacttgaggtcaggagttcgagaccagcctgaccaatattgtgaaatcctgtctttactaaaaatataaaaaatagcccg

SEQ ID NO: 32316 - DNA, 621 bp, Homo sapiens; identical to SEQ ID NO: 32299

SEQ ID NO: 32317 - DNA, 416 bp, Homo sapiens
accctactaaagggaacaaaagctgggtaccgggccccccctcgagagtacttctagaattaattaaggcgggggcacaggactgtacttttggtagcggtgcgggggccgccccggaccttaacccttgattaaaaaggggtaaaccttatttggaacagccattgactgggcacaggccaacactttggaagccgagaggccgaggcaggaggatcgcttgaggccaggagtgccagactgcgagactagcctgggtaacatagtgagaccctctcttcaaaaaaaaaaaaaaaaaaaaaaaagcctgtcacggtggcctgcgcctgtaccccagctactcgagaggatcgcctgagcccagtgaagctgcagcgagctgtgaggatgccaccgcactccggcctgggctaaaa

SEQ ID NO: 32318 - DNA, 480 bp, Homo sapiens
ccctcactaaagggaacaaaagctgggtaccgggccccccctcgagagtacttctagaattaattaaggcgggagcagcccaagtgtccagccacagatgagcagtcaaacgcagggtggccctccacacactggaaagtgacgcagccgtgaacagcagagaggttcggacccaggccacggcgcggatgccccttgaggacagcacacttccggagacaagccggacgcaaaaggccacgcggtgtgtgacaccactcgtgtgaaatgttcaggacaggccaatccagaggcaggaagggaatgcgtgggtgccgggactggggagggaatggggagtgatggctgacagagacggggtttccttctggggtaacaagaatgttctggaagctgatagaggtgatagttgtgcaactctgtcaatgtactatatgccactgaattacacactttaaaaaggtgaactttgccgggtgc

SEQ ID NO: 32319 - DNA, 486 bp, Homo sapiens
gctccaccgcggtggcggccgctgttttttgttttttttttttttgtagagacagtgttttgccatgttgcccaggcttatcctgaactcctgtactcaagaaattctcctgcctcagccccacaaagtgctgggattacaggcgtgatcccaccatgctcagccattcttttctaatgggagagtccgttgccccacctcctttatgaacagttcttctcattgatgtgaaatgctaccaaataatattttttttctctttgtaatttccgattgaccaaataattatttactgggatcttatataaataaagactcttaagactttagctttttagtaaatattaaaattacttttttttgagacaaagtctcactctgtcaccctggctggagtgcagtggcacgatcatggctcactgcagcctccttcttgcaagttcaagcaatcctcacacctcagccacctgagtagctgggaataca

SEQ ID NO: 32320 - DNA, 392 bp, Homo sapiens
cgggccccccctcgagagtacttctagaattatttaacgcgggcctttttctgctgcttcccagctccacatcaacccaaaagggcttcaggaagaggcaaccaggaacccaacaggcttgttctaggtgcctccatccctggggctcttcatggacagcagctgccaaggccatagctctcatacgtgtccttcctgcaggtgttcaagagggcctttcttctctagactgctctcaggtatcctgatgacatctctgctcagaagagtggactgatgagaaattggatgagatcaaaaagcaagcccatagctggaggaagactgagatgagatcttgattctctggttcctggctcaggagcctgcccctcatacgcacccactagctg

SEQ ID NO: 32321 - DNA, 417 bp, Homo sapiens
ccctactaaagggaacaaaagctgggtaccgggccccccctcgagagtacttctagaattaattaacgcgggggccactgccagaaccaaagtgacggtgccgacacccctccgcaagcgcaaggccgacttccataagtaattagccagagcaccgtcccgttcctgtcagcaccgagccccagccaggacaccggtattcccagcaccatacaagaactactttttcgatgaggcaacccaaaagctgcgagcggttcccggtgaggccgcccactcacctggccggcgcagacaagactccgtgcgtcaagacataacagcgcttctcagaactttgcttctccagcagaataatcctgcggaagactgagcagttcttgtgagggtgaaaccatggcccatgcattggtgacg

SEQ ID NO: 32322 - DNA, 446 bp, Homo sapiens
  misc_feature 334: n = A,T,C or G
gccagcgcgcaattaaccctcactaaagggaacaaaagctgggtaccgggccccccctcgagagtacttctagaattaattaacgcgggcctgcctggagggagctgccaccctcagctgcagccccagacctcgcggttgctctcatccgtcgttcccagtgtgggcagtgacgcagcaccacggtaagttctgtagagtggacgccactcgctggcaaagcccagcagggcaaggaataagtgtcactcagtctttatccagaaaaatccaccaatgtacttttagtgcagtattaacagatggtagaaaatggaattgcctagagggattntaatctcttgagggataattctggtacttgtacctgtctgatggtcgtgtaagtccatgttaacaaacctgggaccacaggaaaggagaactgatgcgaatacaaacaggtg

SEQ ID NO: 32323 - DNA, 667 bp, Homo sapiens; identical to SEQ ID NO: 32312

SEQ ID NO: 32324 - DNA, 394 bp, Homo sapiens
gccagcgcgcaattaaccctactaaagggaacaaaagctgggtaccgggccccccctcgagagtacttctagaattaattaaggcgggagaccatggggatccccagcatgatcctcctggggcacagtttgggaggattcctggccacttcttactcaatcaagtaccctgatagagttaaacacctcatcctggtggacccatggggctttcccctccgaccaactaaccccagtgagatccgtgcacccccagcctgggtcaaagccgtggcatctgtcctaggacgttccaatccattggctgttcttcgagtagctgggccctgggggcctggtctggtgcagcgattccggccggacttcaaacgcaagtttgcagacttctttgaag

SEQ ID NO: 32325 - DNA, 443 bp, Homo sapiens
ctactatagggcgaattggagctccaccgcggtggcggccgcttttttttttttttttttttttttttttggagacagggttttgacatgttggtcaggctggtcatgaactcctggcctcaagtgatccacctacctcggcctcccaaagtgctgggattacaggtgtgagccaccgcgcccaaccctgtgtttattcttaggtctgtactacgctttatgcctcagtttccacagttaaaacacgttattttattcctcacgttataggagcaatttgtattcataaacttggccttcaccttcaacttctgaagattttaatacagcgcaaatgatttggggtctgtgaattcagttttatttatttggctccttcctttaaggagtcaggctaatgcaagaaaatccaataattagatcttttggatttcaaataactg

SEQ ID NO: 32326 - DNA, 407 bp, Homo sapiens
gcgtaatacgactcactatagggcgaattggagctccacgcggtggcggccgctttttttttttttttttttttttttttttgaagaatcaacagactctatatttgatcacaaagcaaaagtttaagtgtattacttaaaattttaagacaaaatctggaataattataactaacacaaattttgaggtagaggaagagaattctagagataggtgagataaaattttcatctttgataatgagtagacaaaaacactacctttaacaagtgaagaatttaaaaaatttagagaagaggaaatcataagtggtttttaaaatttattatacatatcgaggtaaagataatccaacagaaaatgagatttgaacagacacttcacaggagatagacaaatgtctcaa

SEQ ID NO: 32327 - DNA, 422 bp, Homo sapiens
agggataaaagctgggtaccggggccccccctcgagagttcttctagaataaattaacgcgggttttttctgcactccaacctgggcaacatagcaagactccatctctaaaacacacacgtgcacacacacacacgcacacacataacaaaatgctcccaagtttttattagacccaaatgtttgctgtttattaccaaaaagataagattttctttttaataaaaagaaaaatggctgggtgcagtggctcacgcctgtaatccaagcactttgggaggctgaggcggggcaggtgaatcacttgaggtcaggagttcaagaccagcctggccaacatggtgaaaccctgtctctgctaaaaaaaaaaaaaaaaaaattagctgggcatgctggcaggtgcctgtaatcccagctactca

SEQ ID NO: 32328 - DNA, 417 bp, Homo sapiens
accctcactaaagggtacaaaagctgggtaccgggccccccctcgagagtacttctagaattaattaaggcgggcgcctgtaatctcagctactttggaggccgaggcaggagaattgctagaacccaggaggcagaggttgcagtgagctgagatcgcgccactgcactccagcctgggagacagaatgagactccatctccaaaaaaaaaagaaagaaagaaagaaagaaagaaagaaggctctattttgatactgggagcctaaactgaatgattctggagaaattcacagatggggctgaggctcaccttcatgacagctgtatcaaaggcctaaatttctaaggctcagaaatcactacaataagcctatcaacagcatgtgatactctccaagcattttgcaaccttaaca

SEQ ID NO: 32329 - DNA, 443 bp, Homo sapiens
cgccagcgcgcaattaaccctcactaaagggaacaaaagctgggtaccgggccccccctcgagagtacttctagaattaattaacgcgggatatagttcttctcattctttgttctcttcctttatatcaacagcctttttctgacatgatataaaatcatgtgcttatgacatgcattaaaaaggagaagtgctggatctaatatccttggtctaatggatccccttgcagatatacagggctccctacacacactgggatatctaggtacaagcccaaagttcatatacagactttctaaaatcattgtatttaaaagcagaaaagtgccgggcacagtggctcacatctgtaatcccaatactttgggaggctgaggtgggcgaatcacctgaggtcgcgagctcaagaccagcctggccaacatggtgaaaccccgtct

SEQ ID NO: 32330 - DNA, 503 bp, Homo sapiens; identical to SEQ ID NO: 32236

SEQ ID NO: 32331 - DNA, 424 bp, Homo sapiens
accctcactaaagggaacaaaagctgggtaccgggccccccctcgagagtacttctagaattaattaacgcgggggaaaaaaaaaaagaaaagaaagcgccttcaaggccatctgtttctctgctactaccctttttggaaagacaaatctccttcccctccctgtcctccttccttctacattccccttaggcctgagtacctctctctcagcgtgccctgcctcggtgcctctgtggcagggccaggtctgacttcccagatgagcttgctctcctaagctgcatcattgcatgactctcctctttcctaacctccctcactcctccagctcccttctgctggtgaatgacatctcttcacgccacacagtcacaggacggctgctccaccaccggcatcacatctcctttccaggcaggaa

SEQ ID NO: 32332 - DNA, 402 bp, Homo sapiens
  misc_feature 361, 385: n = A,T,C or G
agggagtcgcccacgcgtccggcttgcttgctgcgcttctcctgcagcctggtaggcactggctgctacttcagcttcagccttcgtcgcgacccctattttggctccagtctccgaccctgctccgtcctctctctacttggttgcatcctccctcctagttccagatttgcgccagatcctgctccaaatccggtagccgcatccccaagccatggctggtcccttctcccgtctgctgtctgcccgccccggactcaagctcctggctttggctggagctgggtctctcgccgccgggattctgctccgtccggaatctgtacgagctgccaccggtgaacggaggagactgtatccnccgagcgctgagtacccagacctncgaaagcacaacaactg

SEQ ID NO: 32333 - DNA, 490 bp, Homo sapiens
cagcgcgcaattaccctactaaaggacaaaagctgggtaccgggccccccctcgagagtacttctagaattaattaacgcgggcctgctaacatttagtccatcactatcccttaaggggagaataatgcccatgagacctcaggggcggggtgactacccaagatagccatctgaacgtgacacacggacccaattttcctgtaaccttaaggtggtgtaaaaggggcaaccatctggtcatttcttcgagttttttttatattttgtataactcctgtgcacataataaaatatgtaagcctatttttctgctaatgtgtgtactatcagtttgttttatggactcacccctaaggagaaaaatgtaaatttacctacatgtgaaatttaatttggagcttggctgccgtggacctatctaaaactgggtggcctgggctcttccttcccagataaaacttctttttttttttctttctgaagatggt

SEQ ID NO: 32334 - DNA, 381 bp, Homo sapiens
cgggccccccctcgttatgtacttctagaaataattaaatgaatttatattgggcattcatatgtgctaaacaccattctaagtgctgaggcactatgatgaatatgacagacagatacctgttcccagagagtttataatgttgaggtaaagagccacataaaagacaattgtgttatcacttatgaagggctttgggatcaatgaggagggatgcctaacacagacaaaaattcaaagaagcctgcatagaagaggtatcatttaggttgaaatgtgagagaaaaacagcattgtagggagaattccgggcattgtagggagaattctgggcaatgggaacagcatgtgcagagacctaaaggcatgagggagggcaag

SEQ ID NO: 32335 - DNA, 335 bp, Homo sapiens
gtaatacgactactatagggcgaattggagctccaccgcggtggcggccgctttttttttttttttttttttttttttttggaattattatttaatgagaaaaaaatccacgtgtatacaacatttcaaaacagaagttaaatcattaaatagtactttttatttaaatgtttataaggcagatctatgagaatgatagaaaacatggtgtgtaatttgatagcaatattttggagattacagagttttagtaattaccaattacacagttgaaaagaagatagtatattccaagcagattcaaaatatctaatgatagatcatggcttgaaaat

SEQ ID NO: 32336 - DNA, 428 bp, Homo sapiens
  misc_feature 311: n = A,T,C or G
accctcactaaagggaacaaaagctgggtaccgggccccccctcgagagtacttctagaattaattaacgcgggggaaaactgtcttacttaaacaaaatgtattttaggaaaatgcctgtttcaagggtttattactgttttataactaagagacttgggactttagtatacgaaaaggtgtcatttcaaatgggggaaaatgaattattcaacaaatgatcttgggacaactggatagccattcagaaaaaaagtgaagctggaacactataacatgctttaccccacaataaatcagagttaaatgtnaaaaaaaaaaaaaaaaaaaaaaaaaaaaaaggcggccgccaccgcggtggagctccaattcgccctatagtgagtcgtattacgcgcgctcactggccgtcgttttacaacgtcgtg

SEQ ID NO: 32337 - DNA, 480 bp, Homo sapiens
ccctactaaagggaacaaaagctgggtaccgggccccccctcgagagtacttctagaattaattaacgcgggcattgtgtgcagaagacctggactggaatctaacactgtgagtactccccaggatccgtgttcctctctttagcccaggcatgcagttacattacattttccaaccttccttgcagttagctacgatcacgtgactggatttctggccagtggaatgtgtgtggaagtgatgtgggccaattccaggcctggcctataaaaatcccccactttttgttctctttctccatccaccatctgcatggagagctcccagcactagagggagaaaaagccaccagagggaaggagcctgggtccctgaatcactgtgtagactacctgccaaacatacaccctgaattgttatggcaataacaaataaactcctaatgtgttaagccatttaaattctggggttgttacagc

SEQ ID NO: 32338 - DNA, 399 bp, Homo sapiens
ccctcactaaatggaacaaaagctcggtaccgggccccccctcgagagtacttctagaattaattaacgcggttttaaaaaaaaaaagaaaagaaagcgccttcaaggccatctgtttctctgctactaccctttttggaaagacaaatctccttcccctccctgtcctccttccttctacattcccctagggctgtgtacctctctctcagcgtgccctgcctcggtgcctctgtggcagggccaggtctgacttcccagatgagcttgctctcctaagctgcatcattgcatgactctcctctttcctaacctccctcactcctccagctcccttctgctggtgaatgacatctcttcacgccacacagtcacaggacggctgctccaccaccggca

SEQ ID NO: 32339 - DNA, 622 bp, Homo sapiens
tgtgctctaaagagttcagcggcgtcaaacaccacatgcgccgtttcccactcccacgtttccagtctgcggtaaggatggcaacgcatagcctgtactgcatcccagacccctaaccctttaagcaatgataccgaagccgcgctgatcgccgagatccgcacgtccggttggctatcagcgacaaacggcgctggttctgcgtgctcgatcaccgttaccgcaaatccgtgctgtgccagccccagcgccagtgcgccgccgaccattcctgcgccgacaatggcaatttccgttggttgatttgtcatggtcaatcatcctgttagcaatatgctttaagtctacaggatttttacccctaagggctgataacgctcatactggtcacaacggcagcaaagcattacactatgcgccctgcattcctggctactatttcgcaagagcaagtcgatgaccaaaaaactccatattaaaacctggggctgtcagatgaacgagtacgattgatcgaagatggccgatctgctggatgccacccacggctatcaactgaccgacgtggcggaagaagcggatgtgctgctgctgaacacctgctcaatccgcgagaaggctc

SEQ ID NO: 32340 - DNA, 583 bp, Homo sapiens
  misc_feature 21: n = A,T,C or G
gtatacgactcctatagggcngattggagctcaccgcggtggcggccgctttttttttttttttttttttttttttggaagatggaatctcactctgtcacccaggctggagtgcagtggcatgatctcagctcactggaagctctgcctcccaggttcacaccattctcctgcctcagcctctcaagcagctgggactacaggcgccagccgccatgcctggctaattttttttggtattttttagtacagatggggtttcaccgtgttagccaggatggtctcgatctcctgacctcgtgatctgcccacttcagcctcccaaagtgctgggattacaggcatgagccaccatgcccggccgatttcacctttcaatggcaattactataagacaggaaagttatttatttttatatatttacctaattttaagttaccttatacaaccctcattaatagtctgttagaactagaatttaaactctatgtgaatatggaccttatttaaacaatgtatccctagcacctagacaatgcctaacctgtcacattaacttaatatatattttatttatatttt

SEQ ID NO: 32341 - DNA, 220 bp, Homo sapiens
ctcgagagtacttctagaattaattaatccacccttgaaccagtctacctacagaattcctggtacatgagataataacatttcctttgtttaagtcacttttagttggattttctgttattttcaaccaaaagcattcaattgatagaagtgatgtagtaagactgtgacagtttttattcacccacatatttgttaaactatgccttgtctgaccaga

SEQ ID NO: 32342 - DNA, 384 bp, Homo sapiens
gccagcgcgcaattaaccctactaaagggaacaaaagctgggtaccgggccccccctcgagagtacttctagaattaattaacgcgggttctcatacacgaagcactcagatttttctctccatctctccacctgcttttagaatattggtgcatttttcaataagctcttcccttcatggtccaagataaacgtcaacaatttccaaggtttcatgcatcctcatattcaccccacactttaaaactatcatttatagtccacccatgagatttgctctgattggactagcgttgatcaagtgttcacccctagaacccatctatgcggccaggaaaaaggaacgataggctaggtcatatactccacccttggagcaagggc

SEQ ID NO: 32343 - DNA, 474 bp, Homo sapiens
attaaccctcactaaagggaacaaaagctgggtaccgggccccccctcgagagtacttctagaattaattaacgcgggcattgtgtgcagaagacctggactggaatctaacactgtgagtactccccaggatccgtgttcctctctttagcccaggcatgcagttacattacattttccaaccttccttgcagttagctaacgatcaccgtgacctgcatttctggccagtggaatgtgtgtggaagtgatgtgggccaattccaggcctggcctataaaaatcccccactttttgttctctttctccatccaccatctgcatggagagctcccagcactagagggagaaaaagccaccagagggaaggagcctgggtccctgaatcactgtgtagactacctgccaaacatacaccctgaattgttatggcaataacaaataaactcctaatgtgttaagccatttaaattc

SEQ ID NO: 32344 - DNA, 621 bp, Homo sapiens; identical to SEQ ID NO: 32299

SEQ ID NO: 32345 - DNA, 437 bp, Homo sapiens
cgccagcgcgcaattaaccctactaaagggaacaaaagctgggtaccgggccccccctcgagagtacttctagaattaattaacgcgggggaaaactgtctaacttaaacaaaatgttttttaggaaaatgcctgtttcaagggtttattactgttttataactaagagacttgggactttagtatacgaaaaggtgtcatttcaaatgggggaaaatgaattattcaacaaatgatcttgggacaactggatagccattcagaaaaaaagtgaagctggaacactataacatgctttaccccacaataaatcagagttaaatgtaaaaaaaaaaaaaaaaaaaaaaaaaaaaaaaagcggccgccaccgcggtggagctccaattcgccctatagtgagtcgtattacgcgcgctcactggccgtcgttttacaac

SEQ ID NO: 32346 - DNA, 661 bp, Homo sapiens
atacgactcactatagggcgaattggagctccaccgcggtggcggccgctttttcttttctttctttctttttttttttttagacggagtctccctctgtcacccagactggagtgcaatggtgtgatcttggctcactgcaacctccgcctcccgagttcaagtgattctcctgtctcagcctcctgagtagctgggattacaggcgcctgccatcatgtgccggctaattttggtatttttagtagagatgtggtttcaccatatcggccaggttggtctcaaactcctgacctcaggtgatcagcccgcctctgcatcccaaactgctgggattacaggcgtgaggccaccacacccagcccggattacccttaagtaggaggtacattctcttccattgaaaaagagagagagcagagaatagatgcacaggcaagcagatctgtatccattttgttgtgggaagttgcttcctctctgatgttctctctctctctctctctctgtctctctctctctctgtttttctctctcgtgcttcaagtagggaatgattagtgagtgatactgtttgctaagtagtaagaaaataaagaaggggaacacagaaagagtgtttcatagaaaaatgctggcaatgtctagagacatattgctc

SEQ ID NO: 32347 - DNA, 481 bp, Homo sapiens
  misc_feature 212: n = A,T,C or G
ctactatagggcgaattggagctccaccgcggtggcggccgctttttttttttttttttttttttttacttgaattgttgttatagtgcttccgttatttatttttattttttttattatactttaagttttagggtacatgtgcacaacgtgcaggtttgctacatatgtatacatgtgccatgttggtgtgctgcactcattaacttcgnaatttatattaaggtatatataccttgttaattggacccttatcgactttgcagcatgcttatccatctaactattcatctttatttgccttcgttttttgagttcccttattcatcctaaaacaaaatataatgcctgactcatagtcagacttcacagtatttttaaatgaattacattgcattggggaaatataaatagtaatgtccttttatagaggaagtctaaaagaaattcttgggtgaattgataatcaaacatttttaag

SEQ ID NO: 32348 - DNA, 493 bp, Homo sapiens
ccagcgctcaattaaccctactaaagggaacaaaagctgggtaccgggccccccctcgagagtacttctagaattaattaacgcgggggaaaaaaaaaaagaaaagaaagcgccttcaaggccatctgtttctctgctactaccctttttggaaagacaaatctccttcccctccctgtcctccttccttctacattcccctagggctgtgtacctttctcttaagggtgccctgcctcggtgcctctgtggcagggccaggtctgacttcccagatgagcttgctctcctaagctgcatcattgcatgactctcctctttcctaacctccctcactcctccagctcccttctgctggtgaatgacatctcttcacgccacacagtcacaggacggctgctccaccaccggcatcacatctcctttccaggcaggaagaagaggaaggaggaagagacaggacaaaggtggtctttcttccagtaaagctttg

SEQ ID NO: 32349 - DNA, 405 bp, Homo sapiens
ccctcactaagggacaaaagctgggtaccgggccccccctcgagagtacttctagaattaattaacgcgggactgctaacaattagtccatcactatcccctcaagtcaaaataatgcccatcatacctcaggggcggggtgactaccccagatagccatctgaacgtgacacacggacccaattttcctgtaaccttagaggcggtgtaaaaggggcaaccatctggtcatttcttcgagtgttttttatattttggtaactcctgtgcacataataaaatatgtaagcctatttttctggtaatgtgtgtactatcagtttgatttatggactcacccctaaggagaaaaatgtaaatttacctacatgtgaaatttagtttggagcttggctgccgaggacc

SEQ ID NO: 32350 - DNA, 487 bp, Homo sapiens
aagggaacaaaagctgggtaccgggccccccctcgagagtacttctagaattaattaaatgaaatcatattgggcattcatatgtgctaaacaccattctaagtgctgaggcactatgatgaatatgacagacagatacctgttcccagagagtttataatgttgaggtaaagagccacataaaagacaattgtgttatcacttatgaagggctttgggatcaatgaggagggatgcctaacacagacaaaaattcaaagaagcctgcatagaagaggtatcatttaggttgaaatgtgagagaaaaacagcattgtagggagaattccgggcattgtagggagaattctgggcaatgggaacagcatgtgcagagacctagaggcatgagggagggcaagtatgtttgaagatggcagatagttctggagggcagctagtgggggaggaagtgagaaaaggaatgattgtggagaagtagtcaagg

SEQ ID NO: 32351 - DNA, 417 bp, Homo sapiens
gcgcattaccctactaaagggaacaaaagctgggtaccgggccccccctcgagagtacttctagaattaattaacgcgggggaaaaaaaaaaagaaaagaaagcgccttcaaggccatctgtttctctgctactaccctttttggaaagacaaatctccttcccctccctgtcctccttccttctacattcccctagggctgtgtacctctctctcagcgtgccctgcctcggtgcctctgtggcagggccaggtctgacttcccagatgagcttgctctcctaagctgcatcattgcatgactctcctctttcctaacctccctcactcctccagctcccttctgctggtgaatgacatctcttcacgccacacagtcacaggacggctgctccaccaccggcatcacatctcctt

SEQ ID NO: 32352 - DNA, 453 bp, Homo sapiens
gctgggtgccgggccctgagagatcccctcataatttccccaaagcgtaaccatgtgtgaataaattttgagctagtagggttgcagccacgagtaagtcttcccttgttattgtgtagccagaatgccgcaaaacttccatgcctaagcgaactgttgagagtacgtttcgatttctgactgtgttagcctggaagtgcttgtcccaaccttgtttctgagcatgaacgcccgcaagccaacatgttagttgaagcatcagggcgattagcagcatgatatcaaaacgctctgagctgctcgttcggctatggcgtaggcctagtccgtaggcaggacttttcaagtctcggaaggtttcttcaatctgcattcgcttcgaatagatattaacaagttgtttgggtgttcgaatttcaacaggtaagttagttgctagaacccatggctcct

SEQ ID NO: 32353 - DNA, 521 bp, Homo sapiens
  misc_feature 488: n = A,T,C or G
actaaagggaacaaagctggtaccgggcccccctcgagagtactttagaataattaacgcgggcacccagggatcgcaggcggccgaatactgcagctggcttttgaaggcatcgatgcacactgtgagggcctgccttggctcctgcaccccaccacagaacgtgatactgcctttattctctccacccagaaaggtgacaaatccaagccctggatgtgacgggggtccacaagagtaattctggagagatggcgtcacgtgaggaatgcttagagacccacggagccaagtcacgggacctcagcgaccccatggctgacctaccgagacctccagtcgacagcatcgggtaggcccacacgtgtggcggaggaagtgagtgtcactggcccatcaccaagcacagctggcagaggtacctgtgcaggcgagtccaatgcccagctctataataaacacgccttgcggtgctggaagagactcanagtccatccaagacagattctgtcttcccacta

SEQ ID NO: 32354 - DNA, 408 bp, Homo sapiens
tgcgtaccgggccccccctcgattgtacttctagaattaattaacgcgggtggtggaggttgcagtgagccgagattgtgccactgccctccagcctggcaatagagcaagactacgtctcaaaaaaacaaaaaaaaaacaaaaaaaaactgattttgaccagaatggaaagggtgtgtgtattccatttggtttgttgtttgtaataacttaaaaataacaatttgataccaagttatttttttcaatcaaaaaacataaaacaagttacaattccagaatgccatgatttggccaacattgatgacttgaactaaatgacgcagccaaggaggtagttggtaaaataaaaataattctgtgctagggagtcaagatccctaggctaaagtccttgacactgcttat

SEQ ID NO: 32355 - DNA, 531 bp, Homo sapiens
ccgcggtggcggccgctttttttttttttttttttttttttaaagaaagcgggttctcatacaacaaccactcagatgtttctctccatctctccacctgctttttgaatattggtgcattattcagaaggctcttcccttcatagccccaagataaacgtgaacaattcccaaggttccatgcatcctcatcttcaccccacactttaaaactatcataactagttcacccctgagatttgttctgattggactagcgttgatcaagtgtccaccccttgaacccatctctgtggccaggaaaaaggaacgataggctaggtcatatactccacccttggagcaggggcagagtcagcttctccagaaccagatggagccccgctcagaaatcacgggctattgggtcaagggaagaaaaaaataaatgctgcaagaggtaaccaataaaggtatgtgcttgatcatacgaggaacatttgaaggaatagtgtccttagcttaaagatgaatagacatgaagaggacaag

SEQ ID NO: 32356 - DNA, 460 bp, Homo sapiens
acccagcgcgcattaccctactaagggaacaaaagctgggtaccgggccccccctcgagagtacttctagaattaattaaatgaaatcatattgggcattcatatgtgctaaacaccattctaagtgctgaggcactatgatgaatatgacagacagatacctgttcccagagagtttataatgttgaggtaaagagccacataaaagacaattgtgttatcacttatgaagggctttgggatcaatgaggagggatgcctaacacagacaaaaattcaaagaagcctgcatagaagaggtatcatttaggttgaaatgtgagagaaaaacagcattgtagggagaattccgggcattgtagggagaattctgggcaatgggaacagcatgtgcagagacctagaggcatgagggagggcaagtatgtttgaagatggcagatagttctggagggcagct

SEQ ID NO: 32357 - DNA, 404 bp, Homo sapiens
gcaagctgcgtaccgggccccccctcgatagtacttctagaattatattaacgcgggtttgcctggagggagctgccaccctcagctgcagccccagacctcgcggttgctctcatccgtcgttcccagtgtgggcagtgacgcagcaccacggtaagttctgtagagtggacgccactcgctggcaaagcccagcagggcaaggaataagtgtcactcagtctttatccagaaaaatccaccaatgtacttttagtgcagtattaacagatggtagaaaatggaattgcctagaggattttaatctctgatggattattcttgtacctgtacctgtctgatggtcgtgtaagtccatgttaacaaacctgggaccacaggaaaggagaactgatgcgaataca

SEQ ID NO: 32358 - DNA, 623 bp, Homo sapiens
  misc_feature 529: n = A,T,C or G
ctactatagggcgaattggagctccaccgcggtggcggccgcttttttttttttttttttttttttttttggagacagggttttgacatgttggtcaggctggtcatgaactcctggcctcaagtgatccacctacctcggcctcccaaagtgctgggattacaggtgtgagccaccgccccaaccctgtgtttattcttaggtctgtactacgctttatgcctcagtttccacagttaaaacacgttattttattcctcacgttataggagcaatttgtattcataaacttggccttcaccttcaacttctgaagattttaatacagcgcaaatgatttggggtctgtgaattcagttttatttatttggctccttcctttaaggagtcaggctaatgcaagaaaatccaataattagatcttttggatttcaaataactggaagaggaagtggtgtttatctaatggtttaggcataatgcgtgttttttcccgtaggcctgtgtgtatatgtgtgtgtgtggttgntcttaacttgaagaattaaacacttgttttccccgttaattaattctagaagtactctcgagggggggcccggtacccaacttttgttcccttt

SEQ ID NO: 32359 - DNA, 657 bp, Homo sapiens
gcgtaatacgactcactatagggcgaattggagctccaccgcggtggcggccgcttttttttttttttttttttttttttttgagacaaattttctctcttgttgcccaggctggagtgcaatggcatggtctcagctcgtggtctcactgcaacctctgcctcccaggttcaaacgattcttctacctcagcctcccaagtagctgagattacaggtgcctgccatcatgcccggctaattttttgtatttttagtagagacaggatttcatcatgttggccaggctggtcttgaactcttgacctcaggtgatccgcccaccttggcctcccaaagtgctgggattacagacatgagccactgtgcccgtccttgtgttttatttctaaaagataatttttaagttttcattcatatgttattaaaatgccactaaatactagagcaatatatagcaggtatgatagttttgctatttattttattatgccaatggaaaattaaaaatttaataagtttacttatgttatttcagtaccaaataaaaaatgtaaattgactgattttgtaactatagttaaggatgcatttccactttttaaaatgagtactttaaaaataaacagtgatcattgaatgaaaaaaacataatatt

SEQ ID NO: 32360 - DNA, 406 bp, Homo sapiens
gcataaccctactaaagggaacaaaagctgggtaccgggccccccctcgagagtacttctagaattaattaacgcgggttctcatacaagaagtactcagatttttctctccatctctccacctgctttttgaatattggtgcatttttcagtaggctcttcccttcatggtccaagataaacgtcaacaattcccaaggttccatgcatcctcatcttcaccccacactttaaaactatcatttctagttcacccctgagatttgttctgattggactagcgttgatcaagtgtccaccccttgaacccatctctgtggccaggaaaaaggaacgataggctaggtcatatactccacccttggagcaggggcagagtcagcttcttcagaaccagatggagccc

SEQ ID NO: 32361 - DNA, 467 bp, Homo sapiens
ggcgaattggagctccaccgcggtggcggccgcttttttttttttttttttttttttttttttgaggaaggcacctacaaaacgaaagtgcctagggcttacaaaagtcatatgtagcctttacaaatattagctcagtcattttcagaaaggtttttccaattatcattttagagatgaggaaactgaacctcagggaggcttaggaaacttatccaaagcctcttaagaggctatgttagtcagactgggctaacagctgtaacaaccccagaatttaaatggcttaacacattaggagtttatttgttattgccataacaattcagggtgtatgtttggcaggtagtctacacagtgattcagggacccaggctccttccctttggtggctttttctccctctagggctgggagctctccatgcaaatgggggatggcgaaagacaacccattgtgggggattt

SEQ ID NO: 32362 - DNA, 384 bp, Homo sapiens
acaaaagctcggtaccgggccccccctcgagagtacttctagaattaattaaggcggttctcccagggatcgcaggtggccgaatactgcagctggcttttgaaggcatcgatgcacactttgagggcctgccttggctcctgcaccccaccacagttcgtgtttcctccctttattctctccacccagaaaggtgacaaatccaagccctggatgtgaggggggtccacaagagtaattctggagagatggggtcaggtgaggaatggttagagacccagggagccaagtcacgggacctcagtgaccccatggctgacctaccgagacctccagtcgccagcatcgggtaggcccacacgtgtgggggaggaagtgagtgtc

SEQ ID NO: 32363 - DNA, 564 bp, Homo sapiens
  misc_feature 481: n = A,T,C or G
ccctcgagagtacttcttgtattaattaacgcgggcattgtgtgcagaagtattgtactggaatctaacactgtgagtactgcccaggatccgtgttcctctctttagcccaggcatgcagttacattacattttccaacctccttgcagttagctacgatcacgtgactgcattctggccagtggaatgtgtgtggaagtgatgtgggccaattccaggcctggcctataaaaatcccccactttttgttctctttctccatccaccatctgcatggagagctcccagcactagagggagaaaaagccaccagagggaaggagcctgggtccctgaatcactgtgtagactacctgccaaacatacaccctgaattgttatggcaataacaaataaactcctaatgtgttaagccatttaaattctggggttgttacagctgttagcccagtctgactaacatagcctcttaagaggctntggataagtttcctagcctccctgagcttcagtttcctcatctttaaaatgataattggaaaaacctttctgaaaatgactga

SEQ ID NO: 32364 - DNA, 630 bp, Homo sapiens
gcgcgtaatacgactcactatagggcgaattggagctccaccgcggtggcggccgcttttttttttttttttttttttttcacttgaattgtttttatagtgcttccgttatttatttttattttttttattatactttaagttttagggtacatgtgcacaacgtgcaggtttgctacatatgtatacatgtgccatgttggtgtgctgcactcattaactcgtcatttatattaggtatatatacgtgttcattgtacccttatcgactttgcagcatgcttatccatctaactattcatctttatttgccttcgttttttgagttcccttattcatcctaaaacaaaatataatgcctgactcatagtcagacttcacagtatttttaaatgaattacattgcattggggaaatataaatagtaatgtccttttatagaggaagtctaaaagaaattcttgggtgaattgataatcaaacatttttaagaaggtatatttgctagcaaagaaagaaaaaatatgacagcttatttatatagaaaacctatgtattctgggatttttttttgtttcaagtctgtattatgaatatcatgcttatccttcccccgccttaattaatttt

SEQ ID NO: 32365 - DNA, 439 bp, Homo sapiens
ccctcactatagggaacaaaagctgggtaccgggcccccccttagagtacttctagtattaattaaggctttggaagggatagcatgatattcatatacagacttgaaacaaagaaaaatcacagaatacataggttttctatataaataagctgtcatattttttctttctttgctagcaaatataccttcttaaaaatgtttgattatcaattcacccaagaatttcttttagacttcctctataaaaggacattactatttatatttccccaatgcaatgtaattcatttaaaaatactgtgaagtctgactatgagtcaggcattatattttgttttaggatgaataagggaactcaaaaaacgaaggcaaataaagatgaatagttagatggataagcatgctgcaaagtcgataagggtacaatgaacacgta

SEQ ID NO: 32366 - DNA, 329 bp, Homo sapiens
accctactaagggaacaaaagctgggtaccgggccccccctcgagagtacttctagaattaattaacgcgggttctcatacaagaagtactcagatttttctctccatctctccacctgctttttgaatattggtgcatttttcagtaggctcttcccttcatggtccaagataaacgtcaacaattcccaaggttccatgcatcctcatcttcaccccacactttaaaactatcatttctagtacacccctgagatttgttctgattggactagcgttgatcaagtgtccaccccttgaacccatctttgtggccagaaaaaggaacg

SEQ ID NO: 32367 - DNA, 410 bp, Homo sapiens
cccccctcgagagtatttttagaattaatttaggcgggctgtttttaccactacactgcagcctgggtgacggagtgagactctgtcaaacatagaagataagatgaacacgcacaagaatgaaaatggactgtgcaatactaaaattaatatgaaaatgtagaaatttaaaataccaaagaaattttgaaaaataacaaagctggaaactggccttgcctgactttgagacttgtaaagctataaaaattaagacagagtgataataatctcaaactatacaaatagttaaatgtgacagaacaggtagacccacatatatatagatagctgatattgaagagacatgcaaagttaattcatgggcaaaaagatagtcttttcaataaatggtgttaaaataatggtta

SEQ ID NO: 32368 - DNA, 427 bp, Homo sapiens
agctgggtaccgggccccccctcgagagtacttctagaattaattaaggcgggggaagggatagcatgatattcatatacagacttgaaacaaagaaaaatcacagaatacataggttttctatataaataagctgtcatattttttctttctttgctagcaaatataccttcttataaatgtgtgattatcaattcacccaagaatttcttttagacttcctctataaaaggacattactatttatatttccccaatgcaatgtaattcatttaaaaatactgcgaagtctgactatgagtcaggcattatattttgttttaggatgaataagggaactcaaaaaacgaaggcaaataaagatgaatagttagatggataagcatgctgcaaagtcgataagggtacaatgaacacgtatatatac

SEQ ID NO: 32369 - DNA, 456 bp, Homo sapiens
cccagcgcgcattaccctactaaagggaaaaaagctgggtaccgggccccccctcgagagtacttctagaattaattaacgcgggatatagttcttctcattctttgttctcttcctttatatcaacagcctttttctgacatgatataaaatcatgtgcttatgacatgcattaaaaaggagaagtgctggatctaatatccttggtctaatggatccccttgcagatatacagggctccctacacacactgggatatctaggtacaagcccaaagttcatatacagactttctaaaatcattgtatttaaaagcagaaaagtgccgggcacagtggctcacatctgtaatcccaatactttgggaggctgaggtgggcgaatcacctgaggtcgcgagctcaagaccagcctggccaacatggtgaaaccccgtctctactaaaaatatgaaaa

SEQ ID NO: 32370 - DNA, 403 bp, Homo sapiens
accctactaaagggaacaaaagctgggtaccgggccccccctcgagagtacttctagaattaattaatccacccttgaaccagtctacctccagaattcctggtacatgagataataacatttcctttgtttaagtcacttttagttggattttctgttatttccaaccaaaagcattcaattgatagaagtgatgaagtaagactggacagcatttatccacccacatatttgtaaaactatgcctgtctgaccagacgtggtggctcatgcctgtaatcccagcactttgggaggctgctgcaggaggattgcttgaggccaggagttcaagaccagcctgggaaacatagcaagaccttatctctagaataaataaataacaataaaaattttaaaacta

SEQ ID NO: 32371 - DNA, 467 bp, Homo sapiens
  misc_feature 461: n = A,T,C or G
cctccagagtacttctagtaataattaactcgggtagtgtctaagggatgtcttctattctatcttaggtgtctcaaaccggtagcagagagcgctaattaattctttagtcaaagctcggtattttctctgagccaggccatatgggacactgggaacattgaggtgactcagactctgaacctccgtgagcagctgatggggagggccatgctattccagcccttggagcttctatgaccaggtgaacagagagctggcattcctattgaacacaagaaaaacgagctctgagaggaggctgcatgcactcagccaggccaaccaggactgggtcccgggcctcctgactacagcacagcgacctccttctccttcagccagctccagagtacctggggctggagccatgttcctggagctggtttccctggctttcctgttttgtctctggcgctcantgagct

SEQ ID NO: 32372 - DNA, 440 bp, Homo sapiens
acaaaagctgcgtaccgggccccccctcgagagtacttctagaattaatgtaaggcgggttttccagggatcgcaggtggccgaatactgcagctggcttttgaaggcatcgatgcacactttgagggcctgccttggctcctgcaccccaccacagttcgtgtttcctccctttattctctccacccagaaaggtgacaaatccaagccctggatgtgaggggggtccacaagagtaattctggagagatggggtcaggtgaggaatggttagagacccagggagccaagtcacgggacctcagtgaccccatggctgacctaccgagacctccagtcgccagcatcgggtaggcccacacgtgtgggggaggaagtgagtgtcactggcccatcagcaagcagagctggcagaggtacctgtgcaggcgagtccaatg

SEQ ID NO: 32373 - DNA, 428 bp, Homo sapiens; identical to SEQ ID NO: 32336
  misc_feature 311: n = A,T,C or G

SEQ ID NO: 32374 - DNA, 478 bp, Homo sapiens
  misc_feature 236: n = A,T,C or G
aaagggaacaaaagctgggtaccgggccccccctcgagagtacttctagaattaattaacgcgggatatagttcttctcattctttgttctcttcctttatatcaacagcctttttctgacatgatataaaatcatgtgcttatgacatgcattaaaaaggagaagtgctggatctaatatccttggtctaatggatccccttgccagatatacaggggctccctacacacactgngatatctaggtacaagcccaaagttcatatacagactttctaaaatcattgtatttaaaagcagaaaagtgccgggcacagtggctcacatctgtaatcccaatactttgggaggctgaggtgggcgaatcacctgaggtcgcgagctcaagaccagcctggccaacatggtgaaaccccgtctctactaaaaatatgaaaaacagccaggcatggtggcaggtgcctgtaatcccagctac

SEQ ID NO: 32375 - DNA, 312 bp, Homo sapiens
tgctaccagcctgaggagaaatcaaacacatggagaaaggaaagctgacagcccagagacccacggggaaacaggccccgagttactggatacaggcaaccctaaaactgactgtccctctggactctacgtagtgagccaacacatttcctcattattttggatatgttttttttcagttgaaggcattctgattcaatacaggagaaacttttctttgcaaattacaaagtgtgataactgttgctaaaattaggaatgtgcttaaagggaaatcatgaacaccaagacaaaaggcctggatgcaaccaa

SEQ ID NO: 32376 - DNA, 412 bp, Homo sapiens
ctactatagggcgaattggagctccaccgcggtggcggccgcccgggcaggtacccagaaaaccaaaatgagcttaaacattttgaaagatgtcaacaaagttatgcccttggaaataagtttggtttatgtaagagcattgttcctttaatgtaaagacacaataagtttggctcgcattgtaaaagtttgaaatctcatttaggttttgttatccagagtagaagatatgcaggaaaagattctgatgcatttggtggatatgggagatcatgcctccatatcaagcgtgacaaaactcttactggagttaaataccatagatgtgttaaacccagcagccctaaatcacagctcaatgacctacaaaaaatttgtgcaggagggaaaccacatgaatgcagtgtgtgcg

SEQ ID NO: 32377 - DNA, 394 bp, Homo sapiens
ctactataggtcgaattggagctccaccgcggtggcggccgcccgggcaggtacgctcctgtagtcccagcactcaggaggctgaggcacaagaatcgcttgaacccaagagatgcaggttgcagtgagccgagactgtgccaccgcactccagcctgggcgacagagcgggactccgtctttaaaataaaaaaaaaaataaataaataataaatgaataactgacttctgaagacagactgctgctttcaaactttggttctatcacttactagctgtattatcttgggcaagttactgccctgcacttgagttttgccatctataaagtggaaacatatagtacctcggccgctctagaactagtggatcccccgggctgcaggaattcgat

SEQ ID NO: 32378 - DNA, 460 bp, Homo sapiens
tacgactcactatagggcgaattggagctccaccgcggtggcggccgcccggccgggtacgcgggctatttctttgtgtgcggctggacctcttattccctttctctttgcctttctgtctcgatcgtaatctttctttttcttcttatctgtcctccctcctccatcttctttccttctcctcctcctcttcctccccctcttctgcttcctccctcctcagaataggactaagctacacaggttattgtggcttacatttaaaatttttttgacatatcctcttgtttttacaaatcaggacatgagtttttttaagtcatgaatctttattataaaaggacctcacttgcgtttgatcttccatagacacagagagcttctgcccttttgtctacagatagaagacgaccaatagcatactagggggtagtatttctgggtgctccataccccaccc

SEQ ID NO: 32379 - DNA, 507 bp, Homo sapiens
  misc_feature 405: n = A,T,C or G
atagggcgaattggagctccaccgcggtggcggccgcccgggaggtactgcatttttaatttttttaactgtttttatgttttcaaatattttcagtctgcagttggttgaatctgcagatatggaactagtgtatacagagggccaacattctttttaattactaattgtctctgccaacacttaccaaaattatcctgaattctatttttttgtcttgttttgtttcgagataaggcctcgctccattgcccaccctggagtgcagtggcgcgatctcagcttactgcaagctctgcctcccgggttcatgccattctcctgcctcagcctcctgggtagctgggactacaggcacttgccaccacacctggctaattttttgtattttttagtagagacggngtttcactgtgttggccaggctggtctcgaactgctggcctcaggtgagccgcctgcctcggcctcccaagtgctgggattgcaggcgtgagccaccacact

SEQ ID NO: 32380 - DNA, 519 bp, Homo sapiens
ctactatagggcgaattggagctccaccgcggtggcggccgaggtacgcgggagggagagagttgaaatggttggcatcctcccactctgttgctccggctgtgtcccctcgctctgttgttccagctatgtcccctctgttgctccaactgcagctcattctgttagagttcctcattcagctggtcactgtggccagagggtgttggcctgctcccttcctcaagtattcttaaagccatggatttttgtggagcatttttcttcctggctctcccttgagttattttcctttcttcgctatcttgggactcttctttgtgcttgcggtcatcggttgagagaaggacttcttcttccttgtctccttggtgttggctcgtggttgctcttcaacaactggactggaggctcttggttttctcttcatcttcaacaagtcagtctctctcaagggtcttacgttgcagcattcttaccagaggccattgggcctggagttccagttccagtgtctgg

SEQ ID NO: 32381 - DNA, 409 bp, Homo sapiens
atacgactcactatagggcgaattggagctccaccgcggtggcggccgaggtacaggagaaaacagtaaagcctcaaaaggaggaaattcgtaaagagtccttaaaaaccttaaatgatttccaaaaattatttaggggacgttaattggataagacctactttaggaattcccacctaagcaatgtctaaactgtttgctttgctgagatgggatccaaattcatgtagcaaaagaactctgatgcctgctgcagctgaagagttacaaatgattgaggaaaaaattcaaagtgctcaagtccgtagaagagatcctagtgttccattacagctcttagtgttccctactctccattctcctataggggtgattgttcaaaatgttgacttagttaaattgtcctttt

SEQ ID NO: 32382 - DNA, 536 bp, Homo sapiens; identical to SEQ ID NO: 30716
  misc_feature 49: n = A,T,C or G

SEQ ID NO: 32383 - DNA, 378 bp, Homo sapiens
gtaatacgactactatagggcgaattggagctccaccgcggtggcggccgaggtacctatagaaatgccttcctcaggaaccccgccattgttaaacaagagtgagcgcctagtgggcagaaatgtagtgattgtggaacaaccttttccaagaaatcaagcctttgtagttaatcaggaatttgaacagagaataagcctcacaaatgaagtgaatgtggccccatcagtaataaattatatcttgtatcttacagatattgtatcagaataaatcttctgataccagaaaggtgggaaaatctttagtaggaatcctccagccattatatcccagagagctcatttagggctgaaacactgtggaggcagtggttg

SEQ ID NO: 32384 - DNA, 394 bp, Homo sapiens
cgtatacgactactataggtcgaattggagctccaccgcggtggcggccgaggtacatgcacaaagctaggaaaggcacatccccagaaaaggagtgagtgttcccacaccctttacaacaggctaattagaaaagatctccctctgaccaagtcttatacaaaacaactgagagaagcagttattttaccaaacctaatccaaaaattacaaggcctatgaaaggaaagagaaatatggctaaaaaataaataaagcccaacctagaaaaagacaggcagctctctaaattactagacaaatatttatttatttatttatttaagacagggtctcactctatcgtccaggctggagtgcagtggtatagtgtagctcactgcagcatctactt

SEQ ID NO: 32385 - DNA, 392 bp, Homo sapiens
cgtaatacgactcactatagggcgaattggagctccaccgcggtggcggccgcccgggcaggtacattcactctccgcctaggagtaggattttctgagaaccggactactgtgaatgctgctgctcctctgggtctagccacctagtggggctgccacactccaggttggtgctgggaaatgtctgcaagggatccagtgatgtgatctgtcctctagtctcctagcagcagataccagcactagctctggtggagatgtcaggggagtgacgtagaccctataaagttccttggttataaataaccttagtgtgttggctttctcaaatgctggctgaagaagtaatgaactggtcacttgggcagactcaggacctcctggttagccat

SEQ ID NO: 32386 - DNA, 455 bp, Homo sapiens
gcgaattggagctccaccgcggtggcggccgcccgggcaggtacagatctcatcaggtatgagggcagtttctgacgcgaacgtctcttcctcgtggtttttattgtcagtattcacacgaagtttaagtctcctagtgggcacccagacgggattgacgatctcctggtaaaacacaagcataccctcttccccacgttataattgttccaggttcccaggtattggtttgggagtttttccatgacactggcttgccttcgtttagggagaattttttgcctgtataatggcatttagctgcagtcagagtattgtttttaggaacatttagaaagcttaaacaatgctaaatataattgggagtggggagtagttaaattatgcttttaaaccagccttgtcttctttttacagtaacttgaagaggtttagtaatttttttcacgttttgg

SEQ ID NO: 32387 - DNA, 370 bp, Homo sapiens
cgcggtggcggccgaggtacagtataatccctattataaatccaagatggtatttttttcttgcagaaattggcaattaatcttaaaattcatatggaaatacaagggacccagaatagccaaactaattttaaaaaagaacaaagggacaggaggagaactcatacttcctgatttaaaattgactatcacaggatactatgttaacaccaaaatatgactctgacataaaaattatttctgggaagacagttaaagcagacaattaacaagcagcagcaaacagagaaaaagctctgtctatcctttcccttttctttatttatatgggcaggatattaataactgctttatacacggggtctctgga

SEQ ID NO: 32388 - DNA, 480 bp, Homo sapiens
tatagggcgtattggagctccaccgcggtggcggccgaggtacaagcaattctcctgccttgacctcccgttatgctgggactacaggcacacacaaccacacctggctaatttttgtatttttagtagagacagggttttaccatgttggccaggctggtcttgaattcctgacctcaggtgatccacctgcctcggcctcccaaagtgctgagattacaggcatgagccaccacacccaatctagtttgacagtttttatatcattatgagcacaccacagatttagttttgtgctttgtttttttacttatctttataacaatttttttttttttagttatagtattataatatcaagcagcttaaatagcaatagggctaaattttttttttttaaggagtggaaaaagacttagtatcaatctttttatcaatcttagtatcaaactttgattaattcctgtgagtttgctgtta

SEQ ID NO: 32389 - DNA, 462 bp, Homo sapiens
ctacttagggcgaattggagctccaccgcggtggcggccgcccgggcaggtaccacctgaagaccctcacactcaacttcaccatctccaatctccagtattcaccagatatgggcaagggctcagctacattcaactccaccgagggggtccttcagcacctgctcagacccttgttccagaagagcagcatgggccccttctacttgggttgccaactgatctccctcaggcctgagaaggatggggcagccactggtgtggacaccacctgcacctaccaccctgaccctgtgggccccgggctggacatacagcagctttactgggagctgagtcagctgacccatggtgtcacccaactgggcttctatgtcctggacagggatagcctcttcatcaatggctttgcaccccagaatttatcaatccggggcgagtacctcggccgctctagaacta

SEQ ID NO: 32390 - DNA, 531 bp, Homo sapiens
gcgtaatacgactcactatagggcgaattggagctccaccgcggtggcggccgaggtacaatgaggatactggagtccggaatctctgagtgcttctctgtgatggacagaacaatgccccgacaaagatgctcatgccctcctccccagaacctgtgaatatgtcacggtgcatggcaaggggggaataaagttgccggtggaatttaggttgctaataggctaaccctaagatggggagattagcctcgattatcagggtgagcttactgtcatcacagggacccctataagtgagagagggaggcaagagaagtagtgtcagaattagagacgaatttgcagaagctggcttttaagatggaggaagaggccatgagccgaaggatgccggtggcccctagaaacaggaaaaggcaagaaaaaggttctcctctagagcctcctgaggagcacagccttgccaacactttgaactttgccagtagtttgaacttctgtcttccagaactgtgagataataaatctgta

SEQ ID NO: 32391 - DNA, 432 bp, Homo sapiens
ctactatagggcgaattgtagctccaccgcggtggcggccgcccgggcaggtacgcgggagcacagatttgagtagcaattatcaccaggggaacaataacactgactcctatggtgttgcttcttaaaagactgtcctactgctgcagccacgtgctccaccactcctattgcttttaccctgatgtgatgaagctctcatgcacagacaccaggatcaacagtgcagttgggctgactgccctgattaccactgctggggcagattctgtctttattgtcctgtcttatattttgatcattaagactgttctcagcattgcttccccggaagaaaggaagaaagccttcagcacatgtatctcccatattggggctgttgctgtattttacattccattgatcactctgtcctttgttcacgggtttggg

SEQ ID NO: 32392 - DNA, 365 bp, Homo sapiens
gcgaattggagctccaccgcggtggcggccgaggtaccaaggcccaatcaccccaaacagtgacaggaacataatttcctgttgggaccagttctcggaattttgcaccaacatgatcccatagttccacatctaacgttcccttttcaggaaaccaaggacagtgttcttccactgccctgaatagggtgaccatattttccatgggaacccgaactcccccattttaacaggaatttaatatagcagagataagcataatgtttagactctgcgtgacccatagttaccccggacaatacacagacaactcaccaatcgtcggggagccaaacaagcatttttgtggactggaccgattaaca

SEQ ID NO: 32393 - DNA, 416 bp, Homo sapiens
actcactatagggcgaattggagctccaccgcggtggcggccgaggtacaatagagagcatcaatagcaaacttactcaagcaaagaaagataaagagtttgtttggaattaccagtgagagaagaataaataagaatgacaaggagtgaagaaagcctaccagacttattagataacatcaagggaaaaaaatttcatatttttagagttccagaaggcaaagagatgacaaaaggcatagaaaatatatttaacaggtcgggtgcggtggctcacacctgtaatcctagcactttgggaggctgaggtgggtggatcacctgaggtcaggaatttgagaccagcttgggcaacatggcgaaaccccgtctctaccaaaaatacaaaaaattagccaggcatggtggtgggtgcc

SEQ ID NO: 32394 - DNA, 433 bp, Homo sapiens
tatagggcgaattggagctccaccgcggtggcggccgcccgggcaggtacccagaaaaccaaaatgagcttaaacattttgaaagatgtcaacaaagttatgcccttggaaataagtttggtttatgtaagagcattgttcctttaatataaagacacaataagtttggctcgcattgtaaaagtttgaaatctcatttaggttttgttatccagagtagaagatatgcaggaaaagattctgatgcatttggcggatatgggagatcatgcctccatatcaagcgtgacaaaactcttactggagttaaataccatagatgtgttaaacccagcagccctaaatcacagctcaatgacctacaaaaaatttgtgcaggagggaaaccacatgaatgcagtgtgtgcgggagagccttctccaggaaagcaca

SEQ ID NO: 32395 - DNA, 414 bp, Homo sapiens
  misc_feature 311, 322, 333, 339, 340, 362, 370: n = A,T,C or G
cgactactatagggcgaattggagctccaccgcggtggcggccgcccgggcaggtacccagaaaaccaaaatgagcttaaacattttgaaagatgtcaacaaagttatgcccttggaaataagtttggtttatgtaagagcattgttcctttaatgtaaagacacaataagtttggctcgcattgtaaaagtttgaaatctcatttaggttttgttatccagagtagaagatatgcaggaaaagattctgatgcatttggtggatatgggagatcatgcctccatatcaagcgtgacaaaactcttactgngagttaaatanccatagatgtngttaannacccagcagccctaaatcacangctcaatngacctacaaaaaaatttgtgcaggaggggaaaccacatgaatgc

SEQ ID NO: 32396 - DNA, 533 bp, Homo sapiens
tacgactcactatagggcgaattggagctccaccgcggtggcggccgaggtataatgaggatactggagtccggaatctctgagtgctactctgtgatggacagaacaatgccccgacaaagatgctcatgccctcctccccagaacctgtgaatatgtcacggtgcatggcaaggggggaataaagttgccggtggaatttacgttgctaataagctaaccctaagatggcgagattagcctcgattatcagggtgagcttactgtcatcacagggacccctataagtgagagagggaggcaacacaagtactgtcagaattagagactaatttgcagaagctggcttttaagatggatgaagaggccatgagccgaacgatgccggtggcctctagacacaggaaaaggcaggagaaacgttctcctctagagcctcctgaggagcacagccttgccaacactctgaactttgccagtagtttgaacttctgtcttccagaactgtgagataataaatctgtacctgcccg

SEQ ID NO: 32397 - DNA, 329 bp, Homo sapiens
  misc_feature 276: n = A,T,C or G
atagggcgaattggagctccaccgcggtggcggccgaggtacttggtgcatttttgaagatttaataattaattaatagttggtgcaggccaggcatggtggctaacacctgtaatcccagcactttgggaggccgaagtgggcggatcacctgaggccaggagttttagaccagcctgaccaacatggagaaacgctgtctctactaaaaatacaaaaaaaattatccaggcgtggtggcgcatgcctgtaatcccagctactctggaagctgangcgggagaattgcttgaacctgtgaagcggaggttgaggtgagccgagatcac

SEQ ID NO: 32398 - DNA, 450 bp, Homo sapiens
acgactactatagggcgaattggagctccaccgcggtggcggccgcccgggcaggtactctcatgattaaacatcttcgtttctttttccttttccttaaaattaaaaaaaaaaaaatcccaaagagaatagggagcaacaaccataggataggagtctccctaggactaatactctgcagataactgacgtgcctcaggaattgtttttattttggtttgttgttgttttgttttgttttttagagacagggtcttgctctgtcacccaggctagagtgcagtaagatcacagctcactgcagcctcaaacctctggactcaagtgatcctcccacctcagcctcccaagtagctaggactacaaggcagctaggactacaggcgcacaccaccacatccagctaattctttttcattgagacggagtcttactctgtcgccaggctgg

SEQ ID NO: 32399 - DNA, 420 bp, Homo sapiens
atacgactactatagggcgaattggagctccaccgcggtggcggccgcccgggcaggtacccagaaaaccaaaatgagcttaaacattttgaaagatgtcaacaaagttatgcccttggaaataagtttggtttatgtaagagcattgttcctttaatgtaaagacacaataagtttggctcgcattgtaaaagtttgaaatctcatttaggttttgttatccagagtagaagatatgcaggaaaagattctgatgcgtttggtggatatgggagatcatgcctccatatcaagcgtgacaaaactcttactggagttaaataccatagatgtgataaacccaggcgccctaaatcacagctcaatgacctacaaaaaatttgtgcccgagggaaaccacattaatgctttgtgtgcggg

SEQ ID NO: 32400 - DNA, 418 bp, Homo sapiens
gcgaattggagctccaccgcggtggcggccgaggtactgatgctttttaaggcatattatcaacatacagccatgacttgtccagagaatctcacctgacaaaaactcagagaagaaagagaaagaagatgaaatggctggttttcagatgtgtattctcattttatggaagacatgttgccagagtaaagcacaatatattcatcttgaaatgtaatactgagaagatatggaagttatggaagttgtggccttcagaattgacacttacggagagactagaacagcgtgggtgagttgtgaggggcaggaagcatgtcttaatggacttaaccaattttcgtcaactattcacagtaaaatctttcaatgtacctgcccgggcggtcgctctagaaactagtggatcccccgggct

SEQ ID NO: 32401 - DNA, 243 bp, Homo sapiens
acgactcactatagggcgaattggagctccaccgcggtggcggccgcccgggcaggtactttgtattacaagaatagctttttatttcaaatatttcttctcctttttcgtatccatgtgttcttttatatgcatattttatttcatgtaatcctgttctttgccatgattttaattttctatggttcttttcttttgaaaaattcaaaaaattttaaaaaagatcttttgtcataattgtgc

SEQ ID NO: 32402 - DNA, 436 bp, Homo sapiens
ctactatagggcgaattggagctccaccgcggtggcggccgaggtacgcgggtctctactaaaaatataagttagccaggcctggtggcgggtgtctataattccagctacttgggaggctgtggcaggagaatcgcttcaacccgggagtcagaggttgcagtgagccagatgatgccagtttactccagcctgggcaatagagcgaggctcagtctaaaaaaaaaagacaacaacaagatctccttctctctctgacctttgcttccattgtcccattgtcacatctccttctctgtctctgagtccttttttctcttggaaggacctttgtgattatattgggcccttcaaaatcatcccggatacttttcccatctcaaatccatacccttaatcacattttacacgtcccttttcccatgggagaatcgca

SEQ ID NO: 32403 - DNA, 446 bp, Homo sapiens
tacactactatagggcgaattggagctccaccgcggtggcggccgaggtactggactactgggctcaaaaggagaaggagggcaagagaggtccaaatccagctttttggtgggtgaatggccaaggggatgaagtaaagtggagcttcagagagatgggagacctaacccgccgtgtagccaacgtcttcacacagacctgtggcctacaacagggagaccatctggccttgatgctgcctcgagttcctgagtggtggctggtggctgtgggctgcatgcgaacagggatcatcttcattcctgcgaccatcctgttgaaggccaaagacattctctatcgactacagttgtctaaagccaagggcattgtgaccatagatgcccttgcctcagaggtggactccatagcttctcagtgcccctctctgaaaaccaagctcctg

SEQ ID NO: 32404 - DNA, 437 bp, Homo sapiens
ctcactatagggcgaattggagctccaccgcggtggcggccgcccgggcaggtaccagtgtctgaagcctggggactggcggctgctggtcaaggccacattagtttattgttaagtgcaaggtttctggtaacagaaataaagaattcaattgattcatcatcaagaccaaatatatttactaaagatctaccttaaattcattttttagcaggtagtatggcattgtggttaagaatttacatttgtgaacatttaccagctgatgaccgaggtgagcttctgtttcctcctgcataaacttgagattataaaaatcccctagttggctgggcacagtggctcacacctgtaatcccagcactttgggaggccgaggcaggcatcacgaggtcaggagatcaagaccatcctggccaacagggtgaaaccccgtc

SEQ ID NO: 32405 - DNA, 411 bp, Homo sapiens
actatacggcgaattggttctccaccgcggtggcggccgcccgggcaggtactgtctgatgacgggtgagggcagagtttttattgaagcctctctcacagtgagaacacctgtaaggcttttcaccactgtgggtttttcggtgggcactgaagtgggagctattgttgaagattttcccccacactgcacacttgtatgggctctccccagtgtggatgcgccggtgagcactgaactgggaactgctgttgaatctctttccacagacaatgcactggtcaggcttttccccagtatgggtcctctggtggacaataaggctggaactctggttgaagcttttaccacattgcccacactgatagggcctctcccctgagtgagttcatatgtgggcagtgaggttgg

SEQ ID NO: 32406 - DNA, 396 bp, Homo sapiens
gcgtatacgactcactatagggcgaattggagctccaccgcggtggcggccgcccgggcaggtacccagaaaaccaaaatgagcttaaacattttgaaagatgtcaacaaagttatgcccttggaaataagtttggtttatgtaagagcattgttcctttaatataaagacacaataagtttggctcgcattgtaaaagtttgaaatctcatttaggttttgttatccagagtagaagatatgcaggaaaagattctgatgcatttggtggatatgggagatcatgcctccatatcaagcgtgacaaaactcttactggagttaaataccatagatgtgttaaacccagcagccctaaatcacagctcaatgacctacaaaaaatttgtgcaggag

SEQ ID NO: 32407 - DNA, 298 bp, Homo sapiens
cactactatagggcgaattggagctccaccgcggtggcggccgcccgggcaggtactttgtattacaagaatagctttttatttcaaatatttcttctcctttttcgtatccatgtgttcttttatatgcatattttatttcatgtaatcctgttctttgccatgattttcatttctttgattctttctttgaaaaaaatcaaaattttaaaaaagtcctttgttcatatttgtgccataaaactgtttttgtccaaagggaatttatgtcctgatgattttcttggctgtctttttt

SEQ ID NO: 32408 - DNA, 480 bp, Homo sapiens
cactactatagggcgaattggagctccaccgcggtggcggccgaggtaccgtatggagtcctccagctgcagcccagctcaccctcaatgccaacccacttgatgccacccaaagtgaggatgttgttctgcctgtgtttgggacccccaggacaccccagattcatggcagatccagagagctggccaaaccctccattgcagtcagcccaggcactgccatagagcagaaggacatggtgaccttctactacaccactaaggacgtcaacattaccatccactgggtttccaacaacctctccgttgtgttccatgagcgcatgcagctgtccaaggatggcaagatcctcaccattctcattgtccagcgggaggactcggggacttaccaatgtgaagctcgagatgcccttctgagccagaggagcgaccccatcttcctggatgtgaagtatggtcctgatcctgttgaaatca

SEQ ID NO: 32409 - DNA, 377 bp, Homo sapiens
gggcgaattggagctccaccgcggtggcggccgaggtacttctgggtaaactggagaagagcttcaactctgttcacctgcttgcaggtgggtttgctgagttctctcgttgtttccctggcctctgtgaaggaaaatccactctagtccctacctgcatttctcagccttgcttacctgttgccaacattgggccaacccgaattcttcccaatctttatcttggctgccagcgagatgtcctcaacaaggagctgatgcagcagaatgggattggttatgtgttaaatgccagcaatacctgtccaaagcctgactttatccccgagtctcatttcctgcgtgtgcctgtgaatgacagcttttgtgagaaaatt

SEQ ID NO: 32410 - DNA, 539 bp, Homo sapiens
  misc_feature 347: n = A,T,C or G
actatagggcgaattggagctccaccgcggtggcggccgcccgggcaggtacgggccacaaagtatttcctgaagccagaagtcttacagaagtatatggttgatccaggcagaatttgcatttctggtgacagtgctggtggaaatctggctgctgcccttggacaacagtttactcaagatgccagcctaaaaaataagctcaaactacaagctttaatttatccagttcttcaagctttagattttaacacaccatcttatcagcaaaatgtgaacaccccaatcctgccccgctatgtcatggtgaagtattgggtggactacttcaaaggcaactatgactntgtgcaggcaatgatcgttaacaatcacacttcacttgatgtggaagaggctgctgctgtcagggcccgtctaaactggacatccctcttgcctgcatccttcacaaagaactacaagcctgttgtacctcggccgctctagaactagtggatcccccgggctgcaggaattcgatatcaagcttatcgata

SEQ ID NO: 32411 - DNA, 665 bp, Homo sapiens
ctactatagggcgaattggagctccaccgcggtggcggccgctacttctacacgcgcaacgatggcttgcagaaccaggccgtgctgtacaccctgaagaacctgtacgaccagccgcgcatgctgctcgacccgaacaccctggcgcttgatggcaccgtcgccctggccgggccgaggtcagccccgacggcaagctgctggcctacagcatcgccgcgtccggctccgactggaacgagatcaaggtgcgcgacatcgacaccggcaaggacctgcctgaccacatcaagtgggtcaagttctcgagcaccgcctggaccaaggatggcaagggcttcttctacagccgctacgacgagccgaaagaagcgaccaagctggccgacgtcaactacttccagaagctgtacttccaccgcatcggcacgccgcaaagcgccgacaccctggtgtacgaccgcgccgaccagaaggaatggggcttcggcggccagaccaccgacgatggccgttacctgatcatcaccaccaccaagggcaccgcgccgaagaaccgcgtttcgtacaaggacctgtccaagcccgatgccaaggtggtcgacctgatcgacaacttcgacgccggctacgacttcatcgacaatgtcggcaccgtgttctac

SEQ ID NO: 32412 - DNA, 458 bp, Homo sapiens
tacgactactatagggcgaattggagctccaccgcggtggcggccgaggtacgcggggaactcaaaacccctggagaagccagtgctgagctagggaaacctgaactataactgacaaattgctacagccttttaaatctctttttaagagattaaaaactccaggggaaccaagtcatggggttacccatccacattttttttttttttttgagacagagtcccactgtgtcaccaaggctggagtgaaatgacacgatctctgctcactgcaacctccgcctcctgggttcaagcaattctactgtctcagcctcccgagtagctgggactacagtcctgcaccaccacgcctggctaatttttgtatttttagtggagatggggtttccccttgttggtcaggctggtctcgaactcctgacctcaggtgatccacccgccttggccttcaaaag

SEQ ID NO: 32413 - DNA, 478 bp, Homo sapiens
gctatacactactatagggcgaattggagctccaccgcggtggcggccgaggtactgaggccagcaggtaggacataggcctctgcattgcaggtctgggctacgccgtcagcatcacagtcacacacgcggatggtgagggtgctggtgctgctaagtgagggagatccactgtccacaatgaaaattggcagatagtaaactgattgttcctgtctccggaagccgtttctcctggtcagtattgaggctgtgttgtctttgttatctttcaatgaaaagttgtggttatttgttgcatccgttgttaagctgaagtaaaactggtgtccattggatggctcatctttatccacagcactgattttctggataaccaaactgagattgaactgcacttaattcttagaattgtaagacgcttaaacccggttgggtaaggtaggaaacagcccaatcagcgtacctgcccgggcgg

SEQ ID NO: 32414 - DNA, 392 bp, Homo sapiens
gactactatagggcgaattggagctccaccgcggtggcggccgaggtactcggaggatttctgtcaacctccggactttccctgcctcaagcagctggtggcctacgtgcagctcaacatgccaggctcagacctggagtgccgtgcccaccttctcctggcccagctggagcactcggaacccattgaggcagagcctgaggctctgtcaccagtgccagctctaaaaccaactccagagctcgagctagctctaacaccagctcgagcacccagcccagtgccggctccagccccggagccagagccagctccaacaccagctccaggttcagagctagaagtagctccagcaccagctccggagctccagcagactccagagccagctg

SEQ ID NO: 32415 - DNA, 398 bp, Homo sapiens
gactcactatagggcgaattggagctccaccgcggtggcggccgaggtacttttttttttttttttttttttttttggtcaagtaagtgtagtatatttaagaaaataatacaagcacaaagttagtattgaagtataatattgatcacaaaataatatttaatttaccatgagcacattaacaatgaaatgtttctctttaaatgctgtgatttagaactagatgatgtggctttttaaatgaataaatagaatgttagaataaggttggaagggcagatatgacttctcccatgaagaaactacaatacacaggtggttaggatcataggatgcagacagtgaaaaatactaggggagcctgggcacggtggctcacgcctgtaatcccagctttt

SEQ ID NO: 32416 - DNA, 461 bp, Homo sapiens
cgactactatagggcgaattggagctccaccgcggtggcggccgaggtacttctgggtaaactggagaagagcttcaactctgttcacctgcttgcaggtgggtttgctgagttctctcgttgtttccctggcctctgtgaaggaaaatccactctagtccctacctgcatttctcagccttgcttacctgttgccaacattgggccaacccgaattcttcccaatctttatcttggctgccagcgagatgtcctcaacaaggagctgatgcagcagaatgggattggttatgtgttaaatgccagcaatacctgtccaaagcctgactttatccccgagtctcatttcctgcgtgtgcctgtgaatggcagcttttgtgagaaaattttgccgtggttggacaaatcagtagatttcattgagaaagcaaaagcctccaatggatgtgttctagtgcact

SEQ ID NO: 32417 - DNA, 367 bp, Homo sapiens
gggcgaattggagctcaccgcggtggcggccgaggtactctgtgcagatggtgcactggtagggcgaggcgccgttgtgcgttctcaggtgcttgatcatggccgagtagtcccgggagcgctggtggcagagcttacactcaaagggcttctcacctgtgtgcaccctatagtgcgtctccagctgatgcttgaggctgaacttcttgccacagccattgcactcgtagggtttctcacccgtgtggatgcgtttgtggctcttgagtgtgctctcatcccggaagcagctgccacagaactcacactcgtaggggtggtcgcctgtatgtgagcgcaggtggcgtttgagagccgtgtggctggg

SEQ ID NO: 32418 - DNA, 476 bp, Homo sapiens
tacactactatagggcgaattggagctccaccgcggtggcggccgaggtacgcggggaagtctcggtgggttccccgcaaaatcagagatggcatctcactatgttgcccaggctgatcttgaactcctgacctcaagtgatcctctctccttggcctcctaaagtgctgggattccaggtgtgagccacttcacccagccacatttatccatcttgtaaaatattgctttgttttttggtgcatttcaaacccacaggtcctgacttcaggagcaagacacttcaagtgaggtgaggaggaggttccaggacctggataccatcctttgcagggatgtaattcaccagagaccaagatttctagccagaaattgagggcagctcaaggagagactacagacacagcatcctacttactggctatttcccagttacaaaagaaaatgatcaagtcccaggaatcactgaccctgga

SEQ ID NO: 32419 - DNA, 441 bp, Homo sapiens
ggtacacattgttttgtttcttatatccagagtctagtcctcaactttaaccaaagtaaaggaaactggaaagacacacgctttttcagtcattaatagaaagttgtccaggtaagtttctgatggtatatcagttagaaataatatttagctatttgtaataaaaagctgaaaacagtagcttgaatcaatggaagactttatctttctcctcatacagctgacaataatgttgttgcctttatgatatcaaagccccaggttccttttatctttctgcttaacctgccttggcaaatgcttgctgcttcatagtcacatgatggctgactttactgttaaccttcaggtagaaagaaaggaagaggtaaagagataaaggttacctgcccgggcggccgctctagaactagtggatcccccgggctgcaggaattcgat

SEQ ID NO: 32420 - DNA, 467 bp, Homo sapiens
  misc_feature 367, 404: n = A,T,C or G
actacttagggcgaactggagctccatcgtggtggcggccgaggtacgcggggacatcaatgcagagtccctctgtgaatttacaacacccaacacccatgagttcagtccttaagaaggaaaattgagcaagtatttaattggttggacattgcataaaagaggtccatatccaggctaactctagaaattttattctcaaacttagttggcctctttttcttctgtcagaggaccattcttagtggcactggggaaatcttggcacccagaagaattcaactgcgctcactgcaaaaatacaatggcctacattggatttgtagaggagaaaggagccctgtattgtgagctgtgctatgagaanattcttttgcccctgaattgtggttcgatgccaaagnggaagatccttgtgaggaagtcattcaatggcgttgaaacaaacttggcatgtttcctgtttt

SEQ ID NO: 32421 - DNA, 485 bp, Homo sapiens
ggcgaattttagctccaccgccgtggcggccgaggtacaagggaatggaatggaatggaatgcaatgttatggaatcatccgtaatggaatggaaaggaatggaatggaatggaatggaatggaatggaatggaatggaatcaactcgattgcaatcgaatggaatggaatggaattaacccaaatagaatggaatggaatggaatggaacggaacggaatggaatggaatcgagcggccgcccgggcaggacatattgtatctgtgtaacattttgtatattccaggggtagggccgccccctgtatcatacctagcagaggttggagctggcacatggggaggaggttctaataattatttggggctgggaaacttatttattgatagcataggacagaggaaggaggcggggatgggggtcgtggcgccctggtgatgcgactcctgtttattttgctttttatttcggaataaatggattt

SEQ ID NO: 32422 - DNA, 510 bp, Homo sapiens
actactatagggcgaattggagctccaccgcggtggcggccgcccgggcaggtactcttttttttttttttctgttttttaagatggggtgtcaccatgttgccaaggctggtcttgaactcgtaggctcaagggagccacctgcctcggcctcccagggtgctgggattgcaggtgtgagccaccatgctggtcttttaaattatttttgttctctcatgtcaggcaggtaatgtggggacatggtaacaaggtttgagggaggcacatctcacgcatgagtgtgaaaaaccaataatcatgcttatgagctacaataggatctggatccacatgtttctgactccagggctcatgctcatgccacaaataacattgattccaggacccaaggatgggatcatcaggagcgggaagagcagccagggtttcccatatttttcccttaactttcccatctgttaccagtgggaatcatgtgggtaggagactctggaagaccagcagaag

SEQ ID NO: 32423 - DNA, 509 bp, Homo sapiens
acgactcactatagggcgaattggagctccaccgcggtggcggccgcccgggcaggtacatggtaagattttcatatctcaattcaaataaaataaaaaagaaccaagagcaacaaaatttccatctcagaaacataaagaagaacttaccatatgaacgcccaggacatcttcagatgaagcttcctgcaccaggtcctcatcgtaatctaggaaacacagagtaactgtcatcatgttggttccactgaaggaatcccttaggcaaccttggatgctaaggacagggggctggcatgtgtaaaggaggtgggttaagggtagaaacttggctgccactgggacaccctcctgggtgatgagggaaggcaaatgagaccatcaggaagccacagaagtcaggacctggttctctggctaagcccccacaccactgcaaaaaaggcagagtccacacagggtggcacacaaatgcactgctgatttatgacagtgtcccatcaccccct

SEQ ID NO: 32424 - DNA, 389 bp, Homo sapiens
cgtatacgactcactatagggcgaattggagctccaccgcggtggcggccgcccgggcaggtacatggcagggacattgaaggtttcaaacatgatctgggtcatcttctccctgttggccttgggatttaggggagcctctgtgagcagggtggggtgctcttcaggtgctacacgcagctcattgtagaaggagtggtgccagatctggtggagacaaaagccatatgagcctggcagactcccaatggctggaaaattctcattgacattctcatgctgggagagtgtggcaccatgttacacaggatgggatggatctggagaggagaatggtcagccctggaaatttctgattgacatttaaagggtatactccttctcaacag

SEQ ID NO: 32425 - DNA, 396 bp, Homo sapiens
cgtaatacgactcactatagtgcgaattggagctccaccgcggtggcggccgcccgggcaggtactttttttttttttttttttttttatgtttggtgtggatgacttccagcctctggggccagcagtcgcctcctcagtgtatcctcaccctcttgccctgcactggaatgaccaggactctgggcctcctgggagtctgtagtaggtggttcctgagatgctccagttccgtcactcgcttccttagggagggccacagagctgctccctaagtgtgcatctgctcttcctacctggtcacttggagaatggctgggatctggatccaagggttctttacccaaattttctgaagggaggtgatgcccttttccgccatccagaaaactctgc

SEQ ID NO: 32426 - DNA, 306 bp, Homo sapiens
  misc_feature 145: n = A,T,C or G
aatggccaggagtgaaccctaaagtggctcacattagggccctatttctttcaattacctacaaggacaaacacatctcaaagttgagataagtgaccagtatgatttgccaaaattctaaagtgtactcaccatttttttgganaaaggttacctttggggatttgcactgcatgaattctgtgaaaagcttgttggatattgtgatagagatagagaaatgaagtatattatataagatactatgaggttccctgcctttgcttcacatcccaggcttacaaacgtgccccataaacattccct

SEQ ID NO: 32427 - DNA, 402 bp, Homo sapiens
atacgactcactatagggcgaattggagctccaccgcggtggcggccgaggtactacgaagccatcttggctctgtggaaccagctctacatcaacatgaagagcctggtgtcctggcactactgcatgattgacatagagaagatcagggccatgacaatcgccaaggtatgtcctcagggccacttaggctgcctggagggagggcagcgctgccccccgcagtgcctgtgcccaacagttcaaccttcttgctgtgtagcagtgcttttgtgtctcgtcaagcaagtcagctcagccctccttagaggttctggtctgtccaatagagaacgggagggattagcatatggctgattatgagagaaagaagcaatactaattcaggtggcctgacaagca

SEQ ID NO: 32428 - DNA, 406 bp, Homo sapiens
gtaatacgactactatagggcgaattggagctccaccgcggtggcggccgcccgggcaggtacatcttgagaataatacctacagaggttcatactgaagggtagtctcaataatgtaaagaatttgacaagcatgatgctattgaaatagttctgtaaggaagtggtgttctttatacatcaattattacaaaaagcagtgaattgtaagtgtgaggcgtgtttacttagatgtgaagagttctccttactgctgtgatggaataacaagggtcagatttcctctcctgccttaaacaactggaagctatacaatacgtataataggtaatggtttttagacataggacaagcacaggtttgtgatcctcaggagactgcagacagagtgaggtgagcaccatgg

SEQ ID NO: 32429 - DNA, 408 bp, Homo sapiens
tacgactactatagggcgaattggagctccaccgcggtggcggccgaggtacgcgggtgagctaaaaaagaattgcaaaaaaaaatctcataatgtttcaagaaagtttacaaatttgtgttgggccgcattcaaagctgtcctgggctgcatgcgtcccgcgggccaagggttggacaagcttgagttagaggtttctgcaggattacagagatgtgggaacttccagccattgacgtgtggaggttaggatatgaactactgtgaggtgcactttcagaggttgaggctaatactccttttcctacttcccaaggaggtgaagtttcctgaagacagtgcttttttacatgtagagttttttgtggttctgttactctgttgtctccattagtcaaggaacacgtt

SEQ ID NO: 32430 - DNA, 399 bp, Homo sapiens
tacgactactatagggcgaattggagctccaccgcggtggcggccgaggtaccctgtggtcagcatagtagataacatagttacagaagaattgacaacaggaaagttgttttatagaggagggaataagggctccgtaacatgacatcataatttctagacaaacgcttaacttccctgaagcagattccgccaagagggattgggccatgttggaaagagaccagtttgcctgtaatattcttcctttctctaatcctgggctcccttcaggtagaacccagatcaccatcaggaaccagagaatgagaaaaagtagagagattgtggaacctctaagccatcttctcacagaggaggaaactagagttcaaagatgcagccacctgcccgctctag

SEQ ID NO: 32431 - DNA, 411 bp, Homo sapiens
tacgactcactatagggcgaattggagctccaccgcggtggcggccgaggtacgcgggtgagctaaaaaagaattgcaaaaaaaaatctcataatgtttcaagaaagtttacaaatttgtgttgggccgcattcaaagctgtcctgggctgcatgcgtcccgcgggccaagggttggacaagcttgagttagaggtttctgcaggattacagagatgtgggaacttccagccattgacgtgtggaggttaggatatgaactactgtgaggtgcactttcagaggttgaggctaatactccttttcctacttcccaaggaggtgaagtttcctgaagacagtgcttttttacatgtagagttttttgtggatctgttactctgctgtctccattagtcaaggaacacgtttt

SEQ ID NO: 32432 - DNA, 410 bp, Homo sapiens
tacgactcactatagggcgaattggagctccaccgcggtggcggccgaggtacttttttttttttttttttttttctaaaaattaattgttttggtccaaagaacaagacctggttactggttctgatctttcctagttttaaatgaacatccataaaaggcaaactgtcatatcacattgaactttaatttcaataaaatgtgtatctcatgctcttcttcacttccctgtgtaatcctggcacctgcaaggcttgtgcttgcttccgtcattgcagcggcagcagcctcattatgaattgttcataatttcatcaaagtctgcatgtttactaactttgggtctgagctacagcattttcatctgtcatttttatatcaaacatattcaaggatcacacaaaactgat

SEQ ID NO: 32433 - DNA, 416 bp, Homo sapiens
agcgcgcgtaatacgactactatagggcgaattggagctccaccgcggtggcggccgcccgggcaggtacttttttttttttttttttttggctattaggatcattattatttaaataagaatatcactatttcacatatatcaaatcccagcaggaataattaacattagtaatgtctggtgaaaatactatgagaaattttaactaaaaatgataaattttaaaaattgtgacttcgtcaccaattctgttgtattctgaataatattgggttccagacttgattttaatttaaattgttccataatgcctttcaaaggcagctccactgagttaaggcacatgcctcaaaggaataaatggacttttatcagtagatcatgaaatatatgttagatttataagcagtttgtcc

SEQ ID NO: 32434 - DNA, 436 bp, Homo sapiens
ctactatagggcgaattggagctccaccgcggtggcggccgaggtacttaatcctggttggtttacccattctaaattatttatgtgagatagctatctatttggaaaaaagtaaagtgaaagtcttacctcaatccacactcaaaaatagtttactatatgacagatctatggcaggcagatttgatggctcaatgaactccaccctcccagtgttcacacctttatgtagttcccacttacagggagccaaaggtccgtgggacgtgaccaactcagcattccactggaggctatatgatcaaacagcaaactgtttatcatgaatgcaggatgtgagcaaactcaccattgctcctgccgacagaaggttttctggaggcaatcactccctggtgctgaggttatctactgcaacatttagagaatgtagtct

SEQ ID NO: 32435 - DNA, 401 bp, Homo sapiens
gtaatacgactcactatagtggcgaattggagctccaccgcggtggcggccgcccgggcaggtactcttaaggcctgaccgctgaagtaatcccagatatcattttccccatatggtattgggtcaaagcactcccagggccatcccaggttggaggggagggcaaaaagactcagaaatggttggtgttcatctttggagactatttacacagtgattgtatattaaaaaaaacagcaattatatctttgaatttgagtaaagttaaagaaatggtatctgtgaaacttcgaataaacaagtggagcttaaaatatttgattcttgcatattaggttaatgtgctctatgctaatcaggttggagaaatattaagctctgctaggaattctattggactg

SEQ ID NO: 32436 - DNA, 383 bp, Homo sapiens
gcgtaatacgactactatagggcgaattggagctccaccgcggtggcggccgcccgggcaggtacagtcatgagagattgagaatgaaaaaggcaaatgacatttcagtattgttacaaaaatagttctaacctatagggacccgttgaaaagtgtctcagtgacccatagatgaccctggaaatcactttgagaactaccattctatattttttaatatgagataattccattgtagaaagcatacttcaaaattcgaagttttgatgtatctttcagttacccaaaaattcaacttgacttttaatggtgcaatgatgccgaaatccccctgtccgtgcatcagtttatttttctactgcctatttgcatgatggttaaaa

SEQ ID NO: 32437 - DNA, 272 bp, Homo sapiens
ggcggccgaggtacaggtttttaaaagccccacagaagtttatattacgtttaaaaacccatattaaaatttgaaaacttaaaaaaaaaactaagaaaacaatggcatatattccttttcttaaacccgtgaagtccattactttttgttcttgttatattctgccaaaaatgggatggggtgggagagatgcatagaaattgttttatctgccttgttaacaaagtgaactcaaggaccagcttttcttttctttcttcttttcttttttt

SEQ ID NO: 32438 - DNA, 400 bp, Homo sapiens
cgtatacgactcactatagtgcgaattggagctccaccgcggtggcggccgcccgggcaggtactttgaaatattaggggcaggttcccctaatatctggcgcccaacgtggttttctttttcctaagtgcatgtgggaacccgattccctttggtaggtgcggagaaatgttcatcggtccagtccacagaaatgcttgttcggctccccgacgattggtgagttgtctgtgtattgtccggggtaactatgggtcacgcagagtctaaacattatgcttatctctgctatattaaattcctgttaaaatgggggagttcgggttcccatggaaaatatggtcaccctattcagggcagtggaagaacactgtccttggtttcctgaaaagggaacgtt

SEQ ID NO: 32439 - DNA, 442 bp, Homo sapiens
tacgactcactatagggcgaattggagctccaccgcggtggcggccgcccgggcaggtacgcgggggtggctggacccacgtggcaggtgttaaccaccgaagggaggtagaatgtttttccccaccagaggaggcagcgaccacgtctcctctatggaggcattcaagagccgtccagctgaagcagcatcactgtctgagctcggaaggcacaatccacataggtctgcatggtccaccgagctgcatgcccacggggccagcgggaggtgggcagctgctgggctctcttctgaagcagacaggatctcactctgttgctgaggctggatcacagctccctgcaaccttgaactcttcctaagcaattctcccactctgccttccaagcactagcattataggcctaagccaccactcccatccactgtagtgtaaact

SEQ ID NO: 32440 - DNA, 401 bp, Homo sapiens
tagggcgaattggagcttcaccgcggtggcggccgaggtactaacagcattatgtgtgttgccttgtgcagttgctccaagagccccacaggtcgttgtattattgtgcccattttacagatgagaaaaccaaagctctgagaggagtgactggcccaaggacacctagggagtggtgaggcagcgattgaaacccaagtctggtgactccagagctcatgctcttctccacttctagaatgtgcctccctgctcagaggaaaggcttggctctgatgagggtctctaaggcagctgtccagcttccagctccatcaacatcctgagataatgcaatgggaggtgttctacaactcacaaacctgccataaaaatgcaatctctgtgataatggtcagaat

SEQ ID NO: 32441 - DNA, 438 bp, Homo sapiens
  misc_feature 40: n = A,T,C or G
gcggccgagttacttattgactattactgtttttcctttngaattctcctccatttagagaggaacttgcccagccttaactgattgccactgatttaaacttctatttatgccaaattataaatcacatgcaaaagactgtgtttaaaaatctcaaatatttatcaggtaacaatacttccctatctcaaatgctctgaaagcttctatcgcactaatataaaatccaaatgcttcagatcaccttacaaaaaccttttatgacgtaggtcccagccagtctctccaaacccgtctcataacattgtctcctttcctctctaagctccagccttagtggccccttttttctgttctttgacatgccaaactcattcctggattagtaacttagcacaacctcttccctatctggaaaagccattcttatgatcgtgg

SEQ ID NO: 32442 - DNA, 378 bp, Homo sapiens
ggcgaacttggagctccttcgcggtggcggccgaggtacgcgggggaaggaatcccttaagtgcacgtctcccgttttcttttcacatcaatgtagagtccctctgtgaattcacaacacccaacacccatgagttcagtccttaagaaggaaaattgagcaagtatttaattggttggacattgcataaaagaggtccatatccaggctaactctagaaattttattctcaaacttagttggcctctttttcttctgtcagaggaccattcttagtggcactggggaaatcttggcacccagaagaattcaactgcgctcactgcaaaaatacaatggcctacattggatttgtagaggagaaaggacccctggatt

SEQ ID NO: 32443 - DNA, 229 bp, Homo sapiens
ctactatagggcgaattggagctccaccgcggtggcggccgcccgggcaggtacttgtgcttatattcgatccttggcacccagcctcctggacggaaataaaactggattgttgggtatattttggaagtgtgccagaattggtgaacggaagagtccttatgttgcagtatgctgtatagtaatggccttcagcatcctcttcatacagtagctggggaaaatgcca

SEQ ID NO: 32444 - DNA, 201 bp, Homo sapiens
  misc_feature 38: n = A,T,C or G
ggcggccgcccgggcagttactatgcccgagtaagacncatctgtggacacttctattcacaatggcaggtagtagccttgccagtgcccccgggttccacattctttttatttttgagacggagtcttgctctgttgcccaggccaggtgcggtgggctcacaacactttgggaggccgaggctcaggagttagagacca

SEQ ID NO: 32445 - DNA, 644 bp, Homo sapiens
gcgaattggagctccaccgcggtggcggccgcccgggcaggtacttcccaactaggggtgagtttgccacccttacccccactcattgaatatttgcaattcctaaagacgtgttttgattgtcacacctgggtggggaacatgctactggcatctaatgcatagaggcagtaatgctgctaaacatctttcaacgcacaggatagagccccacaaaagagaattatctagccccaaatgtccataacactgctgttgagaaaacctaccgcaggatcttactgggcttcataggtaagcttgcctttgttctggcttctgtagatatataaaataaagacactgcccagtccctccctcaacgtcccgagccagggctcaaggcaattccaataacagtagaatgaacactaaatattgatttcaaaatctcagcaactagaagaatgaccaaccatcctggttggcctgggactgtcctagttttagcattgaaagtttcaggttccaggaaagccctcaggcctgggctgctggtcaccctagcggctgagggactcttcaatacaaaattagtctttgtgcacttgagatgaatatactttaatttgaacatgtgaaaacatctataaacatctactgaa

SEQ ID NO: 32446 - DNA, 603 bp, Homo sapiens
  misc_feature 193, 194, 210, 216, 217, 243, 273: n = A,T,C or G
atactactcactatagggcgaattggagctccaccgcggtggcggccgcccgggcaggtacacaggaggatatgttcaggtcatatgcaaatactacaccattttctatcagagacttgattgagtctctgtggattttggtatccttggggatctggaatcagtcccccacggaccctgagggctgatgtgnncgtccatcctgggatntgatcnnagtgtctccccagagtcttccgaganggctcagtcttgctctctcagtgtgatttntgtgatattataagcatgtgactggtctgtgtccccagtccctggcagtagagttcttaagcccttgcagttttctgagacctgtaggggtgacaggagcttctttttttctgaggtgactcttggtaggctcctaggaagcttcagggtggccctggtcagaaagaccacacacatgatgagagggttgaaacagtctgtgtgacctctgcacccccagggagagaagagggctggagatagagtgagtcaccagtggccagtgatttaataaatcatgtcacatgatggaacccccataaagcccccaggcaactgggttctgagagc

SEQ ID NO: 32447 - DNA, 324 bp, Homo sapiens
  misc_feature 42, 61: n = A,T,C or G
ggcgacttggagctccaccgcggtggcggccgcccggcaggnacttatttctttttctttnttttttttttttttgagacatgtactctttctgtcacccatattgtggaggtttctgccagtataaattagctaaatcttatcatttgtgtgtgtgtgctttctcctcataggtgactttacttcctgggacatacaggaatctgaattcagtaatgggtctggaggcagcaagagatgatacgggtggatcttgaaaagattagcctaacagtgagagggtccccaagtcaggcaggaccagccccatagactggggaagaa

SEQ ID NO: 32448 - DNA, 613 bp, Homo sapiens
gagctccaccgcggtggcggccgaggacaaagaagttaattttttcaaagaataggaattatgactttatattaatctcctttatggttcaataccatatttcacagaatctaaaattccactggctataagacatactattattttatgaataagaaagaagcactgtaataaaactatgacacagtgctaagacatcactaattgtagcacacatcctaattttagagacattaaaatgtaaaaaaaaaaaaaagtgtcaaaaaagcataccttgtttcatgcaatttgataaaattacagaaaatcttagttatgtaatatgaaatacatgtaaaaatacaaagtatatatgtaagctaagaagtataataggtcacccgtgaacctaccacccatcttaagaactagattactactaaatgccttgaatctatccgtgttccttgacttatccccatgcttccacaagaggtaaccactatcctgaattttgtatgcataattcccttgctttaaaaaatagttatcacataggtatgtatctttaaataaaatactgtatatttttgcttggccaatcgattccaaaagtcttactgctcgttccctt

SEQ ID NO: 32449 - DNA, 557 bp, Homo sapiens
accgcggtggcggccgcccgggcaggtacatcactctgctgagggacatccaggacaaggtcaccatattctacaaaggcagtcaactacatgacacattccgcttctgcctggtcaccaacttgacgatggactccgtgttggtcactgcaaggcattgttctcctccaatttgggccccagcctggtggagcaagtctttctagataagaccctgaatgcctcattccattggctgggctccacctaccagttggtggacatccatgtgacagaaatggagtcatcagtttatcaaccaacaagcagctccagcacccagcacttctacctgaatttcaccatcaccaacctaccatattcccaggacaaagcccagccaggcaccaccaattaccagaggaacaaaaggaatattgaggatgcgctcaaccaactcttccgaaacagcagcatcaagagttatttttctgactgtcaagtttcaacattcaagtctgtccccaacaggcaccacaccggggtggactccctgtgtaacttctcgccactggctc

SEQ ID NO: 32450 - DNA, 643 bp, Homo sapiens
gagctccaccgtggtggcggccgcccggcaggtacggagaggaacagagtccctcctttacttctccattagaaagaatgtgatggcaagacaatgaaacaggcaaagtgaacagagatgcaagacaaaattcaggtgagagagccagagcatcactcagccattcctgcatgtaaaacaggcaactagaaatttgcagaaaggaagcgaagtctccataaagatgtttttaaagtgagcttgaagtatttggagacaattcagtgttacataaaatctgcaaatctctggataaagaagcagagatcccagcatgggacaaatggagcctcaaaagtgggaagaagacagagaagaccagggcagaatgcatctcttcctttctcttggctttcctggataaggactgcatcattcctgtggaaggacaggccatcagctccgaaacactgtatgtattttccagtatatactgctagctgtgtgatgttgggaaaatttgttaccctgtctaacccccacttccctcatctgtaaaatggaaataatgatagtacctcggccgctctagaactagtggatcccccgggctgcaggaattcgatatcaagcttatcgataccgtcgacctcgagggggggcc

SEQ ID NO: 32451 - DNA, 608 bp, Homo sapiens
gagctccaccgcggtggcggccgaggacttttttttttttttttttgtcttgaattggcaaatggtttaatttttctgttttgggacgctggccttgctggggcaccatggagcggggccccgtgctggtgggttgttcactgggaccacccttctggaatgtggaggcggcatggcaggacccaccgaatgccttcaaaagccagtggtccatgcccctgtctccttccttagagtcttccagaaaagactggtcagaggtgcagcacagataaacctacaaagcttttcatcaaagcatcacttacaatggtgaaaaggcagaagaatcactgaattccaccaaggtggagcagccgaggaaatcgtgggtagaacactagggagtcacaagaaacaacatatttgaggggacatttatagcagaggaaaatgctcatgatctaatgctacactaaaagggcaggatacaaaataaggtgtattggaagaaagagggtagcatggttgtccatccactgctttcagggactggactaagtgacctggatcagagggagggcaagagatctgcttcctgcctgagccctgtgaacagttgaaatcac

SEQ ID NO: 32452 - DNA, 556 bp, Homo sapiens
ggcggccgcccggcaggtaccgaggtcattttgcttcctatagactgcgaccttttggcaaaagctgttctaactccatctcagcatttacaattccatacctggtggtcagaggaggcccgcctgcaggctcagctaaatcgggctgaggcatccaattactcaggctcagctcacaggctccgataattactctgatactactgctcatttaggctttgatgctctcaccacggaacaagtaacaaaggtgtgtatgagagcttgggataaattacgcaccccaggccaagcttctgtttcttttactattggtaaacagggtcacaatgaattatatcttgattttttagctaaattacaagatgctgttgaaaaatctgtctctgatgagcacactcaaggtattcttcttcatatgttagcttttcaaaatgcgaaccatgagtgtaaaatggccgtgcattccatcctacgtcaaaatttacctgatcatgaggtgttgcctgcatatattaaagcttgtgaaggcgttggatcggagacccacagagct

SEQ ID NO: 32453 - DNA, 386 bp, Homo sapiens
  misc_feature 158, 159, 229, 230, 243, 244, 312: n = A,T,C or G
ggtgccggccgcccgggcaggtacgcggttacatcaatgcagagtccctttgtgaatttacaatactccaacacccttgagttcagtccttaagaaggaaaattgagcaagtgtttaattggttggacattgcataaaagaggtccatatccagctannactctagaaattttaattctcaaacgttaagttggcccctctttttctttctgtcagaaggaccatttcnnttagtggcactgnngggaaatcttggcacccagaagaaattcaactggcgctttcactgcaaaaataccagatggcctacantttggatttgtaagaaggagaaagggggagccctgtattgtgaggctgtgctatgaaagaaattctttggcccc

SEQ ID NO: 32454 - DNA, 589 bp, Homo sapiens
gagctccaccgtggtggcggccgacgacaagaaatcgagcacaattgtttcagaagaacagaagacccttccagcgccatttttctgggaggtggtccaaaggaagtcagtggggccagctctctccctcagacagctaacaggagcaaggcttggtcagccttcctgaactctgcaagtccaaggcttctgagctatttattctatacttactttgaaaacacaaaattgctccaacaggatggatatgttacggaacaattaggcataataggatgtgcatttctgtctactgagaaacaccaggtagaaaactgcaccaagctgaattgagcttcgtggtaatacacaaaaaatgcacacagtctcagctcaacaagtgcactgagtcacaccaaacacatttgatgttacaactttccatccaattccagataaccttcctcccactgcttctcaactgctcaaaagcctaactctccaaacccatttccacaaggtaatttgaagactttttcaaataaaatgccaaatttaccatagtagttatgtatttcttaaccatttaacatttataaaactatatcat

SEQ ID NO: 32455 - DNA, 566 bp, Homo sapiens
  misc_feature 48, 87, 214, 215, 265, 270, 271, 310, 311, 323, 324: n = A,T,C or G
gcgaattggagctccaccgcggtggcggccgcccgggcaggtactttntttttttttttttttttttttttatattttttagcatantaaaaaactaggttctccttagggaaaaaatacatgcaaatgctcacaaacttttaaattcacactttagcggggtggtgatttctgaaggcctctttctgtaacccctggtgtcttttcaggaaanncccaggtggagatcccatgttataaattacctttccgtttacaagagcancttcnnttagattctttaaaaaaggacccatcttaaattttacannttactgttacannaaaattagccaggcagtggtggtatttatgcctatagtcccagctactcgggaggctgaggtgggaggatggctttgggcctgggaggcagaggttgcagtaagctaagatcgcactactgcactgcagcccggccgctctagaactagtggatcccccgggctgcaggaattcgatatcaagcttatcgataccgtcgacctcgagggggggcccggtacccagcttttgttccctttagt

SEQ ID NO: 32456 - DNA, 471 bp, Homo sapiens
  misc_feature 31, 47, 65, 67, 71: n = A,T,C or G
gccgaggtacgcggggggagctttatgcagngctagctccctttttngggccactgactaccagngngctngggagctgcgtaagacaattccccccaacgcgtccaaaaaataggacatggtccactgcaggagttcataatcaggagtccagagagtccaggctcatcatcccttcagaagaaagaatcttcaggcctctgctcttgtgagagtaatttctcttaacaccgacagtgcagcaatacaactaccaccacctttcaattattgagaggcaatcatctaaagcatttggcaagtgatccacttacggagccaagctaagggagctgaagagaagaggccgccgccccaacccaggtgttgttagttatctagccttttgcaaagcctcttccatttctactctgctctttaagctatttcatgccttgaagatgtctctaccagggaaaataaagagattca

SEQ ID NO: 32457 - DNA, 625 bp, Homo sapiens
  misc_feature 27, 28, 532, 597: n = A,T,C or G
atagggcgaattggagctccaccgcgnngtggcggccgaggtactgcaataaccccctaatagttcttttacccaccaatctggcccccaacaaagtttcctttgatttctccttcctaccaagacattctcaacattctccctccaccaggtggatctggccatgattatcataaatctaattgccttctgcttaaaatatttcagggagacccattaatgcatttggataaaaattatttattagctgtgtgactttgggtgaaagatttgagctcatctgtaaagtaaggcaatatggcacccttgaagagtggtgtgaggattatggtgtttaatgtccaccacaatgcctactgtcttatagaagctgagtgggaactaacgctatttctacttatttttgacaagctgcacgtgacagtgggaaaagtattgtatttggagtcagataataatgataacaaccacaaactactagcaaatgcttacacaatgcttttctgtgtggtaggtctttttccaaatactntacaaatactaattatttttaatcttcacaacaaccagaggtaggtgctggttatcatgcccatntaacagatgagaaaagtgaggcatgaag

SEQ ID NO: 32458 - DNA, 486 bp, Homo sapiens
agggcgaattggagctccaccgcggtggcggccgaggtactagcctcaaaagaatcaaactaaatttttagtaacttgattgtgtcccagaacaaaggccaaaaatgtttaaaggaatatttaaagatcctgcaacataaagctcagtgtttagcatccaataaaaaattatcaggcatttaaagaagctggaaaatatggcccataattagggaaaaaattaacagagacatagaaataacccaggtaatcaaattagattaaaatgttaaagctacaaataaaagcaagaattactagaacttgtagaattatttcatttgaaaagtatgaaataatcccatcctctctcctactcaaggacttcactcctaataactattttatgtctctcctggatccatttaatggagatattggttactaattccaacaggaactttttttttcctttgtgaaaggaaggcagataaatgagaaaagatg

SEQ ID NO: 32459 - DNA, 479 bp, Homo sapiens
ctactatagggcgaattggagctccaccgcggtggcggccgcccgggcaggtaccatgagacaaagaggcagctttcaacatctgtcaggtctccaacatgtgatgccatcttacgatggcactaattcaggaaaacaaaacaaaactcttttcttcctttcctcaccactttctgtgccttccaatcccagaggagtcaataccaacggctagccagcctggatagccaaggaaggggaagagcaacccagtctcaatgccacccacttactccactgcacacagagactctgtggtgggcccagctgggggaggggagaaaatgtaagttcaatcaagtttagagttttgggttacaatttgaaatggacattctaatttctggatagagtctgagatgatggtttagcatgaatgcaaaggtctctattgcctaacagtacctcggccgctctagaactagtggatcccccgggct

SEQ ID NO: 32460 - DNA, 484 bp, Homo sapiens
ctactatagggcgaattggagctccaccgcggtggcggccggggtactttaacccatactttgggcaaaatgaaccactggattataagatgcctgaggacacaactccaatttaatagttccttgataccctcccaaagcacctagcacagtgctaagtctagagaatgcttttgaaatatctctcaaagcagaaacttgtgtgtatatattgggggaaagaaaataggtctacttcttaaaaaaaaaagccttgacctacttgaatgcgatgatgttagggtgcttcaacttcctcaaatgcttgatatccgtctcattctgttctctcactttcttgatggccacctcttccgcccggaacttgcccaagaagaccgctccttgggctccactacccagccactgcagctctgagatctcctcaaatggcacttcccaagtatctaggcacacaagcaagaaataagcttgaagagatctc

SEQ ID NO: 32461 - DNA, 477 bp, Homo sapiens
gctccaccgcggtggcggccgaggtacgcggggacatcaatgcagagtccctctgtttattatcaacacccaacacccatgagttcagtccttaagaaggaaaattgagcaagtatttaattggttggacattgcataaaagaggtccatatccaggctaactctagaaattttattctcaaacttagttggcctctttttcttctgtcagaggaccattcttagtggcactggggaaatcttggcacccagaagaattcaactgcgctcactgcaaaaatacaatggcctacattggatttgtagaggagaaaggagccctgtattgtgagctgtgctatgagaaattctttgcccctgaatgtggtcgatgccaaaggaagatccttggagaagtcatcaatgcgttgaaacaaacttggcatgtttcctgttttgtgtgtgtagcctgtggaaagcccattcggaacaatgttt

SEQ ID NO: 32462 - DNA, 472 bp, Homo sapiens
  misc_feature 57: n = A,T,C or G
ttggagctccaccgcggtggcggccgaggtaccagttcatatcatcatcaatgtcgnggctggctttgcaggagatgttgactttgtctcctggagtcgttgacatgaatgctggagactgcgtgagtgtcgtttctgccctggtatcagagatccaaaggaggaggaagctgaggaggtgaacctgggaccccataaccttggccctgacctgcatctacaccaagaagagaggacagaggccagacttcacagacaccatcattctccggaaaggggcctcagtggagcacgtgtgccaccgcatccaccggtcactcgccagccagttcaagtacctgcccgggcggccgctctagaactagtggatcccccgggctgcaggaattcgatatcaagcttatcgataccgtcgacctcgagggggggcccggtacccagcttttgttccctttagggagggttaattgcg

SEQ ID NO: 32463 - DNA, 478 bp, Homo sapiens
ggcgaattggagctccaccgcggtggcggccgcccgggcaggtacaaagtccctaaggcaaaagcatttttgctgtgttctaggaaaagcaaggaagacagcatgtctatagcagtgggaggtggaaggataataaacagtaggtgaggttagaggggaccaaatcatgtattttccatccagaggttcccaaccttggctgcacattagatttattctaaggagcttttaaaaaataccaatgactgggtcccagcctagagtgattaaatcagaatctctggaggtagacttgagaatctgatgtttgcaagtttcctaggcaagtcaaggctgaggaagactgctgcaggccattgtaagagccaggcgttgatctcattcaacctttccctcagctcttctagagacagccagcattctcttatggcacaaatacagcctttcaccctcacagaaagacacaggacaacaaatt

SEQ ID NO: 32464 - DNA, 489 bp, Homo sapiens
tataggccgaattggagctccaccgcggtggcggccgaggtactttaaaataatagaccttacaaagttttctagactgacttcctgtgaagaacaaggagcagggggaaaggggaaggggtagaatttaccaatctgaatatttcagcaagggagaatgcatgagttttactataaaaccacactgaacattgcaacaatactaaattccatacatatataataatcactgagctataaggttgctgatgtatttgttcttgaaagtgaattagagttactttatgcagaatcagctagttttatgtttcataatgtctttcccttttttgaactttttttaagtctaaagtagggggaaccaagcctgctggtggtgattttggagaagtcttgaattcggctgcaaatgctagtgccaccaccacggagcctcttccagaaaagacacaggaaagcctgtgagattcctacctttgttctgctacc

SEQ ID NO: 32465 - DNA, 473 bp, Homo sapiens
ctactatagggcgaattggagctccaccgcggtggcggccgaggtacaaactgatggagtcacctgcaatctcatatcctggtggaatgccatggttattaaagtgtgtttgtgatagtgtcgtcaaaaaaaggtttttgaatagaaattacattctttgacaccctcagttctttcaaactttcaactctgcattttattgcattttctcatttaactgttagtatatgtttgaatataggctgactttttttctctattgcactttcttctttttttctttttagaaaataagcaattaggggttagatgcaatatgaatataaaatagttctgtaaataccaaatattatttttagttctggaagttaaaaatactctccatagtaatgtgtgttataataataaatatttcttttgtttgacttttttaaaattctacaatggtaaaagctattttaatccatgttagc

SEQ ID NO: 32466 - DNA, 423 bp, Homo sapiens
agggcgatttggagctccaccgcggtggcggccgaggtaccaatgaacttcttccctgagttggtctttctcatataacacaaaaggcaattgatagcatgaacaatacaattttcttgccaaaaatatgtgatttgagtctaataaggtctttaggtttaatttcaagtttcctttgtatgtgtctccactgtgcccggtctcttatgcagcccactgggaaggtagacacagggtctttgtgcccatcccataaagggccaaacagcactgcatgccaggaaaatgtgtagagatcagtgcaacgcaatcctcaccagaaaggagctttgtgcaaattttgaagacagaggcaaataggtttttccatatttcatcgcattaacttgttacagcaaacacgctggacttgtatctggatct

SEQ ID NO: 32467 - DNA, 486 bp, Homo sapiens
gggcgaattggagctccaccgcggtggcggccgaggtactaatttaaaactatacatttctaagttaatgatttcagcatcttgcggccataccagacatggcatggaattaaactttcagtcccactgttcattttattcatacattagggtggcaagggtggtcttgctcattgcaagcaaagtcatcctggttcatgaaatgaagaatgtggactgtgcagttttcccagtcatgaagacttttgatacatcacttgaaatgttcctcctgaagttgagggtcttttgtaatatcaccagggcagtgaatggcagagaccagatcatgaatcgcttcatttagagcctgcctccgggcttccctgcactctgtggctgctaataccacacccctgtgtcccttgtggtcttaagtcacaaaaccagctattattagatttgcctggagtgtctgaaaacaggcttaaaatgaggaaaccttgt

SEQ ID NO: 32468 - DNA, 485 bp, Homo sapiens
ggcgaattggagctccaccgcggtggcggccgaggtactattctttccttttgtgtatgtttgaaattttttcattataaaaaggacaaaaaaaaaaagagagagaaaactaaaaaagaaaaaatagtgttgcgcttgttagtaaaaccaatcttaaggccagttactaaaaagtaaactcctacaattttgaatagctatttgctaatacagtgatttgctgccttcttggggttagtttagcctgtccattccttatttaacttgctcccttccttcccttttaataaagtcctgcctaagctccaggctctattttccacctctcccctaagatttaggattgttccgttttaagtcagtggccatatgtcttcctgttctcctagtgtaactcttaccttacccagcagcaggccctttgtttagggcagcctataatattgcttttatgattaatcttcccttatccacaaacttaactg

SEQ ID NO: 32469 - DNA, 558 bp, Homo sapiens
  misc_feature 131, 146: n = A,T,C or G
gagctccaccgtggtggcggccgccgacgcgggaagccggaccaagctgagggaggtggagccagcatcatgcagtggtttcgtgaagggtgagcagtgcgctaacaaagcccttccattcaccagacatntgtctccaacatatncctcttgaaccactctcacagcttctcaagttgcacagccaagtttgcagatggacagcagtgctctgtgccagtttttgacattacacatcagacacctctgtgtgaagaacataccaaaaaaatggataatttcttgagaggagataactcccgtaaagttcagcaccagcagcagaggaaacccaggaaaaaaaccaagcctcctgcactaaccaaaaaaaaaaaaaaaaaggaaaaaaaaaaaagtacctgcccgggcggccgctctagaactagtggatcccccgggctgcaggaattcgatatcaagcttatcgataccgtcgacctcgagggggggcccggtacccagcttttgttccctttagtgagggttaattgcgcgcttggcgtaatcatggtcatagct

SEQ ID NO: 32470 - DNA, 341 bp, Homo sapiens
ggagagtcttgcacatcatctttgtaaaaacagtctttgttttactcagaaaatttgtattgagccctgctacatacatgctaggcattagggtctaaaaagaatgaaaataaagcatctcagggatggcttttcagaacacatgcccaagcagagacttaaatattgaggctggccagattaaaaggggtagagggcaggaaagggtgacagcatgcccggcagcagcaagagcgggagcgaggcctgaaagaatgaaagtatctgcctacaatagaaggatgagtgagttgggcactaccagcagctcagcaatgccagagaaagggcacacagggaaa

SEQ ID NO: 32471 - DNA, 547 bp, Homo sapiens
ctatagggcgatttggagctccaccgcggtggcggccgcccgggcaggttcctatgctgtggatctgtgcaccacgcattgtttctatacatattacattaaactgtgcctcatctggattgtggcacaaggtaaaatagatgcaggctgtcaaggctgagaaaaatgtataaaacaagaccagaagactggagggaccaaaagaggtgatgcatacacaaggttctaaagcccaagtctggactccatatgcacattcaaatttgaggaacactgagcagtaacatgcaaatcacctgagaatcttgcttaatcagcttctcattcagcaggtctgggggagaggctgagagtcagcatttcttgcaagttcccaggtgatgccagtctgcggcccacatgttcatctagaccccaaactagtagcaatgtgtgtggacaaggctgggtaacaggcatgaacaatcctccagtcatgagtaatttccttgagagcagttgttttctgtggaagacccagcgctcagcctccatgaacatggtcgag

SEQ ID NO: 32472 - DNA, 478 bp, Homo sapiens
  misc_feature 165: n = A,T,C or G
accgcggtggcggccgaggtacatgatgatttccttgtagtaaatagttttttctaatttttcccatgtagacaaatccaaaatgcatacatgctcatttaaataatttgtccactggtaacctcagctgagcgctgcccttggcagaatatgtttacaggatanttaaatgtgtttaaaatattctttcatattacttggttggcatttagatgtcttaagttgttttaataaattagggaaagctagaatataaaaggtagaaaatatatacattttcagtgttccaagacactttggtggactatagaatgctttaaatgcaagttaagatgaatattttatatttggctgggcataatggctcatgcctataatctcagcactttgggaagccgaggtgggaggatcgcttgagcccgggagttcgggaccagcctgagcaacatagtgggatcccgtttgtacctgcccgggc

SEQ ID NO: 32473 - DNA, 224 bp, Homo sapiens
  misc_feature 8, 52, 53, 55, 56, 64, 70, 71, 72, 96, 97, 107, 108, 122,130, 132, 137, 143, 154, 180, 201, 202, 204: n = A,T,C or G
caggaggnaagagagcctgattcagcaaaagggggggaaggaggcccagaannannggggccancagagnnnagaccacgagggccaccaaccccnncgcccgcggnncagaagccggggangccacaancncaaangccaanccaggcacagnacccgcaaaaccagccaggagaaaanaaaacccaaccaccgggaggnnancaacaccagccgccagccgc

SEQ ID NO: 32474 - DNA, 367 bp, Homo sapiens
  misc_feature 350: n = A,T,C or G
cttacgtaagggttcataagaaagacaaaagtttatgaaactgttactaccagtcataaaagaccttttcctccctcattcacaggctggcttattagctgtaatggcccagatgggttgttacgtccctgctgaagtgtgcaggctcacaccaattgatagagtgtttactagacttggtgcctcagacagaataatgtcaggagagttttgggttccccattaaggttcttattcagtcatttagatgtgataaaagatatttgcttcttgtatatgagccttttaaatctaatatttgatttttctggtgttactttaaaaacatcactttttaagaactgcatagnctctctctctttttttt

SEQ ID NO: 32475 - DNA, 434 bp, Homo sapiens
tatagggcgatttggagctccaccgcggtggcggccgaggtacttaccatcttgtttctcagtaggtttttgataccaaagaggaaaatgtttaatatttgctttatctattagatcagaacctcttcgaaaaaagaagaaggtggatcctaaaaaagaccaagaagcaaaggagcgcttgaaaaggaagatccgaaaactggaaaaggctactcaagagctaattcctattgaagattttattacccctctaaagttcttggataaagcaaggtaaggatccttctctagggatgaagtcctcaggacaaaggagtaatatcaacttcaggtagttgtgtctgtagttcacacctgtgatagtcattggtcagtaggcttgagctgacttggccctaatgagtccttgctccttttggaagcaggagaaagca

SEQ ID NO: 32476 - DNA, 318 bp, Homo sapiens
cctatcactactatagggcgaattggagctccaccgcggtggcggccgaggtacctgcaatgggactctatttctgatattagaaaaccacccaatggaactgataaaaatgagttggaacttgtgaccagcagctggatgagaggagtgtgaatcccccaaatcttatggatatagtgtgctttctttgatgttcctgccaaagtgaggctggaaagctaggaagatctgtaagacgtgtgccagcacaaagtgactacaattcaaaagttccaaaaaccttgcttgaaacaattgcaaatagcttatcattttaaa

SEQ ID NO: 32477 - DNA, 477 bp, Homo sapiens
ctccaccgcggcggcggccgcccgggcaggtactcattgaacttgagctccgagttctgattcacatccaagctcttcatcttctcatcaagagagcccacatcccgaggagacaccaaagggaagggtagagttagaaactggggttcttgagaaagtagggagggaagaactgtcagctgctattctctcaaggcccttccctcagagagcagtggcacctgccccttctctaaagaaggaggctgcagccccaaaactgcaccgccacggggtgcctctccaaggagcaccagcagagaaaggtgggggggcctgagtcctaatgcttgccgttgtgtaaatacttccacgatggctgcttacaaaccacaaacaggttgtcgctgaatacaaagctggaaagaaatccacacaatcttctctcaccagcacaccactgcagctgctgtgggatcggcccaaggaatgccagca

SEQ ID NO: 32478 - DNA, 473 bp, Homo sapiens
ggcgaattttagctccaccgccgtggcggccgcccgggcagttacctgaaaccatagctggggtcattttgttgcagccaacctgtgcagagagggcaacttctcgttgccttgagttgtggccctccctgtctggtaagagaggaggagacgcctccccgattcagggaaggaggaagagaatgagcggcaggtcgcctacctggacattcttcattgctgcagatccactggctgtttcggcaaatgctgttggagggaaaaagcacaggtcattggtggttctgcaaacacaagggtatgcaaatggatttagagctcatggtagttatcacagtccccaaacgaagggatgtgggaaaagaaaagagctggtgctagcaaaatcttcatagggttaaaattgtacctcggccgctctagaactagtggatcccccgggctgcaggaattcgatatcaagcttatcgata

SEQ ID NO: 32479 - DNA, 426 bp, Homo sapiens
ctactatagggcgaattggagctccaccgcggtggcggccgaggtactttttttttttttttttttggctattatccttataccttttattaaaaagtaaagcaattctactctccttatgagtttgtgtttaacaatgatgaaatatgttaatttgtgcatgcataatgagatgaactctggattatttcatctctgcgattacatgtggaatagagtgattaatcataaaatgtcttcctcatgattccaaaacttggaaattgaagagagcaacagactatatgttttctaaactgatatatctccttgtgatctaaggggattattttcagtgtccatatatatataaacagcctgagggggaaaaacctcaaactgtgacattagaacaagcaccgctggtaacaaatggaaaactgaaaa

SEQ ID NO: 32480 - DNA, 501 bp, Homo sapiens
ctactatagggcgaattggagctccaccgcggtggcggccgaggtacatcagttcagcttctgctggcaggattccactaaaatcaaaatagcaccaaaggaagaaatggttaagggcagccagtggaagatcccactctcccgatggcaaattccagagctgtggtttagctctagtttctgggaagagcaatcattacccaactgtgagggtagggtgcattactaagtaattcattgacatttttcccagtagccttttacttaacagcgaataataagaggaaggtaaagtatttaattaagagccacagccctgtaaacatgaaatcattattccagacatcccttcgaatatgttgcctactttaaaaagaagttatttttctcccatctgggagaaatcctcactattaaaaaaaaaggaaaaagtttatcatgaggataatattttgggagtcaaaggccgtggctcatgcctataatcccaacactttggga

SEQ ID NO: 32481 - DNA, 486 bp, Homo sapiens
actactatagggcgaattggagctccaccgcggtggcggccgcccgggcaggtactgttgcttcttgttcattgttggttaaggaaatccacactgttcattactacggttcttatactactgatcgcgagagcttatacgtctcgaagacatttagaatcgctaggctcttactggggctaaaggtctaacttgaaagttagattattttggaagagggggctaatagacagtaccagggaagagaggggtagcttattttaaccaacccaataaattggggcgaaaaatcacatagggagaaagaacttgatgggggagggaatatatgtctgccgaccatattcacagggtgccgcactcagtttacattggtggaatttaaaggcatatatatagccgccgttgctcctctctgtaataccccaagactgtaaatctataaccactgcaatgatttagtgattaaaaacatgataacctatt

SEQ ID NO: 32482 - DNA, 449 bp, Homo sapiens
ctatagggcgaattggagctccaccgcggtggcggccgcccgggcaggtacaaaggaagtggctcacatcatagggtaagaaaaagcaatgttatgcaaagaacaaaataaagaacattccaagaaaagggaacagccagtgtgaaaacccagaggcagaaaaaacttaggtgtgataaaaaaaaaaaatgtaagagaagctggtttacccggaatatcctgagcttgagtgaagtagaaatacaaaagtttggcaaggctggcaggattaaaaacatgaagattttggaggaagactttgttagaaactggaatttatgctaagaacaatggcagtaagccaccaaacatttttttgccaagaaaacatgttctgaattgacagttccaaaacatgactgtcctatggagaatgaattgaaaagatgaaattatagaagggaatatgc

SEQ ID NO: 32483 - DNA, 519 bp, Homo sapiens
actactatagggcgaattggagctccaccgcggtggcggccgaggtactcagctgaaaacactgtttcagccccctctctggtgacctcagccttctccaggtgtatctcttgatgatcttggagaccagcagccacagctgctgctactcctgcaggagactgtcaggctgtggtggggggcaggggtgttggaggagaagttgaaaatccgtgtgttctctgcccctctgctcctccatcttagcttctggaggagttaaggcaccaagggcaccaagtcaggttggcagttttgttgcccttgcccaagcctccagcaaaactagctggtcccctgctttgctgggtcccagccaggtgtgattttggttgttgattagtaaccacacattgtttttccccacctttttcattagtggaggtttttgttttgttttgtttttgttttgtttgagacaaagtctcacgctcttttcagactggagtgcaatggtgcgatgtcagctcactgcaacct

SEQ ID NO: 32484 - DNA, 430 bp, Homo sapiens
cactactatagggcgaattggagctccaccgcggtggcggccgaggtacataacaaaatgaaaagtctcccatgtctacctgtttatacacagacatggcaaccatccgatttctcaatcttttccccatctctttaaaaaaaaaatgggaatgacaataattatatctgcctcatagtgttattgtgaggattggttaatacaggtaaaggatttagaaaggggcctggcatatagtaagcagtaattttattaattaatttaccttaagccctgtcccaacactccttttttaatatgaaaatactcaggccagcactatggctcacacctgtaatcctaatactttgggaggccgaggcaggaggagtgcttgaggccgggagtttgagaccagtctgggtaatagaacaagactcctgtctctaca

SEQ ID NO: 32485 - DNA, 515 bp, Homo sapiens
ctactatagggcgaattggagctccaccgcggtggcggccgaggtacgcgggccaaatcatgtattttccatccagaggttcccaaccttggctgcacattagatttattctaaggagcttttaaaaaataccaatgactgggtcccagcctagagtgattaaatcagaatctctggaggtagacttgagaatctgatgtttgcaagtttcctaggcaagtcaaggctgaggaagactgctgcaggccattgtaagagccaggcgttgatctcattcaacctttccctcagctcttctagagacagccagcattctcttatggcacaaatacagcctttcaccctcacagaaagacacaggacaacaaattcaataaattaattcactggcatggatgattttctcagactaattgtttccagtttgataggagacaattaaaggctggaaggcactggatgcctgatgatgaagtggactttcaaactggggcactactgaaacgatgggatgg

SEQ ID NO: 32486 - DNA, 517 bp, Homo sapiens
tacactactatagggcgaattggagctccaccgcggtggcggccgcccgggcaggtacacaaggattcattatctgtattaatttttctacttttctatgtttatggaaattaccttcaaaatgtaaaatatatgtttggaaacataaaaatatattccaaaatagctcatgaattaaatgtaagtcaccatagaaattacacgttttttggaatagaacagtcatgaattatactatttcaaaacatgtgggatgcaggtaaagcaggacttaagggtaagtttattgacttaagtcttccaaaaaaagatgtaaatgaattaagttcaattcaaaagttagaaaatgaaacacagaaaagctggagggaaaaagaacagaaaaaatagaaataagttaataatgcagtcatcttttattaacaggtagctgagaagattggattgaactaaggcattattctgagggaggttggtctgtaatattcctctctttaatatccttggttctgtctcg

SEQ ID NO: 32487 - DNA, 402 bp, Homo sapiens
gcgtaatacgactcactatagggcgaattggagctccaccgcggtggcggccgcccgggcaggtactattactaggttcattgtttccagaggggtgaaacggggctttggagaggttaaataacttgcccagggtcacacagctattaagtggtaaagctgggatttacatgagcccagacaaagaacccaagaagctaagctattctcttgtaatacctccaacataggaggcaagaagtgaggtattatacaggttgaggagataaaggggagagaggcctgcagtgctaacaggaggagctgggattcatcctggcttgttctgataggtcagttagtcttagagatacccatgaggtcacctactcaaaatggggctcagagtagccttgtcccatt

SEQ ID NO: 32488 - DNA, 462 bp, Homo sapiens
agggcgaattgggccctctagatgcatgctcgagcggccgccagtgtgatggatatctgcagaattcgccctttcgagcggccgcccgggcaggtacctttcattggattgtccatggtgcatcgctttagcaagcggcgtgactctccgctgcccgtcatcttggccaatatctatctgctggttcctcctgtgctcaacccaattgtctatggagtgaagacaaaggagattcgacagcgcatccttcgacttttccatgtggccacacacgcttcagagccctaggtgtcagtgatcaaacttcttttccattcagagtcctctgattcagattttaatgttaacattttggaagacagtattcagaaaaaaaatttccttaataaaaatacaactcagatccttcaaatatgaaactggttggggaatctccattttttcaatattattttcttcttt

SEQ ID NO: 32489 - DNA, 407 bp, Homo sapiens
tacgactcactatagggcgaattggagctccaccgcggtggcggccgaggtacgcggggacattaatgcagagtccctctgtgaatttacaacacccaacacccatgagttcagtccttaagaaggaaaattgagcaagtatttaattggttggacattgcataaaagaggtccatatccaggctaactctagaaattttattctcaaacttagttggcctcttttttttctgtcagaggaccattcttagtggcactggggaaatcttggcacccagaagaattcaactgcgctcactgcaaaaatacaatggcctacattggatttgtagaggagaaaggagccctgtattgtgagctgtgctatgagaaattctttgcccctgaatgtggtcgatgccaaagga

SEQ ID NO: 32490 - DNA, 408 bp, Homo sapiens
acgactactataggtcgaattggagctccaccgcggtggcggccggccggcaggtacacatttcctgatgtaggaaatactaaaatttcagagcctatggcattggctttcaccacctatgcaattttctacacatctgaaaattaccagtttatctaactccttaaatgttcctctcttcaacaacaaaaaacacaaacaaaaattgctggaagaaacaggaagcatccaggtccaaatgacagcataacagactatgaagaaacagggcttaagtgcccatctagaacaagatggtctagattacaataaggaccccatgggacagaacatcaaaacattcaactttcaagtaaatgtcttggaagtaaacatttaaaatttataggacttcctctggcatgtagg

SEQ ID NO: 32491 - DNA, 400 bp, Homo sapiens
tacgactactatagggcgaattggagctccaccgcggtggcggccgaggtacaatcagaatgctgcattctccagccataaagatcgctccctcttcttttaaacatccctgtccctcaaggcctagctcaagacggtcaccttaagaaaagctccttttgtcgagcagtgactccataccaggccctgctttaaacgctttatctgcattatcttacttgattctcgcaatagccctgggtggtaggtgcaattattatctccagtttataaaagaagatactgagggtcagagaagttaagtgaccggctcaaggtgtcacattcagtaagcgttgaaggggtctgtgttggtctgtccttgaagatgccccctacgactacactttcaatgatttct

SEQ ID NO: 32492 - DNA, 448 bp, Homo sapiens
ctactatagggcgaattggagctccaccgcggtggcggccgcccgggcaggtacgaaaaaatcaggctactaagcccactgttaatatagacgcagaccaattgttaggaacaggtccaaattggagcaccattaaccaacaatcagtgatgcagaatgaggctattgaacaagtaagggctatttgcctcagggcctggggaaaaaattcaggacccaggaacagctttccctattaattcaattaggcaaggctctaaagagccatatcctgactttgtggcaagattacaagatgctgctcaaaagtctattacagatgacaatgcccgaaaagttattgtagaattaatggcctatgaaaatgcaaatccagaatgtcagtcggccataaagccattaaaaggaaaagttccagcaggagttgatgtaattacagaatatgtgt

SEQ ID NO: 32493 - DNA, 412 bp, Homo sapiens
agcgcgcgtaatacgactcactatagggcgaattggagctccaccgcggtggcggccgcccgggcaggacgcgggtcagttaaaaattatttgaatttttccaaacaatcagcgtgggcaaaaaatattatgtctgaatgtattaaaaatagacaaaacattttttgttaattaattacattgaaagttttagtcagctttattccaaaactggtatttgttacttcttaagtcagttttggtaatttctgatttcttagaaattggtgtatttctgaacatttataatttagtagcataaaattgtttgttttgaatctcttgtttctcacttctatatttaaatataaatatatatctacatatacatacacacacagacccttaatgggtttgccaatgatttatcatc

SEQ ID NO: 32494 - DNA, 406 bp, Homo sapiens
gtaatacgactactatagggcgaattggagctccaccgcggtggcggccgaggtacgcgggaaccacatatatgtataaattcaccgttactttttagcaatactataaaatccaacagaaaaaaatagcatttactattaaaaaaagaattagtctttgtgggtttggggcaaacaactgcccttctcagttaggatgggggagttctggacatttctagctaaagcccaggggtcaagggaatgataaactcctcggtcttgagcattgagagaaattctaccagctcgccctcagtagaagggtctatagtcctgcccctcacccgcctggcagggagagctgcctttctctcctgccatccccctatatccacggcttctctcagaggagctgctgagtgca

SEQ ID NO: 32495 - DNA, 397 bp, Homo sapiens
actatagggcgaattggagctccaccgcggtggcggccgaggtactactcgattgtcaacgtcaaggagtcgcaggtcgcctggttctaggaataatggggggggggaaaggcagaggtgaatatggaagagacagttgccctcagcttggtccaggaaaaaatgctgtgtgatatgatgattcagagcatgggcctgaggccaggctcatattggtgtgaatcctagctctgcctctcatttggtgggaagtttacctctccatatcttatatttcttagctctaaaatggaaataataatatctgtctcatagggttactgttaatattaaatgtgttagaaagcaaattattgccgagtgaaaatgccattaaaatctatccatgtgttcaaac

SEQ ID NO: 32496 - DNA, 402 bp, Homo sapiens
tacgactcactatagggcgaattggagctccaccgcggtggcggccgcccgggcaggtactaccgcattgcttgaacagctggaagagacaacgagagaaggagaaaggagggagcaggtgttgaaagccttatctgaagagaaagacgtattgaaacaacagttgtctgctgcaacctcacgaattgctgaacttgaaagcaaaaccaatacactccgtttatcacagactgtggctccaaactgcttcaactcatcaataaataatattcatgaaatggaaatacagctgaaagatgctctggagaaaaatcagcagtggctcgtgtatgatcagcagcgggaagtctatgtaaaaggacttttagcaaagatctttgagttggaaaagaaaacggaaac

SEQ ID NO: 32497 - DNA, 403 bp, Homo sapiens
gcgtatacgactactatagggcgaattggagctccaccgcggtggcggccgaggtactgacatgacacttaaagaaaatgctcattgaaccagcattttaggtttcagatttttggatttggaatataacttatacttctggcttacttgtttcttaaggtcatccctttaatgaccttgaaaattagaagaagcaaaattacttttcttatggttagccttctacgctgtgcctcagctctaaatagacattaacaagtagaacatagagatttctggggcttgtagatgtaggaagtattgatataagatgtcgagaaagttctgaatggagcctgttaccaggaggctagaaaaaaatccttccctctaagtaactgctataatgttttgcagaggcaat

SEQ ID NO: 32498 - DNA, 407 bp, Homo sapiens
tacgactcactatagggcgaattggagctccaccgcggtggcggccgaggtacttttttttttttttttttaaatttccaccggtgccgaggcctcagtggagcctggctggcggcttgttagagcctgcagcctacctgtcctgcataggaatgaagccgggaggagttacatgatatgccctagttgcaggccggggacacagctaccgcattcagagaccaggaaacagagcaaaagctgttctcagagtgcggctgagcgaggagctacaggggaatggagggggccaagctgcatggaagattgtcccattaacctggctttttaccagggtggtcctctccctaacccctaagaatcacaccctgcatccaaacggcagcaaccccagaaaacgggctaag

SEQ ID NO: 32499 - DNA, 414 bp, Homo sapiens
gcgtaatacgactcactatagggcgaattggagctccaccgcggtggcggccgcccgggcaggtacttttttctttctttctttttttttttttttttggggggttatgtgaattatatctcaacaaagttgttaaaaagaatcctttctatgtgagcattaacttttgttttttgttttgagacagtgcccaggctggtgtgcaatggcgtgatctcagttcattgcaacctctgggcaaaagagggaaactgtctctaaataagtaaataaaataaaataaaataaaaatttcttaaccctaggtgtgactttcttcaggcctagggtcagtgatagtaatagaatggctacattaagatttttccattttagacaatacattcaggtattcatagatccaaggcaaaaata

SEQ ID NO: 32500 - DNA, 418 bp, Homo sapiens
agcgcgcgtaatacgactactatagggcgaattggagctccaccgcggtggcggccgcccgggcaggaccaaggcccaatcaccccaaacagtgacaggaacataatttcctgttgggaccagttctcggaattttgcaccaacatgatcccatagttccacatctaacgtttccttttcaggaaaccaaggacagtgttcttccactgccctgaatagggtgaccatattttccatgggaacccgaactcccccattttaacaggaatttaatatagcagagataagcataatgtttagactctgcgtgacccatagttaccccggacaatacacagacaactcaccaatcgtcggggagccgaacaagcatttctgtggactggaccgatgaacatttctccgcacctaccaaagg

SEQ ID NO: 32501 - DNA, 396 bp, Homo sapiens
gcgtatacgactactatagggcgaattggagctccccgcggtggcggccgcccgggcaggtactgtcgggacacctttgaccacccgactctcatagaaaacgagagtatatgcgatgagtttgcgccaaatcttaaaggcagaccacgcaaaaagaaaccatgcccacaaagaagagatcattcagtggtgttaaggattccaacaacaattccgatggcaaagccgttgccaaggtgaaatgtgaggccaggtcagccttgaccaagccgaagaataaccataactgtaaaaaagtctcaaatgaagaaaaaccaaaggttgccattggtgaagagtgcagggcagatggacaagccttcttggtggcactttataaatacatgaaagaaagga

SEQ ID NO: 32502 - DNA, 410 bp, Homo sapiens
cgtatacgactcactatagggcgaattggagctccaccgcggtggcggccgcccggccaggtacttgattgttctgaaattccttatgcatgattagagaaagagtaaatgacgtattttaggattgtgtttaacaaaagtgagatgctaattcttgaaaattaggcctgtctatggggactgcacgtaatcacattaccctagatcttgagttagcgagagaatattcactgtcaggtgattcactgaccttgcctataacttgaaaccaatagcaaatccagatgtagtttcactggcctttgaagtccagggcaaaaagacagagcgtgactccctgtctccccattgcatcctgattgtctccctgtccagggacagaataaatatcctcaagacattgactcttt

SEQ ID NO: 32503 - DNA, 410 bp, Homo sapiens
atacgactcactatagggcgaattggagctccaccgcggtggcggccgcccgggcaggtacaatgcagttctaactagcttccttaaatagctaatattaaatgtcgctcatcaactttcacaaaaagtgtttttgggagactctaaaatgcaccatcttaccttaaggatgttttaggagaagctccactacacaaggcagcaaaagttggaagcctggagtgcctaagcctgcttgtagccagtgatgcccaaattgagtgagtatgaaaacagtggcttcacattttatgttttcttggattaaactaatcagactcctgaagcttagttacatgtgcttttaaaaataatgcttgcgtaattgataatttagtgttaatcatttaaatgttaacttaggttgttgg

SEQ ID NO: 32504 - DNA, 397 bp, Homo sapiens
gcgtaatacgactactatagggcgaattggagctccaccgcggtggcggccgaggtacctgtcagtgttcaatatttaacaaactccagttaaacaggtaagaggtcagcagtagcttataggccttggttctattatccatgtgcccaactgcagccatcgtgggctggtgttaaaattttcctttcaattgtcatttttctaataattgcaatcagtgagaggagaagaaaaagttcaagggaatgacctgacctttcaccatcctacacaggagatgactgatgacatggattcatacactaatgtatatcgtatattctccaaagaccctcaaaaatcgcaagaagttttgaaaaattctgagatcataaactggaaacagaaactccaaatc

SEQ ID NO: 32505 - DNA, 403 bp, Homo sapiens
cgtatacgactcactatagggcgaattggagctccaccgcggtggcggccgaggtaccccagaacttaaagtataattttaaaagaacaaattttcttttaattaagcttttatcatagaacttgtaaagaaaatcgttttcagtctcttactaccacatcatagctgggacaaactgctgatattttaaaagcaacacaaatatcaaacagaaagaactagacttaggaaccaaactcaggtttctgtagtgaacagggcagaatcttaacattcggtccccaccattactccttcagtttggcctttgctagcaaaagatggccttgttatgtagatgagaccacttatataaaaaaaagttttaaaaaatttccaactggattttctgtgtttttttttg

SEQ ID NO: 32506 - DNA, 402 bp, Homo sapiens
cgtaatacgacctactatagggcgaattggagctccaccgcggtggcggccgcccgggcaggtacttgattgttctgaaattccttatgcatgattagagaaagagtaaatgacgtattttaggattgtgtttaacaaaagtgagatgctaattcttgaaaattaggcctctctatggggactgcacgtaatcacattaccctagatcttgagttagcgagagaatattcactgtcaggtgattcactgaccttgcctataacttgaaaccaatagcaaatccagatgtagtttcactggcctttgaagtccagggcaaaaagacaaagcgtgactccctgtctccccattgcatcctgattgtctccctgtccagggacagaataaatatcctcaagacat

SEQ ID NO: 32507 - DNA, 396 bp, Homo sapiens
cgtaatacgactactatagggcgaattggagctccaccgcggtggcggccgcccgggcaggtacgcgggggagccaaatgcagtgcttgcttcctatctgtggtccattgcatagcagtgtgcttgggtgctgcgtaagacaattccccccaacgcctccaaaaaataggacatggtccactgcaggagttcataatctaggagtccagagagtccaggctcatcatcccttcagaagaaagaatcttcaggcccctgctcttgtgagagtaatttctcttaacaccgacagtgcagcaatacaactaccaccacctttcaattattgagaggcaatcatctaaagcatttggcaagtgatccacttacggagccaagctaagggagctgaagaga

SEQ ID NO: 32508 - DNA, 383 bp, Homo sapiens
cgtaatacgactactatagggcgaattggagctccaccgcggtggcggccgcccgggcaggtacgcggggagaaaaagggtggggagtgccctttcttgaaggaatcccttaagtgcacgtctcccgttttcttttcacatcaatgcagagtccctctgtgaatttacaacacccaacacccatgagttcagtccttaagaaggaaaattgagcaagtatttaattggttggacattgcataaaagaggtccatatccaggctaactctagaaattttattctcaaacttagttggcctctttttttctgtcagaggaccattcttagtggcactggggaaatcttggcacccagaagaattcaactgcgctcactgcaaaaa

SEQ ID NO: 32509 - DNA, 447 bp, Homo sapiens
tacgactcactatagggcgaattggagctccaccgcggtggcggccgaggtactcttaaaaatctgttaagagagtggatctcattttaagggttcttaccacaataaaattaaatttttgaaataaatcagtcatatttgagtgaaatgaaacctttccgagtagtttcagacaattgataatacctagtttacagttcctgtagtcattttggagggtgaggacttgatgtgtttagtaaagttgagaaataaatacatgaaagaatgtgtggggaagagaaattgtggggaagagaaattgtctcagaggaccattcttagtggcactggggaaatcttggcacccagaagaattcaactgcgctcactgcaaaaatacaatggcctacattggatttgtagaggagaaaggagccctgtattgtgagctgtgctatgagaaat

SEQ ID NO: 32510 - DNA, 376 bp, Homo sapiens
gtaatacgactactatagggcgaattggagctccaccgcggtggcggccgaggtactcactctcaagtttacgttaaatactatcccatacaaaaaccactctttctcttgttttcattatttatatgttgtcttgtttaaaggaagaacacaaaaatgccctgctaaagggattctgtttggctgcaggcagcaagagggaaaaacacagagcatattttgcagaaaatgatttattagaagtcagaactatgacacgaagccaagcagggcactctaggactgaatttgctgtgctgccttcatacgctccttgctctttcttttctggtagctgtgactcacacagctcatggagagtatcattccctaagag

SEQ ID NO: 32511 - DNA, 371 bp, Homo sapiens
tacgactactatagggcgaattggagctccaccgcggtggcggccgcccgggcaggtactaggggttaagatgtcaacatatggatttaggggggacacaattcagcccatgacagaaggtggcagagtatacctaaggcaggaggtagaaggagggcaaggagggcctctctgagatgacaatgagctgagatctgaatgaaaagagggagctagccacgcaaatgtctaggagagcattccaggcacaggaacaacaggtgctcaccccgaggtgaggacatggctcaggactacttggcatactccatcttcaacgatagtaagaatgggatgggatgatgggaaaaagggagatgttagtcaaaatg

SEQ ID NO: 32512 - DNA, 374 bp, Homo sapiens
gtaatacgactactatagggcgaattggagctccaccgcggtggcggccgaggtacctgcctataggccatatcatacttgacagcaagaagtatcttcatggctaagtaacttcattgtggggcaaatgaaaataggaggactccaaaaaagcccttgccattaacaacctatgccattactgctacaaacttttacaacctaggccactgaggaaaacaaagttactgccaacattaaatactgttgataaagctgaacaaagactataccatttcacttatctggaaacagagttactacacccttctcaactagcacactaaggaccaagtgcaggtgaaagcctctatgaaagtgactgtagaaaaatg

SEQ ID NO: 32513 - DNA, 400 bp, Homo sapiens
gcgtaatacgactcactatagggcgaattggagctccaccgcggtggcggccgcccgggcaggtacacaaagaaaaataaggcagaggaaggggatggtgactgagaggggaaagggtcaagattctctcaggaggtgctacttaaggagagacgagaataaaatgagggtgtgaaccatgaggatattttggggagaaggcagaggaaacaacaagtgcaaagttcccaaggcaggcacacacttgatctgctctaagaacagcaaaaggatggatggagcagggtgagcagaaggtgtggaaagctagatcacctgaggccatgataaggacttcagcattaattctgaggaaggtggagagccccagagggcactagcaaagaagtgacatgtttta

SEQ ID NO: 32514 - DNA, 587 bp, Homo sapiens
  misc_feature 209, 313: n = A,T,C or G
actactatagggcgaattgtgccctctagatgcttgctccagctagatgcatgctcgagcggtcgccagcgtagatggatatctgcagacttcgccctttcgagcggccgcccgggcaggtacgcggggtgacacacacacacacacagcacctgcacgcagatgcacacatctctagtcaaatgaggggctctcagctttttgatagngggctttttgatacgtgtataaccaatactttattctcactgtagtcaaggactcattgcaattcagaaatgagaagctgatccggaactccactacagctcanagaaattctcgaatgttctcacctattaacagttattaaaatggaagaagctggggatgaaattgtgagcaatgccatctcctacgctctatacaaagccttcagcaccagtgagcaagacaaggataactggaatgggcagctgaagcttctgctggagtggaaccagctggacttagccaatgatgagattttcaccaatgaccgccgatgggagtctgccgaccttcaagaagtcatgtttacggctctcataaaggacagacccaagttt

SEQ ID NO: 32515 - DNA, 645 bp, Homo sapiens
  misc_feature 604, 605, 619: n = A,T,C or G
tacgactcactatagggcgaattggagctccaccgcggtggcggccgcccgggcaggtacgcggggtagaactgaaagtatattctgattcggtgtgtgtataaggaaatatacaccagtatatgcattaaaacgtcaagaagagctgggcacagtgtcacatgcctgtaaacccagctattcaggaggctgaggtgggaggatcggttgaggccaggagtttgaggctgcagtgagctatgattgcacagctgcactccagcctgtgtgacagagactctgtctcaaaaaataattatttgcctcttctctaatttatttcattaatatatttttattgtaaagatttttttacctccttgtttaaatttgttctcagaaattattttaatgctactgtaaataagattgttttcttaataatcagtttgctttaagtgtatggaaccataacttaaacttgtatgttaattttatattttgctaatttactgaatgtatttattaatttaaacaggttttagtgtacctcggccgctctagaactagtggatcccccgggctgcaggaattcgatatcaagcttatcgataccgtcgacctnnagggggggcccggnacccagcttttgttccctttagtgag

SEQ ID NO: 32516 - DNA, 384 bp, Homo sapiens
gtaatacgactcactatagggcgaattggagctccaccgcggtggcggccgcccgggcaggtaccgactcctcagaaactggcatgccaaatcaaaatgggtctggttcaatcctccctaatggcaatgtaaacccctctaactaatcccacttctcctaattatctttttctccttacgaacctaaaaatctcaccatttctattagcctgaaaataacatccctctgttcttctcttcctccttcagcactggatctcacttacaataggttttatttaataattatcttccttacactttctgtctcaccagtttccccttaaactgatttacctgctacacaaaattattcttattgggcttatgtgccttttcctccac

SEQ ID NO: 32517 - DNA, 398 bp, Homo sapiens
gtaatacgactcactatagggcgaattggagctccaccgcggtggcggccgcccgggcaggtacaatgaggatacaatgtgtagagcacagcatactgaatggcagggaagtgaacagccaggtcactgtgcacaatcatcaaattcttactcagaagtgcaaagacagttggagatagcgcccacatccctattagtgagtttttggcatttccaattgtagtcagggcactgaggtcaaatttaactacaaattttgcattgtctacattgaacacatgattcttaaaagcctcatgttttatttcagaacaggactcaggaagctgcagactgtgcaggaggttgtttagggcacaagtcatttctcccaatattaacttataggcagtctccaa

SEQ ID NO: 32518 - DNA, 646 bp, Homo sapiens
acgactcactatagggcgaattggagctccaccgcggtggcggccgcccgggcaggtacgcgggggactctttccagacctttgataaaggggctgctcaaaaaagccacgaccttgggcccctgctaaaaccatggctttaagtaaggagggagcagatatataaaaaccttatccctctttctaatctcttatgtcctgtgagtgtcacccattgagtaaacccaagtggaagtcagcaggaaagtagctgggatgatgcagtctttacagggtctctctgtcacccaggctgaagtgaaatggtgtgatctcggctcactgcaacctctgcctcctgggttcaagtgattctccagcctcagcctcccaaatagataccagtaaagatgtcatctggccaatttgtgtgaaaaaaagagaataattctcatccaaaccgcctgtctctggaaataagaaaagctctgagggtctccaaagttaccagaggaaggctgaattttatggcgattgataatatttccaagcttatgaagaaaaaatatcattagtcttttccatggtagaaaagagtaaagcctgtaacaaaaaaagtgatacagtggatgggatgatgagacccttgaaataagcaaggatggac

SEQ ID NO: 32519 - DNA, 595 bp, Homo sapiens
gcgtatacgactactatagggcgaattggagctccaccgcggtggcggccgaggtactttaggcactaactgtcagcatgtggtataaagttagacgttaagagaaattcctgtgctcctagctgcttcatcatacagtgatgaaagcagaaagcacaaacacagggtcaaagtggagaccggaatcacaggtgtgcatcccaacccaccatgactggcaaaccagcagtgggttcaagggcactgctggcctcttcctctcctttcatacaatgaggagcaacagaaacactgagtcagcgctggtcagggccgaggacacagctcatctacccaaccgtgcccaaaatacagttggtatcacaggcaggtgacatcatgcaggggctttttaactcaagtgagcaaacacgaatgagctgcaaataccccaaatggacaaacgcgcttcccagtggccctgtgtgtgtgctggcgtgtgggcaaacacccatacactctggaggtagatgtggggtataggtacctgcccgggcggccgctctagaactagtggatcccccgggctgcaggaattcgatatcaagcttatcga

SEQ ID NO: 32520 - DNA, 522 bp, Homo sapiens
tacgactcactatagggcgaattggagctccaccgcggtggcggccgcccgggcaggtacgattccttagtgtgggagttcctggaactggaggttgttcactttcctcattatccttctttaaaagggagccaaaatctataccagattttaggaactcagtgtaagtccccttctgcaccattttaccctaaaataaaaataaagaatttcagagagatacatgtgcaggtgataatgttaacctaatctaattctaatccagaaaaagtaactgatcttaagttatgattatacttaggtccggaatcctagttgacaaatctaatacaattcaacttgatacacaactgagtgtttctgttctcagccagactctgtgttaggtcctgaagaatatttttaaaatggtaatagtgtgttacaaatggcgattattatcaacaaatgttggtgaccgtattggtagtcttattacagaacatgaaaactgtgataaaccttatgcaataagattgaagg

SEQ ID NO: 32521 - DNA, 428 bp, Homo sapiens
cgactcactatagggcgaattggagctccaccgcggtggcggccgcccgggcaggtacgggggacatcaatgcagagtccctctgtgaatttacaacacccaacacccatgagttcagtccttaagaaggaaaattgagcaagtatttaattggttggacattgcataaaagaggtccatatccaggctaactctagaaattttattctcaaacttagttggcctctttttcttctgtcagaggaccattcttagtggcactggggaaatcttggcacccagaagaattcaactgcgctcactgcaaaaatacaatggcctacattggatttgtagaggagaaaggagccctgtattgtgagctgtgctatgagaaattctttgcccctgaatgtggtcgatgccaaaggaagatccttggaagagac

SEQ ID NO: 32522 - DNA, 510 bp, Homo sapiens
ctactatagtgcgaattggagctccaccgcggtggcggccgaggtacaattttactgcaatttcctttgaactttcttgccactgtttggaatcttaaaaattcattagccttctcctctctgacataaagctactcttcatcagagatgagttcctatgcatgtcctttgttccttcaatagctaattaatgtgcttgaggatacttcagtggaaaaaaaggtttaaatatgcaaattactaataaatgtgtaaccttatgtaacttgtgttacatcaagtaacaagctaatctagtttgtttcactggactaggcttgtgctccctacttcagtattttgatgctttccttgatctttgtttcacaaaatgttgtgaattttggtatcattcaaaacaaatgacatttattaggtttcattttgaaacgatgtacctgcccgggcggccgctctagaactagtggatcccccgggctgcaggaattcgatatcaagcttatcgatacc

SEQ ID NO: 32523 - DNA, 385 bp, Homo sapiens
gactactatagggcgaattggagctccaccgcggtggcggccgaggtacgttgaaatattaggggcaggttcccccaatatctggcgcccaacgtgattttctttttcctaagtgcatgtgggaacccgattccctttggtaggtgcggagaaatgttcatcggcccagtccacagaaatgcttgtttggctccccaacgattggtgagttgtctgtgtattctccggggtaactatgggtcacgcagagtctaaacattatgcttatctctgctatattaaattcctgttaaaatgggggagttcgggttcccatggaaaatatggtcaccctattcaggggcagtggaagaacactgtccttggtttcctgaaaagggaacgt

SEQ ID NO: 32524 - DNA, 369 bp, Homo sapiens
ctactatagggcgaattggagctccaccgcggtggcggccgcccgggcaggtaccacttgttctaccccctgtgaagagctgaatactcgttcatggctttcatccaaaatcaaattaatggtctggtcaaaacctttcagtgttcccacaatcattctcccatctgatgtaataacggcaacagttcctgataactgaatcaaagaaagtgttccttagggaatgcaaattgaaaacagactctggcaagggaatgatttgaatttttagaataaatatgacaactaggtataagtattcaacacagccactaagttcactacataaaaacgttaaaagtttcttcgacgccaaggcaggaggatcac

SEQ ID NO: 32525 - DNA, 413 bp, Homo sapiens
actactatagggcgaattggagctccaccgcggtggcggccgcccgggcaggtacttttttttttttttttttttttgcccctggtaaaagtcagaacctgggatgaccagaaagtaacaggacagatttctcccagcaaatcagtctccacaaccaaatgaatattgttctccaaggagtcaagctatagactcacaatgacaacgtggccatggctcaaaacactctctgaaattacaaaattgctttctgagccaatttaaaagtcacatgattgaatccaagctattttactttaaatggtccttttgctttgcacctgagacctcgcttggccacagacgtcattcgctggactccctgggcactaaatgagtgtctagcatccttaaggctgctcaaacacagcccc

SEQ ID NO: 32526 - DNA, 253 bp, Homo sapiens
ctaacgactactatagggcgaattggagctccaccgcggtggcggccgcccgggcaggtacgcgggtaatgacagtgcccttttgggtcagtaatgtggcttttcctctcttctctcggctcctcacctcaccctacccaccccctctctcgacgctcagtgctcgccaaacccggagtcatcagtgtgatgggaacctaagcgtgggtggccaacatcatatacctcttgaagaagaaggagtcagccatcg

SEQ ID NO: 32527 - DNA, 452 bp, Homo sapiens
cgcggcggcggccgaggtaccccagccaggcgcacgatgtcgtgtaagcagggtatccttgtgccagcatttgcttctctgtgaaaacacagcgccgtcaacattttgcactttccagggcccttcggaattggaagtgcctgtagctaagctgtttcccctggagagtccagctgttctcctgatccggccctgcacacacacacccagccacaaattactaggatgtcaaacccaggtgatcaggatactctcatggactgccctgctcccccagggctctccctacagtgtaatcctaaagccaaacttcctttcagcagtggctgaagcaaactctgcagtcagaggtcatacccagcaggcttcaccatgcagacttgaatgttgatttgagggcctagctgctcagcacagggcatttgggagacaatgtgtacctgcccgggcgg

SEQ ID NO: 32528 - DNA, 312 bp, Homo sapiens
atagggcgaattggagctccaccgcggtggcggccgcccgggcaggtaccttagtcttgaggacttatcagcctgatggctctcatgaccagcacgcagttatgcagagctcagcactcagatcagagccacctctaggaaccacatggctgagagcagacacagacaggctccgcagcccctgacacagtcccatggctgggtttacttaagacaacagctacacacagaacgatgtcaagccccattctcccatgtttttcttacctaaggtaatgatggcatgtgctctaatcacagagggcatgacag

SEQ ID NO: 32529 - DNA, 269 bp, Homo sapiens
ctatagggcgaattggagctccaccgcggtggcggccgaggtacataccataggttaagtaggcgcctgatattaggaagatcaataattcatctaagtgctgtatgaaacagcatctacaaaagttgctttattcaacaaactttgagggaaccgtggtacatcaccctgctgagggacatccaggacaaggtcaccacactctacaaaggcagtcaactacatgacacattccgcttctgcctggtcaccaacttgacgatggactt

SEQ ID NO: 32530 - DNA, 514 bp, Homo sapiens
tatagggcgtattggagctccaccgcggtggcggccgaggttctctccaaagccctcaggctggaatgtttaagttgcccgaacgggaaagatggcggcctgccccatcttttctctcagagttttatcttgtttcatggaacttaatttttagcctgttgattttactgtctacattagacttgttgagaaagattctgtaatcttttaggttagacaaatgagaattcattgtcttctgtaaataaacctgttcatgtcttgttctctggaaagaagtctctttcagctctctgactttggtcacaatcatgtagagcagtagccagtctacaatgatgtaattgaatttccatttccagtgtttcgtcgttgtgtcttacattgtccagttcagaactgagcattttattctcagttgtcaacatgctaagctgtccactgtacctgcccgggcggccgctctagaactagtggatcccccgggctgcggaattcgtatcaagcttatcga

SEQ ID NO: 32531 - DNA, 634 bp, Homo sapiens
cgcgcgtaatacgactcactatagggcgaattggagctccaccgcggtggcggccgaggtacaaagtccctgaggcaaaagcatgcttgctgtgttctaggaaaagcaaggaagacagcatgtctatagcagtgggaggtggaaggataataaacagtaggtgaggttagaggggaccaaatcatgtattttcatcagaggttcccaaccttggctgcacattggatttattctaaggagcttttaaaaaataccaatgactgggtcccagcctagagtgattaaatcagaatctctggaggtagacttgagaatctgatgtttgcaagtttcctaggcaagtcaaggctgaggaagactgctgcaggccattgtaagagccaggcgttgatctcattcaacctttccctcagctcttctagagacagccagcattctcttatggcacaaatacagcctttcaccctcacagaaagacacaggacaacaaattcaataaattaattcactggcatggatgattttctcagactaattgtttccagtttgataggagacaattaaaggctggaaggcactggatgcctgatgatgaagtggactttcaaactggggcactactgaaacgatggga

SEQ ID NO: 32532 - DNA, 418 bp, Homo sapiens
  misc_feature 67, 123: n = A,T,C or G
ggccgaggtacttggatcaaatttctactttaattggtcacggtatcattatgaatattaattttgngcggaaatgacccagataaaatcactgttcctttcaacaagcaacaggttagacanagcctttatcaattctgggcatggcagatgtcttgccgattttgtgggaattattgacaatcgttaccccaaaacaaaaatcttccagtttttaaaattgactacttggattttacctaaagttaccaaacataagcctttaaaaaatgctctggcagtgtttactgatggttccagcaatggaaaagtggcttacaccgggccaaaagaatgagtcatcaaaactcagtatcacttgactcaaagagcagagttggttgccgtcattacagtgttaacaagattttaatcagtc

SEQ ID NO: 32533 - DNA, 435 bp, Homo sapiens
gtgcggaaatgacccagataaaatcactgttcctttcaacaggcaacaggttagacaagcctttatcaattctggcgctgcagatgtcttgccgattttgtgggaaatattgacaatcgttaccacaaaacaaaaatcttccagtttttaaaattgactacttggattttacctaaagttaccaaacataagcctttaaaaaatgctctggcagtgtttactgatggttccagcaatggaaaagtggcttacaccgggccaaaagaatgagtcatcaaaactcagtatcacttgactcaaagagcagagttggttgccgtcattacagcgctaacaagattttaatcagtctattaacattgtatcagattctgcatatgtagtacaggctacaaaggatattgagagagccctaatcaaatacattatggatga

SEQ ID NO: 32534 - DNA, 516 bp, Homo sapiens
ctcactatagggcgaattggagctccaccgcggtggcggccgaggtacctttcattggattgtccatggtgcatcgctttagcaagcggcgttactctccactgcccgtcatcttggccaatatctatctgctggttcctcctgtgctcaacccaattgtctatggagtgaagacaaaggagattcacgcgcatccttcgacttttccatgtggccacacacgcttcagagccctaggtgtcagtgatcaaacttcttttccattcagagtcctctgattcagattttaatgttaacattttggaagacagtattcagaaaaaaaatttccttaataaaaatacaactcagatccttcaaatatgaaactggttggggaatctccattttttcaatattattttcttctttggtttcttgctacatataattattaataccctgactaggttgtggttggagggttattacttttcattttaccatgcagtccaaatctaaactgcttctactgat

SEQ ID NO: 32535 - DNA, 445 bp, Homo sapiens
ggtgccggccgcccggcaggtactgtgttatggcgcagtgggtgacagttggccacatagttgtcaaaagccatggccagcagcactgtggattccatgccagataaggagtggatggcaaacatctgtagcagacaagcatcaaactggatggaggaattgaaccagaagatggccagcattttgggcatggatgaggtggagatgaggatgtcaatgcctgaaagcatgcaaagaaatatatacatgggctcatgcaggctgtgctcagtccgcacaatgtagatgattgtcaagttacctagcacagcaataaggtagagggagcacaatgggaaggccaaccagaactgagcctcttctaaaccagggaggcctattaagatgaagtatgtagcactggattcattgccattgggatccaccatcatgaagaagctgaact

SEQ ID NO: 32536 - DNA, 456 bp, Homo sapiens
ggtgccggccgcccggcaggtactttttggccacaagatccaccatcttttgtatgtgagtttattaacccttttgaagactgctgctaaccagaggaaggtaaccattcctccttatataaacacatatggctttgcagtctggaaatgctgttaccaagggttaaccatcaaaatcctcacttgctggccctccctccaccctctctttgcctgcagcaaggcagggaagagataggtggtaggggagggagaacaagactgtttagacccacaggccctttttaatggagattaagtgaccagattggtccttctccagttctctatttgttctatggtctcatttcttcctctcattatttttggtttcacaacgggaaacgttgatttcttggtgcaaggctggtttttgaaaattcgacacttactatccaatttttttgcgacgtcagc

SEQ ID NO: 32537 - DNA, 489 bp, Homo sapiens
ggcgaatggagttccaccgcggtggcggccgaggtacttttttttttttttttttttttttgaacctcaagggtatggtgtttaagaatagaggtagcagtttggtgccactgccttgatttgtgctaaggcacaagcaggttcacaaaccattgcttttgcaccacaagcagaatttcaaaatgataaaaaggcaaataatggcttagtatgaaaatagttttgacctcttgaaagaatcacctatctctaggatgtcatctttggcctgggtaaccataacaattttctaactactctccctgcattcacccttgcatccaaatccttccctatactgttttctggccgatttttctgggattcattacttgttatttaaaactcttcaaagctgtctaatttttctttgacatctcagttctttaattagcctataacgctgtacctgcccgggcggccgctctagaactagtggatcccccgggc

SEQ ID NO: 32538 - DNA, 338 bp, Homo sapiens
ggagattatttttttattgacgtgttaaaaaaaaatgctggtctgtcagtgaggcatgggtttgtaggggtagcacagaaactttcatcgttcatactagattactctgaaattggctctgtcccccacccagaacatcagtaaaactgaaagaaactcagtcagagcctgggatgatgaagatgatgatgagaatatcattcctttctctctatgtccatggagaatttagcaacttccatcgtgaagaaactgaactctttcattactttttctaagggaagacacagttcacaagatttattagcacaagaggaaattttatgtaatgttagagc

SEQ ID NO: 32539 - DNA, 503 bp, Homo sapiens
ctatagggcgaattggagctccaccgcggtggcggccgaggtacaagatatcgagcacaattgggtcagattaacagaagatttttccagcgccaattttctgggaggtggtccaaaggaagtcagtggggccagctctctccctcagacagctaacaggagcaaggcttgtcagcttctgaagctctgcaagtccaaggcttctgagctatttattctatacttactttgaaaacacaaaattgctccaacaggatggatatgttacggaacaattaggcataataggatgtgcatttctgtctactgagaaacaccaggtagaaaactgcaccaagctgaattgagcttcgtggtaatacacaaaaaatgcacacagctcagctcaacaagtgcactgagtcacaccaaacacatttgatgttacaactttccatccaattccagataaccttcctcccactgcttctcaactgctcaaaagcctaactctccaaacccat

SEQ ID NO: 32540 - DNA, 466 bp, Homo sapiens
tacgactcactatagggcgaattggagctccaccgcggtggcggccgcccgggcaggtacgcggggactctgatgagggctcagacttgataacgcccgtggtgccccatccctataggagctggtgagattgcagcctgctgccccccctccatcagccacagctattggatttcccacccagaatctttaggtaaatgaggtaagtcctgatttttaaaacttcttttgaatctggaatccaaacacctgagtggaaagagaagcctgctttaaactggacagatgaaactagaacagactcttggagacggctggcaggaagtgaagctcaccttacctgggcttacctcactgggtcaaatcagaattttattttggagggcgggttggctaccttggatattatctgtgaatttcctgcattgtctggacttctaatctctgtgaaattaaaagccccctc

SEQ ID NO: 32541 - DNA, 492 bp, Homo sapiens
accgcggtggcggccgaggtacacgcttgtcttattcagtctccatgttttagaatacttttttggttttcaggccgcagccttggttggggtcaatccagtacacaaaagagagaagagccccaagatctcagtgttgaggcagtctgatgcttacagtcaggatgataaggaagaaacaccaaaaaaacagaaggaacagtttggagatgcgggaataaaaccacgagagcgcagggtcctggaagccacctgctggagggttttccaggtggagggagctattggctgagtcagggagaggagccctgagcattggccatgggagttagtaatgcaaaaccattggtgctaatgagagggtagtgctgtggagtcaagtggaataagttaatagagaatgaaaggagagagattggagaccgtgggcagacattcacaactttttcatgttatctgacttgtaaagaaaggaaaaaaaaaaaaaaaaaa

SEQ ID NO: 32542 - DNA, 368 bp, Homo sapiens
  misc_feature 41, 42, 43, 44, 45, 46, 77, 79, 80, 85, 244, 245, 314, 315,340, 341: n = A,T,C or G
acacgcggtcgcggccgcccgggcaggtacttttttttttnnnnnnaacccccttttcggtttattttattgccccncnncctcngccttgccctaaatgttggcatgtcccatgcaatggtcttgagccctcctcattctcttatccacactctctccttaagcatccacatccagatcttctctgatgatgacctccccaggtggatatctctcagtccaaggccgtcttccctgtacccannactaacgtgcccactctcttcttattttaccagcgacctaccaagtattgcctttacaggcactctcannaacttaacattgtctaaaaccagannacttttttctggcccctggtacctcgg

SEQ ID NO: 32543 - DNA, 427 bp, Homo sapiens
agggcgaattggagctccaccgcggtggcggccgaggtactcacctatctcctctacccaacttgtgttttagatgagtccttttggatctttttccccataatggcctctctccttttgctttacagtgcaatcagggcagaataacagatatgttgagtaactaatttatatttctgaagatctccatagaactcttaagttctaagtcttcatagtctttgcaccttgccaagtttgctttcctttgggaattctgtcataaccacaaggttattccccagacatgcagtttggggaaattaacccggcagtagtaaacagactggattagaaaaggtggcagtcgtaataaggatattccaataaccggtgaaagctacagaagggatcttgagctaagatgatgacagttacaatagaagga

SEQ ID NO: 32544 - DNA, 507 bp, Homo sapiens
tatagggcgaattggagctccaccgcggtggcggccgaggtacgcggggcttctgggaatctccacaccctgaagacacagtgagttagcaccaccaccaggaattggcctttcagctctgtgcctgtctccagtcaggctggaataagtctcctcatatttgcaagctcggccctcccctggaatctaaagcctcctcagccttctgagtcagcctgaaaggaacaggccgaactgctgtatgggctctgtaagtaaaactgttttgttcaatgaaaatgcttgactctagatgaattggactttctcacccacagggagtaatttcctcacaatgtgcagaattagattagatgttggtatggtgggctgaggaggacggtagaatttcagaattatttattcccaggaaatacgtagagaatgggtattttcgttctgcctgatataggttagataacttgtttttagtcaaatggttaatcagtgtgctgatatatttatcac

SEQ ID NO: 32545 - DNA, 477 bp, Homo sapiens
  misc_feature 362, 363: n = A,T,C or G
tacgactcactatagggcgaattggagctccaccgcggtggcggccgaggtacatctacctaaaggactattatgtggaataatacatactaatgaagtattacatgatttaaagactacaataaaaccaaacatgcttataacattaagaaaaacaataaagatacatgattgaaaccaagttgaaaaatagcatatgccttggaggaaatgtgctcaaattactaatgatttagtgttgtccctactttctctctcttttttctttctttttttttattatgggttagctgtcacatacaacttttttttttttgagatgggggtctcgcttctgtcaccaggctggagttgcagtggcnngcgatctcggctcactgcaacctccacatcccatgtttggaagtaattcttctgcctcagcctcccgagtagctgggactgagggaacgtgccaccatgactggctaattttct

SEQ ID NO: 32546 - DNA, 449 bp, Homo sapiens
ggcgaattttagctccaccgccgtggcggccgcccgggcagttacgcggggctctcaacgcggtgtgtaaggtagcctgttacagtgctggattcataaaagggcctttatggtttgtgaaagaatatctgtgtgcttagggaggaaactttttgatctgcagaaaagccagaagacatctaggacatccataaaaattcatcagagagcattttactactgagctgcaaagggaaaaacttaaaatggatatgaaaagtgaagaaagtgatcataggagaaaaccatttcagatgacaagagcacctcaaaggcagcagcctcaaggagcagccatggccccagacttgtcgcacggatgcagaaaacttaatggaggaggctgaggtcagaagggaagagtttttaaaaaataaaaaggggagctaatatgtgaggaaaaaaaaaaa

SEQ ID NO: 32547 - DNA, 481 bp, Homo sapiens
  misc_feature 431: n = A,T,C or G
acactactatagggcgaattggagctccaccgcggtggcggccgcccgggcaggtacttcaaaaatattatctgtttccttccaaccttcatggtttcagatggaaaatctgctgtggtttacattattgtttttctgtaagaaatgtgccattttctctgtttgctttcaagatttttaattttttttttttcatttccagaaattgaatgtatttgggtgtattctatttagggtttgctctgtttcttgaatatttaggtttatgtcctccatctaatttgggaaggttgaagtcattattttttaatagtttttttagtcccacattctatctcctcgtcttctatatctcctgtgattatgaatgttagctcttttattattgttctaaagtttcctgaaatgctgttaaattttttttatcgggntttcttcttcttgctcagacagtaaatttctgttggcatgttttcagatt

SEQ ID NO: 32548 - DNA, 346 bp, Homo sapiens
gcgaattggagctccaccgcgagggcgggccgaggtactctttttttttttttttttagttcatctactgcaggaatatttggctcttcaagtagactttaacatcatttttgggggcccccctctctccaaaaataattcttttgagattttcactgggttcattttttagtttttaatttcaaattttaaatgtttttctaaatgtgattctaaattagctttttatattcattactgaaacacatttctacattaacatgaaattttattaacatattgagactcacgaaaagaattaagcaccttattgatttttcctcttttctttttttaaaaacagggc

SEQ ID NO: 32549 - DNA, 442 bp, Homo sapiens
ggcgaattggagctccaccgcggggggggggggccgggcaggtacttttttttttttttttacactgtagtgagatagttggtcctggatgaggggcctgttgaaaatctgataaaaatatgcacaatatacaatacgtgcaaatacataatatttgcctataatttcagaattgaacatgaacatctgaagtcaatttgtggattcccacttcagatctcctccatgtccaatacttgttggtagcccctaatgctcaaaacattcattgacgtgcccagagatctatgggcagctggtggtgtatttttttaaagctggaatattagactgaggatacagcattgagcttcaggtgctgggaagagaatgagtataaatgctctgggaaaaacaaaagatggtacctcggccgctctagaactagtggatcccccgggct

SEQ ID NO: 32550 - DNA, 461 bp, Homo sapiens
attggagctccaccgcggtggcggccgaggtacgttgaaatatatggggcaagttcccccattatctggcgcccaacgtggttttctttgtcctaggtgcatgtggggacccgattccctttggtaggtgcggagaaatgttcatcggtccagtccacagaaatgcttgttcggctccccgacgattggtgagttgtctgtgtattgtccggggtaactatgggtcacgcagagtctaaacattatgcttatctctgctatattaaattcctgttaaaatgggggagttcgggttcccatggaaaatatggtcaccctattcagggcagtggaagaacactgtccttggtttcctgaaaagggaacgttagatgtggaactatgggatcatgttggtgcaaaattccgagaactggtcccaacaggaaattatgttcctgtcactgtttggggtgattggg

SEQ ID NO: 32551 - DNA, 480 bp, Homo sapiens
tacgactcactatagggcgaattggagctccaccgcgggggcggccgaggtacgcggggggagtggagattatggttggattagcttcaatttttttttctttgtgggggatgcaatttgcaaaagaaagttcttataagagtgagactttgttcatttgaagaatgatggagctggcttttctgtcaatttctgcagctttttcttattctccaaaaaccagaaagtggtaatatttgttagtgatcaaatcaaagatgatatttaaaaacacatgttgacaggaggacctagaggcattatgagtattagaaagtctgcaaattaggttgtttgctttgtggtgaggtgtgaaacaggatatgcatttttgaaaatgtatctttggatttgctgaactgggctcaaatgtggtcaaattgagagagcttatgatgcccgttttactgcattctttttagatgggttcccccaaaatcc

SEQ ID NO: 32552 - DNA, 471 bp, Homo sapiens
acgactcactatagggcgaattggagctccaccgcggtggcggccgcccgggcaggtactattcaaaggacagagagttaaagaataaaaaacaaacagagctgcagaaaaaatgcgggaaattcgtatgttaaaatctaatttccaatgtgatggttttaagagagagggcctttgggagagaattataagggggattagtgcccttataaaaggtgcccttataaaagtggcaaagaacctagaagaattgtttgtgtcctactgttttgtaaaaaagaatttgtaaggaatgatatagaatatttggctgaatacatttctttcttttattttttgagacaggagtctcactctgtcacccaggctggagtgcagtggcgcaatctcggctcactgcaacctctgcctcccaggttcatgcaattctgtctcagcctccagagtagttgagattacaggcacgtgcca

SEQ ID NO: 32553 - DNA, 385 bp, Homo sapiens
attggagctccaccgcggtggcggccgaggtacgcgggacacatcaatgcagagtccctctgtgaatttacaacacccaacacccatgagttcagtccttaagaaggaaaattgagcaagtatttaattggttggacattgcataaaagaggtccatatccaggctaactctagaaattttattctcaaacttagttggcctctttttcttctgtcagaggaccattcttagtggcactggggaaatcttggcacccagaagaattcaactgcgctcactgcaaaaatacaatggcctacattggatttgtagaggagaaaggagccctgaattgtgagctgtgctatgaaaaagtattcgcccctgaatgtggtcgatgccaaa

SEQ ID NO: 32554 - DNA, 455 bp, Homo sapiens
atatcggcgaattgtagctccaccgcggtggcggccgaggtacaaccaatctggagcttacttaggattttctagtgcagtagttctaaaatatggtccctggatcagtagtgttagcatcccctgggattttgtgttttaacaagttctctatatgattctgatgcacactaaagcttcagaatcactgctgtagtataaactgtgatggttctcagccttccccactgctggcttaggtgtttgctttcttgggcctactaagtcagttagttctttatctgtttcctttccagtttccaaaatttttgttgctatcttttcctctccagttttcctcatatgtgtgaatttatatctttttttaaaaaaatctctttattgtataagaggccaggtatggtggctcacgcctgtggtcccagcactttgggaggccgaggtgggcggatcac

SEQ ID NO: 32555 - DNA, 479 bp, Homo sapiens
tactatacggcgaattggagctccaccgcggtggcggccgcccgggcaggtacactggaggctggagcctgcagatggcatggctctgcggctcaccttgctgcagttggcggtggtgacagagactgcagcttgactgtagtggtggttaccaggagctctgccactgcatgtccactagtgacgggttcgctccaccaccccagctgggtagccgctgctctcacataaggggtccaattaaaattgccaggaataaattcccccggactttgacttctcaagagctaagaaggtttgctgagtattctggcatgatgtttggtgatcaaacaactgctggccaaaaatgatgagtatttccccctcttgctgaagatgtgctccatacaatagtccatcacattcatcattcatcagtctggaagtgtgcagccaatcatattatctattacatggtgttctgggctttttttttt

SEQ ID NO: 32556 - DNA, 527 bp, Homo sapiens
tatagggcgaattggagctccaccgcggtggcggccgcccgggcaggtacagggcacatgcacagagctttgaagaacatacacaaacctgttgaatcaagttactttcctcatcctcagagactttgacaattcagagctcacagatggcagggggaattctcaggcttcccttcctcctgattgacactttttaaaggaagtgatgtggaagttgttctagaagttagatggacagtgggagcacattcgtgagtggggcttgggagagcccaaaagtggcactttgattttaggctgggcaggcagaagtctcacagtaaaatatatttcactagacgtccaaaccaacactgcattgtagtaacctcttctgaagtaactggttaaattaataactggtcccataagtcagggtcaagccacatttataacccattcgggccggccatgaagggttctgactcgacattggtatttaaatgctgttactttccccatgcttagtagcacttgagactttattt

SEQ ID NO: 32557 - DNA, 465 bp, Homo sapiens
ttggagctccaccgcggtggcggccgaggtacgcgggacatcaatgcagagtccctctgttatatttacaacacccaacacccatgagttcagtccttaagaaggaaaattgagcaagtatttaattggttggacattgcataaaagaggtccatatccaggctaactctagaaattttattctcaaacttagttggcctctttttcttctgtcagaggaccattcttagtggcactggggaaatcttggcacccggaagaattcaactgcgctcactgcaaaaatacaatggcctacattggatttgtagaggagaaaggagccctgaattgtgagctgtgctatgagaaattctttgcccctgaatgtggtcgaagccaaaggaagatccttggagaagtcatcaatgcattgaaacaaacttggcatggttcctgtttcgtgtgtgaaacctgtggaaagcc

SEQ ID NO: 32558 - DNA, 392 bp, Homo sapiens
acgcccgttctctaccttgtgtgatggtgtttgttcgtcttcccagaggccggtctcttccttatgtgatggtgtttgttctgtcttcccagaggctgttctctgccttgtgtgatggtgtttgttctgtcttcccagaggctgtggccctgagaaagatcacgtctacctgcagctgcaccacctgcctccggagcagctggccacgcgcctgcccggcatttcagagacagccatgatcttcgctggtgtggacgtcacgaaggagccgatccctgtcctccccaccgtgcattataacatgggcgggattcccaccaactacaaggggcaggtcctgaagcacgtgaatggccaggatcagattgtgcccgggctgtacgcctgtgggg

SEQ ID NO: 32559 - DNA, 475 bp, Homo sapiens
aaggcgaatcggagctccaccgcgggggcggccgggcaggtacggaaaaacaaaataaggtgatttataaagcgaagcaggtgtccaggtagattgtttctgcttttggaaagccatttgctaaactcatccatcaaaccatcaatgtctcccaggataagaaacttttgaactatatgataatgatcttgattctcttccagaactctctttttgtcagaagcttgaagttcctcaaaaaccttttctaacgtccaggttgctcccagatattctctagggagtttcttcagtttcatccaaagttgctactgatgtctagatctcttgttctaccaaactgtccaccatcacccggaagtaggcccaaaactgtgtcttcccaggtgtcacagacaggaagcagctacttaagattcccacttaaagctgcataaattgctctctcgtatctattaaaaagctcatcttctgc

SEQ ID NO: 32560 - DNA, 474 bp, Homo sapiens
tatagggttaattggagctccaccgcggtggcggccgaggtacaaataaatgttaacgaaattacattattttcacactatctttttccacgattaatatgtatttccttcaattttcagtgaagacttttctaataatactattattaccttcaccccatttcctgtcctcatctactatttagatcacctacatcaaagaaataaaaataggctgggcccagtggcccatacctgtaatcccagcactttgggaggccgagataggcagatcacaaggtcaggagttcgaaaccagccctgccaacatgatgaaaccccatctctactaaaaatacaaaaattagctgggtgtggtggcgcgcgcctatagttccagctactcgggaggctgaggaagaagaatcgcttgaacccgggaggcggaggctgcagtgagccgagatcgcaccactgcactccagcctgggcaac

SEQ ID NO: 32561 - DNA, 467 bp, Homo sapiens
tatagggcgaattggagctccaccgcggtggcggccgaggtacatggattcttcacttgttaagagttatttataccaaatcctacaggggattgtgttttgtcactctagaggagttcttcacagagacttaaaacctcaaaatctcttgattgatgacaaaggaacaattaaactggctgattttggccttgccagagcttttggaatacctatcagagtatatacacatgaggtagtaacactctggtacatggattcttcacttgttaagagttatttataccaaatcctacaggggattgtgttttgtcactctagaagagttcttcacagagacttaaaacctcaaaatctcttgattgatgacaaaggaacaattaaactggctgattttggccttgccagagcttttggaatacctatcagagtatatacacacgaggtagtaacactctggtacctgc

SEQ ID NO: 32562 - DNA, 250 bp, Homo sapiens
tacgactcactatagggcgaattggagctccaccgcggtggcggccgaggtactgctccctgcacgatccagtcagcccccgcccggctggttatgtaacaaacaagtctgtgtctgtgtggagtgttgcaggacgagtggaaatgactgtttccaagttcatggcaattcagaaggtccttcagccagactggttccagtgcctctccgatggaggaagtatcttgtaagggaagcaaactttcataaa

SEQ ID NO: 32563 - DNA, 429 bp, Homo sapiens
gtatacactactatagggcgaattggagctccaccgcggtggcggccgaggtacgcggggacatcaatgcagagtccctctgtgaatttacaacacccaacacccatgagttcagtccttaagaaggaaaattgagcaagtatttaattggttggacattgcataaaagaggtccatatccaggctaactctagaaattttattctcaaacttagttggccactttttcttctgtcagaggaccattcttagcggcactggggaaatcttggcacccagaagaattcaactgcgctcactgcaaaaatacaatggcctacattggatttgtagaggagaaaggagccctgtattgtgagctgtgctatgagaaattctttgcccctgaatgtggtcgatgccaaagggagatccttggagaagtcatca

SEQ ID NO: 32564 - DNA, 406 bp, Homo sapiens
gctcaccgcggtggcggccgcccgggcatgtacttgatggattcatcattacagataactcctcgttggaagggggtatgccttgaagtaagaattgcaaaaggcaatccagctagcaaaagggaataaatgaaaatatcattaaaaaagaaatatcaaaactaattaatggcaataattatcccacagactctgtctaaaaatgcatttgccatgaaaataaatgagagcacatgtaaaaaaggaaatgcagcaatgcatgcaacagaagttagaaagattacagttttaagataaagatgttttgtctacagcaaacaaagtgttcaaatcctctattaaccaatttaacaaagagttatctttcctttgtttctgtccaaacacactaaatggattttggaaa

SEQ ID NO: 32565 - DNA, 481 bp, Homo sapiens
gggcgaattgtagctccaccgcggtggcggccgcccgggcaggtacaaaagttaatagcatgttagagttttgatggcagttgttgtttatgaataagcttcattccatcctaataccttaaaataactaatttgctttcctttccaggtattcctgatgacagtctgcctctatcttacagtaagttgtttttcgaattctatgggcctattatctaatagataacttagccattttgatatttgttaccaaagcctgcttaacccataaagttttctggttcctcttgttctctgtagtgatgtttctagatagatgcccactgatatatgccccttttttctcagatagatgcccactgatctgcccagggtcagacgaatgcttgtcagttgtagctttccaggattctgctccaatgaggaggaaacatcctgccttacccctgttttagcctgggaaccagtaattgtgaactca

SEQ ID NO: 32566 - DNA, 479 bp, Homo sapiens
agggcgaattggagctccaccgcggtggcggccgaggtactttgcagtgtatgatggacacggtggacctgcagcagctgatttctgtcatacccacatggagaaatgtattatggatttgcttcctaaggagaagaacttggaaactttgttgaccttggcttttctagaaatagataaagccttttcgagtcatgcccgcctgtctgctgatgcaactcttctgacctctgggactactgcaacagtagccctattgcgagatggtattgaactggttgtagccagtgttggggacagccgggctattttgtgtagaaaaggaaaacccatgaagctgaccattgaccatactccagaaagaaaagatgaaaaagaaaggatcaagaaatggggtggttttgtagcttggaatagtttggggcagcctcacgtaaatggcaggcttgcaatgacaagaagtattggagatttggacc

SEQ ID NO: 32567 - DNA, 478 bp, Homo sapiens
  misc_feature 158: n = A,T,C or G
ttggagctccaccgcggtggcggccaggtcactattcctccacatgtctgtcccctttgctccaagactgcagaggacagtcttgcacatcatctttgtaaaaacagtctttattttactcagaaatttcttattgagtcctgctacatacatgctangtgttagggtttaaaaagaatgaaaataaagcctgtcagggatcgcttttctagaacacctgcccaagcagagacttaaatattgaggctagctagattaaaagtggtagagggcaagaaagggtgacagcatgccacgcagcagcaagagcaggagcgaggcctgaaagagtgaaagtatttgcctgcaatagaaggaggagtgagtagggcattaagagccactcagtaatgccagagaaagggcacacagggaaaagggctaaagatgtagaatagggcagaagtcagattatgaaagccttatgtgtaattttaag

SEQ ID NO: 32568 - DNA, 450 bp, Homo sapiens
ctactatagggcgaattggagctccaccgcggtggcggccgaggtattcaaagttcaaatggagcccagcaagccagatctcctttactcctaagttccctcaacagtttctcctctgctttagagactgccttgaaaatattcttgtcctgctgttgtgttttggctttggaatgatgtgatgcagctcaatgggtcctacccccaagttgatcagagtaagaaacagctgggaaagtcagtgcaaattcaagttcatcatcctccttacagggattctgattcagagggctcaggtggggcctggaatgtgtttgttaacatgactcaaatgtgcagtcagtttggggacccgctgataccatcgaccttatagtttatgggatgattctgttttgctgataaagaaactgaggcatagacagtctgtaacttgcccaagttcccctt

SEQ ID NO: 32569 - DNA, 489 bp, Homo sapiens
agggcgaattggagctccaccgcggtggcggccgaggtacactagccgcacttcaggtgcccagtgtccacactgactagtggtgacggcgttggacagtgcagatacagaacatttctgtcatcacagaaagttcctttggacagagccatgttaagtgatgttatcacaagatggacagaaacattcctgtttgatttatttttcagacccagtttgtggagaaaaataatgatgctttacatatgtctcttgaatccttaatatgtgaatccagagataagtttatacgggaattatttgaatcatccacaaataacaacaaagatactaaacaaaaagcaggaaaacttagcttcatcagcgtgggaaacaagtttaagacacagttaaatttgcttctggataacttttggaagtacctgcccgggcggccgctctaaactaggtggatcccccgggctgcaagaattcgatatcaagcttatc

SEQ ID NO: 32570 - DNA, 430 bp, Homo sapiens
accgccgtggcggccgcccgggcttgtacaaagatgctatcaccggataaatggggatctggtgatcctaattttgtcaccagctttgaaatctttagctaggcatttcagccctataaaaatccattttctcacttgtaaaaagaagagttgaagttatgtttttccagggcttttttctctgacaaaccgaattgcagaacaattttatgactcaaccgacgtagcagagtccagagagagtttgaaaaaacaccttacaaaacttataactgaagttctccctccaagggcacttaattttttcaagtgaaagcatgcatgcagattcatccagctgttaccctggaagaggacagagtaaatatactccattttatatgaagcccaaagtgtgattgttaaaaatccccatgcacaattagaaaac

SEQ ID NO: 32571 - DNA, 402 bp, Homo sapiens
tatagggcttattggagctccaccgcggtggcggccgaggtacggtattctgtgagctggggaagacagatacccttttattgggggcagggggaggatgtatcaaaggaccaattttcctggagatcctattacgtgaagggacttatactggacacatcatggagaaaatcagaaagaaggctgcttaataagacccactcctggatatggccactctcaattctcagtgtctttgggaagcaaggttcgccatccacttgtctaaacagatgatgacagcagaggtgctgcacaccttctccctgtgacttgtgaatgcctttcgtgctcccaaataaggaacctccttcactgctgtctgctcttgagctgtatttcattttgatagccattttgcag

SEQ ID NO: 32572 - DNA, 451 bp, Homo sapiens
tatagggctaattggagctccaccgcggtggcggccgaggtacgcgggggaactgggcgggtgtgatttcacgaggtacacagcgctgctctgcctcagagaaccggacacttcggccccctgagaccagttcacggacggtggcaaatatcacatctgctggtctctgagtcctgaaggaaatgagtgggtgtgtaaggtcaggatacaaacaggaatgctcgacatcaacagagaacaatggtggccagtgttagaattgaggccaacctcagacacatggccacagaagacaaagtggcacagctttgtccttcactaaaccactcacctagctgtctgccccttgtctcctagaagagagtcctttgacatctccattaaaaaaaattaaatacaatataaaaggttcctgcccgggcggccgttctagaactagtggatccccccg

SEQ ID NO: 32573 - DNA, 459 bp, Homo sapiens
tactatagggcgaattggagctccaccgcggtggcggccgcccgggcaggtacatgttcagctcgatttttttgttcaaatatttgccatgtaaggttgggtgactttatggatgcagaacccatgtatatggagagccaaccgtaatctgtaatacatataaaaaatagtgaatagagcagccatgtgtgtaactgtataccacacagaaaagggcctatgaatttacgcttaaacagagagagacagacagtaaacatcaaaacctgggtaattaaataatataatcatgtctcaccttcagctaacttgggtcatttaacttagaaaggtatgatagataaccaacctgaaaagtgtcagcaactcgatgtaggaactcaattacaaagagaggtggcacttcggtctgtatgacagatacaaagaagagcttatcccggtagatactgatgaggt

SEQ ID NO: 32574 - DNA, 472 bp, Homo sapiens
gggcgaattggagctccaccgcggtggcggccgcccgggcaggtacagcccacagaactgtgagccttttcaatcccttttctttttcaattacccactctcatgtatatctttatagcagtgtgagaacagattaatacactcctcctcagaaagcattcaatttagctgtgtctaaagtatgccaggtgttctagggtgttatcttagccaataattcttcctcttcagcaagatctatttgcctatgacagcttgacctacatttcctaccatacttgtcagtaacaagtagcccataacatctgaatggacttcattgaaatcacagagggtctttagttctctactttattagcaggcattcgggaaacacatcaactttctaatttaataaggtgcctgttgctttgaaaaactgctcaaaagaagataggagaggcttacttaaagatatcactataggcatggc

SEQ ID NO: 32575 - DNA, 326 bp, Homo sapiens
actatagggcgaatcggagctccaccgcggtggcggccgaggtacaacatcatcaaggcagaaacagttttccaacaggttatattttcttaatggtagtcatgaagtcataaataaaaaaatggaatcatttagtatgttctcttgatttgactttttcttttttttggagacagagtctcactctgtcgcccaggctggagtgcaagtgacgcgatctaggctcactgcaacctctgcctcccaggttcaagcaaactctcctgcctcaagcctcctgagtagcctgggattatggggcacccaccaccacaccccagctaatt

SEQ ID NO: 32576 - DNA, 459 bp, Homo sapiens
ctcactatagggcgaattggagctccaccgcggtggcggccgaggtacgcggggcctgtggaggtgagtgaagggtctgctgctgaaatttgggggcaaataaccggagtaggtttgttcctgtgccttggcgagtcgccggtgcgtatcggagtctctgccagccattgatttctacgggtttcaagaagagggagaacaggatggaggagatgttgggctgatggtgtttggtcccctgacacccggagaacggctgcccgggttatcccagttaaattcctgggcctgaacggagtgaaacgatgtttttgttcgtgtgcagttgtccatgaggcagtgcttccttcatccgtttcctcccagtccataccttccttggcttgtctgaccagtctctttcctcagcttttctcccccagccattgcataaaagtcttacgtgtggggtttctcttt

SEQ ID NO: 32577 - DNA, 400 bp, Homo sapiens
tatagggcgaattggagctccaccgcggtggcggccgcccgggcaggtacatgcttcagtcagggctcacatcttcaaattcagtgtctgttctgtagagaaaccttaataatgtgatatatgtgacagcaaagagttataagatatgaatatgttaattttagtagatacttccgaaaagtatttcaaactggttgtgccactataaactctgaccattattaggcaagaattggctttttttttgtttcttttgagacagtcttgctctgtcacccagactggcatgcagtggaatgatcacggctccctgcagccttgacctcccaggctcaagaaatccttctgcctcaaaccctcaaaagctgggactattggcatgcaacaacacgcctggcta

SEQ ID NO: 32578 - DNA, 385 bp, Homo sapiens
agggcgaattggagctccaccgcggtggcggccgcacgggcaggtacactggaggctggagcctgcagatggcatggctctgcggctcaccttgctgcagttggtggtggtgacagagactgcagcttgactgtagtggtaagaggatgcctgtggcagccagatgataggggccttatagggtgggccagtgcattgagggtgacagcagaggtggttgtattggcatcagtgctagtggtggcagcagcagcaagtctgggaaaagaaaagatgaaaaagaaaaattcacaactgccagatcttctcctgtctggaagtgttgtgtgtgctaccagtacctcggccgctctagaactagtggatcccccgggctgcaggaatt

SEQ ID NO: 32579 - DNA, 534 bp, Homo sapiens
actactatagggcgaattggagctccaccgcggtggcggccgcccgggcaggtatttcacaaagtttgattactttggtgggcacagtaaagataaaagtaactttctagagcagtgctgctcaaactttcatgtgcatacgaaacagctgggatcttgttaaaatgcagctttagattcagtagggaggagcttaagattctacattcctaacaagctcccagggactgccgaggccacactgccagtccaaggaccacactgtgcatcttaacaaggttctggagaatcttcccctccaggcaaataaagctagaaagtgtgctgggtgcacatgaatgcctcactgaagtgggacgtggggacagcctccagtcactccaggccaggaagactgtagctgcgcccactggacaagaatgggacaaggctactctgagccccattttgagtaggtgacctcatgggtatctctaagactaactgacctatcagaacaagccaggatgaatcccagctcctcctgttagcact

SEQ ID NO: 32580 - DNA, 433 bp, Homo sapiens
ctactatagggcgaattggagctccaccgcggtggcggccgaggtacacacaacattctggaatggcggcacgttttggttatgagagagttaaatgtcattacactggaacatagtgatgctaaataaaaggagacatcattctacttcaaatgcacctacaactttaaaatggcatctgacaccaacctggattcttcggatgctgacgattgcctctgacaccctctcaatggctgaggggaagaagagggtaaccgccagccgcacagccccatacagcgtcactgccacgaacacgcggctggctgtgatcacactgccgaggagcacgtaggtggtgaaggtcacaaacacgatgattttgcttgcactgaaaaatgaagccaaattcatccctctgaggcaggaacttctcagaatcttggaaatc

SEQ ID NO: 32581 - DNA, 521 bp, Homo sapiens
tacgactcactatagggcgaattggagctccaccgcggtggcggccgcccgggcaggtacgaaaaaatcaggctactaagcccactgttaatatagacgcagaccaattgttaggaacaggtccaaattggagcaccattaaccaacaatcagtgatgcagaatgaggctattgaacaagtaagggctatttgcctcagggcctggggaaaaattcaggacccaggaacagctttccctattaattcaattagacaaggctctaaagagccatatcctgactttgtggcaagattacaagatgctgctcaaaagtctattacagatgacaatgcccgaaaagttattgtagaattaatggcctatgaaaatgcaaatccagaatgtcagtcggccataaagccattaaaaggaaaagttccagcaggagttgatgtaattacagaatatgtgaaggcttgtgatgggattggaggagctatgcataaagcaatgctaatggctcaagcaatgagggggctc

SEQ ID NO: 32582 - DNA, 496 bp, Homo sapiens
ggcgaattggagctccaccgcggtggcggccgaggtacggggaggaacagagtccctcctttacttctccattagaaagaatgagatggcaagacaatgaaacaggcaaagtgaacagagatgcaagacaaaattcaggtgagagagccagagcatcactcagccattcctgacatgtaaaacaggcaactagaaatttgcagaaaggaagcgaagtctccataaagatgtttttaaagtgagcttgaagtatttggagacaattcagtgttacataaaatctgcaaatctctggataaagaagcagagatcccagcatgggacaaatggagcctcaaaagtgggaagaagacagagaagaccagggcagaatgcatctcttcctttctcttggctttcctggataaggactgcatcattcctgtggaaggacaggccatcagctccgaaacactgtatgtattttccagtatatactgctagctgtgtgatgttg

SEQ ID NO: 32583 - DNA, 512 bp, Homo sapiens
cactactatagggcgaattggagctccaccgcggtggccgtggtcgcggccgaggtacttcttggatcttacataggcctgaaagtttagttgcactactttaggaatctctttttatgcatttgttcaattaaaaggcaacaaagacaaatccttaagaaaataccagcatttttcctacatatgaaatcaagggtccttgtctgacgatggattttactagcgtggtcgcggccgaggtacgcggggggactgacaacccggatagctcaaggtccaaaaaaccggttttcaaacattataagttccaggctttgcaagtctttattctctggggtaatatccagtctttctgttattgtctcttaaaattctcttccatggcccacattaagggagtttgcagagagtgagggaggcaaaacttgaaaagggcctgcaacactttaaaccttctcaggttcacccacatgaaacagctgtgctgagtgtgctgccggtgcccggggagc

SEQ ID NO: 32584 - DNA, 433 bp, Homo sapiens
gggcgaattggagctccaccgcggtggcggccgcccgggcaggtacttttttttttttttttttgctgtgtgtgggatcacatccagagttgttgctgctgatctgggcacctgccctggatgtgcaaaagtggtggtgggaagctgagtggaagtctgctctgcctttttgcttgtgggatctggtcttgaaaaagtaactccagagctccttgccattgcagctggtgtgactgcacttgtaatgtgccctatagagaagggcaactgtgaggtagctgggctgatcatggtttccaaagtgagttcctggggagttgtggccccctgaggagctgaggtagtggctgtggctgatgaacggagatctcccagtgtcccagtcaagagtggacagagaatcaaacagaaaagtggacaggggcgtatttgg

SEQ ID NO: 32585 - DNA, 470 bp, Homo sapiens
ctatagggcgaattggagctccaccgcggtggcggccgcccgggcaggtacgcgggtgtgacagaaatggagtcatcagtttatcaaccaacaagcagctccagcacccagcacttctacctgaatttcaccatcaccaacctaccatattcccaggacaaagcccagccaggcaccaccaattaccagaggaacaaaaggaatattgaggatgcgctcaaccaactcttccgaaacagcagcatcaagagttatttttctgactgtcaagtttcaacattcaggtctgtccccaacaggcaccacaccggggtggactccctgtgtaacttctcgccactggctcggagagtagacagagttgccatctatgaggaatttctgcggatgacccggaatggtacctcggccgctctagaactagtggatcccccgggctgcaggaattcgatatcaagcttatcgatacc

SEQ ID NO: 32586 - DNA, 432 bp, Homo sapiens
ggcgaattggagctccaccgcggtggcggccgcccgggcaggtactaatatgatccacagttttcagctgtggaggatctgagaaacagaggggtcaaatgacttgactagagtcacacagctggaatgtggagccaggatatgaacacaaacagtttgaatccagaagctttactcataaccatgattctatgtcatttccagaaatggtggccggcacataatctccctttgcacataacagatttcacacaagcctttcttgccaagaatcaggttcacttctgtaatgctcttgttagtagaaaagataatttcaatctgacaattctatatttcccaacgttcatgggccctttcaaccatcttatcacccagctaatcaagaatcagtgttcccagcaatttctcgaaacgtcatgggcaggatgg

SEQ ID NO: 32587 - DNA, 361 bp, Homo sapiens
actatagggctaattggagctccaccgcggtggcggccgaggtaccccacaaataatgcaaaaatatatatgtaaattggatgatgaggctgattaaaaagcttgggctcagtggtcagacttgggcaagtggcctaatgtcgtcccctagtaagtggacttagagtggggtctccaaatacggagaatctttgggttgcagcaggagctttcactgactgctgcgtgagttgctcgttctttttccttcatcaggtgcgtagtttctctgaaaagcatcacccaggtcagaatgaaaggaaactctctgtgcagaccgttgtatgtgggacctttgaagacagtcaaatagtgttcaatt

SEQ ID NO: 32588 - DNA, 435 bp, Homo sapiens
ctactatagggcgaattggagctccaccgcggtggcggccgcccgggcaggtactacaactgattactctgtttgaggaattcatgaatttgtctcagtcaaacaagatgaagaggaagtctccccgcctagcgccttgcctccaggtttgggtagtcgggccctggagagaaaagattcaggtgagcgcaagcccagagaaggcatcctgacctcatcctaatacaatcactaatgagctcatttcttgaagctgtattgattctaatccttgtcttattcagattgtagtttttacggcaatctttcattacgtttcctcttacaagaaaactaatgtattgagaaacaattaattttgcatgatacacacgcattcaaggatctagccaaaaataccccaggggttggtctatcatttttaatatttagcaa

SEQ ID NO: 32589 - DNA, 408 bp, Homo sapiens
actactatagggtcaattggagctccaccgcggtggcggccgaggtacggggacatcaatgcagagtccctttgtgaatttacaacacccaacacccatgagttcagtccttaagaaggaaaattgagcaagtatttaattggttggacattgcataaaagaggtccatatccaggctaactctagaaattttattctcaaacttagttggcctctttttcttctgtcagaggaccattcttagtggcactggggaaatcttggcacccagaagaattcaactgcgctcactgcaaaaatgcaatggcctacattggatttgtagaggagaaaggagccctgtattgtgagctgtgctatgagaaattctttgcccctgaatgtggtcgatgccaaaggaagatcctt

SEQ ID NO: 32590 - DNA, 499 bp, Homo sapiens
actactatagggcgaattgggtgccgctccccccctggaggtcgacggcgtccatgtaccatgagatcaattaccctaaacagtgacagaaacataattttctgttgggaccagttctcggaattttgcaccaacatgatcccatagttccacatctaacgttcccttttcaggaaaccaaggacagtgttcttccactgccctgaatagggtgaccatattttccatgggaacccgaactcccccattttaacaggaatttcatatatcccaaataagcatactgtctaaactctgtgtgacccatagttaccccggacaatacacagacaactcaccaatcgtcggggagccgaacaagcatttctgtggactggaccgatgaacatttctccgcacctaccaaagggaatcgggttcccacatgcacttaggaaaaagaaaaccacgttgggcgccagatattgggggaacctgcccctaatatttcaacgtacct

SEQ ID NO: 32591 - DNA, 436 bp, Homo sapiens
agggcgaattggagctccaccgcggtggcggccgcccgggcaggtactgcagacaccatttagttttgcattgaccttactagcaattattattttatactggctttgcccttttcattctgttttttggcactagtctgttttccatcagaatattagacctgcttacttctaaaatatttttgtgagtttgaacacatggatagattttaatggcatttttactctgcattattttgctttctaacacatttaatattcacagtaaccctatgagacagatattattatttccattttagagctaagaaatataagatatggagaggtaaacttcccaccaaatgagaggcagagctaggattcacaccaatatgagcctggcctcaggcccatgctctgaatcatcatatcacacagcattttttcctggacc

SEQ ID NO: 32592 - DNA, 513 bp, Homo sapiens
tatagggcgaattggagctccaccgcggtggcggccgaggtacatctacattttcctacactcttaaatatatagtagctgcagaatctgtttgtgtatacttaatagaggtaattttttcttcccctagttatttctttcccattgaatcaagttacatacaagtttctaaccattcctgttataggcttgttggtgattgacttcattttaataatctttttatttcattgcctttcacccagttttttaaactcatgaaattccacacccctttccatctctattttccttccttaaatcaatactttactataagcacctcttatatgtgatcctttgaccatagtcatcttggtttttgattagtcccttccctgcctttcatttactgtgttatcaactagaggtcttgtaggaactggagtaaactttacttgaagaaacattcagataagcagttgtcttgagagggctcatcacagtggattcaaagatgaatcagtgaacata

SEQ ID NO: 32593 - DNA, 503 bp, Homo sapiens
actactatagggcgaattggagctccaccgcggtggcggccgaggtacactaggacttgactggaaaattttacaaaccaagaaagcaagggacttctgttcctcttacctcctagtctttctgtctcctagggaaagagaaaaattacaaagaagaaatctctctctctctccattttaaagcaaaaatagagtcgggtgtggtggtgcatgcagatactctggaggctgaggtggaaggattgcttgatctcaggaggtcgaggctgcagtgagccatgatcgtgccactgcactccagcctgggtgacagagcgagaccccatcttgaatgaatgagtgaacggaatgaatgaatgagtgaacggaatgaatgaatgaatcattctctgccttctgggtagtaaccctggtttttagcatgttgtgtacctgcccgggcggccgctctaaactaagtggatcccccgggctgcaggaattcgatatcaagcttatcgata

SEQ ID NO: 32594 - DNA, 445 bp, Homo sapiens
tatagggcgaattggagctccaccgcggtggcggccgaggtacgcggggacatcaatgcagagtccctctgtgaatttacaacacccaacacccatgagttcagtccttaagaaggaaaattgagcaagtatttaattggttggacattgcataaaagaggtccatatccaggctaactctagaaattttattctcaaacttagttggcctctttttcttctgtcagaggaccattcttagtggcactggggaaatcttggcacccagaagaattcaactgcgctcactgcaaaaatacaatggcctacattggatttgtagaggagaaaggagccctgtattgtgagctgtgctatgagaaattctttgcccctgaatgtggtcgatgccaaaggaagatccttggagaagtcatcaatgcgttgaaacaaacttggcatgttt

SEQ ID NO: 32595 - DNA, 500 bp, Homo sapiens
cgactactatagggcgaattggagctccaccgcggtggcggccgcccgggcaggtaccagttgtaaaattaccaggaaccgccatgcctcaagatcgccctgttttctggcttcatcaatgactgcatgcagtgcaccaccctgtccactacgtgatgctgtagaattaagtctcacagtgggcggctgaggatacagcgccgcgtcctgtgttgctggtgaattagacgccatcgctgtgggttgctggtatggtgccgtgctatttggcacaggacacaccgcttgaggtctgtattgaacctctgaaggaggccgatactgaagctcggttggcagccggtattgataaactaccagcggttgggtcttattttctaccggctgatattgtggatactgtatctgagttggcattgccgggatagagactctgtccctttctacttgattttctcttggggttttggcttgtctaacctgcgtttgagggtgtaatg

SEQ ID NO: 32596 - DNA, 398 bp, Homo sapiens
cactactatagggcgaattggagctccaccgcggtggcggccgaggtactttttttttttttttttgagatatgtgggattcataagggcatatttgtgactaccaagtcaatttctttaaaggatgttggtttactgaggttttctataactccatcgtcagtaaaatcttaagtattagaataatttacattaaaaatgcagcttgaaatttatgaaacagaagagcatactcattacttgtaatccagtaaaattctacttttgtgtagtttttaagctgaaattatcataaacatatagaaaaatgtatatgtatgattaaagttcaatacagcatttattataatgcaaataatttgaaaactatataaatatccaaaaataattgagattga

SEQ ID NO: 32597 - DNA, 397 bp, Homo sapiens
accgccgtggcggccgcccgggcatgtactttcttcttttttttttagatatattttgggctgatagaatttgacattgttcaactttaactttgtcctcattgaactttatcctgctaaggagctaaaaggtccatatgatcaaaaaggcagctctcaacccagcacgaaattctaggctcattcatttctgtttacctactgccaaataagtcagacaactgcatacttgctttacagacgaatagaggacagcatgttgttcaataattgaagtttaaaaagtatatgtaagatacatccacaagaagaaagatagagggagcataccggttgtcttctaagtataggctccctgcccatggagatcacacagtagaattatgatgggtgcctt

SEQ ID NO: 32598 - DNA, 432 bp, Homo sapiens
accgcggcggcggccgaggtaccatttgtaaaattaccaggaaccgccattccttaagatcgccctgttttctggcttcatcaatgactgcatgcagtgcaccaccctgtccactacgtgatgctgtaggattaagtctcacagtgggcggctgaggatacagcgccgcgtcctgtgttgctggtgaattagacgccatcgctgtgggttgctggtatggtgccgtgctatttggcacaggacacaccgcttgaggtctgtattgaacctctgaaggaggccgatactgaagctcggttggcagccggtattgataaactaccagcggttgggtcttattttctaccggctgatattggggatactgtatctgagttggcattgccgggatagagactctgtccctttctacttgattttctttgggggttt

SEQ ID NO: 32599 - DNA, 452 bp, Homo sapiens
tatagggcgaattggagctccaccgcggtggcggccgaggtactcaccagaccctatatccctagagttgctccctccattccaacacccttcccagcatattccaactaccgccccaactctgagctctgtcttctcagctcagtaggaccaccactgctgaacttcgttcttcctctgagtcagtcctataagtgattccaggtagacagctggaatcattctagggctcaccttgtttcccatttttaggaattccaatcctatactacctaccttccatccaatgtttgaacgtttttcatatggattttttcctctttttctagttgttttggcaacagagctaatccagtacctgcccgggcggccgctctagaactagtggatcccccgggctgcaggaattcgatatcaagcttatcgataccgtcgacctcgaggggggcccg

SEQ ID NO: 32600 - DNA, 412 bp, Homo sapiens
tatttagggcgaattggagctccaccgcggtggcggccgaggtacactagccacacttcaggtgcccagtgtccacactgactagtggtgactgcgttgggcagtgcagatacagaacatttctgtcatcacagaaagttcctttggacagagccatgttaagtgatgttatcacaagatggacagaaacattcctgtttgatttatttttcagacccagtttgtggagaaaaataatgatgctttacatatgtctcttgaatccttaatatgtgaatccagagataagtttatacgggaattatttgaatcatccacaaataacaacaaagatactaaacaaaaagcaggaaaacttagcttcatcagcgtgggaaacaagtttaagacacagttaaatttgcttctggat

SEQ ID NO: 32601 - DNA, 420 bp, Homo sapiens
ccgcggtggcggccgcccgggcaggtacgcggggctcacaaggtctcattgtttaaaagtgtgtagcacctcccccttcgctctgtctctcctgctgtcttgtgaagaagggacttgcttcctctttgccttccaccatgattgtaagtttcctgaggcctcccagccatgcttcctctgaagcctgcggaacttcctgagcctcctacctctgctggaagcccagatcccattgtgtgccaacctagtaccggtgcccatcaccaacgccaccctggaccagatcactggcaagtggttttatatcgcatcggcctttcgaaacgaggagtacctcggccgctctagaactagtggatcccccgggctgcaggaattcgatatcaagcttatcgataccgtcgacctcgagggggggcc

SEQ ID NO: 32602 - DNA, 434 bp, Homo sapiens
tcactatagggcgaattggagctccaccgcggtggcggccgaggtacagatctgggaactaaatattaaaaatgagtgtggctggatatatggagaatgtcgggcccagaaggaaccgtatagatcagatattacaacagctttgttttgagggttagaaatatgaaatgatttggttatgaacgcacagtttaggcagcagggccagaatcctgaccctctgccccgtggttatctcctccccagcttggcttgcctcatgtcatcacagtattccattttgtttgttgcatgtctttgtgaagccatcaagattttctcgtctgtttttctttcattggtaatgcttactttgtgacttcatttcaaatctgtaatcccgttcaaataaatatccacaacaggatctgttttcctgcccattctttaaggaa

SEQ ID NO: 32603 - DNA, 479 bp, Homo sapiens
attggagctccaccgcggtggcgggccggggtccgcggggacacacacagcacctgcacgcagatgcacacatctctagtcaaatgaggctctcagctttttgataggggctttttgatacgtgtataaccaatactttattctcactgtagtcaaggactcattgcaattcagaaatgagaagctgatccggaactccactacagctcaaagaaattctcgaatgttctcacctattaacagttattaaaatggaagaagctggggatgaaattgtgagcaatgccatctcctacgctctatacaaagccttcagcaccagtgagcaagacaaggataactggaatgggcagctgaagcttctgctggagtggaaccagctggacttagccaatgatgagattttcaccaatgaccgccgatgggagtctgctgaccttcaaaaagtcatgtttacggctctcataaaggacagaccc

SEQ ID NO: 32604 - DNA, 398 bp, Homo sapiens
gcgaattggagctccaccgcggtggcggccgcccgggcaggtacttaggaagaccacagctagatggacaaacagcattgggaggccttagccctgctcctctcaattccatcctgtagagaacaggagtcaggagccgctggcgggagacagcatgtcacccaggactctgccggtgcagaatatgaacaatgccatgttcttgcagaaaacgcttagcccgagtttcataggaggtaatcaccagacagctgcagaatgtagaacactgagtaggacagctgacctgtctccttcacatagtccatgtcaccacaaatcacaccaacaaaaaggagaggatttatttttgggttccaaaaaagttaaaagataatggaacctgcatttcttttagt

SEQ ID NO: 32605 - DNA, 484 bp, Homo sapiens
ttggagctccaccgcggtggcggccgaggtacgcgggggttgtatgtgggtcggcattcttgcatgatgggagtggccacctgctttcatattctgaagtcagagtgttccagacagaagaaatagcaagtgccgagaagttggcatcagaaaaacagaggggagatttgtgtggctgcagccgagggagaccaggaagatctgcatggtgggaaggacctgatgatacagaggtctgtaggccatgggaatgggtttggaattttattcaaagagctatgggaagtgactagaaggtttaaagttggggaagaggttttgtgtttctgttatatttgtgttttatacaaattactctggttgctgtgttgataggacagcaaaagggtaggagcagggacaccagttaagttattgcaatggttaaggtgagaggtggtgggcttgggcctaggcctttttggagtgaaccagctatttgctt

SEQ ID NO: 32606 - DNA, 389 bp, Homo sapiens
agggcgaattggagctccaccgcggtggcggccgaggtacatgcatgagtgaacataaagaggatgggattagagaagttctgtagcgaagtcctaaaatgattaaatgctgagaaacatgcaaaaaagcttcttagggcagctatcactgataggtatggtttagtgtgaatcctaataaacagtcgaatggattcaggactggacataaaatgataaaagggaccagaaaaagagaaccaagttttttgcacatagcatttattatcattagggtgtaaacatcatgataaattattgtaaatgataatagcacttttgaggccttgccatgtgccagccactctaccagccctttatctgacacgagagattccacttttgatcac

SEQ ID NO: 32607 - DNA, 486 bp, Homo sapiens
acgactcactataggttgaattggagctccaccgcggtggcggccgaggtacaaaaatgaggcaggtgtatttttttccatctaacaggggatgaccacatgaaaagaactggtggcctgtgtgtcccatggtcttacagggcagtggtggaaggtggcccggtcatccactttctggggaggcagaaccagaagcaccagttggacaactgcatatgatttcatgtatttggaaataaaaactcatggatagtgactggaagtggatcagtggttacccataaattcattgccaagtgcaaagtccagacgaatatttcctaggttttcttccaggatttttatagtcagaggatgtaatcttatgccaacgggtcttaataatcaaatgacttcacagtgagaatcattactctgaaaaattgatttttgttagaatgatgggaaatttaaatatttgaaagtgaaaacacatgccaccttttt

SEQ ID NO: 32608 - DNA, 392 bp, Homo sapiens
ttggagctccaccgcggtggcggccgaggtactggaacagggataagttcttggattaggtgccaacatacctataaaagctgatttttgagtaaattattgattctaacatatgtaatggatttggtgtgataattttctgatctttaactataagtgactttttattctccaccagaaaagataaatgactgagaatgtaagtctgcgctctgattaacacaatggagaaacggaaaaactatctctgttaaaaactgattcctgtcattcttctgatatcaaataagaggaaggaaaataaacttttttgtgtgtagatagaaaaacatacctgaggccaggtgcagtggatcacgcctgtaatcccagcactttgggaggccaaggcg

SEQ ID NO: 32609 - DNA, 413 bp, Homo sapiens
atcggagctccaccgcggtggcggccgaggtacgatttacctttacacctcaaagttttttagatgtgagcagcgctggattatggcaatttaccttataataactcaccatagttggctgttataagaataaatattgttcttctaagatttttaattagttgcttcagttactacatttttttctatttttttttttaaatagagatgaggttttgctatgttgcccaggctggtctcctggactcaagcaatctcccacttcaggctaccaaagtgctgggatttacaggcatgagccacctctcccagtctcagttattattttaataaatgagactgaacgtcctcttataaggctcactcccttgttcctactacatttgctctggttaagtatctctttaaattct

SEQ ID NO: 32610 - DNA, 406 bp, Homo sapiens
attggagctccaccgcggtggcggccgaggtacattggtggaacaattcagtatgatgtattttctgtggtttgaatgtattccctccaaaattccagtattgtcaatgtgatagtaataaagaatggggcgtttaagaggtgattagtctgtgaaggctcctctctctccttactggaagtaagaaccttatgaaagaggtgccacgcaacattccactagcttgctctcctgtccgtatgccatgagaaaacatgaagttcctcctctctggaggatgcagccctcaccagacaaccaaacctgctggtgccttgaatcttggactttctggagccttgaatctggaaagttcccagcttccaaagctgtgaggaaataaatttccattcattataaattattc

SEQ ID NO: 32611 - DNA, 406 bp, Homo sapiens
ctactatagggcgaattggagctccaccgcggtggcggccgaggtactatggggaatgtggaagtggaaagtagtgtggagttttggaaagatatttctgcctaggagagtagttgggcatgaggacaggactaagaaagagtgagtgaaggaaaaggtgtgaagggagcagaaaagtggaggggggactcgaggtttggagacttgtccattaattcctacaacagacacctgggaggactgggtggttcctgaaaaattaggtaaagcagagtaggttgcctggtattaatttaaaaatatactggcctacctgccaccatcagggttacccttggcttggatgaggcaaaggttagttgccagggtgttctgttccagggcaccatcattcttcaatggcaag

SEQ ID NO: 32612 - DNA, 410 bp, Homo sapiens
  misc_feature 268, 325: n = A,T,C or G
agggcgaattggagctccaccgcggtggcggccgcccgggcaggtaccaaatgaagtgtgaagacaaggccatccaccactttatagagggtgtaaaaataaaccagaaatcaagggagaaagaaaagatgaaagacaaactgcaaaaaattgccaaaatgcgactttctaaaaatggagcagattctgaggctttgcatgtcttggcattccttcaggagctgaatgaaaaaatgcaacaagcagatgaagactctgagaggggttntggagtctggaagcctcatcccttcagcatcaagctggaatggggaatgaagaaagnagatgttggtgcccactaggctactgctgaaagggagctgaaattccttcaccaagttggtattcaaaatatgtaatgactggta

SEQ ID NO: 32613 - DNA, 412 bp, Homo sapiens
ggcgaattggagctccaccgcggtggcggccgcccgggcaggtacgcggggcagtctttatgggaaaaagtttgtgaaaatcagagaaacctgaacgtggaaaccaccagaatcagccactggaaggattatgtgaatgtaaggctagaagctattagagctgagtatcagaagatgcctgcatttcatcatgaagaataaaaacataatttggagatgctgaaaaagaaggggaaagaaatttttcatcgacttcatttaagtaaagccaaaatggctcacatgagggagattttaagaggaacgtatgcggagctgatgaaaatgtgccataaaccagatgtggagctacttcaggcttttggagacatattacacaggagtgagtccgtgctgctgcacatgccccaac

SEQ ID NO: 32614 - DNA, 408 bp, Homo sapiens
agggcgaattggagctccaccgcggtggcggccgcccgggcagttacatgctccttgctagtagtcctagtctttgaaccctcagagcccaggttccaaacatgattgaagccatcttgaatccatcaaaccaacccatctgccagatgagtacgcgggtcctatattccgttcaatgtaagctctatgagaccaagaacctgggcagttttattcaccataagtattccaagccctagtggttcctggcacattttgtattcacaataaatatttgttaagtcaatgaccagatgaatggcttttaaactcaagatagtttttttttggtttggtatttatttatttatttactttgacagacttttgctcttgttgcccggctggagtgcaattggggcgatcttg

SEQ ID NO: 32615 - DNA, 456 bp, Homo sapiens
agggcgaattggagctccaccgcggtggcggccgaggtacatctacctaaaggactattatgtggaataatacatactaatgaagtattacatgatttaaagactacaataaaaccaaacatgcttataacattaagaaaaacaataaagatacatgattgaaaccaagttgaaaaatagcatatgccttggaggaaatgtgctcaaattactaatgatttagtgttgtccctactttctctctctttttcctttctttttttttattatggttagctgtcacatacaactttttttttttgagatggggtctcgctctgtcaccaggctggagttgcagtgggcgccgatctcggctcactgcaacctccaatcccatgttgaaagtaattcttctgcctcacctcccgagtagctgggactaaaggaacgtgccaccatgactggctattttct

SEQ ID NO: 32616 - DNA, 308 bp, Homo sapiens
agggcgaattggagctccaccgcggtggcggccgaggtacgcgggggagttcagtccttaagaaggaaaattgagcaagtatttaattggttggacattgcataaaagaggtccatatccaggctaactctagaaattttattctcaaacttagttggcctctttttcttctgtcagaggaccattcttagtggcactggggaaatcttggcacccagaagaattcaactgcgctcactgcaaaaatacaatggcctacattggatttgtagaggagaaaggagccctgtattgtgagctgtgctatg

SEQ ID NO: 32617 - DNA, 631 bp, Homo sapiens
gactcactatagggcgaattggagctccaccgcggtggcggccgaggtactccagcctttccatgactttttggacagtggcgcttacctcctgaggatatgggtcgcctctgttgaccatctgcagcagagacacaatgggtgttcagccattaacactgggaaggccccgagagcctctgactatgtgctgacacagtgtgagccctggaacaaagccctccctttctgtctcctgcaccaatgatgatatggtctgagttcaatcaccaaacttccttagttccacttcttcatcagccaaagaaaaacaccgcagtcaatcatctctaaggtccctaagagggtggagaattccatgttccacgttattcatgggggactcacaagatctaactaaagaggatggttctctctccctcatccaatagatgaagaagacacagaaaagcttggcaggatgggaaacttctaccctggtggtcatgtgtgtagttgatttcacaacaggaactgaaacagtgctgcatggacaatgtacctgcccgggcggccgctctagaactagtggatcccccgggctgcaggaattcgatatcaagcttatcgataccgtcgacctcgagggggg

SEQ ID NO: 32618 - DNA, 614 bp, Homo sapiens
gcgaattggagctccaccgcggtggcggccgcccggcaggtacttcccctttatactcttctgtatatttgattttttttttttttaagacagagtcctggctctgtcgcccaggctggagtgcagcgacatagtctcagctcactgcagcatccgtggaggctgaaacaggagaatccatgaattttaaaaaatctaaacatgtaattttaaaacgggcttaagaagaatgataacagttttggtcttcttttttatcaaccatgcttttattttacttgaatctcgtgccaattgctttgtaatattaaagtaggatttacacaagtggaatttagaaaagatgataatctgtcaaatctgtcaataccaattagaatgtaatcaagaaattaggatagtggaggtttgagcacgtaaaggctcacccaaattcaaagccattacttgatgctgagaggggaatatttctgggaaggtaatttttaaaaaattaaagtcacaattttaaatttgtatattgtcctaataaaagaaatctcaactcatgggacaattttgaaattaaaacgctaattggtcctcattcagtgatgaacaagtcaaaacgtttc

SEQ ID NO: 32619 - DNA, 556 bp, Homo sapiens
  misc_feature 391: n = A,T,C or G
acgactactatagggcgaattgtagctccaccgcggtggcggccgaggtacgcgggataaaatagtatgatcaatcacaatgtccatctttagacagttggttaaataaattatctggtctttgaaaagaccgtgctgggcgcggtggttcttgcctgtaatcccagcactttgggaggctgaggcggcagatcacctgagatcgggagtttgagaccaagcctgaccaatatggagaaaccctgtctctactaagaatacaaaattagctgggcatggtggtgcatgcctgtaatcccagctacttgggaggccgaggcaggagaattgcttgaacccgggaggcagaggttgcagtgaggtgagatagcgccattgcactccagcctgngcaacaagagcaaaactctgtctcaaagaaaaaaaaaaatgatggagctccgaatgtgcttaagtggaaaagatatctattgaaatatgggtggttttttaaaacacaaaaattatagaatatgggatcccgtgtgtgtgtgtgtgtgtgtgtgtgtgtgtgtgt

SEQ ID NO: 32620 - DNA, 605 bp, Homo sapiens
gactactatagggcgaattggagctccaccgcggtggcggccgaggtacaaccaatctggagcttacttaggattttctagtgcagtagttctaaaatatggtccctggatcagtagtgttagcatcccctgggattttgtgttttaacaagttctctatatgattctgatgcacactaaagcttcagaatcactgctgtagtataaactgtgatggttctcagccttccccactgctggcttaggtgtttgctttcttgggtctactaagtcagttagttctttatctgtttcctttccagtttccaaaatttttgttgcaatcttttcctctccagttttcctcatatgtgtgaatttatatctttttttaaaaaaatctctttattgtataagagccactgcacccggccgctctagaactagtggatcccccgggctgcaggaattcgatatcaagcttatcgataccgtcgacctcgagggggggcccggtacccagcttttgttccctttagtgagggttaattgcgcgcttggcgtaatcatggtcatagctgtttcctgtgtgaaattggtatccgctcacaattccacacaacata

SEQ ID NO: 32621 - DNA, 501 bp, Homo sapiens
tccaccgcggtggcggccgcccgggcaggtacgcggcgaggggaggggagagcccgagcgctgaatttgttgctgggaaacccggggctaaggttgacaacaggctcgagattgtcctgggtcacataatgccagctgagcgtaaaaagccaacaagtttggaagaaaaagactctttaccaaacaacaaggaaaaagactgcagtgaaaggcggacagtgagcagcatggagaggccaaatgacgatatcaagctcactgccaagaatgaggtcagcaaggcccctgaagacaagaagaagagactggaagatgataagagaaaaaaggaagacaaggaacgcatgataaaagacgaataaaaggtgaaggcagaggaagaatcaaagaaaaaagaagaggaagaaaaaaaagaaacatcaggaggaagagagaaagaagcaagaagagcaggccaaacgtcagcaagaagaaaaagcagctgcttagatgaaagaaaaa

SEQ ID NO: 32622 - DNA, 532 bp, Homo sapiens
aggtacagatcctgtattgcccacccttctctattgctttgtccccgcgcgccctctgttttgcctaaatgggttccaggccatagccaccgactctcgctttgccttctggcctctcggcagtgcgcttcagcaccattgcgccaggtgacgctgctgaaaacagctgagtggccggcactagtgcagctggaagccaaggcccataattctcaggaatctgcactgtacccaggcgaaaagcccaagggctctccccacagcttcccaacatccgtctacagagtgtttaaatattagacttattaacctgtagagatggagagaatcaaagaaatcacaaggtatctctgagggaaaaagaagagcaccagcagtaaatcacttaagagtattgaaccagcaagccagggataggagaatggaatggaaactgacaggatgactgcagaggatggtacctcggccgctctaaaactagtggatcccccgggctgcaggaattcgatattcaagcttatcgataccgtcg

SEQ ID NO: 32623 - DNA, 520 bp, Homo sapiens
gcgaattggagctccaccgcggtggcggccgcccgggcaggtacagcaatgacttcagtaagccaggcatccttggatgtctccatgataataataattcccttaggaccaatttgtgcagggttgctggtaataatggcgctatttgcaactaggtgtacccgcgagaaagaaggacacttagatcctataactgcagggtggccgaatcaacttaccagcaccacccaaaaaggccatcccggcagattcacaaaggggacatcacattggtgcctaccataaatggcactctgcccatcagatctcatcacagatcgtctccatcttcatctactaccttagaaagagggcagatgggcagccggcagagtcacaacagtcaccagtcactcaacagtttggtgacaatctcatcaaaccacgtgccagagaatttctcattagaactcacccacgccactcctgctgttgagcaggtctctcagcttctttcaatgcttcaccaggggcaatatca

SEQ ID NO: 32624 - DNA, 558 bp, Homo sapiens
  misc_feature 164: n = A,T,C or G
gactactatagggcgaattggagctccaccgcggtggcggccgcccgggcaggtacaccactgtgcctgctttgaatcctttacgaagagaaaaaaaaattaaagaaagcctttagatttatccaatgtttactactgggattgcttaaagtgaggcccctccncaccagggggttaattcctgtgattgtgaaaggggctacttccaaggcatcttcatgcaggcagccccttgggagggcacctgagagctggtagagtctgaaattagggatgtgagcctcgtggttactgagtaaggtaaaattgcatccaccattgtttgtgataccttagggaattgcttggacctggtgacgagggctcctgttcaatagtggtgttggggagagagagagcagtgattatagaccgagagagtaggagttgaggtgaggtgaatgaggtgctgggggtgagaatgtcgcctttccccctgggttttggatcactaaattaaggctcttctggatgtttctctgggttggggctggagttcaatgaagtttatttttagct

SEQ ID NO: 32625 - DNA, 444 bp, Homo sapiens
  misc_feature 279: n = A,T,C or G
gtatacgactcactatagggcgaattggagctccaccgcggtggcggccgaggtacgaaaaaatcaggctactaagtccactgttaatatagacgcagaccaattgttaggaacaggtccaaattggagcaccattaaccaacaatcagtgatgcagaatgaggctattgaacaagtaagggctatttgcctcagggcctggggaaaaattcaggacccaggaacagctttccctattaattcaattagacaaggctctaaagagccatatcctgactntgtggcaagattacaagatgctgctcaaaagtctattacagatgacaatgcccgaaaagttattgtagaattaatggcctatgaaaatgcaaatccagaatgtcagtcggccataaagccattaaaaggaaaagttccagcaagagttgatgtaattacagaata

SEQ ID NO: 32626 - DNA, 513 bp, Homo sapiens
  misc_feature 222: n = A,T,C or G
gaattgtagctccaccgcggtggcggccgcccgggcaggtacgttgaaatattaggggcaggttcccccaatatctggcgcccaacgtggttttctttttcctaagtgcatgtgggaacccgattccctttggtaggtgcggagaaatgttcatcggtccagtccacagaaatgcttgttcggctccccgacgattggtgagttgtctgtgtattgtccggngtaactatgggtcacgcagagtctaaacattatgcttatctctgctatattaaattcctgttaaaatgggggagttcgggttcccatggaaaatatggtcaccctattcagggcagtggaagaacactgtccttggtttcctgaaaagggaacgttagatgtggaactatgggatcatgttggtgcaaaattccgagaactggtcccaacaggaaattatgttcctgtcactgtttggggtgattgggccttggtacctcggccgctctagaactagtggatcccccgggc

SEQ ID NO: 32627 - DNA, 379 bp, Homo sapiens
agggcgaattggagctccaccgcggtggcggccgaggtacaccatgaagtgataagtattaatcattcatttcaatatgtccaatggaccaaaaaaggggcagatgggtattaatgattcccaaaataaatatcccctgttttaaaatttggctaaagagtagctttgcattttcctggaaaagaggttggtgggaaaaaaaagataatatttgaacctgtacttaaatgggcggcatttcccaatgactgaattgtagtagaatctgttctcattggcacgacacaatcctctgtctgctggagtgagacaccatgaggggccgtgaaattcaaaaaggctgggaaccttggttgattgcggagtcagggagttattc

SEQ ID NO: 32628 - DNA, 397 bp, Homo sapiens
gcgtatacgactcactatagggcgaattggagctccacgcggtggcggccgaggtacgcgggacacacagcacctgcacgcagatgcacacatctctagtcaaatgaggctctcagctttttgataggggcttttcgatacgtgtataaccaatactttattctcactgtagtcaaggactcattgcaattcagaaatgagaagctgatccggaactccactacagctcaaagaaattctcgaatgttctcacctattaacagttattaaaatggaagaagctggggatgaaattgtgagcaatgccatctcctacgctctatacaaagccttcagcaccagtgagcaaggcaaggataactggaatgggcagctgaagcttctgctggagtggaac

SEQ ID NO: 32629 - DNA, 386 bp, Homo sapiens
gcgtaatacgactcactatagggcgaattggagctccacgcggtggcggccgaggtactttttttttttttttttctcaagattatggtataaagttttattttaaataacatacctattaacataccaccacatgggaccaaccttatcccagaaactatattcattactgaccctaacagcaaagctcaggaacttttatcatttattttatgtagtcactcattcatttattccctcattcagcaagcattcaaccaacaaggcacatggaatttactacttatcattaactaggctggcacttgggggtgggggttacaattatggtaaaataaggtaattttctataatgattcaaaatgtagggggagcaagaaagaatg

SEQ ID NO: 32630 - DNA, 398 bp, Homo sapiens
  misc_feature 361, 362, 364: n = A,T,C or G
gtatacgactcactatagggcgaattggagctccaccgcggtggcggccgcccgggcaggtactgcttttataatttcttcagataaggtcattttaaaatttaatccagtggttttcaactaggggacaattttggtccccagggaacatttggcagggctggagacatttttggttgtcatagcttgggggagagttgctactggcatccagtgggtaggccagaggtgctgctgaacatcccatagagcatagttcctcacagtgcagggttatcctgcccaaaatgccagtggtactatggagaagagaagtgacttgtgagtcctttgccaggggtaagtgggggggaggggggcnntntatctttatgaagtgttcattctaatgaccagtg

SEQ ID NO: 32631 - DNA, 400 bp, Homo sapiens
tatacgactcactatagggcgaattggagctccaccgcggtggcggccgcccgggcaggtacgcggggagaagaaatggcaagtgccgagaagctggcatcagaaaaacagaggggagatttgtgtggctgcagccgagggagaccaggaagatctgcatggtgggaaggacctgatgatacagaggtctgtaggccatgggaatgggtttggaattttattcaaagagctatgggaagtgactagaaggtttaaagttggggaagaggttttgtgtttctgttatatttgtgttttatacaaattactctagttgctgtgttgataggacagcagaagggtaggagcagggacaccagttaagttattgcaatggttaaggtgagaggtggtggctggg

SEQ ID NO: 32632 - DNA, 624 bp, Homo sapiens
  misc_feature 522, 535, 538: n = A,T,C or G
actcactatagggcgaattggagctccaccgcggtggcggccgaggtacgcggggtttgaccacatatctgggcaccgtggcccagccaagttgacatattaaattaacccttgtagtccctttttaaacttacacccattgcaatttaggtcgctgctatggagcaagccacagaacctggcctttaactcatttacccgggctgacccattaggcctttgagtcaccaacacctcactagagaacaagcataatgaagaagctctgctgtaattcgttaatgttaacacttttttctttaaagatgtctcatgctgagcttcgtggcacacgcctataatcccagcactttgggaggctgagatgagaggatggcttgagctcagaggttcgagaccagcctgtgcagcatagtaagattccgtctctacaaaaaagaaaagaaaaaaagttgtctcataattattaaaaaccactattccagatcatggataataatagtcagaacaggtatattgttnaaaaaaaaaaaanaanaaaaaaaaaaggtcctgcccgggcggccgctctagaactagtggatcccccgggctgcaggaattcgatatcaagcttatcgatac

SEQ ID NO: 32633 - DNA, 704 bp, Homo sapiens
gactactatagggcgaattggagctccaccgcggtggcggccgaggtacattttaacagagggatataacaccattaaggctcatggacttaattcctgtctccagggctatgtatctttcaactgccatactgaggacttttcagccgtggtcccggatgtctggccatacccatcacttgaaacaactgtgtgatagtgagagcactgactcctaattttcagagactgaccaaatcaacctcacgtctttgccccataatactcctttttcttaagtcctacaccactggtttccctttctttgaagggcgtctgtattttgccaaggttaactctaagcttgtgctcttaattccatcctcttgtgctttctttgagaatttcaccttcccatttctttcttaccagcttctagctcctctgcctacaaatgtgatttcttcctatcctaaaaacaacaaaacccaaataaccctcctctgactttgcactagctgagctgttctccatcttctttctttttcttcaccatctgatcttaagatatgtctgcattcatgaactgccactactctctcactctcaaatccagtgcctctactctcacaaatccttgattctttaatcctgcatctgccctgaccactttatatcaatagatctgtcaaagatttaactacaacttttcaagtgccacatta

SEQ ID NO: 32634 - DNA, 399 bp, Homo sapiens
atacgactcactatagggcgaattggagctccaccgcggtggcggccgaggtaccccctgaccccttcctccgaatatacttttgtctcttgtcttttattcctgtgttcaccccactgtgttcagtccccctaggtctgtgcgggatacaagtggcgcccaaacagggacagaattgggtgctctacaccctctccttgagcagggactggcctagtgacttacctctattcagaatacggcaaaggcgttggagtctcacctccttaattaagctatacatgtttaaaaaaattattcaatgagaattgttaaagcacagtaaggaagactttattcagggccattatgacaggtatatagacaaatgtaatgggattttgcagtggtagagggtga

SEQ ID NO: 32635 - DNA, 633 bp, Homo sapiens
ctactatagggcgaattggagctccaccgcggtggcggccgctgcacttacaattgcaccccatcctcctacccactctgatcccagaggagagtgcttctgctgtaacctctaaggcacaagtgggtcccaaagtccttaaatatggagggatgtggggaagcagtggtgaagatgcggcaaaggtcagcaggcaacactggtctttgttgtaggtaaccttcatctagagattcttctagttctttccagatttatcttctaaaaactaactggtatggacatattacagtcctgtaattctttcttctaggtcatattgaacattccagatacctatcattactcgatgctgttgataacagcaagatggctttgaactcagtaagtggttaattattaccttcctggccttttctttgttcccttgtcccttctgttattcccaacattgtttggggtcagcaattgcaagggctatttgtagggaacgccgggccacgctgatgctgttcaaggcaccctctagaaagagtgagtcaggtgcgcagccacacaactgcccaagtgagtcgcaagagccatggctgttgggtacctcggccgctctagaactagtggatcccccgggct

SEQ ID NO: 32636 - DNA, 489 bp, Homo sapiens
acgactcactatagggcgaattggagctccaccgcggtggcggccgaggtacagcagaactgcatgatcaggtaagtgtgctgagctgttgatcctcctcattcctgagctgggtgtgtagagacaagagcaggagactaggggctgatgatcttttagtcacatccatttaccccagagtgctctatacaaatagcatttttatgtattccccggcatgaaaaagctggaaagcaccaagagaaggttggtgttaaacaacatgaagttttggaatctcagaaagtctgaatgagttaatttttttgagctttagcatacttatcattttataatgaggataattccttaaagcaattctgtccaatagaactttgggatgatagaaatgttctgtatctgagctgtccaatggtgtagccactagtcacatgtggcttttcagcatttaaaaaatggctagtaaggttggggcacagtggcttatgc

SEQ ID NO: 32637 - DNA, 530 bp, Homo sapiens
cgactcactatagggcgaattggagctccaccgcggtggcggccgaggtacagagtgatgccaggcgttcatctccccactgagctcctgctgagtgtttgcctggggccaggtcctccttccgggaagtcattttagctggaaagaacagggtgggggcgggtggcaagggatcagagcatgagcgtttgagggcttcgtcaggggcagtgaggagcctctaaaggactctacatttaggaatgacagagtcaaacaatttaacaaagccctaaaggtccctgccaggaaagaatgagccccatgtatcaccataagcaacttcttagaaacataacccacccctgtcatcccagcactttgggaggccagggagggaggattgcttgaggtcaggagctcgggatcagcctggtcaacatggtgagaccccatctttgcaaaaaaaaaaaaaagtacctgcccgggcggccgctctagaactagtggatcccccgggctgcaggaattcgatatcaagcttatcgata

SEQ ID NO: 32638 - DNA, 608 bp, Homo sapiens
gcgtaatacgactcactatagggcgaattggagctccaccgcggtggcggccgaggtactagttcccataaaatacacaataaataccagttcccattttcactatcactatccatacctacttcaatctattatctccacatagcagacagagtaatcttaaaaatggtaatttatagacctgtggtacggccgggcgcggtggctcacacctgtaatcccagcactttgggaggctgaggcgggcagatcacgaggtcaggagatcgagaccatcctggctaacatgatgaaaccccgtctctactaaaaatacaaaaaagtagccgggcgtggtggtgggcgcctgtagtcccagctactcggaaggctgagccaggcaatttatggctgggcacagtggcttatacctgtaatcccagtacctgcccgggcggccgctctagaactagtggatcccccgggctgcaagaattcgatatcaagcttatcgataccgtcgacctcgagggggggcccggtacccagcttttgttccctttaatgagggttaaattgcgcgcttggcgtaatcatggtcatagctggttcctgtgtgaaattgttat

SEQ ID NO: 32639 - DNA, 536 bp, Homo sapiens; identical to SEQ ID NO: 30716
  misc_feature 49: n = A,T,C or G

SEQ ID NO: 32640 - DNA, 548 bp, Homo sapiens
taatacgactcactatagggcgaattggagctccaccgcggtggcggccgaggtacttactaacttttagggctgtgtaagtgtagtgttgtttgaagctctgtgtgtgtttctgtaaagactggtctggaaaactgaccagaggaaaacatttccttgcttttcctctgctctcacatgaaaacaacaaacacagttagagtcaacaccaaagacttcaatgacccccagatatgtggggatttccccctaccagcaagcaagcaatcaattctgcagcagacactaactgtgtatcctccaatttaattctgacactatctgcctggaaatagcatcagatccctcatgttgagggctcagtccccaagactgccatcccttcagacaccatgtgcaagtctgggcctatagaacttctgaccagctgagcttcaaattggcattcccagacatttacagtggctcatggctggaggatcacttgaggccaagagtacaagaccagcctgggcaacagagtgagacctgtcttaagaaaataaaaa

SEQ ID NO: 32641 - DNA, 500 bp, Homo sapiens
gactcactatagggcgaattggagctccaccgcggtggcggccgcccgggcaggacgcgggtgagaatggagtcaaaaaggattcaggtgtttagaggagctgcttttcattaggaccttggagagtcccctcagttttgacacccttgtttcaccacaagaaagcacccgacaccctgggttgcatacttactactcaggggctttccccccagctttcggagcactgaattattgtgagctggtgactctgcaggcctgagtggtattagggttgtggaatgttgttgcatacacgtttatgagttaaccactatttaaatgatgctgctttttaaagttttttcaaagtacctcggccgctctagaactagtggatcccccgggctgcaggaattcgatatcaagcttatcgataccgtctacctctagggggggccacgtacccagcttttgttcccattagtgagggttaattgcgcgcttggcgtaatcatggt

SEQ ID NO: 32642 - DNA, 658 bp, Homo sapiens
tacgactactatagggcgaattggagctccaccgcggtggcggccgcccgggcaggtacgaaaaaatcaggctactaagcccactgttaatatagacgcagaccaattgttaggaacaggtccaaattggagcaccattaaccaacaatcagtgatgcagaatgaggctattgaacaagtaagggctatttgcctcagggcctggggaaaaattcaggacccaggaacagctttccctattaattcaattagacaaggctctaaagagccatatcctgactttgtggcaagattacaagatgctgctcaaaagtctattacagatgacaatgcccgaaaagttattgtagaattaatggcctatgaaaatgcaaatccagaatgtcagtcggccataaagccattaaaaggaaaagttccagcaggagttgatgtaattacagaatatgtgaaggcttgtgatgggattggaggagctatgcataaggcaatgctaatggctcaagcaatgagggggctcactctaggaggacaagttagaacatttgggaaaaaatgttataattgtggtcaaatcggtcatctgaaaaggagttgcccaggcttaaataacagaatataataaatcaagctattaacagcaaaaaataaaaagcca

SEQ ID NO: 32643 - DNA, 580 bp, Homo sapiens
  misc_feature 535: n = A,T,C or G
acgactcactatagggcgaattggagctccaccgcggtggcggccgaggtaccaaatgcggtatggggggcataggcagcactagagacatgagagttgattgtgatcacataaatcacaattacttatttgtcagacggcaggcagaggtcaggggcatggggtatggccagggaaaagagaaagttattggtccaagaagggttgcctcatgtcttggcttctggaacattgaaataggatgtaagagtgaaggacacatatgcacacacacacaaacacacatacatgcacacacatgcatgtatacacccatatacacacactcacatacctgcacttgtggggagaggggagaagcaaataataagtgagaaagattggatcatgggagagaggcttgagaagcttgaagcttttgagacatgaggagtatgaatcaacctgtcataagacaaccaagagtcattcttccatctttgtttttcccatcaaacactagtttatgtgtaaaaaaaataaagaaacaattggngatatgatattttttttctcccaacagacacttttgttttaactc

SEQ ID NO: 32644 - DNA, 476 bp, Homo sapiens
agctccaccgcggtggcggccgaggtacctgtcagtgttcaatatttaacaaactccagttaaacaggtaagaggtcagcagtagcttataggccttggttctattatccatgtgcccaactgcagccatcgtgggctggtgttaaaattttcctttcaattgtcatttttctaataattgcaatcagtgagaggagaagaaaaagttcaagggaatgacctgacctttcaccatcctacacaggagatgactgatgacatgggttcatacactaatgtatatcgtatattctccaaagaccctcaaaaatcacaagaagttttgaaaaattctgagatcataaactggaaacagaagctccaaatccaaggtaacaagtctgaagaaatgggcaagcagctgtgcttctcaaattgtgtcttcaactaacagcattagcatcacctgagagctcattagaaatgtaaattcatag

SEQ ID NO: 32645 - DNA, 562 bp, Homo sapiens
cgactcactatagggcgaattggagctccaccgcggtggcggccgaggtacagttatgcagtaaagccattaaaacatcagatatcgacaatcctagccactttgaaaagcaatatgaatctagttcttctagcactcacagtgatagtagcagtgacaatgagcaagactttgtttcctccattctaccaggaaacagaccaaattcaacaaatattagaccacagctgcaccaaaaaagcataatgaaaaagaaagctggtcacaaagctaactccaaacacaaagacaaagaacagacagtagtagatgtcactgagcagttaggcgattgcaaattagatagtcaggagaaagatgctacatgtgaacttcctttacagaaagtaaatactcagagttcttcaaatagcactttgcctgaaagattaaaagcgtcagaaaattctgaaagtgaatacagtaggtcagaaataactctagtaggcataagtaagaaaagtgcagagcattttaagagaaaatttgccaaatcaaaccaagtgtctaggtcagtgtctag

SEQ ID NO: 32646 - DNA, 539 bp, Homo sapiens
ctatagggcgaattggagctccaccgcggtggcggccgcccgggcaggtacctacacatggggagggttattgcaggggttggggagcagtgcatttaaattttgtttcttccctggatctttcacaaacaattatcggtaaggttcctccttccccttggaagcacagaaaagacactgcctatttgaaattatattatttggggttgtcttgggcttctcttacatggaggtgccaccttcattttgtagaacggtgtaagtggtttccattccagcatgaatgtggtcggtcacatggcagtggagtaaccaaattccaggtgttcctggaaacatttctagggtttggtatgttccagggaaaatgtcaaagacatcagaactataaactcccctgtgcttgtattggaagctatggccgtgaaaatgtacctcggccgctctagaactagtggaacccccgggctgcaagaattcgatatcaagcttatcgataccgtctacctcgagggggggccccggtacccagcttttgt

SEQ ID NO: 32647 - DNA, 444 bp, Homo sapiens
gactcactatagggcgaattggagctccaccgcggtggcggccgcccgggcaggtacgcgggggatgtgaactcttttaaactataacatggacactttattggaaccaaactttagttttctacattaatgagaaacactggtaactttgcttcattgaaaaaataattgcttgttctctgtcagatgcacttcgtcttagtaacatggccatggggaagacgaccacaggccagatagtcaatctgctgtccaatgatgtgaacaagtttgatcaggtgacagtgttcttacacttcctgtgggcaggaccactgcaggcgatcgcagtgactgccctactctggatggagataggaatatcgtgccttgctgggatggcagttctaatcattctcctgcccttgcaaagctgttttgggaagttgttcttatcactgagga

SEQ ID NO: 32648 - DNA, 481 bp, Homo sapiens
gcgaattggagctccaccgcggtggcggccgcccgggcaggtacttgggatatattggtgaacaaaacagaaatgtctgtgccttcttggatcgtgtgttttagaattatgagaattaaatgaaaataaatattcaatatggtgccagacacatagaggtgcccacagtgtcttatctcactttcttcctgcttgccatatcttttccatcagggccaaagagaatgggaagtgggaagaaataaactatatatttcatttgtatagctgtggagagtaacaggccctgtgtccctttggggaggtcatgcgaactgggcatggccttctgtcaagaattattagaccaggcatggtggctcatgcctgtaatcctagcacttttggaggctgatgcaagaggattgcttgaggccagtagtttgagaacagcattacccaccatggcgaaaccctgtctctaataaaaatataaaaatta

SEQ ID NO: 32649 - DNA, 594 bp, Homo sapiens
tacgactcactatagggcgaattggagctccaccgcggtggcggccgcccgggcaggtaccaacaacgcacttacccactgttttaatctaggttattcttgaaagcagagcctgagacaaaggtagacacattctatttatgagtctaacacccaggagcaggaatgagagataggggagtgaactggggaaaagggaaactaagtccgagcaaaaccagatactgctcttatcaagtggtccacccctattaatggctacataatgcagaactttctcaggattcttcttaaactttatctcagaactgtctgcctcagggagaaaggagaagtatttctccatcagcagccacctcctgtgtgttgagggctgctccttttgggcattaacccactgcctccaccaccccaaccctctgggctgcaaagagctagctgacagtccagctggtacctcggccgctctagaactagtggatcccccgggctgcaggaattcgatatcaagcttatcgataccgtcgacctcgagggggggcccggtacccagcttttgttccctttagtgagggttaattgcgcgcttggcgt

SEQ ID NO: 32650 - DNA, 454 bp, Homo sapiens
tatagggcgaatcggagctccaccgcggtggcggccgcccgggcaggtacagacagaattaaagacctggagaaacagttcgtaaagcctgatggtgagaatagagctcgcttccttccagggaaagatctgaccgaaaaagaaatgatccaaaaatagacaagatgaatggctatcaaagaaggatcaaaaatgcaactgagaaaatgatggctcttgttgctgagctgtccatgaaacaagccctaaccattgaactccaaaaggaagtcagggagaaagaagacttcatcttcacttgcaattccaggatagaaaaaggtctgccactcaataaggaaattgagaaagaatggttgaaagtccttcgagatgaagaaatgcacgccttggccatcgctgaaaagtcttaggagttcttggaagcagaatatcgccaactgcccaatggtgt

SEQ ID NO: 32651 - DNA, 393 bp, Homo sapiens
ggcgaattggagctccaccgcggtggcggccgaggtactaagaactactttgtgatcaatataaatctcttcatctcactgtatcattatgtctatatggtttccatttgttctaacagaagctgttgggatggaagccaaaaacaccctttgagacttgtattgaacagttttcatatgcaataaagataactttatgcacatgcagggaaataagagagttgaaaatggaaggaaaatatttgccaaattgtttaagtgttttaaggtgattactggtaacacagtaaagtttccaggggaaaattccatctctcaccctccacataaaaactcacagtcactgatcactgcttgccaagtttgagttcagctctattttctggctttaag

SEQ ID NO: 32652 - DNA, 476 bp, Homo sapiens
ggcgaattggagctccaccgcggtggcggccgcccgggcaggtacactcacacacacacacacacacagagctcttaacaactggtcctgagtagctctttgtaaattctttattgccaggagtgaaccctaaagtggctcacaagagtgccctatttatttcaattaacttcatggacaaacacatctcacagttgagatacgtgacccttgtgagatggcatgtttctaaaagaatgtcacatacaagagtgtagcagtcagctgtgcagctgatatctttgaaggccaccaaagaggacaggttggatgaggtcattaacattgacatacctctcatcaagaagaactcacttgaaagcagtggggtccggacaaccaaaaatgaagaggagaatgaaaaggaaaaggagctccagctggaatatctgctgggtgcctttgaaagcctgggcaaagcctggccgcgaaacgcg

SEQ ID NO: 32653 - DNA, 512 bp, Homo sapiens
tacgactactatagggcgaattggagctccaccgcggtggcggccgaggtacatatttttaaatccagcagaataaatgtgaatgttttgattacccatcattaaattttttaaaaaactatccctacttcagctgttggaaaatattatctggcaacttcaggtgacagattaactctgttgtttgttttaaataaagtttaaaggaaataagtatctaataccattttcaactagccatgcaaaattggcttctctccccaaatcctgtatttgaaaaaataactttaacataacgtttggcattaacttatatttgctcatcataaaaaaccaaaagaaatttttatatctcaaattggtaaactttacaaaatatttaacatatgaggaagaggtatatcttacagaattatttggctatgtcataaggcagtaatgaagatggaatttttcctatcataaatctgacataagtgaaagtctataacatggtcattctccataaatct

SEQ ID NO: 32654 - DNA, 467 bp, Homo sapiens
tacgactcactatagggcgaattggagctccaccgcggtggcggccgaggtactccacacctgatcaagtgacagcgtggcgtcatgtcagccagcaaaatgtttgagtgacttttgagtaatggtggcatagaaggtagagggggttgaaggaaataataatgggaatttttttcctttcctatatattttagcatgtataatgcttcaactctctggtggaaatttggaacacaggatagtaaaatattccttttcctagagggtagtaaaagtggagtagaaagtaggagctgttagaatttccatgataaatataatttgattacatatgttggggtgggttccctctgagctgaggattttactttgagagttgtttcacaatggtatatttctttccagttttcagaagcaaatttagccttaagaatttgccctggccagtcccaatggcttatgcttga

SEQ ID NO: 32655 - DNA, 504 bp, Homo sapiens
atagggcgaattggagctccaccgcggtggcggccgaggtacgaaaaaatcaggctactaagcccactgttaatatagacgcacaccaattgttaggaacaggtccaaattggagcaccattaaccaacaatcagtgatgcataatgaggctattgaacaagtaagggctatttgcctcagggcctggggaaaaattcaggacccaggaacagctttccctattaattcaattagacaaggctctaaagagccatatcctgactttgtggcaagattacaagatgctgctcaaaagtctattacagatgacaatgcccgaaaagttattgtagaattaatggcctatgaaaatgcgaatccagaatgtcagtcggccataaagccattaaaaggaaaagttccagcaggagttgatgtaattacagaatatgtgaaggcttgtgatgggattggaggagctatgcataaggcaatgctaatggctcaagcaatgaaggggctca

SEQ ID NO: 32656 - DNA, 489 bp, Homo sapiens
ggcgaattggagctccaccgcggtggcggccgaggtacatctacctaaaggactattatgtggaataatacatactaatgaagtattacatgatttaaagactacaataaaaccaaacatgcttataacattaagaaaaacaataaagatacatgattgaaaccaagttgaaaaatagcatatgccttggaggaaatgtgctcaaattactaatgatttagtgttgtccctactttctctctcttttttctttctttttttttattatggttagctgtcacatacaacttttttttttgagatggggtctcgctctgtcaccaggctggagtgcagtggcgcgatctcggatcactgcaacctccacatcccatgttgaagtaattcttttgccttaaccttccgagtagctgggactagaggaacgtgccaccatgactggctaaatttcggatttattagtagagacagagtttaccatgtttggcc

SEQ ID NO: 32657 - DNA, 446 bp, Homo sapiens
gcgaattggagctccaccgcggtggcggccgaggtactattttctacaagaagccttcaggggaaataatggatcctagttatgtcaaagaaaacaatgagacaaaatggcaacttcacagtcttcaagtaaatataatccctgatataaatggaaattaacatgtaattttgggggcaatagaaacaacaacaaaaacctgtgacaactctgtcctactcctttaaaaatgagctttgactctgtagtctcttaaggcacaaaacctgatagacggcatttaactggtggcctgcacctctgatttggattttaaaaaacaactattgacatttaaataaaaataaaccattttgttagagctggagattcttggataagttgggagaaatatttcaatgaactagcatcttggatgtataaatatttagtgccaaagttaaaaa

SEQ ID NO: 32658 - DNA, 297 bp, Homo sapiens
ttggagctccaccgcggtggcggccgcccgggcaggtacagcccacagaactgtgagccaattcaatcccttttctttttcaattacccactctcatgtatatctttatagcagtgtgagaacagattaatacactcctcctcagaaagcattcaatttagctgtgtctaaagtatgccaggtgttctagggtgttatcttagccaatacttcttcctcttcagcaagatctatttgcctatgacagcttgacctacatttcctaccatacttgttagtaacaagtagcccataaca

SEQ ID NO: 32659 - DNA, 344 bp, Homo sapiens
agggcgaattggagctccaccgcggtggcggccgaggtacgcgggggagttcagtccttaagaaggaaaattgagcaagtatttaattggttggacattgcataaaagaggtccatatccaggctaactctagaaattttattctcaaacttagttggcctcttttttttctgtcagaggaccattcttagtggcactggggaaatcttggcacccagaagaattcaactgcgctcactgcaaaaatacaatggcctacattggatttgtagaggagaaaggagccctgtattgtgagctgtgctatgagaaattctttgcccctgaatgtggtcgatgccaaa

SEQ ID NO: 32660 - DNA, 446 bp, Homo sapiens
atagggcgaattggagctccaccgcggtggcggccgaggtaccagttgtaaaattaccaggaaccgccgtgcctcaagatcgccctgttttctggcttcatcaatgactgcatgcagtgcaccaccctgtccactacgtgatgctgtaggattaagtctcacagtgggcggctgaggatacagcgccgcgtcctgtgttgctggtgaattagacgccatcgctgtgggttgctggtatggtgccgtgctatttggcacaggacacaccgcttgaggtctgtatgaacctctgaaggaggccgatactgaagctcggttggcagccggtattgataaactaccagcgggtgggtcttattttctaccggctgatattggggatactgtatctgagttggcatttgccgggatagagactctgtccctttctacttgattttctttgg

SEQ ID NO: 32661 - DNA, 477 bp, Homo sapiens
gcgtaatacgactcaacgactcactatagggcgaatcggagctccaccgcggtggcggccgaggtactgggattacaggtgtgagccaccacacccgggctctgtgatttgtttgttttttgagatggagtctcgcactgtcatccaggctggagtgcaatggtgcaatctctgctcactgcaaactccgcctcctggctcaagctgattctcctgcctcagcactcccgagtatgctgggattacaggcacatgccactgcgccaaactaatttttgtatttttagtagaaacggggtttcaccatgttgcctgggctggtcttgaattcctgacctcaggtgatacttgccttgccctcccaaagtgcttgggttacaggcgtgagccagagcgcccagccgcctctgtgattttttaaattgtgtcactcacactaaatttaacagcacattttttgataactcattttttttg

SEQ ID NO: 32662 - DNA, 448 bp, Homo sapiens
cgtaatcgactcactatagggcgaattggagctccaccgcggtggcggccgaggtacgcggggaatgccagatgatctatcattgtctcactttgcccccagataagaccatctagttgcagaaaaataagctcagagcttccactgattctacattatggatatggtgccgccgaagcaagcacaaagccctattttacacatgcctagtgatgcttcatggacaaggcttggctctgttgagtccagctaacctacctgagattctgagatttctcttcaatggcttcctgtgagctagagtttgaaaatatcttaaaatcttgagctagagatggaagtagcttggacgatttttattatcatgtaaatcgggtcactcaaggggccaaccacagctgggagccactgctcaggggaaggttcatatgggactttctactgccca

SEQ ID NO: 32663 - DNA, 521 bp, Homo sapiens
gcgcgtaatacgactcactatagggcgaattggagctccaccgcggtggcggccgcccgggcaggtacgcgggacacacacacacacagcacctgcacgcagatgcacacatctctagtcaaatgaggctctcagctttttgataggggctttttgatacgtgtataaccaatactttattctcactgtagtcaaggactcattgcacattcagaaatgagaagtctgatcccggaactccactactagctcaaagaaattctcgaatgttctcacctattaacagttattaaaatggaagaagctggggatgaaattgtgagcaatgccatctcctacgctctatacaaagccttcagcaccagtgagcaagacaaggataactggaatgggcagctgaagcttctgctggagtggaaccagctggacttagccaatgatgagattttcaccaatgaccgccgatgggagtctgctgaccttcaagaagtcatgtttacggctctcataaaggacagacc

SEQ ID NO: 32664 - DNA, 521 bp, Homo sapiens
tacgactcactatagggcgaattggagctccaccgcggtggcggccgcccggcaggcacagtggtgcgatctcagctcactgcaagctccgcctcctgggttcacgccattctcctgcctcagcctcccgagtagctgggactacaggcatctgccaccacgcctggctaattttttttgttttagagagacgggatttcactgtattagccaggatggtctcaatctcctgacctcatgatccacctgccttggcctcccaaagtgctgggattacaggcatgagccactgcgcccagccgagtcattttttaatactactgcatgtgagttaacacaatcattcccaaattgaagttttagatgggccctcaaaatttttaggatatggttttcctacaggtttatattgaaagtatggggtatctcctattactcctctttttatttgtcttaaaggagaaagggagaggccagagaccaaatgtccccatttccctatagctaatctctctggaaga

SEQ ID NO: 32665 - DNA, 577 bp, Homo sapiens
acgactcactatagggcgaattggagctccaccgcggtggcggccgaggtacgcggggagaaaaagggtggggagtgccctttcttgaaggaatcccttaagtgcacgtctcccgttttcttttcacatcaatgcagagtccctctgtgaatttacaacacccaacacccatgagttcagtccttaaaggaaaattgagcaagtatttaattggttggacattgcataaaagaggtccatatccaggctaactctagaaattttattctcaaacttagttggcctctttttcttctgtcagaggaccattcttagtggcactggggaaatcttggcacccagaagaattcaactgcgctcactgcaaaaatacaatggcctacattggatttgtagaggagaaaggagccctgtattgtgagctgtgctatgagaaattctttgcccctgaatgtggtcgatgccaaaggaagatccttggagaagtcatcaatgcgttgaaacaaacttggcatgtttcctgttttgggtgtggagcctgtggaaaagccattcggaacaatgtttttcacttgga

SEQ ID NO: 32666 - DNA, 522 bp, Homo sapiens
tacgactcactatagggcgaattggagctccaccgcggtggcggccgcccgggcaggtacaaagtccctgaggcaaaagcatgcttgctgtgttctaggaaaagcaaggaagacagcatgtctatagcagtgggaggtggaaggataataaacagtaggtgaggttagaggggaccaaatcatgtattttccatccagaggttcccaaccttggctgcacattagatttattctaaggagcttttaaaaaataccaatgactgggtcccagcctagagtgattaaatcagaatctctggaggtagacttgagaatctgatgtttgcaagtttcctaggcaagtcaaggctgaggaagactgctgcaggccattgtaagagccaggcgttgatctcattcaacctttccctcagctcttctagagacagccagcattctcttatggcacaaatacagcctttcaccctcacagaaagacacaggacaacaaattcaataaattaattcactggcatggatgat

SEQ ID NO: 32667 - DNA, 463 bp, Homo sapiens
ctactatagggcgaattggagctccaccgcggtggcggccgaggtaccgactcctcagaaactggcatgccaaatcaaaatgggtctggttcaatcctccctaatggcaatgtaaacccctctaactaatcccacttctcctaattatctttttctccttacgaacctaaaaatctcaccatttctattagcctgaaaataacatccctctgttcttctcttcctccttcagcactggatctcacttacaataggttttatttaataattatcttccttacactttctgtctcaccagtttccccttaaactgatttacctgctacacaaaattattcttattgggcctatgtgccttttcctccacttattcgacctctcacctggatggatgctcctgcagaaatctatactaacgatagtgtgtggatgcctggaactacagatgaccgttgcaccgctc

SEQ ID NO: 32668 - DNA, 463 bp, Homo sapiens
aatacgactactatagggcgaattggagctccaccgcggtggcggccgaggtacgcggggagaagaaatagcaagtgccgagaagctggcatcagaaaaacagaggggagatttgtgtggctgcagccgagggagaccaggaagatctgcatggtgggaaggacctgatgatacagaggtctgtaggccatgggaatgggtttggaattttattcaaagagctatgggaagtgactagaaggtttaaagttggggaagaggttttgtgtttctgttatatttgtgttttatacaaattactctggttgctgtgttgataggacagcagaagggtaggagcagggacaccagttaagttattgcaatggttaaggtgagaggtggtggctgggcctaggcctttttggagtgaacaagctatttgcttggcttccatgatccttctccctccactggaatggag

SEQ ID NO: 32669 - DNA, 448 bp, Homo sapiens
cgtatacgactactatagggcgaattggagctccaccgcggtggcggccgaggtaccagttgtaaaattaccaggaaccgccatgcctcaagatcgccctgttttctggcttcatcaatgactgcatgcagtgcaccaccctgtccactacgtgatgctgtaggattaagtctcacagtaggcggctgaggatacagcgccgcgtcctgtgttgctggtgaattagacgccatcgctgtgggttgctggtatggtgccgtgctatttggcacaggacacaccgcttgaggtctgtatgaacctctgaaggaggccgatactgaagctcggttggcagccggtattgataaactaccagcggttgggtcttattttctaccggctgatattgtggatactgtatctgagttggcattgccgggatagagactctgtccctttctacttg

SEQ ID NO: 32670 - DNA, 446 bp, Homo sapiens
tactatagggcgaattggagctccaccgcggtggcggccgaggtaccgcacacaattgtatgcgctgcactttcatctgactggaagcacagtgggcttacaccagcatcaacacaaacacgtgagcagcgccttgcactacaacagacacgatatccctaggggacagcactgttttcagccccattataatctcatgggactactgttacagatgaggtccaccattgaccaaaacatgtggagcacggcaattaattctggatttggatggggacgcaaaataagcacagctctggcaggtctaatcaagattaagagagaaaagcaactaaaacatctgagaaaacagatacagagggcataacaccacacagaaaatactacatacaactgagctataatttttaattgacttgctggaaattactaaattactaaaattg

SEQ ID NO: 32671 - DNA, 451 bp, Homo sapiens
tacactactatagggcgaattggagctccaccgcggtggcggccgcccgggcaggtacattatttctccatatgtctgtcccctctgctccaagactgcaggggagagtcttgcacatcatctttgtaaaaacagtctttgttttactcagaaaatttgtattgagtcctgctacatacatgctaggcattagggtctaaaaagaatgaaaataaagcatctcagggatggcttttcagaacacatgcccaagcagagacttaaatattgaggctggccagattaaaaggggtagagggcaggaaagggtgacagcatgcccggcagcagcaagagcgggagcgaggcctgaaagaatgaaagtatttgcctacaatagaaggatgagtgagtagggcactaccagcagctcagcaatgccagagaaagggcacacagggaaaagggctaa

SEQ ID NO: 32672 - DNA, 450 bp, Homo sapiens
tacgactcactatagggcgaattggagctccaccgcggtggcggccgcccgggcaggtacttttttttttttttttttttttttggtagagatagggtttcaccatgttggccaggctggtcttgaactcctgggctcaagtgatccacctgccttggcctcccaaagtgctgggattacaggtgtgagccaccacacccagcccaagttcaactttttttttcattctgtttgctgcttgtgtttcttctgctgtgaacactctctgttcatgtcctttgtccattgttctatgggggtgttaacactgttttcttattgatctacaaccacagatattaaggcatttgtttgtcatactttttgcaaatgcttttctcatttgctatttgccttttaactgtacagaaaaggtgaatctgtgttctgtatattctgcctaaggcaaag

SEQ ID NO: 32673 - DNA, 437 bp, Homo sapiens
ctactatagggcgaattggagctccaccgcggtggcggccgcccgggcaggtacgttgaaatattaggggcaggttcccccaatatctggcgcccaacgtggttttctttttcctaagtgcatgtgggaacccgattccctttggtaggtgcggagaaatgttcatcggtccagtccacagaaatgcttgtttggctccccgacgattggtgagttgtctgtgtattgtccggggtaactatgggtcacgcagagtctaaacattatgcttatctctgctatattaaattcctgttaaaatgggggagttcgggttcccatggaaaatatggtcaccctattcagggcagtggaagaacactgtccttggtttcctgaaaagggaacgttagatgtggaactatgggatcatgttggtgcaaaattccgagaactgg

SEQ ID NO: 32674 - DNA, 444 bp, Homo sapiens
tacgactactatagggcgaattggagctccaccgcggtggcggccgaggtacttaatcctggttggtttacccattctaaattatttatgtgagatagctatctatttggaaaaaagtaaagtgaaagtcttacctcaatccacactcaaaaatagtttactatatgacagatctatggcaggcagatttgatggctcaatgaactccaccctcccagtgttcacacctttatgtagttcccacttacagggagccaaaggtccgtgggacgtgaccaactcagcattccactggaggctatatgatcaaacagcaaactgtttatcatgaatgcaggatgtgagcaaactcaccattgctcctgccgacagaaggttttctggaggcaatcactccctggtgctgaggttatctactgcaacatttagagaatgtagtcttgc

SEQ ID NO: 32675 - DNA, 457 bp, Homo sapiens
atacactactatagggcgaattggagctccaccgcggtggcggccgaggtacatctctagatgatcacgaatgtcaaatatcacactacactgtgatatggggattccccttgggggttttcatgtgtatagggtgcctgcagctacactaaacatcttaaagctaccacaatgttcacttcatattttagctttttataggctttcttggtctcctcctatgttcccatgattttcttgctttgaatctgtaagaatcgagttgaatcttctccattttaaattttccataggctgagaaactgtttagccaagttcggataaaattgtatccaaagtaagagtatacaagctatgggcaagtccaaaatcaagctgttcacaggaccatgttctctctaaaggttctaggagagaatccctcatttccttccagcttctgggtggctgctggcat

SEQ ID NO: 32676 - DNA, 446 bp, Homo sapiens
actactatagggcgaattggagctccaccgcggtggcggccgcccgggcaggtacattattcctccacatgtctgtcccctctgctccaagactgcaggggagagtcttgcacatcatctttgtaaaaacagtctttgttttactcagaaatattttattgagtcctgctaaatacatgctagtcattagggtttaaaaagaattaaaataaagcctgtcagagatggcttttctagaacacatgcccaagcagagacttaaatattgagactagccagattaaaaggggtagagggcaggaaagggtgacggcatgccacgcagcagcaagagcgggagcgaggcctgaaagagtgaaagtatttgcctacaatagaaggatgagtgagtagggcattgcccgcagcttaataatgccagatacagggcacacaggggaaagggc

SEQ ID NO: 32677 - DNA, 380 bp, Homo sapiens
cgactcacgttagggcgaaacgagctccaccgcggtggcggccgcccgtgttggcacggaggctgatacagccacaggctctccccatccctccagccttatctaggatcaccatcaacccctcccatgcacctaaacaaaaactaacttgtgatatccttgaacatgtcaggcatacattattctttatgccagagaagcttttgcttgactctgaaatctagaatgacgtaaagatttgaataagttgactatctaacttcatgcaaagaagggacacatatgagattcatcatcacatgagacagcaaatactaaaagtgtaattcgattataagagtctagataaatatatgaaatgcaagagccacacagggaat

SEQ ID NO: 32678 - DNA, 407 bp, Homo sapiens
agcgcgcgtaatacgactcactatagggcgaattggagctccaccgcggtggcggccgcccgggcaggtacttttttttttttttttttttcctaattgcctttctcctttaccttccctggagttccacctttgtaattgttagagaaaatccctctgggccttcaggatagtcatcatcaaggatttcaacatgcagacttttcctcatctcccctgcttcaaagaggagctcccctgctgcaggaacaaaatccaagcctgcttccgctgtcccgctcatcgtcttgtggacgcggggacacttcaggtgcccagtgtccacactgactagtggtgacggcgttggacagtgcagatacagaacatttctgtcatcacagaaagttcctttggacagagccatg

SEQ ID NO: 32679 - DNA, 436 bp, Homo sapiens; identical to SEQ ID NO: 32434

SEQ ID NO: 32680 - DNA, 402 bp, Homo sapiens
agcgcgcgtatacgactcactataggcgaattggagctccaccgcggtggcggccgaggtacttaatcctggttggtttacccattctaaattatttatgtgagatagctatctatttggaaaaaagtaaagtgaaagtcttacctcaatccacactcaaaaatagtttactatatgacagatctatggcaggcagatttgatggctcaatgaactccaccctcccagtgctcacacctttatgtagttcccacttacagggagccaaaggtccgtgggacgtgaccaactcagcattccactggaggctatatgatcaaacagcaaactgtttatcatgaatgcaggatgtgagcaaactcaccattgctcctgccgacagaaggttttctggaggcaata

SEQ ID NO: 32681 - DNA, 341 bp, Homo sapiens
gtaatacgactcactatagggcgaattggagctccacgcggtggcggccgcccgggcaggtacaaccaatctggagcttacttaggattttctagtgcagtagttctaaaatatggtccctggatcagtagtgttagcatcccctgggattttgtgttttaacaagttctctatatgattctgatgcacactaaagcttcagaatcactgctgtagtataaactgtgatggttctcagccttccccactgctggcttaggtgtttgctttcttgggtctactaagtcagttagttctttatctgtttcctttccagtttccaaaatttttgttgctatctt

SEQ ID NO: 32682 - DNA, 389 bp, Homo sapiens
gtaatacgactcactataggcgaattggagctccaccgcggtggcggccgcccgggcaggtacatctctagatgatcacgaatgtcaaatatcacactacactgtgatatggggattccccttgggggttttcatgtgtatagggtgcctgcagctacactaaacatcttaaagctaccacaatgttcacttcatatttttgctttttataggctttcttggtctcctcctatgttcccatcattttcttgctttgaatctgtaagaatcgagttgaatcttctccattttaaattttccataggctgagaaactgtttagccaagtttggataaaattgtatccaaagtaagagtatacaagctatggccaagtccaaaatcaagctg

SEQ ID NO: 32683 - DNA, 319 bp, Homo sapiens
actatagggcgaattggagctccaccgcggtggcggccgaggtacatctctagatgatcacgaatgtcaaatatcacactacactgtgatatggggattccccttgggggttttcatgtgtatagggtgcctgcagctacactaaacatcttaaagctaccacaatgttcactacatatttttgctttttataggctttcttggtcttcctcctatgttcccatcattttcttgctttgaatctgtaagaatctagttgaatctcttttcattatacattcatgcattaggcttcaaaaccattttttaaaaaacttga

SEQ ID NO: 32684 - DNA, 415 bp, Homo sapiens
actcactatagggcgaattgtagctccaccgcggtggcggccgcccgggcaggtacaaaggaatttgagcccaaggggtctgcctcctgaggctggctctcagccaggagacctgtgcttctcaaacgggagcgattgcaccccccggggacatgtgattgtgtcaggaaacatcttccatttgtcacagcttggtcgggtatgggggaatgctactgtcatctcgcgggcagaagctggggatgctgctaatcaccatacaacgcacagggcaaagaattatgcagcccagttccgagcctgagaagccgcatatcacccaacatggcctctctgtaatgccttttaaataaccagctcttaagccctcagtgagcagaactgtatgaagttgccacggcacgactgaagagtg

SEQ ID NO: 32685 - DNA, 236 bp, Homo sapiens
tcactatcagggcgaattgtagctccaccgcggcgaggtacgcggggggtcttgttaagtggaaactgctgctttagagtttgtttggaaggtccgggtgactcatcccaacatttacatccttaattgttaaagcgctgcctccgagcgcacgcatcctgagaacccgagcctttggttaagaccgagcttctattaagcttgaaaagaataaaaactcctccagatgttcttcc

SEQ ID NO: 32686 - DNA, 345 bp, Homo sapiens
ctatagggcgaattggagctccaccgcggtggcggccgcccgggcaggtacttttagcgtgtgctcatggttctttaagggccacgatgccggctctttaaactttttcacaactttcaccaccctccctttattaataaagtcttcaattttttccttctgattataaaaatataactaccgtttggggagaattaaactgttactgaaatatttaaagaaaaatgtttcttaatgagtcatattttagcatatttcctttcagtcctttttttcagggactactcttaagggaagccattgagaaatggaagaggccatattttgtttaagaaataaaatgtg

SEQ ID NO: 32687 - DNA, 409 bp, Homo sapiens
ctatagggcgaattggagctccaccgcggtggcggccgcccgggcaggtaccgaggtcattttgcttcctatagactgccaccttttggcaaaagctgttctaactccatctcagcatttacaattccatacctggtggtcagaggaggcccgcctgcaggttcagctaaatcgggctgatggcattccaattactcaggctcagctcacaggctccgataattactctgatactactgctcatttaggctttgatgctctcaccacggaacaagtaacaaaggtgtgtatgagagcttgggataaattacgcaccccaggccaagcttctgtttcttttactattgttaaacagggtcacaatgaattatatcttgattttttagctaaattacaagatgctgttgaa

SEQ ID NO: 32688 - DNA, 426 bp, Homo sapiens
ctactatagggcgaattggagctccaccgcggtggcggccgaggtacgaaaaaatcaggctactaagcccactgttaatatagacgcagaccaattgttaggaacaggtccaaattggagcaccattaaccaacaatcagtggtgcagaatgaggctattgaacaagtaagggctatttgcctcagggcctggggaaaaattcaggacccaggaacagctttccctattaattcaattagacaaggctctaaagagccatatcccgactttgtggcaagattacaagatgctgctcaaaagtctattacagatgacaatgcccgaaaagttattgtagaattaatggcctatgaaaatgcaaatccagaatgtcagtcggtcataaagccattaaaaggaaaagttccagcaggagttgatgtaat

SEQ ID NO: 32689 - DNA, 422 bp, Homo sapiens
tatagggcgaattggagctccaccgcggtggcggccgaggtaccaatgtgattgaagcaagggaaattgctatgggatatctgaccaactggatattctgctggaagagcagaatgcacttcaaagactagccaataaaactctcatgtaagatatgtttttctttttgtttctatttaactaatgaatagaacctcagtgatttaaggaaaggcaggcccatgatatggaaagagaaggggatgatgatgatattctggaatggtcgtgcaaggcttcaggaggaagtgagagtggtgattgaatcatataactcctgaataaatatctggaataaacatctccagaataaaacatctggaggattctcagtatacttagaataaaattgagcctcctcatgaaagcctactagcaccttc

SEQ ID NO: 32690 - DNA, 413 bp, Homo sapiens
actactatagggcgaattggagctccaccgcggtggcggccgcccgggcaggtacgcggggacatcaatgcagagtccctctgtgaatttacaacacccaacacccatgagttcagtccttaagaaggaaaattgagcaagtatttaattggttggacattgcataaaagaggtccatatccaggctaactctagaaattttattctcaaacttagttggcctctttttcttctgtcagaggaccattcttagtggcactggggaaatcttggcacccagaagaattcaactgcgctcactgcaaaaatacaatggcctacattggatttgtagaggagaaaggagccctgtattgtgagctgtgctatgagaaattctttgcccctgaatgtggtcgatgccaaaggaagat

SEQ ID NO: 32691 - DNA, 424 bp, Homo sapiens
ctatagggcgaattggagctccaccgcggtggcggccgaggtacattattcctccacgtctgtcccctctgctccaagactgcaggggagagtcttgcacatcatctttgtaaaaacagtctttgttttactcagaaatattttattgagtcctgctaaatacatgctaggcattagggtttaaaaagaattaaaataaagcatgtcagagatggcttttctagaacacatgcccaagcagagacttaaatattgagactagccagattaaaaggtgtagagggcaggaaagggtgacggcatgccacgcagcagcaagagcgggagcgaggcctgaaagagtgaaaatatttgcctacaatagaaggatgagtgagtagggcattgccagcagctcagtaatgccagagaaagggcacgcagg

SEQ ID NO: 32692 - DNA, 426 bp, Homo sapiens
ctactatagggcgaattggagctccaccgcggtggcggccgaggtacgttgaaatattaggggcaggttcccccaatatctggcgcccaacgtggttttctttttcctaagtgcatgtgggaacccgattccctttggtaggtgcggagaaatgttcatcggtccagtccacagaaatgcttgttcggctccccgacgattggtgagttgtctgtgtattgtccggggtaactatgggtcacgcagagtctaaacattatgcttatctctgctatattaaattcctgttaaaatgggggagttcgggtacccatggaaaatatggtcaccctattcagggcagtggaagaacactgtccttggtttcctgaaaagggaacgttagatgtggaactatgggatcatgttggtgcaaaattccgagaa

SEQ ID NO: 32693 - DNA, 408 bp, Homo sapiens
tactatacggcgaattggagctccaccgcggtggcggccgcccgggcaggtacttttttttttatttgtttgttttttaagaaagactcaaaaggaaaaaaaaaaaaagaaactatagttattttctcatgatataaaaagattctgtagttgtatatacatttgaactttttgtaagacatctcctacccccctaaaattggaagtcatttattaagactttgtgttctgtaagaggattggaaatgaataattaagaacattaaagaggaaagcagggggtggtgggaaagtgtggtcttgagggggtaataaaccttctacaggccacacacacacaagaaaaaaaaaagggcaataagtgtaccccagtaacaataaggtgggggataaggataggggtaaggt

SEQ ID NO: 32694 - DNA, 419 bp, Homo sapiens
tactatagggcgaattggagctccaccgcggtggcggccgaggtacatggtttgccaaccctgtattatgtttatagcatttgttttacaaaatatacctgattctgaaaaaatgaaaaatggttactataggctagatagtaggtagttaagtcctataactactagtaggtagttataggacttaattaacagatagatatgatgtgacaattcagtttaagtgcaactttcagtttctatcttaactataacttgagagattaatttagaattacaaatgtgtgtatatatatatatgagcatatgtatacataacatatttacacacaaggcacacatactatgagcaccctgcagtttgtaggcatttttacatgcgaatgttattggaacagataggcatcacgggaagaaat

SEQ ID NO: 32695 - DNA, 403 bp, Homo sapiens
gcgaattggagctccaccgcggtggcggccgcccgggcaggtacttagttttaattgaggaaagctccttaaacacaggatctcagtgaatttgtcttcatccgtgccccatctgttctcaccagctttatagagaatctattcacaagagaatgatattagagacacaattattttctttttgagaggtgacatgagaagaatcggagttgtatttcagaggtcagtgccatcatctattatctaaatctctcactttcagaagactagaaatcaaaaattgggctgtcaggagccaaggagaatgataactaccactggggcaggcaaaaagttagggtttccgatccccaagcttcaggcttctctttcaaacaggaaaaaaaaaaagggaaaagtccct

SEQ ID NO: 32696 - DNA, 429 bp, Homo sapiens
actactatagggcgaattggagctccaccgggggggccggccgaggtcccaccacccatggctcttgcgactcacctgggcagctgtgtggctgcgcacctgactcactctttctagagggtgccttgaacagcatcagcgtggcccggcgttccctacaaatagcccttgcaattgctgaccccaaacaatgttgggaataacagaagggacaagggaacaaagaaaaggccaggaaggtaataattaaccacttactgagttcaaagccatcttgctgttatcaacagcatcgagtaatgataggtatctggaatgttcaatatgacctagaagaaagaattgcaggactgtaatatttccataccagttagtttttagaagataaatctggaaagaactagaagaatctctagatgaaggttacct

SEQ ID NO: 32697 - DNA, 401 bp, Homo sapiens
gcgaattggagctccaccgcggtggcggccgaggtacgcggggaagggtggggagtgccctttcttgaaggaatcccttaagtgcacgtctcccgttttcttttcacatcaatgcagagtccctctgtgaatttacaacacccaacacccatgagttcagtccttaagaaggaaaattgagcaagtatttaattggttggacattgcataaaagaggtccatatccaggctaactctagaaattttattctcaaacttagttggcctctttttcttctgtcagaggaccattcttagtggcactggggaaatcttggcacccagaagaattcaactgcgctcactgcaaaaatacaatggcctacattggatttgtagaggagaaaggagccctgtattgt

SEQ ID NO: 32698 - DNA, 434 bp, Homo sapiens
actactatagggcgaattggagctccaccgcggtggcggccgaggtacacaattaccttaacttcaaataaagtgttcttttctccatactcttctattcccttaacaatccctgttctcaaaggcctttgtgttttattttctgctttataacaaaacaaaaaaacaaacacccaccgtcctatgacacaggtgtttttgaatccatgtcaatttttgtagttagtatatgctggttaaaccacatagcatatcccccaaaaagccagaggcaagcaaaaacttaatttgatgcccttcaagtttcggaaggtcccatttctttttattaaccaaaagataagatgaaagctcagcatggctattggctgtgattagataactttttgatattttcattttcccttaccgagctgctgcttctaagctgaact

SEQ ID NO: 32699 - DNA, 266 bp, Homo sapiens
cgcggtaggcggccgaggtacagatctcatcaggtatgagggcagtctctgacgcgaacgtctcttcctcgtggtttttattgtcagtattcacacgaagtttaagtctcctagtgggcacccagacgggattgacgatctcctggtaaaacacaagcatacccctcttccccacgttataattgttccaggttcccaggtattggtttgggagtttttccatgacactggcttgccttcgtttagggagaattttttgcctgtat

SEQ ID NO: 32700 - DNA, 332 bp, Homo sapiens
actactatagggcgaattggagctccaccgcggtggcggccgaggtacttgtagtgaaaaaatatacatttttactttcaaggttaaaatagaccatcagctcattatctctcttagccaatagctatgaagactaaaatggctcttcttgcttctggctcacttgaacatcttatttgtactgaagacaaaaaggatagcagtgctaaagaaaagggtatacccggttcccaagataggtgcggttgaggttctcgcacaaggtgacttaaaacaaaaataacacaactcagttgatccaatctacacacaatgggtgttgcataatcaac

SEQ ID NO: 32701 - DNA, 434 bp, Homo sapiens
tacactactatagggcgaattggagctccaccgcggtggcggccgcccgggcaggtacgccgggacatcaatgcagagtccctctgtgaatttacaacacccaacacccatgagttcagtccttaagaaggaaaattgagcaagtatttaattggttggacattgcataaaagaggtccatatccaggctaactctagaaattttattctcaaacttagttggcctctttttcttctgtcagaggaccattcttagtggcactggggaaatcttggcacccagaagaattcaactgcgctcactgcaaaaatacaatggcctacattggatttgtagaggagaaaggagccctgtattgtgagctgtgctatgagaaattctttgcccctgaatgtggtcgatgccaaaggaagatccttggagaagtcatcaa

SEQ ID NO: 32702 - DNA, 421 bp, Homo sapiens
tatagggcgaattggagctccaccgcggtggcggccgcccgggcaggtacgcggggaagacacctgtgatttgatgtgagccagtcacagaggaagccatttccagagaggaacaaccgtgtagactgctttcctgggagtcaagttaaaacttctctcctgtgaccttgtcacccggcagtggaaagttacccttggctgcagccacgacttccgcatactcttcagaacttgctctgcccttgagttttccagctttcctttaatgcactaaacctttaatattgtattctcctaaatgagacgtctcgcatttgagcagggagagtcccgtattctcagagtaaaagttgtttctggaattgatctcgccaaaaaggacatttttggagccagtgatccctatgtgaaactttcattg

SEQ ID NO: 32703 - DNA, 393 bp, Homo sapiens
gcgaattggagctccaccgcggtggcggccgccgggcaggtacatctctagatgatcacgaatgtcaaatatcacactacactgtgatatggggattccccttgggggttttcatgtgtatagggtgcctgcagctacactaaacatcttaaagctaccacaatgttcacttcatatttttgctttttataggctttcttggtctcctcctatgttcccatcattttcttgctttgaatctgtaagaatcgagttgaatcttctccattttaaattttccataggctgagaaactgtttagccaagtttggataaaattgtatccaaagtaagagtatacaaggctatgggcaaagtccaaaatcaaagctgttcacagggaccaatgttctc

SEQ ID NO: 32704 - DNA, 419 bp, Homo sapiens
ctatagggcgaattggagctccaccgcggtggcggccgcccgggcaggtacgcggggctttcttgaaggaatcccttaagtgcacgtctcccgttttcttttcacatcaatgcagagtccctctgtgaatttacaacacccaacacccatgagttcagtccttaagaaggaaaattgagcaagtatttaattggttggacattgcataaaagaggtccatatccaggctaactctagaaattttattctcaaacttagttggcctcttttttttctgtcagaggaccattcttagtggcactggggaaatcttggcacccagaagaattcaactgcgctcactgcaaaaatacaatggcctacattggatttggagaggagaaaggagccctgtattgtgagctgtgctatgagaaatt

SEQ ID NO: 32705 - DNA, 433 bp, Homo sapiens
ctactatagggcgaattggagctccaccgcggtggcggccgcccgggcaggtaccgcctgcagagccataatccaaatatatcttttttctttgtaaattactgtctcaggtattcctttatataatgcacaaatagcctaacataacacgcatctcaataattgccccattgtcacatttcaaaaataccttgtgaaggttgttatagagatattggctatctgggttgttttgttttgagaggacagtaacatttgattattaaaaaaaaaaatcctagcacaatgtggcttggcattgtttattgttttctatacaagtcataaaccattattatatgtgctcatgttcctttatatagaaaatatataaaaaaaggatttttgttttactctttaaaaagttttcatggctgggcgtgattggctcact

SEQ ID NO: 32706 - DNA, 415 bp, Homo sapiens
ctactatagggcgaattggagctccaccgcggtggcggccgcccgggcaggtacgaaaaaatcaggctactaagcccactgttaatatagacgcagaccaattgttaggaacaggtccaaattggagcaccattaaccaacaatcagtgatgcagaatgaggctattgaacaagtaagggctatttgcctcagggcctggggaaaaattcaggacccaggaacagctttccctattaattcaattagacaaggctctaaagagccatatcctgactttgtggcaagattacaagatgctgctcaaaagtctattacagatgacaatgcccgaaaagttattgtaagaattaatggcctatgaaaatgcaaatccagattggtcagtcggccataaagccattaaagggaaaagtt

SEQ ID NO: 32707 - DNA, 184 bp, Homo sapiens
cgactcactatagggcgaattggagctccaccgcggtggcggccgcccgggcaggtactttgcaaatgattatcgagtagttaaccaatttgccagacattatcagactggacagccactgccaaaaaatatggtgtctcgtctttgtgaatctaaaaaggtttgtgctgcaactgatatgcaa

SEQ ID NO: 32708 - DNA, 414 bp, Homo sapiens
tatagggcgaattggagctccaccgcggtggcggccgaggtacgcgggggaaataaggaatgaacgttatgtaaagaccataatgctagtcagagaatgttccaatggaaaactgatgtttccttctgccaccaggacaaaacttttgtgatctaaaggcaaaacaataacaaaaacagcaacagcaacaaaaaccagcctaacagtcccaagtggtcttcactgtcatgattattaagcattttctccaaagtctgaactacagtttgttgaggtttcattgaaaatgatactaaaacaaatttgcttaaaagtaaaatggagttattggcatcacaaagatcatagtcacctttcttaagaattgcataacctttaatgactgtaaaggatttttaaagaacgaatccttgc

SEQ ID NO: 32709 - DNA, 429 bp, Homo sapiens
tacgactcctatagggcgaattggagctccaccgcggtggcggccgaggtacgcggggagagtccctctgtgaatttacaactttccaacacccatgagttcagtccttaagaaggaaaattgagcaagtatttaattggttggacattgcataaaagaggtccatatccaggctaactctagaaattttattctcaaacttagttggcctctttttcttctgtcagaggaccattcttagtggcactggggaaatcttggcacccagaagaattcaactgcgctcactgcaaaaatacaatggcctacattggatttgtagaggagaaaggagccctgtattgtgagctgtgctatgagaaattctttgcccctgaatgtggtcgatgccaaaggaagatccttggagaagtcatcaatgcgttgaaa

SEQ ID NO: 32710 - DNA, 330 bp, Homo sapiens
gcgggcggccgcccgggcaggtaccgaggtcattttgcttcctatagactgcgaccttttggcaaaagctgttctaactccatctcagcatttacaattccatacctggtggtcagaggaggcccgcctgcaggctcagctaaatcgggctgatggcaattccattactcaggctcagctcacaggctccgataattactctgatactactgctcatttaggctttgatgctctcaccacggaacaagtaacaaaggtgtgtatgagagcttgggataaattacgcaccccaggccaagcaaaggttgctggtactatggttaaacaggg

SEQ ID NO: 32711 - DNA, 352 bp, Homo sapiens
actacactactactatatgggcgaattggagctccaccgcggtggcggccgcccgggcaggtacatctctagatgatcacgaatgtcaaatatcacactacactgtgatatggggattccccttgggggttttcatgtgtatagggtgcctgcagctacactaaacatcttaaagctaccacaatgttcacttcataattttggcttttaataagcttttcttggtctcctcctatgttcccatcattttcttgctttgaatctgtaagaatcgagttgaatcttctccattttaaattttccataggctgagaaactgtttagccaagtttggataaaattgtatccaaag

SEQ ID NO: 32712 - DNA, 368 bp, Homo sapiens
actactatagggcgaattggagctccaccgcggtggcggccgaggtacgcgggggaaatgacacatgaaaaaaaggttacatcagcccataaagcacatagccaccgtaagtaattgcataatggaacagatataaaaggactgtatgaggcaaaagaagtcttctgggaattctcacacccctgaagacacagtgagttaccaccaccaccaggaattggcctttcagctctgtgcctgtctccagtcaggctggaataagtctcctcatatttgcaagctcggccctcccctggaatctaaagcctcctcagccttctgagtcagcctgaaaggaacaggccgaactgctgtatgggctctactgc

SEQ ID NO: 32713 - DNA, 343 bp, Homo sapiens
tagggcgaattggagctccaccgcggtggcggccgcccgggcaggtactttcttcctcatactgactatagtcatccacctccattcgagactccaagagagaaagaggatcactgcagcacaccccattttcatgaagcccctctgtataagaccccctattttcctcatctcgttttagctggatttttaattttgtagaactactgcctgatcctgagttaaatccattattaagctttgctacatagagattgttatcgttgtcatggtctttgcttaacttgatgcttattttggaagagtttatttccatcattctcttggtcattttgttttgtct

SEQ ID NO: 32714 - DNA, 424 bp, Homo sapiens
cgactcactatagggcgaattggagctccaccgcggtggcggccgcccgggcaggtaccgaggtcattttgcttcctatagactgccaccttttggcaaaagctgttctaactccatctcagcatttacaattccatacctggtggtcagaggaggcccgcctgcaggctcagctaaatcgggctgatggcattccaattactcaggctcagctcacaggctccgataattactctgatactactgctcatttaggctttgatgctctcaccacggaacaagtaacaaaggtgtgtatgagagcttgggataaattacgcaccccaggccaagcttctgtttcttttactattgttaaacagggtcacaatgaattatatcttgattttttagctaaattacaagatgctgttgaaaaatctga

SEQ ID NO: 32715 - DNA, 346 bp, Homo sapiens
ctatagggcgaattggagctccaccgcggtggcggccgaggtacttccaaaccctcctgttctttcctttttgttttccccaattttaacataaggcaaaagcagtaattgagcaattctatcacctggattggcactccggggaacagtggagctgatcactaactgaattccccctttataatctgaataaattaccccagtatgaatttggactcccttcaaatttagacttgatctccctcaaaggcctaccctcccttctggcagcgggccatatacccctctaggaatcttttgtgggggctttccagggagtaaaaagaccatttgggtggaacataaa

SEQ ID NO: 32716 - DNA, 338 bp, Homo sapiens
cgcgcgtatacgactcactatagggcgaattggagctccaccgcggtggcggccgaggtacgcgtcacagtagatagtgtcctatagccactggaatgtcctaaaccgaatgaatctgactctggtgacctttcaaacagaagtcacatgagctccttcatttggttgtagttcttcttagaaggtgtgataaccacgatctcaggggaaagaattagaaatggggttgttggaaccatttcttacaaaccaattacagtaatttccacaagcccaattagccatgtctgtttgcttacccttggggatgttcaattttgatgttcattccatattaa

SEQ ID NO: 32717 - DNA, 379 bp, Homo sapiens
gactcactatagggcgaattggagctccaccgcggtggcggccgcccgggcaggtaccagttgtaaaattaccaggaaccgccatgcctcaagatcgccctgttttctggcttcatcaatgactgcatgcagtgcaccaccctgtccactacgtgatgctgtaggattaagtctcacagtgggcgggtgaagatacagcgccgcgtcctgtgttgctggtgaattagacgccatcgctgtgggttgctggtatggtgccgtgctatttggcacaggacacaccgcttgaggtctgtattgaacctctgaaggaggccgatactgaagctcggttggcagccggtattgataaactaccaatcggtttgggtcttatttt

SEQ ID NO: 32718 - DNA, 443 bp, Homo sapiens
acgactactatagggcgaattggagctccaccgcggtggcggccgaggtacgcggggcttcttgaaggaatcccttaagtgcacgtctcccgttttcttttcacatcaatgcagagtccctctgtgaatttacaacacccaacacccatgagttcagtccttaagaaggaaaattgagcaagtatttaattggttggacattgcataaaagaggtccatatccaggctaactctagaaattttattctcaaacttagttggcctctttttcttctgtcagaggaccattcttagtggcactggggaaatcttggcacccagaagaattcaactgcgctcactgcaaaaatacaatggcctacattggatttgtagaggagaaaggagccctgtattgtgagctgtgctatgagaaattctttgcccctgaatgtggtcgatgc

SEQ ID NO: 32719 - DNA, 313 bp, Homo sapiens
tatagggcgaattggagctccaccgcggtggcggccgaggtacatctacctaaaggactattatgtggaataatacatactaatgaagtattacatgatttaaagactacaataaaaccaaacatgcttataacattaagaaaaacaataaagatacatgattgaaaccaagttgaaaaatagcatatggccttggaggaaatgtgctcaaattactaatgatttagtgttgtccctactttctctctcttttttctttctttttttttattatggtaagctgtcacatacaacttttttttttttttttttg

SEQ ID NO: 32720 - DNA, 425 bp, Homo sapiens
cactactatagggcgaattggagctccaccgcggtggcggccgaggtacaaagtccctgaggcaaaagcatgcttgctgtgttctaggaaaagcaaggaagacagcatgtctatagcagtgggaggtggaaggataataaacagtaggtgaggttagaggggaccaaatcatgtattttccatccagaggttcccaaccttggctgcacattagatttattctaaggagcttttaaaaaaataccaatgactgggtcccagcctagagtgattaaatcagaatctctggaggtagacttgagaatctgatgtttgcaagtttcctaggcaagtcaaggctgaggaagactgctgcaggccattgtaagagccaggcgttgatctcattcaacctttccctcagctcttctaaaaacagccagcat

SEQ ID NO: 32721 - DNA, 447 bp, Homo sapiens
gtaatacgactactatagggcgaattggagctccaccgcggtggcggccgcccgggcaggtaccaggagggtattgatgtttgaggtccaaactgaaaacccatcacctccttcccactgctatagcagcgttagccctggggttcattatctagccagttcacaccttctaaagtggggctctgaaaatgtcttacttccctcacagacaaagcaattctcaagcctcctgagatcacccaccaaccagagcaactgctgtcacttggaggtgcagctgaattcttctaattgtgacacaaactcttgaaactgtaaatgctgaaagattaaatgaggttataacactcagaaggttttacaagtaaaagtaagtcaaatcaataggtctttatttcatatctgtaatggtttagctctgcgggaagtgttagcagctatatgaat

SEQ ID NO: 32722 - DNA, 409 bp, Homo sapiens
agggcgaattggagctccaccgcggtggcggccgcccgggcaggtacgcggggacatcaatgcagagtccctctgtgaatttacaacacccaacacccatgagttcagtccttaagaaggaaaattgagcaagtatttaattggttggacattgcataaaagaggtccatatccaggctaactctagaaattttattctcaaacttagttggcctcttttttttctgtcagaggaccattcttagtggcactggggaaatcttggcacccagaagaattcaactgcgctcactgcaaaaatacaatggcctacattggatttgtagaggagaaaggagccctgtattgtgagctgtgctatgagaaattctttgcccctgaatgtggtcgatgccaaaggaagatcctt

SEQ ID NO: 32723 - DNA, 429 bp, Homo sapiens
tatagggcgaattggagctccaccgcggtggcggccgcccgggcaggtacgcgggacatcaatgcagagtccctctgtgaatttacaacacccaacacccgtgagttcagtccttaagaaggaaaattgagcaagtatttaattggttggacattgcataaaagaggtccatatccaggctaactctagaaattttattctcaaacttagttggcctcttttttttctgtcagaggaccattcttagtggcactggggaaatcttggcacccagaagaattcaactgcgctcactgcaaaaatacaatggcctacattggatttgtagaggagaaaggagccctgtattgtgagctgtgctatgagaaattctttgcccctgaatgtggtcgatgccaaaggaagatccttggagaagtcatcaatgcg

SEQ ID NO: 32724 - DNA, 230 bp, Homo sapiens
tacgactaactatagggcgaattggagctccaccgcggtggcggccgaggtactttcttcacaaatggtggaaactcctgagaagacatggcttcttccatggatatcaatgactgccatcaggccagccaggcagactcagtcatcaattgggcccaccattaaaatcagctttcctggttgaggagaacgctaattctttctttggaaaggacacaagcaagcagtgg

SEQ ID NO: 32725 - DNA, 433 bp, Homo sapiens
actcactatagggcgaattggagctccaccgcggtggcggccgcccgggcaggtacatacattctatgacagactctaaaagttctctgctagacatgcatgatttataacacttaactgatctatgatcgcgaatatctgaaatgctgactgctactctctgagagactgaatgacagaaagatgtgtgtgaacccaaggctgcgcataatagctaactctataaaatagatggataattctaagggtctcctgcaaaagatggccttctgaaggctaactgctgaatgaaagtttctattccaactaaagccttagaatagatggacatgcaaactttcaaaggcagagcctcccgagaagccatctgccttcgagcctgccattgaaatgcaaaagtctgttccaaataaagccttggaattgaagaatg

SEQ ID NO: 32726 - DNA, 433 bp, Homo sapiens
  misc_feature 216, 217, 218, 219, 221: n = A,T,C or G
actactatagggcgaattggagctccaccgcggtggcggccgaggtaccatgctgacttcttggtatcttttaaggcctaattttcccttccttgagattactgtagtgtgttccagctaatttctatttggaaacgagttggaacagctgaaaactaggtattattgaaggcaaagcagcctcacgtcatttttttatcagctcatttgggaagnnnntntttttttttttttttttttttggggtaattagaaagtaggctgggcacgggggctcatgcctataatcccagcacttggggaggccgaggatctcctctctggtggatcacttgagggcaggagttaagagaccatcccggccaacatgatgaaaccctgtctctactaaaaatacaaaaagttgctgggcgtggtggcatactcttacaat

SEQ ID NO: 32727 - DNA, 352 bp, Homo sapiens
aatacgactcctatagggcgaattggagctccaccgcggtggcggccgaggtacgcggggacatcaatgcagagtccctctgtgaatttacaacacccaacacccatgagttcagtccttaagaaggaaaattgagcaagtatttaattggttggacattgcataaaagaggtccatatccaggctaactctagaaattttattctcaaacttagttggcctctttttcttctgtcagaggaccattcttagtggcactggggaaatcttggcacccagaaaaattcaactgcgctcactgcaaaaatacaatggcctacattggatttgtacaggattataggtagccctg

SEQ ID NO: 32728 - DNA, 444 bp, Homo sapiens
atacactactatagggcgaattggagctccaccgcggtggcggccgcccgggcaggtaccgactcctcagaaactggcatgccaaatcaaaatgggtctggttcaatcctccctaatggcaatgtaaacccctctaactaatcccacttctcctaattatctttttctccttacgaacctaaaaatctcaccatttctattagcctgaaaataacatccctctgttcttctcttcctccttcagcactggatctcacttacaataggttttatttaataattatcttccttacactttctgtctcaccagtttccccttaaactgatttacctgctacacaaaattattcttattgggcttatgtgccttttcctccacttattcgacctctcacctggatggatgctcctgcagaaatctatactaacgatagtgtgtggatg

SEQ ID NO: 32729 - DNA, 329 bp, Homo sapiens
gcgaattggagctccaccgcggtggcggccgaggtaccggccctccaagtagtgtttgcgaatacacgtcctgttgtgaaagaggtgaggagaaaggagtaggaaggctcataggacataacaggcaaaaagaaacaagagaggtaaataaaaagaattaatctaatggcttcacccggcttaggcgcagttttaaggggcctgacccaggctttgggacccatgtttctagttgggctctgttggcctttttgttgtgggagtgatgaatccaagcaggaattccattcccctccagaaccgttggcgttcgtgaggatgtatggtgt

SEQ ID NO: 32730 - DNA, 424 bp, Homo sapiens
cgtaatacgactcactatagggcgaattggagctccaccgcggtggcggccgaggtacgcggggacatcaatgcagagtccctctgtgaatttacaacacccaacacccatgagttcagtccttaagaaggaaaattgagcaagtatttaattggttggacattgcataaaagaggtccatatccaggctaactctagaaattttattctcaaacttagttggcctcttttttttctgtcagaggaccattcttagtggcactggggaaatcttggcacccagaagaattcaactgcgctcactgcaaaaatacaatggcctacattggatttgtagaggagaaaggagccctgtattgtgagctgtgctatgagaaattctttgcccctgaatgtggtcgatgccaaaggaagatccttggag

SEQ ID NO: 32731 - DNA, 425 bp, Homo sapiens
agggcgaattggagctccaccgcggtggcggccgggcatttctcccagggatctctgtgcttccttttgtgcttcctgtgtgtgtggatatttaaaggggctggaaatgtgcaaaaacatgtcactacttagacattatattgtcatcttgctgtttctagtgatgttaattatctccatttcagcagatgtgtggcctcagatggtaaagtcagcagcctttcttatttctcacctggaaatacatacgaccatttgaggagacaaatggcaaggtgtcagcataccctgaacttgagttgagagctacacacaatattattggtttccgagcatcacaaacaccctctctgtttcttcactgggcacagaattttaatacttatttcagtgggctgttggcaggaacaaatgaagcaatctac

SEQ ID NO: 32732 - DNA, 425 bp, Homo sapiens
ttggagctccaccgcggtggcggccgaggtaccgaggtcattttgcttcctatagactgcgaccttttggcaaaagctgttctaactccatctcagcatttacaattccatacctggtggtcagaggaggcccgcctgcaggctcagctaaatcgggctgatggcattccaattactcaggctcagctcacaggctccgataattactctgatactactgctcatttaggctttgatgctctcaccacggaacaagtaacaaaggtgtgtatgagagcttgggataaattacgcaccccaggccaagcttctgtttcttttactattgttaaacagggtcacaatgaattatatcttgattttttagctaaattacaagatgctgttgaaaaatctgtctctgatgagcacactcaaggtattct

SEQ ID NO: 32733 - DNA, 400 bp, Homo sapiens
agggcgaattggagctccaccgcggtggcggccgaggtacgcggggacatcaatgcagagtccctctgtgaatttacaacacccaacacccatgagttcagtccttaagaaggaaaattgagcaagtatttaattggttggacattgcataaaagaggtccatatccaggctaactctagaaattttattctcaaacttagttggcctctttttcttctgtcagaggaccattcttagtggcactggggaaatcttggcacccagaagaattcaactgcgctcactgcaaaaatacaatggcctacattggatttgtagaggagaaaggagccctgtattgtgagctgtgctatgagaaattctttgcccctgaatgtggtcaatgccaaaggtaagatc

SEQ ID NO: 32734 - DNA, 442 bp, Homo sapiens
cacctatatgggcgaattggagctccaccgcggtggcgggccgcccgggcaggtacttcctagaagcactggaagaggactggtgatggtggagggtgagagggtgccgtttcctgctccagctccagaccttgtctgcagaaaacatctgcagtgcagcaaatccatgtccagccaggcaaccagctgctgcctgtggcgtgtgtgggctggatcccttgaaggctgagtttttgagggcagaaagctagctatgggtagccaggtgttacaaaggtgctgctccttctccaacccctacttggtttccctcaccccaagcctcatgttcataccagccagtgggttcagcagaacgcatgacaccttatcacctccctccttgggtgagctctgaacaccagctttggcccctccacagtaaggctgctacatcaggggc

SEQ ID NO: 32735 - DNA, 427 bp, Homo sapiens
ctatagggcgaattggagctccaccgcggtggcggccgaggtaccagttgtaaaattaccaggaaccgccatgcctcaagatcgccctgttttctggcttcatcaatgactgcatgcagtgcaccaccctgtccactacgtgatgctgtaggattaagtctcacagtgggcggctgaggatacagcgccgcgtcctgtgttgctggtgaaatagacgccatcgctgtgggttgctggtatggtgccgtgctatttggcacaggacacaccgcttgaggtctgtattgaacctctgaaggaggccgatactgaagctcggttggcagccggtattgataaactaccagcggttgggtcttattttctaccggctgatattgtggatactgtatctgagttggcattgccgggatagagactctgtccc

SEQ ID NO: 32736 - DNA, 429 bp, Homo sapiens
tatagggcgaattggagctccaccgcggtggcggccgaggtacttggagcttaaatacaaggcaattgtgtgcctgcaaaaacaaaaagagcaatattatccttaagatttcaacaagacacagtgtctcatcacataatccaaagaagtccaggttacaagccccaaaatattcagcattatgaaaaaccagggagatcttaattcacatggcaaagagaatccttgcataacaatattgagaggacacatatgtcaaaatcatctgacacatacattaaagcagttattataacaatgctcctagaattacgggatagcattcatgaagtgaatggaaagttggaaagtctcaccaaatatttggaatatgtaaacaccaatttaaacttaagaattaaagtattaaccaaaactattaggggaaat

SEQ ID NO: 32737 - DNA, 434 bp, Homo sapiens
actactatagggcgaattggagctccaccgcggtggcggccgaggtacgcgggataggaacttggcttgaaatgttaaaaaggcaggaaaaaacagcagaatctatttttcattgtgggagagcccaggttgtcctgcttatctgaaattaagcccaaatcctaaaatttctgaatacctgctgtcagcttcctgcaaacgggccaggttgcctaaggaatgtcatgagagagctgacagaggcaggggacaggacaggcaccagcaaacaccacttcaccatgcagctattttcatgtcctcccagcccactgaagtgctgataatggcttggatcaattcaacaaacacatttcgtatacctcctttgcaccagacagtgttcaccgaggcacgcagggtggccgcaggtttaaacttacacgaatcgcttt

SEQ ID NO: 32738 - DNA, 429 bp, Homo sapiens
actactatagggcgaattggagctccaccgcggtggcggccgaggtacaagcttcatttgccacaaaactcacaaaaaagtaattgattaaagaatatctcttttatgcaaaatatacattttaggatataatttaattgatattctactatatactgacattgctccttgatcattgaataaaaaaatactctcattgccagaattatgtttttgtaatatttataattgaggtaataatgataaaagacttaaactatgaataatgttggtgagttccatttaagctataacaatttcccagaactaaacaaatatgtgactaaacataggtcatttttgataaatgaatactaacaatttcacaacataattgacaagctgattacatcagtaatttataagaaaattatacaatcaagttcatag

SEQ ID NO: 32739 - DNA, 417 bp, Homo sapiens
actactatagggcgaattggagctccaccgcggtggcggccgaggtaccgaggtcattttgcttcctatagactgccaccttttggcaaaagctgttctaactccatctcagcatttacaattccatacctggtggtcagaggaggcccgcctgcaggctcagctaaatcgggctgatggcattccaattactcaggctcagctcacaggctccgataattactctgatactactgctcatttaggctttgatgctctcaccacggaacaagtaacaaaggtgtgtatgagagcttgggataaattacgcaccccaggccaagcttctgtttcttttactattggtaaacagggtcacaatgaattatatcttgattttttagctaaattacaagatgcttgtgaaaaatctgtctc

SEQ ID NO: 32740 - DNA, 426 bp, Homo sapiens
tacactactatagggcgaattggagctccaccgcggtggcggccgaggtaccggtgccatcacacgctggtcagagtggccatttgtcttgtctttctaccgatgataaaatcaggaattgaaggatatatgcacaacggtatactcttcgaccatcaaacttccggacatcagttcactaccagcaagatggagaaacctgtccatccatagatgaagggatgaagaaactgcagtatatctgcacaacacaatactcttcatccataattaatgtaattttcatttggagccatatggatgaaccatgaaagaaaaacgccccaaagaagctgggccacggagaaaccacgccaaagcactgtcctcagcagttagcaccatggacaggaaggtggtttcttccccaagatgcgccctcaagtt

SEQ ID NO: 32741 - DNA, 428 bp, Homo sapiens
gtatacactactatagggcgaattggagctccaccgcggtggcggccgcccgggcaggtaccatcatgcctcactaatttttttttttgtatttttagtagagatggggtttcatcatgttggtcaggctggtcgtgaactccttacctcgtgatccgcccgccttggcctcccaaagtctgagatgacaggtgtgagccaccgtgcttggctgacatatgattcttttgattatgttgcaaccattgaaaaatataaaatcactcttttttaatatatatttttctttttttaggaaattaaaggaaataagaatggctcctacataggcagagtaggctaaaatcacacttagctgactgtgaagtcatatactgcatatcgttacttcattgatctccttgtctcactttcccacttccctcacc

SEQ ID NO: 32742 - DNA, 203 bp, Homo sapiens
tcactatagggcgaattggagctccaccgcggtggcggccgaggtacccctccaagccggacaacccgggcgaggacgcaccagcggaggacatggccagatactactcagcgctgcgacactacatcaacctcatcaccaggcagagatatggaaaacgatctagcccagagacactgatttcagacctcttgatgagaaga

SEQ ID NO: 32743 - DNA, 292 bp, Homo sapiens
  misc_feature 232: n = A,T,C or G
tagggcgaattggagctccaccgcggtggcggccgaggtacgcggggcttaagtgcacgtctcccgttttcttttcacatcaatgcagagtccctctgtgaatttacaacacccaacacccatgagttcagtccttaagaaggaaaattgagcaagtatttaattggttggacattgcataaaagaaggtccatattccaggcttaactctagaaatttttatttctcaaancttagttttggcctctttttttcttctgttcagagggaccatttcttagtagtgcactgg

SEQ ID NO: 32744 - DNA, 410 bp, Homo sapiens
agggcgaattggagctccaccgcggtggcggccgaggtacgaaaaaatcaggctactaagcccactgttaatatagacgcagaccaattgttaggaacaggtccaaattggagcaccattaaccaacaatcagtgatgcagaatgaggctattgaacaagtaagggctatttgccttagggcctggggaaaaattcaggacccaggaacagctttccctattaattcaattagacaaggctctaaagagccatatcctgactttgtggcaagattacaagatgctgctcaaaagtctattacagatgacaatgcccgaaaagttattgtagaattaatggcctatgaaaatgcaaatccagaatgtcaagtcggccataaagccattaaaaggaaaagtttccagcagga

SEQ ID NO: 32745 - DNA, 315 bp, Homo sapiens
tatagggcgaattggagctccaccgcggtggcggccgaggtacgcggggacatcaatgcagagtccctctgtgaatttacaacacccaacacccatgagttcagtccttaagaaggaaaattgagcaagtatttaattggttggacattgcataaaagaggtccatatccaggctaactctagaaattttattctcaaacttagttggcctctttttcttctgtcagaggaccattcttagtggcactggggaaatcttggcacccagaagaattcaactgtgctcactgcaaaaatacaatggcctacattgga

SEQ ID NO: 32746 - DNA, 431 bp, Homo sapiens
ctatagggcgaattggagctccaccgcggtggcggccgaggtacatcatatttgcttgttggctttatgataacttagaaataatattctggattaactgtgtgactcatgagaagatttgtgcaactatgtttccaaatttacttgattttcaagacttacactagaaccgtgagaacagggtaataaataagcatatgtattaatatcacctttggtcaactcttgggtagccccaacggtagtgtaggaattaacgtaatttttcctactaaaagtattggatttgttttgagagaccacagttgaaaatcattgacatacaaagtttaaaaattgttaggttaaaaaattttaaatgcatttgaagtggttttatagaaaaataattatctaacttggtttatattgacaggttgttttcttggata

SEQ ID NO: 32747 - DNA, 420 bp, Homo sapiens
ctcactatggggcgaattggagctccaccgcggtggcggccgcccgggcaggtaccattcctctaaatttactacctaattctttgcctttaattgtccccatgggggtcactggccctttacctcaaggttcggtgggcctggtgttaggcagggcatccacctcatgatactaaaggtatcatagttcatactagtctcattaattctgattcctctgatgagattaaacttatgtaaacttatggtgtctgccaaagttcctgtttccattccggccagtgagtcaattgctcaattacttttactacctaacattgttttaaacaaaggagataagacatggggccctgggatgggctccagcggtgaaaaagccgcttattggattaatgtaatttctaaacaatggcctacctg

SEQ ID NO: 32748 - DNA, 427 bp, Homo sapiens
tacgactactatagggcgaattggagctccaccgcggtggcggccgaggtacgcggggagtgataacattagaaactcattggagcacgaaccctgttgtgaactgcctatccgaaggatctaggttgtgtgcttcgtatgagaatctaatgccagatgatctatcattgtctcactttgcccccagataagaccatctagttgcagaaaaataagcccagagcttccactgattctacattatggatatgtgccgccgaagcaagcacaaagccctacttttacacatgcctagtgatgcttcatggacaaggcttggctctgttgagtccaactaacctacctgagattctgagatttctcttcaatggcttcctgtgagctagagtttgaaaatatcttaaaatcttgagctagagatggaagt

SEQ ID NO: 32749 - DNA, 426 bp, Homo sapiens
atacgactactatagggcgaattggagctccaccgcggtggcggccgaggtaccatactcttttggttgctataattctgtggtataatatgaagtcagaaaatataattcctccaattttatttatttatttatttttgcttaggatagtattatttcttatagtgaaagcattctatgttatttattattagtctaattttgtagttttacaatgctatcctcttttacaaagctatgatcaactcagtgtgtccagatcaggatcatttgtagctatttgcaaaagtagcaatattctggctgggcatggtggctcatgcttatattcccagcactttgggaggccaagacaggcagatcacctgaggtcagaggttcaagatcagcctggtcaacatggtgaaaccctgtctccaataaaaa

SEQ ID NO: 32750 - DNA, 419 bp, Homo sapiens
tactatagggcgaattggagctccaccgcggtggcggccgcccgggcaggtacgaaaaaatcaggctactaagcccactgttaatatagacgcagaccaattgttaggaacaggtccaaattggagcaccattaaccaacaatcagtgatgcagaatgaggctattgaacaagtaagggctatttgcctcagggcctggggaaaaattcaggatccaggaacagctttccctattaattcaattagacaaggctctaaagagccatatcctgactttgtggcaagattacaagatgctgctcaaaagtctattacagatgacaatgcccgaaaagttattgtagaattaatggcctatgaaaatgcaaatccagaatgtcagtcggccataaagccattaaaaggaaaagttccagcag

SEQ ID NO: 32751 - DNA, 430 bp, Homo sapiens
ctaatacactactatagggcgaattggagctccaccgcggtggcggccgcccgggcaggtacatctctagatgatcacgaatgtcaaatatcacactacactgtgatatggggattccccttgggggttttcatgtgtatagggtgcctgcagctacactaaacatcttaaagctaccacaatgttcacttcatatttttgctttttataggctttcttggtctcctcctatgttcccatcattttcttgctttgaatctgtaagaatcgagttgaatcttctccattttaaattttccataggctgagaaactgtttagccaagtttggataaaattgtatccaaagtaaagagtatacaatgctatgggccaagtccaaaatcaaagcttgttcacagggaccaatgttctctctaaaaggttctagg

SEQ ID NO: 32752 - DNA, 380 bp, Homo sapiens
cctatacactactatagggcgaattggagctccaccgcggtggcggccgaggtacaggttttttttccctctccctcatgtatcatgtttgaaaatgaagaatctttacccagtctctaaactggattcctttgacacagttatggaataaaatctttgatgtttccttctaaacagtgttcacatttgagggttgatggacttaaaacactaataaagataggcataaacagggccttttggaaataggggaagttgctgttgttgctgaaagaagaaaggtcataggaagggttggctgatgtgggaaaagtgactattccatagtgaagctttgagtatctcccattaattatggacctgttttcactgaataaaag

SEQ ID NO: 32753 - DNA, 416 bp, Homo sapiens
actactatagggcgaattggagctccaccgcggtggcggccgcccgggcaggtaccaaagagggcataataatcagtctcacagtagggttcaccatcctccaagtgaaaaacattgttccgaatgggctttccacaggctacacacacaaaacaggaaacatgccaagtttgtttcaacgcattgatgacttaccacctttccttcaaaggaggaaaattatctcccctgcaaagcccggttctacacagatttcacaaattgtgctaagaaccgtccgtgttctcagaaagcccagtgtttttgcaaataatgaaaagggaccccatatgtagcaaaaatcagggctgggggagagccgggttcattccctgtcctcattggtcgtccctatgaattgtacctgcccgggcggc

SEQ ID NO: 32754 - DNA, 418 bp, Homo sapiens
ctcactatagggcgaattggagctccaccgcggtggcggccgcccgggcaggtactttatacagagtccttgtttgcctttagtctgatgccgtgggtgagcctgagttgtcctgtggtccacgttcctgaccaggtgtctttctcacccactggtttcaaaaaagatgttactgggttatagaaggctgggatggaaacaggataccaagttcgcatgaagacagtatctgaaaagagaggtaatttactttaacattttcaaaagaagatgcatatccatattgtgaagaaacgaagaacaaaaccttcactccaaacttctctacctggttgcaaagtatttgaagggaaagctcactaaggaagctactcccatagatcccagaactgttactgggtgtggccaggggactgca

SEQ ID NO: 32755 - DNA, 440 bp, Homo sapiens
actactatagggcgaattggagctccaccgcggtggcggccgcccgggcaggtacgcggggctaaggtaaagatttaattaaataattttggcctctcatagttttctctctctttaaagagaataaatagagggccaggtgtggtggctcacgcctgtgatcccagcactttgggaggccaagaggggcggatcatgaggtcaagagatcaagatcatcctggccaacgtggtgaaaccctgtctctactaaaaatacaaaaatgagctgggcatggtggggcgtgcctgtagtcccatgtacctcggccgcccgggcaggtccgggcaggtacattgatgggctggagagcagggtggcagcctgttcttgcacagaaccaagaattacagaaaaaaagtccaggaagctggagaggcacaacatcttccttggtagc

SEQ ID NO: 32756 - DNA, 367 bp, Homo sapiens
ctatagggcgaattggagctccaccgcggtggcggccgcccgggcaggtacaaagtccctgaggcaaaagcatgcttgctgtgttctaggaaaagcaaggaagacagcatgtctatagcagtgggaggtggaaggataataaacagtatgtgaggttagaggggaccaaatcatgtattttccatccacaggttcccaaccttggctgcacattaaatttattctaaggagcttttaaaaaataccaatgactgggtcccagcctagagtgattaaatcagaatctctggaggtagacttgagaatctgatgtttgcaagtttcctagggcaagtcaaggcctgaggaaagactgcttgcaggccat

SEQ ID NO: 32757 - DNA, 411 bp, Homo sapiens
actactatagggcgaattggagctccaccgcggtggcggccgaggtacgcggggacatcaatgcagagtccctctgtgaatttacaacacccaacacccatgagttcagtccttaagaaggaaaattgagcaagtatttaattggttggacattgcataaaagaggtccatatccaggctaactctagaaattttattctcaaacttagttggcctctttttcttctgtcagaggaccattcttagtggcactggggaaatcttggcacccagaagaattcaactgcgctcactgcaaaaatacaatggcctacattggatttgtagaggagaaaggagccctgtattgtgagctgtgctatgagaaattctttgcccctgaatgtgggtcgatgccaaaggaagatcctt

SEQ ID NO: 32758 - DNA, 432 bp, Homo sapiens
tacgactactatagggcgaattggagctccaccgcggtggcggccgaggtacctttcattggattgtccatggtgcatcgctttagcaagcggcgtgactctccactgcccgtcatcttggccaatatctatctgctggttcctcctgtgctcaacccaattgtctatggagtgaagacaaaggagattcgacagcgcatccttcgacttttccatgtggccacacacgcttcagagccctaggtgtcagtgatcaaacttcttttccattcagagtcctctgattcagattttaatgttaacattttggaagacagtattcagaaaaaaaatttccttaataaaaatacaactcagatccttcaaatatgaaactggttggggaatctccattttttcaatattattttcttctttgttttcttgctacat

SEQ ID NO: 32759 - DNA, 449 bp, Homo sapiens
gtaatacgactcactatagggcgaattggagctccaccgcggtggcggccgcccgggcaggtacttccaaaccctcctgttctttccgttttgttttccccaattttaacataaggcaaaagcagtaattgagcaattctatcacctggattggcactccggggaacagtggagctgacactaactgaattccccctttataatctgaataaattaccccagtatgaatttggactcccttcaaatttagacttgatctccctaaaataaggcctaccctcccttctggcagcgggccatatacccctctaggaatcttttgtgggggctttccagggagtaaagagaccattttgggtggaacataaatctactgcggtgctgcctgctgtggcgcgggacagctgttggattgttgtaattggctgactccctgaagtggtggtatt

SEQ ID NO: 32760 - DNA, 308 bp, Homo sapiens
ctactatagggcgaattggagctccaccgcggtggcggccgaggtaccagttgtaaaattaccaggaaccgccatgcctcaagatcgccctgttttctggcttcatcaatgactgcatgcagtgcaccaccctgtccactacgtgatgctgtaggattaagtctcacagtgggcggctgaggatacagcgccgcgtcctgtgtcgctggtgaattagacgccatcgctgtgggttgctggtatggtgccgtgctatttggcacaggacacaccgcttgaggtctgtattgaacctttgaaggaggccg

SEQ ID NO: 32761 - DNA, 394 bp, Homo sapiens
  misc_feature 338: n = A,T,C or G
actactatagggcgaattggagctccaccgcggtggcggccgaggtacttttttttactttggcaacaaatatttatacatacaagatgctagttcatttgaatatttctcccaacttatccaaggatctccagctctaacaaaatggtttatttttatttaaatgtcaatagtcgttttttaaaatccaaatcaagaggtgcaggccaccagttaaatgccgtctatcaggttttgtgccttaagagactacagagtcaaagctcatttttaaaggagtaggacaaagttgtcacaggtttttgttgttgtttttattgcccccaaaattacatgtntaatttccatttatatcagggaattctatttactttgaagacctgtgaagttgcca

SEQ ID NO: 32762 - DNA, 236 bp, Homo sapiens
ctataggcgaattggagctccaccgcggtggcggccgcccgggcaggtactttctctttttttttttttaaataaatgaaaaattataaataaaattataatttaacttacaatattgaaacaaatacagactttcaggaggttgttaaattaatagtcttgcatgcccttcacccagtgatgacatttttttttttgagacgggggtcttgctcttgtcacccaggcttggagtg

SEQ ID NO: 32763 - DNA, 329 bp, Homo sapiens
gcgaattggagctccaccgcggtggcggccgaggtacattggatgtgaactcttttaaactataacatggacactttattggaaccaaactttagttttctacattaatgagaaacactggtaactttgcttcattgaaaaaataattgcttgttctctgtcagatgcacttcgtcttagtaacatggccatggggaagacaaccacaggccagatagtcaatctgctgtccaatgatgtgaacaagtttgatcaggtgacagtgttcttacacttcctgtgggcaggaccactgcaggcgatcgcagagactgccctactctggatgg

SEQ ID NO: 32764 - DNA, 437 bp, Homo sapiens
  misc_feature 76, 422: n = A,T,C or G
actactatagggcgaattggagctccaccgcggtggcggccgaggtactctgcacggggtgggagaaagacaacanagggcaggtgaagtgggcaggcatgtgctttggcgaccccaaaaagctggcaaggctgcggaggttcaaacttaccttgaacaccaggggggacaaagatgacagtaatcatgatcactacagctaaggagaatcccatagggagacttctttgggacagggtttctgcattttgccccctgaggaaaggggtattgggaagagcaacacagcaggctcagcttgcaggggaatgtgtgtgctgcagcaccccaagaactcttcagggaccagggaaatgggagccccacgctttctttttactttcatctcccagatagtataggaccagtcatgattccatagntaatttataaggaaa

SEQ ID NO: 32765 - DNA, 415 bp, Homo sapiens
aatacgactactatagggcgaattggagctccaccgcggtggcggccgaggtacttttttttttttttttttttttttggtagagacagggtttcaccatgttggccaggatgatcttgatctcttgacctcatgatccgcccgtcttggcctcccaaagtgctgggatcacaggcgtgagccaccacacctggccctctatttattctctttaaagagagagaaaactatgagaggccaaaattatttaattaaatctttaccttagcgcaagggaaaaatggaatttgcctaatataggtgatgaagcatacacaatgaacagaaacaatcacattttagtaaaaggcaaaaatttgagacttattaagctttatggtaagcttatttttgggtgggggaagaaatgagaaaa

SEQ ID NO: 32766 - DNA, 407 bp, Homo sapiens
tatagggcgaattggagctccaccgcggtggcggccgcccgggcaggtaccatgacccgttgcagccatcagcagtctccctatcagcttctgtttggggaaccctacatctttgaagaacttctgagcttgaagatccgcatctctccagatgcctttttccagattaacacagctggtgcagagatgctgtatcggactgtgggggagctgactggagtgaactctgacaccatccttcttgacatctgctgtggaactggtgtgattggcctctctctggctcagcatacatctcgggtccttgggattgaattgttggagcaggcagtggaggatgcaagatggactgcagccttcaatggcatcaccaactctgaatttcatactggtcaagcagagaagat

SEQ ID NO: 32767 - DNA, 434 bp, Homo sapiens
tacgactcactatagggcgaattggagctccaccgcggtggcggccgcccgggcaggtacgcggggacatcaatacagagtccctctgtgaatttacaacacccaacacccatgagttcagtccttaagaaggaaaattgagcaagtatttaattggttggacattgcataaaagaggtccatatccaggctaactctagaaattttattctcaaacttagttggcctcttttccttctgtcagaggaccattcttagtggcactggggaaatcttggcacccagaagaattcaactgcgctcactgcaaaaatacaatggcctacattggatttgtagaggagaaaggagccctgtattgtgagctgtgctatgagaaattctttgcccctgaatgtggtcgatgccaaaggaagatccttggagaagtcatc

SEQ ID NO: 32768 - DNA, 369 bp, Homo sapiens
acgactactatagggcgaattggagctccaccgcggtggcggccgaggtacgcggggacatcaatgcagagtccctctgtgaatttacaacacccaacacccatgagttcagtccttaagaaggaaaattgagcaagtatttaattggttggacattgcataaaagaggtccatatccaggctaactctagaaattttattctcaaacttagttggcctctttttcttctgtcagaggaccattcttagtggcactggggaaatcttggcacccagaagaattcaactgcgctcactgcaaaaatacaatggcctacattggatttgtagaggaggaaagggagccctgtattgtgaggctgtgctatg

SEQ ID NO: 32769 - DNA, 363 bp, Homo sapiens
atacgactcactatagggcgaattggagctccaccgcggtggcggccgaggtacaaaaatatcacgctactaaccccactgttaatatagacgcagaccaattgttaggaacaggtccaaattggagcaccattaaccaacaatcagtgatgcataatgaggctattgaacaagtaagggctatttgcctcagggcctgtggaaaaattcaggacccaggaacagctttccctattaattcaattagacaaggctctaaagagccatatcctgactttgtggcaagattacaagatgctgctcaaaagtctattacaggatgacaattgcccgaaaagttattgtaagaattaatgggcctat

SEQ ID NO: 32770 - DNA, 435 bp, Homo sapiens
ctatacactactatagggcgaattggagctccaccgcggtggcggccgaggtacaaagtccctgaggcaaaagcatgcttgctgtgttctaggaaaagcaaggaagacagcatgtctatagcagtgggaggtggaaggataataaacagtaggtgaggttagaggggaccaaatcatgtattttccatccagaggttcccaaccttggctgcacattagatttattctaaggagcttttaaaaaataccaatgactgggtcccagcctagagtgattaaatcagaatctctggaggtagacttgagaatctgatgtttgcaagtttcctaggcaagtcaaggctgaggaagactgctgcaggccattgtaagagccaggcgttgatctcattcaacctttccctcagctcttctagagacagccagcattctctt

SEQ ID NO: 32771 - DNA, 429 bp, Homo sapiens
  misc_feature 76: n = A,T,C or G
agggcgaattggagctccaccgcggtggcggccgaggtaccaccctcttgctgaaagcactggttcccctgttganagcttgctagggattacagtgggtttgactcaattcaagtaagtaagcaaacatttaagtatttttcaggcataaatgttagcgttcttatcctgtaatatgcgaagtaataaattatatacttactgcctttgttacaatgcatgcaaacacgtggtaaggtgttcataccttaggaagagatctgattctcaagaacagcagaaaataggaagcagagaatgagttaggatgaaattcaaatgggagaaagaaatgaagaagccagatacttccagtagttaatttcttaacatggctacttataataatagagaaatggttagaaaagaagggaaaagcaagaaaaatgt

SEQ ID NO: 32772 - DNA, 329 bp, Homo sapiens
  misc_feature 270: n = A,T,C or G
tactatagggcgaattggagctccaccgcggtggcggccgcccgggcaggtacacataacagaaaaatttaaaaggttagggatcatttaggaaaaaatgcaaatgccaacaaatgtgagaaaatgctcaatcttacttataatttaagaactacaattcagccaggcgcggtggctcatgcctgtaattcccagctactttgggaggctgaggcacgagaattgcttgaacccaagagggagagggttgcagtgagccaagaatcatgnccacttgggcactccagcctggggcgacagtagcaaagaacttggtcttctaaaaacaa

SEQ ID NO: 32773 - DNA, 311 bp, Homo sapiens
tacgactcactatagggcgaattggagctccaccgcggtggcggccgaggtacatcctgactctcaattcttgttttcctttgaagatccttcgaacccaacgtctcaactcacctggactggtttaccccaagggttcagggatagcccccatctatttggccaggcattagcccaagacttgagccagttctcatacctggaccctcttgtcctttggtacgcggggcctctcctctggccgccgcgcgggagagaggccgagatggcagatgagattgccaagggctcaggtcgcttcggccctggtg

SEQ ID NO: 32774 - DNA, 301 bp, Homo sapiens
tatagggcgaattggagctccaccgcggtggcggccgcccgggcaggtactggaacgtttgtcagtgagtttcatttccaaagtttaccctacatagggaattgtagaagtgagttagtagaagtgagttcgtgtgaaaccctggaaagaaaacaaaagccccatgcaacgcgttccgggctgttgtgtagatgcttattctagtcactaggggaagcacataaaaacacctgaggtgtgtgtgctgaagggcgaattttgtccttttggggagttcatgatataaacatctagaaccaaa

SEQ ID NO: 32775 - DNA, 339 bp, Homo sapiens
tacgactactatagggcgaattggagctccaccgcggtggcggccgaggtacaatgaaagtttcacatacggatcactggctccaaagatgtcctttttggcgagatcaattccagaaacaacttttactctgagaatacgggactctcccgagtgttacttgctcaaatgcgagacgtctcatttaggagaattcaatattaaaggtttagtgcattaaaggaaagctggaaaactcaagggcagagcaagttctgaagagtatgcggaagtcgtggctgcagccaagggtaactttccactgccgggtgacaaggtcacaggtagagaagttttaac

SEQ ID NO: 32776 - DNA, 410 bp, Homo sapiens
  misc_feature 360: n = A,T,C or G
tatagggcgaattggagctccaccgcggtggcggccgcccgggcaggtacgcggggatgtctcttgtcagctgtctttcagaagacctggtggggcaagtccgtgggcatcatgttgaccgagctggagaaagccttgaactctatcatcgacgtctaccacaagtacacctttcacagcagtcttaaagttgcagcagaagaatttaaagttcctgctgcaacaagtgcaattattaccaatgatggaataggaataaatcctgcacagactgctggaaatgtttttctaaaacatggttcagaactgcggattattcctagagatcgtgttggaaggttgttaatatctgctacttgngaacatacgattgcctttcagggataaatattggtatttttttgtttgtt

SEQ ID NO: 32777 - DNA, 423 bp, Homo sapiens
ctactatagggcgaattgtagctccaccgcggtggcggccgaggtactaacaaatgcagtagccaacaagattaccatgcaatcattaaggagaaccaaagtaagagagccactcaaaccagattttgaacgctactaaaattaaagtagttctttgatgaatatgaatgagtagggaaaggattctttgtaatagtgatacctctgtggtaagagaagggtggtatgtgagttttagtctacagattatggcaaattcagtgacaacaatcaaatggtctaagattgacagtagcacagttttactctgtgaaggtaatgttcaggacaaatttcaagaaaactagaaaaccattctttacagctgaaatctttccctaaccattgttatttccacttttaagtccttaagagatgagaaaa

SEQ ID NO: 32778 - DNA, 437 bp, Homo sapiens
cgactcactatagggcgaattggagctccaccgcggtggcggccgaggtactattgcattcatgaatgattacgcacttagtttataggctcttagcctgaatagatgttcagtaaacaaggaacttttgaaaaattacatcatattatcagttacatttaataattaatttctgacattaatttgattcctcaaaagtgttgatgatcctctcttattgagtatgtagttgatgcccatcattttcaatatcagttcattgtaaaagttaaaatagcatgagtctttagtgctatctttaccagttgtgaaattagtagtatttaataacactaaaaattctccatcttcattgtcttcagtgatttttagatttttggttattgactgataattcaatgagatcttttgttaaaaactaaattgttactttctgt

SEQ ID NO: 32779 - DNA, 434 bp, Homo sapiens
atacgactcactatagggcgaattggagctccaccgcggtggcggccgaggtacaaggataagaattattgaaatatgttactagttagctttttcctttgtatttcaattctttttgaaatcttggaagtttggcttagtctttgattacaccaaggatacagggctttgaagacctggagaaactagtgagtattcatttcaaaagcaagtcttaagactggttcagaaccacaagcatgtttttttgggaaaagtgggaggattattgaacccaattgaatcacctttttaactgaagcaaactgaaatgaatatagcaaacccatcagttatatcactatattctttttaaactaatctaccatttccttgctcacctatcagttcatccatgttgtatgtatgagacagtatgacgtggtgattaaaag

SEQ ID NO: 32780 - DNA, 405 bp, Homo sapiens
tacgactactatagggcgaattggagctccaccgcggtggcggccgaggtacattattcctccacgtctgtcccctctgctccaagactgcaggggagagtcttgcacatcatctttgtaaaaacagtctttgttttactcagaaatattttattgagtcctgctaaatacatgctaggcattagggtttaaaaagaattaaaataaagcatgtcagagatggcttttctagaacacatgcccaagcagagacttaaatattgagactagccagattaaaaggtgtagagggcaggaaagggtgacggcatgccacgcagcagcaagagcgggagcgactcctgaaagagtgaaagtatttgcctacaatagaaggatgagtgagtagggcactgccagcagttc

SEQ ID NO: 32781 - DNA, 418 bp, Homo sapiens
taatacactactatagggcgaattggagctccaccgcggtggcggccgcccgggcaggtacactggaggctggagcctgcagatggcatggctctgcggctcaccttgctgcagttggtggtggtgacagagactgcagcttgactgtagtggtggttaccaggagctctgccactgcatgtccactagtgacgggttcgctccaccaccccagctgggtagccgctgctctcacataaggggtccaattaaaattgccaggaataaattcccccggactttgacttctcaagagctaagaaggtttgctgagtattctggcatgatgtttggtgatcaaacaactgctggccaaaaatgatgagtatttccccctcttgctgaagatgtgctccatacaattattccatcacgttca

SEQ ID NO: 32782 - DNA, 587 bp, Homo sapiens; identical to SEQ ID NO: 32514
  misc_feature 209, 313: n = A,T,C or G

SEQ ID NO: 32783 - DNA, 414 bp, Homo sapiens
actactatagggcgaattggagctccaccgcggtggcggccgcccgggcaggtacaaagtccctgaggcaaaagcatgcttgctgtgttctaggaaaagcaaggaagacagcatgtctatagcagtgggaggtggaaggataataaacagtaggtgaggttagaggggaccaaatcatgtattttccatccagaggttcccaaccttggctgcacattagatttattctaaggagcttttaaaaaataccaatgactgggtcccagcctagagtgattaaatcagaatctctggaggtagacttgagaatctgatgtttgcaagtttcctaggcaagtcaaggctgaggaagactgctgcaggccattgtaagagccaggcgttgatctcattcaacctttccctcagctcttc

SEQ ID NO: 32784 - DNA, 445 bp, Homo sapiens
actactatagggcgaattggagctccaccgcggtggcggccgaggtactgggcaaagctttgcagtatagatcgccctgaagaaggaggtctgccaccttatgtgtttgccctgatggccattttctttcttcagcagaggaaagaaccccttttgcctgtatatctaggatcatggattgaaggattctcattaagcaaactagggaatttcaaccttcaagacattgaaaaagatgttgtgatctgggaacatactgacagtgctgcaggggacacaggcataacaaaagaagaggcaccaagagaaacgccgattaaaaggggacaggtggtatcatccctactctgcagataatgatagcgcccattttttgaacactgtgtgccaggcactgtgctaagcactttacagacactatctcactcagtcctcccaacaaccc

SEQ ID NO: 32785 - DNA, 431 bp, Homo sapiens
tacgactcactatagggcgaattggagctccaccgcggtggcggccgcccgggcaggtactttttttttttttttttttttgtctttgtgccattgctttatctctatttggaatgacactctttcgtccttggtctctcaccaatccctacttcatagtcatcattaaaacccaaattttccttttacgcccaattcaaatgccagttctaccctgaaagctttctgggtctgccaaataagcactaactacttgtctctctctgtttctgtaatggccatcacatgagaacgacaagtgattttacagctgacaatatatatcctatcagcccttccgaattctttctccatccagctctgtgccctggatgtctcgcatggcctaacttgatggatgtccttgccttctagcttctcactgggttcac

SEQ ID NO: 32786 - DNA, 422 bp, Homo sapiens
ctatagggcgaattggagctcaccgcggtggcggccgaggtacttccaaaccctcctgttctttcctttttgttttccccaattttaacataaggcaaaagcagtaattgagcaattctatcacctggattggcactccggggaacagtggagctgatcactaactgaattccccctttataatctgaataaattaccccagtttgaatttggactcccttcaaatttagacttgatctccctcaaaggcctaccctcccttctggcagcgggccatatacccctctaggaatcttttgtgggggctttccagggagtaaaaagaccatttgggtggaacataaattctacttgcggtgctgcctgctgtggcgcgggacaagctgttgggattgattgtaattgggctgacctccctgaag

SEQ ID NO: 32787 - DNA, 436 bp, Homo sapiens; identical to SEQ ID NO: 32434

SEQ ID NO: 32788 - DNA, 427 bp, Homo sapiens
acactactatagggcgaattggagctccaccgcggtggcggccgaggtacgcggggagtgataacattagaaactcattggagcacgaaccctgttgtgaactgcctatccgaaggatctaggttgtgtgcttcgtatgagaatctaatgccagatgatctatcattgtctcactttgcccccagataagaccatctagttgcagaaaaataagcccagagcttccactgattctacattatggatatgtgccgccgaagcaagcacaaagccctacttttacacatgcctagtgatgcttcatggacaaggcttggctctgttgagtccaactaacctacctgagattctgagatttctcttcaatggcttcctgtgagctagagtttgaaaatatcttaaaatcttgagctagagatggaagtag

SEQ ID NO: 32789 - DNA, 428 bp, Homo sapiens
tacgactactatagggcgaattggagctccaccgcggtggcggccgaggtacttggcctggctgtcgaaataattcattccatttctttggtgattgtcaggaagctcttaatattttctgtaagtttttttcttggtttcaccaacaggcttcatcgatccacctctgtttaatataaatgatgcaatagggatgttgctgagcaagtaattatagtgagttattttgtcaatatatgggcttttgggagtaacaataatattcagatgttctcccactagcaaagccttatggttatcagtccaatcaatataaaggtaactttggctgagagatgagtatgctattgctcggtaaccttccctggcctgattttcttctggaagatctggagcatcagttttgacattaaactccagcaccgtca

SEQ ID NO: 32790 - DNA, 424 bp, Homo sapiens
acgactactatagggcgaattggagctccaccgcggtggcggccgcccgggcaggtacccatctacttggttacagtgactacaccgtaagtggacacttcaatcaagaaaggcctatcagagtcttcctctagactaacctatggtctgagggaaaaaaaaattctttctttccattaaaagctatggctgctggcagccattttgcttgtcccttaagaagaggccatctgttgaacagagaccactggattcaaagatggagagacattatctgagctcccagatccagctcagcctaagccctaaccagacttgccaattattacacacattaacttggttttttttgcttaaggttactgaaatcatatttccaacacctgcatccaagagtcctatataccacaagggggggtaaaca

SEQ ID NO: 32791 - DNA, 393 bp, Homo sapiens
atacactactatagggcgaattggagctccaccgcggtggcggccgcccgggcaggtacttcagatactcacacaaccatcgtgtttttcacttctggtgaataaagcagcccttatcgatacagtttctactgaatgtgtatcgtgttcacaccatcatcaagtcgaaaaatcatcaagttgaaccgttttaagccggggaccatctgtgttcaactttctgatgactttcacaagctctgcattttatctcccagctctgttgtaaggtattgtcagtgccttgcagaaaagaatcaaattccttccaagtgacatagacagcaagttttggagagctaaggacaaacagggcccgcagcttagctcagttggcttttgctttctcccaca

SEQ ID NO: 32792 - DNA, 388 bp, Homo sapiens
gtatacactactatagggcgaattggagctccaccgcggtggcggccgaggtacatttacacatgaatgggtgcttggcaaggttaagaaacttgcacaaggtcacacagccaataaatgggggatccagaattccagcccaggtctgttgggctctaaagcctttgcacagtcttagctgttatgttgtattatattgcctcctaggttatgtatgtagaatttttggtcacatttaaatattccccttcgattcatagtgttaagaaatatacttaagcagctacgtatttactagggatgaaaatgtttccaattcataagccagaacacttttttcttcagatatttaacacaaagaagggatgaagaccattttttattccca

SEQ ID NO: 32793 - DNA, 444 bp, Homo sapiens
ctactatagggcgaattggagctccaccgcggtggcggccgcccgggcaggtacgcggggacatcaatgcagagtccctctgtgaatttacaacacccaacacccatgagttcagtccttaagaaggaaaattgagcaagtatttaattggttggacattgcataaaagaggtccatatccaggctaaccctagaaattttattctcaaacttagttggcctctttttcttctgtcagaggaccattcttagtggcactggggaaatcttggcacccagaagaattcaactgcgctcactgcaaaaatacaatggcctacattggatttgtagaggagaaaggagccctgtattgtgagctgtgctatgagaaattctttgcccctgaatgtggtcgatgccaaaggaagatccttggagaagtcatcaatgcgttgaaacaaa

SEQ ID NO: 32794 - DNA, 283 bp, Homo sapiens
tacgactcactatagggcgaattggagctccaccgcggtggcggccgaggtacatctacctaaaggactattatgtggaataatacatactaatgaagtattacatgatttaaagactacaataaaaccaaacatgcttataacattaagaaaaacaataaagatacatgattgaaaccaagttgaaaaatagtatatgccttggaggaaatgtgctcaaattactaatgatttagtgttgtccctactttctctctcttttttctttcttttttgtattatg

SEQ ID NO: 32795 - DNA, 401 bp, Homo sapiens
ctactatagggcgaattggagctccaccgcggtggcggccgcccgggcaggtactttaaaagttataatgctgatgaacaaaaaggtatgtaaaaactcaggatttaattaattagatatattttccaccattagaacatttctgctcagaggtcttattacaaagctacatttctgatagtctactacggtgcagcttctgccaaagccactcaatactaacctcttacatagcaactctacttacatgactaaaatgtatatcatactttacatagccaaaaagataaagaaccacctgatttctatttccaagctactcaaccctagtaaatggccttatcatttaccctacccaggcactgatgtaaaaaatctgggagttaatcataatttttctc

SEQ ID NO: 32796 - DNA, 434 bp, Homo sapiens
tacgactcactatagggcgaattggagctccaccgcggtggcggccgaggtaccagttgtaaaattaccaggaaccgccatgcctcaagatcgccctgttttctggcttcatcaatgactgcatgcagtgcaccaccctgtccactacgtgatgctgtaggattaagtctcacagtgggcggctgaggatacagcgccgcgtcctgtgttgctggtgaattagacgccatcgctgtgggttgctggtatggtgccgtgctatttggcacaggacacaccgcttgaggtctgtattgaacctctgaaggaggccgatactgaagctcggttggcagccggtattgataaactaccagcggttgggtcttattttctaccggctgatattgtggatactgtatctgagttggcattgccgggatagagactctgtc

SEQ ID NO: 32797 - DNA, 423 bp, Homo sapiens
tacgactcactatagggcgaattggagctccaccgcggtggcggccgaggtacgcggggtaaccacctgggaaaacttcacagaaaatgagagtttcagatgctgagaatagaaccactaagaagcagaaaagagaagatattctcgtgggggagaacaacggctgggaggggaggaagcatggccaaggcaaagaggtgggcattaataagaactgcttcttgctgccgccatatgaagaaggacgtgttcgcttccccttcctccatgattgtaagtttcctgagaccttgccagccatgctgaactgaatacaacatgtttaagaccacagaacatctgcataggctgtaaatttcgttgaatgatggatgcaaagatggaagacagatggatagaggaaaagacagaatcagatactgg

SEQ ID NO: 32798 - DNA, 623 bp, Homo sapiens
gcgcgtaatacgactcactatagggcgaattggagctccaccgcggtggcggccgaggtacctacagtcagtgctaccagtagatttacttatcacatggtaagtggaatgtcacagataaataatttacaggacccttcttatcaaagatcattacaatgtaggcctaaggggaaggcttgccccaaggaaattcccaaagaatcaaaaagcccagaagtcttagtctgcggagaatgtgtggctgatactgcagtgtagtacctgcccgggcggccgaggtacgcggggacatcaatgcagagtccctctgtgaatttacaacacccaacacccatgagttcagtccttaagaaggaaaattgagcaagtatttaattggttggacattgcataaaagaggtccatatccaggctaactctagaaattttattctcaaacttagttggcctctttttcttctgtcagaggaccattcttagtggcactggggaaatcttggcacccagaagaattcaactgcgctcactgcaaaaatacaatggcctacattggatttgtagaggagaaaggagccctgtattgtgagctgtgctatgagaaattctttgcccctgaatgt

SEQ ID NO: 32799 - DNA, 401 bp, Homo sapiens
atacactactatagggcgaattggagctccaccgcggtggcggccgaggtacgcggggacatcaatgcagagtccctctgtgaatttacaacacccaacacccatgagttcagtccttaagaaggaaaattgagcaagtatttaattggttggacattgcataaaagaggtccatatccaggctaactctagaaattttattctcaaacttagttggcctcttttttttctgtcagaggaccattcttagtggcactggggaaatcttggcacccagaagaattcaactgcgctcactgcaaaaatacaatggcctacattggatttgtagaggagaaaggagccctgtattgtgagctgtgctatgagaaattctttgcccctgaatgtggtcgatgcca

SEQ ID NO: 32800 - DNA, 432 bp, Homo sapiens
gggcgaattggagctccaccgcggtggcggccgaggtacgcgggtaatctcttgggttatgattactgcaaaatacccatatattcataatattgtctctgttataaacttgtaatttctattggcagaacatatactcaaattatttttctaagtatgggtgatatatttgttttaattcattttacttttgtccctaagatccaacaatctataatgtgaagagagttaactgggtttaaaagtataatctgttcaacagggtggagtcttagtccacagaaaagtaaattatataaactcaattccttcatttttaagttgggtataacaccaactactcgacacctcatagcattaatatgaggacacaacgacgtaataaagacattagtgttactgaagattggcagccaatgctgatgtagtagc

SEQ ID NO: 32801 - DNA, 182 bp, Homo sapiens
agggcgaattggagctccaccgcggtggcggtcgaggtacgttcaatccggggaatgatgacatgttcaatggcatttacacgcctgttggttatcttaatagcttcatccaaagtaacaaaagaagtctgcagagaagctagttccaccagtagttccactgctttggcataattcctctt

SEQ ID NO: 32802 - DNA, 425 bp, Homo sapiens
  misc_feature 369: n = A,T,C or G
acactactatagggcgaattggagctccaccgcggtggcggccgcccgggcaggtaccagttgtaaaattaccaggaaccgccatgcctcaagatcgccctgttttctggcttcatcaatgactgcatgcagtgcaccaccctgtccactacgtgatgctgtaggattaagtctcacagtgggcggctgaggatacagcgccgcgtcctgtgttgctggtgaattagacgccatcgctgtgggttgctggtatggtgccgtgctatttggcacaggacacaccgcttgaggtctgtattgaacctctgaaggaggccgatactgaagctcggttggcagccggtattgataaactaccagcggttgggntcttattttctaccggctgatattgtggatactgtatctgagttggcattgccggg

SEQ ID NO: 32803 - DNA, 175 bp, Homo sapiens
tatagggcgaattggagctccaccgcggtggcggccgccatcttgggtcatcgatgagcctcgccctgtgcctggtcccgcttgtgagggaaggacattagaaaatgaattgatgtgttccttaaaggatgggcaggaaaacagatcctgttgtggatatttatttgaacgggat

SEQ ID NO: 32804 - DNA, 630 bp, Homo sapiens
  misc_feature 580: n = A,T,C or G
gcgtaatcggacgcgcgtaatacgactcactatagggcgaattggagctccaccgcggtggcggccgaggtacaggatagttgggaaatgtttctcaaccctcagagaatgctcactaggcacatgcataacatgtagatgcccaaagcatttcagaagtagaattacaaaaaacccccaaaacacttgtcatgaaggtttgtgaacctaatctcgcctgtatagactgggctaattctgatagtaagaggagttctcccttctcttaagtaaacaaaaactattggctttcatccaatcggttattctaagaccactgcaacttttttctctcacaaaaaggagttgccctaaagaagtttcatttgctttgatcttttttttcctccctcctctaaaggaaaaaaggtatgtgtgtgttgaaatctaaaatatggcaaagtttccatttaaaaatactttttaaataaccagatttgctcttcgcacaatgaggtctttggtccctgggagatattttatatcatattcccgaatttgttcctggagtcatctttaacggggctagggaacttattgngtgctgtaagaactgttggtatgacccaccatgctctctctggctctctc

SEQ ID NO: 32805 - DNA, 439 bp, Homo sapiens
  misc_feature 135: n = A,T,C or G
cgactcacttagggcgaattggagctccaccgcggtggcggccgcccgggcaggtaccaggagggtattgatgtttgaggtccaaactgaaaacccatcacctccttcccactgctatagcagcgttagccctgnggttcattatctagccagttcacaaccttctaaagtggggctctgaaatgtcttacttcccttacagacaaaccatttctcaagccctcctgagatcacccaccaaccagagcaactgctgtcacttggaggtgcagctgaattcttctaattgtgacacaaactcttgaaactgtaaatgctgaaagattaaatgaggttataacactcagaaggtttacaagtaaaagtaagtcaaatcaataggtctttatttcatatctgtaatggtttagctctgcgggaagtgttagcagctatatga

SEQ ID NO: 32806 - DNA, 571 bp, Homo sapiens
  misc_feature 545: n = A,T,C or G
gtatacgactcactatacggcgaattggagctccaccgcggtggcggccgcccgggcaggtaccggagttggagccacctgggtctgactcttacctcagtcatggcccagctcttgaagtcacagtctcctcagtgcaaacagggatgaatccctgagcctcacagatctttgtgagatgattttcagccctatatgaacaggcctaacatgtttctaactctgtaagtgcttactatactgctatacttctgctatgactagacaagaccattgcagaacacaggaaccgatcattctatagaaaccaagcatctagtgtgctatgctgtgtctgggccacctcaggaaagctctaagcataggcagcatgaggcattccagagatgacatgtgagcagcagtgaaggagagaggcttccgtgtgaaggtggcctgagccaacctagattcttcagtctgaaaagacacatagagaatgtgacagaatctggaaaataataaagaaaatggtggaggtaaacatcactgtcccatttgaaatntgaatatagtaatttccaggcacaca

SEQ ID NO: 32807 - DNA, 515 bp, Homo sapiens
  misc_feature 11: n = A,T,C or G
gactactatanggcgaattggagctccaccgcggtggcggccgaggtacctgtctcatatgtggcaactacgtggggcagcacactcaaggaatgaaggaagtttcagtgaatgacaactttataaagacagtgttgaggcagcccagtgcagcggtttgggagccaggaacagcgtgtggccggagtgtggctgcaggacaggaggtcaaaaataagggttgagggtggaataggaagaccccggaacgtcatcctgggagcttgagattttattctacatttctcttgttcttaactatttagggtgatggatctctgcagtaagtggaagagttcttcatggcccccaaggttatatccatctagaacttcagcacgtaatttcatctggaaatagtgcctttgcggatataagttaggtaaaactgaagatgagatcatactggattaggatgggatctaaatccaatgaaaatgtctccataaaaaacaggaaagaacccatagaaacac

SEQ ID NO: 32808 - DNA, 432 bp, Homo sapiens
tacgactactatagggcgaattggagctccaccgcggtggcggccgcccgggcaggtacgcggggacatcaatgcagagtccctctgtgaatttacaacacccaacacccatgagttcagtccttaagaaggaaaattgagcaagtatttaattggttggacattgcataaaagaggtccatatccaggctaactctagaaattttattctcaaacttagttggcctctttttttctgtcagaggaccattcttagtggcactggggaaatcttggcacccagaagaattcaactgcgctcactgcaaaaatacaatggcctacattggatttgtagaggagaaaggagccctgtattgtgagctgtgctatgagaaattctttgcccctgaatgtggtcgatgccaaaggaagatccttggagaagtcatc

SEQ ID NO: 32809 - DNA, 420 bp, Homo sapiens
agggcgaattggagctccaccgcggtggcggccgaggtacgcggggacatcaatgcagagtccctctgtgaatttacaacacccaacacccatgagttcagtccttaagaaggaaaattgagcaagtatttaattggttggacattgcataaaagaggtccatatccaggctaactctagaaattttattctcaaacttagttggcctctttttcttctgtcagaggaccattcttagtggcactggggaaatcttggcacccagaagaattcaactgcgctcactgcaaaaatacaatggcctacattggatttgtagaggagaaaggagccctgtattgtgagctgtgctatgagaaattctttgcccctgaatgtggtcgatgccaaaggaagatccttggagaagtcatcaatgcg

SEQ ID NO: 32810 - DNA, 435 bp, Homo sapiens
tacgactcactatagggcgaattggagctccaccgcggtggcggccgcccgggcaggtacttccaaaccctcctgttctttcctttttgttttccccaattttaacataaggcaaaagcagtaattgagcaattctatcacctggattggcactccggggaacagtggagctgatcactaactgaattccccctttataatctgaataaattaccccagtatgaatttggactcccttcaaatttagacttgatctccctcaaaggcctaccctcccttctggcagcgggccatatacccctctaggaatcttttgtgggggctttccagggagtaaaaagaccatttgggtggaacataaatctactgcggtgctgcctgctgtggcgcgggacagctgttggattgttgtaattggctgactccctgaagtgg

SEQ ID NO: 32811 - DNA, 616 bp, Homo sapiens
atacgactcactatagggcgaattggagctccaccgcggtggcggccgaggtacgcggggaatgccagatgatctatcattgtctcactttgcccccagataagaccatctagttgcagaaaaataagctcagagcttgcactgattctacattatggatatgtgccgccgaagcaagcacaaagcctacttttacacatgcctagtgatgcttcatggacaacgcttggctctgttgagtccagctaacctacctgagattctgagatttctcttcaatggcttcctgtgagctagagtttgaaaatatcttaaaatcttgagctagagatggaagtagcttggacgattttcattatcatgtaaatcgggtaactcaaggggccaaccacagctgggagccactgctcacgggaaggttcatatgggactttctactgcccaaggttctatacaggatataaaggtgccttacagtatagatctgggagcaaagtaagaagaaacaaacactgatctctttctgccacccctctgaccctttggaactcctctgaccctttaggacaagcctacctaatatctgctagagaaaagaccaacaacggcctcaaag

SEQ ID NO: 32812 - DNA, 438 bp, Homo sapiens
atacgactactatagggcgaattggagctccaccgcggtggcggccgaggtacaatacaccttaattagagaacaaaaatgtaagctcagggttttgaaatcctggcttttcattgagtttttgcagatcataaaatatacttaattcggcaaaatatctaacagtccaaaacatataaacaacattaaaaaagctacagggattgggttaagacaggccaacacatttatcaggttcatctgttttaacaaaatgaaatatattaattgtagataaaaacatagctggagagaaagcaccaaggtaatcaaatagtaagcagcagcagaaccacatgccaagacactaagtgcttcacttgccttacatctcatttattccccacaacaacctaggagacaaacagtattactctgccccctttatcaactatgaag

SEQ ID NO: 32813 - DNA, 661 bp, Homo sapiens
  misc_feature 11: n = A,T,C or G
gactactatanggcgaattggagctccaccgcggtggcggccgcccgggcaggtacccttacaaagaagacaccataccttatgcgttattgggtggaataatcattccattcagtattatcgttgtaagttaaatccacttttccaagtttataacttttgggcacttggcttaatttctgtactcttttaatgcttaaatgtgtaatcctccaaaaacaatgtatgctttttaaacctttaattgatgctttatttgatcaagagaatctcagctattttaagtggagtcaaaaaataacaatgtgtaattgtaagagccaggcatggtgacatgcctgtagtcccagctactcgagaggctgaggctagaggattgcttgagtctcggagttggatactataatatgtgatgatcacatctgtgaatagccattatactccagcccagacaacactgcaacatcccatcttaaaaaaaaacagaaaaaaaacacgaaaagaaccttgctggctatgtatagattttatgctaatcttttccatgtcaccgtgattgttagagctctaattttattgttttaataatcttgtgatcaatagttgaatgttatagcaatatgattctagcatactttatacataggatatcattttataa

SEQ ID NO: 32814 - DNA, 422 bp, Homo sapiens
tatacggcgaattggtgctccaccgcggtggcggccgaggtacatttggtggaactgagaaatggcataacaccaaatttaatatatgtcagatgttactatgattatcattcaatctcatagttttgtcatggcccaatttatcctcacttgtgcctcaacaaattgaactgttaacaaaggaatctctggtcctgggttatggctgagcaccactgagcatttccattccagttggcttcttgggtttgctagctgcatcactagtcatcttaaataaatgaagttttaacatttctccagtgatttttttatctcacctttgaagatactatgttatgtgattaaataaagaacttgagaagaacaggtttcattaaacataaaatcaatgtaaacgcaaattttctggatgggcaata

SEQ ID NO: 32815 - DNA, 423 bp, Homo sapiens
actactatagggcgaatgggagctccaccgcggtggcggccgaggtacagcccacagaactgtgagccaattcaatcccttttctttttcaattacccactctcatgtatatctttatagcagtgtgagaacagattaatacactcctcctcagaaagcattcaatttagctgtgtctaaagtatgccaggtgttctagggtgttatcttagccaataattcttcctcttcagcaagatctatttgcctatgacagcttgacctacatttcctaccatacttgtcagtaacaagtagcccataacatctgaatggacttcattgaaatcacagaggttctttagttctctactttattagcaggcattcgggaaacacatcaactttctaatttaataaggtgcctgttgctttgaaaaactg

SEQ ID NO: 32816 - DNA, 422 bp, Homo sapiens
ctactatagggcgaattggagctccaccgcggtggcggccgaggtacgaaaaaatcgggctactaagcccactgttaatatagacgcagaccaattgttaggaacaggtccaaattggagcaccattaaccaacaatcagtgatgcagaatgaggctattgaacaagtaagggctatttgcctcagggcctggggaaaaattcaggacccaggaacagctttccctattaattcaattagacaaggctctaaagagccatatcctgactttgtggcaagattacaagatgctgctcaaaagtctattacagatgacaatgcccgaaaagttattgtagaattaatggcctatgaaaatgcaaatccagaatgtcagtcggccataaagccattaaaaggaaaagttccagcaggagttgatg

SEQ ID NO: 32817 - DNA, 266 bp, Homo sapiens
ctatagggcgaattggagctccaccgcggtggcggccgaggtacatcatatttgcttgttggctttatgataacctagaaataatattctggattaactgtgtgactcatgagaagatttgtgcaactatgtttccaaatttacttgattttcaagacttacactagaactgtgagaacagggtaattaaataaacatattgtattaaatatcaacctttggtcaaactctttgggtacgccccaacggttagtgtagagaattaa

SEQ ID NO: 32818 - DNA, 239 bp, Homo sapiens
cgactcactatagggcgaattggagctccaccgcggtggcggccgggcatttctcccagggatctctgtgcttccttttgtgcttcctgtgtgtgtggatatttaaaggggctggaaatgtgtaaaaacatgtcactacttagacattatattgtcatcttgctgattctagtgatgttaattatctccatttcagcagatgtgtggcctcagatggtaaaagtcaagcagcctttctt

SEQ ID NO: 32819 - DNA, 425 bp, Homo sapiens
ctatagggcgaattggagctccaccgcggtggcggccgaggtacgtgcaaagcattctatgtatttttagcagaacaggagacttactttacactagctgaactaggtgtccatcagtgcctctgccaaccattggatgttagaggattctgccacctagcttattttatttgtatttaagtgaatataccaaacatttatatgagcaaaccaagttttacataacatgcttttggtatgtattatgactttttacatttctacttggatttcctcttcagatctcagtttccacaaatctgcatccaggttcagggcctctgattctgcacaaatcatatgagccaagtggattgattacttgacagatcagatctcttccccagctaataactctgccttctgattccagtcctcaaaataaa

SEQ ID NO: 32820 - DNA, 449 bp, Homo sapiens
ctactactatagggcgaattggagctccaccgcggtggcggccgaggtaccgactcctcagaaactggcatgccaaatcaaaatgggtctggttcaatcctccctaatggcaatgtaaacaccctctaactaatcccacttctcctaattatctttttctccttacgaacctaaaaatctcaccatttctattagcctgaaaataacatccctctgttcttctcttcctccttcagcactggatctcacttacaataggttttatttaataattatcttccttacactttctgtctcaccagtttccccttaaactgatttacctgctacacaaaattattcttattgggcttatgtgccttttcctccacttattcgacctctcacctggatggatgctcctgcacaaatctatactaacgatagtgtgtggatgcctggaactacag

SEQ ID NO: 32821 - DNA, 423 bp, Homo sapiens
ctactatagggcgaattggagctccaccgcggtggcggccgcccgggcaggtacatctctagatgatcacgaatgtcaaatatcacactacactgtgatatggggattccccttgggggttttcatgtgtatagggtgcctgcagctacactaaacatcttaaagctaccacaatgttcacttcatatttttgctttttataggctttcttggtctcctcctatgttcccatcattttcttgctttgaatctgtaagaatcgagttgaatcttctccattttaaattttccataggctgagaaactgtttagccaagtttggataaaattgtatccaaagtaagagtatacaagctatgggcaagtccaaaatcaagctgttcacaggaccatgtttctctctaaaggttctaggaaagaatc

SEQ ID NO: 32822 - DNA, 418 bp, Homo sapiens
ctactatagggcgaattggagctccaccgcggtggcggccgaggtactttttttttttttttttttttttttttgtctttatctcattgttagaatgggaacaatgttcttttcagctttctacatcttagccagaaacagaaatctctttcctttggtatggctccacctatatgatatcaagataatttaatagtatgtagccacagtgcactaggaaaattaattggcttttaccagctttctgctgataatgccttaacttgaagaagttaaataattttggaaaagtcagatattgggaacaatcaaatttcgaatatacacatccaatataatcagataagtagtaaatagttaacaacaacaattaacgtcagaaaatagatccaagctctcatacatttgtctatcaaga

SEQ ID NO: 32823 - DNA, 420 bp, Homo sapiens
tatagggcgaattggagctccaccgcggtggcggccgaggtacgcggggaggtgtgctgaggtccctcggcaagggacgctgctttcccctggcagccacactgctgagcataaatgctttaaagtgtcagcaattgatgtgtggagagaagtatgactgcattacagcttaaagagctttcacattcaggtctctacaggagaagacgagatcgccccgatagtttgagagtaaatgggttaccagaggaagagctaagcaacatggccaacgccctggccagcgccacttgcgagcgctgcaagggcggctttgcgcccgctgagaagatcgtgaacagtaatggggagctgtacctgcccgggcggccgctctagaactagtggatcccccgggctgcagggaattcgatatcaagc

SEQ ID NO: 32824 - DNA, 459 bp, Homo sapiens
actactatagggcgaattgtagctccaccgcggtggcggccgaggtacttaaaatttacagctgactcaaattgcctcacagaattatttgatgtagaaggctagttgtcttacttcagatcagcaggacagttgggctctcagactcatgaccactgagtttgcttgtgttgaaactgtggtttcatccaacatatgctattggacatgattattattccattcaaatggattacagacttcttgaggacaggacaaacttatctctcatggtgtttttttagaatacttttataaccaaggaagaaaccatgccagctgttaccattcaacttcttaagcagagattaagctttttcatatctgttcttatcctggacatcagtagtttttaattgcccagcatccgttccatcttgtaacaactccctgatgtttcttaaaaccacctcttcctat

SEQ ID NO: 32825 - DNA, 407 bp, Homo sapiens
ctactatagggcgaattggagctccaccgcggtggcggccgaggtacatctacctaaaggactattatgtggaataatacatactaatgaagtattacatgatttaaagactacaataaaaccaaacatgcttataacattaagaaaaacaataaagatacatgattgaaaccaagttgaaaaatagcatatgccttggaggaaatgtgctcaaattactaatgatttagtgttgtccctactttctctctcttttttctttcttttttttttattatggttagctgtcacatacaactttttttttttttgaggtggggtctcgctctgtcaccaggctggagtgcagtggcgcgatctcggctcactgcaacctccacatcccatgttgaagtaattcttctgcc

SEQ ID NO: 32826 - DNA, 408 bp, Homo sapiens
actatagggcgaattggagctccaccgcggggggcggccgcccggccaggtacccgactcctcagaaactggcatgccaaatcaaaatgggtctggttcaatcctccctaatggcaatgtaaacccctctaactaatcccacttctcctaattatctttttctccttacgaacctaaaaatctcaccatttctattagcctgaaaataacatccctctgttcttctcttcctccttcagcactggatctcacttacaataggttttatttaataattatcttccttacactttctgtctcaccagtttccccttaaactgatttacctgctacacaaaattattcttattgggcttatgtgccttttcctccacttattcgacctctcacctggatggatgctcctgc

SEQ ID NO: 32827 - DNA, 421 bp, Homo sapiens
tacactactatagggcgaattggagctccaccgcggtggcggccgaggtactaacaaatgcagtagccaacaagattaccatgcaatcattaaggagaaccaaagtaagagagccactcaaaccagattttgaacgctactaaaattaaagtagttctttgatgaatatgaatgagtagggaaaggattctttgtaatagtgatacctctgtggtaagagaagggtggtatgtgagttttagtctacagattatggcaaattcagtgacaacaatcaaatggtctaagattgacagtagcacagttttactctgtgaaggtaatgttcaggacaaatttcaagaaaactagaaaaccattctttacagctgaaatctttccctaaccattggtatttccacttttaagtcctcaagagatg

SEQ ID NO: 32828 - DNA, 421 bp, Homo sapiens
tactatagggcgaattggagctccaccgcggtggcggccgaggtaccagttgtaaaattaccaggaaccgccatgcctcaagatcgccctgttttctggcttcatcaatgactgcatgcagtgcaccaccctgtccactacgtgatgctgtaggattaagtctcacagtgggcggctgaggatacagcgccgcgtcctgtgttgctggtgaattagacgccatcgctgtgggttgctggtatggtgccgtgctatttggcacaggacacaccgcttgaggtctgtattgaacctctgaaggaggccgatactgaagctcggttggcagccggtattgataaactaccagcggttgggtcttattttctaccggctgatattgtggatactggatctgaattggcattgccgggatagagac

SEQ ID NO: 32829 - DNA, 416 bp, Homo sapiens
actactatagggcgaattggagctccaccgcggtggcggccgcccgggcaggtacttattttttttttttttttttttttgcttaagctaaaaaaatatataaactttagggaagagcagaacactcaggaactgcacccatacagactttatattcttcacttcaagaaatacagggtacgggctgggcgtggtggctcatgcctgtaatcccagcactttatcacttgaggtcagcagtttgagaccaacctggccaacatggtgaaactccctctctactaaaaatacaaaaattagccgggtgtggtggcaggcgcctatagtcccagctactcaggaggctgaggcaggaggatcacttgaacccaggaggcaaaggttgcagtgagccaagatcaccccaatgtattcca

SEQ ID NO: 32830 - DNA, 412 bp, Homo sapiens
tatagggcgaattggagctccaccgcggggggcggccgaggtccaaaaaaatcaggctactaagcccactgttaatatagacgcagaccaattgttaggaacaggtccaaattggagcaccattaaccaacaatcagtgatgcagaatgaggctattgaacaagtaagggctatttgcctcagggcctggggaaaaattcaggacccaggaacagctttccctattaattcaattagacaaggctctaaagagccatatcctgactttgtggcaagattacaagatgctgctcaaaagtctattacagatgacaatgcccgaaaagttattgtagaattaatggcctatgaaaatgcaaatccagaatgtcagtcggccataaagccattaaaaggaaaagttccagcagga

SEQ ID NO: 32831 - DNA, 413 bp, Homo sapiens
actactatagggcgaattggagctccaccgcggtggcggccgcccgggcaggtactattataatatcgattttataggaaattgagacacagatattaagatatcaacgcaaagtcataggggagggaggagagaggggactgtaatttgaacacagtttgtctccagagtttgtgcttttagccactgagtagttgttaaactttagtgtgcatcagaattacttggaagccttgttcaaacattgctgggctccccccgcaatttctgattcagtagccctaggatggggactgagaatttttatttctaacaagttcccaggggatgctggtgctgcaggttcagggaacacacattgagccagtgcactaagccctgctgcctcttttgggtaatctgtgcccatgttt

SEQ ID NO: 32832 - DNA, 424 bp, Homo sapiens
gcgtatacgactcactatagggcgaattggagctccaccgcggtggcggccgaggtacgttgaaatattaggggcaggttcccccaatatctggcgcccaacgtggttttctttttcctaagtgcatgtgggaacccgattccctttgataggtgcggagaaatgttcatcggtccagtccacagaaatgcttgttcggctccccgacgattggtgagttgtctgtgtattgtccggggtaactatgggtcacgcagagtctaaacattatgcttatctctgctatattaaattcctgttaaaatgggggagttcgggttcccatggaaaatatggtcaccctattcagggcagtggaagaacactgtccttggtttcctgaaaagggaacgttagatgtggaactatgggatcatgttggtgt

SEQ ID NO: 32833 - DNA, 385 bp, Homo sapiens
gactactatagggcgaattggagctccaccgcggtggcggccgaggtacgcggggcttcttgaaggaatcccttaagtgcacgtctcccgttttcttttcacatcaatgcagagtccctctgtgaatttacaacacccaacacccatgagttcagtccttaagaaggaaaattgagcaagtatttaattggttggacattgcataaaagaggtccatatccaggctaactttagaaattttattctcaaacttagttggcctctttttcttctgtcaggggaccattcttagtggcactggggaaatcttggcgcccagaagaattcaactgcgcttactgcaaaaatacagtgggcctacattggatttggtagaggaggaaag

SEQ ID NO: 32834 - DNA, 424 bp, Homo sapiens
tacactactatagggcgaattggagctccaccgcggtggcggccgcccgggcaggtactcattttccctcatacttcggattgaccacagttgttacggcactcttataaataggattttcaccctacaacaaaaaaaaagtgagaaaaattatcagttaccctactaaaattatgtagaataatttttataaatcaagactaaaagttgcaatcatcttaagaagtcatttctattttatttgtccagatatcacagttgttttaaaggcattaataatggtttatataaaaatagaaaatggaagctttgctttacaagtctaatgatgccccgttatctggtgctatttcattcttgagtccttcctccactggaggcttgatttaagaatgttctccatggcacagaatgtgctgtcatc

SEQ ID NO: 32835 - DNA, 261 bp, Homo sapiens
tatatgggcgaattggagctccaccgcggtggcggccgaggtacatttttattatccttataccagttataacttcattcatggtcctgatcctggcatccgtgaaagttgcagttttactcctaaggggaaccagacacgggagatgagcctgagcgatcacagcctgcccttatcagcggcaggcacaggcagggacctgcatcgcatggttccctacagcgcttttgattccgacaacacagacaggtcctactcaaa

SEQ ID NO: 32836 - DNA, 415 bp, Homo sapiens
  misc_feature 44: n = A,T,C or G
actactatagggcgaattggagctccaccgcggtgggcggccgnccggccaggtacgcttcccttggcaccatgttataccatctgtgctgggctgaatagtgtccccccaaaattgaataatgtccccccaaaattcgtgtataccctgaacattagaatgtgatcttacttggtattacttggtatagggtgttgtagaaataatcaaataaagatgaggtcatactgcatcagggtagaccctaaattcaatgaccaggatttttataagtgaaaggagaggcggattcagagaaaaagacacagacacacacagagagaagacagccatgtgaagacacaagcataaattgaagtgacacagctacaagtccaagggaatgccaaaaattgctggtaaccaccatgaagta

SEQ ID NO: 32837 - DNA, 366 bp, Homo sapiens
  misc_feature 334, 346, 350, 351: n = A,T,C or G
tatagggcgaattggagctccaccgcggtggcggccgaggtacgtgcaaagcattctatgtatttttagcagaacaggagacttactttacactagctgaactaggtgtccatcagtgcctctgccaaccattggatgttagaggattctgccacctagcttattttatttgtatttaagtgaatataccaaacatttatatgagcaaaccaagttttacataacatgcttttggtatgtattatgactttttacatttctacttggatttcctcttcagatctcagtttccacaaatctgcatccaggttcaggggcctctgattctgcacanaatcatatgagnccannagtggattgattact

SEQ ID NO: 32838 - DNA, 382 bp, Homo sapiens
ggccgaggtccttggaactccaggcccgccccaccatgcccagctcatttttgtatttttagtagagacagggttccaccatgttggccaggatgatcttgatctcttgacctcatgatccgcccctcttggcctcccaaagtgccgggatcacaggcgtgagccgccacacctggccctctatttattctctttaaagagagagaaaactatgagaggccaaaattatttaattaaatctttaccttagcacaagggaaaaaatggaatttgcctaatataggtgatgaagcatacacaatgaacagaaacaatcacattttagtaaaaggcaaaaatttgagacttataagctatatggtacgcttatttttgggtgggg

SEQ ID NO: 32839 - DNA, 457 bp, Homo sapiens
cactactatagggcgaattggagctccaccgcggtggcggccgaggtacgaaaaaatcaggctactaagcccactgttaatatagacgcagaccaattgttaggaacaggtccaaattggagcaccattaaccaacaatcagtgatgcagaatgaggctattgaacaagtaagggctatttgcctcagggcctggggaaaaattcaggacccaggaacagctttccctattaattcaattagacaaggctctaaagagccatatcctgactttgtggcaagattacaagatgctgctcaaaagtctattacagatgacaatgcccgaaaagttattgtagaattaatggcctatgaaaatgcaaatccagaatgtcagtcggccataaagccattaaaaggaaaagttccagcaggagttgatgtaattacagaatatgtgaaggcttgtgatgaga

SEQ ID NO: 32840 - DNA, 188 bp, Homo sapiens
cactataggcgaattggagctcccccgcggggccggccgcccggccaggtccccggggagtgcaatctgggcgatcgcttcctggtcctcgcctcctccgctgtctccctggagttcttgcaagtcggccaggatgtctcaggctgagtttgagaaagctgcagaggaggttagtgcacctttaagac

SEQ ID NO: 32841 - DNA, 398 bp, Homo sapiens
gcgaattggagctccaccgcggtggcggccgcccgggcaggtacggggaggaacagagtccctcctttacttctccattagaaagaatgagatgacaagacaatgaaacaggcaaagtgaacagagatgcaagacaaaattcaggtgagagagccagagcatcgctcagccattcctgacatgtaaaacaggcaactagaaatttgcagaaaggaagcgaagtctccataaagatgtttttaaagtgagcttgaagtatttggagacaattcagtgttacataaaatctgcaaatctttggataaagaaagcgagatcccagcatgggacaaatggagcctcaaaagtgggaagaagacagagaagaccaggggcagaatgcattatcttcctttttc

SEQ ID NO: 32842 - DNA, 444 bp, Homo sapiens
gcgaattggagctccaccgcggtggcggccgaggtaccagttgtaaaattcccaggaaccgccatgcctcaagatcgccctgttttctggcttcatcaatgactgcatgcagtgcaccaccctgtccactacgtgatgctgtaggattaagtctcacagtgggcggctgaggatacagcgccgcgtcctgtgttgctggtgaattagacgccatcgctgtgggttgctgatatggtgccgtgctatttggcacaggacacaccgcttgaggtctgtattgaacctctgaaggaggccgatactgaagctcggttggcagccggtattgataaactaccagcggttgggtcttattttctaccggctgatattgtggatactgtatctgagttggcattgccgggatagagactctgtccctttctacttgattttctttggggt

SEQ ID NO: 32843 - DNA, 328 bp, Homo sapiens
aattggagctccaccgcggtggcggccgcccgggcaggtacatgggactacaggcacgccccaccatgcccagctcatttttgtatttttagtagagacagggtttcaccatgttggccaggatgatcttgatctcttgacctcatgatccgcccctcttggcctcccaaagtgctgggatcacaggcgtgagccaccacacctggccctctatttattctctttaaagagagagaaaactatgagaggccaaaattatttaattaaatctttaccttagcacaagggaaaaaatggaatttgcctaatataggtgatgaagcataca

SEQ ID NO: 32844 - DNA, 411 bp, Homo sapiens
  misc_feature 310, 317, 329, 340, 349, 358, 362, 363, 376, 377, 392, 394,395: n = A,T,C or G
actactatagggcgaattggagctccaccgcggtggcggccgaggtacgcggggacatcaatgcagagtccctctgtgaatttacaacacccaacacccatgagttcagtccttaagaaggaaaattgagcaagtatttaattggttggacattgcataaaataggtccatatccaggctaactctagaaattttattctcaaacttagttggcctctttttcttctgtcagaggaccattcttagtggcactggggaaatcttggcacccagaagaattcaactgcgctcaccgcaaaaatacaatggncctacanttggatttgtangaggagaaagngagccctgntattgtgangctnngtgctatgagaannattctttgcccctgnannatgtggtcgaatgcca

SEQ ID NO: 32845 - DNA, 434 bp, Homo sapiens
ctcctatagggcgtattggagctccaccgcggtggcggccgaggtaccagttgtaaaattaccaggaaccgccattcctcaagatcgccctgttttctggcttcatcaatgactgcatgcagtgcaccaccctgtccactacgtgatgctgtaggattaagtctcacagtgggcggctgaggatacagcgccgcgtcctgtgttgctggtgaattagacgccatcgctgtgggttgctggtatggtgccgtgctatttggcacaggacacaccgcttgaggtctgtattgaacctctgaaggaggccgatactgaagctcggttggcagccggtattgataaactaccaacggttgggtcttattttctaccggctgatattggggatactgtatctgaattggcattgcccggatagaaactctgtccctttc

SEQ ID NO: 32846 - DNA, 411 bp, Homo sapiens
actcactatagggcgaattggagctccaccgcggtggcggccgaggtactggtgccaatattgccatggtgagctcctctctaatgtcttccagggcaccaatatctgcccatgtcacattagggacagtgacaaagccttcccttttggcagagggttggactgaggattgagcaaaccaatgaaatcattcaatttcaatgcacaagttcttgcattccgcttcctctgagagggggatcttttggtctcttagcaaaccccagacagccttttgtaatttcattcctgtgttttcagtaagttgggtctcagtttctcccagccttttcccttccttggacttcctttttagatgggcaaaaattcttccattttcaaggaatttttttcttcttgactgtttccctg

SEQ ID NO: 32847 - DNA, 437 bp, Homo sapiens
tacgactcactatagggcgaattggagctccaccgcggtggcggccaggtacttccaaccctcctgttctttccgttttgttttccccaattttaacataaggcaaaagcagtaattgagcaattctatcacctggattggcactccggggaacagtggagctgacactaactgaattccccctttataatctgaataaattaccccagtatgaatttggactcccttcaaatttagacttgatctccctaaaataaggcctaccctcccttctggcagcgggccatatacccctctaggaatcttttgtgggggctttccagggagtaaagagaccatttgggtggaacataaatctactgcggtgctgcctgctgtggcgcgggacagctgttggattgttgtaattggctgactcctgaagtgggggtattttc

SEQ ID NO: 32848 - DNA, 445 bp, Homo sapiens
gcgaattggagctccaccgcggtggcggccgaggtacactagtatttaacctggacatgaggaaggagtaggaaattttctggtgaatacaggagagcaaagagcagcaggtcagcaggaatgactaatttttttctatgcatgtttaatggaatattcgtgtaggatattttgagtaggtcattggataatcagcatttataactcacatcctactagtttgattctcagtaataagacttgtcaaagatccaagaatctgaaagtcagtaataaatgtccatgtgcatcatcgtccgtgacagaaagtcagcatccacagaacacagaattgggacagatgaacttaatagataaagatgaatatcggagttgttcctcttagggaatgatactctccatgacctgtgtgagtcacagctgcagaaaagaaagagcaaggaga

SEQ ID NO: 32849 - DNA, 411 bp, Homo sapiens
tatagggcgaattggagctccaccgcggtggcggccgcccgggcaggtacgcgggggcagggcaagctctaggagctggtgagtctagaaggacggactagagagagctggcattggaatggacaatcgctagagggcgccggagcactagcagagtcaacctccgggacccataagcagggcttctaggataaggaatggagtttgacccaaccccaagatatgccctggggatattggttttctcaggtgcatctgactctccggcctggattgcctcgctgcggagaggggacaaaaggttttgccctgagcatctggtgatgtcttccagtgcctggttaggttgctccgcggctggacagtctgactactctcaaaactcctcgtgacaggcctttctggggtctg

SEQ ID NO: 32850 - DNA, 431 bp, Homo sapiens
ctactatagggcgaattggagctccaccgcggtggcggccgcccgggcaggtacaagaaaaaatcaaacaatcacatcaaaaagtgggcgaaggatatgaacagacacttatcaaaagaagacatttatgcagccaacagacacatgaaaaaatgttcatcatcactggtcatcagagaaatgcaaatcaaaaccacaatccgggaggtcttgccaaagaccacctgggctttccgggcaacgtgctagagcttctgggaagcagtcatggccctttggagattccacggcttcagatccctactgcaggatgctccactgtgcctgccggcctctggcgttttgctgaggggtaacctcggaatggttagaaacaagaacactgagatggcccagtcgtgccccaggcattcccgcacacgtggtggcaa

SEQ ID NO: 32851 - DNA, 448 bp, Homo sapiens
atacgactcactatagggcgaattggagctccaccgcggtggcggccgcccgggcaggtacatctctagatgatcacgaatgtcaaatatcacactacactgtgatatggggattccccttgggggttttcatgtgtatagggtgcctgcagctacactaaacatcttaaagctaccacaatgttcacttcatatttttgctttttataggctttcttggtctcctcctatgttcccatcattttcttgctttgaatctgtaagaatcgagttgaatcttctccattttaaattttccataggctgagaaactgtttagccaagtttggataaaattgtatccaaagtaagagtatacaagctatgggcaagtccaaaatcaaatctgttcacaggaccatgttctctctaaaggttctaggagagaatccctcatttccttccagct

SEQ ID NO: 32852 - DNA, 415 bp, Homo sapiens
ggcgaattggagctccaccgcggtggcggccgaggtacgcggggacatcaatgcagagtccctctgtgaatttacaacacccaacacccatgagttcagtccttaagaaggaaaattgagcaagtatttaattggttggacattgcataaaagaggtccatatcccggctaactctagaaattttattctcaaacttagttggcctctttttcttctgtcagaggaccattcttagtgacactggggaaatcttggcacccagaagaattcaactgcgctcactgcaaaaatacaatggcctacattggatttgtagaggagaaaggagccctgtattgtgagctgtgctatgagaaattctttgcccctgaatgtggtcgatgccaaaggaagatccttggagaagtcatcaat

SEQ ID NO: 32853 - DNA, 437 bp, Homo sapiens
ggcgaattggagctccaccgcggtggcggccgcccgggcaggtaccagttgtaaaattaccaggaaccgccatgcctcaagatcgccctgttttctggcttcatcaatgactgcatgcagtgcaccaccctgtccactacgtgatgctgtaggattaagtctcacagggggcggttgaggatacagcgccgcgtcctgtgttgctggtgaattagacgccatcgctgtgggttgctggtatggtgccgtgctatttggcacaggacacaccgcttgaggtctgtattgaacctctgaaggaggccgatactgaagctcggttggcagccggtattgataaactaccagcggttgggtcttattttctaccggctgatattgtggatactggatctgggttggcattggcgggatagagaatctgtccctttctactt

SEQ ID NO: 32854 - DNA, 299 bp, Homo sapiens
tatagggcgaattggagctccaccgcggtggcggccgccatcttgggtcatcgatgagcctcgccctgtgcctggtcccgcttgtgagggaaggacattagaaaatgaattgatgtgttccttaaaggatgggcaggaaaacagatcctgttgtggatatttatttgaacggggattacagattttgaaattgaaagtcacaaagttgagccattaccaaatgacgaggaaaaacagtacgaagaaaaatcttgaatggccctcacaagtaccatgcaaacaaacaaaaatgggaatac

SEQ ID NO: 32855 - DNA, 396 bp, Homo sapiens
ctccaccgcggtggcggccgcccgggcaggtactgagtttcaggaaacagtgagatactttcagcaaaacagtgggcttcatgctgaaagaagtcactccaagtaaacacacatcacacacacacacacacacacacacacacacatacacacacccgcagacaccctagtggccaatgggtcctctcaccaaaaacctgtgatcaggagagcagaaagcctcccaggggtccatcactgccctttctggagccccttatcagatggccagccccaggacagcactgtctgatcctggtccagtccaaaccgccatcaccctgtgatgtgggagctggccacttcaccagaacctctgtgtcagaaaaatttctcttccttttaaaatgatgaggg

SEQ ID NO: 32856 - DNA, 419 bp, Homo sapiens
actactatagggctaattggagctccaccgcggtggcggccgaggtaccgactcctcagaaactggcatgccaaatcaaaatgggtctggttcaatcctccctaatggcaatgtaaacccctctaactaatcccacttctcctaattatctttttctccttacgaacctaaaaatctcaccatttctattagcctgaaaataacatccctctgttcttctcttcctccttcagcactggatctcacttacaataggttttatttaataattatcttccttacactttctgtctcaccagtttccccttaaactgatttacctgctacacaaaattattcttattgggcttatgtgccttttccttcacttatttgacctctcacctggatggatgctcctgcagaaatctatactaacg

SEQ ID NO: 32857 - DNA, 373 bp, Homo sapiens
ccgcggtggcggcgcgaggtacgaaaaaatcaggctactaagcccactgttaatatagactcagaccaattgttaggaacaggtccaaattggagcaccattaaccaacaatcagtgatgcagaatgaggctattgaacaagtaagggctatttgcctcagggcctggggaaaaattcaggacccaggaacagctttccctattaattcaattagacaaggctctaaagagccatatcctgactttgtggcaagattacaagatgctgctcaaaagtctattacagatgacaatgcccgaaaagttattgtagaattaatggcctatgaaaatgcaaatccagaatgttcagtcggccataaagccattaaaa

SEQ ID NO: 32858 - DNA, 422 bp, Homo sapiens
tatagggctaattggaactccaccgcggtggcggccgcccggtcaggtacaaagtctttgaggcaaaagtttgcttgctgtgttctaggaaaagcaaggaagacagcatgtctatagcagtgggaggtggaaggataataaacagtaggtgaggttagaggggaccaaatcatgtattttccatccagaggttcccaaccttggctgcacattagatttattctaaggagcttttaaaaaataccaatgactgggtcccagcctagagtgattaaatcagaatctctggaggtagacttgagaatctgatgtttgcaagtttcctaggcaagtcaaggctgaggaagactgctgcaggccattgtaagagccaggcgttgatctcattcaacctttccctcagctcttctagagacagccag

SEQ ID NO: 32859 - DNA, 421 bp, Homo sapiens
atagggcgaattgtagctccaccgcggtggcggccgcccgggcaggtactacagattacagtgctatccagaggaagggaggctgaaagtgtctgattttttatagcattaggttcagtctcactggcattactacttttatactgagctgcagccaatgctgccttgtgcttttttaaatggataaaatcagttgtgcctgagaacccagaactgggttgaacaacacttcctgtcttactactggctaatgtaactggtgctgtggtgctgaccttgcattcttgtttttgagccactggctgactgacactttttgaagatacacattctgatgatgtagaggccaaaatggtatttgataaagaggaaattacttctgaaccaccccagctggaaacactggtagtatcggcagcaa

SEQ ID NO: 32860 - DNA, 461 bp, Homo sapiens
cgcggtggcggccgaggtacgaaaaaatcaggctactaagcccactgttaatatagacgcagaccaattgttaggaacaggtccaaattggagcaccattaaccaacaatcagtgatgcagaatgaggctattgaacaagtaagggctatttgcctcagggcctggggaaaaattcaggacccaggaacagctttccctattaattcaattagacaaggctctaaagagccatatcctgactttgtggcaagattacaagatgctgctcaaaagtctattacagatgacaatgcccgaaaagttattgtagaattaatggcctatgaaaatgcaaatccagaatgtcagtcggccataaagccattaaaaggaaaagttccagcaggagttgatgtaattacagaatatgtgaaggcttgtgatgggattggaggagctatgcataaggcaatgctaatgg

SEQ ID NO: 32861 - DNA, 417 bp, Homo sapiens
gcgaattggagctccaccgcggtggcggccgcccgggcaggacgcggggagaaaaacagaggggagatttgtgtggctgcagccgagggagaccaggaagatctgcatggtgggaaggacctgatgatgcagaggtctgtaggccatgggaatgggtttggaattttattcaaagagctatgggaagtgactagaaggtttaaagttggggaagaggttttgtgtttctgttatatttgtgttttatacaaattactctggttgctgtgttgataggacagcagaagggtaggagcagggacaccagttaagttattgcaatggttaaggtgagaggtggtggctgggcctaggcctttttggagtgaacaagctatttgcttggcttccatgatccttctccctccactggaatgg

SEQ ID NO: 32862 - DNA, 404 bp, Homo sapiens
gcgaattggagctccaccgcggtggcggccgaggtacgtaacaggacatcaataaatattagttgaatggaagattaaatcaacaaaatgggtgatggatctctgcagtaagtggaagagttcttcatggcccccaaggttatatccatctagaacttcatcacgttattttcatctggaaatagtgcctttgcggatataagttaggtaaaactgaagatgagatcatactggattaggatgggatctaaatccaatgaaaatgtcttcataaaaaacaggaaagaacccatagaaacacaaggaagaaggtcatgtgaagatggaggcagagattggagggatgcagccaccggcccaggaatgccagcagccacccagaagctggaaggaaatgagggatt

SEQ ID NO: 32863 - DNA, 427 bp, Homo sapiens
tatagggctaattggagctccaccgcggtggcggccgaggtacttttggcaatctgttgcaacacaatgctgtgtttaattgattctaccatgctatttgttgtctctttgagagtttcaattttctttctctgttcatcttctttgcagttttgaagcttgtcatcaaaaagctttaattgttcaatcaagatttgtaggtaagcatcagcttctgtaagtttcttatcaaaatcttggacactaggaacaaatcctgaatccaaaccttgaagctggagagtatgtcgaagaattgtttcttctaaggcatggatccacttctctcgctcatcagcatcacgggcctggaaatggaaggttttctgatcaacagttattgtgaaggtgctgtcgtcctcatcgtctataccaatcacagctcctc

SEQ ID NO: 32864 - DNA, 409 bp, Homo sapiens
ggcaattggagcttcaccgcgatggccgccgaggtactttttttttttttttttttttttttgtccgcaaaatttttcattcagatatttgctgagatttttgcttttttatctaacctcatttggtgtcctgtaaagcgcatcttgaacagcccctagagctaaagggtagtcactagaccagcagcatcaacatcagctgggagctttactgaattgcagaatatgaggccccagtccagatggactgagtcaaagtctggggggatgtgacccagcaatctgtgttccaacaagccctctagaagattcgaacacacacgaaagttggacaaccattgctttgaattttgacaccagaaactcagggaaagctacagaatgacgtttgaatgaagaagcaatatta

SEQ ID NO: 32865 - DNA, 421 bp, Homo sapiens
gggcgaattgttgctccaccgcggtggcggccgcccgggcaggtacaataaatcttcctgtcccttccaccagaatacacatgtgtgaaggcatcattgacttgcagcgcccaaacaccttcatcatggactcggtatgttgctatacatctctgctggccaagggaccaaaggcgaattgtcccatcaaaactgcctgacaggcattgcgtgccatctctgtttaatagcaatgccttcacattatccgtgtgccctttaagcttcattagttttgcacatgttcttggatcccataccctgaacaccttttcagtggaccctgatacaatgattgttcccagttgattcatggccaggctataaatggaatctttgtttccacttaaagaagaagttgtgacagtgttatttgaggcag

SEQ ID NO: 32866 - DNA, 386 bp, Homo sapiens
ggcggccgcccgggcaggttcatggcgaagcttgagactgtaactcttaagattgggacaaattaaagaaaaaaatgtgatttaacacaattacaaaaactgttacgttagggtcaaacaagaaccattttatgaaactgaattacaacaaatgacattatatctaactcttccgggtctccacagcacttatacttacttaagcagcttaaacacttccgagtctccacagcactctgatacttacttaaacagctcttttaacctgccctagtattcttaagtgcagcatatctaatttttttttttcctcagtagttcgaacacttgctggctattttttctgtccaagttctcagtaacttcggcctgtgtagtcagtggtt

SEQ ID NO: 32867 - DNA, 410 bp, Homo sapiens
ctatagggcgaattggagctccaccgcggtggcggccgcccgggcaggtactcattttccctcatacttcggattgaccacagttgttacggcactcttataaataggattttcaccctacaacaaaaaaaagtgagaaaaattatcagttaccctactaaaattatgtagaataatttttataaatcaagactaaaagttgcaatcatcttaagaagtcatttctattttatttgtccagatatcacagttgttttaaaggcattaataatggtttatataaaaatagaaaatggaagctttgctttacaagtctaatgatgccccgttatctggtgctatttcattcttgagtccttcctccactggaggcttgatttaagaatgttctccatggcacagaatgtgct

SEQ ID NO: 32868 - DNA, 418 bp, Homo sapiens
  misc_feature 338, 391: n = A,T,C or G
ctactatagggcgaattggagctccaccgcggtggcggccgaggtacttgcccccaggcccagataatttatttaaaaactttttttgtagagacagggtctcactatgttgcccaggctggtctcaaactcctggcctcaaacaatcctctacctcaacccccctaagtgctggcattacaggcatcagctgccatgcctggctacaaatcttaatgttttccccatggcttctttttctggcgttcttttctcaggtaatggaagtgggcagagaatgatcctttccctaggctccagtgtgtaagaattaaagaaagaggaaagaaacacaatgngcttgatggtcgaggacaggtttattttaaagaaaacaaacccaagagtggcnttctggctgagttagatcagaggcatg

SEQ ID NO: 32869 - DNA, 415 bp, Homo sapiens
tactatagggcgaattggagctccaccgcggtggcggccgaggtacagaacgcaagaagggaataggtggtctgaacgtggtgtctcactctgaaaagcaggaatgtaagatgatgaaagagacaatgtaatactgttggtccaaaagcatttaaaatcaatagatctgggattatgtggccttaggtagctggttgtactgaggctgtatacagccacagcctccccccatccctccagccttatctgtcatcaccatcaacccctcccatgcacctaaacaaaatctaacttgtaattccttgaacatgtcaggcatacattattccttctgcctgagaagctcttccttgtctcttaaatctagaatgatgtaaagttttgaataagtttgactatcttacttcatgcaaag

SEQ ID NO: 32870 - DNA, 416 bp, Homo sapiens
tactatagggcgaattggagctccaccgcggtggcggccgaggtacgcgggctttcttgaaggaatcccttaagtgcacgtctcccgttttcttttcacatcaatgcagagtccctctgtgaatttacaacacccaacacccatgagttcagtccttaagaaggaaaattgagcaagtatttaattggttggacattgcataaaagaggtccatatccaggctaactctagaaattttattctcaaacttagttggcctcttttttttctgtcagaggaccattcttagtggcactggggaaatcttggcacccagaagaattcaactgcgcctcactgcataaaatacaatggtcctacatttggattttgttagagggagaaagggagcccttgtatttgtgagcctgttgcta

SEQ ID NO: 32871 - DNA, 448 bp, Homo sapiens
tacactactatagggcgaattggagctccaccgcggtggcggccgaggtaccttctgctgttccctgggtcttcaatgactcaatttcccaccagcagtatcctttaaagccatcctgcatcctgagacaagagattgacaattcattgataagtagtcttaattgtcactattacagggctgtaggtcctttgccagccatgcctttcagtcctaaatggtcttcaaggttgggctgtgttgtccaagagctgaggaccttacatttattgttccaatatttattggctataatgatttctgtggagcagtcagctgtcagaaaattttgtctcctttgtaggtaacctgtcattggtctttggatttttttatagtctccctttgtatctggtgtaatttagtttcaatctgttgtgcctacgtgtagacttcttgcttgaaaagc

SEQ ID NO: 32872 - DNA, 412 bp, Homo sapiens; identical to SEQ ID NO: 31354

SEQ ID NO: 32873 - DNA, 417 bp, Homo sapiens
  misc_feature 363: n = A,T,C or G
ctactatagggcgaattggagctccaccgcggtggcggccgcccgggcaggtacgctgaaatattaggggcaggttcccccaatatctggcgcccaacgtggttttctttttcctaagtgcatgtgggaacccgattccctttggtaggtgcggagaaatgttcatcggtccagtccacagaaatgcttgtttggctccccaacgattggtgagttgtctgtgtattctccggggtaactatgggtcacgcagagtctaaacattatgcttatctctgctatattaaattcctgttaaaatgggggagttcgggttcccatggaaaatatggtacaccctattcagggcagttggaagaacanctgtccttggttttcctgaaaaggggaacgtttagatgttggaaactatgggga

SEQ ID NO: 32874 - DNA, 409 bp, Homo sapiens
ctatagggcgaattggagctccaccgcggtggcggccgaggtacgcggggacatcaatgcagagtccctctgtgaatttacaacacccaacacccatgagttcagtccttaagaaggaaaattgagcaagtatttaattggttggacattgcataaaagaggtccatatccaggctaactctagaaattttattctcaaacttagttggcctctttttcttctgtcagaggaccattcttagtggcactggggaaatcttggcacccagaagaattcaactgcgctcactgcaaaaatacaatggcctacattggatttgtagaggagaaaggagccctgtattgtgagctgtgctatgagaaattctttgcccctgaatgtggttcgatgccaaaggaagatccttgg

SEQ ID NO: 32875 - DNA, 435 bp, Homo sapiens
ggcgatattggagctccaccgcggtggcggccgcccgggcaggtacgcgggggcagacagattgccttatttcagctcaataaaacatcaccaaattcccttaggcagaaaaagggtggggagtgccctttcttgaaggaatcccttaagtgcacgtctcccgttttcttttcacatcaatgcagagtccctctgtgaatttacaacacccaacacccatgagttcagtccttaagaaggaaaattgagcaagtatttaattggttggacattgcataaaagaggtccatatccaggctaactctagaaattttattctcaaacttagttggcctctttttttctgtcagaggaccattcttagtggcactggggaaatcttggcacccagaagaattcaactgcgctcactgcaaaaatacaatggcctacatt

SEQ ID NO: 32876 - DNA, 410 bp, Homo sapiens
tactatagggcgaattggagctccaccgcggtggcggccgcccgggcaggtactaatgtaggttttaggcaaccattgggggtcttggaatgtgtcccctgtggatgagaggggattactatattccatattgaaatcttgtcaaagcaaacgatttgcaacttgtctgtgagagtagatctagcttctggatggtccaaaaacttagactctttagaagcttcttataaaaagaaaagatgctcacttgaagaagtgaaccttcaaattcttctgtgaaatgcttaggccagttatacacggtgtttgaaataacaactccctcccctaaactgaacatccaaaactgaaattttatattgcacaaggtctatcacacttattacctagaaactgctttcctaaaaatt

SEQ ID NO: 32877 - DNA, 173 bp, Homo sapiens
tggagctcatccgcggtggcggccgcccgggcaggtacctcaagttgcgttgtcgtatttatatacattcctatgcttgaaactgcccaataaatggatgaggactcactttacccataaataagagaggtgaacagcacatggggcctgtagatgccttttgcagggccctc

SEQ ID NO: 32878 - DNA, 409 bp, Homo sapiens
actactatagggcgaattggagctccaccgcggtggcggccgaggtacatagtccctgaggcaaaagcatgcttgctgtgttctaggaaaagcaaggaagacagcatgtctatagcagtgggaggtggaaggataataaacagtgggtgaggttagaggggaccaaatcatgtattttccatccagaggttcccaaccttggctgcacattagatttattctaaggagcttttaaaaaataccaatgactgggtcccagcctagagtgattaaatcagaatctctggaggtagacttgagaatctgatgtttgcaagtttcctaggcaagtcaaggctgaggaagactgctgcgggccattgtaagagccaggccgttgatctcatttaacctttccctcatctcttct

SEQ ID NO: 32879 - DNA, 359 bp, Homo sapiens
actactatagggcgaattggagctccaccgcggtggcggccgaggtacaaagtccctgaggcaaaagcatgcttgctgtgttctaggaaaagcaaggaagacagcatgtctatagcagtgggaggtggaaggataataaacagtaggtgaggttagaggggaccaaatcatgtattttccatccagaggttcccaaccttggctgcacattagatttattctaaggagcttttaaaaaataccaatgactgggtcccagcctagagtgattaaatcagaatctctggaggtagacttgagaatctgatgtttgcaagtttcctaggcaagtcaaggcttgaggtaagactgtctgcagg

SEQ ID NO: 32880 - DNA, 388 bp, Homo sapiens
ctatagggcgaattggagctccaccgcggtggcggccgaggtaccagttgtaaaattaccaggaaccgccatgcctcaagatcgccctgttttctggcttcatcaatgactgcatgcagtgcaccaccctgtccactacgtgatgctgtaggattaagtctcacagtgggcggctgaggatacagcgccgcgtcctgtgttgctggtgaattagacgccatcgctgtgggttgctggtatggtgccgtgctatttggcacaggacacaccgcttgaggtctgtattgaacctctgaaggaggccgatactgaatctcggttggcagccggtattgataaactaccagcggttgggtcttattttctaccggctgatattgtggatact

SEQ ID NO: 32881 - DNA, 393 bp, Homo sapiens
  misc_feature 340, 351: n = A,T,C or G
tatagggcgaattggagctccaccgcggtggcggccgaggtacttgctccatgctggtgcctggacaagctccactgcacaagccaacgtggccccaggaaggtgctgtatgcgagagtttgtaaaaatacagcgcagcatcactcacgatgaggcaaagctcctagtgactttaaatttccagatagaccagacaacatcacgaatctcctgaggaatcattaatcattactagagaaacagaaacgtcataaaccctgtccaaagctggacaccggacatggagttgccaccgttagagctaaattttattcttggctttctgatacctaaagtatanttcagaagttnttttttttttttttacaacagccctgtttttgtttttaaaca

SEQ ID NO: 32882 - DNA, 385 bp, Homo sapiens
agggcgaattggagctccaccgcggtggcggccgcccgggcaggtacgcggggtcacatcaatgcagagtccctctgtgaatttacaacacccaacacccatgagttcagtccttaagaaggaaaattgagcaagtatttaattggttggacattgcataaaagaggtccatatccaggctaactctagaaattttattttcaaacttagttggcctctttttcttctgtcagaggaccattcttagtggcactggggaaatcttggcacccagaagaattcaactgcgctcactgcaaaaatacaatggcctacattggatttgtagaggagaaaggagccctgtattgtgagctgtgctatgagaaattctttgcccctgaat

SEQ ID NO: 32883 - DNA, 223 bp, Homo sapiens
ggagctccaccgcggtggcggccgaggtacgcgggacatcaatgcagagtccctctgtgaatttacaacacccaacacccatgagttcagtccttaagaaggaaaattgagcaagtatttaattggttggacattgcataaaagaggtccatatccaggcctacttctagaaatttttattcttcaaactttagttgggcctctttttttcttgtcagaagga

SEQ ID NO: 32884 - DNA, 456 bp, Homo sapiens
acactactatagggcgaattggagctccaccgcggtggcggccgcccgggcaggtacgcggggacacacacacacacagcacctgcacgcagatgcacacatctctagtcaaatgaggctctcagctttttgataggggctttttgatacgtgtataaccaatactttattctcactgtagtcaaggacttcattgcaattcagaaatgagaagctgatccggaactccactacagctcaaagaaattctcgaatgttctcacctattaacagttattaaaatggaagaagctggggatgaaattgtgagcaatgccatctcctacgctctatacaaagccttcagcaccagtgagcaagacaaggataactggaatgggcagctgaagcttctgctggagtggaaccagctggacttagccaatgatgagattttcaccaatgaccgccgatggg

SEQ ID NO: 32885 - DNA, 376 bp, Homo sapiens
  misc_feature 348: n = A,T,C or G
gcgaattggagctccaccgcggtggcggccgaggtaccgactcctcagaaactggcatgccaaatcaaaatgggtctggttcaatcctccctaatggcaatgtaaacccctctaactaatcccacttctcctaattatctttttctccttacgaacctaaaaattctacccatttctattagcctgaaaataacatccctctgttcttctcttcctccttcagcactggatctcacttacaataggttttatttaataattatcttccttacactttctgtctcaccagtgttccccttaaactgatttaccgtgctacacaaaattattccttattggggcttatgntggccttttcctccaacttatttcgacc

SEQ ID NO: 32886 - DNA, 449 bp, Homo sapiens
acgactattatagggcgaattgcagctccaccgcggtggcggcttcccgggcaggtactattataatgacatttccaaggaacagagattaatcaatgtgcccaaattcacattattcacagagctgggatttaagcctagtctggctgtggaatctgtattcttaatgaccatgctatattgcttaagattaaccttgaaaatttactccagttacaaagattgtttttatttctctgaaactgcccccaatgagccataacaataaattaatcaattatcttggttatctcttttgcccaagtttatatttcaaaaaaaattcaaacataccagaaagatgaaagaatagcacagaatccaatcaaagatcaggcactgcatgtcatgtcttcatttcctttaatctaaaacatgcctctactttctttgatcttccatgacattgg

SEQ ID NO: 32887 - DNA, 392 bp, Homo sapiens
  misc_feature 350: n = A,T,C or G
atagggcgaattggagctccaccgcggtggcggccgcccgggcaggtacatctacctaaaggactattatgtggaataatacataccaatgaagtattacatgatttaaagactacaataaaaccaaacatgcttataacattaagaaaaacaataaagatacatgattgaaaccaagttgaaaaatagcatatgccttggaggaaatgtgctcaaattactaatgatttagtgttgtccctactttctctctcttttttctttctttttttttattatggttagctgtcacatacaactttttttttttttgagatggggtctcgctctgtcaccaggctggagtgcangcggcgcgatctcggctcactgcaacctccacatcccatgtt

SEQ ID NO: 32888 - DNA, 422 bp, Homo sapiens
ctatagggcgaattggagctccaccgcggtggcggccgcccgggcaggtacttccaaaccctcctgttctttcctttttgttttccccaattttaacataaggcaaaagcagtaattgagcaattctatcacctggattggcactccggggaacagtggagctgatcactaactgaattccccctttataatctgaataaattaccccagtatgaatttggactcccttcaaatttagacttgatctccctcaaaggcctaccctcccttctggcagcgggccatatacccctctaggaatcttttgtgggggctttccagggagtaaaaagaccatttgggtggaacataaatctactgcggtgctgcctgctgtggcgcgggacagctgttggattgttgtaattggctgactccctgaa

SEQ ID NO: 32889 - DNA, 452 bp, Homo sapiens
tatagggcgaattggagctccaccgcggtggcggccgccatcttgggtcatcgatgagcctcgccctgtgcctggtcccgcttgagagggaaggacattagaaaatgaattgatgtgttccttaaaggatgggcaggaaaacagatcctgttgtggatatttatttgaacgggattacagatttgaaatgaagtcacaaagtgagcattaccaatgagaggaaaacagacgagaaaatcttgatggcttcacaagacatgcaacaaacaaaatggaatactgtgatgacatgaggcagccaagctggggaggagataaccacggggcagagggtcaggaatctggccctgctgcctaaactgtgcgttcataaccaaatcatttcatatttctaaccctcaaaacaaagctgttgtaaaatctgatctctaccgttccttctgggcccaaca

SEQ ID NO: 32890 - DNA, 427 bp, Homo sapiens
tagggcgaattggagctccaccgcggtggcggccgaggtactttttttttttttttttttttcccttcatcaaggaagttcatcaaagaatttcatcaaagttcaatgatgacctctttttaaaattttcttagtattctatgtaactatcaccgatcttttccccacacactccaagagctttttaatataattttctacatagccatcagcacagataaccaatcctctttttttccccactagagatgtgccttccgtaacctctgtcctcttcctttaacctggaatattgctcttcaggcctgttgtgcagctaagagcttcattcctcatcatcctggggttcctttccctctctcttgggctggaatccctcttgcctggatctctcaccttcataaatctagtttactcctttgttttg

SEQ ID NO: 32891 - DNA, 403 bp, Homo sapiens
  misc_feature 299, 303, 304, 321, 330, 331, 345, 346, 356, 374, 375: n = A,T,C or G
gactactatagggcgaattggagctccaccgcggtggcggccgaggtacgttgaaatattaggggcaggttcccccaatatctggcgcccaacgtggttttctttttcctaagtgcatgtgggaacccgattccctttggtaggtgcggagaaatgttcatcggtccagtccacagaaatgcttgtttggctccccaacgattggtgagttgtctgtgtattctccggggtaactatgggtcacgcagagtctaaacattatgcttatctctgctatattaaattcctgttaaaatggngggnnagttcgggttcccatgngaaaatatnnggtcaccctatttnncagggcagtnggaagaaacccactgtcnncttggtttttcctgaaaagggggaacgt

SEQ ID NO: 32892 - DNA, 404 bp, Homo sapiens
acgactcactatagggcgaattggagctccaccgcggtggcggccgcccgggcaggtacaaaatccgtaaacacttccactaatcgaatctaagtcaaagtccactttggattggggtttgagaaaaaattcatttgctgcaacctctgcctcccgggttcaagcgattcttctacctcagtttcccaagtagctgagactacaggtgcgtgccaccacgcccatctaatttttttgtatttttaatagagacggggtttcgccatgttggccaggatggtctctatctcctcctgacctcgtgatctgcccacctcagccttccaaagtgccttgggattacaggcgtgagcccaccgtgccctggttcattccaacccattgagcctttttgataggactac

SEQ ID NO: 32893 - DNA, 451 bp, Homo sapiens
tatagggcgaattggagctccaccgcggtggcggccgaggtacgaaaaaatcaggctactaagcccactgttaatatagacgcagaccaattgttaggaacaggtccaaattggagcaccattaaccaacaatcagtgatgcagaatgaggctattgaacaagtaagggctatttgccttaaggcccgggggaaaaatcaggacccaggaacagctttccctattaattcaattagacaaggctctaaagagccatatcctgactttgtggcaagattacaagatgctgctcaaaagtctattacagatgacaatgcccgaaaagttattgtagaattaatggcctatgaaaatgcaaatccagaatgtcagtcggccataaagccattaaaaggaaaagttccagcaggagttgatgtaattacagaatatgtgaaggcttgtgatggga

SEQ ID NO: 32894 - DNA, 399 bp, Homo sapiens
gcggccgaggtacactgtttttgcattagcattatgcctcctctcttacctcctctgtccttcatacttgcaaccaacaatctattagcaacctgaatttcagggtttctttcagagggagacacagactggaaaatgtgtatgtaacaacgtgaaaagttgtattgacacacagggctggggtctgggccaggcctctgcattcaccttttctatctttaaccctatcttacagatgtccttcaggacgtgtgtctggtgatgggaccggctcttcatttacatttttctgttgacaaacagagtccatgaatattaattattctgaagtttatttgcagaaaaggcactttctaatccttatcaattatttattaaaaatctcccccaccctaataa

SEQ ID NO: 32895 - DNA, 326 bp, Homo sapiens
cgaattggatctccaccgcggtggcggccgcccgggcaggtactcggggaggctcctggggtggagtccaatttactcattgtttgtgaaagctgagctcacagcaaaacaagccaccatgaagctgtcggtgtgtctcctgctggtcacgctggccctctgctgctaccaggccaatgccgagttctgcccagctcttgtttctgagctgttagacttcttcttcattagtgaacctctgttcaagttaaagttttgccaaatttgatgccccctccggaagctgttgcagccaaagttaggaagtgaagaagatgccacggatc

SEQ ID NO: 32896 - DNA, 442 bp, Homo sapiens
gcgaattgtagctccaccgcggtggcggccgaggtacgcgggggcgcatagctgcagccgccgagccggacgtgtccgcgaagatggcgggccggagcatgcaagcggcaagatgtcctacagatgaattatctttaaccaattgtgcagttgtgaatgaaaaggatttccagtctggccagtgagtatctgactttgttttcttttaacctgctaagtggcattcgggaaacttccagagagtcatttttaggaaacgttggaaaatatttttaaaaaattcttgctgagttggaaaatggagaggatgagaaaaagttatgtatttgaatcattactgtgtcaaactttgataaatactgtataatgttttaaaaatgttttatgtataaaactctaaattttatcagttttcttagtagagcttaacatactggtttgt

SEQ ID NO: 32897 - DNA, 421 bp, Homo sapiens
ggccgaggtacgcggggatgctttgtcacacatacacacccacacgttgaccaacccgcagatgcacacatctctaggcaaatgatgctctcagctttttgataggtgctttttgatacgtgtataaccaatactttattctcactgtagtcaagggcttattgcaattcagaaatgagaagctgatccggaactccactacagctcaaagaaattctcgaatgttctcacctattaacagttattaaaatggaagaagctggggatgaaattgtgagcaatgccatctcctacgctctatacaaagccttcagcaccagtgagcaagacaaagataactggaatgggcagctgaagcttctgctggagtggaaccagctggacttacccaatgatgagattttcaccaatgaccgccgat

SEQ ID NO: 32898 - DNA, 425 bp, Homo sapiens
tactatagggcgaattggagctccaccgcggtggcggccgacgggctaggacttcggggcttttcttgaaggaatccctaaagtgcacgtgattcgcggtttctttacacatcagtgcaaagcccctctgtgaatttacaacacccaacacccatgagttcagtgcttaagaaggaaaattgagcaagtattttatttggttggacattgcataaaagaggaccatatccaggctaactctataaattttattctcaaacttagttggcctctttttcttctgtcagaggaccattcttagtggcactggggaaatcttggcacccagaagaattcaactgcgctcactgcaaaaatacaatggcctacattggatttgtagaggagaaaggagccctgtattgggaagctggctatgagaaatt

SEQ ID NO: 32899 - DNA, 423 bp, Homo sapiens
cactactatagggcgaattggagctccaccgcggtggcggccgcccgggcaggtacgaaaaaatcaggctactaagcccactgttaatatagacgcagaccaattgttaggaacaggtccaaattggagcaccattaaccaacaatcagtgatgcagaatgaggctattgaacaagtaagggctatttgcctcagggcctggggaaaaattcaggacccaggaacagctttccctattaattcaattagacaaggctctaaagagccatatcctgactttgtggcaagattacaagctgctgctcaaaagtctattacagatgacaatgcccgaaaagttattgtagaattaatggcctatgaaaatgcaaatccagaatggtcagtcggccataaagccattaaaaggaaaaagttccagca

SEQ ID NO: 32900 - DNA, 395 bp, Homo sapiens
ctactatagggcgaattggagctccaccgcggtggcggccgcccgggcaggtacgtaacaggacatcaataaatattagttgaatggaagattaaatcaacaaaatgggtgatggatctctgcagtaagtggaagagttcttcatggcccccaaggttatatccatctagaacttcagcacgtaatttcatctggaaatagtgcctttgcggatataagttaggtaaaactgaagatgagatcatactggattaggatgggatctaaatccaatgaaaatgtcttcataaaaaaacaggaaagaacccatagaaacacaaggaagaaggtcatgtgaagatggaggcagagattggagggatgcagccaccggcccaggaatgccagcagccacc

SEQ ID NO: 32901 - DNA, 423 bp, Homo sapiens
atacgactcactatagggcgaattggagctccaccgcggtggcggccgaggtacgcggggaatgcagagtccctctgtgaatttacaacacccaacacccatgagttcagtccttaagaaggaaaattgagcaagtatttaattggttggacattgcataaaagaggtccatatccaggctaactctagaaattttattctcaaacttagttggcctctttttcttctgtcagaggaccattcttagtggcactggggaaatcttggcacccagaagaattcaactgcgctcactgcaaaaatacaatggcctacattggatttgtagaggagaaaggagccctgtattgtgagctgtgctatgagaaattctttgcccctgaatgtggtcgatgccaaaggaagatccttggagaagtcatc

SEQ ID NO: 32902 - DNA, 368 bp, Homo sapiens
gcgtatacgactcactataagtcatatagggcgaattggagctccaccgcggtggcggccgcccgggcaggtacggtattggaaatggatctgtctttggtaaagatcagcctataattcttgtgctgatggatatcacccccatgatgggtgtcctggacggtgtcctaatggaactgcaagactgtgcccttcccctcctgaaagatgtcatcgcaacagataaagaagacgttgccttcaaagacctggatgtggccattcttgtgggctccatgccaagaagggaaggcatggagagaaaagatttactgaaagcaaatgtgaaaatctttaaatcccagggtgcagtccttagataaatacgc

SEQ ID NO: 32903 - DNA, 409 bp, Homo sapiens
  misc_feature 312, 320, 332, 395: n = A,T,C or G
acgactactatagggcgaattggagctccaccgcggtggcggccgaggtacgcggggacatcaatgcagagtccctctgtgaatttacaacacccaacacccatgagttcagtccttaagaaggaaaattgagcaagtatttaattggttggacattgcataaaagaggtccatatccaggctaactctagaaattttattctcaaacttagttggcctctttttcttctgtcagaggaccattcttagtggcactggggaaatcttggcacccaggagaattcaactgcgctcactgcaaaaatacaatgngcctacanttggatttgtangaggagaaagggagccctgttatttgtgaagctgtgcctaatgagaaaattcttttgcccctnggaatgtggttcga

SEQ ID NO: 32904 - DNA, 414 bp, Homo sapiens
cgactactatagggcgaattggagctccaccgcggtggcggccgaggtacgcgggacatcaatgcagagtccctctgtgaatttacaacacccaacacccatgagttcagtccttaagaaggaaaattgagtaagtatttaattggttggacattgcataaaagaggtccatatccaggctaactctaaaaattttatttctcaaacttagttggcctctttttcttctgtcagaggaccattcttagtggcactggggaaatcttggcacccagaagaattcaactgcgctcactgcaaaaatacaatggcctacattggatttgtagaggagaaaggagccctgtattgtgagctgtgctatgagaaattctttgcccctgaatgtggtcgatgccaaagggaagatccttg

SEQ ID NO: 32905 - DNA, 448 bp, Homo sapiens
tacgactactatagggcgaattggagctccaccgcggtggcggccgcccgggcaggtacttgatggactcatcattacagaatactcctcgttggaagggggtatgccttgaagtaagaattgcaaaaggcaatccagctagcaaaagggaataaatgaaaatatcattaaaaaagaaatatcaaaactaattaaatggcaataattatcccacagactctgtctaaaaatgcatttgccgtgaaaataaatgagagcacatgtaaaaaaggaaatgcagcaatgcatgcaacagaagttagaaagattacagttttaagataaagatgttttgtctacagcaaacaaagtgttcaaatcctctattaaccaatttaacaaagagttatctttcctttgtttctgtccaaacacactaaatggattttggaaaaatctcttctcacgt

SEQ ID NO: 32906 - DNA, 425 bp, Homo sapiens
tacgactcactatagggcgaattggagctccaccgcggtggcggccgcccgggcaggtactctggtagccaagttttgcaagagccggggtttccagcagggatggtagccagcctgggcacacttttctgtattgtatttgaacctcatttcctgatgctcatccagaagttcctggctgggtgagtaggtgaacagttcaaggctgtgtggatgaaactctggcatctctttacagtgctgtccggcagggcagtgtgaggccactctgtcctcctttgacctctttcttcttcagcagccaaatggaggctctctaaaggtgatgattaacttggcataaacatgccaagctttcctgagcgtttgccctgaattgggctgtctcttgctgctctgagacagggagactggctgtctggctg

SEQ ID NO: 32907 - DNA, 425 bp, Homo sapiens
tatagggcgaattgtagctccaccgcggtggcggccgcccgggcaggtacgttgaaatattaggggcaggttcccccaatatctggcgcccaacgtggttttctttttcctaagtgcatgtgggaacccgattccctttggtaggtgcggagaaatgttcatcggtccagtccacagaaatgcttgttcggctccccgacgattggtgagttgtctgtgtattgtccggggtaactatgggtcacgcagagtctaaacattatgctcatctctgctatattaaattcctgttaaaatgggggagttcgggttcccatggaaaatatggtcaccctattcagggcagtggaagaacactgtccttggtttcctgaaaagggaacgttagatgtggaactatgggatcatgttggtgcaaaattccg

SEQ ID NO: 32908 - DNA, 386 bp, Homo sapiens
tatacgactcactatagggcgaattggagctccaccgcggtggcggccgaggtacagatctcatcaggtatgagggcagtctctgacgcgaacgtctcttcctcgtggtttttattgtcagtattcacacgaagtttaagtctcctagtgggcacccagacgggattgacgatctcctggtaaaacacaagcataccctcttccccacgttataattgttccaggttcccaggtattggtttgggagtttttccatgacactggcttgccttcgtttagggagaattttttgcctgtataatggcatttagctgcagtcagagtaattgtttttaggaaacatttagaaaagcttaaacaattgctaaatataattgggaagtggg

SEQ ID NO: 32909 - DNA, 425 bp, Homo sapiens
cactactatagggcgaattggagctccaccgcggtggcggccgaggtactccaacccgttcttaggttttgggttagtgagtggtgtatcagcagcccttactagcaaaagtcctatgtgcacctacctacccttcttcattgatggattggagctatacttacctgggcaggcatgacctcggcattagtccccgcaatcttgactccagcatacaagcaggcccggtaatgggcctccacgatgtccctgccataggctctttgagctcccacaccacagtaatatggacctacagaagcatcaggacaaaacgctaagagtcaagaaatccagagaatcccaaagtcagagatcagaaggccctaagccttgccctcttgaatcactatccttgccttcatctgcaggtgcggggcagggga

SEQ ID NO: 32910 - DNA, 445 bp, Homo sapiens
agggcgaattggttctccaccgcggtggcggccgaggtactccagcctgggcgacagaccgagattctgtctcaaaaaaacattaacaaagaatactccagatcatccagaaagtcagtatctgatagtgtttatatggagaactcctgcactggaatgtaaactcctaaccctagatccatctcttctcaggtcttcctatcacctcagcctacagcagtcaatccttccctctaaccactccctcctcctaagatttcagcatttaatgcctgtacgcggggatgtctcttgtcagctgtctttcagaagacctggtggggcaagtccgcgggcatcatgttgaccgagctggagaaagccttgaactctatcatcgacgtctaccacaagtactcttcatacctcgttggatgtgggaaatgcctactgtcccaatcaaaaa

SEQ ID NO: 32911 - DNA, 432 bp, Homo sapiens
cgtaatacgactcactatttggcgaattggagctccaccgcggtggcggccgaggtacttttttttttttttttttttttttgtctgtaaaatctagcattcagatatttgctgagatttttgcttttttatctaacctcatttggtgtcctgtaaagcgcatcttgaacagcccctagagctaaagtgtagtcactagaccagcagcatcaacatcagctgggagctttactgaattgcagaatatgaggccccagtccagatggactgagtcagagtctggggggatgtgacccaccaatctgtgttccaacaagccctctagaagattcgaacacgcacgaaagtttgacaaccattgctttgaattttgacaccagaaactcagggaaagctacagaatgacgtttgaatgaagaagcaatattagcc

SEQ ID NO: 32912 - DNA, 425 bp, Homo sapiens
atacgactcactatagggcgaattggagctccaccgcggtggcggccgcccgggcaggtaccctggcaaggtttgtcctgtcttggtagcagaaagaacttctcaaagtaagggcttcacactaggggagagttcaatggcccaacccagccatggccaccctgacaccatgccctgatgctagtccctgtggcctggcccacactgaaaatactgtggggacaacagaatggatttgcaagttaccactatctctcaccagctgtaagaccctgggcacattgttgatcctaagcctcagtttcctaatctgtaaaagggtgatattaattgttcttgctcacagaactgttatgagaattaacagaaatagcatattcagactatagcagagtgtctggcatgaaacagagactcaataaata

SEQ ID NO: 32913 - DNA, 405 bp, Homo sapiens
cgaatcgtagctccactgcggtggcggccgaggtacgttgaaatattaggggcaggttcccccaatatctggcgcccatcgtggttttctttttcctaagtgcatgtgggaacccgattccctttggtaggtgcggagaaatgttcatcggtccagtccacagaaatgcttgttcggctccccgacgattggtgagttgtctgtgtattgtccggggtaactatgggtcacgcagagtctaaacattatgcttatctctgctatattaaattcctgttaaaatgggggagttcgggttcccatggaaaatatggtcaccctattcagggcagtggaagaacactgtccttggtttcctgaaaagggaacgttagatgtggaactatgggatcacgttggtgcaaa

SEQ ID NO: 32914 - DNA, 431 bp, Homo sapiens
actactatagggcgaattggagctccaccgcggtggcggccgaggtaccagttgtaaaattaccaggaaccgccatgcctcaagatcgccctgttttctggcttcatcaatgactgcatgcagtgcaccaccctgtccactacgtgatgctgtaggattaagtctcacagtgggcggctgaggatacagcgccgcgtcctgtgttgctggtgaattagacgccatcgctgtgggttgctggtatggtgccgtgctatttggcacaggacacaccgcttgaggtctgtattgaacctctgaaggaggccgatactgaagctcggttggcagccggtattgataaactaccagcggttgggttcttattttctaccggctgatatttgtggatactgtatcttgagttggcattgccgggatagagactctgt

SEQ ID NO: 32915 - DNA, 413 bp, Homo sapiens
actactatagggcgaattggagctccaccgcggtggcggccgaggtacgcggggacatcaatgcagagtccctctgtgaatttacaacacccaacacccatgagttcagtccttaagaaggaaaattgagcaagtatttaattggttggacattgcataaaagaggtccatatccaggctaactctagaaattttattctcaaacttagttggcctctttttcttctgtcagaggaccattcttagtggcactggggaaatcttggcacccagaagaattcaactgcgctcactgcaaaaatacaatggcctacattggatttgtagaggagaaaggagccctgtattgtgagctgtgctatgagaaattctttgcccctgaatgtggttcgatgccaaaggaagatccttgg

SEQ ID NO: 32916 - DNA, 417 bp, Homo sapiens
ctactatagggcgaattggagctccaccgcggtggcggccgcccgggcaggtaccagtgaaggacaagaaacttctggaggtcaaactgggggagctgccaagctggatcttgatgcgggacttcagtcctagtggcattttcggagcgtttcaaagaggtcagagccttgtgggatgtctgtaaatgaaagcaaatctctgggtcttcagatctcttttttgccatgaattaatttgggcaatgaaggccttgttgtctgaaagcagtaagttatgtagaggatgacagggagggatgctaggccttggacttctgtggttgattggccctttcaaaggctggctctgagatattacagccaagaacatgcttcctgttgcttggaatcagtatgtctgcctctgtcttagagaaa

SEQ ID NO: 32917 - DNA, 415 bp, Homo sapiens
actactatagggcgaattggagctccaccgcggtggcggccgaggtacagtaacatgctgcacagttttgtaggctatgagcaataggccataccatataggctaggtgtgtagcaggctgtgccacccaggtttgtgtaagtgcactctatgatgcttgcacaacgaccaattccacccaacaacgcatttctcagaatgaatccctgttgtcaagcgatgcatgactgtgcctttgatagttccttacaaattgatcttgagtgtgtattcatgtgtaacctagttactgaataatgcatctcgaaatgttggattctttttgcatccgcctgtgctgtgctgccttccatggagctctatgatgactggcacctcctggtggaggcatccttcccacattacccccagtaag

SEQ ID NO: 32918 - DNA, 390 bp, Homo sapiens
caccgcggtggcggccgagttactctttttttttttttccttttttttttaataaaaaagaatcttaaaatctggttgagaattatatctggaatataattgtatatttgaatattgctgtcataacttttcagttggagaagggtcaactcagaggggttccacttcaaaaagaggacagggtgggtgaacagcttgcctggccttttttccccaccctgtgtctccatattccagccttctaagaaaatggctggtgggtgaggataatgcaccaaatccttcttgactggtgatcttgatgcacgtgccatttccctgtctctcccagtgtgggaacttaaacttagggcagagcctattcctggccttataatactgtgttggttg

SEQ ID NO: 32919 - DNA, 425 bp, Homo sapiens
ctactatatggcgaattggagctccaccgcggtggcggccgcccgggcaggtaccaggatccaaagagctcctgtggaaccagacttttccccactctgctgaaaaaacctctcctcagagccctgggctgtgcaacgacaactatgaaaatatttgtttctcacttagggaaatttcccaggaatcctgctaagtccagaggggttttctttctcttccttattcataggttccccttgcctttaaaaggaactaaataaacaagcataaaaacaaaacaagaaaatctcccctgctcccttggcttttatctgaccctgaaatgaccccttgcctggcttgcttcatacaggtctttgaaaggcgttctctgcagaatggtgtgggcacaactttgaagtccaggcttcagtagtggccaaac

SEQ ID NO: 32920 - DNA, 371 bp, Homo sapiens
tacgactcactatagggcgaattggagctccaccgcggtggcggccgaggtactttttttttttttttttttttttggaaacagggtttcaccgtgttagccaggatggtctcgatctcctggcctcgtgatccgcccgcctcggcctcccaaagtgctgggatcacaggcgtgagccatcgtgcctggccgctgcttgggtttaaaatgaatcttggatacaggtggccagactaaatggtctctcaacttgtcttcaagtttaggattttaatttttgatatttttcacttctctctggaaatttgttcaattctcaattgttgggggagatgcgcagcttgcttcattattggagtttactgggctga

SEQ ID NO: 32921 - DNA, 439 bp, Homo sapiens
ctactatagggcgaattggagctccaccgcggtggcggccgcccgggcaggtactaacaaatgcagtagtcaacaagattaccatgcaatcattaaggagaaccaaagtaagagagccactcagaccagattttgaacgctactaaaattaaagtagttctttgatgaatatgaatgagtagggaaaggattctttgtaatagtgatacctctgcggtaagagaagggtggtatgtgagttttagtctacagattatggcaaattcagtgacaacaatcaaatggtctaagattgacagtagcacagctttactctgtgaaggtaatgttcaggacaaatttcaagaaaactagaaaaccattctttacagctgaaatctttccctaaccattgttatttccacttttaagtcctcaagagatgagaaaagggaggtaa

SEQ ID NO: 32922 - DNA, 425 bp, Homo sapiens
tagggcgaattggagctccaccgcggtggcggccgaggtacgaaaaaatcaggctactaagcccactgttaatatagacgcagaccaattgttaggaacaggtccaaattggagcaccattaaccaacaatcagtgatgcagaatgaggctattgaacaagtaagggctatttgcctcagggcctggggaaaaattcaggacccaggaacagctttccctattaattcaattagacaaggctctaaagagccatatcctgactttgtggcaagattacaagatgctgctcaaaagtctattacagatgacaatgcccgaaaagttattgtagaattaatggcctatgaaaatgcaaatccagaatgttcagttcggccataaagccattaaaaggaaaagttccagcaggagtttgatgtaatta

SEQ ID NO: 32923 - DNA, 435 bp, Homo sapiens
atacactactatagggcgaattggagctccaccgcggtggcggccgaggtacttctgctcctttttttggcagtagtggatgtgtcctagtgcttggtttctctgcaggccttttagggagaaatagctgaatttgttacagtataacttactttttatgttgatctgtttccttccctaatgtaaataggtctaatgctagttgtactttttttttttttttttttttttttttggaggggtttgcaactgcgttttattgaaagaaagagtggaggggttaacatggggcccaccttacaacccacttttcacccccaaaatcacccagggatgggactcaggaaagggaagcatgtgtgtgttgaataggagccctaactgtagttacttcttttacagcagggaaggaagagggaagaggcacctttggaa

SEQ ID NO: 32924 - DNA, 430 bp, Homo sapiens
  misc_feature 335: n = A,T,C or G
tacgactcactatagggcgaattggagctccaccgcggtggcggccgaggtactttgcttggattgctgtgattcttaaaaaaaaaaaaaaaaagtttttttattttcctgaaggcgacagtctgtcttttggcgagtccaattagtgatcgtttccatttatccttaaccctctgtttgtgatcttcctgattccacctacaagttcattagttctaaataaaagcctgttggcaagtgttggtagattacaactctttttatttgaagttgctcgagaagttagacatgctttagaattatgagtgtggggaaaattttgatgtttccttagngattattataaactgaggaggggaacattgccaaatagggttctgaggggctttgtttctcttcttggctctgaaaacattttctgaaaaaggca

SEQ ID NO: 32925 - DNA, 427 bp, Homo sapiens
tacgactactatagggcgaattggagctccaccgcggtggcggccgcccgggcaggtacccaacagccatggctcttgcgactcacctgggcagctgtgtggctgcgcacctgactcactctttctagagggtgccttgaacagcatcagcgtggcccggcgttccctacaaatagcccttgcaattgctgacccccaacaatgttgggaataacagaagggacaagggaacaaagaaaaggccaggaaggtaataattaaccacttactgagttcaaagccatcttgctgttatcaacagcatcgagtaatgataggtatctggaatgttcaatatgacctagaagaaagaattacaggactgtaatatttccataccagttagtttttagaagataaatctggaaagaactagaagaatctctag

SEQ ID NO: 32926 - DNA, 424 bp, Homo sapiens
ctactatagggcgaattggagctccaccgcggtggcggccgaggtaccgactcctcagaaactggcatgccaaatcaaaatgggtctggttcaatcctccctaatggcaatgtaaacccctctaactaatcccacttctcctaattatctttttctccttacgaacctaaaaatctcaccatttctattagcctgaaaataacatccctctgttcttctcttcctccttcagcactggatctcacttacaataggttttatttaataattatcttccttacactttctgtctcaccagtttccccttaaactgatttacctgctacacaaaattattcttattgggcttatgtgccttttcctccacttattcgacctctcacctggatggatgctcctgcagaaatctatactaacgatagtg

SEQ ID NO: 32927 - DNA, 407 bp, Homo sapiens
ctatagggcgaattggagctccaccgcggtggcggccgaggtactttgcccactcgtcatgtcaggagcatgaaactcacgaggccttcatttacttttatcctgtaacaccttcaatttttcccacatcctcccttgattcgtggatggacaactatggaggccaatcttgctgaggtgaggactgcttgagtctaaattcctctctcctcaaacccaattcaaactggcctgagcaaaatgaatgtattgatccataactgaaaagtccagaatgatcaggcatcaggcatggttgcatccaggggcccatgtattagaaccatctccttccagttctgggctctgcttgcctcccagttggttttactgcacagaggcttattcaagtccagagagatcttatc

SEQ ID NO: 32928 - DNA, 419 bp, Homo sapiens
tacgactcactatagggcgaattggagctccaccgcggtggcggccgaggtaccgagacaacaagtgacttatcccaagtcacacaggagttagaggcagggccaggacccaaacccaagtttcccttttatgagtcagctcatttcctgtgactccatattaaagatgccactctgaattttgccttggaagctggcgcttcagtttataacacaaattgacactttaggaagacaagagagctttgtattctccctgcaatcatttactcagtcaggaaaatactaaacactgtctttgcgtagaatataatgctactgatgtgaggaaaagaaatccagtgcctggcacatagaaaaggatagatacacttttgtgggaggaaaaacagtggtaaaaacatggactggagtctcag

SEQ ID NO: 32929 - DNA, 432 bp, Homo sapiens
atacgactactatagggcgaattggagctccaccgcggtggcggccgaggtacgcgggacatcaatgcagagtccctctgtgaatttacaacacccaacacccatgagttcagtccttaagaaggaaaattgagcaagtatttaattggttggacattgcataaaagaggtccatatccaggctaactctagaaattttattctcaaacttagttggcctctttttcttctgtcagaggaccattcttagtggcactggggaaatcttggcacccagaagaattcaactgcgctcactgcaaaaatacaatggcctacattggatttgtagaggagaaaggagccctgtattgtgagctgtgctatgagaaattctttgcccctgaatgtggtcgatgccaaaggaagatccttggagaagtcatcaatgcg

SEQ ID NO: 32930 - DNA, 386 bp, Homo sapiens
tatagggcgaattggagctccaccgcggtggcggccgcccgggcaggtacagagaagcaggttgagtggatggcaaagtgaccggttgaggggccaaaatgataggagggtgaggggctgtggtggatgggggagggcctgcagaattacaggtaaattgtagtttggatggctccggaggcaaagactgtaaaggtttggagagggaagagttagcatagatatggtcctgggctgtctgagttggggccgcaggagctacaagtgtcggctcttcgtgaaaagaaataaaatcatcagggggtgatgttaagccaaagtcactggagttagatattgaatcctcagtatcgtcaggtgggggaggagtaggcaaagggaggggc

SEQ ID NO: 32931 - DNA, 434 bp, Homo sapiens
actactatagggcgaattggagctccaccgcggtggcggccgcccgggcaggtacttagtggacactccgaggcaggcaggggagtgggaagctttacggtggaaaaggggaaggctgcagcagtgctctgattggaggcttctggcctggagaagttggaagcagctgatagaggtaggtgtcttcagtgattggtttgaggagcctatttgtttttctgtggttgattctgagttgcaagagtcctgaccatttggggctgattgctgctgaggttgtggttttcttgcaggacaggcaagccccaaattgggccttagcccatgagggttcctggctttacccaggaaagaattcaagggtgagccagtggtaaggtggaagaaaacaacttcattaaagaggcagtgtgacagctccgtgacttttcctg

SEQ ID NO: 32932 - DNA, 441 bp, Homo sapiens
atacgactcactatagggcgaattggagctccaccgcggtggcggccgcccgggcaggtacagtggcgtgatcatagctcactgcagcctcaaactcctgggctcaagtgatcctcctgccccagtttcttgagtagttgggactacaggcgtgtgccacatctggctatttttttttttttaatagagaaggggtcttgttatgttgcccaggctcgtcttgaaattctgggctcaagcaatcctttcacctcagccccccaaagcaatggttcacaggttcacaggtatgaactaccatgcctagcctagctatttactcttaaaggaaaaaataattttttattttagttttcaaggcctttcatgctatttacacttgaagtttggccttattattttttgcttagaaatcttttaatggttttaggtcacgttggg

SEQ ID NO: 32933 - DNA, 414 bp, Homo sapiens
tagggcgaattggagcttcaccgcggtggcggccgcccgggcaggtacttttttttttttttttttttttttttttggtagagatttccccatgttgcccaagttggtctcaaactcctggggctcaagagatctgcccacctctgcctcccaaggtgctgggatttttacaggtgtgagccaccacaaccaacctaatctggttttaaaaataatagagagatagaaaagaccagattctttcatgggaaggaggaggaggtggcaaaagtcaagccattttccgttatgaggttgcagagggcagctctcacccaaggagcgagcatgcaggaaagcagatgagtcgtattaagggaaaggaactggcggtcattaacccaggtcaaacacgggcaggtggcctcccaaggc

SEQ ID NO: 32934 - DNA, 410 bp, Homo sapiens
tgggagctccaccgcggtggcggccgaggtacaggccagactcattcatgttcacaggccccatccatctggcccattaatccagcctatgacggtgatgtaactgaaaggctggaccaggtttatagaaggttagaatcactctgtccaaggaaaatggggtgaaaagggaatttcatcaccttgaccaaagttagtcctgttactggtcctgaacatccagaattaggaagcttactgtggcctcacaccacattagaatttgttctggaaatcaagctataggaacaagagatcgtaagtcatattatactatcaacctaaattccagtctgacaattcctttgcaaaattgtgtaaaactcccttatattgctagttgtaggaaaaacatagttattaaacctgat

SEQ ID NO: 32935 - DNA, 427 bp, Homo sapiens
ctatagggcgaattggagctccaccgcggtggcggccgaggtacctgtggatgggaagaatagaaatcaggagtgggcagagggaaaagttaagctgtgatgtaggcccagtgacaagccactgacacttctatggggagctgtaaatagacctttggcattgtcccaagttgggccaatatggccagggcccttacaggctcacacatcatttattgcttgtgggccactccaggaaggtgcatgactttgggtaaggaggctctctggagctgaggtaatccctgaaaggactaacagctgaagattgtctgctgagaatactgccgaagactaaggcaacaaattctttccacatacaggatctggatggcacatcacagtgcccaaaataaaggctgaactttatttagttataatctgatca

SEQ ID NO: 32936 - DNA, 420 bp, Homo sapiens
actactatagggcgaattggagctccaccgcggtggcggccgaggtacttcaaatgggtcactgaatatcttcaaattgtatgtaaattttggaggggaagtggtatatgcagatttttttttttctggaaagaagaccaatcacttttgccaaattctcaaacaggcccatattttttctaacacacatgcgtgcgcatgcgcacacgcgcgcgcacacacacacacacacacgttaagatgcgaagaatcactgtcataaaatgtcatatttctaatttctgtaaatggggagaattcctcaagcttatataaaagtgatgtaaataattcagttacaattataaaagaaatggtatcacagcaaatccctttggcaccccactgaaaatttctctctgatgtttaaaacaccatttc

SEQ ID NO: 32937 - DNA, 461 bp, Homo sapiens
  misc_feature 188, 216, 224, 237, 238, 280, 281, 310, 311, 318, 319, 341,342, 351, 352, 363, 365, 366, 384, 390, 391, 392: n = A,T,C or G
actactatagggcgaattggagctccaccgcggtggcggccgcccgggcaggtacctctgctcagttttgctgtgaatctaaaactactctatataaagtctataaaaaactaaaacaaaaactaaacccctgaagattggaattttgcaagacggagtagctgttcctcaaaagaacagcttatgtnccccctcttggccagcacttggcttgangacttacnagggtgcaacatnngaaatttcttgtttcgtagcaaggtgcatttgtctcacagtnntgtcagtctgccactttccgagtttattnngggtgtnnttgtttccttttgagaatccanntgcatttcnnctggttgaatncnntcctggaacctccctcanttaggnnntatgaaatagcatgatgccattgcatttaaagtcacggaaaggttggcaaaagaatcacccaacgctga

SEQ ID NO: 32938 - DNA, 328 bp, Homo sapiens
ggagctccaccgcggtggcggccgcctgggcaggtacaggttgctgtaggagcccttaatctatgagatcttgacagattgcttgctttcttctttccaccatgggagaatgcaacaaggtcttcaccagatggccgaacagatccaagtgtcatgaccttggactgtccatcctccagaaccataggccaaataaatttcttttcttcataaatttcccagtctgtggtatctggcttaccttgaaatcaactgaaatcagtcactaaggaacaaaattctccagagaaactgtttcttccttgaaatctgaatgcccgaactgtca

SEQ ID NO: 32939 - DNA, 417 bp, Homo sapiens
tactatagggcgaattggagctccaccgcggtggcggccgaggtacgcggggctttctcgaaggaatcccttaagtgcacgtctcccgttttcttttcacatcaatgcatagtccctgtgtgaatttacaacacccaacacccatgagttcagtccttaagaaggaaaattgaaccaagtttttatttggttggacattgcataaaagaggtccatatccaggctaattctagaaattttattctcaaacttagttggcctctttttcttctgtcagaggaccattcttagtggcactggggaaatcttggcacccagaagaattcaactgcgctcactgcaataatacaatggcctacattggatttgtagaggagaaaggagccctgtattgtgagctgtgctatgagaaattct

SEQ ID NO: 32940 - DNA, 432 bp, Homo sapiens
actactatagggcgaattggagctccaccgcggtggcggccgaggtacaaactctgtttagataaagaattaaacaaaacttccatttttattaataattcaagtataatccataatatgattattaggtgttataactaataagttgttattttatatcttaatgtaggtaaagagaactggtcttgtggtggtgaaaaacatgaaaattgttggtctccactgttctagtgaagatttacatgccgggcagattgctcttattaaacatgggtcaaggctgaaaaactgtgatctttatttttccagaaaaccatgttctgcttgtttgaaaatgattgtaaatggtaagtgcagaaaagggtttgttggggattaagagtatttatctgggatgggcgtgggggtttatgcctgtcatcccagcacttt

SEQ ID NO: 32941 - DNA, 430 bp, Homo sapiens
tacgactactatagggcgaattggagctccaccgcggtggcggccgaggtacctttcattggattgtccatggtgcatcgctttagcaagcggcgtgactctccgctgcccgtcatcttggccaatatctatctgctggttcctcctgtgctcaacccaattgtctatggagtgaagacaagggagattcgacagcgcatccttcgacttttccatgtggccacacacgcttcagagccctaggtgtcagtgatcaaacttcttttccattcagagtcctctgattcagattttaatgttaacattttggaagacagtattcagaaaaaaaaatttccttaataaaaatacaactcagatccttcaaatatgaaactggttggggaatctccattttttcaatattattttcttctttgttttcttgcta

SEQ ID NO: 32942 - DNA, 417 bp, Homo sapiens
actactatagggcgaattggagctccaccgcggtggcggccgaggtacgcggggagctcaataaaacatcaccaaattcccttaggcagaaaaagggtggggagtgtcctttcttgaaggaatcccttaagtgcacgtctcccgttttcttttcacatcaatgcagagtcccttctggggaatttacaacacccaacacccatgagttcagtccttaagaaggaaaattgagcaagtatttaattggttggacattgcataaaagaggtccatatccaggctaactctagaaattttattctcaaacttagttggcctctttttcttctgtcagaggaccattcttagtggcactggggaaatcttggcacccagaagaattcaactgcgctcactgcaaaaatacaatggcctaca

SEQ ID NO: 32943 - DNA, 414 bp, Homo sapiens
actactatagggcgaattggagctccaccgcggtggcggccgaggtacgcggggatcctcattctcaatcctacccatgatgcagacagattgcctcatttcagctcaataaaacatcaccaaattcccttaggcagaaaaagggtggggagtgccctttcttgaaggaatcccttaagtgcacgtctcccgttttcttttcacatcaatgcagagtccctctgtgaatttacaacacccaacacccatgagttcagtccttaagaaggaaaattgagcaagtatttaattggttggacattgcataaaagaggtccatatccaggctaactctagaaattttattctcaaacttagttggcctcttttttttctgtcagaggaccattcttagtggcactggggaaatcttgg

SEQ ID NO: 32944 - DNA, 406 bp, Homo sapiens
  misc_feature 323: n = A,T,C or G
tacactactatagggcgaattggagctccaccgcgggggcggccgcccgggcaggtactgatgccattaataggaatcatgggaacatgggaatgagaaatgagctccaaaagaaaagatgcattctcttttggacatattgagttggctatctctaaaagatattcatgtgcagatgtctggcagactattagaaatgctggtttggaactcaaggaaaaagttacaaaaaattggactaggttaatggatggactattttgaagttaaatcctatgcttcagtataaatgaagacatattttttttttctataaccactanttgaagttcccctccccctccaaattataagtattggtctttgggagtgttttggatccacatttggcaggggactggggata

SEQ ID NO: 32945 - DNA, 443 bp, Homo sapiens
tacgactactatagggcgaattggagctccaccgcggtggcggccgcccgggcaggactatagattatttgtcttgaagaagagctttgatatgtttcaaaattcgacgttggctttggaaggaaactgtaaatttacagatctttgtccttccccacaaagagccttaatctcacaggttggattatgtggaactcactgctatttttcagttctcctttaagtgactaaggaacatccagatacttccaaaaaaaaaaaagtctaagtttttcactttgtccattgccatttaattatcttctgcatattttaaagcatttcctgtgaacataagtattgcccatccagaaaatttgcgtctacattgattttatgtttaatgaaacctgttcttctcaagttctttatttaatcacataacatagtatcttcaaaggtga

SEQ ID NO: 32946 - DNA, 419 bp, Homo sapiens
ctatagggcgaattggagctccaccgcggtggcggccgcccgggcaggtacattatttctccatatgtctgtcccctctgctccaaaactgcaggggagagtcttgcacatcatctttgtaaaaacagtctttgttttactcagaaaatttgtattgagtcctgctacatacacgctaggcattaggggtctaaaaagaatgaaaataaagcatctcagggatggcttttctagaacacatgcccaagcagagacttaaatattgaggctggccagattaaaaggggtagagggcaggaaagggtgacagcatgcccggcagcagcaagagcgggagcgaggcctgaaagaatgaaagtatttgcctacaatagaaggatgagtgagtagggcactaccagcagctcagtaatgccaga

SEQ ID NO: 32947 - DNA, 408 bp, Homo sapiens
ctactatagggcgaattggagctccaccgcggtggcggccgaggtaccagttgtaaaattaccaggaaccgccatgcctcaagatcgccctgttttctggcttcatcaatgactgcatgcagtgcaccaccctgtccactacgtgatgctgtaggattaagtctcacagtgggcggctgaggatacagcgccgcgtcctgtgttgctggtgaattagacgccatcgctgtgggttgctggcatggtgccgtgctatttggcacaggacacaccgcttgaggtctgtattgaacctctgaaggaggccgatactgaagctcggttggcagccggtattgataaactaccagcggttgggtcttattttctaccggctgatattgtggatactgtatctgagttggcatt

SEQ ID NO: 32948 - DNA, 428 bp, Homo sapiens
cgactactatagggcgaattggagctccaccgcggtggcggccgcccgggcaggtacgaaaaaatcaggctactaagcccactgttaatatagacgcagaccaattgttaggaacaggtccaaattggagcaccattaaccaacaatcagtgatgcagaatgaggctattgaacaagtaagggctatttgcctcagggcctggggaaaaattcaggacccaggaacagctttccctattaattcaattagacaaggctctaaagagccatatcctgactttgtggcaagattacaagatgctgctcaaaagtctattacagatgacaatgcccgaaaagttattgtagaattaatggcctatgaaaatgcaaatccagaatgtcagtcggccataaagccattaaaaggaaaagttccagcaggagtt

SEQ ID NO: 32949 - DNA, 429 bp, Homo sapiens
actactatagggcgaattggagctccaccgcggtggcggccgcccgggcaggtacccaacagccatggctcttgcgactcacctgggcagctgtgtggctgcgcacctgactcactctttctagagggtgccttgaacagcatcagcgtggcccggcgttccctacaaatagcccttgcaattgctgaccccaaacaatgttgggaataacagaagggacaagggaacaaagaaaaggccaggaaggtaataattaaccacttactgagttcaaagccatcttgctgttatcaacagcatcgagtaatgataggtatctggaatgttcaatatgacctataagaaagaattacagggctgtaatatttccataccagttagtttttagaagataaatctggaaagaactagaagaatctctagatgaag

SEQ ID NO: 32950 - DNA, 416 bp, Homo sapiens
actactatagggcgaattggagctccaccgcggtggcggccgcccgggcaggtacgcggggaggctttgtgacacacacacacacacagcacctgcacgcagatgcacacatctctagtcaaatgaggctctcagctttttgataggggctttttgatacgtgtataaccaatactttattctcactgtagtcaaggactcattgcaattcagaaatgagaagctgatccggaactccactacagctcaaagaaattctcgaatgttctcacctattaacagttattaaaatggaagaagctggggatgaaattgtgagcaatgccatctcctacgctctatacaaagccttcagcaccagtgagcaagacaaggataactggaatgggcagctgaagcttctgctggagtggaac

SEQ ID NO: 32951 - DNA, 417 bp, Homo sapiens
atacactactatagggcgaattggagctccaccgcggtggcgggccaggtccccggggatcaatgcagagtccctctgtgaatttacaacacccaacacccatgagttcagtccttaagaaggaaaattgagcaagtatttaattggttggacattgcataaaagaggtccatatccaggctaactctagaaattttattctcaaacttagttggcctctttttttttctgtcagaggaccattcttagtggcactggggaaatcttggcacccagaagaattcaactgcgctcactgcaaaaatacaatggcctacattggatttgtagaggagaaaggagccctgtattgtgaagctgtgctatgaagaaattctttgcccctgaatgtggttcgatgccaaagggaagatcctt

SEQ ID NO: 32952 - DNA, 431 bp, Homo sapiens
ctactatagggcgaattggagctccaccgcggtggcggccgaggtactttttcttttttttttttgtttttttctgggctgttagaatttgacattgttcaactttaactttgtcctcattgaactttatcctgctaaggagctaaaaggtccatatgatcaaaaaggcagctctcaacccagcacgaaattccaaggctcattcatttctgtttacctactgccaaataagtcagacaactgcatacttgctttacagacgaatagaggacagcatgttgttcaataattgtagtttaaaaagtatatgtaagatacatccacaagaagaaagatagagggagcataccgtttgtcttctagtataggctccctgcccatggagatcacagagtagaattatgatgggtgccttagagaccagcctccct

SEQ ID NO: 32953 - DNA, 451 bp, Homo sapiens
gcgctatacgactactatagggcgaattggagctccaccgcggtggcggccgcccgggcaggtactctggtagccaagttttgcaagagccggggtttccagcagggatggtagccagcctgggcacacttttctgtattgtatttgaacctcatttcctgatgctcatccagaagttcctggctgggtgagtaggtgaacagttcaaggctgtgtggatgaaactctggcatctctttacagtgctgtccggcagggcagtgtgaggccactctgtcctcctttgacctctttcttcttcagcagccaaatggaggctctctaaaggtgatgattaacttggcataaacatgccaagctttcctgagcgtttgccctgaattgggctgtctcttgctgctctgagacagggagactggctgtctggctgaccagcccttggggctgaggt

SEQ ID NO: 32954 - DNA, 448 bp, Homo sapiens
gtactactgactcactatagggcgaattggagctccaccgcggtggcggccgcccgggcaggtacttccaaaccctcctgttctttccgttttgttttccccaattttaacataaggcaaaagcagtaattgagcaattctatcacctggattggcactccggggaacagtggagctgacactaactgaattccccctttataatctgaataaattaccccagtatgaatttggactcccttcaaatttagacttgatctccctaaaataaggcctaccctcccttctggcagcgggccatatacccctctaggaatcttttgtgggggctttccagggagtaaagagaccatttgggtggaacataaatctactgcggtgctgcctgctgtggcgcgggacagctgttggattgttgtaattggctgactccctgaagtggtggtat

SEQ ID NO: 32955 - DNA, 414 bp, Homo sapiens
tacgactactatagggcgaattggagctccaccgcggtggcggccgaggtacagagtgatgccaggcgttcatctccccactgagctcctgctgagtgtttgcctggggccaggtcctccttccgggaagtcattttagctggaaagaacagggtgggggcgggtggcaagggatcagagcatgagcgtttgagggcttcgtcaggggcagtgaggagcctctaaaggactctacatttaggaatgacagagtcaaacaatttaacaaagccctaaaggtccctgccaggaaagaatgagccccatgtatcaccataagcaacttcttagaaacataacccacccctgtcatcccagcactttgggaggccaaggagggaggattgcttgaagccaggagctcgagatcaacct

SEQ ID NO: 32956 - DNA, 424 bp, Homo sapiens
tacactactatagggcgaattggagctccaccgcggtggcggccgaggtactttactgaaaaccaggttatattctaaagaagaaagaaggcaggatagtgcttttgaacaagcctatttccattttgaaagtagatttcaggctaggtgcggtggctcacacctgtaatctcagcactttgggaggccaaggcaggcagatcacttgaggtcaggagttcgagaccagcctgaccaacatggtgagaccctgtctctactaaaaatacaaaaattagctgggtgtggtggcggcgcctgtaatcccagctacttgggaggctaaggcatgagaattgcttgaacccaggaggtggaggctgcagtgagccgagatcacgacactgcactccagctgtgtgacagaatgagaccatctccaaaa

SEQ ID NO: 32957 - DNA, 270 bp, Homo sapiens
ctactatagggcaatggagctcaccgcggtggcggccgaggtacaactgatcagcaaaaatattatgattaatatgttaactgaggaagtatatcctacaatttagaaagattaatatttaaaatagttaaaattattgaaagttttaacttgcccgaaacagtccctaaccataagggacaattaatgatgctataaaattctatctaacattcctagtctacttgttgttttggagggcaggctgccattcctgcctattttaatctt

SEQ ID NO: 32958 - DNA, 446 bp, Homo sapiens
actactatagggcgaattggagctccaccgcggtgggcggccgcccggccaggtacgcgggggtgacacacacacacacacacagcacctgcacgcagatgcacacatctctagtcaaatgaggctctcagctttttgataggggctttttgatacgtgtataaccaatactttattctcactgtagtcaaggactcattgcaattcagaaatgagaagctgatccggaactccacaacagctcaaagaaattctcgaatgttctcacctattaacagttattaaaatggaagaagctggggatgaaattgtgagcaatgccatctcctacgctctatacaaagccttcagcaccagtgagcaagacaaggataactggaatgggcagctgaagcttctgctggagtggaaccagctggacttagccaatgatgagattttcacca

SEQ ID NO: 32959 - DNA, 444 bp, Homo sapiens
tacgactcactatagggcgaattggagctccaccgcggtggcggccgaggtacgcggggagaaaggaaagcatgaggaataggaaaccttgtgggagtataataacaagagtattggttgagtagtcttttgaaaaatataaattatattttcgcaaatagaactccttgagtccccttatggcagtcaagctgaagcagcatgagcgtcatatcatagtgatgtattttaaggtcacaacggcggaaagacatagaaagtatctgacctcttagaaacaagcagctgctgcctggtggtaacagcaaagggtggaagtcaatagagtctctgtgagactgtttcacagaaggatgtgtgtttacccaaggctgcgcatcaaaaagaaatagataaaataaatggaaaattagaagggtctcctgttaaagatggtcttctgaa

SEQ ID NO: 32960 - DNA, 349 bp, Homo sapiens
atagggcgaattgtagctccaccgcggtggcggccgaggtaccctcagtctttcaacgttagtcaaacgttacattttctttcactcttacccttttttgagcttcatttcctctctttatgttctcgagtatagcttcgaggtgtagggtattcattcccaagatccacaacaattacctccctagaaaatgtcactccttttaaaggtcttttttggctttcaacaactgaaggagttctagtgacagatgtgtgtattttctgcaaaccatcatcctcttcttgaccagtttctccagcattctcaggctcttgcttctcatttatttggttctcctcttctgcct

SEQ ID NO: 32961 - DNA, 441 bp, Homo sapiens
gtatacactactatagggcgaattggagctccaccgcggtggcggccgcccgggcaggtacatacattctaatggtgtaggaatgtataatgaaagatggtcttcaatggctactgaaacacctgatataagggatgctgtgtgcactactacatagagattgggtcttaaaaatatttagggaaaaaagctataattttctttctgaaaaatttaatcttaagtgatatttactaagaaatatatactgcaaaccacaataacaatgatcttctcaaaatttgcctaattgcttcacaaatgagtcaacttacaaagaagaaaacacagaaaattgcttttaaatatataactccttcattttgctgataatcaaatgaaaatttaattcatcccatttaatacaaattaaactcatgctcaatgtaagatatcattata

SEQ ID NO: 32962 - DNA, 335 bp, Homo sapiens
ctactatagggcgaattggagctccaccgcggtggcggccgaggtaccagttgtaaaattaccaggaaccgccatgcctcaagatcgccctgttttctggcttcatcaatgactgcatgcagtgcaccaccctgtccactacgtgatgctgtaggattaagtctcacagtgggcggctgaggatacagcgccgcgtcctgtgttgctggtgaattagacgccatcgctgtgggttgctggtatggtgccgtgctatttggcacaggacacaccgcttgaggtctgtattgaacctctgaaggaggccgatactgaagctcggttggcagccggta

SEQ ID NO: 32963 - DNA, 434 bp, Homo sapiens
gcgaattggagctccaccgcggtggcggccgcccgggcaggtacgcggggacatcaatgcagagtccctctgtgaatttacaacacccaacacccatgagttcagtccttaagaaggaaaattgagcaagtatttaattggttggacattgcataaaagaggtccatatccaggctaactctagaaattttattctcaaacttagttggcctctttttcttctgtcagaggaccattcttagtggcactggggaaatcttggcacccagaagaattcaactgcgctcactgcaaaaatacaatggcctacattggatttgtagaggagaaaggagccctgtattgtgagctgtgctatgagaaattctttgcccctgaatgtggtcgatgccaaaggaagattcttggagaactcatcaatgcgttgaaacaaa
